United States Patent Application Publication US 2018/0305689 A1 - sequence listing, part 100

SEQ ID NO: 1448292 - RNA, 19 nt, Artificial Sequence
  Description of Artificial Sequence: Synthetic oligonucleotide
  Sense strand starting at position 2990 of SEQ ID NO: 1243879
acuuccaggucuuuagaua

SEQ ID NO: 1448293 - RNA, 19 nt, Artificial Sequence
  Description of Artificial Sequence: Synthetic oligonucleotide
  Antisense strand to SEQ ID NO: 1448292
uaucuaaagaccuggaagu

SEQ ID NO: 1448294 - RNA, 19 nt, Artificial Sequence
  Description of Artificial Sequence: Synthetic oligonucleotide
  Sense strand starting at position 3122 of SEQ ID NO: 1243879
acauguauugaucgaugac

SEQ ID NO: 1448295 - RNA, 19 nt, Artificial Sequence
  Description of Artificial Sequence: Synthetic oligonucleotide
  Antisense strand to SEQ ID NO: 1448294
gucaucgaucaauacaugu

SEQ ID NO: 1448296 - RNA, 19 nt, Artificial Sequence
  Description of Artificial Sequence: Synthetic oligonucleotide
  Sense strand starting at position 3125 of SEQ ID NO: 1243879
uguauugaucgaugacuca

SEQ ID NO: 1448297 - RNA, 19 nt, Artificial Sequence
  Description of Artificial Sequence: Synthetic oligonucleotide
  Antisense strand to SEQ ID NO: 1448296
ugagucaucgaucaauaca

SEQ ID NO: 1448298 - RNA, 19 nt, Artificial Sequence
  Description of Artificial Sequence: Synthetic oligonucleotide
  Sense strand starting at position 3204 of SEQ ID NO: 1243879
gcuccugaggccguguuau

SEQ ID NO: 1448299 - RNA, 19 nt, Artificial Sequence
  Description of Artificial Sequence: Synthetic oligonucleotide
  Antisense strand to SEQ ID NO: 1448298
auaacacggccucaggagc

SEQ ID NO: 1448300 - RNA, 19 nt, Artificial Sequence
  Description of Artificial Sequence: Synthetic oligonucleotide
  Sense strand starting at position 3215 of SEQ ID NO: 1243879
cguguuaucaucgcauccu

SEQ ID NO: 1448301 - RNA, 19 nt, Artificial Sequence
  Description of Artificial Sequence: Synthetic oligonucleotide
  Antisense strand to SEQ ID NO: 1448300
aggaugcgaugauaacacg

SEQ ID NO: 1448302 - RNA, 19 nt, Artificial Sequence
  Description of Artificial Sequence: Synthetic oligonucleotide
  Sense strand starting at position 3245 of SEQ ID NO: 1243879
auauaaacuuucucgauug

SEQ ID NO: 1448303 - RNA, 19 nt, Artificial Sequence
  Description of Artificial Sequence: Synthetic oligonucleotide
  Antisense strand to SEQ ID NO: 1448302
caaucgagaaaguuuauau

SEQ ID NO: 1448304 - RNA, 19 nt, Artificial Sequence
  Description of Artificial Sequence: Synthetic oligonucleotide
  Sense strand starting at position 3257 of SEQ ID NO: 1243879
ucgauugagacuggucuca

SEQ ID NO: 1448305 - RNA, 19 nt, Artificial Sequence
  Description of Artificial Sequence: Synthetic oligonucleotide
  Antisense strand to SEQ ID NO: 1448304
ugagaccagucucaaucga

SEQ ID NO: 1448306 - RNA, 19 nt, Artificial Sequence
  Description of Artificial Sequence: Synthetic oligonucleotide
  Sense strand starting at position 3259 of SEQ ID NO: 1243879
gauugagacuggucucaga

SEQ ID NO: 1448307 - RNA, 19 nt, Artificial Sequence
  Description of Artificial Sequence: Synthetic oligonucleotide
  Antisense strand to SEQ ID NO: 1448306
ucugagaccagucucaauc

SEQ ID NO: 1448308 - RNA, 19 nt, Artificial Sequence
  Description of Artificial Sequence: Synthetic oligonucleotide
  Sense strand starting at position 3313 of SEQ ID NO: 1243879
cauggaguuccuuaagguc

SEQ ID NO: 1448309 - RNA, 19 nt, Artificial Sequence
  Description of Artificial Sequence: Synthetic oligonucleotide
  Antisense strand to SEQ ID NO: 1448308
gaccuuaaggaacuccaug

SEQ ID NO: 1448310 - RNA, 19 nt, Artificial Sequence
  Description of Artificial Sequence: Synthetic oligonucleotide
  Sense strand starting at position 3319 of SEQ ID NO: 1243879
guuccuuaaggucaagcau

SEQ ID NO: 1448311 - RNA, 19 nt, Artificial Sequence
  Description of Artificial Sequence: Synthetic oligonucleotide
  Antisense strand to SEQ ID NO: 1448310
augcuugaccuuaaggaac

SEQ ID NO: 1448312 - RNA, 19 nt, Artificial Sequence
  Description of Artificial Sequence: Synthetic oligonucleotide
  Sense strand starting at position 3464 of SEQ ID NO: 1243879
uguaccaggcacuagaaau

SEQ ID NO: 1448313 - RNA, 19 nt, Artificial Sequence
  Description of Artificial Sequence: Synthetic oligonucleotide
  Antisense strand to SEQ ID NO: 1448312
auuucuagugccugguaca

SEQ ID NO: 1448314 - RNA, 19 nt, Artificial Sequence
  Description of Artificial Sequence: Synthetic oligonucleotide
  Sense strand starting at position 3475 of SEQ ID NO: 1243879
cuagaaauacagugguagu

SEQ ID NO: 1448315 - RNA, 19 nt, Artificial Sequence
  Description of Artificial Sequence: Synthetic oligonucleotide
  Antisense strand to SEQ ID NO: 1448314
acuaccacuguauuucuag

SEQ ID NO: 1448316 - RNA, 19 nt, Artificial Sequence
  Description of Artificial Sequence: Synthetic oligonucleotide
  Sense strand starting at position 3777 of SEQ ID NO: 1243879
gcaagaaucugacucaaac

SEQ ID NO: 1448317 - RNA, 19 nt, Artificial Sequence
  Description of Artificial Sequence: Synthetic oligonucleotide
  Antisense strand to SEQ ID NO: 1448316
guuugagucagauucuugc

SEQ ID NO: 1448318 - RNA, 19 nt, Artificial Sequence
  Description of Artificial Sequence: Synthetic oligonucleotide
  Sense strand starting at position 3863 of SEQ ID NO: 1243879
aaaggaguuaguggucuga

SEQ ID NO: 1448319 - RNA, 19 nt, Artificial Sequence
  Description of Artificial Sequence: Synthetic oligonucleotide
  Antisense strand to SEQ ID NO: 1448318
ucagaccacuaacuccuuu

SEQ ID NO: 1448320 - RNA, 19 nt, Artificial Sequence
  Description of Artificial Sequence: Synthetic oligonucleotide
  Sense strand starting at position 3865 of SEQ ID NO: 1243879
aggaguuaguggucugaag

SEQ ID NO: 1448321 - RNA, 19 nt, Artificial Sequence
  Description of Artificial Sequence: Synthetic oligonucleotide
  Antisense strand to SEQ ID NO: 1448320
cuucagaccacuaacuccu

SEQ ID NO: 1448322 - RNA, 19 nt, Artificial Sequence
  Description of Artificial Sequence: Synthetic oligonucleotide
  Sense strand starting at position 3867 of SEQ ID NO: 1243879
gaguuaguggucugaagga

SEQ ID NO: 1448323 - RNA, 19 nt, Artificial Sequence
  Description of Artificial Sequence: Synthetic oligonucleotide
  Antisense strand to SEQ ID NO: 1448322
uccuucagaccacuaacuc

SEQ ID NO: 1448324 - RNA, 19 nt, Artificial Sequence
  Description of Artificial Sequence: Synthetic oligonucleotide
  Sense strand starting at position 3885 of SEQ ID NO: 1243879
aauggaacaugguucuaua

SEQ ID NO: 1448325 - RNA, 19 nt, Artificial Sequence
  Description of Artificial Sequence: Synthetic oligonucleotide
  Antisense strand to SEQ ID NO: 1448324
uauagaaccauguuccauu

SEQ ID NO: 1448326 - RNA, 19 nt, Artificial Sequence
  Description of Artificial Sequence: Synthetic oligonucleotide
  Sense strand starting at position 3907 of SEQ ID NO: 1243879
ucaugucacagaggagauu

SEQ ID NO: 1448327 - RNA, 19 nt, Artificial Sequence
  Description of Artificial Sequence: Synthetic oligonucleotide
  Antisense strand to SEQ ID NO: 1448326
aaucuccucugugacauga

SEQ ID NO: 1448328 - RNA, 19 nt, Artificial Sequence
  Description of Artificial Sequence: Synthetic oligonucleotide
  Sense strand starting at position 292 of SEQ ID NO: 1243880
acaauuaauuguguugaca

SEQ ID NO: 1448329 - RNA, 19 nt, Artificial Sequence
  Description of Artificial Sequence: Synthetic oligonucleotide
  Antisense strand to SEQ ID NO: 1448328
ugucaacacaauuaauugu

SEQ ID NO: 1448330 - RNA, 19 nt, Artificial Sequence
  Description of Artificial Sequence: Synthetic oligonucleotide
  Sense strand starting at position 300 of SEQ ID NO: 1243880
uuguguugacagcagaaau

SEQ ID NO: 1448331 - RNA, 19 nt, Artificial Sequence
  Description of Artificial Sequence: Synthetic oligonucleotide
  Antisense strand to SEQ ID NO: 1448330
auuucugcugucaacacaa

SEQ ID NO: 1448332 - RNA, 19 nt, Artificial Sequence
  Description of Artificial Sequence: Synthetic oligonucleotide
  Sense strand starting at position 351 of SEQ ID NO: 1243880
aggccauguuugcuaggau

SEQ ID NO: 1448333 - RNA, 19 nt, Artificial Sequence
  Description of Artificial Sequence: Synthetic oligonucleotide
  Antisense strand to SEQ ID NO: 1448332
auccuagcaaacauggccu

SEQ ID NO: 1448334 - RNA, 19 nt, Artificial Sequence
  Description of Artificial Sequence: Synthetic oligonucleotide
  Sense strand starting at position 354 of SEQ ID NO: 1243880
ccauguuugcuaggauaga

SEQ ID NO: 1448335 - RNA, 19 nt, Artificial Sequence
  Description of Artificial Sequence: Synthetic oligonucleotide
  Antisense strand to SEQ ID NO: 1448334
ucuauccuagcaaacaugg

SEQ ID NO: 1448336 - RNA, 19 nt, Artificial Sequence
  Description of Artificial Sequence: Synthetic oligonucleotide
  Sense strand starting at position 439 of SEQ ID NO: 1243880
gccugugaaaccugugaaa

SEQ ID NO: 1448337 - RNA, 19 nt, Artificial Sequence
  Description of Artificial Sequence: Synthetic oligonucleotide
  Antisense strand to SEQ ID NO: 1448336
uuucacagguuucacaggc

SEQ ID NO: 1448338 - RNA, 19 nt, Artificial Sequence
  Description of Artificial Sequence: Synthetic oligonucleotide
  Sense strand starting at position 441 of SEQ ID NO: 1243880
cugugaaaccugugaaaug

SEQ ID NO: 1448339 - RNA, 19 nt, Artificial Sequence
  Description of Artificial Sequence: Synthetic oligonucleotide
  Antisense strand to SEQ ID NO: 1448338
cauuucacagguuucacag

SEQ ID NO: 1448340 - RNA, 19 nt, Artificial Sequence
  Description of Artificial Sequence: Synthetic oligonucleotide
  Sense strand starting at position 500 of SEQ ID NO: 1243880
gaguuuggaucuguuagga

SEQ ID NO: 1448341 - RNA, 19 nt, Artificial Sequence
  Description of Artificial Sequence: Synthetic oligonucleotide
  Antisense strand to SEQ ID NO: 1448340
uccuaacagauccaaacuc

SEQ ID NO: 1448342 - RNA, 19 nt, Artificial Sequence
  Description of Artificial Sequence: Synthetic oligonucleotide
  Sense strand starting at position 516 of SEQ ID NO: 1243880
ggauauuaauacuugugac

SEQ ID NO: 1448343 - RNA, 19 nt, Artificial Sequence
  Description of Artificial Sequence: Synthetic oligonucleotide
  Antisense strand to SEQ ID NO: 1448342
gucacaaguauuaauaucc

SEQ ID NO: 1448344 - RNA, 19 nt, Artificial Sequence
  Description of Artificial Sequence: Synthetic oligonucleotide
  Sense strand starting at position 624 of SEQ ID NO: 1243880
gguucuaaauccuuagacu

SEQ ID NO: 1448345 - RNA, 19 nt, Artificial Sequence
  Description of Artificial Sequence: Synthetic oligonucleotide
  Antisense strand to SEQ ID NO: 1448344
agucuaaggauuuagaacc

SEQ ID NO: 1448346 - RNA, 19 nt, Artificial Sequence
  Description of Artificial Sequence: Synthetic oligonucleotide
  Sense strand starting at position 646 of SEQ ID NO: 1243880
uagacuaaaucguuagugu

SEQ ID NO: 1448347 - RNA, 19 nt, Artificial Sequence
  Description of Artificial Sequence: Synthetic oligonucleotide
  Antisense strand to SEQ ID NO: 1448346
acacuaacgauuuagucua

SEQ ID NO: 1448348 - RNA, 19 nt, Artificial Sequence
  Description of Artificial Sequence: Synthetic oligonucleotide
  Sense strand starting at position 647 of SEQ ID NO: 1243880
agacuaaaucguuaguguu

SEQ ID NO: 1448349 - RNA, 19 nt, Artificial Sequence
  Description of Artificial Sequence: Synthetic oligonucleotide
  Antisense strand to SEQ ID NO: 1448348
aacacuaacgauuuagucu

SEQ ID NO: 1448350 - RNA, 19 nt, Artificial Sequence
  Description of Artificial Sequence: Synthetic oligonucleotide
  Sense strand starting at position 961 of SEQ ID NO: 1243880
cagagaucacaguggaguu

SEQ ID NO: 1448351 - RNA, 19 nt, Artificial Sequence
  Description of Artificial Sequence: Synthetic oligonucleotide
  Antisense strand to SEQ ID NO: 1448350
aacuccacugugaucucug

SEQ ID NO: 1448352 - RNA, 19 nt, Artificial Sequence
  Description of Artificial Sequence: Synthetic oligonucleotide
  Sense strand starting at position 962 of SEQ ID NO: 1243880
agagaucacaguggaguuu

SEQ ID NO: 1448353 - RNA, 19 nt, Artificial Sequence
  Description of Artificial Sequence: Synthetic oligonucleotide
  Antisense strand to SEQ ID NO: 1448352
aaacuccacugugaucucu

SEQ ID NO: 1448354 - RNA, 19 nt, Artificial Sequence
  Description of Artificial Sequence: Synthetic oligonucleotide
  Sense strand starting at position 971 of SEQ ID NO: 1243880
aguggaguuucuccugaga

SEQ ID NO: 1448355 - RNA, 19 nt, Artificial Sequence
  Description of Artificial Sequence: Synthetic oligonucleotide
  Antisense strand to SEQ ID NO: 1448354
ucucaggagaaacuccacu

SEQ ID NO: 1448356 - RNA, 19 nt, Artificial Sequence
  Description of Artificial Sequence: Synthetic oligonucleotide
  Sense strand starting at position 989 of SEQ ID NO: 1243880
acaggagugucagcugagu

SEQ ID NO: 1448357 - RNA, 19 nt, Artificial Sequence
  Description of Artificial Sequence: Synthetic oligonucleotide
  Antisense strand to SEQ ID NO: 1448356
acucagcugacacuccugu

SEQ ID NO: 1448358 - RNA, 19 nt, Artificial Sequence
  Description of Artificial Sequence: Synthetic oligonucleotide
  Sense strand starting at position 1007 of SEQ ID NO: 1243880
ugggaacugugucccucau

SEQ ID NO: 1448359 - RNA, 19 nt, Artificial Sequence
  Description of Artificial Sequence: Synthetic oligonucleotide
  Antisense strand to SEQ ID NO: 1448358
augagggacacaguuccca

SEQ ID NO: 1448360 - RNA, 19 nt, Artificial Sequence
  Description of Artificial Sequence: Synthetic oligonucleotide
  Sense strand starting at position 1065 of SEQ ID NO: 1243880
cgucauuaucuaggaugaa

SEQ ID NO: 1448361 - RNA, 19 nt, Artificial Sequence
  Description of Artificial Sequence: Synthetic oligonucleotide
  Antisense strand to SEQ ID NO: 1448360
uucauccuagauaaugacg

SEQ ID NO: 1448362 - RNA, 19 nt, Artificial Sequence
  Description of Artificial Sequence: Synthetic oligonucleotide
  Sense strand starting at position 1184 of SEQ ID NO: 1243880
aucugcuggcccuaggaua

SEQ ID NO: 1448363 - RNA, 19 nt, Artificial Sequence
  Description of Artificial Sequence: Synthetic oligonucleotide
  Antisense strand to SEQ ID NO: 1448362
uauccuagggccagcagau

SEQ ID NO: 1448364 - RNA, 19 nt, Artificial Sequence
  Description of Artificial Sequence: Synthetic oligonucleotide
  Sense strand starting at position 2368 of SEQ ID NO: 1243880
ggacaaauacgucagguca

SEQ ID NO: 1448365 - RNA, 19 nt, Artificial Sequence
  Description of Artificial Sequence: Synthetic oligonucleotide
  Antisense strand to SEQ ID NO: 1448364
ugaccugacguauuugucc

SEQ ID NO: 1448366 - RNA, 19 nt, Artificial Sequence
  Description of Artificial Sequence: Synthetic oligonucleotide
  Sense strand starting at position 2456 of SEQ ID NO: 1243880
ugaagaggcuuucucauuc

SEQ ID NO: 1448367 - RNA, 19 nt, Artificial Sequence
  Description of Artificial Sequence: Synthetic oligonucleotide
  Antisense strand to SEQ ID NO: 1448366
gaaugagaaagccucuuca

SEQ ID NO: 1448368 - RNA, 19 nt, Artificial Sequence
  Description of Artificial Sequence: Synthetic oligonucleotide
  Sense strand starting at position 2624 of SEQ ID NO: 1243880
guuucuuuggucuaagucu

SEQ ID NO: 1448369 - RNA, 19 nt, Artificial Sequence
  Description of Artificial Sequence: Synthetic oligonucleotide
  Antisense strand to SEQ ID NO: 1448368
agacuuagaccaaagaaac

SEQ ID NO: 1448370 - RNA, 19 nt, Artificial Sequence
  Description of Artificial Sequence: Synthetic oligonucleotide
  Sense strand starting at position 2630 of SEQ ID NO: 1243880
uuggucuaagucuaacuaa

SEQ ID NO: 1448371 - RNA, 19 nt, Artificial Sequence
  Description of Artificial Sequence: Synthetic oligonucleotide
  Antisense strand to SEQ ID NO: 1448370
uuaguuagacuuagaccaa

SEQ ID NO: 1448372 - RNA, 19 nt, Artificial Sequence
  Description of Artificial Sequence: Synthetic oligonucleotide
  Sense strand starting at position 2633 of SEQ ID NO: 1243880
gucuaagucuaacuaagac

SEQ ID NO: 1448373 - RNA, 19 nt, Artificial Sequence
  Description of Artificial Sequence: Synthetic oligonucleotide
  Antisense strand to SEQ ID NO: 1448372
gucuuaguuagacuuagac

SEQ ID NO: 1448374 - RNA, 19 nt, Artificial Sequence
  Description of Artificial Sequence: Synthetic oligonucleotide
  Sense strand starting at position 2693 of SEQ ID NO: 1243880
aucccagugauauguuagu

SEQ ID NO: 1448375 - RNA, 19 nt, Artificial Sequence
  Description of Artificial Sequence: Synthetic oligonucleotide
  Antisense strand to SEQ ID NO: 1448374
acuaacauaucacugggau

SEQ ID NO: 1448376 - RNA, 19 nt, Artificial Sequence
  Description of Artificial Sequence: Synthetic oligonucleotide
  Sense strand starting at position 2709 of SEQ ID NO: 1243880
agugcuacguaugcauuua

SEQ ID NO: 1448377 - RNA, 19 nt, Artificial Sequence
  Description of Artificial Sequence: Synthetic oligonucleotide
  Antisense strand to SEQ ID NO: 1448376
uaaaugcauacguagcacu

SEQ ID NO: 1448378 - RNA, 19 nt, Artificial Sequence
  Description of Artificial Sequence: Synthetic oligonucleotide
  Sense strand starting at position 2735 of SEQ ID NO: 1243880
aaacacugugcguguauuu

SEQ ID NO: 1448379 - RNA, 19 nt, Artificial Sequence
  Description of Artificial Sequence: Synthetic oligonucleotide
  Antisense strand to SEQ ID NO: 1448378
aaauacacgcacaguguuu

SEQ ID NO: 1448380 - RNA, 19 nt, Artificial Sequence
  Description of Artificial Sequence: Synthetic oligonucleotide
  Sense strand starting at position 2788 of SEQ ID NO: 1243880
agcccacaccuguaagaua

SEQ ID NO: 1448381 - RNA, 19 nt, Artificial Sequence
  Description of Artificial Sequence: Synthetic oligonucleotide
  Antisense strand to SEQ ID NO: 1448380
uaucuuacaggugugggcu

SEQ ID NO: 1448382 - RNA, 19 nt, Artificial Sequence
  Description of Artificial Sequence: Synthetic oligonucleotide
  Sense strand starting at position 2796 of SEQ ID NO: 1243880
ccuguaagauaggcauaau

SEQ ID NO: 1448383 - RNA, 19 nt, Artificial Sequence
  Description of Artificial Sequence: Synthetic oligonucleotide
  Antisense strand to SEQ ID NO: 1448382
auuaugccuaucuuacagg

SEQ ID NO: 1448384 - RNA, 19 nt, Artificial Sequence
  Description of Artificial Sequence: Synthetic oligonucleotide
  Sense strand starting at position 2838 of SEQ ID NO: 1243880
agacucagagguuguguga

SEQ ID NO: 1448385 - RNA, 19 nt, Artificial Sequence
  Description of Artificial Sequence: Synthetic oligonucleotide
  Antisense strand to SEQ ID NO: 1448384
ucacacaaccucugagucu

SEQ ID NO: 1448386 - RNA, 19 nt, Artificial Sequence
  Description of Artificial Sequence: Synthetic oligonucleotide
  Sense strand starting at position 2964 of SEQ ID NO: 1243880
ucacuuacccuagaugguu

SEQ ID NO: 1448387 - RNA, 19 nt, Artificial Sequence
  Description of Artificial Sequence: Synthetic oligonucleotide
  Antisense strand to SEQ ID NO: 1448386
aaccaucuaggguaaguga

SEQ ID NO: 1448388 - RNA, 19 nt, Artificial Sequence
  Description of Artificial Sequence: Synthetic oligonucleotide
  Sense strand starting at position 2969 of SEQ ID NO: 1243880
uacccuagaugguuacaga

SEQ ID NO: 1448389 - RNA, 19 nt, Artificial Sequence
  Description of Artificial Sequence: Synthetic oligonucleotide
  Antisense strand to SEQ ID NO: 1448388
ucuguaaccaucuagggua

SEQ ID NO: 1448390 - RNA, 19 nt, Artificial Sequence
  Description of Artificial Sequence: Synthetic oligonucleotide
  Sense strand starting at position 3170 of SEQ ID NO: 1243880
acuaauauugcuuguuuga

SEQ ID NO: 1448391 - RNA, 19 nt, Artificial Sequence
  Description of Artificial Sequence: Synthetic oligonucleotide
  Antisense strand to SEQ ID NO: 1448390
ucaaacaagcaauauuagu

SEQ ID NO: 1448392 - RNA, 19 nt, Artificial Sequence
  Description of Artificial Sequence: Synthetic oligonucleotide
  Sense strand starting at position 3172 of SEQ ID NO: 1243880
uaauauugcuuguuugaga

SEQ ID NO: 1448393 - RNA, 19 nt, Artificial Sequence
  Description of Artificial Sequence: Synthetic oligonucleotide
  Antisense strand to SEQ ID NO: 1448392
ucucaaacaagcaauauua

SEQ ID NO: 1448394 - RNA, 19 nt, Artificial Sequence
  Description of Artificial Sequence: Synthetic oligonucleotide
  Sense strand starting at position 3173 of SEQ ID NO: 1243880
aauauugcuuguuugagac

SEQ ID NO: 1448395 - RNA, 19 nt, Artificial Sequence
  Description of Artificial Sequence: Synthetic oligonucleotide
  Antisense strand to SEQ ID NO: 1448394
gucucaaacaagcaauauu

SEQ ID NO: 1448396 - RNA, 19 nt, Artificial Sequence
  Description of Artificial Sequence: Synthetic oligonucleotide
  Sense strand starting at position 3377 of SEQ ID NO: 1243880
ucucaagucugggcucaau

SEQ ID NO: 1448397 - RNA, 19 nt, Artificial Sequence
  Description of Artificial Sequence: Synthetic oligonucleotide
  Antisense strand to SEQ ID NO: 1448396
auugagcccagacuugaga

SEQ ID NO: 1448398 - RNA, 19 nt, Artificial Sequence
  Description of Artificial Sequence: Synthetic oligonucleotide
  Sense strand starting at position 3572 of SEQ ID NO: 1243880
gggagaaucacccgagucu

SEQ ID NO: 1448399 - RNA, 19 nt, Artificial Sequence
  Description of Artificial Sequence: Synthetic oligonucleotide
  Antisense strand to SEQ ID NO: 1448398
agacucgggugauucuccc

SEQ ID NO: 1448400 - RNA, 19 nt, Artificial Sequence
  Description of Artificial Sequence: Synthetic oligonucleotide
  Sense strand starting at position 3730 of SEQ ID NO: 1243880
gggugaucaugaucaaggu

SEQ ID NO: 1448401 - RNA, 19 nt, Artificial Sequence
  Description of Artificial Sequence: Synthetic oligonucleotide
  Antisense strand to SEQ ID NO: 1448400
accuugaucaugaucaccc

SEQ ID NO: 1448402 - RNA, 19 nt, Artificial Sequence
  Description of Artificial Sequence: Synthetic oligonucleotide
  Sense strand starting at position 3734 of SEQ ID NO: 1243880
gaucaugaucaaggucuca

SEQ ID NO: 1448403 - RNA, 19 nt, Artificial Sequence
  Description of Artificial Sequence: Synthetic oligonucleotide
  Antisense strand to SEQ ID NO: 1448402
ugagaccuugaucaugauc

SEQ ID NO: 1448404 - RNA, 19 nt, Artificial Sequence
  Description of Artificial Sequence: Synthetic oligonucleotide
  Sense strand starting at position 3893 of SEQ ID NO: 1243880
gacuuugagcccugcaaga

SEQ ID NO: 1448405 - RNA, 19 nt, Artificial Sequence
  Description of Artificial Sequence: Synthetic oligonucleotide
  Antisense strand to SEQ ID NO: 1448404
ucuugcagggcucaaaguc

SEQ ID NO: 1448406 - RNA, 19 nt, Artificial Sequence
  Description of Artificial Sequence: Synthetic oligonucleotide
  Sense strand starting at position 3895 of SEQ ID NO: 1243880
cuuugagcccugcaagaac

SEQ ID NO: 1448407 - RNA, 19 nt, Artificial Sequence
  Description of Artificial Sequence: Synthetic oligonucleotide
  Antisense strand to SEQ ID NO: 1448406
guucuugcagggcucaaag

SEQ ID NO: 1448408 - RNA, 19 nt, Artificial Sequence
  Description of Artificial Sequence: Synthetic oligonucleotide
  Sense strand starting at position 22 of SEQ ID NO: 1243881
guuggccauggcuauaauu

SEQ ID NO: 1448409 - RNA, 19 nt, Artificial Sequence
  Description of Artificial Sequence: Synthetic oligonucleotide
  Antisense strand to SEQ ID NO: 1448408
aauuauagccauggccaac

SEQ ID NO: 1448410 - RNA, 19 nt, Artificial Sequence
  Description of Artificial Sequence: Synthetic oligonucleotide
  Sense strand starting at position 30 of SEQ ID NO: 1243881
uggcuauaauuaguccuaa

SEQ ID NO: 1448411 - RNA, 19 nt, Artificial Sequence
  Description of Artificial Sequence: Synthetic oligonucleotide
  Antisense strand to SEQ ID NO: 1448410
uuaggacuaauuauagcca

SEQ ID NO: 1448412 - RNA, 19 nt, Artificial Sequence
  Description of Artificial Sequence: Synthetic oligonucleotide
  Sense strand starting at position 31 of SEQ ID NO: 1243881
ggcuauaauuaguccuaag

SEQ ID NO: 1448413 - RNA, 19 nt, Artificial Sequence
  Description of Artificial Sequence: Synthetic oligonucleotide
  Antisense strand to SEQ ID NO: 1448412
cuuaggacuaauuauagcc

SEQ ID NO: 1448414 - RNA, 19 nt, Artificial Sequence
  Description of Artificial Sequence: Synthetic oligonucleotide
  Sense strand starting at position 411 of SEQ ID NO: 1243881
agcagaucugcuuacaucu

SEQ ID NO: 1448415 - RNA, 19 nt, Artificial Sequence
  Description of Artificial Sequence: Synthetic oligonucleotide
  Antisense strand to SEQ ID NO: 1448414
agauguaagcagaucugcu

SEQ ID NO: 1448416 - RNA, 19 nt, Artificial Sequence
  Description of Artificial Sequence: Synthetic oligonucleotide
  Sense strand starting at position 559 of SEQ ID NO: 1243881
guaagauggccucaucaag

SEQ ID NO: 1448417 - RNA, 19 nt, Artificial Sequence
  Description of Artificial Sequence: Synthetic oligonucleotide
  Antisense strand to SEQ ID NO: 1448416
cuugaugaggccaucuuac

SEQ ID NO: 1448418 - RNA, 19 nt, Artificial Sequence
  Description of Artificial Sequence: Synthetic oligonucleotide
  Sense strand starting at position 680 of SEQ ID NO: 1243881
uauugaagugucuguggga

SEQ ID NO: 1448419 - RNA, 19 nt, Artificial Sequence
  Description of Artificial Sequence: Synthetic oligonucleotide
  Antisense strand to SEQ ID NO: 1448418
ucccacagacacuucaaua

SEQ ID NO: 1448420 - RNA, 19 nt, Artificial Sequence
  Description of Artificial Sequence: Synthetic oligonucleotide
  Sense strand starting at position 681 of SEQ ID NO: 1243881
auugaagugucugugggaa

SEQ ID NO: 1448421 - RNA, 19 nt, Artificial Sequence
  Description of Artificial Sequence: Synthetic oligonucleotide
  Antisense strand to SEQ ID NO: 1448420
uucccacagacacuucaau

SEQ ID NO: 1448422 - RNA, 19 nt, Artificial Sequence
  Description of Artificial Sequence: Synthetic oligonucleotide
  Sense strand starting at position 694 of SEQ ID NO: 1243881
ugggaaucuccugguggaa

SEQ ID NO: 1448423 - RNA, 19 nt, Artificial Sequence
  Description of Artificial Sequence: Synthetic oligonucleotide
  Antisense strand to SEQ ID NO: 1448422
uuccaccaggagauuccca

SEQ ID NO: 1448424 - RNA, 19 nt, Artificial Sequence
  Description of Artificial Sequence: Synthetic oligonucleotide
  Sense strand starting at position 724 of SEQ ID NO: 1243881
gagauaauaguguagugcu

SEQ ID NO: 1448425 - RNA, 19 nt, Artificial Sequence
  Description of Artificial Sequence: Synthetic oligonucleotide
  Antisense strand to SEQ ID NO: 1448424
agcacuacacuauuaucuc

SEQ ID NO: 1448426 - RNA, 19 nt, Artificial Sequence
  Description of Artificial Sequence: Synthetic oligonucleotide
  Sense strand starting at position 771 of SEQ ID NO: 1243881
agaucucuuccuugugaac

SEQ ID NO: 1448427 - RNA, 19 nt, Artificial Sequence
  Description of Artificial Sequence: Synthetic oligonucleotide
  Antisense strand to SEQ ID NO: 1448426
guucacaaggaagagaucu

SEQ ID NO: 1448428 - RNA, 19 nt, Artificial Sequence
  Description of Artificial Sequence: Synthetic oligonucleotide
  Sense strand starting at position 996 of SEQ ID NO: 1243881
gcagcuccggcugaaauuu

SEQ ID NO: 1448429 - RNA, 19 nt, Artificial Sequence
  Description of Artificial Sequence: Synthetic oligonucleotide
  Antisense strand to SEQ ID NO: 1448428
aaauuucagccggagcugc

SEQ ID NO: 1448430 - RNA, 19 nt, Artificial Sequence
  Description of Artificial Sequence: Synthetic oligonucleotide
  Sense strand starting at position 1033 of SEQ ID NO: 1243881
ccaggaugaugucugcauu

SEQ ID NO: 1448431 - RNA, 19 nt, Artificial Sequence
  Description of Artificial Sequence: Synthetic oligonucleotide
  Antisense strand to SEQ ID NO: 1448430
aaugcagacaucauccugg

SEQ ID NO: 1448432 - RNA, 19 nt, Artificial Sequence
  Description of Artificial Sequence: Synthetic oligonucleotide
  Sense strand starting at position 1036 of SEQ ID NO: 1243881
ggaugaugucugcauuguc

SEQ ID NO: 1448433 - RNA, 19 nt, Artificial Sequence
  Description of Artificial Sequence: Synthetic oligonucleotide
  Antisense strand to SEQ ID NO: 1448432
gacaaugcagacaucaucc

SEQ ID NO: 1448434 - RNA, 19 nt, Artificial Sequence
  Description of Artificial Sequence: Synthetic oligonucleotide
  Sense strand starting at position 1170 of SEQ ID NO: 1243881
gagagucauccuugggaug

SEQ ID NO: 1448435 - RNA, 19 nt, Artificial Sequence
  Description of Artificial Sequence: Synthetic oligonucleotide
  Antisense strand to SEQ ID NO: 1448434
caucccaaggaugacucuc

SEQ ID NO: 1448436 - RNA, 19 nt, Artificial Sequence
  Description of Artificial Sequence: Synthetic oligonucleotide
  Sense strand starting at position 1171 of SEQ ID NO: 1243881
agagucauccuugggaugu

SEQ ID NO: 1448437 - RNA, 19 nt, Artificial Sequence
  Description of Artificial Sequence: Synthetic oligonucleotide
  Antisense strand to SEQ ID NO: 1448436
acaucccaaggaugacucu

SEQ ID NO: 1448438 - RNA, 19 nt, Artificial Sequence
  Description of Artificial Sequence: Synthetic oligonucleotide
  Sense strand starting at position 1181 of SEQ ID NO: 1243881
uugggauguggauggucaa

SEQ ID NO: 1448439 - RNA, 19 nt, Artificial Sequence
  Description of Artificial Sequence: Synthetic oligonucleotide
  Antisense strand to SEQ ID NO: 1448438
uugaccauccacaucccaa

SEQ ID NO: 1448440 - RNA, 19 nt, Artificial Sequence
  Description of Artificial Sequence: Synthetic oligonucleotide
  Sense strand starting at position 1605 of SEQ ID NO: 1243881
guaagccacccugauguua

SEQ ID NO: 1448441 - RNA, 19 nt, Artificial Sequence
  Description of Artificial Sequence: Synthetic oligonucleotide
  Antisense strand to SEQ ID NO: 1448440
uaacaucaggguggcuuac

SEQ ID NO: 1448442 - RNA, 19 nt, Artificial Sequence
  Description of Artificial Sequence: Synthetic oligonucleotide
  Sense strand starting at position 1690 of SEQ ID NO: 1243881
acagaugcuucuccugacu

SEQ ID NO: 1448443 - RNA, 19 nt, Artificial Sequence
  Description of Artificial Sequence: Synthetic oligonucleotide
  Antisense strand to SEQ ID NO: 1448442
agucaggagaagcaucugu

SEQ ID NO: 1448444 - RNA, 19 nt, Artificial Sequence
  Description of Artificial Sequence: Synthetic oligonucleotide
  Sense strand starting at position 1693 of SEQ ID NO: 1243881
gaugcuucuccugacuaug

SEQ ID NO: 1448445 - RNA, 19 nt, Artificial Sequence
  Description of Artificial Sequence: Synthetic oligonucleotide
  Antisense strand to SEQ ID NO: 1448444
cauagucaggagaagcauc

SEQ ID NO: 1448446 - RNA, 19 nt, Artificial Sequence
  Description of Artificial Sequence: Synthetic oligonucleotide
  Sense strand starting at position 1696 of SEQ ID NO: 1243881
gcuucuccugacuauggaa

SEQ ID NO: 1448447 - RNA, 19 nt, Artificial Sequence
  Description of Artificial Sequence: Synthetic oligonucleotide
  Antisense strand to SEQ ID NO: 1448446
uuccauagucaggagaagc

SEQ ID NO: 1448448 - RNA, 19 nt, Artificial Sequence
  Description of Artificial Sequence: Synthetic oligonucleotide
  Sense strand starting at position 1716 of SEQ ID NO: 1243881
ggaacuaggugagaacaaa

SEQ ID NO: 1448449 - RNA, 19 nt, Artificial Sequence
  Description of Artificial Sequence: Synthetic oligonucleotide
  Antisense strand to SEQ ID NO: 1448448
uuuguucucaccuaguucc

SEQ ID NO: 1448450 - RNA, 19 nt, Artificial Sequence
  Description of Artificial Sequence: Synthetic oligonucleotide
  Sense strand starting at position 2018 of SEQ ID NO: 1243881
ggaucucagugcccagaaa

SEQ ID NO: 1448451 - RNA, 19 nt, Artificial Sequence
  Description of Artificial Sequence: Synthetic oligonucleotide
  Antisense strand to SEQ ID NO: 1448450
uuucugggcacugagaucc

SEQ ID NO: 1448452 - RNA, 19 nt, Artificial Sequence
  Description of Artificial Sequence: Synthetic oligonucleotide
  Sense strand starting at position 2019 of SEQ ID NO: 1243881
gaucucagugcccagaaau

SEQ ID NO: 1448453 - RNA, 19 nt, Artificial Sequence
  Description of Artificial Sequence: Synthetic oligonucleotide
  Antisense strand to SEQ ID NO: 1448452
auuucugggcacugagauc

SEQ ID NO: 1448454 - RNA, 19 nt, Artificial Sequence
  Description of Artificial Sequence: Synthetic oligonucleotide
  Sense strand starting at position 2090 of SEQ ID NO: 1243881
ggcugaugagaaggguuau

SEQ ID NO: 1448455 - RNA, 19 nt, Artificial Sequence
  Description of Artificial Sequence: Synthetic oligonucleotide
  Antisense strand to SEQ ID NO: 1448454
auaacccuucucaucagcc

SEQ ID NO: 1448456 - RNA, 19 nt, Artificial Sequence
  Description of Artificial Sequence: Synthetic oligonucleotide
  Sense strand starting at position 2091 of SEQ ID NO: 1243881
gcugaugagaaggguuaug

SEQ ID NO: 1448457 - RNA, 19 nt, Artificial Sequence
  Description of Artificial Sequence: Synthetic oligonucleotide
  Antisense strand to SEQ ID NO: 1448456
cauaacccuucucaucagc

SEQ ID NO: 1448458 - RNA, 19 nt, Artificial Sequence
  Description of Artificial Sequence: Synthetic oligonucleotide
  Sense strand starting at position 2101 of SEQ ID NO: 1243881
aggguuauguggucaggag

SEQ ID NO: 1448459 - RNA, 19 nt, Artificial Sequence
  Description of Artificial Sequence: Synthetic oligonucleotide
  Antisense strand to SEQ ID NO: 1448458
cuccugaccacauaacccu

SEQ ID NO: 1448460 - RNA, 19 nt, Artificial Sequence
  Description of Artificial Sequence: Synthetic oligonucleotide
  Sense strand starting at position 2102 of SEQ ID NO: 1243881
ggguuauguggucaggagu

SEQ ID NO: 1448461 - RNA, 19 nt, Artificial Sequence
  Description of Artificial Sequence: Synthetic oligonucleotide
  Antisense strand to SEQ ID NO: 1448460
acuccugaccacauaaccc

SEQ ID NO: 1448462 - RNA, 19 nt, Artificial Sequence
  Description of Artificial Sequence: Synthetic oligonucleotide
  Sense strand starting at position 2174 of SEQ ID NO: 1243881
guggucaaaguaugggaaa

SEQ ID NO: 1448463 - RNA, 19 nt, Artificial Sequence
  Description of Artificial Sequence: Synthetic oligonucleotide
  Antisense strand to SEQ ID NO: 1448462
uuucccauacuuugaccac

SEQ ID NO: 1448464 - RNA, 19 nt, Artificial Sequence
  Description of Artificial Sequence: Synthetic oligonucleotide
  Sense strand starting at position 2176 of SEQ ID NO: 1243881
ggucaaaguaugggaaagu

SEQ ID NO: 1448465 - RNA, 19 nt, Artificial Sequence
  Description of Artificial Sequence: Synthetic oligonucleotide
  Antisense strand to SEQ ID NO: 1448464
acuuucccauacuuugacc

SEQ ID NO: 1448466 - RNA, 19 nt, Artificial Sequence
  Description of Artificial Sequence: Synthetic oligonucleotide
  Sense strand starting at position 2220 of SEQ ID NO: 1243881
aauguaaguggcuaggauu

SEQ ID NO: 1448467 - RNA, 19 nt, Artificial Sequence
  Description of Artificial Sequence: Synthetic oligonucleotide
  Antisense strand to SEQ ID NO: 1448466
aauccuagccacuuacauu

SEQ ID NO: 1448468 - RNA, 19 nt, Artificial Sequence
  Description of Artificial Sequence: Synthetic oligonucleotide
  Sense strand starting at position 2243 of SEQ ID NO: 1243881
gccugaauucuccacagag

SEQ ID NO: 1448469 - RNA, 19 nt, Artificial Sequence
  Description of Artificial Sequence: Synthetic oligonucleotide
  Antisense strand to SEQ ID NO: 1448468
cucuguggagaauucaggc

SEQ ID NO: 1448470 - RNA, 19 nt, Artificial Sequence
  Description of Artificial Sequence: Synthetic oligonucleotide
  Sense strand starting at position 2453 of SEQ ID NO: 1243881
auuggaucuuggcuuaaag

SEQ ID NO: 1448471 - RNA, 19 nt, Artificial Sequence
  Description of Artificial Sequence: Synthetic oligonucleotide
  Antisense strand to SEQ ID NO: 1448470
cuuuaagccaagauccaau

SEQ ID NO: 1448472 - RNA, 19 nt, Artificial Sequence
  Description of Artificial Sequence: Synthetic oligonucleotide
  Sense strand starting at position 2511 of SEQ ID NO: 1243881
gaacucgcaucucuggaau

SEQ ID NO: 1448473 - RNA, 19 nt, Artificial Sequence
  Description of Artificial Sequence: Synthetic oligonucleotide
  Antisense strand to SEQ ID NO: 1448472
auuccagagaugcgaguuc

SEQ ID NO: 1448474 - RNA, 19 nt, Artificial Sequence
  Description of Artificial Sequence: Synthetic oligonucleotide
  Sense strand starting at position 2514 of SEQ ID NO: 1243881
cucgcaucucuggaauagu

SEQ ID NO: 1448475 - RNA, 19 nt, Artificial Sequence
  Description of Artificial Sequence: Synthetic oligonucleotide
  Antisense strand to SEQ ID NO: 1448474
acuauuccagagaugcgag

SEQ ID NO: 1448476 - RNA, 19 nt, Artificial Sequence
  Description of Artificial Sequence: Synthetic oligonucleotide
  Sense strand starting at position 3115 of SEQ ID NO: 1243881
ggcugcuguccggccaaau

SEQ ID NO: 1448477 - RNA, 19 nt, Artificial Sequence
  Description of Artificial Sequence: Synthetic oligonucleotide
  Antisense strand to SEQ ID NO: 1448476
auuuggccggacagcagcc

SEQ ID NO: 1448478 - RNA, 19 nt, Artificial Sequence
  Description of Artificial Sequence: Synthetic oligonucleotide
  Sense strand starting at position 3116 of SEQ ID NO: 1243881
gcugcuguccggccaaaua

SEQ ID NO: 1448479 - RNA, 19 nt, Artificial Sequence
  Description of Artificial Sequence: Synthetic oligonucleotide
  Antisense strand to SEQ ID NO: 1448478
uauuuggccggacagcagc

SEQ ID NO: 1448480 - RNA, 19 nt, Artificial Sequence
  Description of Artificial Sequence: Synthetic oligonucleotide
  Sense strand starting at position 3790 of SEQ ID NO: 1243881
ccucaaucgcgcucccaau

SEQ ID NO: 1448481 - RNA, 19 nt, Artificial Sequence
  Description of Artificial Sequence: Synthetic oligonucleotide
  Antisense strand to SEQ ID NO: 1448480
auugggagcgcgauugagg

SEQ ID NO: 1448482 - RNA, 19 nt, Artificial Sequence
  Description of Artificial Sequence: Synthetic oligonucleotide
  Sense strand starting at position 3926 of SEQ ID NO: 1243881
ccgacacaggguugugaau

SEQ ID NO: 1448483 - RNA, 19 nt, Artificial Sequence
  Description of Artificial Sequence: Synthetic oligonucleotide
  Antisense strand to SEQ ID NO: 1448482
auucacaacccugugucgg

SEQ ID NO: 1448484 - RNA, 19 nt, Artificial Sequence
  Description of Artificial Sequence: Synthetic oligonucleotide
  Sense strand starting at position 3957 of SEQ ID NO: 1243881
uaugaauggcaauagcgau

SEQ ID NO: 1448485 - RNA, 19 nt, Artificial Sequence
  Description of Artificial Sequence: Synthetic oligonucleotide
  Antisense strand to SEQ ID NO: 1448484
aucgcuauugccauucaua

SEQ ID NO: 1448486 - RNA, 19 nt, Artificial Sequence
  Description of Artificial Sequence: Synthetic oligonucleotide
  Sense strand starting at position 3969 of SEQ ID NO: 1243881
uagcgaucauuugagaaac

SEQ ID NO: 1448487 - RNA, 19 nt, Artificial Sequence
  Description of Artificial Sequence: Synthetic oligonucleotide
  Antisense strand to SEQ ID NO: 1448486
guuucucaaaugaucgcua

SEQ ID NO: 1448488 - RNA, 19 nt, Artificial Sequence
  Description of Artificial Sequence: Synthetic oligonucleotide
  Sense strand starting at position 31 of SEQ ID NO: 1243882
gaguaagcugucuauuaau

SEQ ID NO: 1448489 - RNA, 19 nt, Artificial Sequence
  Description of Artificial Sequence: Synthetic oligonucleotide
  Antisense strand to SEQ ID NO: 1448488
auuaauagacagcuuacuc

SEQ ID NO: 1448490 - RNA, 19 nt, Artificial Sequence
  Description of Artificial Sequence: Synthetic oligonucleotide
  Sense strand starting at position 148 of SEQ ID NO: 1243882
agaauuguccuauagcuga

SEQ ID NO: 1448491 - RNA, 19 nt, Artificial Sequence
  Description of Artificial Sequence: Synthetic oligonucleotide
  Antisense strand to SEQ ID NO: 1448490
ucagcuauaggacaauucu

SEQ ID NO: 1448492 - RNA, 19 nt, Artificial Sequence
  Description of Artificial Sequence: Synthetic oligonucleotide
  Sense strand starting at position 153 of SEQ ID NO: 1243882
uguccuauagcugacaaua

SEQ ID NO: 1448493 - RNA, 19 nt, Artificial Sequence
  Description of Artificial Sequence: Synthetic oligonucleotide
  Antisense strand to SEQ ID NO: 1448492
uauugucagcuauaggaca

SEQ ID NO: 1448494 - RNA, 19 nt, Artificial Sequence
  Description of Artificial Sequence: Synthetic oligonucleotide
  Sense strand starting at position 260 of SEQ ID NO: 1243882
ggaugaguucucugagaau

SEQ ID NO: 1448495 - RNA, 19 nt, Artificial Sequence
  Description of Artificial Sequence: Synthetic oligonucleotide
  Antisense strand to SEQ ID NO: 1448494
auucucagagaacucaucc

SEQ ID NO: 1448496 - RNA, 19 nt, Artificial Sequence
  Description of Artificial Sequence: Synthetic oligonucleotide
  Sense strand starting at position 273 of SEQ ID NO: 1243882
gagaaugagugcccaggau

SEQ ID NO: 1448497 - RNA, 19 nt, Artificial Sequence
  Description of Artificial Sequence: Synthetic oligonucleotide
  Antisense strand to SEQ ID NO: 1448496
auccugggcacucauucuc

SEQ ID NO: 1448498 - RNA, 19 nt, Artificial Sequence
  Description of Artificial Sequence: Synthetic oligonucleotide
  Sense strand starting at position 314 of SEQ ID NO: 1243882
ucagguaugguagaaugua

SEQ ID NO: 1448499 - RNA, 19 nt, Artificial Sequence
  Description of Artificial Sequence: Synthetic oligonucleotide
  Antisense strand to SEQ ID NO: 1448498
uacauucuaccauaccuga

SEQ ID NO: 1448500 - RNA, 19 nt, Artificial Sequence
  Description of Artificial Sequence: Synthetic oligonucleotide
  Sense strand starting at position 592 of SEQ ID NO: 1243882
augaauugcccuggaauca

SEQ ID NO: 1448501 - RNA, 19 nt, Artificial Sequence
  Description of Artificial Sequence: Synthetic oligonucleotide
  Antisense strand to SEQ ID NO: 1448500
ugauuccagggcaauucau

SEQ ID NO: 1448502 - RNA, 19 nt, Artificial Sequence
  Description of Artificial Sequence: Synthetic oligonucleotide
  Sense strand starting at position 740 of SEQ ID NO: 1243882
guuucugggaugugaucaa

SEQ ID NO: 1448503 - RNA, 19 nt, Artificial Sequence
  Description of Artificial Sequence: Synthetic oligonucleotide
  Antisense strand to SEQ ID NO: 1448502
uugaucacaucccagaaac

SEQ ID NO: 1448504 - RNA, 19 nt, Artificial Sequence
  Description of Artificial Sequence: Synthetic oligonucleotide
  Sense strand starting at position 779 of SEQ ID NO: 1243882
uuaucuggccucuaauaug

SEQ ID NO: 1448505 - RNA, 19 nt, Artificial Sequence
  Description of Artificial Sequence: Synthetic oligonucleotide
  Antisense strand to SEQ ID NO: 1448504
cauauuagaggccagauaa

SEQ ID NO: 1448506 - RNA, 19 nt, Artificial Sequence
  Description of Artificial Sequence: Synthetic oligonucleotide
  Sense strand starting at position 1048 of SEQ ID NO: 1243882
cugugcuaaccauaaugaa

SEQ ID NO: 1448507 - RNA, 19 nt, Artificial Sequence
  Description of Artificial Sequence: Synthetic oligonucleotide
  Antisense strand to SEQ ID NO: 1448506
uucauuaugguuagcacag

SEQ ID NO: 1448508 - RNA, 19 nt, Artificial Sequence
  Description of Artificial Sequence: Synthetic oligonucleotide
  Sense strand starting at position 1119 of SEQ ID NO: 1243882
uaggguggucucuauaaag

SEQ ID NO: 1448509 - RNA, 19 nt, Artificial Sequence
  Description of Artificial Sequence: Synthetic oligonucleotide
  Antisense strand to SEQ ID NO: 1448508
cuuuauagagaccacccua

SEQ ID NO: 1448510 - RNA, 19 nt, Artificial Sequence
  Description of Artificial Sequence: Synthetic oligonucleotide
  Sense strand starting at position 1167 of SEQ ID NO: 1243882
agccauuaccaagagucaa

SEQ ID NO: 1448511 - RNA, 19 nt, Artificial Sequence
  Description of Artificial Sequence: Synthetic oligonucleotide
  Antisense strand to SEQ ID NO: 1448510
uugacucuugguaauggcu

SEQ ID NO: 1448512 - RNA, 19 nt, Artificial Sequence
  Description of Artificial Sequence: Synthetic oligonucleotide
  Sense strand starting at position 1223 of SEQ ID NO: 1243882
guuucuucgagugaaagga

SEQ ID NO: 1448513 - RNA, 19 nt, Artificial Sequence
  Description of Artificial Sequence: Synthetic oligonucleotide
  Antisense strand to SEQ ID NO: 1448512
uccuuucacucgaagaaac

SEQ ID NO: 1448514 - RNA, 19 nt, Artificial Sequence
  Description of Artificial Sequence: Synthetic oligonucleotide
  Sense strand starting at position 1227 of SEQ ID NO: 1243882
cuucgagugaaaggauauu

SEQ ID NO: 1448515 - RNA, 19 nt, Artificial Sequence
  Description of Artificial Sequence: Synthetic oligonucleotide
  Antisense strand to SEQ ID NO: 1448514
aauauccuuucacucgaag

SEQ ID NO: 1448516 - RNA, 19 nt, Artificial Sequence
  Description of Artificial Sequence: Synthetic oligonucleotide
  Sense strand starting at position 1538 of SEQ ID NO: 1243882
ggcuguguggaccacuaaa

SEQ ID NO: 1448517 - RNA, 19 nt, Artificial Sequence
  Description of Artificial Sequence: Synthetic oligonucleotide
  Antisense strand to SEQ ID NO: 1448516
uuuagugguccacacagcc

SEQ ID NO: 1448518 - RNA, 19 nt, Artificial Sequence
  Description of Artificial Sequence: Synthetic oligonucleotide
  Sense strand starting at position 2498 of SEQ ID NO: 1243882
agaacacuucccggugaca

SEQ ID NO: 1448519 - RNA, 19 nt, Artificial Sequence
  Description of Artificial Sequence: Synthetic oligonucleotide
  Antisense strand to SEQ ID NO: 1448518
ugucaccgggaaguguucu

SEQ ID NO: 1448520 - RNA, 19 nt, Artificial Sequence
  Description of Artificial Sequence: Synthetic oligonucleotide
  Sense strand starting at position 2610 of SEQ ID NO: 1243882
agaggaacuccggguuacu

SEQ ID NO: 1448521 - RNA, 19 nt, Artificial Sequence
  Description of Artificial Sequence: Synthetic oligonucleotide
  Antisense strand to SEQ ID NO: 1448520
aguaacccggaguuccucu

SEQ ID NO: 1448522 - RNA, 19 nt, Artificial Sequence
  Description of Artificial Sequence: Synthetic oligonucleotide
  Sense strand starting at position 2630 of SEQ ID NO: 1243882
guuucugagccacacuaaa

SEQ ID NO: 1448523 - RNA, 19 nt, Artificial Sequence
  Description of Artificial Sequence: Synthetic oligonucleotide
  Antisense strand to SEQ ID NO: 1448522
uuuaguguggcucagaaac

SEQ ID NO: 1448524 - RNA, 19 nt, Artificial Sequence
  Description of Artificial Sequence: Synthetic oligonucleotide
  Sense strand starting at position 2672 of SEQ ID NO: 1243882
ccagauugcauguagaggu

SEQ ID NO: 1448525 - RNA, 19 nt, Artificial Sequence
  Description of Artificial Sequence: Synthetic oligonucleotide
  Antisense strand to SEQ ID NO: 1448524
accucuacaugcaaucugg

SEQ ID NO: 1448526 - RNA, 19 nt, Artificial Sequence
  Description of Artificial Sequence: Synthetic oligonucleotide
  Sense strand starting at position 2696 of SEQ ID NO: 1243882
uuugguggucuggagugaa

SEQ ID NO: 1448527 - RNA, 19 nt, Artificial Sequence
  Description of Artificial Sequence: Synthetic oligonucleotide
  Antisense strand to SEQ ID NO: 1448526
uucacuccagaccaccaaa

SEQ ID NO: 1448528 - RNA, 19 nt, Artificial Sequence
  Description of Artificial Sequence: Synthetic oligonucleotide
  Sense strand starting at position 2708 of SEQ ID NO: 1243882
gagugaaauccguauucua

SEQ ID NO: 1448529 - RNA, 19 nt, Artificial Sequence
  Description of Artificial Sequence: Synthetic oligonucleotide
  Antisense strand to SEQ ID NO: 1448528
uagaauacggauuucacuc

SEQ ID NO: 1448530 - RNA, 19 nt, Artificial Sequence
  Description of Artificial Sequence: Synthetic oligonucleotide
  Sense strand starting at position 2780 of SEQ ID NO: 1243882
guuaucuagcaauacaaug

SEQ ID NO: 1448531 - RNA, 19 nt, Artificial Sequence
  Description of Artificial Sequence: Synthetic oligonucleotide
  Antisense strand to SEQ ID NO: 1448530
cauuguauugcuagauaac

SEQ ID NO: 1448532 - RNA, 19 nt, Artificial Sequence
  Description of Artificial Sequence: Synthetic oligonucleotide
  Sense strand starting at position 2797 of SEQ ID NO: 1243882
uggaguaguaaugguacau

SEQ ID NO: 1448533 - RNA, 19 nt, Artificial Sequence
  Description of Artificial Sequence: Synthetic oligonucleotide
  Antisense strand to SEQ ID NO: 1448532
auguaccauuacuacucca

SEQ ID NO: 1448534 - RNA, 19 nt, Artificial Sequence
  Description of Artificial Sequence: Synthetic oligonucleotide
  Sense strand starting at position 2801 of SEQ ID NO: 1243882
guaguaaugguacaucuuu

SEQ ID NO: 1448535 - RNA, 19 nt, Artificial Sequence
  Description of Artificial Sequence: Synthetic oligonucleotide
  Antisense strand to SEQ ID NO: 1448534
aaagauguaccauuacuac

SEQ ID NO: 1448536 - RNA, 19 nt, Artificial Sequence
  Description of Artificial Sequence: Synthetic oligonucleotide
  Sense strand starting at position 2919 of SEQ ID NO: 1243882
uugugauuaccaggguaga

SEQ ID NO: 1448537 - RNA, 19 nt, Artificial Sequence
  Description of Artificial Sequence: Synthetic oligonucleotide
  Antisense strand to SEQ ID NO: 1448536
ucuacccugguaaucacaa

SEQ ID NO: 1448538 - RNA, 19 nt, Artificial Sequence
  Description of Artificial Sequence: Synthetic oligonucleotide
  Sense strand starting at position 2920 of SEQ ID NO: 1243882
ugugauuaccaggguagau

SEQ ID NO: 1448539 - RNA, 19 nt, Artificial Sequence
  Description of Artificial Sequence: Synthetic oligonucleotide
  Antisense strand to SEQ ID NO: 1448538
aucuacccugguaaucaca

SEQ ID NO: 1448540 - RNA, 19 nt, Artificial Sequence
  Description of Artificial Sequence: Synthetic oligonucleotide
  Sense strand starting at position 3040 of SEQ ID NO: 1243882
auagguaauuggguucuaa

SEQ ID NO: 1448541 - RNA, 19 nt, Artificial Sequence
  Description of Artificial Sequence: Synthetic oligonucleotide
  Antisense strand to SEQ ID NO: 1448540
uuagaacccaauuaccuau

SEQ ID NO: 1448542 - RNA, 19 nt, Artificial Sequence
  Description of Artificial Sequence: Synthetic oligonucleotide
  Sense strand starting at position 3176 of SEQ ID NO: 1243882
ucuguaggagcuuaacacu

SEQ ID NO: 1448543 - RNA, 19 nt, Artificial Sequence
  Description of Artificial Sequence: Synthetic oligonucleotide
  Antisense strand to SEQ ID NO: 1448542
aguguuaagcuccuacaga

SEQ ID NO: 1448544 - RNA, 19 nt, Artificial Sequence
  Description of Artificial Sequence: Synthetic oligonucleotide
  Sense strand starting at position 3206 of SEQ ID NO: 1243882
gggacaagagguugucgau

SEQ ID NO: 1448545 - RNA, 19 nt, Artificial Sequence
  Description of Artificial Sequence: Synthetic oligonucleotide
  Antisense strand to SEQ ID NO: 1448544
aucgacaaccucuuguccc

SEQ ID NO: 1448546 - RNA, 19 nt, Artificial Sequence
  Description of Artificial Sequence: Synthetic oligonucleotide
  Sense strand starting at position 3280 of SEQ ID NO: 1243882
gguaacauuucugugcagu

SEQ ID NO: 1448547 - RNA, 19 nt, Artificial Sequence
  Description of Artificial Sequence: Synthetic oligonucleotide
  Antisense strand to SEQ ID NO: 1448546
acugcacagaaauguuacc

SEQ ID NO: 1448548 - RNA, 19 nt, Artificial Sequence
  Description of Artificial Sequence: Synthetic oligonucleotide
  Sense strand starting at position 3281 of SEQ ID NO: 1243882
guaacauuucugugcaguu

SEQ ID NO: 1448549 - RNA, 19 nt, Artificial Sequence
  Description of Artificial Sequence: Synthetic oligonucleotide
  Antisense strand to SEQ ID NO: 1448548
aacugcacagaaauguuac

SEQ ID NO: 1448550 - RNA, 19 nt, Artificial Sequence
  Description of Artificial Sequence: Synthetic oligonucleotide
  Sense strand starting at position 3328 of SEQ ID NO: 1243882
cuuggugcucuggaaggaa

SEQ ID NO: 1448551 - RNA, 19 nt, Artificial Sequence
  Description of Artificial Sequence: Synthetic oligonucleotide
  Antisense strand to SEQ ID NO: 1448550
uuccuuccagagcaccaag

SEQ ID NO: 1448552 - RNA, 19 nt, Artificial Sequence
  Description of Artificial Sequence: Synthetic oligonucleotide
  Sense strand starting at position 3547 of SEQ ID NO: 1243882
ccauguacccuagaucuga

SEQ ID NO: 1448553 - RNA, 19 nt, Artificial Sequence
  Description of Artificial Sequence: Synthetic oligonucleotide
  Antisense strand to SEQ ID NO: 1448552
ucagaucuaggguacaugg

SEQ ID NO: 1448554 - RNA, 19 nt, Artificial Sequence
  Description of Artificial Sequence: Synthetic oligonucleotide
  Sense strand starting at position 3712 of SEQ ID NO: 1243882
uguuuaaaccuagagcaaa

SEQ ID NO: 1448555 - RNA, 19 nt, Artificial Sequence
  Description of Artificial Sequence: Synthetic oligonucleotide
  Antisense strand to SEQ ID NO: 1448554
uuugcucuagguuuaaaca

SEQ ID NO: 1448556 - RNA, 19 nt, Artificial Sequence
  Description of Artificial Sequence: Synthetic oligonucleotide
  Sense strand starting at position 3801 of SEQ ID NO: 1243882
uguugagugccagaaccaa

SEQ ID NO: 1448557 - RNA, 19 nt, Artificial Sequence
  Description of Artificial Sequence: Synthetic oligonucleotide
  Antisense strand to SEQ ID NO: 1448556
uugguucuggcacucaaca

SEQ ID NO: 1448558 - RNA, 19 nt, Artificial Sequence
  Description of Artificial Sequence: Synthetic oligonucleotide
  Sense strand starting at position 3821 of SEQ ID NO: 1243882
accugagucccugaaaccu

SEQ ID NO: 1448559 - RNA, 19 nt, Artificial Sequence
  Description of Artificial Sequence: Synthetic oligonucleotide
  Antisense strand to SEQ ID NO: 1448558
agguuucagggacucaggu

SEQ ID NO: 1448560 - RNA, 19 nt, Artificial Sequence
  Description of Artificial Sequence: Synthetic oligonucleotide
  Sense strand starting at position 3883 of SEQ ID NO: 1243882
aagcaucuugaagagucau

SEQ ID NO: 1448561 - RNA, 19 nt, Artificial Sequence
  Description of Artificial Sequence: Synthetic oligonucleotide
  Antisense strand to SEQ ID NO: 1448560
augacucuucaagaugcuu

SEQ ID NO: 1448562 - RNA, 19 nt, Artificial Sequence
  Description of Artificial Sequence: Synthetic oligonucleotide
  Sense strand starting at position 3897 of SEQ ID NO: 1243882
gucauagcuucugugauuu

SEQ ID NO: 1448563 - RNA, 19 nt, Artificial Sequence
  Description of Artificial Sequence: Synthetic oligonucleotide
  Antisense strand to SEQ ID NO: 1448562
aaaucacagaagcuaugac

SEQ ID NO: 1448564 - RNA, 19 nt, Artificial Sequence
  Description of Artificial Sequence: Synthetic oligonucleotide
  Sense strand starting at position 3952 of SEQ ID NO: 1243882
gaaucaaauguaggacuuu

SEQ ID NO: 1448565 - RNA, 19 nt, Artificial Sequence
  Description of Artificial Sequence: Synthetic oligonucleotide
  Antisense strand to SEQ ID NO: 1448564
aaaguccuacauuugauuc

SEQ ID NO: 1448566 - RNA, 19 nt, Artificial Sequence
  Description of Artificial Sequence: Synthetic oligonucleotide
  Sense strand starting at position 3976 of SEQ ID NO: 1243882
auuauagaugucuaagcca

SEQ ID NO: 1448567 - RNA, 19 nt, Artificial Sequence
  Description of Artificial Sequence: Synthetic oligonucleotide
  Antisense strand to SEQ ID NO: 1448566
uggcuuagacaucuauaau

SEQ ID NO: 1448568 - RNA, 19 nt, Artificial Sequence
  Description of Artificial Sequence: Synthetic oligonucleotide
  Sense strand starting at position 553 of SEQ ID NO: 1243883
aauguugcuguacaaugaa

SEQ ID NO: 1448569 - RNA, 19 nt, Artificial Sequence
  Description of Artificial Sequence: Synthetic oligonucleotide
  Antisense strand to SEQ ID NO: 1448568
uucauuguacagcaacauu

SEQ ID NO: 1448570 - RNA, 19 nt, Artificial Sequence
  Description of Artificial Sequence: Synthetic oligonucleotide
  Sense strand starting at position 556 of SEQ ID NO: 1243883
guugcuguacaaugaauuu

SEQ ID NO: 1448571 - RNA, 19 nt, Artificial Sequence
  Description of Artificial Sequence: Synthetic oligonucleotide
  Antisense strand to SEQ ID NO: 1448570
aaauucauuguacagcaac

SEQ ID NO: 1448572 - RNA, 19 nt, Artificial Sequence
  Description of Artificial Sequence: Synthetic oligonucleotide
  Sense strand starting at position 710 of SEQ ID NO: 1243883
cuccauaggugauccuaau

SEQ ID NO: 1448573 - RNA, 19 nt, Artificial Sequence
  Description of Artificial Sequence: Synthetic oligonucleotide
  Antisense strand to SEQ ID NO: 1448572
auuaggaucaccuauggag

SEQ ID NO: 1448574 - RNA, 19 nt, Artificial Sequence
  Description of Artificial Sequence: Synthetic oligonucleotide
  Sense strand starting at position 925 of SEQ ID NO: 1243883
ggagucgggcccuagaauu

SEQ ID NO: 1448575 - RNA, 19 nt, Artificial Sequence
  Description of Artificial Sequence: Synthetic oligonucleotide
  Antisense strand to SEQ ID NO: 1448574
aauucuagggcccgacucc

SEQ ID NO: 1448576 - RNA, 19 nt, Artificial Sequence
  Description of Artificial Sequence: Synthetic oligonucleotide
  Sense strand starting at position 1032 of SEQ ID NO: 1243883
ccagguuaaguacauuaca

SEQ ID NO: 1448577 - RNA, 19 nt, Artificial Sequence
  Description of Artificial Sequence: Synthetic oligonucleotide
  Antisense strand to SEQ ID NO: 1448576
uguaauguacuuaaccugg

SEQ ID NO: 1448578 - RNA, 19 nt, Artificial Sequence
  Description of Artificial Sequence: Synthetic oligonucleotide
  Sense strand starting at position 1035 of SEQ ID NO: 1243883
gguuaaguacauuacaguu

SEQ ID NO: 1448579 - RNA, 19 nt, Artificial Sequence
  Description of Artificial Sequence: Synthetic oligonucleotide
  Antisense strand to SEQ ID NO: 1448578
aacuguaauguacuuaacc

SEQ ID NO: 1448580 - RNA, 19 nt, Artificial Sequence
  Description of Artificial Sequence: Synthetic oligonucleotide
  Sense strand starting at position 1129 of SEQ ID NO: 1243883
ccaguuuaagcccaagaaa

SEQ ID NO: 1448581 - RNA, 19 nt, Artificial Sequence
  Description of Artificial Sequence: Synthetic oligonucleotide
  Antisense strand to SEQ ID NO: 1448580
uuucuugggcuuaaacugg

SEQ ID NO: 1448582 - RNA, 19 nt, Artificial Sequence
  Description of Artificial Sequence: Synthetic oligonucleotide
  Sense strand starting at position 1145 of SEQ ID NO: 1243883
aaacacgaguaguccaauu

SEQ ID NO: 1448583 - RNA, 19 nt, Artificial Sequence
  Description of Artificial Sequence: Synthetic oligonucleotide
  Antisense strand to SEQ ID NO: 1448582
aauuggacuacucguguuu

SEQ ID NO: 1448584 - RNA, 19 nt, Artificial Sequence
  Description of Artificial Sequence: Synthetic oligonucleotide
  Sense strand starting at position 1446 of SEQ ID NO: 1243883
cucuccucuuagguagaua

SEQ ID NO: 1448585 - RNA, 19 nt, Artificial Sequence
  Description of Artificial Sequence: Synthetic oligonucleotide
  Antisense strand to SEQ ID NO: 1448584
uaucuaccuaagaggagag

SEQ ID NO: 1448586 - RNA, 19 nt, Artificial Sequence
  Description of Artificial Sequence: Synthetic oligonucleotide
  Sense strand starting at position 1502 of SEQ ID NO: 1243883
agggcuugucccgggauuu

SEQ ID NO: 1448587 - RNA, 19 nt, Artificial Sequence
  Description of Artificial Sequence: Synthetic oligonucleotide
  Antisense strand to SEQ ID NO: 1448586
aaaucccgggacaagcccu

SEQ ID NO: 1448588 - RNA, 19 nt, Artificial Sequence
  Description of Artificial Sequence: Synthetic oligonucleotide
  Sense strand starting at position 1503 of SEQ ID NO: 1243883
gggcuugucccgggauuug

SEQ ID NO: 1448589 - RNA, 19 nt, Artificial Sequence
  Description of Artificial Sequence: Synthetic oligonucleotide
  Antisense strand to SEQ ID NO: 1448588
caaaucccgggacaagccc

SEQ ID NO: 1448590 - RNA, 19 nt, Artificial Sequence
  Description of Artificial Sequence: Synthetic oligonucleotide
  Sense strand starting at position 1579 of SEQ ID NO: 1243883
uggcaauagagccgauaaa

SEQ ID NO: 1448591 - RNA, 19 nt, Artificial Sequence
  Description of Artificial Sequence: Synthetic oligonucleotide
  Antisense strand to SEQ ID NO: 1448590
uuuaucggcucuauugcca

SEQ ID NO: 1448592 - RNA, 19 nt, Artificial Sequence
  Description of Artificial Sequence: Synthetic oligonucleotide
  Sense strand starting at position 1823 of SEQ ID NO: 1243883
uccacucuggccuaagaaa

SEQ ID NO: 1448593 - RNA, 19 nt, Artificial Sequence
  Description of Artificial Sequence: Synthetic oligonucleotide
  Antisense strand to SEQ ID NO: 1448592
uuucuuaggccagagugga

SEQ ID NO: 1448594 - RNA, 19 nt, Artificial Sequence
  Description of Artificial Sequence: Synthetic oligonucleotide
  Sense strand starting at position 2102 of SEQ ID NO: 1243883
ccagauuacggguaaguuu

SEQ ID NO: 1448595 - RNA, 19 nt, Artificial Sequence
  Description of Artificial Sequence: Synthetic oligonucleotide
  Antisense strand to SEQ ID NO: 1448594
aaacuuacccguaaucugg

SEQ ID NO: 1448596 - RNA, 19 nt, Artificial Sequence
  Description of Artificial Sequence: Synthetic oligonucleotide
  Sense strand starting at position 2232 of SEQ ID NO: 1243883
ugcgccugugaucuuuauu

SEQ ID NO: 1448597 - RNA, 19 nt, Artificial Sequence
  Description of Artificial Sequence: Synthetic oligonucleotide
  Antisense strand to SEQ ID NO: 1448596
aauaaagaucacaggcgca

SEQ ID NO: 1448598 - RNA, 19 nt, Artificial Sequence
  Description of Artificial Sequence: Synthetic oligonucleotide
  Sense strand starting at position 2540 of SEQ ID NO: 1243883
guuuguucuggagagagug

SEQ ID NO: 1448599 - RNA, 19 nt, Artificial Sequence
  Description of Artificial Sequence: Synthetic oligonucleotide
  Antisense strand to SEQ ID NO: 1448598
cacucucuccagaacaaac

SEQ ID NO: 1448600 - RNA, 19 nt, Artificial Sequence
  Description of Artificial Sequence: Synthetic oligonucleotide
  Sense strand starting at position 2683 of SEQ ID NO: 1243883
cuguguuagaaggaagcau

SEQ ID NO: 1448601 - RNA, 19 nt, Artificial Sequence
  Description of Artificial Sequence: Synthetic oligonucleotide
  Antisense strand to SEQ ID NO: 1448600
augcuuccuucuaacacag

SEQ ID NO: 1448602 - RNA, 19 nt, Artificial Sequence
  Description of Artificial Sequence: Synthetic oligonucleotide
  Sense strand starting at position 2687 of SEQ ID NO: 1243883
guuagaaggaagcaucuuu

SEQ ID NO: 1448603 - RNA, 19 nt, Artificial Sequence
  Description of Artificial Sequence: Synthetic oligonucleotide
  Antisense strand to SEQ ID NO: 1448602
aaagaugcuuccuucuaac

SEQ ID NO: 1448604 - RNA, 19 nt, Artificial Sequence
  Description of Artificial Sequence: Synthetic oligonucleotide
  Sense strand starting at position 2694 of SEQ ID NO: 1243883
ggaagcaucuuucuagaaa

SEQ ID NO: 1448605 - RNA, 19 nt, Artificial Sequence
  Description of Artificial Sequence: Synthetic oligonucleotide
  Antisense strand to SEQ ID NO: 1448604
uuucuagaaagaugcuucc

SEQ ID NO: 1448606 - RNA, 19 nt, Artificial Sequence
  Description of Artificial Sequence: Synthetic oligonucleotide
  Sense strand starting at position 3025 of SEQ ID NO: 1243883
uuuaacuagucauucgaca

SEQ ID NO: 1448607 - RNA, 19 nt, Artificial Sequence
  Description of Artificial Sequence: Synthetic oligonucleotide
  Antisense strand to SEQ ID NO: 1448606
ugucgaaugacuaguuaaa

SEQ ID NO: 1448608 - RNA, 19 nt, Artificial Sequence
  Description of Artificial Sequence: Synthetic oligonucleotide
  Sense strand starting at position 3176 of SEQ ID NO: 1243883
aaguaacaguuaccgaaau

SEQ ID NO: 1448609 - RNA, 19 nt, Artificial Sequence
  Description of Artificial Sequence: Synthetic oligonucleotide
  Antisense strand to SEQ ID NO: 1448608
auuucgguaacuguuacuu

SEQ ID NO: 1448610 - RNA, 19 nt, Artificial Sequence
  Description of Artificial Sequence: Synthetic oligonucleotide
  Sense strand starting at position 3209 of SEQ ID NO: 1243883
uaacaaucagugcagugaa

SEQ ID NO: 1448611 - RNA, 19 nt, Artificial Sequence
  Description of Artificial Sequence: Synthetic oligonucleotide
  Antisense strand to SEQ ID NO: 1448610
uucacugcacugauuguua

SEQ ID NO: 1448612 - RNA, 19 nt, Artificial Sequence
  Description of Artificial Sequence: Synthetic oligonucleotide
  Sense strand starting at position 3221 of SEQ ID NO: 1243883
cagugaagacaauguaaua

SEQ ID NO: 1448613 - RNA, 19 nt, Artificial Sequence
  Description of Artificial Sequence: Synthetic oligonucleotide
  Antisense strand to SEQ ID NO: 1448612
uauuacauugucuucacug

SEQ ID NO: 1448614 - RNA, 19 nt, Artificial Sequence
  Description of Artificial Sequence: Synthetic oligonucleotide
  Sense strand starting at position 3305 of SEQ ID NO: 1243883
ugaguuuagaucugaacga

SEQ ID NO: 1448615 - RNA, 19 nt, Artificial Sequence
  Description of Artificial Sequence: Synthetic oligonucleotide
  Antisense strand to SEQ ID NO: 1448614
ucguucagaucuaaacuca

SEQ ID NO: 1448616 - RNA, 19 nt, Artificial Sequence
  Description of Artificial Sequence: Synthetic oligonucleotide
  Sense strand starting at position 3309 of SEQ ID NO: 1243883
uuuagaucugaacgaugau

SEQ ID NO: 1448617 - RNA, 19 nt, Artificial Sequence
  Description of Artificial Sequence: Synthetic oligonucleotide
  Antisense strand to SEQ ID NO: 1448616
aucaucguucagaucuaaa

SEQ ID NO: 1448618 - RNA, 19 nt, Artificial Sequence
  Description of Artificial Sequence: Synthetic oligonucleotide
  Sense strand starting at position 3330 of SEQ ID NO: 1243883
ggagcuaccuacucaauaa

SEQ ID NO: 1448619 - RNA, 19 nt, Artificial Sequence
  Description of Artificial Sequence: Synthetic oligonucleotide
  Antisense strand to SEQ ID NO: 1448618
uuauugaguagguagcucc

SEQ ID NO: 1448620 - RNA, 19 nt, Artificial Sequence
  Description of Artificial Sequence: Synthetic oligonucleotide
  Sense strand starting at position 3472 of SEQ ID NO: 1243883
guaacaaaggccugguaau

SEQ ID NO: 1448621 - RNA, 19 nt, Artificial Sequence
  Description of Artificial Sequence: Synthetic oligonucleotide
  Antisense strand to SEQ ID NO: 1448620
auuaccaggccuuuguuac

SEQ ID NO: 1448622 - RNA, 19 nt, Artificial Sequence
  Description of Artificial Sequence: Synthetic oligonucleotide
  Sense strand starting at position 3545 of SEQ ID NO: 1243883
aagcuauuggaauguuuga

SEQ ID NO: 1448623 - RNA, 19 nt, Artificial Sequence
  Description of Artificial Sequence: Synthetic oligonucleotide
  Antisense strand to SEQ ID NO: 1448622
ucaaacauuccaauagcuu

SEQ ID NO: 1448624 - RNA, 19 nt, Artificial Sequence
  Description of Artificial Sequence: Synthetic oligonucleotide
  Sense strand starting at position 3572 of SEQ ID NO: 1243883
agugaugugaucugacuca

SEQ ID NO: 1448625 - RNA, 19 nt, Artificial Sequence
  Description of Artificial Sequence: Synthetic oligonucleotide
  Antisense strand to SEQ ID NO: 1448624
ugagucagaucacaucacu

SEQ ID NO: 1448626 - RNA, 19 nt, Artificial Sequence
  Description of Artificial Sequence: Synthetic oligonucleotide
  Sense strand starting at position 3605 of SEQ ID NO: 1243883
uauugauuacuuuguggag

SEQ ID NO: 1448627 - RNA, 19 nt, Artificial Sequence
  Description of Artificial Sequence: Synthetic oligonucleotide
  Antisense strand to SEQ ID NO: 1448626
cuccacaaaguaaucaaua

SEQ ID NO: 1448628 - RNA, 19 nt, Artificial Sequence
  Description of Artificial Sequence: Synthetic oligonucleotide
  Sense strand starting at position 3606 of SEQ ID NO: 1243883
auugauuacuuuguggaga

SEQ ID NO: 1448629 - RNA, 19 nt, Artificial Sequence
  Description of Artificial Sequence: Synthetic oligonucleotide
  Antisense strand to SEQ ID NO: 1448628
ucuccacaaaguaaucaau

SEQ ID NO: 1448630 - RNA, 19 nt, Artificial Sequence
  Description of Artificial Sequence: Synthetic oligonucleotide
  Sense strand starting at position 3678 of SEQ ID NO: 1243883
aguaguccacaugagugau

SEQ ID NO: 1448631 - RNA, 19 nt, Artificial Sequence
  Description of Artificial Sequence: Synthetic oligonucleotide
  Antisense strand to SEQ ID NO: 1448630
aucacucauguggacuacu

SEQ ID NO: 1448632 - RNA, 19 nt, Artificial Sequence
  Description of Artificial Sequence: Synthetic oligonucleotide
  Sense strand starting at position 3681 of SEQ ID NO: 1243883
aguccacaugagugaugau

SEQ ID NO: 1448633 - RNA, 19 nt, Artificial Sequence
  Description of Artificial Sequence: Synthetic oligonucleotide
  Antisense strand to SEQ ID NO: 1448632
aucaucacucauguggacu

SEQ ID NO: 1448634 - RNA, 19 nt, Artificial Sequence
  Description of Artificial Sequence: Synthetic oligonucleotide
  Sense strand starting at position 3690 of SEQ ID NO: 1243883
gagugaugauggucaccuu

SEQ ID NO: 1448635 - RNA, 19 nt, Artificial Sequence
  Description of Artificial Sequence: Synthetic oligonucleotide
  Antisense strand to SEQ ID NO: 1448634
aaggugaccaucaucacuc

SEQ ID NO: 1448636 - RNA, 19 nt, Artificial Sequence
  Description of Artificial Sequence: Synthetic oligonucleotide
  Sense strand starting at position 3701 of SEQ ID NO: 1243883
gucaccuugagugaguaau

SEQ ID NO: 1448637 - RNA, 19 nt, Artificial Sequence
  Description of Artificial Sequence: Synthetic oligonucleotide
  Antisense strand to SEQ ID NO: 1448636
auuacucacucaaggugac

SEQ ID NO: 1448638 - RNA, 19 nt, Artificial Sequence
  Description of Artificial Sequence: Synthetic oligonucleotide
  Sense strand starting at position 3707 of SEQ ID NO: 1243883
uugagugaguaauugauua

SEQ ID NO: 1448639 - RNA, 19 nt, Artificial Sequence
  Description of Artificial Sequence: Synthetic oligonucleotide
  Antisense strand to SEQ ID NO: 1448638
uaaucaauuacucacucaa

SEQ ID NO: 1448640 - RNA, 19 nt, Artificial Sequence
  Description of Artificial Sequence: Synthetic oligonucleotide
  Sense strand starting at position 3711 of SEQ ID NO: 1243883
gugaguaauugauuaacuu

SEQ ID NO: 1448641 - RNA, 19 nt, Artificial Sequence
  Description of Artificial Sequence: Synthetic oligonucleotide
  Antisense strand to SEQ ID NO: 1448640
aaguuaaucaauuacucac

SEQ ID NO: 1448642 - RNA, 19 nt, Artificial Sequence
  Description of Artificial Sequence: Synthetic oligonucleotide
  Sense strand starting at position 3819 of SEQ ID NO: 1243883
ucaggucuccaugauucua

SEQ ID NO: 1448643 - RNA, 19 nt, Artificial Sequence
  Description of Artificial Sequence: Synthetic oligonucleotide
  Antisense strand to SEQ ID NO: 1448642
uagaaucauggagaccuga

SEQ ID NO: 1448644 - RNA, 19 nt, Artificial Sequence
  Description of Artificial Sequence: Synthetic oligonucleotide
  Sense strand starting at position 3821 of SEQ ID NO: 1243883
aggucuccaugauucuaca

SEQ ID NO: 1448645 - RNA, 19 nt, Artificial Sequence
  Description of Artificial Sequence: Synthetic oligonucleotide
  Antisense strand to SEQ ID NO: 1448644
uguagaaucauggagaccu

SEQ ID NO: 1448646 - RNA, 19 nt, Artificial Sequence
  Description of Artificial Sequence: Synthetic oligonucleotide
  Sense strand starting at position 3920 of SEQ ID NO: 1243883
gcucuucuaggaugagauu

SEQ ID NO: 1448647 - RNA, 19 nt, Artificial Sequence
  Description of Artificial Sequence: Synthetic oligonucleotide
  Antisense strand to SEQ ID NO: 1448646
aaucucauccuagaagagc

SEQ ID NO: 1448648 - RNA, 19 nt, Artificial Sequence
  Description of Artificial Sequence: Synthetic oligonucleotide
  Sense strand starting at position 221 of SEQ ID NO: 1243884
cccuguagauaacuugaaa

SEQ ID NO: 1448649 - RNA, 19 nt, Artificial Sequence
  Description of Artificial Sequence: Synthetic oligonucleotide
  Antisense strand to SEQ ID NO: 1448648
uuucaaguuaucuacaggg

SEQ ID NO: 1448650 - RNA, 19 nt, Artificial Sequence
  Description of Artificial Sequence: Synthetic oligonucleotide
  Sense strand starting at position 531 of SEQ ID NO: 1243884
cucaacauccauuggauga

SEQ ID NO: 1448651 - RNA, 19 nt, Artificial Sequence
  Description of Artificial Sequence: Synthetic oligonucleotide
  Antisense strand to SEQ ID NO: 1448650
ucauccaauggauguugag

SEQ ID NO: 1448652 - RNA, 19 nt, Artificial Sequence
  Description of Artificial Sequence: Synthetic oligonucleotide
  Sense strand starting at position 535 of SEQ ID NO: 1243884
acauccauuggaugaagua

SEQ ID NO: 1448653 - RNA, 19 nt, Artificial Sequence
  Description of Artificial Sequence: Synthetic oligonucleotide
  Antisense strand to SEQ ID NO: 1448652
uacuucauccaauggaugu

SEQ ID NO: 1448654 - RNA, 19 nt, Artificial Sequence
  Description of Artificial Sequence: Synthetic oligonucleotide
  Sense strand starting at position 642 of SEQ ID NO: 1243884
aucuaauucgaauauagcu

SEQ ID NO: 1448655 - RNA, 19 nt, Artificial Sequence
  Description of Artificial Sequence: Synthetic oligonucleotide
  Antisense strand to SEQ ID NO: 1448654
agcuauauucgaauuagau

SEQ ID NO: 1448656 - RNA, 19 nt, Artificial Sequence
  Description of Artificial Sequence: Synthetic oligonucleotide
  Sense strand starting at position 649 of SEQ ID NO: 1243884
ucgaauauagcugggugaa

SEQ ID NO: 1448657 - RNA, 19 nt, Artificial Sequence
  Description of Artificial Sequence: Synthetic oligonucleotide
  Antisense strand to SEQ ID NO: 1448656
uucacccagcuauauucga

SEQ ID NO: 1448658 - RNA, 19 nt, Artificial Sequence
  Description of Artificial Sequence: Synthetic oligonucleotide
  Sense strand starting at position 651 of SEQ ID NO: 1243884
gaauauagcugggugaaua

SEQ ID NO: 1448659 - RNA, 19 nt, Artificial Sequence
  Description of Artificial Sequence: Synthetic oligonucleotide
  Antisense strand to SEQ ID NO: 1448658
uauucacccagcuauauuc

SEQ ID NO: 1448660 - RNA, 19 nt, Artificial Sequence
  Description of Artificial Sequence: Synthetic oligonucleotide
  Sense strand starting at position 652 of SEQ ID NO: 1243884
aauauagcugggugaauag

SEQ ID NO: 1448661 - RNA, 19 nt, Artificial Sequence
  Description of Artificial Sequence: Synthetic oligonucleotide
  Antisense strand to SEQ ID NO: 1448660
cuauucacccagcuauauu

SEQ ID NO: 1448662 - RNA, 19 nt, Artificial Sequence
  Description of Artificial Sequence: Synthetic oligonucleotide
  Sense strand starting at position 664 of SEQ ID NO: 1243884
ugaauaggauaucaagaaa

SEQ ID NO: 1448663 - RNA, 19 nt, Artificial Sequence
  Description of Artificial Sequence: Synthetic oligonucleotide
  Antisense strand to SEQ ID NO: 1448662
uuucuugauauccuauuca

SEQ ID NO: 1448664 - RNA, 19 nt, Artificial Sequence
  Description of Artificial Sequence: Synthetic oligonucleotide
  Sense strand starting at position 736 of SEQ ID NO: 1243884
cagacuaauguuugaguau

SEQ ID NO: 1448665 - RNA, 19 nt, Artificial Sequence
  Description of Artificial Sequence: Synthetic oligonucleotide
  Antisense strand to SEQ ID NO: 1448664
auacucaaacauuagucug

SEQ ID NO: 1448666 - RNA, 19 nt, Artificial Sequence
  Description of Artificial Sequence: Synthetic oligonucleotide
  Sense strand starting at position 862 of SEQ ID NO: 1243884
ugguuaauagcacagagua

SEQ ID NO: 1448667 - RNA, 19 nt, Artificial Sequence
  Description of Artificial Sequence: Synthetic oligonucleotide
  Antisense strand to SEQ ID NO: 1448666
uacucugugcuauuaacca

SEQ ID NO: 1448668 - RNA, 19 nt, Artificial Sequence
  Description of Artificial Sequence: Synthetic oligonucleotide
  Sense strand starting at position 887 of SEQ ID NO: 1243884
uugagugaauucuugaaga

SEQ ID NO: 1448669 - RNA, 19 nt, Artificial Sequence
  Description of Artificial Sequence: Synthetic oligonucleotide
  Antisense strand to SEQ ID NO: 1448668
ucuucaagaauucacucaa

SEQ ID NO: 1448670 - RNA, 19 nt, Artificial Sequence
  Description of Artificial Sequence: Synthetic oligonucleotide
  Sense strand starting at position 895 of SEQ ID NO: 1243884
auucuugaagacugaguua

SEQ ID NO: 1448671 - RNA, 19 nt, Artificial Sequence
  Description of Artificial Sequence: Synthetic oligonucleotide
  Antisense strand to SEQ ID NO: 1448670
uaacucagucuucaagaau

SEQ ID NO: 1448672 - RNA, 19 nt, Artificial Sequence
  Description of Artificial Sequence: Synthetic oligonucleotide
  Sense strand starting at position 906 of SEQ ID NO: 1243884
cugaguuaggauggaugua

SEQ ID NO: 1448673 - RNA, 19 nt, Artificial Sequence
  Description of Artificial Sequence: Synthetic oligonucleotide
  Antisense strand to SEQ ID NO: 1448672
uacauccauccuaacucag

SEQ ID NO: 1448674 - RNA, 19 nt, Artificial Sequence
  Description of Artificial Sequence: Synthetic oligonucleotide
  Sense strand starting at position 918 of SEQ ID NO: 1243884
ggauguacucuuuaccaua

SEQ ID NO: 1448675 - RNA, 19 nt, Artificial Sequence
  Description of Artificial Sequence: Synthetic oligonucleotide
  Antisense strand to SEQ ID NO: 1448674
uaugguaaagaguacaucc

SEQ ID NO: 1448676 - RNA, 19 nt, Artificial Sequence
  Description of Artificial Sequence: Synthetic oligonucleotide
  Sense strand starting at position 1045 of SEQ ID NO: 1243884
ggcgacuugcaccaagaaa

SEQ ID NO: 1448677 - RNA, 19 nt, Artificial Sequence
  Description of Artificial Sequence: Synthetic oligonucleotide
  Antisense strand to SEQ ID NO: 1448676
uuucuuggugcaagucgcc

SEQ ID NO: 1448678 - RNA, 19 nt, Artificial Sequence
  Description of Artificial Sequence: Synthetic oligonucleotide
  Sense strand starting at position 1127 of SEQ ID NO: 1243884
uuuacaucccugcaaggau

SEQ ID NO: 1448679 - RNA, 19 nt, Artificial Sequence
  Description of Artificial Sequence: Synthetic oligonucleotide
  Antisense strand to SEQ ID NO: 1448678
auccuugcagggauguaaa

SEQ ID NO: 1448680 - RNA, 19 nt, Artificial Sequence
  Description of Artificial Sequence: Synthetic oligonucleotide
  Sense strand starting at position 1249 of SEQ ID NO: 1243884
ugucaauaaguguauguca

SEQ ID NO: 1448681 - RNA, 19 nt, Artificial Sequence
  Description of Artificial Sequence: Synthetic oligonucleotide
  Antisense strand to SEQ ID NO: 1448680
ugacauacacuuauugaca

SEQ ID NO: 1448682 - RNA, 19 nt, Artificial Sequence
  Description of Artificial Sequence: Synthetic oligonucleotide
  Sense strand starting at position 1251 of SEQ ID NO: 1243884
ucaauaaguguaugucaaa

SEQ ID NO: 1448683 - RNA, 19 nt, Artificial Sequence
  Description of Artificial Sequence: Synthetic oligonucleotide
  Antisense strand to SEQ ID NO: 1448682
uuugacauacacuuauuga

SEQ ID NO: 1448684 - RNA, 19 nt, Artificial Sequence
  Description of Artificial Sequence: Synthetic oligonucleotide
  Sense strand starting at position 1252 of SEQ ID NO: 1243884
caauaaguguaugucaaag

SEQ ID NO: 1448685 - RNA, 19 nt, Artificial Sequence
  Description of Artificial Sequence: Synthetic oligonucleotide
  Antisense strand to SEQ ID NO: 1448684
cuuugacauacacuuauug

SEQ ID NO: 1448686 - RNA, 19 nt, Artificial Sequence
  Description of Artificial Sequence: Synthetic oligonucleotide
  Sense strand starting at position 1296 of SEQ ID NO: 1243884
aggugaugacacgaucgua

SEQ ID NO: 1448687 - RNA, 19 nt, Artificial Sequence
  Description of Artificial Sequence: Synthetic oligonucleotide
  Antisense strand to SEQ ID NO: 1448686
uacgaucgugucaucaccu

SEQ ID NO: 1448688 - RNA, 19 nt, Artificial Sequence
  Description of Artificial Sequence: Synthetic oligonucleotide
  Sense strand starting at position 1337 of SEQ ID NO: 1243884
ccagaaagucuaugugaaa

SEQ ID NO: 1448689 - RNA, 19 nt, Artificial Sequence
  Description of Artificial Sequence: Synthetic oligonucleotide
  Antisense strand to SEQ ID NO: 1448688
uuucacauagacuuucugg

SEQ ID NO: 1448690 - RNA, 19 nt, Artificial Sequence
  Description of Artificial Sequence: Synthetic oligonucleotide
  Sense strand starting at position 1338 of SEQ ID NO: 1243884
cagaaagucuaugugaaau

SEQ ID NO: 1448691 - RNA, 19 nt, Artificial Sequence
  Description of Artificial Sequence: Synthetic oligonucleotide
  Antisense strand to SEQ ID NO: 1448690
auuucacauagacuuucug

SEQ ID NO: 1448692 - RNA, 19 nt, Artificial Sequence
  Description of Artificial Sequence: Synthetic oligonucleotide
  Sense strand starting at position 1373 of SEQ ID NO: 1243884
agcuuaucaagaggaguaa

SEQ ID NO: 1448693 - RNA, 19 nt, Artificial Sequence
  Description of Artificial Sequence: Synthetic oligonucleotide
  Antisense strand to SEQ ID NO: 1448692
uuacuccucuugauaagcu

SEQ ID NO: 1448694 - RNA, 19 nt, Artificial Sequence
  Description of Artificial Sequence: Synthetic oligonucleotide
  Sense strand starting at position 1519 of SEQ ID NO: 1243884
uuagcagucccucagaaau

SEQ ID NO: 1448695 - RNA, 19 nt, Artificial Sequence
  Description of Artificial Sequence: Synthetic oligonucleotide
  Antisense strand to SEQ ID NO: 1448694
auuucugagggacugcuaa

SEQ ID NO: 1448696 - RNA, 19 nt, Artificial Sequence
  Description of Artificial Sequence: Synthetic oligonucleotide
  Sense strand starting at position 1762 of SEQ ID NO: 1243884
cguguuauugcagcccaca

SEQ ID NO: 1448697 - RNA, 19 nt, Artificial Sequence
  Description of Artificial Sequence: Synthetic oligonucleotide
  Antisense strand to SEQ ID NO: 1448696
ugugggcugcaauaacacg

SEQ ID NO: 1448698 - RNA, 19 nt, Artificial Sequence
  Description of Artificial Sequence: Synthetic oligonucleotide
  Sense strand starting at position 1782 of SEQ ID NO: 1243884
acaucuugccagugggaac

SEQ ID NO: 1448699 - RNA, 19 nt, Artificial Sequence
  Description of Artificial Sequence: Synthetic oligonucleotide
  Antisense strand to SEQ ID NO: 1448698
guucccacuggcaagaugu

SEQ ID NO: 1448700 - RNA, 19 nt, Artificial Sequence
  Description of Artificial Sequence: Synthetic oligonucleotide
  Sense strand starting at position 1794 of SEQ ID NO: 1243884
ugggaacaauuccuguaaa

SEQ ID NO: 1448701 - RNA, 19 nt, Artificial Sequence
  Description of Artificial Sequence: Synthetic oligonucleotide
  Antisense strand to SEQ ID NO: 1448700
uuuacaggaauuguuccca

SEQ ID NO: 1448702 - RNA, 19 nt, Artificial Sequence
  Description of Artificial Sequence: Synthetic oligonucleotide
  Sense strand starting at position 1807 of SEQ ID NO: 1243884
uguaaaguuuaacugggua

SEQ ID NO: 1448703 - RNA, 19 nt, Artificial Sequence
  Description of Artificial Sequence: Synthetic oligonucleotide
  Antisense strand to SEQ ID NO: 1448702
uacccaguuaaacuuuaca

SEQ ID NO: 1448704 - RNA, 19 nt, Artificial Sequence
  Description of Artificial Sequence: Synthetic oligonucleotide
  Sense strand starting at position 2040 of SEQ ID NO: 1243884
cacagaucugugcaaguuc

SEQ ID NO: 1448705 - RNA, 19 nt, Artificial Sequence
  Description of Artificial Sequence: Synthetic oligonucleotide
  Antisense strand to SEQ ID NO: 1448704
gaacuugcacagaucugug

SEQ ID NO: 1448706 - RNA, 19 nt, Artificial Sequence
  Description of Artificial Sequence: Synthetic oligonucleotide
  Sense strand starting at position 2146 of SEQ ID NO: 1243884
cugggaauaucaucugcca

SEQ ID NO: 1448707 - RNA, 19 nt, Artificial Sequence
  Description of Artificial Sequence: Synthetic oligonucleotide
  Antisense strand to SEQ ID NO: 1448706
uggcagaugauauucccag

SEQ ID NO: 1448708 - RNA, 19 nt, Artificial Sequence
  Description of Artificial Sequence: Synthetic oligonucleotide
  Sense strand starting at position 2205 of SEQ ID NO: 1243884
cgggaaucagauugccuaa

SEQ ID NO: 1448709 - RNA, 19 nt, Artificial Sequence
  Description of Artificial Sequence: Synthetic oligonucleotide
  Antisense strand to SEQ ID NO: 1448708
uuaggcaaucugauucccg

SEQ ID NO: 1448710 - RNA, 19 nt, Artificial Sequence
  Description of Artificial Sequence: Synthetic oligonucleotide
  Sense strand starting at position 2207 of SEQ ID NO: 1243884
ggaaucagauugccuaauu

SEQ ID NO: 1448711 - RNA, 19 nt, Artificial Sequence
  Description of Artificial Sequence: Synthetic oligonucleotide
  Antisense strand to SEQ ID NO: 1448710
aauuaggcaaucugauucc

SEQ ID NO: 1448712 - RNA, 19 nt, Artificial Sequence
  Description of Artificial Sequence: Synthetic oligonucleotide
  Sense strand starting at position 2294 of SEQ ID NO: 1243884
acugauggugucuaugaca

SEQ ID NO: 1448713 - RNA, 19 nt, Artificial Sequence
  Description of Artificial Sequence: Synthetic oligonucleotide
  Antisense strand to SEQ ID NO: 1448712
ugucauagacaccaucagu

SEQ ID NO: 1448714 - RNA, 19 nt, Artificial Sequence
  Description of Artificial Sequence: Synthetic oligonucleotide
  Sense strand starting at position 2438 of SEQ ID NO: 1243884
ugaccuagguuauccuuaa

SEQ ID NO: 1448715 - RNA, 19 nt, Artificial Sequence
  Description of Artificial Sequence: Synthetic oligonucleotide
  Antisense strand to SEQ ID NO: 1448714
uuaaggauaaccuagguca

SEQ ID NO: 1448716 - RNA, 19 nt, Artificial Sequence
  Description of Artificial Sequence: Synthetic oligonucleotide
  Sense strand starting at position 2439 of SEQ ID NO: 1243884
gaccuagguuauccuuaag

SEQ ID NO: 1448717 - RNA, 19 nt, Artificial Sequence
  Description of Artificial Sequence: Synthetic oligonucleotide
  Antisense strand to SEQ ID NO: 1448716
cuuaaggauaaccuagguc

SEQ ID NO: 1448718 - RNA, 19 nt, Artificial Sequence
  Description of Artificial Sequence: Synthetic oligonucleotide
  Sense strand starting at position 2442 of SEQ ID NO: 1243884
cuagguuauccuuaagauc

SEQ ID NO: 1448719 - RNA, 19 nt, Artificial Sequence
  Description of Artificial Sequence: Synthetic oligonucleotide
  Antisense strand to SEQ ID NO: 1448718
gaucuuaaggauaaccuag

SEQ ID NO: 1448720 - RNA, 19 nt, Artificial Sequence
  Description of Artificial Sequence: Synthetic oligonucleotide
  Sense strand starting at position 2560 of SEQ ID NO: 1243884
ggaggcaauucuuugauga

SEQ ID NO: 1448721 - RNA, 19 nt, Artificial Sequence
  Description of Artificial Sequence: Synthetic oligonucleotide
  Antisense strand to SEQ ID NO: 1448720
ucaucaaagaauugccucc

SEQ ID NO: 1448722 - RNA, 19 nt, Artificial Sequence
  Description of Artificial Sequence: Synthetic oligonucleotide
  Sense strand starting at position 2561 of SEQ ID NO: 1243884
gaggcaauucuuugaugau

SEQ ID NO: 1448723 - RNA, 19 nt, Artificial Sequence
  Description of Artificial Sequence: Synthetic oligonucleotide
  Antisense strand to SEQ ID NO: 1448722
aucaucaaagaauugccuc

SEQ ID NO: 1448724 - RNA, 19 nt, Artificial Sequence
  Description of Artificial Sequence: Synthetic oligonucleotide
  Sense strand starting at position 3894 of SEQ ID NO: 1243884
uucucagcugcgcuuuaau

SEQ ID NO: 1448725 - RNA, 19 nt, Artificial Sequence
  Description of Artificial Sequence: Synthetic oligonucleotide
  Antisense strand to SEQ ID NO: 1448724
auuaaagcgcagcugagaa

SEQ ID NO: 1448726 - RNA, 19 nt, Artificial Sequence
  Description of Artificial Sequence: Synthetic oligonucleotide
  Sense strand starting at position 3971 of SEQ ID NO: 1243884
aaucaauagguucgaaaga

SEQ ID NO: 1448727 - RNA, 19 nt, Artificial Sequence
  Description of Artificial Sequence: Synthetic oligonucleotide
  Antisense strand to SEQ ID NO: 1448726
ucuuucgaaccuauugauu

SEQ ID NO: 1448728 - RNA, 19 nt, Artificial Sequence
  Description of Artificial Sequence: Synthetic oligonucleotide
  Sense strand starting at position 109 of SEQ ID NO: 1243885
uggagugaguucccucuua

SEQ ID NO: 1448729 - RNA, 19 nt, Artificial Sequence
  Description of Artificial Sequence: Synthetic oligonucleotide
  Antisense strand to SEQ ID NO: 1448728
uaagagggaacucacucca

SEQ ID NO: 1448730 - RNA, 19 nt, Artificial Sequence
  Description of Artificial Sequence: Synthetic oligonucleotide
  Sense strand starting at position 208 of SEQ ID NO: 1243885
cguguuauugcagcccaca

SEQ ID NO: 1448731 - RNA, 19 nt, Artificial Sequence
  Description of Artificial Sequence: Synthetic oligonucleotide
  Antisense strand to SEQ ID NO: 1448730
ugugggcugcaauaacacg

SEQ ID NO: 1448732 - RNA, 19 nt, Artificial Sequence
  Description of Artificial Sequence: Synthetic oligonucleotide
  Sense strand starting at position 228 of SEQ ID NO: 1243885
acaucuugccagugggaac

SEQ ID NO: 1448733 - RNA, 19 nt, Artificial Sequence
  Description of Artificial Sequence: Synthetic oligonucleotide
  Antisense strand to SEQ ID NO: 1448732
guucccacuggcaagaugu

SEQ ID NO: 1448734 - RNA, 19 nt, Artificial Sequence
  Description of Artificial Sequence: Synthetic oligonucleotide
  Sense strand starting at position 240 of SEQ ID NO: 1243885
ugggaacaauuccuguaaa

SEQ ID NO: 1448735 - RNA, 19 nt, Artificial Sequence
  Description of Artificial Sequence: Synthetic oligonucleotide
  Antisense strand to SEQ ID NO: 1448734
uuuacaggaauuguuccca

SEQ ID NO: 1448736 - RNA, 19 nt, Artificial Sequence
  Description of Artificial Sequence: Synthetic oligonucleotide
  Sense strand starting at position 253 of SEQ ID NO: 1243885
uguaaaguuuaacugggua

SEQ ID NO: 1448737 - RNA, 19 nt, Artificial Sequence
  Description of Artificial Sequence: Synthetic oligonucleotide
  Antisense strand to SEQ ID NO: 1448736
uacccaguuaaacuuuaca

SEQ ID NO: 1448738 - RNA, 19 nt, Artificial Sequence
  Description of Artificial Sequence: Synthetic oligonucleotide
  Sense strand starting at position 486 of SEQ ID NO: 1243885
cacagaucugugcaaguuc

SEQ ID NO: 1448739 - RNA, 19 nt, Artificial Sequence
  Description of Artificial Sequence: Synthetic oligonucleotide
  Antisense strand to SEQ ID NO: 1448738
gaacuugcacagaucugug

SEQ ID NO: 1448740 - RNA, 19 nt, Artificial Sequence
  Description of Artificial Sequence: Synthetic oligonucleotide
  Sense strand starting at position 592 of SEQ ID NO: 1243885
cugggaauaucaucugcca

SEQ ID NO: 1448741 - RNA, 19 nt, Artificial Sequence
  Description of Artificial Sequence: Synthetic oligonucleotide
  Antisense strand to SEQ ID NO: 1448740
uggcagaugauauucccag

SEQ ID NO: 1448742 - RNA, 19 nt, Artificial Sequence
  Description of Artificial Sequence: Synthetic oligonucleotide
  Sense strand starting at position 651 of SEQ ID NO: 1243885
cgggaaucagauugccuaa

SEQ ID NO: 1448743 - RNA, 19 nt, Artificial Sequence
  Description of Artificial Sequence: Synthetic oligonucleotide
  Antisense strand to SEQ ID NO: 1448742
uuaggcaaucugauucccg

SEQ ID NO: 1448744 - RNA, 19 nt, Artificial Sequence
  Description of Artificial Sequence: Synthetic oligonucleotide
  Sense strand starting at position 653 of SEQ ID NO: 1243885
ggaaucagauugccuaauu

SEQ ID NO: 1448745 - RNA, 19 nt, Artificial Sequence
  Description of Artificial Sequence: Synthetic oligonucleotide
  Antisense strand to SEQ ID NO: 1448744
aauuaggcaaucugauucc

SEQ ID NO: 1448746 - RNA, 19 nt, Artificial Sequence
  Description of Artificial Sequence: Synthetic oligonucleotide
  Sense strand starting at position 740 of SEQ ID NO: 1243885
acugauggugucuaugaca

SEQ ID NO: 1448747 - RNA, 19 nt, Artificial Sequence
  Description of Artificial Sequence: Synthetic oligonucleotide
  Antisense strand to SEQ ID NO: 1448746
ugucauagacaccaucagu

SEQ ID NO: 1448748 - RNA, 19 nt, Artificial Sequence
  Description of Artificial Sequence: Synthetic oligonucleotide
  Sense strand starting at position 884 of SEQ ID NO: 1243885
ugaccuagguuauccuuaa

SEQ ID NO: 1448749 - RNA, 19 nt, Artificial Sequence
  Description of Artificial Sequence: Synthetic oligonucleotide
  Antisense strand to SEQ ID NO: 1448748
uuaaggauaaccuagguca

SEQ ID NO: 1448750 - RNA, 19 nt, Artificial Sequence
  Description of Artificial Sequence: Synthetic oligonucleotide
  Sense strand starting at position 885 of SEQ ID NO: 1243885
gaccuagguuauccuuaag

SEQ ID NO: 1448751 - RNA, 19 nt, Artificial Sequence
  Description of Artificial Sequence: Synthetic oligonucleotide
  Antisense strand to SEQ ID NO: 1448750
cuuaaggauaaccuagguc

SEQ ID NO: 1448752 - RNA, 19 nt, Artificial Sequence
  Description of Artificial Sequence: Synthetic oligonucleotide
  Sense strand starting at position 888 of SEQ ID NO: 1243885
cuagguuauccuuaagauc

SEQ ID NO: 1448753 - RNA, 19 nt, Artificial Sequence
  Description of Artificial Sequence: Synthetic oligonucleotide
  Antisense strand to SEQ ID NO: 1448752
gaucuuaaggauaaccuag

SEQ ID NO: 1448754 - RNA, 19 nt, Artificial Sequence
  Description of Artificial Sequence: Synthetic oligonucleotide
  Sense strand starting at position 1006 of SEQ ID NO: 1243885
ggaggcaauucuuugauga

SEQ ID NO: 1448755 - RNA, 19 nt, Artificial Sequence
  Description of Artificial Sequence: Synthetic oligonucleotide
  Antisense strand to SEQ ID NO: 1448754
ucaucaaagaauugccucc

SEQ ID NO: 1448756 - RNA, 19 nt, Artificial Sequence
  Description of Artificial Sequence: Synthetic oligonucleotide
  Sense strand starting at position 1007 of SEQ ID NO: 1243885
gaggcaauucuuugaugau

SEQ ID NO: 1448757 - RNA, 19 nt, Artificial Sequence
  Description of Artificial Sequence: Synthetic oligonucleotide
  Antisense strand to SEQ ID NO: 1448756
aucaucaaagaauugccuc

SEQ ID NO: 1448758 - RNA, 19 nt, Artificial Sequence
  Description of Artificial Sequence: Synthetic oligonucleotide
  Sense strand starting at position 2340 of SEQ ID NO: 1243885
uucucagcugcgcuuuaau

SEQ ID NO: 1448759 - RNA, 19 nt, Artificial Sequence
  Description of Artificial Sequence: Synthetic oligonucleotide
  Antisense strand to SEQ ID NO: 1448758
auuaaagcgcagcugagaa

SEQ ID NO: 1448760 - RNA, 19 nt, Artificial Sequence
  Description of Artificial Sequence: Synthetic oligonucleotide
  Sense strand starting at position 2417 of SEQ ID NO: 1243885
aaucaauagguucgaaaga

SEQ ID NO: 1448761 - RNA, 19 nt, Artificial Sequence
  Description of Artificial Sequence: Synthetic oligonucleotide
  Antisense strand to SEQ ID NO: 1448760
ucuuucgaaccuauugauu

SEQ ID NO: 1448762 - RNA, 19 nt, Artificial Sequence
  Description of Artificial Sequence: Synthetic oligonucleotide
  Sense strand starting at position 2430 of SEQ ID NO: 1243885
gaaagaaucuucguucgga

SEQ ID NO: 1448763 - RNA, 19 nt, Artificial Sequence
  Description of Artificial Sequence: Synthetic oligonucleotide
  Antisense strand to SEQ ID NO: 1448762
uccgaacgaagauucuuuc

SEQ ID NO: 1448764 - RNA, 19 nt, Artificial Sequence
  Description of Artificial Sequence: Synthetic oligonucleotide
  Sense strand starting at position 2431 of SEQ ID NO: 1243885
aaagaaucuucguucggac

SEQ ID NO: 1448765 - RNA, 19 nt, Artificial Sequence
  Description of Artificial Sequence: Synthetic oligonucleotide
  Antisense strand to SEQ ID NO: 1448764
guccgaacgaagauucuuu

SEQ ID NO: 1448766 - RNA, 19 nt, Artificial Sequence
  Description of Artificial Sequence: Synthetic oligonucleotide
  Sense strand starting at position 2593 of SEQ ID NO: 1243885
uagaguugcuuucuggaaa

SEQ ID NO: 1448767 - RNA, 19 nt, Artificial Sequence
  Description of Artificial Sequence: Synthetic oligonucleotide
  Antisense strand to SEQ ID NO: 1448766
uuuccagaaagcaacucua

SEQ ID NO: 1448768 - RNA, 19 nt, Artificial Sequence
  Description of Artificial Sequence: Synthetic oligonucleotide
  Sense strand starting at position 2596 of SEQ ID NO: 1243885
aguugcuuucuggaaaggu

SEQ ID NO: 1448769 - RNA, 19 nt, Artificial Sequence
  Description of Artificial Sequence: Synthetic oligonucleotide
  Antisense strand to SEQ ID NO: 1448768
accuuuccagaaagcaacu

SEQ ID NO: 1448770 - RNA, 19 nt, Artificial Sequence
  Description of Artificial Sequence: Synthetic oligonucleotide
  Sense strand starting at position 2653 of SEQ ID NO: 1243885
gcucccuuuguguuaaugu

SEQ ID NO: 1448771 - RNA, 19 nt, Artificial Sequence
  Description of Artificial Sequence: Synthetic oligonucleotide
  Antisense strand to SEQ ID NO: 1448770
acauuaacacaaagggagc

SEQ ID NO: 1448772 - RNA, 19 nt, Artificial Sequence
  Description of Artificial Sequence: Synthetic oligonucleotide
  Sense strand starting at position 2662 of SEQ ID NO: 1243885
guguuaauguugucuauuu

SEQ ID NO: 1448773 - RNA, 19 nt, Artificial Sequence
  Description of Artificial Sequence: Synthetic oligonucleotide
  Antisense strand to SEQ ID NO: 1448772
aaauagacaacauuaacac

SEQ ID NO: 1448774 - RNA, 19 nt, Artificial Sequence
  Description of Artificial Sequence: Synthetic oligonucleotide
  Sense strand starting at position 2738 of SEQ ID NO: 1243885
gacccucauuaggcagauu

SEQ ID NO: 1448775 - RNA, 19 nt, Artificial Sequence
  Description of Artificial Sequence: Synthetic oligonucleotide
  Antisense strand to SEQ ID NO: 1448774
aaucugccuaaugaggguc

SEQ ID NO: 1448776 - RNA, 19 nt, Artificial Sequence
  Description of Artificial Sequence: Synthetic oligonucleotide
  Sense strand starting at position 2812 of SEQ ID NO: 1243885
uuaacugugcccuggaaug

SEQ ID NO: 1448777 - RNA, 19 nt, Artificial Sequence
  Description of Artificial Sequence: Synthetic oligonucleotide
  Antisense strand to SEQ ID NO: 1448776
cauuccagggcacaguuaa

SEQ ID NO: 1448778 - RNA, 19 nt, Artificial Sequence
  Description of Artificial Sequence: Synthetic oligonucleotide
  Sense strand starting at position 2851 of SEQ ID NO: 1243885
uuugacauuucuggaaaca

SEQ ID NO: 1448779 - RNA, 19 nt, Artificial Sequence
  Description of Artificial Sequence: Synthetic oligonucleotide
  Antisense strand to SEQ ID NO: 1448778
uguuuccagaaaugucaaa

SEQ ID NO: 1448780 - RNA, 19 nt, Artificial Sequence
  Description of Artificial Sequence: Synthetic oligonucleotide
  Sense strand starting at position 2863 of SEQ ID NO: 1243885
ggaaacacuugcuuggcau

SEQ ID NO: 1448781 - RNA, 19 nt, Artificial Sequence
  Description of Artificial Sequence: Synthetic oligonucleotide
  Antisense strand to SEQ ID NO: 1448780
augccaagcaaguguuucc

SEQ ID NO: 1448782 - RNA, 19 nt, Artificial Sequence
  Description of Artificial Sequence: Synthetic oligonucleotide
  Sense strand starting at position 2975 of SEQ ID NO: 1243885
guuucuuuagcuugaagaa

SEQ ID NO: 1448783 - RNA, 19 nt, Artificial Sequence
  Description of Artificial Sequence: Synthetic oligonucleotide
  Antisense strand to SEQ ID NO: 1448782
uucuucaagcuaaagaaac

SEQ ID NO: 1448784 - RNA, 19 nt, Artificial Sequence
  Description of Artificial Sequence: Synthetic oligonucleotide
  Sense strand starting at position 2976 of SEQ ID NO: 1243885
uuucuuuagcuugaagaaa

SEQ ID NO: 1448785 - RNA, 19 nt, Artificial Sequence
  Description of Artificial Sequence: Synthetic oligonucleotide
  Antisense strand to SEQ ID NO: 1448784
uuucuucaagcuaaagaaa

SEQ ID NO: 1448786 - RNA, 19 nt, Artificial Sequence
  Description of Artificial Sequence: Synthetic oligonucleotide
  Sense strand starting at position 3006 of SEQ ID NO: 1243885
cccuuaaucgaaugcgaaa

SEQ ID NO: 1448787 - RNA, 19 nt, Artificial Sequence
  Description of Artificial Sequence: Synthetic oligonucleotide
  Antisense strand to SEQ ID NO: 1448786
uuucgcauucgauuaaggg

SEQ ID NO: 1448788 - RNA, 19 nt, Artificial Sequence
  Description of Artificial Sequence: Synthetic oligonucleotide
  Sense strand starting at position 3019 of SEQ ID NO: 1243885
gcgaaauucuacccaucua

SEQ ID NO: 1448789 - RNA, 19 nt, Artificial Sequence
  Description of Artificial Sequence: Synthetic oligonucleotide
  Antisense strand to SEQ ID NO: 1448788
uagauggguagaauuucgc

SEQ ID NO: 1448790 - RNA, 19 nt, Artificial Sequence
  Description of Artificial Sequence: Synthetic oligonucleotide
  Sense strand starting at position 3216 of SEQ ID NO: 1243885
agagauucaguguaguuug

SEQ ID NO: 1448791 - RNA, 19 nt, Artificial Sequence
  Description of Artificial Sequence: Synthetic oligonucleotide
  Antisense strand to SEQ ID NO: 1448790
caaacuacacugaaucucu

SEQ ID NO: 1448792 - RNA, 19 nt, Artificial Sequence
  Description of Artificial Sequence: Synthetic oligonucleotide
  Sense strand starting at position 3352 of SEQ ID NO: 1243885
caaagaaagccgcaggauu

SEQ ID NO: 1448793 - RNA, 19 nt, Artificial Sequence
  Description of Artificial Sequence: Synthetic oligonucleotide
  Antisense strand to SEQ ID NO: 1448792
aauccugcggcuuucuuug

SEQ ID NO: 1448794 - RNA, 19 nt, Artificial Sequence
  Description of Artificial Sequence: Synthetic oligonucleotide
  Sense strand starting at position 3586 of SEQ ID NO: 1243885
gcugcaauccaggaagaca

SEQ ID NO: 1448795 - RNA, 19 nt, Artificial Sequence
  Description of Artificial Sequence: Synthetic oligonucleotide
  Antisense strand to SEQ ID NO: 1448794
ugucuuccuggauugcagc

SEQ ID NO: 1448796 - RNA, 19 nt, Artificial Sequence
  Description of Artificial Sequence: Synthetic oligonucleotide
  Sense strand starting at position 3650 of SEQ ID NO: 1243885
ggaaauggaucugaaagac

SEQ ID NO: 1448797 - RNA, 19 nt, Artificial Sequence
  Description of Artificial Sequence: Synthetic oligonucleotide
  Antisense strand to SEQ ID NO: 1448796
gucuuucagauccauuucc

SEQ ID NO: 1448798 - RNA, 19 nt, Artificial Sequence
  Description of Artificial Sequence: Synthetic oligonucleotide
  Sense strand starting at position 3704 of SEQ ID NO: 1243885
agaggauuguaggcugacu

SEQ ID NO: 1448799 - RNA, 19 nt, Artificial Sequence
  Description of Artificial Sequence: Synthetic oligonucleotide
  Antisense strand to SEQ ID NO: 1448798
agucagccuacaauccucu

SEQ ID NO: 1448800 - RNA, 19 nt, Artificial Sequence
  Description of Artificial Sequence: Synthetic oligonucleotide
  Sense strand starting at position 3746 of SEQ ID NO: 1243885
gcagguauucacugaggua

SEQ ID NO: 1448801 - RNA, 19 nt, Artificial Sequence
  Description of Artificial Sequence: Synthetic oligonucleotide
  Antisense strand to SEQ ID NO: 1448800
uaccucagugaauaccugc

SEQ ID NO: 1448802 - RNA, 19 nt, Artificial Sequence
  Description of Artificial Sequence: Synthetic oligonucleotide
  Sense strand starting at position 3873 of SEQ ID NO: 1243885
uuugaucuagucuacauua

SEQ ID NO: 1448803 - RNA, 19 nt, Artificial Sequence
  Description of Artificial Sequence: Synthetic oligonucleotide
  Antisense strand to SEQ ID NO: 1448802
uaauguagacuagaucaaa

SEQ ID NO: 1448804 - RNA, 19 nt, Artificial Sequence
  Description of Artificial Sequence: Synthetic oligonucleotide
  Sense strand starting at position 3900 of SEQ ID NO: 1243885
agcugcaacucaucagaaa

SEQ ID NO: 1448805 - RNA, 19 nt, Artificial Sequence
  Description of Artificial Sequence: Synthetic oligonucleotide
  Antisense strand to SEQ ID NO: 1448804
uuucugaugaguugcagcu

SEQ ID NO: 1448806 - RNA, 19 nt, Artificial Sequence
  Description of Artificial Sequence: Synthetic oligonucleotide
  Sense strand starting at position 3901 of SEQ ID NO: 1243885
gcugcaacucaucagaaac

SEQ ID NO: 1448807 - RNA, 19 nt, Artificial Sequence
  Description of Artificial Sequence: Synthetic oligonucleotide
  Antisense strand to SEQ ID NO: 1448806
guuucugaugaguugcagc

SEQ ID NO: 1448808 - RNA, 19 nt, Artificial Sequence
  Description of Artificial Sequence: Synthetic oligonucleotide
  Sense strand starting at position 54 of SEQ ID NO: 1243886
gcaauuguauauuucuguu

SEQ ID NO: 1448809 - RNA, 19 nt, Artificial Sequence
  Description of Artificial Sequence: Synthetic oligonucleotide
  Antisense strand to SEQ ID NO: 1448808
aacagaaauauacaauugc

SEQ ID NO: 1448810 - RNA, 19 nt, Artificial Sequence
  Description of Artificial Sequence: Synthetic oligonucleotide
  Sense strand starting at position 60 of SEQ ID NO: 1243886
guauauuucuguugaaaga

SEQ ID NO: 1448811 - RNA, 19 nt, Artificial Sequence
  Description of Artificial Sequence: Synthetic oligonucleotide
  Antisense strand to SEQ ID NO: 1448810
ucuuucaacagaaauauac

SEQ ID NO: 1448812 - RNA, 19 nt, Artificial Sequence
  Description of Artificial Sequence: Synthetic oligonucleotide
  Sense strand starting at position 271 of SEQ ID NO: 1243886
gggaauggaugagacaauu

SEQ ID NO: 1448813 - RNA, 19 nt, Artificial Sequence
  Description of Artificial Sequence: Synthetic oligonucleotide
  Antisense strand to SEQ ID NO: 1448812
aauugucucauccauuccc

SEQ ID NO: 1448814 - RNA, 19 nt, Artificial Sequence
  Description of Artificial Sequence: Synthetic oligonucleotide
  Sense strand starting at position 327 of SEQ ID NO: 1243886
ggagaaggaugccucucuu

SEQ ID NO: 1448815 - RNA, 19 nt, Artificial Sequence
  Description of Artificial Sequence: Synthetic oligonucleotide
  Antisense strand to SEQ ID NO: 1448814
aagagaggcauccuucucc

SEQ ID NO: 1448816 - RNA, 19 nt, Artificial Sequence
  Description of Artificial Sequence: Synthetic oligonucleotide
  Sense strand starting at position 470 of SEQ ID NO: 1243886
ccugguuacccugaugcga

SEQ ID NO: 1448817 - RNA, 19 nt, Artificial Sequence
  Description of Artificial Sequence: Synthetic oligonucleotide
  Antisense strand to SEQ ID NO: 1448816
ucgcaucaggguaaccagg

SEQ ID NO: 1448818 - RNA, 19 nt, Artificial Sequence
  Description of Artificial Sequence: Synthetic oligonucleotide
  Sense strand starting at position 574 of SEQ ID NO: 1243886
gucuaccuguaagucuaaa

SEQ ID NO: 1448819 - RNA, 19 nt, Artificial Sequence
  Description of Artificial Sequence: Synthetic oligonucleotide
  Antisense strand to SEQ ID NO: 1448818
uuuagacuuacagguagac

SEQ ID NO: 1448820 - RNA, 19 nt, Artificial Sequence
  Description of Artificial Sequence: Synthetic oligonucleotide
  Sense strand starting at position 834 of SEQ ID NO: 1243886
uugagaucacgccagauca

SEQ ID NO: 1448821 - RNA, 19 nt, Artificial Sequence
  Description of Artificial Sequence: Synthetic oligonucleotide
  Antisense strand to SEQ ID NO: 1448820
ugaucuggcgugaucucaa

SEQ ID NO: 1448822 - RNA, 19 nt, Artificial Sequence
  Description of Artificial Sequence: Synthetic oligonucleotide
  Sense strand starting at position 836 of SEQ ID NO: 1243886
gagaucacgccagaucacu

SEQ ID NO: 1448823 - RNA, 19 nt, Artificial Sequence
  Description of Artificial Sequence: Synthetic oligonucleotide
  Antisense strand to SEQ ID NO: 1448822
agugaucuggcgugaucuc

SEQ ID NO: 1448824 - RNA, 19 nt, Artificial Sequence
  Description of Artificial Sequence: Synthetic oligonucleotide
  Sense strand starting at position 945 of SEQ ID NO: 1243886
gugcaaauucgacacccua

SEQ ID NO: 1448825 - RNA, 19 nt, Artificial Sequence
  Description of Artificial Sequence: Synthetic oligonucleotide
  Antisense strand to SEQ ID NO: 1448824
uagggugucgaauuugcac

SEQ ID NO: 1448826 - RNA, 19 nt, Artificial Sequence
  Description of Artificial Sequence: Synthetic oligonucleotide
  Sense strand starting at position 1059 of SEQ ID NO: 1243886
cacagagcccuuuagugaa

SEQ ID NO: 1448827 - RNA, 19 nt, Artificial Sequence
  Description of Artificial Sequence: Synthetic oligonucleotide
  Antisense strand to SEQ ID NO: 1448826
uucacuaaagggcucugug

SEQ ID NO: 1448828 - RNA, 19 nt, Artificial Sequence
  Description of Artificial Sequence: Synthetic oligonucleotide
  Sense strand starting at position 1344 of SEQ ID NO: 1243886
gccaguguggcuucucuca

SEQ ID NO: 1448829 - RNA, 19 nt, Artificial Sequence
  Description of Artificial Sequence: Synthetic oligonucleotide
  Antisense strand to SEQ ID NO: 1448828
ugagagaagccacacuggc

SEQ ID NO: 1448830 - RNA, 19 nt, Artificial Sequence
  Description of Artificial Sequence: Synthetic oligonucleotide
  Sense strand starting at position 1346 of SEQ ID NO: 1243886
caguguggcuucucucaau

SEQ ID NO: 1448831 - RNA, 19 nt, Artificial Sequence
  Description of Artificial Sequence: Synthetic oligonucleotide
  Antisense strand to SEQ ID NO: 1448830
auugagagaagccacacug

SEQ ID NO: 1448832 - RNA, 19 nt, Artificial Sequence
  Description of Artificial Sequence: Synthetic oligonucleotide
  Sense strand starting at position 2228 of SEQ ID NO: 1243886
cugcuuaucuuugcauguu

SEQ ID NO: 1448833 - RNA, 19 nt, Artificial Sequence
  Description of Artificial Sequence: Synthetic oligonucleotide
  Antisense strand to SEQ ID NO: 1448832
aacaugcaaagauaagcag

SEQ ID NO: 1448834 - RNA, 19 nt, Artificial Sequence
  Description of Artificial Sequence: Synthetic oligonucleotide
  Sense strand starting at position 2289 of SEQ ID NO: 1243886
gggcucauacuuuguccau

SEQ ID NO: 1448835 - RNA, 19 nt, Artificial Sequence
  Description of Artificial Sequence: Synthetic oligonucleotide
  Antisense strand to SEQ ID NO: 1448834
auggacaaaguaugagccc

SEQ ID NO: 1448836 - RNA, 19 nt, Artificial Sequence
  Description of Artificial Sequence: Synthetic oligonucleotide
  Sense strand starting at position 2291 of SEQ ID NO: 1243886
gcucauacuuuguccauga

SEQ ID NO: 1448837 - RNA, 19 nt, Artificial Sequence
  Description of Artificial Sequence: Synthetic oligonucleotide
  Antisense strand to SEQ ID NO: 1448836
ucauggacaaaguaugagc

SEQ ID NO: 1448838 - RNA, 19 nt, Artificial Sequence
  Description of Artificial Sequence: Synthetic oligonucleotide
  Sense strand starting at position 2295 of SEQ ID NO: 1243886
auacuuuguccaugaagac

SEQ ID NO: 1448839 - RNA, 19 nt, Artificial Sequence
  Description of Artificial Sequence: Synthetic oligonucleotide
  Antisense strand to SEQ ID NO: 1448838
gucuucauggacaaaguau

SEQ ID NO: 1448840 - RNA, 19 nt, Artificial Sequence
  Description of Artificial Sequence: Synthetic oligonucleotide
  Sense strand starting at position 2358 of SEQ ID NO: 1243886
ggcuguuauucugccagag

SEQ ID NO: 1448841 - RNA, 19 nt, Artificial Sequence
  Description of Artificial Sequence: Synthetic oligonucleotide
  Antisense strand to SEQ ID NO: 1448840
cucuggcagaauaacagcc

SEQ ID NO: 1448842 - RNA, 19 nt, Artificial Sequence
  Description of Artificial Sequence: Synthetic oligonucleotide
  Sense strand starting at position 2424 of SEQ ID NO: 1243886
cgcuucuucccaugaggga

SEQ ID NO: 1448843 - RNA, 19 nt, Artificial Sequence
  Description of Artificial Sequence: Synthetic oligonucleotide
  Antisense strand to SEQ ID NO: 1448842
ucccucaugggaagaagcg

SEQ ID NO: 1448844 - RNA, 19 nt, Artificial Sequence
  Description of Artificial Sequence: Synthetic oligonucleotide
  Sense strand starting at position 2425 of SEQ ID NO: 1243886
gcuucuucccaugagggaa

SEQ ID NO: 1448845 - RNA, 19 nt, Artificial Sequence
  Description of Artificial Sequence: Synthetic oligonucleotide
  Antisense strand to SEQ ID NO: 1448844
uucccucaugggaagaagc

SEQ ID NO: 1448846 - RNA, 19 nt, Artificial Sequence
  Description of Artificial Sequence: Synthetic oligonucleotide
  Sense strand starting at position 2499 of SEQ ID NO: 1243886
gagugagcucuucguggga

SEQ ID NO: 1448847 - RNA, 19 nt, Artificial Sequence
  Description of Artificial Sequence: Synthetic oligonucleotide
  Antisense strand to SEQ ID NO: 1448846
ucccacgaagagcucacuc

SEQ ID NO: 1448848 - RNA, 19 nt, Artificial Sequence
  Description of Artificial Sequence: Synthetic oligonucleotide
  Sense strand starting at position 2503 of SEQ ID NO: 1243886
gagcucuucgugggagaca

SEQ ID NO: 1448849 - RNA, 19 nt, Artificial Sequence
  Description of Artificial Sequence: Synthetic oligonucleotide
  Antisense strand to SEQ ID NO: 1448848
ugucucccacgaagagcuc

SEQ ID NO: 1448850 - RNA, 19 nt, Artificial Sequence
  Description of Artificial Sequence: Synthetic oligonucleotide
  Sense strand starting at position 2549 of SEQ ID NO: 1243886
cugaaacaguuggaugaau

SEQ ID NO: 1448851 - RNA, 19 nt, Artificial Sequence
  Description of Artificial Sequence: Synthetic oligonucleotide
  Antisense strand to SEQ ID NO: 1448850
auucauccaacuguuucag

SEQ ID NO: 1448852 - RNA, 19 nt, Artificial Sequence
  Description of Artificial Sequence: Synthetic oligonucleotide
  Sense strand starting at position 2702 of SEQ ID NO: 1243886
ugaaaucucuaugcaaaug

SEQ ID NO: 1448853 - RNA, 19 nt, Artificial Sequence
  Description of Artificial Sequence: Synthetic oligonucleotide
  Antisense strand to SEQ ID NO: 1448852
cauuugcauagagauuuca

SEQ ID NO: 1448854 - RNA, 19 nt, Artificial Sequence
  Description of Artificial Sequence: Synthetic oligonucleotide
  Sense strand starting at position 2790 of SEQ ID NO: 1243886
auguuagggcucuaauuag

SEQ ID NO: 1448855 - RNA, 19 nt, Artificial Sequence
  Description of Artificial Sequence: Synthetic oligonucleotide
  Antisense strand to SEQ ID NO: 1448854
cuaauuagagcccuaacau

SEQ ID NO: 1448856 - RNA, 19 nt, Artificial Sequence
  Description of Artificial Sequence: Synthetic oligonucleotide
  Sense strand starting at position 3027 of SEQ ID NO: 1243886
gcuccuagaucuguucuuu

SEQ ID NO: 1448857 - RNA, 19 nt, Artificial Sequence
  Description of Artificial Sequence: Synthetic oligonucleotide
  Antisense strand to SEQ ID NO: 1448856
aaagaacagaucuaggagc

SEQ ID NO: 1448858 - RNA, 19 nt, Artificial Sequence
  Description of Artificial Sequence: Synthetic oligonucleotide
  Sense strand starting at position 3225 of SEQ ID NO: 1243886
gguagaaacccuggcuucu

SEQ ID NO: 1448859 - RNA, 19 nt, Artificial Sequence
  Description of Artificial Sequence: Synthetic oligonucleotide
  Antisense strand to SEQ ID NO: 1448858
agaagccaggguuucuacc

SEQ ID NO: 1448860 - RNA, 19 nt, Artificial Sequence
  Description of Artificial Sequence: Synthetic oligonucleotide
  Sense strand starting at position 3253 of SEQ ID NO: 1243886
aguuguaugcguugauuag

SEQ ID NO: 1448861 - RNA, 19 nt, Artificial Sequence
  Description of Artificial Sequence: Synthetic oligonucleotide
  Antisense strand to SEQ ID NO: 1448860
cuaaucaacgcauacaacu

SEQ ID NO: 1448862 - RNA, 19 nt, Artificial Sequence
  Description of Artificial Sequence: Synthetic oligonucleotide
  Sense strand starting at position 3254 of SEQ ID NO: 1243886
guuguaugcguugauuagu

SEQ ID NO: 1448863 - RNA, 19 nt, Artificial Sequence
  Description of Artificial Sequence: Synthetic oligonucleotide
  Antisense strand to SEQ ID NO: 1448862
acuaaucaacgcauacaac

SEQ ID NO: 1448864 - RNA, 19 nt, Artificial Sequence
  Description of Artificial Sequence: Synthetic oligonucleotide
  Sense strand starting at position 3257 of SEQ ID NO: 1243886
guaugcguugauuaguagu

SEQ ID NO: 1448865 - RNA, 19 nt, Artificial Sequence
  Description of Artificial Sequence: Synthetic oligonucleotide
  Antisense strand to SEQ ID NO: 1448864
acuacuaaucaacgcauac

SEQ ID NO: 1448866 - RNA, 19 nt, Artificial Sequence
  Description of Artificial Sequence: Synthetic oligonucleotide
  Sense strand starting at position 3263 of SEQ ID NO: 1243886
guugauuaguagucccaag

SEQ ID NO: 1448867 - RNA, 19 nt, Artificial Sequence
  Description of Artificial Sequence: Synthetic oligonucleotide
  Antisense strand to SEQ ID NO: 1448866
cuugggacuacuaaucaac

SEQ ID NO: 1448868 - RNA, 19 nt, Artificial Sequence
  Description of Artificial Sequence: Synthetic oligonucleotide
  Sense strand starting at position 3477 of SEQ ID NO: 1243886
cgucccuauccucagagau

SEQ ID NO: 1448869 - RNA, 19 nt, Artificial Sequence
  Description of Artificial Sequence: Synthetic oligonucleotide
  Antisense strand to SEQ ID NO: 1448868
aucucugaggauagggacg

SEQ ID NO: 1448870 - RNA, 19 nt, Artificial Sequence
  Description of Artificial Sequence: Synthetic oligonucleotide
  Sense strand starting at position 3585 of SEQ ID NO: 1243886
gagcucucucaauggagag

SEQ ID NO: 1448871 - RNA, 19 nt, Artificial Sequence
  Description of Artificial Sequence: Synthetic oligonucleotide
  Antisense strand to SEQ ID NO: 1448870
cucuccauugagagagcuc

SEQ ID NO: 1448872 - RNA, 19 nt, Artificial Sequence
  Description of Artificial Sequence: Synthetic oligonucleotide
  Sense strand starting at position 3595 of SEQ ID NO: 1243886
aauggagagucaugaugau

SEQ ID NO: 1448873 - RNA, 19 nt, Artificial Sequence
  Description of Artificial Sequence: Synthetic oligonucleotide
  Antisense strand to SEQ ID NO: 1448872
aucaucaugacucuccauu

SEQ ID NO: 1448874 - RNA, 19 nt, Artificial Sequence
  Description of Artificial Sequence: Synthetic oligonucleotide
  Sense strand starting at position 3618 of SEQ ID NO: 1243886
agagaauguucuggaagaa

SEQ ID NO: 1448875 - RNA, 19 nt, Artificial Sequence
  Description of Artificial Sequence: Synthetic oligonucleotide
  Antisense strand to SEQ ID NO: 1448874
uucuuccagaacauucucu

SEQ ID NO: 1448876 - RNA, 19 nt, Artificial Sequence
  Description of Artificial Sequence: Synthetic oligonucleotide
  Sense strand starting at position 3692 of SEQ ID NO: 1243886
aaggguuugguuuggcaga

SEQ ID NO: 1448877 - RNA, 19 nt, Artificial Sequence
  Description of Artificial Sequence: Synthetic oligonucleotide
  Antisense strand to SEQ ID NO: 1448876
ucugccaaaccaaacccuu

SEQ ID NO: 1448878 - RNA, 19 nt, Artificial Sequence
  Description of Artificial Sequence: Synthetic oligonucleotide
  Sense strand starting at position 3743 of SEQ ID NO: 1243886
aggcuuaagagcugagaag

SEQ ID NO: 1448879 - RNA, 19 nt, Artificial Sequence
  Description of Artificial Sequence: Synthetic oligonucleotide
  Antisense strand to SEQ ID NO: 1448878
cuucucagcucuuaagccu

SEQ ID NO: 1448880 - RNA, 19 nt, Artificial Sequence
  Description of Artificial Sequence: Synthetic oligonucleotide
  Sense strand starting at position 3802 of SEQ ID NO: 1243886
ggaagugaucgugaaggca

SEQ ID NO: 1448881 - RNA, 19 nt, Artificial Sequence
  Description of Artificial Sequence: Synthetic oligonucleotide
  Antisense strand to SEQ ID NO: 1448880
ugccuucacgaucacuucc

SEQ ID NO: 1448882 - RNA, 19 nt, Artificial Sequence
  Description of Artificial Sequence: Synthetic oligonucleotide
  Sense strand starting at position 3836 of SEQ ID NO: 1243886
ggcucugagaacuguacau

SEQ ID NO: 1448883 - RNA, 19 nt, Artificial Sequence
  Description of Artificial Sequence: Synthetic oligonucleotide
  Antisense strand to SEQ ID NO: 1448882
auguacaguucucagagcc

SEQ ID NO: 1448884 - RNA, 19 nt, Artificial Sequence
  Description of Artificial Sequence: Synthetic oligonucleotide
  Sense strand starting at position 3892 of SEQ ID NO: 1243886
ggcugcuuagaggaugaau

SEQ ID NO: 1448885 - RNA, 19 nt, Artificial Sequence
  Description of Artificial Sequence: Synthetic oligonucleotide
  Antisense strand to SEQ ID NO: 1448884
auucauccucuaagcagcc

SEQ ID NO: 1448886 - RNA, 19 nt, Artificial Sequence
  Description of Artificial Sequence: Synthetic oligonucleotide
  Sense strand starting at position 3937 of SEQ ID NO: 1243886
ugagucuugcucuauugac

SEQ ID NO: 1448887 - RNA, 19 nt, Artificial Sequence
  Description of Artificial Sequence: Synthetic oligonucleotide
  Antisense strand to SEQ ID NO: 1448886
gucaauagagcaagacuca

SEQ ID NO: 1448888 - RNA, 19 nt, Artificial Sequence
  Description of Artificial Sequence: Synthetic oligonucleotide
  Sense strand starting at position 116 of SEQ ID NO: 1243887
auugaucuauuuccgcgua

SEQ ID NO: 1448889 - RNA, 19 nt, Artificial Sequence
  Description of Artificial Sequence: Synthetic oligonucleotide
  Antisense strand to SEQ ID NO: 1448888
uacgcggaaauagaucaau

SEQ ID NO: 1448890 - RNA, 19 nt, Artificial Sequence
  Description of Artificial Sequence: Synthetic oligonucleotide
  Sense strand starting at position 117 of SEQ ID NO: 1243887
uugaucuauuuccgcguaa

SEQ ID NO: 1448891 - RNA, 19 nt, Artificial Sequence
  Description of Artificial Sequence: Synthetic oligonucleotide
  Antisense strand to SEQ ID NO: 1448890
uuacgcggaaauagaucaa

SEQ ID NO: 1448892 - RNA, 19 nt, Artificial Sequence
  Description of Artificial Sequence: Synthetic oligonucleotide
  Sense strand starting at position 118 of SEQ ID NO: 1243887
ugaucuauuuccgcguaaa

SEQ ID NO: 1448893 - RNA, 19 nt, Artificial Sequence
  Description of Artificial Sequence: Synthetic oligonucleotide
  Antisense strand to SEQ ID NO: 1448892
uuuacgcggaaauagauca

SEQ ID NO: 1448894 - RNA, 19 nt, Artificial Sequence
  Description of Artificial Sequence: Synthetic oligonucleotide
  Sense strand starting at position 119 of SEQ ID NO: 1243887
gaucuauuuccgcguaaac

SEQ ID NO: 1448895 - RNA, 19 nt, Artificial Sequence
  Description of Artificial Sequence: Synthetic oligonucleotide
  Antisense strand to SEQ ID NO: 1448894
guuuacgcggaaauagauc

SEQ ID NO: 1448896 - RNA, 19 nt, Artificial Sequence
  Description of Artificial Sequence: Synthetic oligonucleotide
  Sense strand starting at position 121 of SEQ ID NO: 1243887
ucuauuuccgcguaaaccu

SEQ ID NO: 1448897 - RNA, 19 nt, Artificial Sequence
  Description of Artificial Sequence: Synthetic oligonucleotide
  Antisense strand to SEQ ID NO: 1448896
agguuuacgcggaaauaga

SEQ ID NO: 1448898 - RNA, 19 nt, Artificial Sequence
  Description of Artificial Sequence: Synthetic oligonucleotide
  Sense strand starting at position 209 of SEQ ID NO: 1243887
gucuaacugguuugugcau

SEQ ID NO: 1448899 - RNA, 19 nt, Artificial Sequence
  Description of Artificial Sequence: Synthetic oligonucleotide
  Antisense strand to SEQ ID NO: 1448898
augcacaaaccaguuagac

SEQ ID NO: 1448900 - RNA, 19 nt, Artificial Sequence
  Description of Artificial Sequence: Synthetic oligonucleotide
  Sense strand starting at position 324 of SEQ ID NO: 1243887
accugucugucuccucgaa

SEQ ID NO: 1448901 - RNA, 19 nt, Artificial Sequence
  Description of Artificial Sequence: Synthetic oligonucleotide
  Antisense strand to SEQ ID NO: 1448900
uucgaggagacagacaggu

SEQ ID NO: 1448902 - RNA, 19 nt, Artificial Sequence
  Description of Artificial Sequence: Synthetic oligonucleotide
  Sense strand starting at position 491 of SEQ ID NO: 1243887
cuuguaacgucucaacuaa

SEQ ID NO: 1448903 - RNA, 19 nt, Artificial Sequence
  Description of Artificial Sequence: Synthetic oligonucleotide
  Antisense strand to SEQ ID NO: 1448902
uuaguugagacguuacaag

SEQ ID NO: 1448904 - RNA, 19 nt, Artificial Sequence
  Description of Artificial Sequence: Synthetic oligonucleotide
  Sense strand starting at position 534 of SEQ ID NO: 1243887
aaaucuuggugguuuaacu

SEQ ID NO: 1448905 - RNA, 19 nt, Artificial Sequence
  Description of Artificial Sequence: Synthetic oligonucleotide
  Antisense strand to SEQ ID NO: 1448904
aguuaaaccaccaagauuu

SEQ ID NO: 1448906 - RNA, 19 nt, Artificial Sequence
  Description of Artificial Sequence: Synthetic oligonucleotide
  Sense strand starting at position 561 of SEQ ID NO: 1243887
uugguaagccgguauacgu

SEQ ID NO: 1448907 - RNA, 19 nt, Artificial Sequence
  Description of Artificial Sequence: Synthetic oligonucleotide
  Antisense strand to SEQ ID NO: 1448906
acguauaccggcuuaccaa

SEQ ID NO: 1448908 - RNA, 19 nt, Artificial Sequence
  Description of Artificial Sequence: Synthetic oligonucleotide
  Sense strand starting at position 574 of SEQ ID NO: 1243887
auacguacaguugguuuaa

SEQ ID NO: 1448909 - RNA, 19 nt, Artificial Sequence
  Description of Artificial Sequence: Synthetic oligonucleotide
  Antisense strand to SEQ ID NO: 1448908
uuaaaccaacuguacguau

SEQ ID NO: 1448910 - RNA, 19 nt, Artificial Sequence
  Description of Artificial Sequence: Synthetic oligonucleotide
  Sense strand starting at position 575 of SEQ ID NO: 1243887
uacguacaguugguuuaau

SEQ ID NO: 1448911 - RNA, 19 nt, Artificial Sequence
  Description of Artificial Sequence: Synthetic oligonucleotide
  Antisense strand to SEQ ID NO: 1448910
auuaaaccaacuguacgua

SEQ ID NO: 1448912 - RNA, 19 nt, Artificial Sequence
  Description of Artificial Sequence: Synthetic oligonucleotide
  Sense strand starting at position 576 of SEQ ID NO: 1243887
acguacaguugguuuaaua

SEQ ID NO: 1448913 - RNA, 19 nt, Artificial Sequence
  Description of Artificial Sequence: Synthetic oligonucleotide
  Antisense strand to SEQ ID NO: 1448912
uauuaaaccaacuguacgu

SEQ ID NO: 1448914 - RNA, 19 nt, Artificial Sequence
  Description of Artificial Sequence: Synthetic oligonucleotide
  Sense strand starting at position 585 of SEQ ID NO: 1243887
ugguuuaauaacugaugga

SEQ ID NO: 1448915 - RNA, 19 nt, Artificial Sequence
  Description of Artificial Sequence: Synthetic oligonucleotide
  Antisense strand to SEQ ID NO: 1448914
uccaucaguuauuaaacca

SEQ ID NO: 1448916 - RNA, 19 nt, Artificial Sequence
  Description of Artificial Sequence: Synthetic oligonucleotide
  Sense strand starting at position 644 of SEQ ID NO: 1243887
accgaagucucuugaaugu

SEQ ID NO: 1448917 - RNA, 19 nt, Artificial Sequence
  Description of Artificial Sequence: Synthetic oligonucleotide
  Antisense strand to SEQ ID NO: 1448916
acauucaagagacuucggu

SEQ ID NO: 1448918 - RNA, 19 nt, Artificial Sequence
  Description of Artificial Sequence: Synthetic oligonucleotide
  Sense strand starting at position 659 of SEQ ID NO: 1243887
auguaaucgcucugaaugc

SEQ ID NO: 1448919 - RNA, 19 nt, Artificial Sequence
  Description of Artificial Sequence: Synthetic oligonucleotide
  Antisense strand to SEQ ID NO: 1448918
gcauucagagcgauuacau

SEQ ID NO: 1448920 - RNA, 19 nt, Artificial Sequence
  Description of Artificial Sequence: Synthetic oligonucleotide
  Sense strand starting at position 686 of SEQ ID NO: 1243887
gggucaagcuggugucuau

SEQ ID NO: 1448921 - RNA, 19 nt, Artificial Sequence
  Description of Artificial Sequence: Synthetic oligonucleotide
  Antisense strand to SEQ ID NO: 1448920
auagacaccagcuugaccc

SEQ ID NO: 1448922 - RNA, 19 nt, Artificial Sequence
  Description of Artificial Sequence: Synthetic oligonucleotide
  Sense strand starting at position 1159 of SEQ ID NO: 1243887
ccgagacugcgauauugau

SEQ ID NO: 1448923 - RNA, 19 nt, Artificial Sequence
  Description of Artificial Sequence: Synthetic oligonucleotide
  Antisense strand to SEQ ID NO: 1448922
aucaauaucgcagucucgg

SEQ ID NO: 1448924 - RNA, 19 nt, Artificial Sequence
  Description of Artificial Sequence: Synthetic oligonucleotide
  Sense strand starting at position 1417 of SEQ ID NO: 1243887
gagcgauucuuggcgcgga

SEQ ID NO: 1448925 - RNA, 19 nt, Artificial Sequence
  Description of Artificial Sequence: Synthetic oligonucleotide
  Antisense strand to SEQ ID NO: 1448924
uccgcgccaagaaucgcuc

SEQ ID NO: 1448926 - RNA, 19 nt, Artificial Sequence
  Description of Artificial Sequence: Synthetic oligonucleotide
  Sense strand starting at position 1695 of SEQ ID NO: 1243887
ggcuguuaccuugacgaga

SEQ ID NO: 1448927 - RNA, 19 nt, Artificial Sequence
  Description of Artificial Sequence: Synthetic oligonucleotide
  Antisense strand to SEQ ID NO: 1448926
ucucgucaagguaacagcc

SEQ ID NO: 1448928 - RNA, 19 nt, Artificial Sequence
  Description of Artificial Sequence: Synthetic oligonucleotide
  Sense strand starting at position 2623 of SEQ ID NO: 1243887
acgcgaacgcucugcaaga

SEQ ID NO: 1448929 - RNA, 19 nt, Artificial Sequence
  Description of Artificial Sequence: Synthetic oligonucleotide
  Antisense strand to SEQ ID NO: 1448928
ucuugcagagcguucgcgu

SEQ ID NO: 1448930 - RNA, 19 nt, Artificial Sequence
  Description of Artificial Sequence: Synthetic oligonucleotide
  Sense strand starting at position 2624 of SEQ ID NO: 1243887
cgcgaacgcucugcaagau

SEQ ID NO: 1448931 - RNA, 19 nt, Artificial Sequence
  Description of Artificial Sequence: Synthetic oligonucleotide
  Antisense strand to SEQ ID NO: 1448930
aucuugcagagcguucgcg

SEQ ID NO: 1448932 - RNA, 19 nt, Artificial Sequence
  Description of Artificial Sequence: Synthetic oligonucleotide
  Sense strand starting at position 3179 of SEQ ID NO: 1243887
ggcagucggcuuugaaauc

SEQ ID NO: 1448933 - RNA, 19 nt, Artificial Sequence
  Description of Artificial Sequence: Synthetic oligonucleotide
  Antisense strand to SEQ ID NO: 1448932
gauuucaaagccgacugcc

SEQ ID NO: 1448934 - RNA, 19 nt, Artificial Sequence
  Description of Artificial Sequence: Synthetic oligonucleotide
  Sense strand starting at position 3180 of SEQ ID NO: 1243887
gcagucggcuuugaaauca

SEQ ID NO: 1448935 - RNA, 19 nt, Artificial Sequence
  Description of Artificial Sequence: Synthetic oligonucleotide
  Antisense strand to SEQ ID NO: 1448934
ugauuucaaagccgacugc

SEQ ID NO: 1448936 - RNA, 19 nt, Artificial Sequence
  Description of Artificial Sequence: Synthetic oligonucleotide
  Sense strand starting at position 3290 of SEQ ID NO: 1243887
gcguguucauggguccacu

SEQ ID NO: 1448937 - RNA, 19 nt, Artificial Sequence
  Description of Artificial Sequence: Synthetic oligonucleotide
  Antisense strand to SEQ ID NO: 1448936
aguggacccaugaacacgc

SEQ ID NO: 1448938 - RNA, 19 nt, Artificial Sequence
  Description of Artificial Sequence: Synthetic oligonucleotide
  Sense strand starting at position 3334 of SEQ ID NO: 1243887
uuuagaagaucguaagauc

SEQ ID NO: 1448939 - RNA, 19 nt, Artificial Sequence
  Description of Artificial Sequence: Synthetic oligonucleotide
  Antisense strand to SEQ ID NO: 1448938
gaucuuacgaucuucuaaa

SEQ ID NO: 1448940 - RNA, 19 nt, Artificial Sequence
  Description of Artificial Sequence: Synthetic oligonucleotide
  Sense strand starting at position 3337 of SEQ ID NO: 1243887
agaagaucguaagauccaa

SEQ ID NO: 1448941 - RNA, 19 nt, Artificial Sequence
  Description of Artificial Sequence: Synthetic oligonucleotide
  Antisense strand to SEQ ID NO: 1448940
uuggaucuuacgaucuucu

SEQ ID NO: 1448942 - RNA, 19 nt, Artificial Sequence
  Description of Artificial Sequence: Synthetic oligonucleotide
  Sense strand starting at position 3361 of SEQ ID NO: 1243887
acaguuuacuggugagaaa

SEQ ID NO: 1448943 - RNA, 19 nt, Artificial Sequence
  Description of Artificial Sequence: Synthetic oligonucleotide
  Antisense strand to SEQ ID NO: 1448942
uuucucaccaguaaacugu

SEQ ID NO: 1448944 - RNA, 19 nt, Artificial Sequence
  Description of Artificial Sequence: Synthetic oligonucleotide
  Sense strand starting at position 3534 of SEQ ID NO: 1243887
gcacuuuccaggugaagca

SEQ ID NO: 1448945 - RNA, 19 nt, Artificial Sequence
  Description of Artificial Sequence: Synthetic oligonucleotide
  Antisense strand to SEQ ID NO: 1448944
ugcuucaccuggaaagugc

SEQ ID NO: 1448946 - RNA, 19 nt, Artificial Sequence
  Description of Artificial Sequence: Synthetic oligonucleotide
  Sense strand starting at position 3772 of SEQ ID NO: 1243887
gcuguauaaacuuggagag

SEQ ID NO: 1448947 - RNA, 19 nt, Artificial Sequence
  Description of Artificial Sequence: Synthetic oligonucleotide
  Antisense strand to SEQ ID NO: 1448946
cucuccaaguuuauacagc

SEQ ID NO: 1448948 - RNA, 19 nt, Artificial Sequence
  Description of Artificial Sequence: Synthetic oligonucleotide
  Sense strand starting at position 3773 of SEQ ID NO: 1243887
cuguauaaacuuggagagu

SEQ ID NO: 1448949 - RNA, 19 nt, Artificial Sequence
  Description of Artificial Sequence: Synthetic oligonucleotide
  Antisense strand to SEQ ID NO: 1448948
acucuccaaguuuauacag

SEQ ID NO: 1448950 - RNA, 19 nt, Artificial Sequence
  Description of Artificial Sequence: Synthetic oligonucleotide
  Sense strand starting at position 3774 of SEQ ID NO: 1243887
uguauaaacuuggagaguu

SEQ ID NO: 1448951 - RNA, 19 nt, Artificial Sequence
  Description of Artificial Sequence: Synthetic oligonucleotide
  Antisense strand to SEQ ID NO: 1448950
aacucuccaaguuuauaca

SEQ ID NO: 1448952 - RNA, 19 nt, Artificial Sequence
  Description of Artificial Sequence: Synthetic oligonucleotide
  Sense strand starting at position 3864 of SEQ ID NO: 1243887
guuugaaggaguugguauu

SEQ ID NO: 1448953 - RNA, 19 nt, Artificial Sequence
  Description of Artificial Sequence: Synthetic oligonucleotide
  Antisense strand to SEQ ID NO: 1448952
aauaccaacuccuucaaac

SEQ ID NO: 1448954 - RNA, 19 nt, Artificial Sequence
  Description of Artificial Sequence: Synthetic oligonucleotide
  Sense strand starting at position 3915 of SEQ ID NO: 1243887
gugagagcuuaaugagggu

SEQ ID NO: 1448955 - RNA, 19 nt, Artificial Sequence
  Description of Artificial Sequence: Synthetic oligonucleotide
  Antisense strand to SEQ ID NO: 1448954
acccucauuaagcucucac

SEQ ID NO: 1448956 - RNA, 19 nt, Artificial Sequence
  Description of Artificial Sequence: Synthetic oligonucleotide
  Sense strand starting at position 3932 of SEQ ID NO: 1243887
guuagcuguagucaccaau

SEQ ID NO: 1448957 - RNA, 19 nt, Artificial Sequence
  Description of Artificial Sequence: Synthetic oligonucleotide
  Antisense strand to SEQ ID NO: 1448956
auuggugacuacagcuaac

SEQ ID NO: 1448958 - RNA, 19 nt, Artificial Sequence
  Description of Artificial Sequence: Synthetic oligonucleotide
  Sense strand starting at position 3935 of SEQ ID NO: 1243887
agcuguagucaccaauacu

SEQ ID NO: 1448959 - RNA, 19 nt, Artificial Sequence
  Description of Artificial Sequence: Synthetic oligonucleotide
  Antisense strand to SEQ ID NO: 1448958
aguauuggugacuacagcu

SEQ ID NO: 1448960 - RNA, 19 nt, Artificial Sequence
  Description of Artificial Sequence: Synthetic oligonucleotide
  Sense strand starting at position 394 of SEQ ID NO: 1243888
auaugagacuagucugaac

SEQ ID NO: 1448961 - RNA, 19 nt, Artificial Sequence
  Description of Artificial Sequence: Synthetic oligonucleotide
  Antisense strand to SEQ ID NO: 1448960
guucagacuagucucauau

SEQ ID NO: 1448962 - RNA, 19 nt, Artificial Sequence
  Description of Artificial Sequence: Synthetic oligonucleotide
  Sense strand starting at position 430 of SEQ ID NO: 1243888
agaagaaacugcuucgacu

SEQ ID NO: 1448963 - RNA, 19 nt, Artificial Sequence
  Description of Artificial Sequence: Synthetic oligonucleotide
  Antisense strand to SEQ ID NO: 1448962
agucgaagcaguuucuucu

SEQ ID NO: 1448964 - RNA, 19 nt, Artificial Sequence
  Description of Artificial Sequence: Synthetic oligonucleotide
  Sense strand starting at position 469 of SEQ ID NO: 1243888
gaggacuccugaugcuguu

SEQ ID NO: 1448965 - RNA, 19 nt, Artificial Sequence
  Description of Artificial Sequence: Synthetic oligonucleotide
  Antisense strand to SEQ ID NO: 1448964
aacagcaucaggaguccuc

SEQ ID NO: 1448966 - RNA, 19 nt, Artificial Sequence
  Description of Artificial Sequence: Synthetic oligonucleotide
  Sense strand starting at position 472 of SEQ ID NO: 1243888
gacuccugaugcuguuaca

SEQ ID NO: 1448967 - RNA, 19 nt, Artificial Sequence
  Description of Artificial Sequence: Synthetic oligonucleotide
  Antisense strand to SEQ ID NO: 1448966
uguaacagcaucaggaguc

SEQ ID NO: 1448968 - RNA, 19 nt, Artificial Sequence
  Description of Artificial Sequence: Synthetic oligonucleotide
  Sense strand starting at position 608 of SEQ ID NO: 1243888
gacagucaaucucagggau

SEQ ID NO: 1448969 - RNA, 19 nt, Artificial Sequence
  Description of Artificial Sequence: Synthetic oligonucleotide
  Antisense strand to SEQ ID NO: 1448968
aucccugagauugacuguc

SEQ ID NO: 1448970 - RNA, 19 nt, Artificial Sequence
  Description of Artificial Sequence: Synthetic oligonucleotide
  Sense strand starting at position 652 of SEQ ID NO: 1243888
gcagguaauuuauguucuu

SEQ ID NO: 1448971 - RNA, 19 nt, Artificial Sequence
  Description of Artificial Sequence: Synthetic oligonucleotide
  Antisense strand to SEQ ID NO: 1448970
aagaacauaaauuaccugc

SEQ ID NO: 1448972 - RNA, 19 nt, Artificial Sequence
  Description of Artificial Sequence: Synthetic oligonucleotide
  Sense strand starting at position 658 of SEQ ID NO: 1243888
aauuuauguucuuggcgua

SEQ ID NO: 1448973 - RNA, 19 nt, Artificial Sequence
  Description of Artificial Sequence: Synthetic oligonucleotide
  Antisense strand to SEQ ID NO: 1448972
uacgccaagaacauaaauu

SEQ ID NO: 1448974 - RNA, 19 nt, Artificial Sequence
  Description of Artificial Sequence: Synthetic oligonucleotide
  Sense strand starting at position 673 of SEQ ID NO: 1243888
cguagagucuguucccaau

SEQ ID NO: 1448975 - RNA, 19 nt, Artificial Sequence
  Description of Artificial Sequence: Synthetic oligonucleotide
  Antisense strand to SEQ ID NO: 1448974
auugggaacagacucuacg

SEQ ID NO: 1448976 - RNA, 19 nt, Artificial Sequence
  Description of Artificial Sequence: Synthetic oligonucleotide
  Sense strand starting at position 676 of SEQ ID NO: 1243888
agagucuguucccaauauc

SEQ ID NO: 1448977 - RNA, 19 nt, Artificial Sequence
  Description of Artificial Sequence: Synthetic oligonucleotide
  Antisense strand to SEQ ID NO: 1448976
gauauugggaacagacucu

SEQ ID NO: 1448978 - RNA, 19 nt, Artificial Sequence
  Description of Artificial Sequence: Synthetic oligonucleotide
  Sense strand starting at position 717 of SEQ ID NO: 1243888
ccaucuuacugagcaaggu

SEQ ID NO: 1448979 - RNA, 19 nt, Artificial Sequence
  Description of Artificial Sequence: Synthetic oligonucleotide
  Antisense strand to SEQ ID NO: 1448978
accuugcucaguaagaugg

SEQ ID NO: 1448980 - RNA, 19 nt, Artificial Sequence
  Description of Artificial Sequence: Synthetic oligonucleotide
  Sense strand starting at position 807 of SEQ ID NO: 1243888
gucuguuuccauugccuca

SEQ ID NO: 1448981 - RNA, 19 nt, Artificial Sequence
  Description of Artificial Sequence: Synthetic oligonucleotide
  Antisense strand to SEQ ID NO: 1448980
ugaggcaauggaaacagac

SEQ ID NO: 1448982 - RNA, 19 nt, Artificial Sequence
  Description of Artificial Sequence: Synthetic oligonucleotide
  Sense strand starting at position 900 of SEQ ID NO: 1243888
gacagucuucuggacgcuu

SEQ ID NO: 1448983 - RNA, 19 nt, Artificial Sequence
  Description of Artificial Sequence: Synthetic oligonucleotide
  Antisense strand to SEQ ID NO: 1448982
aagcguccagaagacuguc

SEQ ID NO: 1448984 - RNA, 19 nt, Artificial Sequence
  Description of Artificial Sequence: Synthetic oligonucleotide
  Sense strand starting at position 1087 of SEQ ID NO: 1243888
accgguuuccugagggugu

SEQ ID NO: 1448985 - RNA, 19 nt, Artificial Sequence
  Description of Artificial Sequence: Synthetic oligonucleotide
  Antisense strand to SEQ ID NO: 1448984
acacccucaggaaaccggu

SEQ ID NO: 1448986 - RNA, 19 nt, Artificial Sequence
  Description of Artificial Sequence: Synthetic oligonucleotide
  Sense strand starting at position 1127 of SEQ ID NO: 1243888
uguggugacuuccuaccaa

SEQ ID NO: 1448987 - RNA, 19 nt, Artificial Sequence
  Description of Artificial Sequence: Synthetic oligonucleotide
  Antisense strand to SEQ ID NO: 1448986
uugguaggaagucaccaca

SEQ ID NO: 1448988 - RNA, 19 nt, Artificial Sequence
  Description of Artificial Sequence: Synthetic oligonucleotide
  Sense strand starting at position 1190 of SEQ ID NO: 1243888
aggaaacguuuccagccua

SEQ ID NO: 1448989 - RNA, 19 nt, Artificial Sequence
  Description of Artificial Sequence: Synthetic oligonucleotide
  Antisense strand to SEQ ID NO: 1448988
uaggcuggaaacguuuccu

SEQ ID NO: 1448990 - RNA, 19 nt, Artificial Sequence
  Description of Artificial Sequence: Synthetic oligonucleotide
  Sense strand starting at position 1210 of SEQ ID NO: 1243888
aagccacuuguaggauuau

SEQ ID NO: 1448991 - RNA, 19 nt, Artificial Sequence
  Description of Artificial Sequence: Synthetic oligonucleotide
  Antisense strand to SEQ ID NO: 1448990
auaauccuacaaguggcuu

SEQ ID NO: 1448992 - RNA, 19 nt, Artificial Sequence
  Description of Artificial Sequence: Synthetic oligonucleotide
  Sense strand starting at position 1216 of SEQ ID NO: 1243888
cuuguaggauuaucggauu

SEQ ID NO: 1448993 - RNA, 19 nt, Artificial Sequence
  Description of Artificial Sequence: Synthetic oligonucleotide
  Antisense strand to SEQ ID NO: 1448992
aauccgauaauccuacaag

SEQ ID NO: 1448994 - RNA, 19 nt, Artificial Sequence
  Description of Artificial Sequence: Synthetic oligonucleotide
  Sense strand starting at position 1219 of SEQ ID NO: 1243888
guaggauuaucggauucau

SEQ ID NO: 1448995 - RNA, 19 nt, Artificial Sequence
  Description of Artificial Sequence: Synthetic oligonucleotide
  Antisense strand to SEQ ID NO: 1448994
augaauccgauaauccuac

SEQ ID NO: 1448996 - RNA, 19 nt, Artificial Sequence
  Description of Artificial Sequence: Synthetic oligonucleotide
  Sense strand starting at position 1681 of SEQ ID NO: 1243888
acgcgcgaguucucugaga

SEQ ID NO: 1448997 - RNA, 19 nt, Artificial Sequence
  Description of Artificial Sequence: Synthetic oligonucleotide
  Antisense strand to SEQ ID NO: 1448996
ucucagagaacucgcgcgu

SEQ ID NO: 1448998 - RNA, 19 nt, Artificial Sequence
  Description of Artificial Sequence: Synthetic oligonucleotide
  Sense strand starting at position 1683 of SEQ ID NO: 1243888
gcgcgaguucucugagacg

SEQ ID NO: 1448999 - RNA, 19 nt, Artificial Sequence
  Description of Artificial Sequence: Synthetic oligonucleotide
  Antisense strand to SEQ ID NO: 1448998
cgucucagagaacucgcgc

SEQ ID NO: 1449000 - RNA, 19 nt, Artificial Sequence
  Description of Artificial Sequence: Synthetic oligonucleotide
  Sense strand starting at position 1685 of SEQ ID NO: 1243888
gcgaguucucugagacgcu

SEQ ID NO: 1449001 - RNA, 19 nt, Artificial Sequence
  Description of Artificial Sequence: Synthetic oligonucleotide
  Antisense strand to SEQ ID NO: 1449000
agcgucucagagaacucgc

SEQ ID NO: 1449002 - RNA, 19 nt, Artificial Sequence
  Description of Artificial Sequence: Synthetic oligonucleotide
  Sense strand starting at position 2272 of SEQ ID NO: 1243888
gcgacucccagacagaauu

SEQ ID NO: 1449003 - RNA, 19 nt, Artificial Sequence
  Description of Artificial Sequence: Synthetic oligonucleotide
  Antisense strand to SEQ ID NO: 1449002
aauucugucugggagucgc

SEQ ID NO: 1449004 - RNA, 19 nt, Artificial Sequence
  Description of Artificial Sequence: Synthetic oligonucleotide
  Sense strand starting at position 2323 of SEQ ID NO: 1243888
ugaguucucggccaggcuu

SEQ ID NO: 1449005 - RNA, 19 nt, Artificial Sequence
  Description of Artificial Sequence: Synthetic oligonucleotide
  Antisense strand to SEQ ID NO: 1449004
aagccuggccgagaacuca

SEQ ID NO: 1449006 - RNA, 19 nt, Artificial Sequence
  Description of Artificial Sequence: Synthetic oligonucleotide
  Sense strand starting at position 2334 of SEQ ID NO: 1243888
ccaggcuuccugcgauauc

SEQ ID NO: 1449007 - RNA, 19 nt, Artificial Sequence
  Description of Artificial Sequence: Synthetic oligonucleotide
  Antisense strand to SEQ ID NO: 1449006
gauaucgcaggaagccugg

SEQ ID NO: 1449008 - RNA, 19 nt, Artificial Sequence
  Description of Artificial Sequence: Synthetic oligonucleotide
  Sense strand starting at position 2335 of SEQ ID NO: 1243888
caggcuuccugcgauauca

SEQ ID NO: 1449009 - RNA, 19 nt, Artificial Sequence
  Description of Artificial Sequence: Synthetic oligonucleotide
  Antisense strand to SEQ ID NO: 1449008
ugauaucgcaggaagccug

SEQ ID NO: 1449010 - RNA, 19 nt, Artificial Sequence
  Description of Artificial Sequence: Synthetic oligonucleotide
  Sense strand starting at position 2337 of SEQ ID NO: 1243888
ggcuuccugcgauaucagu

SEQ ID NO: 1449011 - RNA, 19 nt, Artificial Sequence
  Description of Artificial Sequence: Synthetic oligonucleotide
  Antisense strand to SEQ ID NO: 1449010
acugauaucgcaggaagcc

SEQ ID NO: 1449012 - RNA, 19 nt, Artificial Sequence
  Description of Artificial Sequence: Synthetic oligonucleotide
  Sense strand starting at position 2345 of SEQ ID NO: 1243888
gcgauaucagucuguuucu

SEQ ID NO: 1449013 - RNA, 19 nt, Artificial Sequence
  Description of Artificial Sequence: Synthetic oligonucleotide
  Antisense strand to SEQ ID NO: 1449012
agaaacagacugauaucgc

SEQ ID NO: 1449014 - RNA, 19 nt, Artificial Sequence
  Description of Artificial Sequence: Synthetic oligonucleotide
  Sense strand starting at position 2346 of SEQ ID NO: 1243888
cgauaucagucuguuucuu

SEQ ID NO: 1449015 - RNA, 19 nt, Artificial Sequence
  Description of Artificial Sequence: Synthetic oligonucleotide
  Antisense strand to SEQ ID NO: 1449014
aagaaacagacugauaucg

SEQ ID NO: 1449016 - RNA, 19 nt, Artificial Sequence
  Description of Artificial Sequence: Synthetic oligonucleotide
  Sense strand starting at position 2621 of SEQ ID NO: 1243888
ugggauuacaggcgagaaa

SEQ ID NO: 1449017 - RNA, 19 nt, Artificial Sequence
  Description of Artificial Sequence: Synthetic oligonucleotide
  Antisense strand to SEQ ID NO: 1449016
uuucucgccuguaauccca

SEQ ID NO: 1449018 - RNA, 19 nt, Artificial Sequence
  Description of Artificial Sequence: Synthetic oligonucleotide
  Sense strand starting at position 2730 of SEQ ID NO: 1243888
ggacauuguuguugacacu

SEQ ID NO: 1449019 - RNA, 19 nt, Artificial Sequence
  Description of Artificial Sequence: Synthetic oligonucleotide
  Antisense strand to SEQ ID NO: 1449018
agugucaacaacaaugucc

SEQ ID NO: 1449020 - RNA, 19 nt, Artificial Sequence
  Description of Artificial Sequence: Synthetic oligonucleotide
  Sense strand starting at position 2908 of SEQ ID NO: 1243888
cagccagucuauggaguaa

SEQ ID NO: 1449021 - RNA, 19 nt, Artificial Sequence
  Description of Artificial Sequence: Synthetic oligonucleotide
  Antisense strand to SEQ ID NO: 1449020
uuacuccauagacuggcug

SEQ ID NO: 1449022 - RNA, 19 nt, Artificial Sequence
  Description of Artificial Sequence: Synthetic oligonucleotide
  Sense strand starting at position 2912 of SEQ ID NO: 1243888
cagucuauggaguaaucca

SEQ ID NO: 1449023 - RNA, 19 nt, Artificial Sequence
  Description of Artificial Sequence: Synthetic oligonucleotide
  Antisense strand to SEQ ID NO: 1449022
uggauuacuccauagacug

SEQ ID NO: 1449024 - RNA, 19 nt, Artificial Sequence
  Description of Artificial Sequence: Synthetic oligonucleotide
  Sense strand starting at position 2953 of SEQ ID NO: 1243888
gcauguguugacugcugaa

SEQ ID NO: 1449025 - RNA, 19 nt, Artificial Sequence
  Description of Artificial Sequence: Synthetic oligonucleotide
  Antisense strand to SEQ ID NO: 1449024
uucagcagucaacacaugc

SEQ ID NO: 1449026 - RNA, 19 nt, Artificial Sequence
  Description of Artificial Sequence: Synthetic oligonucleotide
  Sense strand starting at position 2960 of SEQ ID NO: 1243888
uugacugcugaaugacaaa

SEQ ID NO: 1449027 - RNA, 19 nt, Artificial Sequence
  Description of Artificial Sequence: Synthetic oligonucleotide
  Antisense strand to SEQ ID NO: 1449026
uuugucauucagcagucaa

SEQ ID NO: 1449028 - RNA, 19 nt, Artificial Sequence
  Description of Artificial Sequence: Synthetic oligonucleotide
  Sense strand starting at position 3381 of SEQ ID NO: 1243888
gggucaccugcccagauaa

SEQ ID NO: 1449029 - RNA, 19 nt, Artificial Sequence
  Description of Artificial Sequence: Synthetic oligonucleotide
  Antisense strand to SEQ ID NO: 1449028
uuaucugggcaggugaccc

SEQ ID NO: 1449030 - RNA, 19 nt, Artificial Sequence
  Description of Artificial Sequence: Synthetic oligonucleotide
  Sense strand starting at position 3383 of SEQ ID NO: 1243888
gucaccugcccagauaauu

SEQ ID NO: 1449031 - RNA, 19 nt, Artificial Sequence
  Description of Artificial Sequence: Synthetic oligonucleotide
  Antisense strand to SEQ ID NO: 1449030
aauuaucugggcaggugac

SEQ ID NO: 1449032 - RNA, 19 nt, Artificial Sequence
  Description of Artificial Sequence: Synthetic oligonucleotide
  Sense strand starting at position 3869 of SEQ ID NO: 1243888
aaaucugaauguguugcua

SEQ ID NO: 1449033 - RNA, 19 nt, Artificial Sequence
  Description of Artificial Sequence: Synthetic oligonucleotide
  Antisense strand to SEQ ID NO: 1449032
uagcaacacauucagauuu

SEQ ID NO: 1449034 - RNA, 19 nt, Artificial Sequence
  Description of Artificial Sequence: Synthetic oligonucleotide
  Sense strand starting at position 3878 of SEQ ID NO: 1243888
uguguugcuaccuugugua

SEQ ID NO: 1449035 - RNA, 19 nt, Artificial Sequence
  Description of Artificial Sequence: Synthetic oligonucleotide
  Antisense strand to SEQ ID NO: 1449034
uacacaagguagcaacaca

SEQ ID NO: 1449036 - RNA, 19 nt, Artificial Sequence
  Description of Artificial Sequence: Synthetic oligonucleotide
  Sense strand starting at position 3928 of SEQ ID NO: 1243888
cccaguuuagcucagagca

SEQ ID NO: 1449037 - RNA, 19 nt, Artificial Sequence
  Description of Artificial Sequence: Synthetic oligonucleotide
  Antisense strand to SEQ ID NO: 1449036
ugcucugagcuaaacuggg

SEQ ID NO: 1449038 - RNA, 19 nt, Artificial Sequence
  Description of Artificial Sequence: Synthetic oligonucleotide
  Sense strand starting at position 3930 of SEQ ID NO: 1243888
caguuuagcucagagcaua

SEQ ID NO: 1449039 - RNA, 19 nt, Artificial Sequence
  Description of Artificial Sequence: Synthetic oligonucleotide
  Antisense strand to SEQ ID NO: 1449038
uaugcucugagcuaaacug

SEQ ID NO: 1449040 - RNA, 19 nt, Artificial Sequence
  Description of Artificial Sequence: Synthetic oligonucleotide
  Sense strand starting at position 68 of SEQ ID NO: 1243889
ugaaauguuagaugguauu

SEQ ID NO: 1449041 - RNA, 19 nt, Artificial Sequence
  Description of Artificial Sequence: Synthetic oligonucleotide
  Antisense strand to SEQ ID NO: 1449040
aauaccaucuaacauuuca

SEQ ID NO: 1449042 - RNA, 19 nt, Artificial Sequence
  Description of Artificial Sequence: Synthetic oligonucleotide
  Sense strand starting at position 267 of SEQ ID NO: 1243889
gcaaaugaugucuggccua

SEQ ID NO: 1449043 - RNA, 19 nt, Artificial Sequence
  Description of Artificial Sequence: Synthetic oligonucleotide
  Antisense strand to SEQ ID NO: 1449042
uaggccagacaucauuugc

SEQ ID NO: 1449044 - RNA, 19 nt, Artificial Sequence
  Description of Artificial Sequence: Synthetic oligonucleotide
  Sense strand starting at position 679 of SEQ ID NO: 1243889
cauguugagucguuaauga

SEQ ID NO: 1449045 - RNA, 19 nt, Artificial Sequence
  Description of Artificial Sequence: Synthetic oligonucleotide
  Antisense strand to SEQ ID NO: 1449044
ucauuaacgacucaacaug

SEQ ID NO: 1449046 - RNA, 19 nt, Artificial Sequence
  Description of Artificial Sequence: Synthetic oligonucleotide
  Sense strand starting at position 684 of SEQ ID NO: 1243889
ugagucguuaaugaugaga

SEQ ID NO: 1449047 - RNA, 19 nt, Artificial Sequence
  Description of Artificial Sequence: Synthetic oligonucleotide
  Antisense strand to SEQ ID NO: 1449046
ucucaucauuaacgacuca

SEQ ID NO: 1449048 - RNA, 19 nt, Artificial Sequence
  Description of Artificial Sequence: Synthetic oligonucleotide
  Sense strand starting at position 687 of SEQ ID NO: 1243889
gucguuaaugaugagaaua

SEQ ID NO: 1449049 - RNA, 19 nt, Artificial Sequence
  Description of Artificial Sequence: Synthetic oligonucleotide
  Antisense strand to SEQ ID NO: 1449048
uauucucaucauuaacgac

SEQ ID NO: 1449050 - RNA, 19 nt, Artificial Sequence
  Description of Artificial Sequence: Synthetic oligonucleotide
  Sense strand starting at position 747 of SEQ ID NO: 1243889
gguuauaugcagcaaggaa

SEQ ID NO: 1449051 - RNA, 19 nt, Artificial Sequence
  Description of Artificial Sequence: Synthetic oligonucleotide
  Antisense strand to SEQ ID NO: 1449050
uuccuugcugcauauaacc

SEQ ID NO: 1449052 - RNA, 19 nt, Artificial Sequence
  Description of Artificial Sequence: Synthetic oligonucleotide
  Sense strand starting at position 859 of SEQ ID NO: 1243889
cguuaauaguacucugaag

SEQ ID NO: 1449053 - RNA, 19 nt, Artificial Sequence
  Description of Artificial Sequence: Synthetic oligonucleotide
  Antisense strand to SEQ ID NO: 1449052
cuucagaguacuauuaacg

SEQ ID NO: 1449054 - RNA, 19 nt, Artificial Sequence
  Description of Artificial Sequence: Synthetic oligonucleotide
  Sense strand starting at position 861 of SEQ ID NO: 1243889
uuaauaguacucugaagau

SEQ ID NO: 1449055 - RNA, 19 nt, Artificial Sequence
  Description of Artificial Sequence: Synthetic oligonucleotide
  Antisense strand to SEQ ID NO: 1449054
aucuucagaguacuauuaa

SEQ ID NO: 1449056 - RNA, 19 nt, Artificial Sequence
  Description of Artificial Sequence: Synthetic oligonucleotide
  Sense strand starting at position 873 of SEQ ID NO: 1243889
ugaagauuauccguccuau

SEQ ID NO: 1449057 - RNA, 19 nt, Artificial Sequence
  Description of Artificial Sequence: Synthetic oligonucleotide
  Antisense strand to SEQ ID NO: 1449056
auaggacggauaaucuuca

SEQ ID NO: 1449058 - RNA, 19 nt, Artificial Sequence
  Description of Artificial Sequence: Synthetic oligonucleotide
  Sense strand starting at position 924 of SEQ ID NO: 1243889
uauauauucgaggguauag

SEQ ID NO: 1449059 - RNA, 19 nt, Artificial Sequence
  Description of Artificial Sequence: Synthetic oligonucleotide
  Antisense strand to SEQ ID NO: 1449058
cuauacccucgaauauaua

SEQ ID NO: 1449060 - RNA, 19 nt, Artificial Sequence
  Description of Artificial Sequence: Synthetic oligonucleotide
  Sense strand starting at position 948 of SEQ ID NO: 1243889
ccauauggcuuuccuguau

SEQ ID NO: 1449061 - RNA, 19 nt, Artificial Sequence
  Description of Artificial Sequence: Synthetic oligonucleotide
  Antisense strand to SEQ ID NO: 1449060
auacaggaaagccauaugg

SEQ ID NO: 1449062 - RNA, 19 nt, Artificial Sequence
  Description of Artificial Sequence: Synthetic oligonucleotide
  Sense strand starting at position 952 of SEQ ID NO: 1243889
auggcuuuccuguaucuuu

SEQ ID NO: 1449063 - RNA, 19 nt, Artificial Sequence
  Description of Artificial Sequence: Synthetic oligonucleotide
  Antisense strand to SEQ ID NO: 1449062
aaagauacaggaaagccau

SEQ ID NO: 1449064 - RNA, 19 nt, Artificial Sequence
  Description of Artificial Sequence: Synthetic oligonucleotide
  Sense strand starting at position 971 of SEQ ID NO: 1243889
gauaacucuugcccuguga

SEQ ID NO: 1449065 - RNA, 19 nt, Artificial Sequence
  Description of Artificial Sequence: Synthetic oligonucleotide
  Antisense strand to SEQ ID NO: 1449064
ucacagggcaagaguuauc

SEQ ID NO: 1449066 - RNA, 19 nt, Artificial Sequence
  Description of Artificial Sequence: Synthetic oligonucleotide
  Sense strand starting at position 975 of SEQ ID NO: 1243889
acucuugcccugugaaaca

SEQ ID NO: 1449067 - RNA, 19 nt, Artificial Sequence
  Description of Artificial Sequence: Synthetic oligonucleotide
  Antisense strand to SEQ ID NO: 1449066
uguuucacagggcaagagu

SEQ ID NO: 1449068 - RNA, 19 nt, Artificial Sequence
  Description of Artificial Sequence: Synthetic oligonucleotide
  Sense strand starting at position 1236 of SEQ ID NO: 1243889
ccgcauuuauugucaaaug

SEQ ID NO: 1449069 - RNA, 19 nt, Artificial Sequence
  Description of Artificial Sequence: Synthetic oligonucleotide
  Antisense strand to SEQ ID NO: 1449068
cauuugacaauaaaugcgg

SEQ ID NO: 1449070 - RNA, 19 nt, Artificial Sequence
  Description of Artificial Sequence: Synthetic oligonucleotide
  Sense strand starting at position 2236 of SEQ ID NO: 1243889
guaucuccauugcucagau

SEQ ID NO: 1449071 - RNA, 19 nt, Artificial Sequence
  Description of Artificial Sequence: Synthetic oligonucleotide
  Antisense strand to SEQ ID NO: 1449070
aucugagcaauggagauac

SEQ ID NO: 1449072 - RNA, 19 nt, Artificial Sequence
  Description of Artificial Sequence: Synthetic oligonucleotide
  Sense strand starting at position 2238 of SEQ ID NO: 1243889
aucuccauugcucagauga

SEQ ID NO: 1449073 - RNA, 19 nt, Artificial Sequence
  Description of Artificial Sequence: Synthetic oligonucleotide
  Antisense strand to SEQ ID NO: 1449072
ucaucugagcaauggagau

SEQ ID NO: 1449074 - RNA, 19 nt, Artificial Sequence
  Description of Artificial Sequence: Synthetic oligonucleotide
  Sense strand starting at position 2514 of SEQ ID NO: 1243889
ugcagugagcuguaaugga

SEQ ID NO: 1449075 - RNA, 19 nt, Artificial Sequence
  Description of Artificial Sequence: Synthetic oligonucleotide
  Antisense strand to SEQ ID NO: 1449074
uccauuacagcucacugca

SEQ ID NO: 1449076 - RNA, 19 nt, Artificial Sequence
  Description of Artificial Sequence: Synthetic oligonucleotide
  Sense strand starting at position 3137 of SEQ ID NO: 1243889
aaguguuaucuguaaggac

SEQ ID NO: 1449077 - RNA, 19 nt, Artificial Sequence
  Description of Artificial Sequence: Synthetic oligonucleotide
  Antisense strand to SEQ ID NO: 1449076
guccuuacagauaacacuu

SEQ ID NO: 1449078 - RNA, 19 nt, Artificial Sequence
  Description of Artificial Sequence: Synthetic oligonucleotide
  Sense strand starting at position 3146 of SEQ ID NO: 1243889
cuguaaggaccguagugaa

SEQ ID NO: 1449079 - RNA, 19 nt, Artificial Sequence
  Description of Artificial Sequence: Synthetic oligonucleotide
  Antisense strand to SEQ ID NO: 1449078
uucacuacgguccuuacag

SEQ ID NO: 1449080 - RNA, 19 nt, Artificial Sequence
  Description of Artificial Sequence: Synthetic oligonucleotide
  Sense strand starting at position 3189 of SEQ ID NO: 1243889
ccggaagguaucugucaca

SEQ ID NO: 1449081 - RNA, 19 nt, Artificial Sequence
  Description of Artificial Sequence: Synthetic oligonucleotide
  Antisense strand to SEQ ID NO: 1449080
ugugacagauaccuuccgg

SEQ ID NO: 1449082 - RNA, 19 nt, Artificial Sequence
  Description of Artificial Sequence: Synthetic oligonucleotide
  Sense strand starting at position 3203 of SEQ ID NO: 1243889
ucacaauaggugugacugu

SEQ ID NO: 1449083 - RNA, 19 nt, Artificial Sequence
  Description of Artificial Sequence: Synthetic oligonucleotide
  Antisense strand to SEQ ID NO: 1449082
acagucacaccuauuguga

SEQ ID NO: 1449084 - RNA, 19 nt, Artificial Sequence
  Description of Artificial Sequence: Synthetic oligonucleotide
  Sense strand starting at position 3212 of SEQ ID NO: 1243889
gugugacuguauguaauaa

SEQ ID NO: 1449085 - RNA, 19 nt, Artificial Sequence
  Description of Artificial Sequence: Synthetic oligonucleotide
  Antisense strand to SEQ ID NO: 1449084
uuauuacauacagucacac

SEQ ID NO: 1449086 - RNA, 19 nt, Artificial Sequence
  Description of Artificial Sequence: Synthetic oligonucleotide
  Sense strand starting at position 3474 of SEQ ID NO: 1243889
gcaagacccuaugucuaua

SEQ ID NO: 1449087 - RNA, 19 nt, Artificial Sequence
  Description of Artificial Sequence: Synthetic oligonucleotide
  Antisense strand to SEQ ID NO: 1449086
uauagacauagggucuugc

SEQ ID NO: 1449088 - RNA, 19 nt, Artificial Sequence
  Description of Artificial Sequence: Synthetic oligonucleotide
  Sense strand starting at position 3552 of SEQ ID NO: 1243889
acaugaaucuuggucucau

SEQ ID NO: 1449089 - RNA, 19 nt, Artificial Sequence
  Description of Artificial Sequence: Synthetic oligonucleotide
  Antisense strand to SEQ ID NO: 1449088
augagaccaagauucaugu

SEQ ID NO: 1449090 - RNA, 19 nt, Artificial Sequence
  Description of Artificial Sequence: Synthetic oligonucleotide
  Sense strand starting at position 3596 of SEQ ID NO: 1243889
gaaggcaagaaguguguau

SEQ ID NO: 1449091 - RNA, 19 nt, Artificial Sequence
  Description of Artificial Sequence: Synthetic oligonucleotide
  Antisense strand to SEQ ID NO: 1449090
auacacacuucuugccuuc

SEQ ID NO: 1449092 - RNA, 19 nt, Artificial Sequence
  Description of Artificial Sequence: Synthetic oligonucleotide
  Sense strand starting at position 3598 of SEQ ID NO: 1243889
aggcaagaaguguguaucu

SEQ ID NO: 1449093 - RNA, 19 nt, Artificial Sequence
  Description of Artificial Sequence: Synthetic oligonucleotide
  Antisense strand to SEQ ID NO: 1449092
agauacacacuucuugccu

SEQ ID NO: 1449094 - RNA, 19 nt, Artificial Sequence
  Description of Artificial Sequence: Synthetic oligonucleotide
  Sense strand starting at position 3600 of SEQ ID NO: 1243889
gcaagaaguguguaucuaa

SEQ ID NO: 1449095 - RNA, 19 nt, Artificial Sequence
  Description of Artificial Sequence: Synthetic oligonucleotide
  Antisense strand to SEQ ID NO: 1449094
uuagauacacacuucuugc

SEQ ID NO: 1449096 - RNA, 19 nt, Artificial Sequence
  Description of Artificial Sequence: Synthetic oligonucleotide
  Sense strand starting at position 3603 of SEQ ID NO: 1243889
agaaguguguaucuaacau

SEQ ID NO: 1449097 - RNA, 19 nt, Artificial Sequence
  Description of Artificial Sequence: Synthetic oligonucleotide
  Antisense strand to SEQ ID NO: 1449096
auguuagauacacacuucu

SEQ ID NO: 1449098 - RNA, 19 nt, Artificial Sequence
  Description of Artificial Sequence: Synthetic oligonucleotide
  Sense strand starting at position 3745 of SEQ ID NO: 1243889
gaguaaauguucucgagga

SEQ ID NO: 1449099 - RNA, 19 nt, Artificial Sequence
  Description of Artificial Sequence: Synthetic oligonucleotide
  Antisense strand to SEQ ID NO: 1449098
uccucgagaacauuuacuc

SEQ ID NO: 1449100 - RNA, 19 nt, Artificial Sequence
  Description of Artificial Sequence: Synthetic oligonucleotide
  Sense strand starting at position 3747 of SEQ ID NO: 1243889
guaaauguucucgaggaaa

SEQ ID NO: 1449101 - RNA, 19 nt, Artificial Sequence
  Description of Artificial Sequence: Synthetic oligonucleotide
  Antisense strand to SEQ ID NO: 1449100
uuuccucgagaacauuuac

SEQ ID NO: 1449102 - RNA, 19 nt, Artificial Sequence
  Description of Artificial Sequence: Synthetic oligonucleotide
  Sense strand starting at position 3749 of SEQ ID NO: 1243889
aaauguucucgaggaaacu

SEQ ID NO: 1449103 - RNA, 19 nt, Artificial Sequence
  Description of Artificial Sequence: Synthetic oligonucleotide
  Antisense strand to SEQ ID NO: 1449102
aguuuccucgagaacauuu

SEQ ID NO: 1449104 - RNA, 19 nt, Artificial Sequence
  Description of Artificial Sequence: Synthetic oligonucleotide
  Sense strand starting at position 3755 of SEQ ID NO: 1243889
ucucgaggaaacugguuua

SEQ ID NO: 1449105 - RNA, 19 nt, Artificial Sequence
  Description of Artificial Sequence: Synthetic oligonucleotide
  Antisense strand to SEQ ID NO: 1449104
uaaaccaguuuccucgaga

SEQ ID NO: 1449106 - RNA, 19 nt, Artificial Sequence
  Description of Artificial Sequence: Synthetic oligonucleotide
  Sense strand starting at position 3758 of SEQ ID NO: 1243889
cgaggaaacugguuuagaa

SEQ ID NO: 1449107 - RNA, 19 nt, Artificial Sequence
  Description of Artificial Sequence: Synthetic oligonucleotide
  Antisense strand to SEQ ID NO: 1449106
uucuaaaccaguuuccucg

SEQ ID NO: 1449108 - RNA, 19 nt, Artificial Sequence
  Description of Artificial Sequence: Synthetic oligonucleotide
  Sense strand starting at position 3766 of SEQ ID NO: 1243889
cugguuuagaaguagaugu

SEQ ID NO: 1449109 - RNA, 19 nt, Artificial Sequence
  Description of Artificial Sequence: Synthetic oligonucleotide
  Antisense strand to SEQ ID NO: 1449108
acaucuacuucuaaaccag

SEQ ID NO: 1449110 - RNA, 19 nt, Artificial Sequence
  Description of Artificial Sequence: Synthetic oligonucleotide
  Sense strand starting at position 3768 of SEQ ID NO: 1243889
gguuuagaaguagauguca

SEQ ID NO: 1449111 - RNA, 19 nt, Artificial Sequence
  Description of Artificial Sequence: Synthetic oligonucleotide
  Antisense strand to SEQ ID NO: 1449110
ugacaucuacuucuaaacc

SEQ ID NO: 1449112 - RNA, 19 nt, Artificial Sequence
  Description of Artificial Sequence: Synthetic oligonucleotide
  Sense strand starting at position 3777 of SEQ ID NO: 1243889
guagaugucagcuagccau

SEQ ID NO: 1449113 - RNA, 19 nt, Artificial Sequence
  Description of Artificial Sequence: Synthetic oligonucleotide
  Antisense strand to SEQ ID NO: 1449112
auggcuagcugacaucuac

SEQ ID NO: 1449114 - RNA, 19 nt, Artificial Sequence
  Description of Artificial Sequence: Synthetic oligonucleotide
  Sense strand starting at position 3812 of SEQ ID NO: 1243889
gagauaucuccauggcauc

SEQ ID NO: 1449115 - RNA, 19 nt, Artificial Sequence
  Description of Artificial Sequence: Synthetic oligonucleotide
  Antisense strand to SEQ ID NO: 1449114
gaugccauggagauaucuc

SEQ ID NO: 1449116 - RNA, 19 nt, Artificial Sequence
  Description of Artificial Sequence: Synthetic oligonucleotide
  Sense strand starting at position 3813 of SEQ ID NO: 1243889
agauaucuccauggcauca

SEQ ID NO: 1449117 - RNA, 19 nt, Artificial Sequence
  Description of Artificial Sequence: Synthetic oligonucleotide
  Antisense strand to SEQ ID NO: 1449116
ugaugccauggagauaucu

SEQ ID NO: 1449118 - RNA, 19 nt, Artificial Sequence
  Description of Artificial Sequence: Synthetic oligonucleotide
  Sense strand starting at position 3826 of SEQ ID NO: 1243889
gcaucacauugguccagaa

SEQ ID NO: 1449119 - RNA, 19 nt, Artificial Sequence
  Description of Artificial Sequence: Synthetic oligonucleotide
  Antisense strand to SEQ ID NO: 1449118
uucuggaccaaugugaugc

SEQ ID NO: 1449120 - RNA, 19 nt, Artificial Sequence
  Description of Artificial Sequence: Synthetic oligonucleotide
  Sense strand starting at position 148 of SEQ ID NO: 1243890
uugguaaagcuucgacaug

SEQ ID NO: 1449121 - RNA, 19 nt, Artificial Sequence
  Description of Artificial Sequence: Synthetic oligonucleotide
  Antisense strand to SEQ ID NO: 1449120
caugucgaagcuuuaccaa

SEQ ID NO: 1449122 - RNA, 19 nt, Artificial Sequence
  Description of Artificial Sequence: Synthetic oligonucleotide
  Sense strand starting at position 159 of SEQ ID NO: 1243890
ucgacaugcaguuauugua

SEQ ID NO: 1449123 - RNA, 19 nt, Artificial Sequence
  Description of Artificial Sequence: Synthetic oligonucleotide
  Antisense strand to SEQ ID NO: 1449122
uacaauaacugcaugucga

SEQ ID NO: 1449124 - RNA, 19 nt, Artificial Sequence
  Description of Artificial Sequence: Synthetic oligonucleotide
  Sense strand starting at position 621 of SEQ ID NO: 1243890
ucaugugacuggccaaaca

SEQ ID NO: 1449125 - RNA, 19 nt, Artificial Sequence
  Description of Artificial Sequence: Synthetic oligonucleotide
  Antisense strand to SEQ ID NO: 1449124
uguuuggccagucacauga

SEQ ID NO: 1449126 - RNA, 19 nt, Artificial Sequence
  Description of Artificial Sequence: Synthetic oligonucleotide
  Sense strand starting at position 1114 of SEQ ID NO: 1243890
uugcuugcuuucuugauuu

SEQ ID NO: 1449127 - RNA, 19 nt, Artificial Sequence
  Description of Artificial Sequence: Synthetic oligonucleotide
  Antisense strand to SEQ ID NO: 1449126
aaaucaagaaagcaagcaa

SEQ ID NO: 1449128 - RNA, 19 nt, Artificial Sequence
  Description of Artificial Sequence: Synthetic oligonucleotide
  Sense strand starting at position 1116 of SEQ ID NO: 1243890
gcuugcuuucuugauuuau

SEQ ID NO: 1449129 - RNA, 19 nt, Artificial Sequence
  Description of Artificial Sequence: Synthetic oligonucleotide
  Antisense strand to SEQ ID NO: 1449128
auaaaucaagaaagcaagc

SEQ ID NO: 1449130 - RNA, 19 nt, Artificial Sequence
  Description of Artificial Sequence: Synthetic oligonucleotide
  Sense strand starting at position 1464 of SEQ ID NO: 1243890
uuagguagacagugaagau

SEQ ID NO: 1449131 - RNA, 19 nt, Artificial Sequence
  Description of Artificial Sequence: Synthetic oligonucleotide
  Antisense strand to SEQ ID NO: 1449130
aucuucacugucuaccuaa

SEQ ID NO: 1449132 - RNA, 19 nt, Artificial Sequence
  Description of Artificial Sequence: Synthetic oligonucleotide
  Sense strand starting at position 1571 of SEQ ID NO: 1243890
uguauuagguuucuuagga

SEQ ID NO: 1449133 - RNA, 19 nt, Artificial Sequence
  Description of Artificial Sequence: Synthetic oligonucleotide
  Antisense strand to SEQ ID NO: 1449132
uccuaagaaaccuaauaca

SEQ ID NO: 1449134 - RNA, 19 nt, Artificial Sequence
  Description of Artificial Sequence: Synthetic oligonucleotide
  Sense strand starting at position 1572 of SEQ ID NO: 1243890
guauuagguuucuuaggac

SEQ ID NO: 1449135 - RNA, 19 nt, Artificial Sequence
  Description of Artificial Sequence: Synthetic oligonucleotide
  Antisense strand to SEQ ID NO: 1449134
guccuaagaaaccuaauac

SEQ ID NO: 1449136 - RNA, 19 nt, Artificial Sequence
  Description of Artificial Sequence: Synthetic oligonucleotide
  Sense strand starting at position 1616 of SEQ ID NO: 1243890
ugguauugggcccaggaau

SEQ ID NO: 1449137 - RNA, 19 nt, Artificial Sequence
  Description of Artificial Sequence: Synthetic oligonucleotide
  Antisense strand to SEQ ID NO: 1449136
auuccugggcccaauacca

SEQ ID NO: 1449138 - RNA, 19 nt, Artificial Sequence
  Description of Artificial Sequence: Synthetic oligonucleotide
  Sense strand starting at position 1627 of SEQ ID NO: 1243890
ccaggaaugaugcauguca

SEQ ID NO: 1449139 - RNA, 19 nt, Artificial Sequence
  Description of Artificial Sequence: Synthetic oligonucleotide
  Antisense strand to SEQ ID NO: 1449138
ugacaugcaucauuccugg

SEQ ID NO: 1449140 - RNA, 19 nt, Artificial Sequence
  Description of Artificial Sequence: Synthetic oligonucleotide
  Sense strand starting at position 1638 of SEQ ID NO: 1243890
gcaugucaacucuguaaua

SEQ ID NO: 1449141 - RNA, 19 nt, Artificial Sequence
  Description of Artificial Sequence: Synthetic oligonucleotide
  Antisense strand to SEQ ID NO: 1449140
uauuacagaguugacaugc

SEQ ID NO: 1449142 - RNA, 19 nt, Artificial Sequence
  Description of Artificial Sequence: Synthetic oligonucleotide
  Sense strand starting at position 1640 of SEQ ID NO: 1243890
augucaacucuguaauaua

SEQ ID NO: 1449143 - RNA, 19 nt, Artificial Sequence
  Description of Artificial Sequence: Synthetic oligonucleotide
  Antisense strand to SEQ ID NO: 1449142
uauauuacagaguugacau

SEQ ID NO: 1449144 - RNA, 19 nt, Artificial Sequence
  Description of Artificial Sequence: Synthetic oligonucleotide
  Sense strand starting at position 1775 of SEQ ID NO: 1243890
ugguuauugcuauauaagu

SEQ ID NO: 1449145 - RNA, 19 nt, Artificial Sequence
  Description of Artificial Sequence: Synthetic oligonucleotide
  Antisense strand to SEQ ID NO: 1449144
acuuauauagcaauaacca

SEQ ID NO: 1449146 - RNA, 19 nt, Artificial Sequence
  Description of Artificial Sequence: Synthetic oligonucleotide
  Sense strand starting at position 1819 of SEQ ID NO: 1243890
ggcugucuuccgccagagu

SEQ ID NO: 1449147 - RNA, 19 nt, Artificial Sequence
  Description of Artificial Sequence: Synthetic oligonucleotide
  Antisense strand to SEQ ID NO: 1449146
acucuggcggaagacagcc

SEQ ID NO: 1449148 - RNA, 19 nt, Artificial Sequence
  Description of Artificial Sequence: Synthetic oligonucleotide
  Sense strand starting at position 2079 of SEQ ID NO: 1243890
gccuuuguuccucaugauc

SEQ ID NO: 1449149 - RNA, 19 nt, Artificial Sequence
  Description of Artificial Sequence: Synthetic oligonucleotide
  Antisense strand to SEQ ID NO: 1449148
gaucaugaggaacaaaggc

SEQ ID NO: 1449150 - RNA, 19 nt, Artificial Sequence
  Description of Artificial Sequence: Synthetic oligonucleotide
  Sense strand starting at position 2132 of SEQ ID NO: 1243890
uuguuuaaaccagggauac

SEQ ID NO: 1449151 - RNA, 19 nt, Artificial Sequence
  Description of Artificial Sequence: Synthetic oligonucleotide
  Antisense strand to SEQ ID NO: 1449150
guaucccugguuuaaacaa

SEQ ID NO: 1449152 - RNA, 19 nt, Artificial Sequence
  Description of Artificial Sequence: Synthetic oligonucleotide
  Sense strand starting at position 2133 of SEQ ID NO: 1243890
uguuuaaaccagggauaca

SEQ ID NO: 1449153 - RNA, 19 nt, Artificial Sequence
  Description of Artificial Sequence: Synthetic oligonucleotide
  Antisense strand to SEQ ID NO: 1449152
uguaucccugguuuaaaca

SEQ ID NO: 1449154 - RNA, 19 nt, Artificial Sequence
  Description of Artificial Sequence: Synthetic oligonucleotide
  Sense strand starting at position 2240 of SEQ ID NO: 1243890
gacagaagucucugccaug

SEQ ID NO: 1449155 - RNA, 19 nt, Artificial Sequence
  Description of Artificial Sequence: Synthetic oligonucleotide
  Antisense strand to SEQ ID NO: 1449154
cauggcagagacuucuguc

SEQ ID NO: 1449156 - RNA, 19 nt, Artificial Sequence
  Description of Artificial Sequence: Synthetic oligonucleotide
  Sense strand starting at position 2241 of SEQ ID NO: 1243890
acagaagucucugccauga

SEQ ID NO: 1449157 - RNA, 19 nt, Artificial Sequence
  Description of Artificial Sequence: Synthetic oligonucleotide
  Antisense strand to SEQ ID NO: 1449156
ucauggcagagacuucugu

SEQ ID NO: 1449158 - RNA, 19 nt, Artificial Sequence
  Description of Artificial Sequence: Synthetic oligonucleotide
  Sense strand starting at position 2245 of SEQ ID NO: 1243890
aagucucugccaugaguac

SEQ ID NO: 1449159 - RNA, 19 nt, Artificial Sequence
  Description of Artificial Sequence: Synthetic oligonucleotide
  Antisense strand to SEQ ID NO: 1449158
guacucauggcagagacuu

SEQ ID NO: 1449160 - RNA, 19 nt, Artificial Sequence
  Description of Artificial Sequence: Synthetic oligonucleotide
  Sense strand starting at position 2256 of SEQ ID NO: 1243890
augaguacuugucucuugu

SEQ ID NO: 1449161 - RNA, 19 nt, Artificial Sequence
  Description of Artificial Sequence: Synthetic oligonucleotide
  Antisense strand to SEQ ID NO: 1449160
acaagagacaaguacucau

SEQ ID NO: 1449162 - RNA, 19 nt, Artificial Sequence
  Description of Artificial Sequence: Synthetic oligonucleotide
  Sense strand starting at position 2384 of SEQ ID NO: 1243890
gugcauuucuuguuguuua

SEQ ID NO: 1449163 - RNA, 19 nt, Artificial Sequence
  Description of Artificial Sequence: Synthetic oligonucleotide
  Antisense strand to SEQ ID NO: 1449162
uaaacaacaagaaaugcac

SEQ ID NO: 1449164 - RNA, 19 nt, Artificial Sequence
  Description of Artificial Sequence: Synthetic oligonucleotide
  Sense strand starting at position 2455 of SEQ ID NO: 1243890
cauuguauucuugggaauc

SEQ ID NO: 1449165 - RNA, 19 nt, Artificial Sequence
  Description of Artificial Sequence: Synthetic oligonucleotide
  Antisense strand to SEQ ID NO: 1449164
gauucccaagaauacaaug

SEQ ID NO: 1449166 - RNA, 19 nt, Artificial Sequence
  Description of Artificial Sequence: Synthetic oligonucleotide
  Sense strand starting at position 2466 of SEQ ID NO: 1243890
ugggaaucuuuauuaugcu

SEQ ID NO: 1449167 - RNA, 19 nt, Artificial Sequence
  Description of Artificial Sequence: Synthetic oligonucleotide
  Antisense strand to SEQ ID NO: 1449166
agcauaauaaagauuccca

SEQ ID NO: 1449168 - RNA, 19 nt, Artificial Sequence
  Description of Artificial Sequence: Synthetic oligonucleotide
  Sense strand starting at position 2519 of SEQ ID NO: 1243890
auuauaguugacuagcaga

SEQ ID NO: 1449169 - RNA, 19 nt, Artificial Sequence
  Description of Artificial Sequence: Synthetic oligonucleotide
  Antisense strand to SEQ ID NO: 1449168
ucugcuagucaacuauaau

SEQ ID NO: 1449170 - RNA, 19 nt, Artificial Sequence
  Description of Artificial Sequence: Synthetic oligonucleotide
  Sense strand starting at position 2535 of SEQ ID NO: 1243890
agacaugugucucucugua

SEQ ID NO: 1449171 - RNA, 19 nt, Artificial Sequence
  Description of Artificial Sequence: Synthetic oligonucleotide
  Antisense strand to SEQ ID NO: 1449170
uacagagagacacaugucu

SEQ ID NO: 1449172 - RNA, 19 nt, Artificial Sequence
  Description of Artificial Sequence: Synthetic oligonucleotide
  Sense strand starting at position 2901 of SEQ ID NO: 1243890
gcccucccucaggaguaau

SEQ ID NO: 1449173 - RNA, 19 nt, Artificial Sequence
  Description of Artificial Sequence: Synthetic oligonucleotide
  Antisense strand to SEQ ID NO: 1449172
auuacuccugagggagggc

SEQ ID NO: 1449174 - RNA, 19 nt, Artificial Sequence
  Description of Artificial Sequence: Synthetic oligonucleotide
  Sense strand starting at position 2974 of SEQ ID NO: 1243890
ugcaguucugaauauaaac

SEQ ID NO: 1449175 - RNA, 19 nt, Artificial Sequence
  Description of Artificial Sequence: Synthetic oligonucleotide
  Antisense strand to SEQ ID NO: 1449174
guuuauauucagaacugca

SEQ ID NO: 1449176 - RNA, 19 nt, Artificial Sequence
  Description of Artificial Sequence: Synthetic oligonucleotide
  Sense strand starting at position 2995 of SEQ ID NO: 1243890
ugagcauauaauggaugua

SEQ ID NO: 1449177 - RNA, 19 nt, Artificial Sequence
  Description of Artificial Sequence: Synthetic oligonucleotide
  Antisense strand to SEQ ID NO: 1449176
uacauccauuauaugcuca

SEQ ID NO: 1449178 - RNA, 19 nt, Artificial Sequence
  Description of Artificial Sequence: Synthetic oligonucleotide
  Sense strand starting at position 2998 of SEQ ID NO: 1243890
gcauauaauggauguaacu

SEQ ID NO: 1449179 - RNA, 19 nt, Artificial Sequence
  Description of Artificial Sequence: Synthetic oligonucleotide
  Antisense strand to SEQ ID NO: 1449178
aguuacauccauuauaugc

SEQ ID NO: 1449180 - RNA, 19 nt, Artificial Sequence
  Description of Artificial Sequence: Synthetic oligonucleotide
  Sense strand starting at position 3007 of SEQ ID NO: 1243890
ggauguaacuuaucuguuu

SEQ ID NO: 1449181 - RNA, 19 nt, Artificial Sequence
  Description of Artificial Sequence: Synthetic oligonucleotide
  Antisense strand to SEQ ID NO: 1449180
aaacagauaaguuacaucc

SEQ ID NO: 1449182 - RNA, 19 nt, Artificial Sequence
  Description of Artificial Sequence: Synthetic oligonucleotide
  Sense strand starting at position 3091 of SEQ ID NO: 1243890
cuuugucuuccauguuaau

SEQ ID NO: 1449183 - RNA, 19 nt, Artificial Sequence
  Description of Artificial Sequence: Synthetic oligonucleotide
  Antisense strand to SEQ ID NO: 1449182
auuaacauggaagacaaag

SEQ ID NO: 1449184 - RNA, 19 nt, Artificial Sequence
  Description of Artificial Sequence: Synthetic oligonucleotide
  Sense strand starting at position 3304 of SEQ ID NO: 1243890
ugugaaguugucuaggcaa

SEQ ID NO: 1449185 - RNA, 19 nt, Artificial Sequence
  Description of Artificial Sequence: Synthetic oligonucleotide
  Antisense strand to SEQ ID NO: 1449184
uugccuagacaacuucaca

SEQ ID NO: 1449186 - RNA, 19 nt, Artificial Sequence
  Description of Artificial Sequence: Synthetic oligonucleotide
  Sense strand starting at position 3768 of SEQ ID NO: 1243890
aguuacuaugcguauagua

SEQ ID NO: 1449187 - RNA, 19 nt, Artificial Sequence
  Description of Artificial Sequence: Synthetic oligonucleotide
  Antisense strand to SEQ ID NO: 1449186
uacuauacgcauaguaacu

SEQ ID NO: 1449188 - RNA, 19 nt, Artificial Sequence
  Description of Artificial Sequence: Synthetic oligonucleotide
  Sense strand starting at position 3776 of SEQ ID NO: 1243890
ugcguauaguaccuuaaag

SEQ ID NO: 1449189 - RNA, 19 nt, Artificial Sequence
  Description of Artificial Sequence: Synthetic oligonucleotide
  Antisense strand to SEQ ID NO: 1449188
cuuuaagguacuauacgca

SEQ ID NO: 1449190 - RNA, 19 nt, Artificial Sequence
  Description of Artificial Sequence: Synthetic oligonucleotide
  Sense strand starting at position 3778 of SEQ ID NO: 1243890
cguauaguaccuuaaagug

SEQ ID NO: 1449191 - RNA, 19 nt, Artificial Sequence
  Description of Artificial Sequence: Synthetic oligonucleotide
  Antisense strand to SEQ ID NO: 1449190
cacuuuaagguacuauacg

SEQ ID NO: 1449192 - RNA, 19 nt, Artificial Sequence
  Description of Artificial Sequence: Synthetic oligonucleotide
  Sense strand starting at position 3883 of SEQ ID NO: 1243890
agauguguucugcaagcau

SEQ ID NO: 1449193 - RNA, 19 nt, Artificial Sequence
  Description of Artificial Sequence: Synthetic oligonucleotide
  Antisense strand to SEQ ID NO: 1449192
augcuugcagaacacaucu

SEQ ID NO: 1449194 - RNA, 19 nt, Artificial Sequence
  Description of Artificial Sequence: Synthetic oligonucleotide
  Sense strand starting at position 3944 of SEQ ID NO: 1243890
ggcuuugagccaggcagau

SEQ ID NO: 1449195 - RNA, 19 nt, Artificial Sequence
  Description of Artificial Sequence: Synthetic oligonucleotide
  Antisense strand to SEQ ID NO: 1449194
aucugccuggcucaaagcc

SEQ ID NO: 1449196 - RNA, 19 nt, Artificial Sequence
  Description of Artificial Sequence: Synthetic oligonucleotide
  Sense strand starting at position 3977 of SEQ ID NO: 1243890
caguuuccuggcugggaga

SEQ ID NO: 1449197 - RNA, 19 nt, Artificial Sequence
  Description of Artificial Sequence: Synthetic oligonucleotide
  Antisense strand to SEQ ID NO: 1449196
ucucccagccaggaaacug

SEQ ID NO: 1449198 - RNA, 19 nt, Artificial Sequence
  Description of Artificial Sequence: Synthetic oligonucleotide
  Sense strand starting at position 3979 of SEQ ID NO: 1243890
guuuccuggcugggagauu

SEQ ID NO: 1449199 - RNA, 19 nt, Artificial Sequence
  Description of Artificial Sequence: Synthetic oligonucleotide
  Antisense strand to SEQ ID NO: 1449198
aaucucccagccaggaaac

SEQ ID NO: 1449200 - RNA, 19 nt, Artificial Sequence
  Description of Artificial Sequence: Synthetic oligonucleotide
  Sense strand starting at position 604 of SEQ ID NO: 1243891
cugagugggcguuauuaca

SEQ ID NO: 1449201 - RNA, 19 nt, Artificial Sequence
  Description of Artificial Sequence: Synthetic oligonucleotide
  Antisense strand to SEQ ID NO: 1449200
uguaauaacgcccacucag

SEQ ID NO: 1449202 - RNA, 19 nt, Artificial Sequence
  Description of Artificial Sequence: Synthetic oligonucleotide
  Sense strand starting at position 613 of SEQ ID NO: 1243891
cguuauuacaaaugaggaa

SEQ ID NO: 1449203 - RNA, 19 nt, Artificial Sequence
  Description of Artificial Sequence: Synthetic oligonucleotide
  Antisense strand to SEQ ID NO: 1449202
uuccucauuuguaauaacg

SEQ ID NO: 1449204 - RNA, 19 nt, Artificial Sequence
  Description of Artificial Sequence: Synthetic oligonucleotide
  Sense strand starting at position 869 of SEQ ID NO: 1243891
gcagccugccugugagaca

SEQ ID NO: 1449205 - RNA, 19 nt, Artificial Sequence
  Description of Artificial Sequence: Synthetic oligonucleotide
  Antisense strand to SEQ ID NO: 1449204
ugucucacaggcaggcugc

SEQ ID NO: 1449206 - RNA, 19 nt, Artificial Sequence
  Description of Artificial Sequence: Synthetic oligonucleotide
  Sense strand starting at position 1291 of SEQ ID NO: 1243891
ugcccuuucuccugaaugu

SEQ ID NO: 1449207 - RNA, 19 nt, Artificial Sequence
  Description of Artificial Sequence: Synthetic oligonucleotide
  Antisense strand to SEQ ID NO: 1449206
acauucaggagaaagggca

SEQ ID NO: 1449208 - RNA, 19 nt, Artificial Sequence
  Description of Artificial Sequence: Synthetic oligonucleotide
  Sense strand starting at position 1292 of SEQ ID NO: 1243891
gcccuuucuccugaaugua

SEQ ID NO: 1449209 - RNA, 19 nt, Artificial Sequence
  Description of Artificial Sequence: Synthetic oligonucleotide
  Antisense strand to SEQ ID NO: 1449208
uacauucaggagaaagggc

SEQ ID NO: 1449210 - RNA, 19 nt, Artificial Sequence
  Description of Artificial Sequence: Synthetic oligonucleotide
  Sense strand starting at position 1295 of SEQ ID NO: 1243891
cuuucuccugaauguaaug

SEQ ID NO: 1449211 - RNA, 19 nt, Artificial Sequence
  Description of Artificial Sequence: Synthetic oligonucleotide
  Antisense strand to SEQ ID NO: 1449210
cauuacauucaggagaaag

SEQ ID NO: 1449212 - RNA, 19 nt, Artificial Sequence
  Description of Artificial Sequence: Synthetic oligonucleotide
  Sense strand starting at position 1996 of SEQ ID NO: 1243891
acgacuaaggcuuaguaau

SEQ ID NO: 1449213 - RNA, 19 nt, Artificial Sequence
  Description of Artificial Sequence: Synthetic oligonucleotide
  Antisense strand to SEQ ID NO: 1449212
auuacuaagccuuagucgu

SEQ ID NO: 1449214 - RNA, 19 nt, Artificial Sequence
  Description of Artificial Sequence: Synthetic oligonucleotide
  Sense strand starting at position 2009 of SEQ ID NO: 1243891
aguaauaacuucccaggau

SEQ ID NO: 1449215 - RNA, 19 nt, Artificial Sequence
  Description of Artificial Sequence: Synthetic oligonucleotide
  Antisense strand to SEQ ID NO: 1449214
auccugggaaguuauuacu

SEQ ID NO: 1449216 - RNA, 19 nt, Artificial Sequence
  Description of Artificial Sequence: Synthetic oligonucleotide
  Sense strand starting at position 2030 of SEQ ID NO: 1243891
augcaaauuugguguccaa

SEQ ID NO: 1449217 - RNA, 19 nt, Artificial Sequence
  Description of Artificial Sequence: Synthetic oligonucleotide
  Antisense strand to SEQ ID NO: 1449216
uuggacaccaaauuugcau

SEQ ID NO: 1449218 - RNA, 19 nt, Artificial Sequence
  Description of Artificial Sequence: Synthetic oligonucleotide
  Sense strand starting at position 2037 of SEQ ID NO: 1243891
uuugguguccaagacaaug

SEQ ID NO: 1449219 - RNA, 19 nt, Artificial Sequence
  Description of Artificial Sequence: Synthetic oligonucleotide
  Antisense strand to SEQ ID NO: 1449218
cauugucuuggacaccaaa

SEQ ID NO: 1449220 - RNA, 19 nt, Artificial Sequence
  Description of Artificial Sequence: Synthetic oligonucleotide
  Sense strand starting at position 2073 of SEQ ID NO: 1243891
aaagcuguuugcgaaaguu

SEQ ID NO: 1449221 - RNA, 19 nt, Artificial Sequence
  Description of Artificial Sequence: Synthetic oligonucleotide
  Antisense strand to SEQ ID NO: 1449220
aacuuucgcaaacagcuuu

SEQ ID NO: 1449222 - RNA, 19 nt, Artificial Sequence
  Description of Artificial Sequence: Synthetic oligonucleotide
  Sense strand starting at position 2092 of SEQ ID NO: 1243891
uugugaaauuguggaaucu

SEQ ID NO: 1449223 - RNA, 19 nt, Artificial Sequence
  Description of Artificial Sequence: Synthetic oligonucleotide
  Antisense strand to SEQ ID NO: 1449222
agauuccacaauuucacaa

SEQ ID NO: 1449224 - RNA, 19 nt, Artificial Sequence
  Description of Artificial Sequence: Synthetic oligonucleotide
  Sense strand starting at position 2101 of SEQ ID NO: 1243891
uguggaaucucugauccuc

SEQ ID NO: 1449225 - RNA, 19 nt, Artificial Sequence
  Description of Artificial Sequence: Synthetic oligonucleotide
  Antisense strand to SEQ ID NO: 1449224
gaggaucagagauuccaca

SEQ ID NO: 1449226 - RNA, 19 nt, Artificial Sequence
  Description of Artificial Sequence: Synthetic oligonucleotide
  Sense strand starting at position 2185 of SEQ ID NO: 1243891
cccagaguguuugaacaga

SEQ ID NO: 1449227 - RNA, 19 nt, Artificial Sequence
  Description of Artificial Sequence: Synthetic oligonucleotide
  Antisense strand to SEQ ID NO: 1449226
ucuguucaaacacucuggg

SEQ ID NO: 1449228 - RNA, 19 nt, Artificial Sequence
  Description of Artificial Sequence: Synthetic oligonucleotide
  Sense strand starting at position 2366 of SEQ ID NO: 1243891
cccaaauucuaagagagaa

SEQ ID NO: 1449229 - RNA, 19 nt, Artificial Sequence
  Description of Artificial Sequence: Synthetic oligonucleotide
  Antisense strand to SEQ ID NO: 1449228
uucucucuuagaauuuggg

SEQ ID NO: 1449230 - RNA, 19 nt, Artificial Sequence
  Description of Artificial Sequence: Synthetic oligonucleotide
  Sense strand starting at position 2550 of SEQ ID NO: 1243891
aguugauuagcugggaacu

SEQ ID NO: 1449231 - RNA, 19 nt, Artificial Sequence
  Description of Artificial Sequence: Synthetic oligonucleotide
  Antisense strand to SEQ ID NO: 1449230
aguucccagcuaaucaacu

SEQ ID NO: 1449232 - RNA, 19 nt, Artificial Sequence
  Description of Artificial Sequence: Synthetic oligonucleotide
  Sense strand starting at position 2593 of SEQ ID NO: 1243891
augacucauucggcuaaag

SEQ ID NO: 1449233 - RNA, 19 nt, Artificial Sequence
  Description of Artificial Sequence: Synthetic oligonucleotide
  Antisense strand to SEQ ID NO: 1449232
cuuuagccgaaugagucau

SEQ ID NO: 1449234 - RNA, 19 nt, Artificial Sequence
  Description of Artificial Sequence: Synthetic oligonucleotide
  Sense strand starting at position 2635 of SEQ ID NO: 1243891
gaggaaaccggaugucugu

SEQ ID NO: 1449235 - RNA, 19 nt, Artificial Sequence
  Description of Artificial Sequence: Synthetic oligonucleotide
  Antisense strand to SEQ ID NO: 1449234
acagacauccgguuuccuc

SEQ ID NO: 1449236 - RNA, 19 nt, Artificial Sequence
  Description of Artificial Sequence: Synthetic oligonucleotide
  Sense strand starting at position 2642 of SEQ ID NO: 1243891
ccggaugucugucccgaau

SEQ ID NO: 1449237 - RNA, 19 nt, Artificial Sequence
  Description of Artificial Sequence: Synthetic oligonucleotide
  Antisense strand to SEQ ID NO: 1449236
auucgggacagacauccgg

SEQ ID NO: 1449238 - RNA, 19 nt, Artificial Sequence
  Description of Artificial Sequence: Synthetic oligonucleotide
  Sense strand starting at position 2644 of SEQ ID NO: 1243891
ggaugucugucccgaauga

SEQ ID NO: 1449239 - RNA, 19 nt, Artificial Sequence
  Description of Artificial Sequence: Synthetic oligonucleotide
  Antisense strand to SEQ ID NO: 1449238
ucauucgggacagacaucc

SEQ ID NO: 1449240 - RNA, 19 nt, Artificial Sequence
  Description of Artificial Sequence: Synthetic oligonucleotide
  Sense strand starting at position 2645 of SEQ ID NO: 1243891
gaugucugucccgaaugag

SEQ ID NO: 1449241 - RNA, 19 nt, Artificial Sequence
  Description of Artificial Sequence: Synthetic oligonucleotide
  Antisense strand to SEQ ID NO: 1449240
cucauucgggacagacauc

SEQ ID NO: 1449242 - RNA, 19 nt, Artificial Sequence
  Description of Artificial Sequence: Synthetic oligonucleotide
  Sense strand starting at position 2677 of SEQ ID NO: 1243891
aggcgauuggcucaccuga

SEQ ID NO: 1449243 - RNA, 19 nt, Artificial Sequence
  Description of Artificial Sequence: Synthetic oligonucleotide
  Antisense strand to SEQ ID NO: 1449242
ucaggugagccaaucgccu

SEQ ID NO: 1449244 - RNA, 19 nt, Artificial Sequence
  Description of Artificial Sequence: Synthetic oligonucleotide
  Sense strand starting at position 2764 of SEQ ID NO: 1243891
acgugacuucccuggucau

SEQ ID NO: 1449245 - RNA, 19 nt, Artificial Sequence
  Description of Artificial Sequence: Synthetic oligonucleotide
  Antisense strand to SEQ ID NO: 1449244
augaccagggaagucacgu

SEQ ID NO: 1449246 - RNA, 19 nt, Artificial Sequence
  Description of Artificial Sequence: Synthetic oligonucleotide
  Sense strand starting at position 2765 of SEQ ID NO: 1243891
cgugacuucccuggucauu

SEQ ID NO: 1449247 - RNA, 19 nt, Artificial Sequence
  Description of Artificial Sequence: Synthetic oligonucleotide
  Antisense strand to SEQ ID NO: 1449246
aaugaccagggaagucacg

SEQ ID NO: 1449248 - RNA, 19 nt, Artificial Sequence
  Description of Artificial Sequence: Synthetic oligonucleotide
  Sense strand starting at position 2844 of SEQ ID NO: 1243891
agaaccaugcagcguuaau

SEQ ID NO: 1449249 - RNA, 19 nt, Artificial Sequence
  Description of Artificial Sequence: Synthetic oligonucleotide
  Antisense strand to SEQ ID NO: 1449248
auuaacgcugcaugguucu

SEQ ID NO: 1449250 - RNA, 19 nt, Artificial Sequence
  Description of Artificial Sequence: Synthetic oligonucleotide
  Sense strand starting at position 2855 of SEQ ID NO: 1243891
gcguuaaugcuggaaggga

SEQ ID NO: 1449251 - RNA, 19 nt, Artificial Sequence
  Description of Artificial Sequence: Synthetic oligonucleotide
  Antisense strand to SEQ ID NO: 1449250
ucccuuccagcauuaacgc

SEQ ID NO: 1449252 - RNA, 19 nt, Artificial Sequence
  Description of Artificial Sequence: Synthetic oligonucleotide
  Sense strand starting at position 2925 of SEQ ID NO: 1243891
gcccaaggucaugguaagu

SEQ ID NO: 1449253 - RNA, 19 nt, Artificial Sequence
  Description of Artificial Sequence: Synthetic oligonucleotide
  Antisense strand to SEQ ID NO: 1449252
acuuaccaugaccuugggc

SEQ ID NO: 1449254 - RNA, 19 nt, Artificial Sequence
  Description of Artificial Sequence: Synthetic oligonucleotide
  Sense strand starting at position 2931 of SEQ ID NO: 1243891
ggucaugguaagugacaga

SEQ ID NO: 1449255 - RNA, 19 nt, Artificial Sequence
  Description of Artificial Sequence: Synthetic oligonucleotide
  Antisense strand to SEQ ID NO: 1449254
ucugucacuuaccaugacc

SEQ ID NO: 1449256 - RNA, 19 nt, Artificial Sequence
  Description of Artificial Sequence: Synthetic oligonucleotide
  Sense strand starting at position 2934 of SEQ ID NO: 1243891
caugguaagugacagaauu

SEQ ID NO: 1449257 - RNA, 19 nt, Artificial Sequence
  Description of Artificial Sequence: Synthetic oligonucleotide
  Antisense strand to SEQ ID NO: 1449256
aauucugucacuuaccaug

SEQ ID NO: 1449258 - RNA, 19 nt, Artificial Sequence
  Description of Artificial Sequence: Synthetic oligonucleotide
  Sense strand starting at position 3349 of SEQ ID NO: 1243891
gucaccuucuguccuaauu

SEQ ID NO: 1449259 - RNA, 19 nt, Artificial Sequence
  Description of Artificial Sequence: Synthetic oligonucleotide
  Antisense strand to SEQ ID NO: 1449258
aauuaggacagaaggugac

SEQ ID NO: 1449260 - RNA, 19 nt, Artificial Sequence
  Description of Artificial Sequence: Synthetic oligonucleotide
  Sense strand starting at position 3473 of SEQ ID NO: 1243891
agggacgucugaucucaca

SEQ ID NO: 1449261 - RNA, 19 nt, Artificial Sequence
  Description of Artificial Sequence: Synthetic oligonucleotide
  Antisense strand to SEQ ID NO: 1449260
ugugagaucagacgucccu

SEQ ID NO: 1449262 - RNA, 19 nt, Artificial Sequence
  Description of Artificial Sequence: Synthetic oligonucleotide
  Sense strand starting at position 3637 of SEQ ID NO: 1243891
uggaguuucgcucauugcu

SEQ ID NO: 1449263 - RNA, 19 nt, Artificial Sequence
  Description of Artificial Sequence: Synthetic oligonucleotide
  Antisense strand to SEQ ID NO: 1449262
agcaaugagcgaaacucca

SEQ ID NO: 1449264 - RNA, 19 nt, Artificial Sequence
  Description of Artificial Sequence: Synthetic oligonucleotide
  Sense strand starting at position 3948 of SEQ ID NO: 1243891
gcaggagcuccacauucuu

SEQ ID NO: 1449265 - RNA, 19 nt, Artificial Sequence
  Description of Artificial Sequence: Synthetic oligonucleotide
  Antisense strand to SEQ ID NO: 1449264
aagaauguggagcuccugc

SEQ ID NO: 1449266 - RNA, 19 nt, Artificial Sequence
  Description of Artificial Sequence: Synthetic oligonucleotide
  Sense strand starting at position 3970 of SEQ ID NO: 1243891
cauguugccuggcaacuau

SEQ ID NO: 1449267 - RNA, 19 nt, Artificial Sequence
  Description of Artificial Sequence: Synthetic oligonucleotide
  Antisense strand to SEQ ID NO: 1449266
auaguugccaggcaacaug

SEQ ID NO: 1449268 - RNA, 19 nt, Artificial Sequence
  Description of Artificial Sequence: Synthetic oligonucleotide
  Sense strand starting at position 2012 of SEQ ID NO: 1243892
cgggcuugugcuaguggau

SEQ ID NO: 1449269 - RNA, 19 nt, Artificial Sequence
  Description of Artificial Sequence: Synthetic oligonucleotide
  Antisense strand to SEQ ID NO: 1449268
auccacuagcacaagcccg

SEQ ID NO: 1449270 - RNA, 19 nt, Artificial Sequence
  Description of Artificial Sequence: Synthetic oligonucleotide
  Sense strand starting at position 2015 of SEQ ID NO: 1243892
gcuugugcuaguggauaau

SEQ ID NO: 1449271 - RNA, 19 nt, Artificial Sequence
  Description of Artificial Sequence: Synthetic oligonucleotide
  Antisense strand to SEQ ID NO: 1449270
auuauccacuagcacaagc

SEQ ID NO: 1449272 - RNA, 19 nt, Artificial Sequence
  Description of Artificial Sequence: Synthetic oligonucleotide
  Sense strand starting at position 2877 of SEQ ID NO: 1243892
caacuugucuuguguagga

SEQ ID NO: 1449273 - RNA, 19 nt, Artificial Sequence
  Description of Artificial Sequence: Synthetic oligonucleotide
  Antisense strand to SEQ ID NO: 1449272
uccuacacaagacaaguug

SEQ ID NO: 1449274 - RNA, 19 nt, Artificial Sequence
  Description of Artificial Sequence: Synthetic oligonucleotide
  Sense strand starting at position 3766 of SEQ ID NO: 1243892
ucucgagcucuugacuuua

SEQ ID NO: 1449275 - RNA, 19 nt, Artificial Sequence
  Description of Artificial Sequence: Synthetic oligonucleotide
  Antisense strand to SEQ ID NO: 1449274
uaaagucaagagcucgaga

SEQ ID NO: 1449276 - RNA, 19 nt, Artificial Sequence
  Description of Artificial Sequence: Synthetic oligonucleotide
  Sense strand starting at position 104 of SEQ ID NO: 1243893
gugaguaauagcggugaug

SEQ ID NO: 1449277 - RNA, 19 nt, Artificial Sequence
  Description of Artificial Sequence: Synthetic oligonucleotide
  Antisense strand to SEQ ID NO: 1449276
caucaccgcuauuacucac

SEQ ID NO: 1449278 - RNA, 19 nt, Artificial Sequence
  Description of Artificial Sequence: Synthetic oligonucleotide
  Sense strand starting at position 106 of SEQ ID NO: 1243893
gaguaauagcggugaugug

SEQ ID NO: 1449279 - RNA, 19 nt, Artificial Sequence
  Description of Artificial Sequence: Synthetic oligonucleotide
  Antisense strand to SEQ ID NO: 1449278
cacaucaccgcuauuacuc

SEQ ID NO: 1449280 - RNA, 19 nt, Artificial Sequence
  Description of Artificial Sequence: Synthetic oligonucleotide
  Sense strand starting at position 171 of SEQ ID NO: 1243893
cggccuaguucccaauaga

SEQ ID NO: 1449281 - RNA, 19 nt, Artificial Sequence
  Description of Artificial Sequence: Synthetic oligonucleotide
  Antisense strand to SEQ ID NO: 1449280
ucuauugggaacuaggccg

SEQ ID NO: 1449282 - RNA, 19 nt, Artificial Sequence
  Description of Artificial Sequence: Synthetic oligonucleotide
  Sense strand starting at position 507 of SEQ ID NO: 1243893
gugcgucaugguuguguga

SEQ ID NO: 1449283 - RNA, 19 nt, Artificial Sequence
  Description of Artificial Sequence: Synthetic oligonucleotide
  Antisense strand to SEQ ID NO: 1449282
ucacacaaccaugacgcac

SEQ ID NO: 1449284 - RNA, 19 nt, Artificial Sequence
  Description of Artificial Sequence: Synthetic oligonucleotide
  Sense strand starting at position 509 of SEQ ID NO: 1243893
gcgucaugguugugugagu

SEQ ID NO: 1449285 - RNA, 19 nt, Artificial Sequence
  Description of Artificial Sequence: Synthetic oligonucleotide
  Antisense strand to SEQ ID NO: 1449284
acucacacaaccaugacgc

SEQ ID NO: 1449286 - RNA, 19 nt, Artificial Sequence
  Description of Artificial Sequence: Synthetic oligonucleotide
  Sense strand starting at position 510 of SEQ ID NO: 1243893
cgucaugguugugugaguu

SEQ ID NO: 1449287 - RNA, 19 nt, Artificial Sequence
  Description of Artificial Sequence: Synthetic oligonucleotide
  Antisense strand to SEQ ID NO: 1449286
aacucacacaaccaugacg

SEQ ID NO: 1449288 - RNA, 19 nt, Artificial Sequence
  Description of Artificial Sequence: Synthetic oligonucleotide
  Sense strand starting at position 518 of SEQ ID NO: 1243893
uugugugaguuugugucaa

SEQ ID NO: 1449289 - RNA, 19 nt, Artificial Sequence
  Description of Artificial Sequence: Synthetic oligonucleotide
  Antisense strand to SEQ ID NO: 1449288
uugacacaaacucacacaa

SEQ ID NO: 1449290 - RNA, 19 nt, Artificial Sequence
  Description of Artificial Sequence: Synthetic oligonucleotide
  Sense strand starting at position 520 of SEQ ID NO: 1243893
gugugaguuugugucaaac

SEQ ID NO: 1449291 - RNA, 19 nt, Artificial Sequence
  Description of Artificial Sequence: Synthetic oligonucleotide
  Antisense strand to SEQ ID NO: 1449290
guuugacacaaacucacac

SEQ ID NO: 1449292 - RNA, 19 nt, Artificial Sequence
  Description of Artificial Sequence: Synthetic oligonucleotide
  Sense strand starting at position 522 of SEQ ID NO: 1243893
gugaguuugugucaaacuu

SEQ ID NO: 1449293 - RNA, 19 nt, Artificial Sequence
  Description of Artificial Sequence: Synthetic oligonucleotide
  Antisense strand to SEQ ID NO: 1449292
aaguuugacacaaacucac

SEQ ID NO: 1449294 - RNA, 19 nt, Artificial Sequence
  Description of Artificial Sequence: Synthetic oligonucleotide
  Sense strand starting at position 100 of SEQ ID NO: 1243894
ugggaugaccaaugagcua

SEQ ID NO: 1449295 - RNA, 19 nt, Artificial Sequence
  Description of Artificial Sequence: Synthetic oligonucleotide
  Antisense strand to SEQ ID NO: 1449294
uagcucauuggucauccca

SEQ ID NO: 1449296 - RNA, 19 nt, Artificial Sequence
  Description of Artificial Sequence: Synthetic oligonucleotide
  Sense strand starting at position 979 of SEQ ID NO: 1243894
cagguuguuggugaaggua

SEQ ID NO: 1449297 - RNA, 19 nt, Artificial Sequence
  Description of Artificial Sequence: Synthetic oligonucleotide
  Antisense strand to SEQ ID NO: 1449296
uaccuucaccaacaaccug

SEQ ID NO: 1449298 - RNA, 19 nt, Artificial Sequence
  Description of Artificial Sequence: Synthetic oligonucleotide
  Sense strand starting at position 1160 of SEQ ID NO: 1243894
acggauuucugcugcguuu

SEQ ID NO: 1449299 - RNA, 19 nt, Artificial Sequence
  Description of Artificial Sequence: Synthetic oligonucleotide
  Antisense strand to SEQ ID NO: 1449298
aaacgcagcagaaauccgu

SEQ ID NO: 1449300 - RNA, 19 nt, Artificial Sequence
  Description of Artificial Sequence: Synthetic oligonucleotide
  Sense strand starting at position 1186 of SEQ ID NO: 1243894
guuggaggaugucggaaua

SEQ ID NO: 1449301 - RNA, 19 nt, Artificial Sequence
  Description of Artificial Sequence: Synthetic oligonucleotide
  Antisense strand to SEQ ID NO: 1449300
uauuccgacauccuccaac

SEQ ID NO: 1449302 - RNA, 19 nt, Artificial Sequence
  Description of Artificial Sequence: Synthetic oligonucleotide
  Sense strand starting at position 1253 of SEQ ID NO: 1243894
uucuguuccuuugugauau

SEQ ID NO: 1449303 - RNA, 19 nt, Artificial Sequence
  Description of Artificial Sequence: Synthetic oligonucleotide
  Antisense strand to SEQ ID NO: 1449302
auaucacaaaggaacagaa

SEQ ID NO: 1449304 - RNA, 19 nt, Artificial Sequence
  Description of Artificial Sequence: Synthetic oligonucleotide
  Sense strand starting at position 1254 of SEQ ID NO: 1243894
ucuguuccuuugugauaua

SEQ ID NO: 1449305 - RNA, 19 nt, Artificial Sequence
  Description of Artificial Sequence: Synthetic oligonucleotide
  Antisense strand to SEQ ID NO: 1449304
uauaucacaaaggaacaga

SEQ ID NO: 1449306 - RNA, 19 nt, Artificial Sequence
  Description of Artificial Sequence: Synthetic oligonucleotide
  Sense strand starting at position 1341 of SEQ ID NO: 1243894
cacuguuacucuucuggga

SEQ ID NO: 1449307 - RNA, 19 nt, Artificial Sequence
  Description of Artificial Sequence: Synthetic oligonucleotide
  Antisense strand to SEQ ID NO: 1449306
ucccagaagaguaacagug

SEQ ID NO: 1449308 - RNA, 19 nt, Artificial Sequence
  Description of Artificial Sequence: Synthetic oligonucleotide
  Sense strand starting at position 1343 of SEQ ID NO: 1243894
cuguuacucuucugggaac

SEQ ID NO: 1449309 - RNA, 19 nt, Artificial Sequence
  Description of Artificial Sequence: Synthetic oligonucleotide
  Antisense strand to SEQ ID NO: 1449308
guucccagaagaguaacag

SEQ ID NO: 1449310 - RNA, 19 nt, Artificial Sequence
  Description of Artificial Sequence: Synthetic oligonucleotide
  Sense strand starting at position 1502 of SEQ ID NO: 1243894
uuauaaacuccugguaggu

SEQ ID NO: 1449311 - RNA, 19 nt, Artificial Sequence
  Description of Artificial Sequence: Synthetic oligonucleotide
  Antisense strand to SEQ ID NO: 1449310
accuaccaggaguuuauaa

SEQ ID NO: 1449312 - RNA, 19 nt, Artificial Sequence
  Description of Artificial Sequence: Synthetic oligonucleotide
  Sense strand starting at position 1803 of SEQ ID NO: 1243894
ggccuuagauggcgauauu

SEQ ID NO: 1449313 - RNA, 19 nt, Artificial Sequence
  Description of Artificial Sequence: Synthetic oligonucleotide
  Antisense strand to SEQ ID NO: 1449312
aauaucgccaucuaaggcc

SEQ ID NO: 1449314 - RNA, 19 nt, Artificial Sequence
  Description of Artificial Sequence: Synthetic oligonucleotide
  Sense strand starting at position 1804 of SEQ ID NO: 1243894
gccuuagauggcgauauuc

SEQ ID NO: 1449315 - RNA, 19 nt, Artificial Sequence
  Description of Artificial Sequence: Synthetic oligonucleotide
  Antisense strand to SEQ ID NO: 1449314
gaauaucgccaucuaaggc

SEQ ID NO: 1449316 - RNA, 19 nt, Artificial Sequence
  Description of Artificial Sequence: Synthetic oligonucleotide
  Sense strand starting at position 2062 of SEQ ID NO: 1243894
accuguuucugugcacauu

SEQ ID NO: 1449317 - RNA, 19 nt, Artificial Sequence
  Description of Artificial Sequence: Synthetic oligonucleotide
  Antisense strand to SEQ ID NO: 1449316
aaugugcacagaaacaggu

SEQ ID NO: 1449318 - RNA, 19 nt, Artificial Sequence
  Description of Artificial Sequence: Synthetic oligonucleotide
  Sense strand starting at position 2065 of SEQ ID NO: 1243894
uguuucugugcacauuuau

SEQ ID NO: 1449319 - RNA, 19 nt, Artificial Sequence
  Description of Artificial Sequence: Synthetic oligonucleotide
  Antisense strand to SEQ ID NO: 1449318
auaaaugugcacagaaaca

SEQ ID NO: 1449320 - RNA, 19 nt, Artificial Sequence
  Description of Artificial Sequence: Synthetic oligonucleotide
  Sense strand starting at position 2240 of SEQ ID NO: 1243894
uuguccucucuuuaagguu

SEQ ID NO: 1449321 - RNA, 19 nt, Artificial Sequence
  Description of Artificial Sequence: Synthetic oligonucleotide
  Antisense strand to SEQ ID NO: 1449320
aaccuuaaagagaggacaa

SEQ ID NO: 1449322 - RNA, 19 nt, Artificial Sequence
  Description of Artificial Sequence: Synthetic oligonucleotide
  Sense strand starting at position 2464 of SEQ ID NO: 1243894
gguugugagcaugauucag

SEQ ID NO: 1449323 - RNA, 19 nt, Artificial Sequence
  Description of Artificial Sequence: Synthetic oligonucleotide
  Antisense strand to SEQ ID NO: 1449322
cugaaucaugcucacaacc

SEQ ID NO: 1449324 - RNA, 19 nt, Artificial Sequence
  Description of Artificial Sequence: Synthetic oligonucleotide
  Sense strand starting at position 2724 of SEQ ID NO: 1243894
aaccgaaaucccgggaaca

SEQ ID NO: 1449325 - RNA, 19 nt, Artificial Sequence
  Description of Artificial Sequence: Synthetic oligonucleotide
  Antisense strand to SEQ ID NO: 1449324
uguucccgggauuucgguu

SEQ ID NO: 1449326 - RNA, 19 nt, Artificial Sequence
  Description of Artificial Sequence: Synthetic oligonucleotide
  Sense strand starting at position 2991 of SEQ ID NO: 1243894
uuguguaggagguaugauu

SEQ ID NO: 1449327 - RNA, 19 nt, Artificial Sequence
  Description of Artificial Sequence: Synthetic oligonucleotide
  Antisense strand to SEQ ID NO: 1449326
aaucauaccuccuacacaa

SEQ ID NO: 1449328 - RNA, 19 nt, Artificial Sequence
  Description of Artificial Sequence: Synthetic oligonucleotide
  Sense strand starting at position 3106 of SEQ ID NO: 1243894
cccacuuugugucauuuaa

SEQ ID NO: 1449329 - RNA, 19 nt, Artificial Sequence
  Description of Artificial Sequence: Synthetic oligonucleotide
  Antisense strand to SEQ ID NO: 1449328
uuaaaugacacaaaguggg

SEQ ID NO: 1449330 - RNA, 19 nt, Artificial Sequence
  Description of Artificial Sequence: Synthetic oligonucleotide
  Sense strand starting at position 3397 of SEQ ID NO: 1243894
gacagagugugacuccauu

SEQ ID NO: 1449331 - RNA, 19 nt, Artificial Sequence
  Description of Artificial Sequence: Synthetic oligonucleotide
  Antisense strand to SEQ ID NO: 1449330
aauggagucacacucuguc

SEQ ID NO: 1449332 - RNA, 19 nt, Artificial Sequence
  Description of Artificial Sequence: Synthetic oligonucleotide
  Sense strand starting at position 3457 of SEQ ID NO: 1243894
cagguagugugguguuacu

SEQ ID NO: 1449333 - RNA, 19 nt, Artificial Sequence
  Description of Artificial Sequence: Synthetic oligonucleotide
  Antisense strand to SEQ ID NO: 1449332
aguaacaccacacuaccug

SEQ ID NO: 1449334 - RNA, 19 nt, Artificial Sequence
  Description of Artificial Sequence: Synthetic oligonucleotide
  Sense strand starting at position 3464 of SEQ ID NO: 1243894
ugugguguuacucaguuau

SEQ ID NO: 1449335 - RNA, 19 nt, Artificial Sequence
  Description of Artificial Sequence: Synthetic oligonucleotide
  Antisense strand to SEQ ID NO: 1449334
auaacugaguaacaccaca

SEQ ID NO: 1449336 - RNA, 19 nt, Artificial Sequence
  Description of Artificial Sequence: Synthetic oligonucleotide
  Sense strand starting at position 3466 of SEQ ID NO: 1243894
ugguguuacucaguuauuu

SEQ ID NO: 1449337 - RNA, 19 nt, Artificial Sequence
  Description of Artificial Sequence: Synthetic oligonucleotide
  Antisense strand to SEQ ID NO: 1449336
aaauaacugaguaacacca

SEQ ID NO: 1449338 - RNA, 19 nt, Artificial Sequence
  Description of Artificial Sequence: Synthetic oligonucleotide
  Sense strand starting at position 3470 of SEQ ID NO: 1243894
guuacucaguuauuuaguu

SEQ ID NO: 1449339 - RNA, 19 nt, Artificial Sequence
  Description of Artificial Sequence: Synthetic oligonucleotide
  Antisense strand to SEQ ID NO: 1449338
aacuaaauaacugaguaac

SEQ ID NO: 1449340 - RNA, 19 nt, Artificial Sequence
  Description of Artificial Sequence: Synthetic oligonucleotide
  Sense strand starting at position 3930 of SEQ ID NO: 1243894
uggccucucuaaguacuua

SEQ ID NO: 1449341 - RNA, 19 nt, Artificial Sequence
  Description of Artificial Sequence: Synthetic oligonucleotide
  Antisense strand to SEQ ID NO: 1449340
uaaguacuuagagaggcca

SEQ ID NO: 1449342 - RNA, 19 nt, Artificial Sequence
  Description of Artificial Sequence: Synthetic oligonucleotide
  Sense strand starting at position 3946 of SEQ ID NO: 1243894
uuagauuacuggcgugagu

SEQ ID NO: 1449343 - RNA, 19 nt, Artificial Sequence
  Description of Artificial Sequence: Synthetic oligonucleotide
  Antisense strand to SEQ ID NO: 1449342
acucacgccaguaaucuaa

SEQ ID NO: 1449344 - RNA, 19 nt, Artificial Sequence
  Description of Artificial Sequence: Synthetic oligonucleotide
  Sense strand starting at position 284 of SEQ ID NO: 1243895
gaauaacucgugcauugca

SEQ ID NO: 1449345 - RNA, 19 nt, Artificial Sequence
  Description of Artificial Sequence: Synthetic oligonucleotide
  Antisense strand to SEQ ID NO: 1449344
ugcaaugcacgaguuauuc

SEQ ID NO: 1449346 - RNA, 19 nt, Artificial Sequence
  Description of Artificial Sequence: Synthetic oligonucleotide
  Sense strand starting at position 679 of SEQ ID NO: 1243895
acuuguguucacgugcaua

SEQ ID NO: 1449347 - RNA, 19 nt, Artificial Sequence
  Description of Artificial Sequence: Synthetic oligonucleotide
  Antisense strand to SEQ ID NO: 1449346
uaugcacgugaacacaagu

SEQ ID NO: 1449348 - RNA, 19 nt, Artificial Sequence
  Description of Artificial Sequence: Synthetic oligonucleotide
  Sense strand starting at position 681 of SEQ ID NO: 1243895
uuguguucacgugcauauu

SEQ ID NO: 1449349 - RNA, 19 nt, Artificial Sequence
  Description of Artificial Sequence: Synthetic oligonucleotide
  Antisense strand to SEQ ID NO: 1449348
aauaugcacgugaacacaa

SEQ ID NO: 1449350 - RNA, 19 nt, Artificial Sequence
  Description of Artificial Sequence: Synthetic oligonucleotide
  Sense strand starting at position 682 of SEQ ID NO: 1243895
uguguucacgugcauauuu

SEQ ID NO: 1449351 - RNA, 19 nt, Artificial Sequence
  Description of Artificial Sequence: Synthetic oligonucleotide
  Antisense strand to SEQ ID NO: 1449350
aaauaugcacgugaacaca

SEQ ID NO: 1449352 - RNA, 19 nt, Artificial Sequence
  Description of Artificial Sequence: Synthetic oligonucleotide
  Sense strand starting at position 750 of SEQ ID NO: 1243895
ugaaaucuaccuugagacu

SEQ ID NO: 1449353 - RNA, 19 nt, Artificial Sequence
  Description of Artificial Sequence: Synthetic oligonucleotide
  Antisense strand to SEQ ID NO: 1449352
agucucaagguagauuuca

SEQ ID NO: 1449354 - RNA, 19 nt, Artificial Sequence
  Description of Artificial Sequence: Synthetic oligonucleotide
  Sense strand starting at position 756 of SEQ ID NO: 1243895
cuaccuugagacuguuaca

SEQ ID NO: 1449355 - RNA, 19 nt, Artificial Sequence
  Description of Artificial Sequence: Synthetic oligonucleotide
  Antisense strand to SEQ ID NO: 1449354
uguaacagucucaagguag

SEQ ID NO: 1449356 - RNA, 19 nt, Artificial Sequence
  Description of Artificial Sequence: Synthetic oligonucleotide
  Sense strand starting at position 830 of SEQ ID NO: 1243895
aucuuaauccugugugacu

SEQ ID NO: 1449357 - RNA, 19 nt, Artificial Sequence
  Description of Artificial Sequence: Synthetic oligonucleotide
  Antisense strand to SEQ ID NO: 1449356
agucacacaggauuaagau

SEQ ID NO: 1449358 - RNA, 19 nt, Artificial Sequence
  Description of Artificial Sequence: Synthetic oligonucleotide
  Sense strand starting at position 831 of SEQ ID NO: 1243895
ucuuaauccugugugacuu

SEQ ID NO: 1449359 - RNA, 19 nt, Artificial Sequence
  Description of Artificial Sequence: Synthetic oligonucleotide
  Antisense strand to SEQ ID NO: 1449358
aagucacacaggauuaaga

SEQ ID NO: 1449360 - RNA, 19 nt, Artificial Sequence
  Description of Artificial Sequence: Synthetic oligonucleotide
  Sense strand starting at position 839 of SEQ ID NO: 1243895
cugugugacuuucucuaca

SEQ ID NO: 1449361 - RNA, 19 nt, Artificial Sequence
  Description of Artificial Sequence: Synthetic oligonucleotide
  Antisense strand to SEQ ID NO: 1449360
uguagagaaagucacacag

SEQ ID NO: 1449362 - RNA, 19 nt, Artificial Sequence
  Description of Artificial Sequence: Synthetic oligonucleotide
  Sense strand starting at position 841 of SEQ ID NO: 1243895
gugugacuuucucuacauu

SEQ ID NO: 1449363 - RNA, 19 nt, Artificial Sequence
  Description of Artificial Sequence: Synthetic oligonucleotide
  Antisense strand to SEQ ID NO: 1449362
aauguagagaaagucacac

SEQ ID NO: 1449364 - RNA, 19 nt, Artificial Sequence
  Description of Artificial Sequence: Synthetic oligonucleotide
  Sense strand starting at position 913 of SEQ ID NO: 1243895
gggaaccguucagagagaa

SEQ ID NO: 1449365 - RNA, 19 nt, Artificial Sequence
  Description of Artificial Sequence: Synthetic oligonucleotide
  Antisense strand to SEQ ID NO: 1449364
uucucucugaacgguuccc

SEQ ID NO: 1449366 - RNA, 19 nt, Artificial Sequence
  Description of Artificial Sequence: Synthetic oligonucleotide
  Sense strand starting at position 992 of SEQ ID NO: 1243895
uugggucuuucugacauuu

SEQ ID NO: 1449367 - RNA, 19 nt, Artificial Sequence
  Description of Artificial Sequence: Synthetic oligonucleotide
  Antisense strand to SEQ ID NO: 1449366
aaaugucagaaagacccaa

SEQ ID NO: 1449368 - RNA, 19 nt, Artificial Sequence
  Description of Artificial Sequence: Synthetic oligonucleotide
  Sense strand starting at position 1579 of SEQ ID NO: 1243895
gggccucaccgagauagau

SEQ ID NO: 1449369 - RNA, 19 nt, Artificial Sequence
  Description of Artificial Sequence: Synthetic oligonucleotide
  Antisense strand to SEQ ID NO: 1449368
aucuaucucggugaggccc

SEQ ID NO: 1449370 - RNA, 19 nt, Artificial Sequence
  Description of Artificial Sequence: Synthetic oligonucleotide
  Sense strand starting at position 1588 of SEQ ID NO: 1243895
cgagauagaugucuccgaa

SEQ ID NO: 1449371 - RNA, 19 nt, Artificial Sequence
  Description of Artificial Sequence: Synthetic oligonucleotide
  Antisense strand to SEQ ID NO: 1449370
uucggagacaucuaucucg

SEQ ID NO: 1449372 - RNA, 19 nt, Artificial Sequence
  Description of Artificial Sequence: Synthetic oligonucleotide
  Sense strand starting at position 1591 of SEQ ID NO: 1243895
gauagaugucuccgaagga

SEQ ID NO: 1449373 - RNA, 19 nt, Artificial Sequence
  Description of Artificial Sequence: Synthetic oligonucleotide
  Antisense strand to SEQ ID NO: 1449372
uccuucggagacaucuauc

SEQ ID NO: 1449374 - RNA, 19 nt, Artificial Sequence
  Description of Artificial Sequence: Synthetic oligonucleotide
  Sense strand starting at position 1592 of SEQ ID NO: 1243895
auagaugucuccgaaggag

SEQ ID NO: 1449375 - RNA, 19 nt, Artificial Sequence
  Description of Artificial Sequence: Synthetic oligonucleotide
  Antisense strand to SEQ ID NO: 1449374
cuccuucggagacaucuau

SEQ ID NO: 1449376 - RNA, 19 nt, Artificial Sequence
  Description of Artificial Sequence: Synthetic oligonucleotide
  Sense strand starting at position 2204 of SEQ ID NO: 1243895
aggugaguuccucgcgaca

SEQ ID NO: 1449377 - RNA, 19 nt, Artificial Sequence
  Description of Artificial Sequence: Synthetic oligonucleotide
  Antisense strand to SEQ ID NO: 1449376
ugucgcgaggaacucaccu

SEQ ID NO: 1449378 - RNA, 19 nt, Artificial Sequence
  Description of Artificial Sequence: Synthetic oligonucleotide
  Sense strand starting at position 2420 of SEQ ID NO: 1243895
ugauguccagccugaagau

SEQ ID NO: 1449379 - RNA, 19 nt, Artificial Sequence
  Description of Artificial Sequence: Synthetic oligonucleotide
  Antisense strand to SEQ ID NO: 1449378
aucuucaggcuggacauca

SEQ ID NO: 1449380 - RNA, 19 nt, Artificial Sequence
  Description of Artificial Sequence: Synthetic oligonucleotide
  Sense strand starting at position 2421 of SEQ ID NO: 1243895
gauguccagccugaagauu

SEQ ID NO: 1449381 - RNA, 19 nt, Artificial Sequence
  Description of Artificial Sequence: Synthetic oligonucleotide
  Antisense strand to SEQ ID NO: 1449380
aaucuucaggcuggacauc

SEQ ID NO: 1449382 - RNA, 19 nt, Artificial Sequence
  Description of Artificial Sequence: Synthetic oligonucleotide
  Sense strand starting at position 2518 of SEQ ID NO: 1243895
ucaacauucuuaucugugu

SEQ ID NO: 1449383 - RNA, 19 nt, Artificial Sequence
  Description of Artificial Sequence: Synthetic oligonucleotide
  Antisense strand to SEQ ID NO: 1449382
acacagauaagaauguuga

SEQ ID NO: 1449384 - RNA, 19 nt, Artificial Sequence
  Description of Artificial Sequence: Synthetic oligonucleotide
  Sense strand starting at position 2522 of SEQ ID NO: 1243895
cauucuuaucuguguugga

SEQ ID NO: 1449385 - RNA, 19 nt, Artificial Sequence
  Description of Artificial Sequence: Synthetic oligonucleotide
  Antisense strand to SEQ ID NO: 1449384
uccaacacagauaagaaug

SEQ ID NO: 1449386 - RNA, 19 nt, Artificial Sequence
  Description of Artificial Sequence: Synthetic oligonucleotide
  Sense strand starting at position 2523 of SEQ ID NO: 1243895
auucuuaucuguguuggau

SEQ ID NO: 1449387 - RNA, 19 nt, Artificial Sequence
  Description of Artificial Sequence: Synthetic oligonucleotide
  Antisense strand to SEQ ID NO: 1449386
auccaacacagauaagaau

SEQ ID NO: 1449388 - RNA, 19 nt, Artificial Sequence
  Description of Artificial Sequence: Synthetic oligonucleotide
  Sense strand starting at position 2531 of SEQ ID NO: 1243895
cuguguuggaucugaaugu

SEQ ID NO: 1449389 - RNA, 19 nt, Artificial Sequence
  Description of Artificial Sequence: Synthetic oligonucleotide
  Antisense strand to SEQ ID NO: 1449388
acauucagauccaacacag

SEQ ID NO: 1449390 - RNA, 19 nt, Artificial Sequence
  Description of Artificial Sequence: Synthetic oligonucleotide
  Sense strand starting at position 2535 of SEQ ID NO: 1243895
guuggaucugaauguuccu

SEQ ID NO: 1449391 - RNA, 19 nt, Artificial Sequence
  Description of Artificial Sequence: Synthetic oligonucleotide
  Antisense strand to SEQ ID NO: 1449390
aggaacauucagauccaac

SEQ ID NO: 1449392 - RNA, 19 nt, Artificial Sequence
  Description of Artificial Sequence: Synthetic oligonucleotide
  Sense strand starting at position 2621 of SEQ ID NO: 1243895
ucccaucacugggaagaaa

SEQ ID NO: 1449393 - RNA, 19 nt, Artificial Sequence
  Description of Artificial Sequence: Synthetic oligonucleotide
  Antisense strand to SEQ ID NO: 1449392
uuucuucccagugauggga

SEQ ID NO: 1449394 - RNA, 19 nt, Artificial Sequence
  Description of Artificial Sequence: Synthetic oligonucleotide
  Sense strand starting at position 2729 of SEQ ID NO: 1243895
ugucgcauccucgcugaaa

SEQ ID NO: 1449395 - RNA, 19 nt, Artificial Sequence
  Description of Artificial Sequence: Synthetic oligonucleotide
  Antisense strand to SEQ ID NO: 1449394
uuucagcgaggaugcgaca

SEQ ID NO: 1449396 - RNA, 19 nt, Artificial Sequence
  Description of Artificial Sequence: Synthetic oligonucleotide
  Sense strand starting at position 2730 of SEQ ID NO: 1243895
gucgcauccucgcugaaac

SEQ ID NO: 1449397 - RNA, 19 nt, Artificial Sequence
  Description of Artificial Sequence: Synthetic oligonucleotide
  Antisense strand to SEQ ID NO: 1449396
guuucagcgaggaugcgac

SEQ ID NO: 1449398 - RNA, 19 nt, Artificial Sequence
  Description of Artificial Sequence: Synthetic oligonucleotide
  Sense strand starting at position 2731 of SEQ ID NO: 1243895
ucgcauccucgcugaaacu

SEQ ID NO: 1449399 - RNA, 19 nt, Artificial Sequence
  Description of Artificial Sequence: Synthetic oligonucleotide
  Antisense strand to SEQ ID NO: 1449398
aguuucagcgaggaugcga

SEQ ID NO: 1449400 - RNA, 19 nt, Artificial Sequence
  Description of Artificial Sequence: Synthetic oligonucleotide
  Sense strand starting at position 2974 of SEQ ID NO: 1243895
gggcguccauucccgaaau

SEQ ID NO: 1449401 - RNA, 19 nt, Artificial Sequence
  Description of Artificial Sequence: Synthetic oligonucleotide
  Antisense strand to SEQ ID NO: 1449400
auuucgggaauggacgccc

SEQ ID NO: 1449402 - RNA, 19 nt, Artificial Sequence
  Description of Artificial Sequence: Synthetic oligonucleotide
  Sense strand starting at position 2976 of SEQ ID NO: 1243895
gcguccauucccgaaauua

SEQ ID NO: 1449403 - RNA, 19 nt, Artificial Sequence
  Description of Artificial Sequence: Synthetic oligonucleotide
  Antisense strand to SEQ ID NO: 1449402
uaauuucgggaauggacgc

SEQ ID NO: 1449404 - RNA, 19 nt, Artificial Sequence
  Description of Artificial Sequence: Synthetic oligonucleotide
  Sense strand starting at position 3074 of SEQ ID NO: 1243895
cccaguuucugaguuacag

SEQ ID NO: 1449405 - RNA, 19 nt, Artificial Sequence
  Description of Artificial Sequence: Synthetic oligonucleotide
  Antisense strand to SEQ ID NO: 1449404
cuguaacucagaaacuggg

SEQ ID NO: 1449406 - RNA, 19 nt, Artificial Sequence
  Description of Artificial Sequence: Synthetic oligonucleotide
  Sense strand starting at position 3380 of SEQ ID NO: 1243895
uuguguguuugugucuuga

SEQ ID NO: 1449407 - RNA, 19 nt, Artificial Sequence
  Description of Artificial Sequence: Synthetic oligonucleotide
  Antisense strand to SEQ ID NO: 1449406
ucaagacacaaacacacaa

SEQ ID NO: 1449408 - RNA, 19 nt, Artificial Sequence
  Description of Artificial Sequence: Synthetic oligonucleotide
  Sense strand starting at position 3382 of SEQ ID NO: 1243895
guguguuugugucuugacu

SEQ ID NO: 1449409 - RNA, 19 nt, Artificial Sequence
  Description of Artificial Sequence: Synthetic oligonucleotide
  Antisense strand to SEQ ID NO: 1449408
agucaagacacaaacacac

SEQ ID NO: 1449410 - RNA, 19 nt, Artificial Sequence
  Description of Artificial Sequence: Synthetic oligonucleotide
  Sense strand starting at position 3445 of SEQ ID NO: 1243895
gcaggagcccugggaacau

SEQ ID NO: 1449411 - RNA, 19 nt, Artificial Sequence
  Description of Artificial Sequence: Synthetic oligonucleotide
  Antisense strand to SEQ ID NO: 1449410
auguucccagggcuccugc

SEQ ID NO: 1449412 - RNA, 19 nt, Artificial Sequence
  Description of Artificial Sequence: Synthetic oligonucleotide
  Sense strand starting at position 3697 of SEQ ID NO: 1243895
ugaggauagucauugccaa

SEQ ID NO: 1449413 - RNA, 19 nt, Artificial Sequence
  Description of Artificial Sequence: Synthetic oligonucleotide
  Antisense strand to SEQ ID NO: 1449412
uuggcaaugacuauccuca

SEQ ID NO: 1449414 - RNA, 19 nt, Artificial Sequence
  Description of Artificial Sequence: Synthetic oligonucleotide
  Sense strand starting at position 3698 of SEQ ID NO: 1243895
gaggauagucauugccaag

SEQ ID NO: 1449415 - RNA, 19 nt, Artificial Sequence
  Description of Artificial Sequence: Synthetic oligonucleotide
  Antisense strand to SEQ ID NO: 1449414
cuuggcaaugacuauccuc

SEQ ID NO: 1449416 - RNA, 19 nt, Artificial Sequence
  Description of Artificial Sequence: Synthetic oligonucleotide
  Sense strand starting at position 3701 of SEQ ID NO: 1243895
gauagucauugccaaggaa

SEQ ID NO: 1449417 - RNA, 19 nt, Artificial Sequence
  Description of Artificial Sequence: Synthetic oligonucleotide
  Antisense strand to SEQ ID NO: 1449416
uuccuuggcaaugacuauc

SEQ ID NO: 1449418 - RNA, 19 nt, Artificial Sequence
  Description of Artificial Sequence: Synthetic oligonucleotide
  Sense strand starting at position 3834 of SEQ ID NO: 1243895
guuugaugauacuagaaca

SEQ ID NO: 1449419 - RNA, 19 nt, Artificial Sequence
  Description of Artificial Sequence: Synthetic oligonucleotide
  Antisense strand to SEQ ID NO: 1449418
uguucuaguaucaucaaac

SEQ ID NO: 1449420 - RNA, 19 nt, Artificial Sequence
  Description of Artificial Sequence: Synthetic oligonucleotide
  Sense strand starting at position 3844 of SEQ ID NO: 1243895
acuagaacaucucagagua

SEQ ID NO: 1449421 - RNA, 19 nt, Artificial Sequence
  Description of Artificial Sequence: Synthetic oligonucleotide
  Antisense strand to SEQ ID NO: 1449420
uacucugagauguucuagu

SEQ ID NO: 1449422 - RNA, 19 nt, Artificial Sequence
  Description of Artificial Sequence: Synthetic oligonucleotide
  Sense strand starting at position 3846 of SEQ ID NO: 1243895
uagaacaucucagaguaga

SEQ ID NO: 1449423 - RNA, 19 nt, Artificial Sequence
  Description of Artificial Sequence: Synthetic oligonucleotide
  Antisense strand to SEQ ID NO: 1449422
ucuacucugagauguucua

SEQ ID NO: 1449424 - RNA, 19 nt, Artificial Sequence
  Description of Artificial Sequence: Synthetic oligonucleotide
  Sense strand starting at position 169 of SEQ ID NO: 1243896
gcugaaguuuaagaacaca

SEQ ID NO: 1449425 - RNA, 19 nt, Artificial Sequence
  Description of Artificial Sequence: Synthetic oligonucleotide
  Antisense strand to SEQ ID NO: 1449424
uguguucuuaaacuucagc

SEQ ID NO: 1449426 - RNA, 19 nt, Artificial Sequence
  Description of Artificial Sequence: Synthetic oligonucleotide
  Sense strand starting at position 244 of SEQ ID NO: 1243896
ugaugauuguuccuguaug

SEQ ID NO: 1449427 - RNA, 19 nt, Artificial Sequence
  Description of Artificial Sequence: Synthetic oligonucleotide
  Antisense strand to SEQ ID NO: 1449426
cauacaggaacaaucauca

SEQ ID NO: 1449428 - RNA, 19 nt, Artificial Sequence
  Description of Artificial Sequence: Synthetic oligonucleotide
  Sense strand starting at position 258 of SEQ ID NO: 1243896
guaugucuacuuuagcuga

SEQ ID NO: 1449429 - RNA, 19 nt, Artificial Sequence
  Description of Artificial Sequence: Synthetic oligonucleotide
  Antisense strand to SEQ ID NO: 1449428
ucagcuaaaguagacauac

SEQ ID NO: 1449430 - RNA, 19 nt, Artificial Sequence
  Description of Artificial Sequence: Synthetic oligonucleotide
  Sense strand starting at position 260 of SEQ ID NO: 1243896
augucuacuuuagcugaga

SEQ ID NO: 1449431 - RNA, 19 nt, Artificial Sequence
  Description of Artificial Sequence: Synthetic oligonucleotide
  Antisense strand to SEQ ID NO: 1449430
ucucagcuaaaguagacau

SEQ ID NO: 1449432 - RNA, 19 nt, Artificial Sequence
  Description of Artificial Sequence: Synthetic oligonucleotide
  Sense strand starting at position 261 of SEQ ID NO: 1243896
ugucuacuuuagcugagau

SEQ ID NO: 1449433 - RNA, 19 nt, Artificial Sequence
  Description of Artificial Sequence: Synthetic oligonucleotide
  Antisense strand to SEQ ID NO: 1449432
aucucagcuaaaguagaca

SEQ ID NO: 1449434 - RNA, 19 nt, Artificial Sequence
  Description of Artificial Sequence: Synthetic oligonucleotide
  Sense strand starting at position 263 of SEQ ID NO: 1243896
ucuacuuuagcugagaucu

SEQ ID NO: 1449435 - RNA, 19 nt, Artificial Sequence
  Description of Artificial Sequence: Synthetic oligonucleotide
  Antisense strand to SEQ ID NO: 1449434
agaucucagcuaaaguaga

SEQ ID NO: 1449436 - RNA, 19 nt, Artificial Sequence
  Description of Artificial Sequence: Synthetic oligonucleotide
  Sense strand starting at position 285 of SEQ ID NO: 1243896
uccugagcuuuaguccuau

SEQ ID NO: 1449437 - RNA, 19 nt, Artificial Sequence
  Description of Artificial Sequence: Synthetic oligonucleotide
  Antisense strand to SEQ ID NO: 1449436
auaggacuaaagcucagga

SEQ ID NO: 1449438 - RNA, 19 nt, Artificial Sequence
  Description of Artificial Sequence: Synthetic oligonucleotide
  Sense strand starting at position 385 of SEQ ID NO: 1243896
cuagaacucuucuaguguu

SEQ ID NO: 1449439 - RNA, 19 nt, Artificial Sequence
  Description of Artificial Sequence: Synthetic oligonucleotide
  Antisense strand to SEQ ID NO: 1449438
aacacuagaagaguucuag

SEQ ID NO: 1449440 - RNA, 19 nt, Artificial Sequence
  Description of Artificial Sequence: Synthetic oligonucleotide
  Sense strand starting at position 674 of SEQ ID NO: 1243896
gugccuguaugccuguaau

SEQ ID NO: 1449441 - RNA, 19 nt, Artificial Sequence
  Description of Artificial Sequence: Synthetic oligonucleotide
  Antisense strand to SEQ ID NO: 1449440
auuacaggcauacaggcac

SEQ ID NO: 1449442 - RNA, 19 nt, Artificial Sequence
  Description of Artificial Sequence: Synthetic oligonucleotide
  Sense strand starting at position 676 of SEQ ID NO: 1243896
gccuguaugccuguaauuc

SEQ ID NO: 1449443 - RNA, 19 nt, Artificial Sequence
  Description of Artificial Sequence: Synthetic oligonucleotide
  Antisense strand to SEQ ID NO: 1449442
gaauuacaggcauacaggc

SEQ ID NO: 1449444 - RNA, 19 nt, Artificial Sequence
  Description of Artificial Sequence: Synthetic oligonucleotide
  Sense strand starting at position 1059 of SEQ ID NO: 1243896
auguuaaagucgcugcuua

SEQ ID NO: 1449445 - RNA, 19 nt, Artificial Sequence
  Description of Artificial Sequence: Synthetic oligonucleotide
  Antisense strand to SEQ ID NO: 1449444
uaagcagcgacuuuaacau

SEQ ID NO: 1449446 - RNA, 19 nt, Artificial Sequence
  Description of Artificial Sequence: Synthetic oligonucleotide
  Sense strand starting at position 1177 of SEQ ID NO: 1243896
guguuugcuuccguccuga

SEQ ID NO: 1449447 - RNA, 19 nt, Artificial Sequence
  Description of Artificial Sequence: Synthetic oligonucleotide
  Antisense strand to SEQ ID NO: 1449446
ucaggacggaagcaaacac

SEQ ID NO: 1449448 - RNA, 19 nt, Artificial Sequence
  Description of Artificial Sequence: Synthetic oligonucleotide
  Sense strand starting at position 1656 of SEQ ID NO: 1243896
gguuucccaccaggauuaa

SEQ ID NO: 1449449 - RNA, 19 nt, Artificial Sequence
  Description of Artificial Sequence: Synthetic oligonucleotide
  Antisense strand to SEQ ID NO: 1449448
uuaauccuggugggaaacc

SEQ ID NO: 1449450 - RNA, 19 nt, Artificial Sequence
  Description of Artificial Sequence: Synthetic oligonucleotide
  Sense strand starting at position 1850 of SEQ ID NO: 1243896
gaaagaguaucugugacaa

SEQ ID NO: 1449451 - RNA, 19 nt, Artificial Sequence
  Description of Artificial Sequence: Synthetic oligonucleotide
  Antisense strand to SEQ ID NO: 1449450
uugucacagauacucuuuc

SEQ ID NO: 1449452 - RNA, 19 nt, Artificial Sequence
  Description of Artificial Sequence: Synthetic oligonucleotide
  Sense strand starting at position 1852 of SEQ ID NO: 1243896
aagaguaucugugacaaac

SEQ ID NO: 1449453 - RNA, 19 nt, Artificial Sequence
  Description of Artificial Sequence: Synthetic oligonucleotide
  Antisense strand to SEQ ID NO: 1449452
guuugucacagauacucuu

SEQ ID NO: 1449454 - RNA, 19 nt, Artificial Sequence
  Description of Artificial Sequence: Synthetic oligonucleotide
  Sense strand starting at position 1854 of SEQ ID NO: 1243896
gaguaucugugacaaacaa

SEQ ID NO: 1449455 - RNA, 19 nt, Artificial Sequence
  Description of Artificial Sequence: Synthetic oligonucleotide
  Antisense strand to SEQ ID NO: 1449454
uuguuugucacagauacuc

SEQ ID NO: 1449456 - RNA, 19 nt, Artificial Sequence
  Description of Artificial Sequence: Synthetic oligonucleotide
  Sense strand starting at position 2780 of SEQ ID NO: 1243896
gugacauccuguccggcau

SEQ ID NO: 1449457 - RNA, 19 nt, Artificial Sequence
  Description of Artificial Sequence: Synthetic oligonucleotide
  Antisense strand to SEQ ID NO: 1449456
augccggacaggaugucac

SEQ ID NO: 1449458 - RNA, 19 nt, Artificial Sequence
  Description of Artificial Sequence: Synthetic oligonucleotide
  Sense strand starting at position 2855 of SEQ ID NO: 1243896
ccugguggaugacuucuaa

SEQ ID NO: 1449459 - RNA, 19 nt, Artificial Sequence
  Description of Artificial Sequence: Synthetic oligonucleotide
  Antisense strand to SEQ ID NO: 1449458
uuagaagucauccaccagg

SEQ ID NO: 1449460 - RNA, 19 nt, Artificial Sequence
  Description of Artificial Sequence: Synthetic oligonucleotide
  Sense strand starting at position 2859 of SEQ ID NO: 1243896
guggaugacuucuaagcau

SEQ ID NO: 1449461 - RNA, 19 nt, Artificial Sequence
  Description of Artificial Sequence: Synthetic oligonucleotide
  Antisense strand to SEQ ID NO: 1449460
augcuuagaagucauccac

SEQ ID NO: 1449462 - RNA, 19 nt, Artificial Sequence
  Description of Artificial Sequence: Synthetic oligonucleotide
  Sense strand starting at position 2954 of SEQ ID NO: 1243896
gcuuuauggccuuaacuaa

SEQ ID NO: 1449463 - RNA, 19 nt, Artificial Sequence
  Description of Artificial Sequence: Synthetic oligonucleotide
  Antisense strand to SEQ ID NO: 1449462
uuaguuaaggccauaaagc

SEQ ID NO: 1449464 - RNA, 19 nt, Artificial Sequence
  Description of Artificial Sequence: Synthetic oligonucleotide
  Sense strand starting at position 2961 of SEQ ID NO: 1243896
ggccuuaacuaacugaugu

SEQ ID NO: 1449465 - RNA, 19 nt, Artificial Sequence
  Description of Artificial Sequence: Synthetic oligonucleotide
  Antisense strand to SEQ ID NO: 1449464
acaucaguuaguuaaggcc

SEQ ID NO: 1449466 - RNA, 19 nt, Artificial Sequence
  Description of Artificial Sequence: Synthetic oligonucleotide
  Sense strand starting at position 3040 of SEQ ID NO: 1243896
aagacagauuugugggaga

SEQ ID NO: 1449467 - RNA, 19 nt, Artificial Sequence
  Description of Artificial Sequence: Synthetic oligonucleotide
  Antisense strand to SEQ ID NO: 1449466
ucucccacaaaucugucuu

SEQ ID NO: 1449468 - RNA, 19 nt, Artificial Sequence
  Description of Artificial Sequence: Synthetic oligonucleotide
  Sense strand starting at position 3043 of SEQ ID NO: 1243896
acagauuugugggagaaac

SEQ ID NO: 1449469 - RNA, 19 nt, Artificial Sequence
  Description of Artificial Sequence: Synthetic oligonucleotide
  Antisense strand to SEQ ID NO: 1449468
guuucucccacaaaucugu

SEQ ID NO: 1449470 - RNA, 19 nt, Artificial Sequence
  Description of Artificial Sequence: Synthetic oligonucleotide
  Sense strand starting at position 3232 of SEQ ID NO: 1243896
gugcaucuuccacgugagu

SEQ ID NO: 1449471 - RNA, 19 nt, Artificial Sequence
  Description of Artificial Sequence: Synthetic oligonucleotide
  Antisense strand to SEQ ID NO: 1449470
acucacguggaagaugcac

SEQ ID NO: 1449472 - RNA, 19 nt, Artificial Sequence
  Description of Artificial Sequence: Synthetic oligonucleotide
  Sense strand starting at position 3234 of SEQ ID NO: 1243896
gcaucuuccacgugaguau

SEQ ID NO: 1449473 - RNA, 19 nt, Artificial Sequence
  Description of Artificial Sequence: Synthetic oligonucleotide
  Antisense strand to SEQ ID NO: 1449472
auacucacguggaagaugc

SEQ ID NO: 1449474 - RNA, 19 nt, Artificial Sequence
  Description of Artificial Sequence: Synthetic oligonucleotide
  Sense strand starting at position 3235 of SEQ ID NO: 1243896
caucuuccacgugaguaua

SEQ ID NO: 1449475 - RNA, 19 nt, Artificial Sequence
  Description of Artificial Sequence: Synthetic oligonucleotide
  Antisense strand to SEQ ID NO: 1449474
uauacucacguggaagaug

SEQ ID NO: 1449476 - RNA, 19 nt, Artificial Sequence
  Description of Artificial Sequence: Synthetic oligonucleotide
  Sense strand starting at position 3238 of SEQ ID NO: 1243896
cuuccacgugaguauaguu

SEQ ID NO: 1449477 - RNA, 19 nt, Artificial Sequence
  Description of Artificial Sequence: Synthetic oligonucleotide
  Antisense strand to SEQ ID NO: 1449476
aacuauacucacguggaag

SEQ ID NO: 1449478 - RNA, 19 nt, Artificial Sequence
  Description of Artificial Sequence: Synthetic oligonucleotide
  Sense strand starting at position 3343 of SEQ ID NO: 1243896
ggccgagcugugucuacuu

SEQ ID NO: 1449479 - RNA, 19 nt, Artificial Sequence
  Description of Artificial Sequence: Synthetic oligonucleotide
  Antisense strand to SEQ ID NO: 1449478
aaguagacacagcucggcc

SEQ ID NO: 1449480 - RNA, 19 nt, Artificial Sequence
  Description of Artificial Sequence: Synthetic oligonucleotide
  Sense strand starting at position 3369 of SEQ ID NO: 1243896
gcguauuugcuuuagugga

SEQ ID NO: 1449481 - RNA, 19 nt, Artificial Sequence
  Description of Artificial Sequence: Synthetic oligonucleotide
  Antisense strand to SEQ ID NO: 1449480
uccacuaaagcaaauacgc

SEQ ID NO: 1449482 - RNA, 19 nt, Artificial Sequence
  Description of Artificial Sequence: Synthetic oligonucleotide
  Sense strand starting at position 3390 of SEQ ID NO: 1243896
cguccauucguccuaucuu

SEQ ID NO: 1449483 - RNA, 19 nt, Artificial Sequence
  Description of Artificial Sequence: Synthetic oligonucleotide
  Antisense strand to SEQ ID NO: 1449482
aagauaggacgaauggacg

SEQ ID NO: 1449484 - RNA, 19 nt, Artificial Sequence
  Description of Artificial Sequence: Synthetic oligonucleotide
  Sense strand starting at position 3568 of SEQ ID NO: 1243896
cucugagcucuugaagcuu

SEQ ID NO: 1449485 - RNA, 19 nt, Artificial Sequence
  Description of Artificial Sequence: Synthetic oligonucleotide
  Antisense strand to SEQ ID NO: 1449484
aagcuucaagagcucagag

SEQ ID NO: 1449486 - RNA, 19 nt, Artificial Sequence
  Description of Artificial Sequence: Synthetic oligonucleotide
  Sense strand starting at position 3608 of SEQ ID NO: 1243896
acggaaaucaaguggcuua

SEQ ID NO: 1449487 - RNA, 19 nt, Artificial Sequence
  Description of Artificial Sequence: Synthetic oligonucleotide
  Antisense strand to SEQ ID NO: 1449486
uaagccacuugauuuccgu

SEQ ID NO: 1449488 - RNA, 19 nt, Artificial Sequence
  Description of Artificial Sequence: Synthetic oligonucleotide
  Sense strand starting at position 3609 of SEQ ID NO: 1243896
cggaaaucaaguggcuuaa

SEQ ID NO: 1449489 - RNA, 19 nt, Artificial Sequence
  Description of Artificial Sequence: Synthetic oligonucleotide
  Antisense strand to SEQ ID NO: 1449488
uuaagccacuugauuuccg

SEQ ID NO: 1449490 - RNA, 19 nt, Artificial Sequence
  Description of Artificial Sequence: Synthetic oligonucleotide
  Sense strand starting at position 3645 of SEQ ID NO: 1243896
ggaagacuguccugaaagu

SEQ ID NO: 1449491 - RNA, 19 nt, Artificial Sequence
  Description of Artificial Sequence: Synthetic oligonucleotide
  Antisense strand to SEQ ID NO: 1449490
acuuucaggacagucuucc

SEQ ID NO: 1449492 - RNA, 19 nt, Artificial Sequence
  Description of Artificial Sequence: Synthetic oligonucleotide
  Sense strand starting at position 3673 of SEQ ID NO: 1243896
gcugaagaguggugagaau

SEQ ID NO: 1449493 - RNA, 19 nt, Artificial Sequence
  Description of Artificial Sequence: Synthetic oligonucleotide
  Antisense strand to SEQ ID NO: 1449492
auucucaccacucuucagc

SEQ ID NO: 1449494 - RNA, 19 nt, Artificial Sequence
  Description of Artificial Sequence: Synthetic oligonucleotide
  Sense strand starting at position 3753 of SEQ ID NO: 1243896
uguucuaagccuugguaau

SEQ ID NO: 1449495 - RNA, 19 nt, Artificial Sequence
  Description of Artificial Sequence: Synthetic oligonucleotide
  Antisense strand to SEQ ID NO: 1449494
auuaccaaggcuuagaaca

SEQ ID NO: 1449496 - RNA, 19 nt, Artificial Sequence
  Description of Artificial Sequence: Synthetic oligonucleotide
  Sense strand starting at position 3754 of SEQ ID NO: 1243896
guucuaagccuugguaauu

SEQ ID NO: 1449497 - RNA, 19 nt, Artificial Sequence
  Description of Artificial Sequence: Synthetic oligonucleotide
  Antisense strand to SEQ ID NO: 1449496
aauuaccaaggcuuagaac

SEQ ID NO: 1449498 - RNA, 19 nt, Artificial Sequence
  Description of Artificial Sequence: Synthetic oligonucleotide
  Sense strand starting at position 3863 of SEQ ID NO: 1243896
ugauaagcgcuuuacagga

SEQ ID NO: 1449499 - RNA, 19 nt, Artificial Sequence
  Description of Artificial Sequence: Synthetic oligonucleotide
  Antisense strand to SEQ ID NO: 1449498
uccuguaaagcgcuuauca

SEQ ID NO: 1449500 - RNA, 19 nt, Artificial Sequence
  Description of Artificial Sequence: Synthetic oligonucleotide
  Sense strand starting at position 3868 of SEQ ID NO: 1243896
agcgcuuuacaggaaauua

SEQ ID NO: 1449501 - RNA, 19 nt, Artificial Sequence
  Description of Artificial Sequence: Synthetic oligonucleotide
  Antisense strand to SEQ ID NO: 1449500
uaauuuccuguaaagcgcu

SEQ ID NO: 1449502 - RNA, 19 nt, Artificial Sequence
  Description of Artificial Sequence: Synthetic oligonucleotide
  Sense strand starting at position 3947 of SEQ ID NO: 1243896
ggcgaaucaccagaaaucu

SEQ ID NO: 1449503 - RNA, 19 nt, Artificial Sequence
  Description of Artificial Sequence: Synthetic oligonucleotide
  Antisense strand to SEQ ID NO: 1449502
agauuucuggugauucgcc

SEQ ID NO: 1449504 - RNA, 19 nt, Artificial Sequence
  Description of Artificial Sequence: Synthetic oligonucleotide
  Sense strand starting at position 359 of SEQ ID NO: 1243897
uguacuguucgcgcccuaa

SEQ ID NO: 1449505 - RNA, 19 nt, Artificial Sequence
  Description of Artificial Sequence: Synthetic oligonucleotide
  Antisense strand to SEQ ID NO: 1449504
uuagggcgcgaacaguaca

SEQ ID NO: 1449506 - RNA, 19 nt, Artificial Sequence
  Description of Artificial Sequence: Synthetic oligonucleotide
  Sense strand starting at position 361 of SEQ ID NO: 1243897
uacuguucgcgcccuaaau

SEQ ID NO: 1449507 - RNA, 19 nt, Artificial Sequence
  Description of Artificial Sequence: Synthetic oligonucleotide
  Antisense strand to SEQ ID NO: 1449506
auuuagggcgcgaacagua

SEQ ID NO: 1449508 - RNA, 19 nt, Artificial Sequence
  Description of Artificial Sequence: Synthetic oligonucleotide
  Sense strand starting at position 389 of SEQ ID NO: 1243897
gaagcagacugguaaagga

SEQ ID NO: 1449509 - RNA, 19 nt, Artificial Sequence
  Description of Artificial Sequence: Synthetic oligonucleotide
  Antisense strand to SEQ ID NO: 1449508
uccuuuaccagucugcuuc

SEQ ID NO: 1449510 - RNA, 19 nt, Artificial Sequence
  Description of Artificial Sequence: Synthetic oligonucleotide
  Sense strand starting at position 470 of SEQ ID NO: 1243897
gagggcuuucuggaaauuc

SEQ ID NO: 1449511 - RNA, 19 nt, Artificial Sequence
  Description of Artificial Sequence: Synthetic oligonucleotide
  Antisense strand to SEQ ID NO: 1449510
gaauuuccagaaagcccuc

SEQ ID NO: 1449512 - RNA, 19 nt, Artificial Sequence
  Description of Artificial Sequence: Synthetic oligonucleotide
  Sense strand starting at position 530 of SEQ ID NO: 1243897
auuguauugagguaugcua

SEQ ID NO: 1449513 - RNA, 19 nt, Artificial Sequence
  Description of Artificial Sequence: Synthetic oligonucleotide
  Antisense strand to SEQ ID NO: 1449512
uagcauaccucaauacaau

SEQ ID NO: 1449514 - RNA, 19 nt, Artificial Sequence
  Description of Artificial Sequence: Synthetic oligonucleotide
  Sense strand starting at position 532 of SEQ ID NO: 1243897
uguauugagguaugcuaag

SEQ ID NO: 1449515 - RNA, 19 nt, Artificial Sequence
  Description of Artificial Sequence: Synthetic oligonucleotide
  Antisense strand to SEQ ID NO: 1449514
cuuagcauaccucaauaca

SEQ ID NO: 1449516 - RNA, 19 nt, Artificial Sequence
  Description of Artificial Sequence: Synthetic oligonucleotide
  Sense strand starting at position 581 of SEQ ID NO: 1243897
ugugucuccgcuuacuaaa

SEQ ID NO: 1449517 - RNA, 19 nt, Artificial Sequence
  Description of Artificial Sequence: Synthetic oligonucleotide
  Antisense strand to SEQ ID NO: 1449516
uuuaguaagcggagacaca

SEQ ID NO: 1449518 - RNA, 19 nt, Artificial Sequence
  Description of Artificial Sequence: Synthetic oligonucleotide
  Sense strand starting at position 609 of SEQ ID NO: 1243897
gacuccuuccgaggauucu

SEQ ID NO: 1449519 - RNA, 19 nt, Artificial Sequence
  Description of Artificial Sequence: Synthetic oligonucleotide
  Antisense strand to SEQ ID NO: 1449518
agaauccucggaaggaguc

SEQ ID NO: 1449520 - RNA, 19 nt, Artificial Sequence
  Description of Artificial Sequence: Synthetic oligonucleotide
  Sense strand starting at position 619 of SEQ ID NO: 1243897
gaggauucucccugguggu

SEQ ID NO: 1449521 - RNA, 19 nt, Artificial Sequence
  Description of Artificial Sequence: Synthetic oligonucleotide
  Antisense strand to SEQ ID NO: 1449520
accaccagggagaauccuc

SEQ ID NO: 1449522 - RNA, 19 nt, Artificial Sequence
  Description of Artificial Sequence: Synthetic oligonucleotide
  Sense strand starting at position 667 of SEQ ID NO: 1243897
agugcuguuagcugaagga

SEQ ID NO: 1449523 - RNA, 19 nt, Artificial Sequence
  Description of Artificial Sequence: Synthetic oligonucleotide
  Antisense strand to SEQ ID NO: 1449522
uccuucagcuaacagcacu

SEQ ID NO: 1449524 - RNA, 19 nt, Artificial Sequence
  Description of Artificial Sequence: Synthetic oligonucleotide
  Sense strand starting at position 743 of SEQ ID NO: 1243897
cggacaguuucccucagaa

SEQ ID NO: 1449525 - RNA, 19 nt, Artificial Sequence
  Description of Artificial Sequence: Synthetic oligonucleotide
  Antisense strand to SEQ ID NO: 1449524
uucugagggaaacuguccg

SEQ ID NO: 1449526 - RNA, 19 nt, Artificial Sequence
  Description of Artificial Sequence: Synthetic oligonucleotide
  Sense strand starting at position 984 of SEQ ID NO: 1243897
gaggaauucucuuaauggg

SEQ ID NO: 1449527 - RNA, 19 nt, Artificial Sequence
  Description of Artificial Sequence: Synthetic oligonucleotide
  Antisense strand to SEQ ID NO: 1449526
cccauuaagagaauuccuc

SEQ ID NO: 1449528 - RNA, 19 nt, Artificial Sequence
  Description of Artificial Sequence: Synthetic oligonucleotide
  Sense strand starting at position 1103 of SEQ ID NO: 1243897
cugucucuuccuuguuaua

SEQ ID NO: 1449529 - RNA, 19 nt, Artificial Sequence
  Description of Artificial Sequence: Synthetic oligonucleotide
  Antisense strand to SEQ ID NO: 1449528
uauaacaaggaagagacag

SEQ ID NO: 1449530 - RNA, 19 nt, Artificial Sequence
  Description of Artificial Sequence: Synthetic oligonucleotide
  Sense strand starting at position 1173 of SEQ ID NO: 1243897
cacagauccggcugucauc

SEQ ID NO: 1449531 - RNA, 19 nt, Artificial Sequence
  Description of Artificial Sequence: Synthetic oligonucleotide
  Antisense strand to SEQ ID NO: 1449530
gaugacagccggaucugug

SEQ ID NO: 1449532 - RNA, 19 nt, Artificial Sequence
  Description of Artificial Sequence: Synthetic oligonucleotide
  Sense strand starting at position 1212 of SEQ ID NO: 1243897
uugguuucuuuagcaacaa

SEQ ID NO: 1449533 - RNA, 19 nt, Artificial Sequence
  Description of Artificial Sequence: Synthetic oligonucleotide
  Antisense strand to SEQ ID NO: 1449532
uuguugcuaaagaaaccaa

SEQ ID NO: 1449534 - RNA, 19 nt, Artificial Sequence
  Description of Artificial Sequence: Synthetic oligonucleotide
  Sense strand starting at position 2403 of SEQ ID NO: 1243897
gcggguagguauaaggaaa

SEQ ID NO: 1449535 - RNA, 19 nt, Artificial Sequence
  Description of Artificial Sequence: Synthetic oligonucleotide
  Antisense strand to SEQ ID NO: 1449534
uuuccuuauaccuacccgc

SEQ ID NO: 1449536 - RNA, 19 nt, Artificial Sequence
  Description of Artificial Sequence: Synthetic oligonucleotide
  Sense strand starting at position 3008 of SEQ ID NO: 1243897
acaggcuagguguggaaau

SEQ ID NO: 1449537 - RNA, 19 nt, Artificial Sequence
  Description of Artificial Sequence: Synthetic oligonucleotide
  Antisense strand to SEQ ID NO: 1449536
auuuccacaccuagccugu

SEQ ID NO: 1449538 - RNA, 19 nt, Artificial Sequence
  Description of Artificial Sequence: Synthetic oligonucleotide
  Sense strand starting at position 3201 of SEQ ID NO: 1243897
ugugcccacucuuugacaa

SEQ ID NO: 1449539 - RNA, 19 nt, Artificial Sequence
  Description of Artificial Sequence: Synthetic oligonucleotide
  Antisense strand to SEQ ID NO: 1449538
uugucaaagagugggcaca

SEQ ID NO: 1449540 - RNA, 19 nt, Artificial Sequence
  Description of Artificial Sequence: Synthetic oligonucleotide
  Sense strand starting at position 3202 of SEQ ID NO: 1243897
gugcccacucuuugacaau

SEQ ID NO: 1449541 - RNA, 19 nt, Artificial Sequence
  Description of Artificial Sequence: Synthetic oligonucleotide
  Antisense strand to SEQ ID NO: 1449540
auugucaaagagugggcac

SEQ ID NO: 1449542 - RNA, 19 nt, Artificial Sequence
  Description of Artificial Sequence: Synthetic oligonucleotide
  Sense strand starting at position 3311 of SEQ ID NO: 1243897
uaucaacaaucgguaagua

SEQ ID NO: 1449543 - RNA, 19 nt, Artificial Sequence
  Description of Artificial Sequence: Synthetic oligonucleotide
  Antisense strand to SEQ ID NO: 1449542
uacuuaccgauuguugaua

SEQ ID NO: 1449544 - RNA, 19 nt, Artificial Sequence
  Description of Artificial Sequence: Synthetic oligonucleotide
  Sense strand starting at position 3411 of SEQ ID NO: 1243897
aguagcaguuccuuaaaua

SEQ ID NO: 1449545 - RNA, 19 nt, Artificial Sequence
  Description of Artificial Sequence: Synthetic oligonucleotide
  Antisense strand to SEQ ID NO: 1449544
uauuuaaggaacugcuacu

SEQ ID NO: 1449546 - RNA, 19 nt, Artificial Sequence
  Description of Artificial Sequence: Synthetic oligonucleotide
  Sense strand starting at position 3412 of SEQ ID NO: 1243897
guagcaguuccuuaaauau

SEQ ID NO: 1449547 - RNA, 19 nt, Artificial Sequence
  Description of Artificial Sequence: Synthetic oligonucleotide
  Antisense strand to SEQ ID NO: 1449546
auauuuaaggaacugcuac

SEQ ID NO: 1449548 - RNA, 19 nt, Artificial Sequence
  Description of Artificial Sequence: Synthetic oligonucleotide
  Sense strand starting at position 3466 of SEQ ID NO: 1243897
aagaauuaauaagaggagu

SEQ ID NO: 1449549 - RNA, 19 nt, Artificial Sequence
  Description of Artificial Sequence: Synthetic oligonucleotide
  Antisense strand to SEQ ID NO: 1449548
acuccucuuauuaauucuu

SEQ ID NO: 1449550 - RNA, 19 nt, Artificial Sequence
  Description of Artificial Sequence: Synthetic oligonucleotide
  Sense strand starting at position 3573 of SEQ ID NO: 1243897
gcaguaauccguuaauccg

SEQ ID NO: 1449551 - RNA, 19 nt, Artificial Sequence
  Description of Artificial Sequence: Synthetic oligonucleotide
  Antisense strand to SEQ ID NO: 1449550
cggauuaacggauuacugc

SEQ ID NO: 1449552 - RNA, 19 nt, Artificial Sequence
  Description of Artificial Sequence: Synthetic oligonucleotide
  Sense strand starting at position 3636 of SEQ ID NO: 1243897
ccaggugcugugcaagaua

SEQ ID NO: 1449553 - RNA, 19 nt, Artificial Sequence
  Description of Artificial Sequence: Synthetic oligonucleotide
  Antisense strand to SEQ ID NO: 1449552
uaucuugcacagcaccugg

SEQ ID NO: 1449554 - RNA, 19 nt, Artificial Sequence
  Description of Artificial Sequence: Synthetic oligonucleotide
  Sense strand starting at position 3667 of SEQ ID NO: 1243897
gugagugagaccuguuccu

SEQ ID NO: 1449555 - RNA, 19 nt, Artificial Sequence
  Description of Artificial Sequence: Synthetic oligonucleotide
  Antisense strand to SEQ ID NO: 1449554
aggaacaggucucacucac

SEQ ID NO: 1449556 - RNA, 19 nt, Artificial Sequence
  Description of Artificial Sequence: Synthetic oligonucleotide
  Sense strand starting at position 3674 of SEQ ID NO: 1243897
agaccuguuccugaccuaa

SEQ ID NO: 1449557 - RNA, 19 nt, Artificial Sequence
  Description of Artificial Sequence: Synthetic oligonucleotide
  Antisense strand to SEQ ID NO: 1449556
uuaggucaggaacaggucu

SEQ ID NO: 1449558 - RNA, 19 nt, Artificial Sequence
  Description of Artificial Sequence: Synthetic oligonucleotide
  Sense strand starting at position 3704 of SEQ ID NO: 1243897
gaauaaugguaggaaguga

SEQ ID NO: 1449559 - RNA, 19 nt, Artificial Sequence
  Description of Artificial Sequence: Synthetic oligonucleotide
  Antisense strand to SEQ ID NO: 1449558
ucacuuccuaccauuauuc

SEQ ID NO: 1449560 - RNA, 19 nt, Artificial Sequence
  Description of Artificial Sequence: Synthetic oligonucleotide
  Sense strand starting at position 3719 of SEQ ID NO: 1243897
gugauagaggccugguuua

SEQ ID NO: 1449561 - RNA, 19 nt, Artificial Sequence
  Description of Artificial Sequence: Synthetic oligonucleotide
  Antisense strand to SEQ ID NO: 1449560
uaaaccaggccucuaucac

SEQ ID NO: 1449562 - RNA, 19 nt, Artificial Sequence
  Description of Artificial Sequence: Synthetic oligonucleotide
  Sense strand starting at position 3745 of SEQ ID NO: 1243897
ggcaguagagauggaaagu

SEQ ID NO: 1449563 - RNA, 19 nt, Artificial Sequence
  Description of Artificial Sequence: Synthetic oligonucleotide
  Antisense strand to SEQ ID NO: 1449562
acuuuccaucucuacugcc

SEQ ID NO: 1449564 - RNA, 19 nt, Artificial Sequence
  Description of Artificial Sequence: Synthetic oligonucleotide
  Sense strand starting at position 3746 of SEQ ID NO: 1243897
gcaguagagauggaaaguu

SEQ ID NO: 1449565 - RNA, 19 nt, Artificial Sequence
  Description of Artificial Sequence: Synthetic oligonucleotide
  Antisense strand to SEQ ID NO: 1449564
aacuuuccaucucuacugc

SEQ ID NO: 1449566 - RNA, 19 nt, Artificial Sequence
  Description of Artificial Sequence: Synthetic oligonucleotide
  Sense strand starting at position 3755 of SEQ ID NO: 1243897
auggaaaguuuagaacaca

SEQ ID NO: 1449567 - RNA, 19 nt, Artificial Sequence
  Description of Artificial Sequence: Synthetic oligonucleotide
  Antisense strand to SEQ ID NO: 1449566
uguguucuaaacuuuccau

SEQ ID NO: 1449568 - RNA, 19 nt, Artificial Sequence
  Description of Artificial Sequence: Synthetic oligonucleotide
  Sense strand starting at position 3779 of SEQ ID NO: 1243897
aggacuuuaguggguagaa

SEQ ID NO: 1449569 - RNA, 19 nt, Artificial Sequence
  Description of Artificial Sequence: Synthetic oligonucleotide
  Antisense strand to SEQ ID NO: 1449568
uucuacccacuaaaguccu

SEQ ID NO: 1449570 - RNA, 19 nt, Artificial Sequence
  Description of Artificial Sequence: Synthetic oligonucleotide
  Sense strand starting at position 3780 of SEQ ID NO: 1243897
ggacuuuaguggguagaau

SEQ ID NO: 1449571 - RNA, 19 nt, Artificial Sequence
  Description of Artificial Sequence: Synthetic oligonucleotide
  Antisense strand to SEQ ID NO: 1449570
auucuacccacuaaagucc

SEQ ID NO: 1449572 - RNA, 19 nt, Artificial Sequence
  Description of Artificial Sequence: Synthetic oligonucleotide
  Sense strand starting at position 3781 of SEQ ID NO: 1243897
gacuuuaguggguagaauu

SEQ ID NO: 1449573 - RNA, 19 nt, Artificial Sequence
  Description of Artificial Sequence: Synthetic oligonucleotide
  Antisense strand to SEQ ID NO: 1449572
aauucuacccacuaaaguc

SEQ ID NO: 1449574 - RNA, 19 nt, Artificial Sequence
  Description of Artificial Sequence: Synthetic oligonucleotide
  Sense strand starting at position 3827 of SEQ ID NO: 1243897
agaagaaaguauugagaua

SEQ ID NO: 1449575 - RNA, 19 nt, Artificial Sequence
  Description of Artificial Sequence: Synthetic oligonucleotide
  Antisense strand to SEQ ID NO: 1449574
uaucucaauacuuucuucu

SEQ ID NO: 1449576 - RNA, 19 nt, Artificial Sequence
  Description of Artificial Sequence: Synthetic oligonucleotide
  Sense strand starting at position 3879 of SEQ ID NO: 1243897
aggagacauuaagaaccau

SEQ ID NO: 1449577 - RNA, 19 nt, Artificial Sequence
  Description of Artificial Sequence: Synthetic oligonucleotide
  Antisense strand to SEQ ID NO: 1449576
augguucuuaaugucuccu

SEQ ID NO: 1449578 - RNA, 19 nt, Artificial Sequence
  Description of Artificial Sequence: Synthetic oligonucleotide
  Sense strand starting at position 3900 of SEQ ID NO: 1243897
guaggaugcuuucuacuuc

SEQ ID NO: 1449579 - RNA, 19 nt, Artificial Sequence
  Description of Artificial Sequence: Synthetic oligonucleotide
  Antisense strand to SEQ ID NO: 1449578
gaaguagaaagcauccuac

SEQ ID NO: 1449580 - RNA, 19 nt, Artificial Sequence
  Description of Artificial Sequence: Synthetic oligonucleotide
  Sense strand starting at position 3926 of SEQ ID NO: 1243897
cggcaacucaguggaugau

SEQ ID NO: 1449581 - RNA, 19 nt, Artificial Sequence
  Description of Artificial Sequence: Synthetic oligonucleotide
  Antisense strand to SEQ ID NO: 1449580
aucauccacugaguugccg

SEQ ID NO: 1449582 - RNA, 19 nt, Artificial Sequence
  Description of Artificial Sequence: Synthetic oligonucleotide
  Sense strand starting at position 3929 of SEQ ID NO: 1243897
caacucaguggaugauaau

SEQ ID NO: 1449583 - RNA, 19 nt, Artificial Sequence
  Description of Artificial Sequence: Synthetic oligonucleotide
  Antisense strand to SEQ ID NO: 1449582
auuaucauccacugaguug

SEQ ID NO: 1449584 - RNA, 19 nt, Artificial Sequence
  Description of Artificial Sequence: Synthetic oligonucleotide
  Sense strand starting at position 95 of SEQ ID NO: 1243898
uguacuguucgcgcccuaa

SEQ ID NO: 1449585 - RNA, 19 nt, Artificial Sequence
  Description of Artificial Sequence: Synthetic oligonucleotide
  Antisense strand to SEQ ID NO: 1449584
uuagggcgcgaacaguaca

SEQ ID NO: 1449586 - RNA, 19 nt, Artificial Sequence
  Description of Artificial Sequence: Synthetic oligonucleotide
  Sense strand starting at position 97 of SEQ ID NO: 1243898
uacuguucgcgcccuaaau

SEQ ID NO: 1449587 - RNA, 19 nt, Artificial Sequence
  Description of Artificial Sequence: Synthetic oligonucleotide
  Antisense strand to SEQ ID NO: 1449586
auuuagggcgcgaacagua

SEQ ID NO: 1449588 - RNA, 19 nt, Artificial Sequence
  Description of Artificial Sequence: Synthetic oligonucleotide
  Sense strand starting at position 206 of SEQ ID NO: 1243898
gagggcuuucuggaaauuc

SEQ ID NO: 1449589 - RNA, 19 nt, Artificial Sequence
  Description of Artificial Sequence: Synthetic oligonucleotide
  Antisense strand to SEQ ID NO: 1449588
gaauuuccagaaagcccuc

SEQ ID NO: 1449590 - RNA, 19 nt, Artificial Sequence
  Description of Artificial Sequence: Synthetic oligonucleotide
  Sense strand starting at position 266 of SEQ ID NO: 1243898
auuguauugagguaugcua

SEQ ID NO: 1449591 - RNA, 19 nt, Artificial Sequence
  Description of Artificial Sequence: Synthetic oligonucleotide
  Antisense strand to SEQ ID NO: 1449590
uagcauaccucaauacaau

SEQ ID NO: 1449592 - RNA, 19 nt, Artificial Sequence
  Description of Artificial Sequence: Synthetic oligonucleotide
  Sense strand starting at position 268 of SEQ ID NO: 1243898
uguauugagguaugcuaag

SEQ ID NO: 1449593 - RNA, 19 nt, Artificial Sequence
  Description of Artificial Sequence: Synthetic oligonucleotide
  Antisense strand to SEQ ID NO: 1449592
cuuagcauaccucaauaca

SEQ ID NO: 1449594 - RNA, 19 nt, Artificial Sequence
  Description of Artificial Sequence: Synthetic oligonucleotide
  Sense strand starting at position 317 of SEQ ID NO: 1243898
ugugucuccgcuuacuaaa

SEQ ID NO: 1449595 - RNA, 19 nt, Artificial Sequence
  Description of Artificial Sequence: Synthetic oligonucleotide
  Antisense strand to SEQ ID NO: 1449594
uuuaguaagcggagacaca

SEQ ID NO: 1449596 - RNA, 19 nt, Artificial Sequence
  Description of Artificial Sequence: Synthetic oligonucleotide
  Sense strand starting at position 345 of SEQ ID NO: 1243898
gacuccuuccgaggauucu

SEQ ID NO: 1449597 - RNA, 19 nt, Artificial Sequence
  Description of Artificial Sequence: Synthetic oligonucleotide
  Antisense strand to SEQ ID NO: 1449596
agaauccucggaaggaguc

SEQ ID NO: 1449598 - RNA, 19 nt, Artificial Sequence
  Description of Artificial Sequence: Synthetic oligonucleotide
  Sense strand starting at position 355 of SEQ ID NO: 1243898
gaggauucucccugguggu

SEQ ID NO: 1449599 - RNA, 19 nt, Artificial Sequence
  Description of Artificial Sequence: Synthetic oligonucleotide
  Antisense strand to SEQ ID NO: 1449598
accaccagggagaauccuc

SEQ ID NO: 1449600 - RNA, 19 nt, Artificial Sequence
  Description of Artificial Sequence: Synthetic oligonucleotide
  Sense strand starting at position 403 of SEQ ID NO: 1243898
agugcuguuagcugaagga

SEQ ID NO: 1449601 - RNA, 19 nt, Artificial Sequence
  Description of Artificial Sequence: Synthetic oligonucleotide
  Antisense strand to SEQ ID NO: 1449600
uccuucagcuaacagcacu

SEQ ID NO: 1449602 - RNA, 19 nt, Artificial Sequence
  Description of Artificial Sequence: Synthetic oligonucleotide
  Sense strand starting at position 479 of SEQ ID NO: 1243898
cggacaguuucccucagaa

SEQ ID NO: 1449603 - RNA, 19 nt, Artificial Sequence
  Description of Artificial Sequence: Synthetic oligonucleotide
  Antisense strand to SEQ ID NO: 1449602
uucugagggaaacuguccg

SEQ ID NO: 1449604 - RNA, 19 nt, Artificial Sequence
  Description of Artificial Sequence: Synthetic oligonucleotide
  Sense strand starting at position 720 of SEQ ID NO: 1243898
gaggaauucucuuaauggg

SEQ ID NO: 1449605 - RNA, 19 nt, Artificial Sequence
  Description of Artificial Sequence: Synthetic oligonucleotide
  Antisense strand to SEQ ID NO: 1449604
cccauuaagagaauuccuc

SEQ ID NO: 1449606 - RNA, 19 nt, Artificial Sequence
  Description of Artificial Sequence: Synthetic oligonucleotide
  Sense strand starting at position 839 of SEQ ID NO: 1243898
cugucucuuccuuguuaua

SEQ ID NO: 1449607 - RNA, 19 nt, Artificial Sequence
  Description of Artificial Sequence: Synthetic oligonucleotide
  Antisense strand to SEQ ID NO: 1449606
uauaacaaggaagagacag

SEQ ID NO: 1449608 - RNA, 19 nt, Artificial Sequence
  Description of Artificial Sequence: Synthetic oligonucleotide
  Sense strand starting at position 909 of SEQ ID NO: 1243898
cacagauccggcugucauc

SEQ ID NO: 1449609 - RNA, 19 nt, Artificial Sequence
  Description of Artificial Sequence: Synthetic oligonucleotide
  Antisense strand to SEQ ID NO: 1449608
gaugacagccggaucugug

SEQ ID NO: 1449610 - RNA, 19 nt, Artificial Sequence
  Description of Artificial Sequence: Synthetic oligonucleotide
  Sense strand starting at position 948 of SEQ ID NO: 1243898
uugguuucuuuagcaacaa

SEQ ID NO: 1449611 - RNA, 19 nt, Artificial Sequence
  Description of Artificial Sequence: Synthetic oligonucleotide
  Antisense strand to SEQ ID NO: 1449610
uuguugcuaaagaaaccaa

SEQ ID NO: 1449612 - RNA, 19 nt, Artificial Sequence
  Description of Artificial Sequence: Synthetic oligonucleotide
  Sense strand starting at position 2139 of SEQ ID NO: 1243898
gcggguagguauaaggaaa

SEQ ID NO: 1449613 - RNA, 19 nt, Artificial Sequence
  Description of Artificial Sequence: Synthetic oligonucleotide
  Antisense strand to SEQ ID NO: 1449612
uuuccuuauaccuacccgc

SEQ ID NO: 1449614 - RNA, 19 nt, Artificial Sequence
  Description of Artificial Sequence: Synthetic oligonucleotide
  Sense strand starting at position 2744 of SEQ ID NO: 1243898
acaggcuagguguggaaau

SEQ ID NO: 1449615 - RNA, 19 nt, Artificial Sequence
  Description of Artificial Sequence: Synthetic oligonucleotide
  Antisense strand to SEQ ID NO: 1449614
auuuccacaccuagccugu

SEQ ID NO: 1449616 - RNA, 19 nt, Artificial Sequence
  Description of Artificial Sequence: Synthetic oligonucleotide
  Sense strand starting at position 2937 of SEQ ID NO: 1243898
ugugcccacucuuugacaa

SEQ ID NO: 1449617 - RNA, 19 nt, Artificial Sequence
  Description of Artificial Sequence: Synthetic oligonucleotide
  Antisense strand to SEQ ID NO: 1449616
uugucaaagagugggcaca

SEQ ID NO: 1449618 - RNA, 19 nt, Artificial Sequence
  Description of Artificial Sequence: Synthetic oligonucleotide
  Sense strand starting at position 2938 of SEQ ID NO: 1243898
gugcccacucuuugacaau

SEQ ID NO: 1449619 - RNA, 19 nt, Artificial Sequence
  Description of Artificial Sequence: Synthetic oligonucleotide
  Antisense strand to SEQ ID NO: 1449618
auugucaaagagugggcac

SEQ ID NO: 1449620 - RNA, 19 nt, Artificial Sequence
  Description of Artificial Sequence: Synthetic oligonucleotide
  Sense strand starting at position 3047 of SEQ ID NO: 1243898
uaucaacaaucgguaagua

SEQ ID NO: 1449621 - RNA, 19 nt, Artificial Sequence
  Description of Artificial Sequence: Synthetic oligonucleotide
  Antisense strand to SEQ ID NO: 1449620
uacuuaccgauuguugaua

SEQ ID NO: 1449622 - RNA, 19 nt, Artificial Sequence
  Description of Artificial Sequence: Synthetic oligonucleotide
  Sense strand starting at position 3147 of SEQ ID NO: 1243898
aguagcaguuccuuaaaua

SEQ ID NO: 1449623 - RNA, 19 nt, Artificial Sequence
  Description of Artificial Sequence: Synthetic oligonucleotide
  Antisense strand to SEQ ID NO: 1449622
uauuuaaggaacugcuacu

SEQ ID NO: 1449624 - RNA, 19 nt, Artificial Sequence
  Description of Artificial Sequence: Synthetic oligonucleotide
  Sense strand starting at position 3148 of SEQ ID NO: 1243898
guagcaguuccuuaaauau

SEQ ID NO: 1449625 - RNA, 19 nt, Artificial Sequence
  Description of Artificial Sequence: Synthetic oligonucleotide
  Antisense strand to SEQ ID NO: 1449624
auauuuaaggaacugcuac

SEQ ID NO: 1449626 - RNA, 19 nt, Artificial Sequence
  Description of Artificial Sequence: Synthetic oligonucleotide
  Sense strand starting at position 3202 of SEQ ID NO: 1243898
aagaauuaauaagaggagu

SEQ ID NO: 1449627 - RNA, 19 nt, Artificial Sequence
  Description of Artificial Sequence: Synthetic oligonucleotide
  Antisense strand to SEQ ID NO: 1449626
acuccucuuauuaauucuu

SEQ ID NO: 1449628 - RNA, 19 nt, Artificial Sequence
  Description of Artificial Sequence: Synthetic oligonucleotide
  Sense strand starting at position 3309 of SEQ ID NO: 1243898
gcaguaauccguuaauccg

SEQ ID NO: 1449629 - RNA, 19 nt, Artificial Sequence
  Description of Artificial Sequence: Synthetic oligonucleotide
  Antisense strand to SEQ ID NO: 1449628
cggauuaacggauuacugc

SEQ ID NO: 1449630 - RNA, 19 nt, Artificial Sequence
  Description of Artificial Sequence: Synthetic oligonucleotide
  Sense strand starting at position 3372 of SEQ ID NO: 1243898
ccaggugcugugcaagaua

SEQ ID NO: 1449631 - RNA, 19 nt, Artificial Sequence
  Description of Artificial Sequence: Synthetic oligonucleotide
  Antisense strand to SEQ ID NO: 1449630
uaucuugcacagcaccugg

SEQ ID NO: 1449632 - RNA, 19 nt, Artificial Sequence
  Description of Artificial Sequence: Synthetic oligonucleotide
  Sense strand starting at position 3403 of SEQ ID NO: 1243898
gugagugagaccuguuccu

SEQ ID NO: 1449633 - RNA, 19 nt, Artificial Sequence
  Description of Artificial Sequence: Synthetic oligonucleotide
  Antisense strand to SEQ ID NO: 1449632
aggaacaggucucacucac

SEQ ID NO: 1449634 - RNA, 19 nt, Artificial Sequence
  Description of Artificial Sequence: Synthetic oligonucleotide
  Sense strand starting at position 3410 of SEQ ID NO: 1243898
agaccuguuccugaccuaa

SEQ ID NO: 1449635 - RNA, 19 nt, Artificial Sequence
  Description of Artificial Sequence: Synthetic oligonucleotide
  Antisense strand to SEQ ID NO: 1449634
uuaggucaggaacaggucu

SEQ ID NO: 1449636 - RNA, 19 nt, Artificial Sequence
  Description of Artificial Sequence: Synthetic oligonucleotide
  Sense strand starting at position 3440 of SEQ ID NO: 1243898
gaauaaugguaggaaguga

SEQ ID NO: 1449637 - RNA, 19 nt, Artificial Sequence
  Description of Artificial Sequence: Synthetic oligonucleotide
  Antisense strand to SEQ ID NO: 1449636
ucacuuccuaccauuauuc

SEQ ID NO: 1449638 - RNA, 19 nt, Artificial Sequence
  Description of Artificial Sequence: Synthetic oligonucleotide
  Sense strand starting at position 3455 of SEQ ID NO: 1243898
gugauagaggccugguuua

SEQ ID NO: 1449639 - RNA, 19 nt, Artificial Sequence
  Description of Artificial Sequence: Synthetic oligonucleotide
  Antisense strand to SEQ ID NO: 1449638
uaaaccaggccucuaucac

SEQ ID NO: 1449640 - RNA, 19 nt, Artificial Sequence
  Description of Artificial Sequence: Synthetic oligonucleotide
  Sense strand starting at position 3481 of SEQ ID NO: 1243898
ggcaguagagauggaaagu

SEQ ID NO: 1449641 - RNA, 19 nt, Artificial Sequence
  Description of Artificial Sequence: Synthetic oligonucleotide
  Antisense strand to SEQ ID NO: 1449640
acuuuccaucucuacugcc

SEQ ID NO: 1449642 - RNA, 19 nt, Artificial Sequence
  Description of Artificial Sequence: Synthetic oligonucleotide
  Sense strand starting at position 3482 of SEQ ID NO: 1243898
gcaguagagauggaaaguu

SEQ ID NO: 1449643 - RNA, 19 nt, Artificial Sequence
  Description of Artificial Sequence: Synthetic oligonucleotide
  Antisense strand to SEQ ID NO: 1449642
aacuuuccaucucuacugc

SEQ ID NO: 1449644 - RNA, 19 nt, Artificial Sequence
  Description of Artificial Sequence: Synthetic oligonucleotide
  Sense strand starting at position 3491 of SEQ ID NO: 1243898
auggaaaguuuagaacaca

SEQ ID NO: 1449645 - RNA, 19 nt, Artificial Sequence
  Description of Artificial Sequence: Synthetic oligonucleotide
  Antisense strand to SEQ ID NO: 1449644
uguguucuaaacuuuccau

SEQ ID NO: 1449646 - RNA, 19 nt, Artificial Sequence
  Description of Artificial Sequence: Synthetic oligonucleotide
  Sense strand starting at position 3515 of SEQ ID NO: 1243898
aggacuuuaguggguagaa

SEQ ID NO: 1449647 - RNA, 19 nt, Artificial Sequence
  Description of Artificial Sequence: Synthetic oligonucleotide
  Antisense strand to SEQ ID NO: 1449646
uucuacccacuaaaguccu

SEQ ID NO: 1449648 - RNA, 19 nt, Artificial Sequence
  Description of Artificial Sequence: Synthetic oligonucleotide
  Sense strand starting at position 3516 of SEQ ID NO: 1243898
ggacuuuaguggguagaau

SEQ ID NO: 1449649 - RNA, 19 nt, Artificial Sequence
  Description of Artificial Sequence: Synthetic oligonucleotide
  Antisense strand to SEQ ID NO: 1449648
auucuacccacuaaagucc

SEQ ID NO: 1449650 - RNA, 19 nt, Artificial Sequence
  Description of Artificial Sequence: Synthetic oligonucleotide
  Sense strand starting at position 3517 of SEQ ID NO: 1243898
gacuuuaguggguagaauu

SEQ ID NO: 1449651 - RNA, 19 nt, Artificial Sequence
  Description of Artificial Sequence: Synthetic oligonucleotide
  Antisense strand to SEQ ID NO: 1449650
aauucuacccacuaaaguc

SEQ ID NO: 1449652 - RNA, 19 nt, Artificial Sequence
  Description of Artificial Sequence: Synthetic oligonucleotide
  Sense strand starting at position 3563 of SEQ ID NO: 1243898
agaagaaaguauugagaua

SEQ ID NO: 1449653 - RNA, 19 nt, Artificial Sequence
  Description of Artificial Sequence: Synthetic oligonucleotide
  Antisense strand to SEQ ID NO: 1449652
uaucucaauacuuucuucu

SEQ ID NO: 1449654 - RNA, 19 nt, Artificial Sequence
  Description of Artificial Sequence: Synthetic oligonucleotide
  Sense strand starting at position 3615 of SEQ ID NO: 1243898
aggagacauuaagaaccau

SEQ ID NO: 1449655 - RNA, 19 nt, Artificial Sequence
  Description of Artificial Sequence: Synthetic oligonucleotide
  Antisense strand to SEQ ID NO: 1449654
augguucuuaaugucuccu

SEQ ID NO: 1449656 - RNA, 19 nt, Artificial Sequence
  Description of Artificial Sequence: Synthetic oligonucleotide
  Sense strand starting at position 3636 of SEQ ID NO: 1243898
guaggaugcuuucuacuuc

SEQ ID NO: 1449657 - RNA, 19 nt, Artificial Sequence
  Description of Artificial Sequence: Synthetic oligonucleotide
  Antisense strand to SEQ ID NO: 1449656
gaaguagaaagcauccuac

SEQ ID NO: 1449658 - RNA, 19 nt, Artificial Sequence
  Description of Artificial Sequence: Synthetic oligonucleotide
  Sense strand starting at position 3662 of SEQ ID NO: 1243898
cggcaacucaguggaugau

SEQ ID NO: 1449659 - RNA, 19 nt, Artificial Sequence
  Description of Artificial Sequence: Synthetic oligonucleotide
  Antisense strand to SEQ ID NO: 1449658
aucauccacugaguugccg

SEQ ID NO: 1449660 - RNA, 19 nt, Artificial Sequence
  Description of Artificial Sequence: Synthetic oligonucleotide
  Sense strand starting at position 3665 of SEQ ID NO: 1243898
caacucaguggaugauaau

SEQ ID NO: 1449661 - RNA, 19 nt, Artificial Sequence
  Description of Artificial Sequence: Synthetic oligonucleotide
  Antisense strand to SEQ ID NO: 1449660
auuaucauccacugaguug

SEQ ID NO: 1449662 - RNA, 19 nt, Artificial Sequence
  Description of Artificial Sequence: Synthetic oligonucleotide
  Sense strand starting at position 3746 of SEQ ID NO: 1243898
ggugguguauguucagaug

SEQ ID NO: 1449663 - RNA, 19 nt, Artificial Sequence
  Description of Artificial Sequence: Synthetic oligonucleotide
  Antisense strand to SEQ ID NO: 1449662
caucugaacauacaccacc

SEQ ID NO: 1449664 - RNA, 19 nt, Artificial Sequence
  Description of Artificial Sequence: Synthetic oligonucleotide
  Sense strand starting at position 262 of SEQ ID NO: 1243899
caacuaguggcuugugaaa

SEQ ID NO: 1449665 - RNA, 19 nt, Artificial Sequence
  Description of Artificial Sequence: Synthetic oligonucleotide
  Antisense strand to SEQ ID NO: 1449664
uuucacaagccacuaguug

SEQ ID NO: 1449666 - RNA, 19 nt, Artificial Sequence
  Description of Artificial Sequence: Synthetic oligonucleotide
  Sense strand starting at position 271 of SEQ ID NO: 1243899
gcuugugaaagcuacaaga

SEQ ID NO: 1449667 - RNA, 19 nt, Artificial Sequence
  Description of Artificial Sequence: Synthetic oligonucleotide
  Antisense strand to SEQ ID NO: 1449666
ucuuguagcuuucacaagc

SEQ ID NO: 1449668 - RNA, 19 nt, Artificial Sequence
  Description of Artificial Sequence: Synthetic oligonucleotide
  Sense strand starting at position 296 of SEQ ID NO: 1243899
ugaaguaucuccugacaau

SEQ ID NO: 1449669 - RNA, 19 nt, Artificial Sequence
  Description of Artificial Sequence: Synthetic oligonucleotide
  Antisense strand to SEQ ID NO: 1449668
auugucaggagauacuuca

SEQ ID NO: 1449670 - RNA, 19 nt, Artificial Sequence
  Description of Artificial Sequence: Synthetic oligonucleotide
  Sense strand starting at position 329 of SEQ ID NO: 1243899
gugcccuuccuauguaagu

SEQ ID NO: 1449671 - RNA, 19 nt, Artificial Sequence
  Description of Artificial Sequence: Synthetic oligonucleotide
  Antisense strand to SEQ ID NO: 1449670
acuuacauaggaagggcac

SEQ ID NO: 1449672 - RNA, 19 nt, Artificial Sequence
  Description of Artificial Sequence: Synthetic oligonucleotide
  Sense strand starting at position 330 of SEQ ID NO: 1243899
ugcccuuccuauguaaguu

SEQ ID NO: 1449673 - RNA, 19 nt, Artificial Sequence
  Description of Artificial Sequence: Synthetic oligonucleotide
  Antisense strand to SEQ ID NO: 1449672
aacuuacauaggaagggca

SEQ ID NO: 1449674 - RNA, 19 nt, Artificial Sequence
  Description of Artificial Sequence: Synthetic oligonucleotide
  Sense strand starting at position 334 of SEQ ID NO: 1243899
cuuccuauguaaguucuaa

SEQ ID NO: 1449675 - RNA, 19 nt, Artificial Sequence
  Description of Artificial Sequence: Synthetic oligonucleotide
  Antisense strand to SEQ ID NO: 1449674
uuagaacuuacauaggaag

SEQ ID NO: 1449676 - RNA, 19 nt, Artificial Sequence
  Description of Artificial Sequence: Synthetic oligonucleotide
  Sense strand starting at position 338 of SEQ ID NO: 1243899
cuauguaaguucuaacuau

SEQ ID NO: 1449677 - RNA, 19 nt, Artificial Sequence
  Description of Artificial Sequence: Synthetic oligonucleotide
  Antisense strand to SEQ ID NO: 1449676
auaguuagaacuuacauag

SEQ ID NO: 1449678 - RNA, 19 nt, Artificial Sequence
  Description of Artificial Sequence: Synthetic oligonucleotide
  Sense strand starting at position 457 of SEQ ID NO: 1243899
uccugucugccagguauga

SEQ ID NO: 1449679 - RNA, 19 nt, Artificial Sequence
  Description of Artificial Sequence: Synthetic oligonucleotide
  Antisense strand to SEQ ID NO: 1449678
ucauaccuggcagacagga

SEQ ID NO: 1449680 - RNA, 19 nt, Artificial Sequence
  Description of Artificial Sequence: Synthetic oligonucleotide
  Sense strand starting at position 459 of SEQ ID NO: 1243899
cugucugccagguaugagu

SEQ ID NO: 1449681 - RNA, 19 nt, Artificial Sequence
  Description of Artificial Sequence: Synthetic oligonucleotide
  Antisense strand to SEQ ID NO: 1449680
acucauaccuggcagacag

SEQ ID NO: 1449682 - RNA, 19 nt, Artificial Sequence
  Description of Artificial Sequence: Synthetic oligonucleotide
  Sense strand starting at position 479 of SEQ ID NO: 1243899
gguccuguccucuguucua

SEQ ID NO: 1449683 - RNA, 19 nt, Artificial Sequence
  Description of Artificial Sequence: Synthetic oligonucleotide
  Antisense strand to SEQ ID NO: 1449682
uagaacagaggacaggacc

SEQ ID NO: 1449684 - RNA, 19 nt, Artificial Sequence
  Description of Artificial Sequence: Synthetic oligonucleotide
  Sense strand starting at position 641 of SEQ ID NO: 1243899
ggacuuaaaugaggagaug

SEQ ID NO: 1449685 - RNA, 19 nt, Artificial Sequence
  Description of Artificial Sequence: Synthetic oligonucleotide
  Antisense strand to SEQ ID NO: 1449684
caucuccucauuuaagucc

SEQ ID NO: 1449686 - RNA, 19 nt, Artificial Sequence
  Description of Artificial Sequence: Synthetic oligonucleotide
  Sense strand starting at position 667 of SEQ ID NO: 1243899
cgcauugucaagugggacu

SEQ ID NO: 1449687 - RNA, 19 nt, Artificial Sequence
  Description of Artificial Sequence: Synthetic oligonucleotide
  Antisense strand to SEQ ID NO: 1449686
agucccacuugacaaugcg

SEQ ID NO: 1449688 - RNA, 19 nt, Artificial Sequence
  Description of Artificial Sequence: Synthetic oligonucleotide
  Sense strand starting at position 669 of SEQ ID NO: 1243899
cauugucaagugggacuaa

SEQ ID NO: 1449689 - RNA, 19 nt, Artificial Sequence
  Description of Artificial Sequence: Synthetic oligonucleotide
  Antisense strand to SEQ ID NO: 1449688
uuagucccacuugacaaug

SEQ ID NO: 1449690 - RNA, 19 nt, Artificial Sequence
  Description of Artificial Sequence: Synthetic oligonucleotide
  Sense strand starting at position 670 of SEQ ID NO: 1243899
auugucaagugggacuaaa

SEQ ID NO: 1449691 - RNA, 19 nt, Artificial Sequence
  Description of Artificial Sequence: Synthetic oligonucleotide
  Antisense strand to SEQ ID NO: 1449690
uuuagucccacuugacaau

SEQ ID NO: 1449692 - RNA, 19 nt, Artificial Sequence
  Description of Artificial Sequence: Synthetic oligonucleotide
  Sense strand starting at position 1013 of SEQ ID NO: 1243899
ggugguagugaagaaaucu

SEQ ID NO: 1449693 - RNA, 19 nt, Artificial Sequence
  Description of Artificial Sequence: Synthetic oligonucleotide
  Antisense strand to SEQ ID NO: 1449692
agauuucuucacuaccacc

SEQ ID NO: 1449694 - RNA, 19 nt, Artificial Sequence
  Description of Artificial Sequence: Synthetic oligonucleotide
  Sense strand starting at position 1041 of SEQ ID NO: 1243899
aaugguuuguggccacaga

SEQ ID NO: 1449695 - RNA, 19 nt, Artificial Sequence
  Description of Artificial Sequence: Synthetic oligonucleotide
  Antisense strand to SEQ ID NO: 1449694
ucuguggccacaaaccauu

SEQ ID NO: 1449696 - RNA, 19 nt, Artificial Sequence
  Description of Artificial Sequence: Synthetic oligonucleotide
  Sense strand starting at position 1042 of SEQ ID NO: 1243899
augguuuguggccacagaa

SEQ ID NO: 1449697 - RNA, 19 nt, Artificial Sequence
  Description of Artificial Sequence: Synthetic oligonucleotide
  Antisense strand to SEQ ID NO: 1449696
uucuguggccacaaaccau

SEQ ID NO: 1449698 - RNA, 19 nt, Artificial Sequence
  Description of Artificial Sequence: Synthetic oligonucleotide
  Sense strand starting at position 1070 of SEQ ID NO: 1243899
cagcguacuagugguauua

SEQ ID NO: 1449699 - RNA, 19 nt, Artificial Sequence
  Description of Artificial Sequence: Synthetic oligonucleotide
  Antisense strand to SEQ ID NO: 1449698
uaauaccacuaguacgcug

SEQ ID NO: 1449700 - RNA, 19 nt, Artificial Sequence
  Description of Artificial Sequence: Synthetic oligonucleotide
  Sense strand starting at position 1117 of SEQ ID NO: 1243899
uaacgagguugagaaacaa

SEQ ID NO: 1449701 - RNA, 19 nt, Artificial Sequence
  Description of Artificial Sequence: Synthetic oligonucleotide
  Antisense strand to SEQ ID NO: 1449700
uuguuucucaaccucguua

SEQ ID NO: 1449702 - RNA, 19 nt, Artificial Sequence
  Description of Artificial Sequence: Synthetic oligonucleotide
  Sense strand starting at position 1984 of SEQ ID NO: 1243899
cuccauugggcggaaauca

SEQ ID NO: 1449703 - RNA, 19 nt, Artificial Sequence
  Description of Artificial Sequence: Synthetic oligonucleotide
  Antisense strand to SEQ ID NO: 1449702
ugauuuccgcccaauggag

SEQ ID NO: 1449704 - RNA, 19 nt, Artificial Sequence
  Description of Artificial Sequence: Synthetic oligonucleotide
  Sense strand starting at position 2130 of SEQ ID NO: 1243899
guuggguguggcugaaaga

SEQ ID NO: 1449705 - RNA, 19 nt, Artificial Sequence
  Description of Artificial Sequence: Synthetic oligonucleotide
  Antisense strand to SEQ ID NO: 1449704
ucuuucagccacacccaac

SEQ ID NO: 1449706 - RNA, 19 nt, Artificial Sequence
  Description of Artificial Sequence: Synthetic oligonucleotide
  Sense strand starting at position 2131 of SEQ ID NO: 1243899
uuggguguggcugaaagau

SEQ ID NO: 1449707 - RNA, 19 nt, Artificial Sequence
  Description of Artificial Sequence: Synthetic oligonucleotide
  Antisense strand to SEQ ID NO: 1449706
aucuuucagccacacccaa

SEQ ID NO: 1449708 - RNA, 19 nt, Artificial Sequence
  Description of Artificial Sequence: Synthetic oligonucleotide
  Sense strand starting at position 2133 of SEQ ID NO: 1243899
ggguguggcugaaagauug

SEQ ID NO: 1449709 - RNA, 19 nt, Artificial Sequence
  Description of Artificial Sequence: Synthetic oligonucleotide
  Antisense strand to SEQ ID NO: 1449708
caaucuuucagccacaccc

SEQ ID NO: 1449710 - RNA, 19 nt, Artificial Sequence
  Description of Artificial Sequence: Synthetic oligonucleotide
  Sense strand starting at position 2143 of SEQ ID NO: 1243899
gaaagauuggcaggcgacu

SEQ ID NO: 1449711 - RNA, 19 nt, Artificial Sequence
  Description of Artificial Sequence: Synthetic oligonucleotide
  Antisense strand to SEQ ID NO: 1449710
agucgccugccaaucuuuc

SEQ ID NO: 1449712 - RNA, 19 nt, Artificial Sequence
  Description of Artificial Sequence: Synthetic oligonucleotide
  Sense strand starting at position 2723 of SEQ ID NO: 1243899
gaucucuuguguguaugga

SEQ ID NO: 1449713 - RNA, 19 nt, Artificial Sequence
  Description of Artificial Sequence: Synthetic oligonucleotide
  Antisense strand to SEQ ID NO: 1449712
uccauacacacaagagauc

SEQ ID NO: 1449714 - RNA, 19 nt, Artificial Sequence
  Description of Artificial Sequence: Synthetic oligonucleotide
  Sense strand starting at position 2724 of SEQ ID NO: 1243899
aucucuuguguguauggaa

SEQ ID NO: 1449715 - RNA, 19 nt, Artificial Sequence
  Description of Artificial Sequence: Synthetic oligonucleotide
  Antisense strand to SEQ ID NO: 1449714
uuccauacacacaagagau

SEQ ID NO: 1449716 - RNA, 19 nt, Artificial Sequence
  Description of Artificial Sequence: Synthetic oligonucleotide
  Sense strand starting at position 2819 of SEQ ID NO: 1243899
guuuguugcccagggcaga

SEQ ID NO: 1449717 - RNA, 19 nt, Artificial Sequence
  Description of Artificial Sequence: Synthetic oligonucleotide
  Antisense strand to SEQ ID NO: 1449716
ucugcccugggcaacaaac

SEQ ID NO: 1449718 - RNA, 19 nt, Artificial Sequence
  Description of Artificial Sequence: Synthetic oligonucleotide
  Sense strand starting at position 2852 of SEQ ID NO: 1243899
ccggaaaucagaugucaaa

SEQ ID NO: 1449719 - RNA, 19 nt, Artificial Sequence
  Description of Artificial Sequence: Synthetic oligonucleotide
  Antisense strand to SEQ ID NO: 1449718
uuugacaucugauuuccgg

SEQ ID NO: 1449720 - RNA, 19 nt, Artificial Sequence
  Description of Artificial Sequence: Synthetic oligonucleotide
  Sense strand starting at position 2918 of SEQ ID NO: 1243899
ccaagaaaccuuuggucag

SEQ ID NO: 1449721 - RNA, 19 nt, Artificial Sequence
  Description of Artificial Sequence: Synthetic oligonucleotide
  Antisense strand to SEQ ID NO: 1449720
cugaccaaagguuucuugg

SEQ ID NO: 1449722 - RNA, 19 nt, Artificial Sequence
  Description of Artificial Sequence: Synthetic oligonucleotide
  Sense strand starting at position 3199 of SEQ ID NO: 1243899
gagcgagacuccuucccuu

SEQ ID NO: 1449723 - RNA, 19 nt, Artificial Sequence
  Description of Artificial Sequence: Synthetic oligonucleotide
  Antisense strand to SEQ ID NO: 1449722
aagggaaggagucucgcuc

SEQ ID NO: 1449724 - RNA, 19 nt, Artificial Sequence
  Description of Artificial Sequence: Synthetic oligonucleotide
  Sense strand starting at position 3641 of SEQ ID NO: 1243899
ccauuuggcucagaagcau

SEQ ID NO: 1449725 - RNA, 19 nt, Artificial Sequence
  Description of Artificial Sequence: Synthetic oligonucleotide
  Antisense strand to SEQ ID NO: 1449724
augcuucugagccaaaugg

SEQ ID NO: 1449726 - RNA, 19 nt, Artificial Sequence
  Description of Artificial Sequence: Synthetic oligonucleotide
  Sense strand starting at position 3652 of SEQ ID NO: 1243899
agaagcauuucugaggaua

SEQ ID NO: 1449727 - RNA, 19 nt, Artificial Sequence
  Description of Artificial Sequence: Synthetic oligonucleotide
  Antisense strand to SEQ ID NO: 1449726
uauccucagaaaugcuucu

SEQ ID NO: 1449728 - RNA, 19 nt, Artificial Sequence
  Description of Artificial Sequence: Synthetic oligonucleotide
  Sense strand starting at position 3654 of SEQ ID NO: 1243899
aagcauuucugaggauagg

SEQ ID NO: 1449729 - RNA, 19 nt, Artificial Sequence
  Description of Artificial Sequence: Synthetic oligonucleotide
  Antisense strand to SEQ ID NO: 1449728
ccuauccucagaaaugcuu

SEQ ID NO: 1449730 - RNA, 19 nt, Artificial Sequence
  Description of Artificial Sequence: Synthetic oligonucleotide
  Sense strand starting at position 3682 of SEQ ID NO: 1243899
agcacuuuguaucuacaua

SEQ ID NO: 1449731 - RNA, 19 nt, Artificial Sequence
  Description of Artificial Sequence: Synthetic oligonucleotide
  Antisense strand to SEQ ID NO: 1449730
uauguagauacaaagugcu

SEQ ID NO: 1449732 - RNA, 19 nt, Artificial Sequence
  Description of Artificial Sequence: Synthetic oligonucleotide
  Sense strand starting at position 3710 of SEQ ID NO: 1243899
aagauuaguuugguuggga

SEQ ID NO: 1449733 - RNA, 19 nt, Artificial Sequence
  Description of Artificial Sequence: Synthetic oligonucleotide
  Antisense strand to SEQ ID NO: 1449732
ucccaaccaaacuaaucuu

SEQ ID NO: 1449734 - RNA, 19 nt, Artificial Sequence
  Description of Artificial Sequence: Synthetic oligonucleotide
  Sense strand starting at position 3711 of SEQ ID NO: 1243899
agauuaguuugguugggac

SEQ ID NO: 1449735 - RNA, 19 nt, Artificial Sequence
  Description of Artificial Sequence: Synthetic oligonucleotide
  Antisense strand to SEQ ID NO: 1449734
gucccaaccaaacuaaucu

SEQ ID NO: 1449736 - RNA, 19 nt, Artificial Sequence
  Description of Artificial Sequence: Synthetic oligonucleotide
  Sense strand starting at position 3713 of SEQ ID NO: 1243899
auuaguuugguugggacau

SEQ ID NO: 1449737 - RNA, 19 nt, Artificial Sequence
  Description of Artificial Sequence: Synthetic oligonucleotide
  Antisense strand to SEQ ID NO: 1449736
augucccaaccaaacuaau

SEQ ID NO: 1449738 - RNA, 19 nt, Artificial Sequence
  Description of Artificial Sequence: Synthetic oligonucleotide
  Sense strand starting at position 3715 of SEQ ID NO: 1243899
uaguuugguugggacauua

SEQ ID NO: 1449739 - RNA, 19 nt, Artificial Sequence
  Description of Artificial Sequence: Synthetic oligonucleotide
  Antisense strand to SEQ ID NO: 1449738
uaaugucccaaccaaacua

SEQ ID NO: 1449740 - RNA, 19 nt, Artificial Sequence
  Description of Artificial Sequence: Synthetic oligonucleotide
  Sense strand starting at position 3846 of SEQ ID NO: 1243899
gugccaguuucuccugaaa

SEQ ID NO: 1449741 - RNA, 19 nt, Artificial Sequence
  Description of Artificial Sequence: Synthetic oligonucleotide
  Antisense strand to SEQ ID NO: 1449740
uuucaggagaaacuggcac

SEQ ID NO: 1449742 - RNA, 19 nt, Artificial Sequence
  Description of Artificial Sequence: Synthetic oligonucleotide
  Sense strand starting at position 3849 of SEQ ID NO: 1243899
ccaguuucuccugaaauag

SEQ ID NO: 1449743 - RNA, 19 nt, Artificial Sequence
  Description of Artificial Sequence: Synthetic oligonucleotide
  Antisense strand to SEQ ID NO: 1449742
cuauuucaggagaaacugg

SEQ ID NO: 1449744 - RNA, 19 nt, Artificial Sequence
  Description of Artificial Sequence: Synthetic oligonucleotide
  Sense strand starting at position 127 of SEQ ID NO: 1243900
gaagcagucugcucuuuga

SEQ ID NO: 1449745 - RNA, 19 nt, Artificial Sequence
  Description of Artificial Sequence: Synthetic oligonucleotide
  Antisense strand to SEQ ID NO: 1449744
ucaaagagcagacugcuuc

SEQ ID NO: 1449746 - RNA, 19 nt, Artificial Sequence
  Description of Artificial Sequence: Synthetic oligonucleotide
  Sense strand starting at position 138 of SEQ ID NO: 1243900
cucuuugaacccugggauu

SEQ ID NO: 1449747 - RNA, 19 nt, Artificial Sequence
  Description of Artificial Sequence: Synthetic oligonucleotide
  Antisense strand to SEQ ID NO: 1449746
aaucccaggguucaaagag

SEQ ID NO: 1449748 - RNA, 19 nt, Artificial Sequence
  Description of Artificial Sequence: Synthetic oligonucleotide
  Sense strand starting at position 140 of SEQ ID NO: 1243900
cuuugaacccugggauuau

SEQ ID NO: 1449749 - RNA, 19 nt, Artificial Sequence
  Description of Artificial Sequence: Synthetic oligonucleotide
  Antisense strand to SEQ ID NO: 1449748
auaaucccaggguucaaag

SEQ ID NO: 1449750 - RNA, 19 nt, Artificial Sequence
  Description of Artificial Sequence: Synthetic oligonucleotide
  Sense strand starting at position 141 of SEQ ID NO: 1243900
uuugaacccugggauuauu

SEQ ID NO: 1449751 - RNA, 19 nt, Artificial Sequence
  Description of Artificial Sequence: Synthetic oligonucleotide
  Antisense strand to SEQ ID NO: 1449750
aauaaucccaggguucaaa

SEQ ID NO: 1449752 - RNA, 19 nt, Artificial Sequence
  Description of Artificial Sequence: Synthetic oligonucleotide
  Sense strand starting at position 177 of SEQ ID NO: 1243900
ggugacaacuguucugaug

SEQ ID NO: 1449753 - RNA, 19 nt, Artificial Sequence
  Description of Artificial Sequence: Synthetic oligonucleotide
  Antisense strand to SEQ ID NO: 1449752
caucagaacaguugucacc

SEQ ID NO: 1449754 - RNA, 19 nt, Artificial Sequence
  Description of Artificial Sequence: Synthetic oligonucleotide
  Sense strand starting at position 208 of SEQ ID NO: 1243900
ccaguaacucuagggcaga

SEQ ID NO: 1449755 - RNA, 19 nt, Artificial Sequence
  Description of Artificial Sequence: Synthetic oligonucleotide
  Antisense strand to SEQ ID NO: 1449754
ucugcccuagaguuacugg

SEQ ID NO: 1449756 - RNA, 19 nt, Artificial Sequence
  Description of Artificial Sequence: Synthetic oligonucleotide
  Sense strand starting at position 259 of SEQ ID NO: 1243900
auauuaaccgucugguguu

SEQ ID NO: 1449757 - RNA, 19 nt, Artificial Sequence
  Description of Artificial Sequence: Synthetic oligonucleotide
  Antisense strand to SEQ ID NO: 1449756
aacaccagacgguuaauau

SEQ ID NO: 1449758 - RNA, 19 nt, Artificial Sequence
  Description of Artificial Sequence: Synthetic oligonucleotide
  Sense strand starting at position 266 of SEQ ID NO: 1243900
ccgucugguguugaauaca

SEQ ID NO: 1449759 - RNA, 19 nt, Artificial Sequence
  Description of Artificial Sequence: Synthetic oligonucleotide
  Antisense strand to SEQ ID NO: 1449758
uguauucaacaccagacgg

SEQ ID NO: 1449760 - RNA, 19 nt, Artificial Sequence
  Description of Artificial Sequence: Synthetic oligonucleotide
  Sense strand starting at position 282 of SEQ ID NO: 1243900
acaggugucucccuacaca

SEQ ID NO: 1449761 - RNA, 19 nt, Artificial Sequence
  Description of Artificial Sequence: Synthetic oligonucleotide
  Antisense strand to SEQ ID NO: 1449760
uguguagggagacaccugu

SEQ ID NO: 1449762 - RNA, 19 nt, Artificial Sequence
  Description of Artificial Sequence: Synthetic oligonucleotide
  Sense strand starting at position 285 of SEQ ID NO: 1243900
ggugucucccuacacacau

SEQ ID NO: 1449763 - RNA, 19 nt, Artificial Sequence
  Description of Artificial Sequence: Synthetic oligonucleotide
  Antisense strand to SEQ ID NO: 1449762
auguguguagggagacacc

SEQ ID NO: 1449764 - RNA, 19 nt, Artificial Sequence
  Description of Artificial Sequence: Synthetic oligonucleotide
  Sense strand starting at position 399 of SEQ ID NO: 1243900
gggauacagcccuagucau

SEQ ID NO: 1449765 - RNA, 19 nt, Artificial Sequence
  Description of Artificial Sequence: Synthetic oligonucleotide
  Antisense strand to SEQ ID NO: 1449764
augacuagggcuguauccc

SEQ ID NO: 1449766 - RNA, 19 nt, Artificial Sequence
  Description of Artificial Sequence: Synthetic oligonucleotide
  Sense strand starting at position 729 of SEQ ID NO: 1243900
gaugacuuccuccgugaga

SEQ ID NO: 1449767 - RNA, 19 nt, Artificial Sequence
  Description of Artificial Sequence: Synthetic oligonucleotide
  Antisense strand to SEQ ID NO: 1449766
ucucacggaggaagucauc

SEQ ID NO: 1449768 - RNA, 19 nt, Artificial Sequence
  Description of Artificial Sequence: Synthetic oligonucleotide
  Sense strand starting at position 730 of SEQ ID NO: 1243900
augacuuccuccgugagag

SEQ ID NO: 1449769 - RNA, 19 nt, Artificial Sequence
  Description of Artificial Sequence: Synthetic oligonucleotide
  Antisense strand to SEQ ID NO: 1449768
cucucacggaggaagucau

SEQ ID NO: 1449770 - RNA, 19 nt, Artificial Sequence
  Description of Artificial Sequence: Synthetic oligonucleotide
  Sense strand starting at position 731 of SEQ ID NO: 1243900
ugacuuccuccgugagaga

SEQ ID NO: 1449771 - RNA, 19 nt, Artificial Sequence
  Description of Artificial Sequence: Synthetic oligonucleotide
  Antisense strand to SEQ ID NO: 1449770
ucucucacggaggaaguca

SEQ ID NO: 1449772 - RNA, 19 nt, Artificial Sequence
  Description of Artificial Sequence: Synthetic oligonucleotide
  Sense strand starting at position 732 of SEQ ID NO: 1243900
gacuuccuccgugagagaa

SEQ ID NO: 1449773 - RNA, 19 nt, Artificial Sequence
  Description of Artificial Sequence: Synthetic oligonucleotide
  Antisense strand to SEQ ID NO: 1449772
uucucucacggaggaaguc

SEQ ID NO: 1449774 - RNA, 19 nt, Artificial Sequence
  Description of Artificial Sequence: Synthetic oligonucleotide
  Sense strand starting at position 930 of SEQ ID NO: 1243900
gguggauggucuucuugua

SEQ ID NO: 1449775 - RNA, 19 nt, Artificial Sequence
  Description of Artificial Sequence: Synthetic oligonucleotide
  Antisense strand to SEQ ID NO: 1449774
uacaagaagaccauccacc

SEQ ID NO: 1449776 - RNA, 19 nt, Artificial Sequence
  Description of Artificial Sequence: Synthetic oligonucleotide
  Sense strand starting at position 963 of SEQ ID NO: 1243900
cagggcaucuuguuucuaa

SEQ ID NO: 1449777 - RNA, 19 nt, Artificial Sequence
  Description of Artificial Sequence: Synthetic oligonucleotide
  Antisense strand to SEQ ID NO: 1449776
uuagaaacaagaugcccug

SEQ ID NO: 1449778 - RNA, 19 nt, Artificial Sequence
  Description of Artificial Sequence: Synthetic oligonucleotide
  Sense strand starting at position 964 of SEQ ID NO: 1243900
agggcaucuuguuucuaaa

SEQ ID NO: 1449779 - RNA, 19 nt, Artificial Sequence
  Description of Artificial Sequence: Synthetic oligonucleotide
  Antisense strand to SEQ ID NO: 1449778
uuuagaaacaagaugcccu

SEQ ID NO: 1449780 - RNA, 19 nt, Artificial Sequence
  Description of Artificial Sequence: Synthetic oligonucleotide
  Sense strand starting at position 966 of SEQ ID NO: 1243900
ggcaucuuguuucuaaacu

SEQ ID NO: 1449781 - RNA, 19 nt, Artificial Sequence
  Description of Artificial Sequence: Synthetic oligonucleotide
  Antisense strand to SEQ ID NO: 1449780
aguuuagaaacaagaugcc

SEQ ID NO: 1449782 - RNA, 19 nt, Artificial Sequence
  Description of Artificial Sequence: Synthetic oligonucleotide
  Sense strand starting at position 1087 of SEQ ID NO: 1243900
caguguacguuucuuagag

SEQ ID NO: 1449783 - RNA, 19 nt, Artificial Sequence
  Description of Artificial Sequence: Synthetic oligonucleotide
  Antisense strand to SEQ ID NO: 1449782
cucuaagaaacguacacug

SEQ ID NO: 1449784 - RNA, 19 nt, Artificial Sequence
  Description of Artificial Sequence: Synthetic oligonucleotide
  Sense strand starting at position 2247 of SEQ ID NO: 1243900
uccggaaaccuacaugguu

SEQ ID NO: 1449785 - RNA, 19 nt, Artificial Sequence
  Description of Artificial Sequence: Synthetic oligonucleotide
  Antisense strand to SEQ ID NO: 1449784
aaccauguagguuuccgga

SEQ ID NO: 1449786 - RNA, 19 nt, Artificial Sequence
  Description of Artificial Sequence: Synthetic oligonucleotide
  Sense strand starting at position 2453 of SEQ ID NO: 1243900
accugagaccuccgagacu

SEQ ID NO: 1449787 - RNA, 19 nt, Artificial Sequence
  Description of Artificial Sequence: Synthetic oligonucleotide
  Antisense strand to SEQ ID NO: 1449786
agucucggaggucucaggu

SEQ ID NO: 1449788 - RNA, 19 nt, Artificial Sequence
  Description of Artificial Sequence: Synthetic oligonucleotide
  Sense strand starting at position 2575 of SEQ ID NO: 1243900
gggcaccucccuggaauua

SEQ ID NO: 1449789 - RNA, 19 nt, Artificial Sequence
  Description of Artificial Sequence: Synthetic oligonucleotide
  Antisense strand to SEQ ID NO: 1449788
uaauuccagggaggugccc

SEQ ID NO: 1449790 - RNA, 19 nt, Artificial Sequence
  Description of Artificial Sequence: Synthetic oligonucleotide
  Sense strand starting at position 2755 of SEQ ID NO: 1243900
ugcugagcccugggaagau

SEQ ID NO: 1449791 - RNA, 19 nt, Artificial Sequence
  Description of Artificial Sequence: Synthetic oligonucleotide
  Antisense strand to SEQ ID NO: 1449790
aucuucccagggcucagca

SEQ ID NO: 1449792 - RNA, 19 nt, Artificial Sequence
  Description of Artificial Sequence: Synthetic oligonucleotide
  Sense strand starting at position 3063 of SEQ ID NO: 1243900
uccucugagcgcuugcaau

SEQ ID NO: 1449793 - RNA, 19 nt, Artificial Sequence
  Description of Artificial Sequence: Synthetic oligonucleotide
  Antisense strand to SEQ ID NO: 1449792
auugcaagcgcucagagga

SEQ ID NO: 1449794 - RNA, 19 nt, Artificial Sequence
  Description of Artificial Sequence: Synthetic oligonucleotide
  Sense strand starting at position 3158 of SEQ ID NO: 1243900
cccagacaccaauguguuu

SEQ ID NO: 1449795 - RNA, 19 nt, Artificial Sequence
  Description of Artificial Sequence: Synthetic oligonucleotide
  Antisense strand to SEQ ID NO: 1449794
aaacacauuggugucuggg

SEQ ID NO: 1449796 - RNA, 19 nt, Artificial Sequence
  Description of Artificial Sequence: Synthetic oligonucleotide
  Sense strand starting at position 3165 of SEQ ID NO: 1243900
accaauguguuuccaucau

SEQ ID NO: 1449797 - RNA, 19 nt, Artificial Sequence
  Description of Artificial Sequence: Synthetic oligonucleotide
  Antisense strand to SEQ ID NO: 1449796
augauggaaacacauuggu

SEQ ID NO: 1449798 - RNA, 19 nt, Artificial Sequence
  Description of Artificial Sequence: Synthetic oligonucleotide
  Sense strand starting at position 3391 of SEQ ID NO: 1243900
gaggcagggugcuugaaau

SEQ ID NO: 1449799 - RNA, 19 nt, Artificial Sequence
  Description of Artificial Sequence: Synthetic oligonucleotide
  Antisense strand to SEQ ID NO: 1449798
auuucaagcacccugccuc

SEQ ID NO: 1449800 - RNA, 19 nt, Artificial Sequence
  Description of Artificial Sequence: Synthetic oligonucleotide
  Sense strand starting at position 3442 of SEQ ID NO: 1243900
gauucuuaauccgaaggga

SEQ ID NO: 1449801 - RNA, 19 nt, Artificial Sequence
  Description of Artificial Sequence: Synthetic oligonucleotide
  Antisense strand to SEQ ID NO: 1449800
ucccuucggauuaagaauc

SEQ ID NO: 1449802 - RNA, 19 nt, Artificial Sequence
  Description of Artificial Sequence: Synthetic oligonucleotide
  Sense strand starting at position 3489 of SEQ ID NO: 1243900
gcuccuuucccagguugua

SEQ ID NO: 1449803 - RNA, 19 nt, Artificial Sequence
  Description of Artificial Sequence: Synthetic oligonucleotide
  Antisense strand to SEQ ID NO: 1449802
uacaaccugggaaaggagc

SEQ ID NO: 1449804 - RNA, 19 nt, Artificial Sequence
  Description of Artificial Sequence: Synthetic oligonucleotide
  Sense strand starting at position 3533 of SEQ ID NO: 1243900
uggccaauauagucuagau

SEQ ID NO: 1449805 - RNA, 19 nt, Artificial Sequence
  Description of Artificial Sequence: Synthetic oligonucleotide
  Antisense strand to SEQ ID NO: 1449804
aucuagacuauauuggcca

SEQ ID NO: 1449806 - RNA, 19 nt, Artificial Sequence
  Description of Artificial Sequence: Synthetic oligonucleotide
  Sense strand starting at position 3535 of SEQ ID NO: 1243900
gccaauauagucuagauua

SEQ ID NO: 1449807 - RNA, 19 nt, Artificial Sequence
  Description of Artificial Sequence: Synthetic oligonucleotide
  Antisense strand to SEQ ID NO: 1449806
uaaucuagacuauauuggc

SEQ ID NO: 1449808 - RNA, 19 nt, Artificial Sequence
  Description of Artificial Sequence: Synthetic oligonucleotide
  Sense strand starting at position 3543 of SEQ ID NO: 1243900
agucuagauuauguuauca

SEQ ID NO: 1449809 - RNA, 19 nt, Artificial Sequence
  Description of Artificial Sequence: Synthetic oligonucleotide
  Antisense strand to SEQ ID NO: 1449808
ugauaacauaaucuagacu

SEQ ID NO: 1449810 - RNA, 19 nt, Artificial Sequence
  Description of Artificial Sequence: Synthetic oligonucleotide
  Sense strand starting at position 3547 of SEQ ID NO: 1243900
uagauuauguuaucaagug

SEQ ID NO: 1449811 - RNA, 19 nt, Artificial Sequence
  Description of Artificial Sequence: Synthetic oligonucleotide
  Antisense strand to SEQ ID NO: 1449810
cacuugauaacauaaucua

SEQ ID NO: 1449812 - RNA, 19 nt, Artificial Sequence
  Description of Artificial Sequence: Synthetic oligonucleotide
  Sense strand starting at position 3559 of SEQ ID NO: 1243900
ucaaguguauuaccuuaca

SEQ ID NO: 1449813 - RNA, 19 nt, Artificial Sequence
  Description of Artificial Sequence: Synthetic oligonucleotide
  Antisense strand to SEQ ID NO: 1449812
uguaagguaauacacuuga

SEQ ID NO: 1449814 - RNA, 19 nt, Artificial Sequence
  Description of Artificial Sequence: Synthetic oligonucleotide
  Sense strand starting at position 3562 of SEQ ID NO: 1243900
aguguauuaccuuacacuu

SEQ ID NO: 1449815 - RNA, 19 nt, Artificial Sequence
  Description of Artificial Sequence: Synthetic oligonucleotide
  Antisense strand to SEQ ID NO: 1449814
aaguguaagguaauacacu

SEQ ID NO: 1449816 - RNA, 19 nt, Artificial Sequence
  Description of Artificial Sequence: Synthetic oligonucleotide
  Sense strand starting at position 3620 of SEQ ID NO: 1243900
gcaagaucccucugcaguu

SEQ ID NO: 1449817 - RNA, 19 nt, Artificial Sequence
  Description of Artificial Sequence: Synthetic oligonucleotide
  Antisense strand to SEQ ID NO: 1449816
aacugcagagggaucuugc

SEQ ID NO: 1449818 - RNA, 19 nt, Artificial Sequence
  Description of Artificial Sequence: Synthetic oligonucleotide
  Sense strand starting at position 3678 of SEQ ID NO: 1243900
aucugcaaaccuggagauu

SEQ ID NO: 1449819 - RNA, 19 nt, Artificial Sequence
  Description of Artificial Sequence: Synthetic oligonucleotide
  Antisense strand to SEQ ID NO: 1449818
aaucuccagguuugcagau

SEQ ID NO: 1449820 - RNA, 19 nt, Artificial Sequence
  Description of Artificial Sequence: Synthetic oligonucleotide
  Sense strand starting at position 3701 of SEQ ID NO: 1243900
uuugcacucgccuauggau

SEQ ID NO: 1449821 - RNA, 19 nt, Artificial Sequence
  Description of Artificial Sequence: Synthetic oligonucleotide
  Antisense strand to SEQ ID NO: 1449820
auccauaggcgagugcaaa

SEQ ID NO: 1449822 - RNA, 19 nt, Artificial Sequence
  Description of Artificial Sequence: Synthetic oligonucleotide
  Sense strand starting at position 3710 of SEQ ID NO: 1243900
gccuauggauugcucauaa

SEQ ID NO: 1449823 - RNA, 19 nt, Artificial Sequence
  Description of Artificial Sequence: Synthetic oligonucleotide
  Antisense strand to SEQ ID NO: 1449822
uuaugagcaauccauaggc

SEQ ID NO: 1449824 - RNA, 19 nt, Artificial Sequence
  Description of Artificial Sequence: Synthetic oligonucleotide
  Sense strand starting at position 165 of SEQ ID NO: 1243901
gggcuuagucaacagucau

SEQ ID NO: 1449825 - RNA, 19 nt, Artificial Sequence
  Description of Artificial Sequence: Synthetic oligonucleotide
  Antisense strand to SEQ ID NO: 1449824
augacuguugacuaagccc

SEQ ID NO: 1449826 - RNA, 19 nt, Artificial Sequence
  Description of Artificial Sequence: Synthetic oligonucleotide
  Sense strand starting at position 171 of SEQ ID NO: 1243901
agucaacagucaucaaaca

SEQ ID NO: 1449827 - RNA, 19 nt, Artificial Sequence
  Description of Artificial Sequence: Synthetic oligonucleotide
  Antisense strand to SEQ ID NO: 1449826
uguuugaugacuguugacu

SEQ ID NO: 1449828 - RNA, 19 nt, Artificial Sequence
  Description of Artificial Sequence: Synthetic oligonucleotide
  Sense strand starting at position 255 of SEQ ID NO: 1243901
ccaccugggaggugugaau

SEQ ID NO: 1449829 - RNA, 19 nt, Artificial Sequence
  Description of Artificial Sequence: Synthetic oligonucleotide
  Antisense strand to SEQ ID NO: 1449828
auucacaccucccaggugg

SEQ ID NO: 1449830 - RNA, 19 nt, Artificial Sequence
  Description of Artificial Sequence: Synthetic oligonucleotide
  Sense strand starting at position 309 of SEQ ID NO: 1243901
gagggauugggcuguauag

SEQ ID NO: 1449831 - RNA, 19 nt, Artificial Sequence
  Description of Artificial Sequence: Synthetic oligonucleotide
  Antisense strand to SEQ ID NO: 1449830
cuauacagcccaaucccuc

SEQ ID NO: 1449832 - RNA, 19 nt, Artificial Sequence
  Description of Artificial Sequence: Synthetic oligonucleotide
  Sense strand starting at position 353 of SEQ ID NO: 1243901
cuacaaauggguugcaagu

SEQ ID NO: 1449833 - RNA, 19 nt, Artificial Sequence
  Description of Artificial Sequence: Synthetic oligonucleotide
  Antisense strand to SEQ ID NO: 1449832
acuugcaacccauuuguag

SEQ ID NO: 1449834 - RNA, 19 nt, Artificial Sequence
  Description of Artificial Sequence: Synthetic oligonucleotide
  Sense strand starting at position 364 of SEQ ID NO: 1243901
uugcaaguuuaauuagacu

SEQ ID NO: 1449835 - RNA, 19 nt, Artificial Sequence
  Description of Artificial Sequence: Synthetic oligonucleotide
  Antisense strand to SEQ ID NO: 1449834
agucuaauuaaacuugcaa

SEQ ID NO: 1449836 - RNA, 19 nt, Artificial Sequence
  Description of Artificial Sequence: Synthetic oligonucleotide
  Sense strand starting at position 422 of SEQ ID NO: 1243901
uugcaagaaucuuccagaa

SEQ ID NO: 1449837 - RNA, 19 nt, Artificial Sequence
  Description of Artificial Sequence: Synthetic oligonucleotide
  Antisense strand to SEQ ID NO: 1449836
uucuggaagauucuugcaa

SEQ ID NO: 1449838 - RNA, 19 nt, Artificial Sequence
  Description of Artificial Sequence: Synthetic oligonucleotide
  Sense strand starting at position 460 of SEQ ID NO: 1243901
ucccuuggcuucuucgaua

SEQ ID NO: 1449839 - RNA, 19 nt, Artificial Sequence
  Description of Artificial Sequence: Synthetic oligonucleotide
  Antisense strand to SEQ ID NO: 1449838
uaucgaagaagccaaggga

SEQ ID NO: 1449840 - RNA, 19 nt, Artificial Sequence
  Description of Artificial Sequence: Synthetic oligonucleotide
  Sense strand starting at position 465 of SEQ ID NO: 1243901
uggcuucuucgauaaucau

SEQ ID NO: 1449841 - RNA, 19 nt, Artificial Sequence
  Description of Artificial Sequence: Synthetic oligonucleotide
  Antisense strand to SEQ ID NO: 1449840
augauuaucgaagaagcca

SEQ ID NO: 1449842 - RNA, 19 nt, Artificial Sequence
  Description of Artificial Sequence: Synthetic oligonucleotide
  Sense strand starting at position 963 of SEQ ID NO: 1243901
cagguagugcuugaacacu

SEQ ID NO: 1449843 - RNA, 19 nt, Artificial Sequence
  Description of Artificial Sequence: Synthetic oligonucleotide
  Antisense strand to SEQ ID NO: 1449842
aguguucaagcacuaccug

SEQ ID NO: 1449844 - RNA, 19 nt, Artificial Sequence
  Description of Artificial Sequence: Synthetic oligonucleotide
  Sense strand starting at position 990 of SEQ ID NO: 1243901
guggcaaacauaugacuga

SEQ ID NO: 1449845 - RNA, 19 nt, Artificial Sequence
  Description of Artificial Sequence: Synthetic oligonucleotide
  Antisense strand to SEQ ID NO: 1449844
ucagucauauguuugccac

SEQ ID NO: 1449846 - RNA, 19 nt, Artificial Sequence
  Description of Artificial Sequence: Synthetic oligonucleotide
  Sense strand starting at position 1013 of SEQ ID NO: 1243901
uccugcaaggucuguguau

SEQ ID NO: 1449847 - RNA, 19 nt, Artificial Sequence
  Description of Artificial Sequence: Synthetic oligonucleotide
  Antisense strand to SEQ ID NO: 1449846
auacacagaccuugcagga

SEQ ID NO: 1449848 - RNA, 19 nt, Artificial Sequence
  Description of Artificial Sequence: Synthetic oligonucleotide
  Sense strand starting at position 1094 of SEQ ID NO: 1243901
ucaugcuaccuuuguguau

SEQ ID NO: 1449849 - RNA, 19 nt, Artificial Sequence
  Description of Artificial Sequence: Synthetic oligonucleotide
  Antisense strand to SEQ ID NO: 1449848
auacacaaagguagcauga

SEQ ID NO: 1449850 - RNA, 19 nt, Artificial Sequence
  Description of Artificial Sequence: Synthetic oligonucleotide
  Sense strand starting at position 1204 of SEQ ID NO: 1243901
ugugaauuguagccaggau

SEQ ID NO: 1449851 - RNA, 19 nt, Artificial Sequence
  Description of Artificial Sequence: Synthetic oligonucleotide
  Antisense strand to SEQ ID NO: 1449850
auccuggcuacaauucaca

SEQ ID NO: 1449852 - RNA, 19 nt, Artificial Sequence
  Description of Artificial Sequence: Synthetic oligonucleotide
  Sense strand starting at position 1205 of SEQ ID NO: 1243901
gugaauuguagccaggauc

SEQ ID NO: 1449853 - RNA, 19 nt, Artificial Sequence
  Description of Artificial Sequence: Synthetic oligonucleotide
  Antisense strand to SEQ ID NO: 1449852
gauccuggcuacaauucac

SEQ ID NO: 1449854 - RNA, 19 nt, Artificial Sequence
  Description of Artificial Sequence: Synthetic oligonucleotide
  Sense strand starting at position 1213 of SEQ ID NO: 1243901
uagccaggaucugcugaua

SEQ ID NO: 1449855 - RNA, 19 nt, Artificial Sequence
  Description of Artificial Sequence: Synthetic oligonucleotide
  Antisense strand to SEQ ID NO: 1449854
uaucagcagauccuggcua

SEQ ID NO: 1449856 - RNA, 19 nt, Artificial Sequence
  Description of Artificial Sequence: Synthetic oligonucleotide
  Sense strand starting at position 1216 of SEQ ID NO: 1243901
ccaggaucugcugauacua

SEQ ID NO: 1449857 - RNA, 19 nt, Artificial Sequence
  Description of Artificial Sequence: Synthetic oligonucleotide
  Antisense strand to SEQ ID NO: 1449856
uaguaucagcagauccugg

SEQ ID NO: 1449858 - RNA, 19 nt, Artificial Sequence
  Description of Artificial Sequence: Synthetic oligonucleotide
  Sense strand starting at position 1238 of SEQ ID NO: 1243901
auuugagaaucccaagaua

SEQ ID NO: 1449859 - RNA, 19 nt, Artificial Sequence
  Description of Artificial Sequence: Synthetic oligonucleotide
  Antisense strand to SEQ ID NO: 1449858
uaucuugggauucucaaau

SEQ ID NO: 1449860 - RNA, 19 nt, Artificial Sequence
  Description of Artificial Sequence: Synthetic oligonucleotide
  Sense strand starting at position 1292 of SEQ ID NO: 1243901
caaugauugugcuuuacgu

SEQ ID NO: 1449861 - RNA, 19 nt, Artificial Sequence
  Description of Artificial Sequence: Synthetic oligonucleotide
  Antisense strand to SEQ ID NO: 1449860
acguaaagcacaaucauug

SEQ ID NO: 1449862 - RNA, 19 nt, Artificial Sequence
  Description of Artificial Sequence: Synthetic oligonucleotide
  Sense strand starting at position 1299 of SEQ ID NO: 1243901
ugugcuuuacgugugcaca

SEQ ID NO: 1449863 - RNA, 19 nt, Artificial Sequence
  Description of Artificial Sequence: Synthetic oligonucleotide
  Antisense strand to SEQ ID NO: 1449862
ugugcacacguaaagcaca

SEQ ID NO: 1449864 - RNA, 19 nt, Artificial Sequence
  Description of Artificial Sequence: Synthetic oligonucleotide
  Sense strand starting at position 1387 of SEQ ID NO: 1243901
gcacaaacccuauagcaga

SEQ ID NO: 1449865 - RNA, 19 nt, Artificial Sequence
  Description of Artificial Sequence: Synthetic oligonucleotide
  Antisense strand to SEQ ID NO: 1449864
ucugcuauaggguuugugc

SEQ ID NO: 1449866 - RNA, 19 nt, Artificial Sequence
  Description of Artificial Sequence: Synthetic oligonucleotide
  Sense strand starting at position 1635 of SEQ ID NO: 1243901
gaaacugagucuuccagga

SEQ ID NO: 1449867 - RNA, 19 nt, Artificial Sequence
  Description of Artificial Sequence: Synthetic oligonucleotide
  Antisense strand to SEQ ID NO: 1449866
uccuggaagacucaguuuc

SEQ ID NO: 1449868 - RNA, 19 nt, Artificial Sequence
  Description of Artificial Sequence: Synthetic oligonucleotide
  Sense strand starting at position 1912 of SEQ ID NO: 1243901
uggguucuccucgaguugu

SEQ ID NO: 1449869 - RNA, 19 nt, Artificial Sequence
  Description of Artificial Sequence: Synthetic oligonucleotide
  Antisense strand to SEQ ID NO: 1449868
acaacucgaggagaaccca

SEQ ID NO: 1449870 - RNA, 19 nt, Artificial Sequence
  Description of Artificial Sequence: Synthetic oligonucleotide
  Sense strand starting at position 2024 of SEQ ID NO: 1243901
gagcuugaguccuuuguuc

SEQ ID NO: 1449871 - RNA, 19 nt, Artificial Sequence
  Description of Artificial Sequence: Synthetic oligonucleotide
  Antisense strand to SEQ ID NO: 1449870
gaacaaaggacucaagcuc

SEQ ID NO: 1449872 - RNA, 19 nt, Artificial Sequence
  Description of Artificial Sequence: Synthetic oligonucleotide
  Sense strand starting at position 2026 of SEQ ID NO: 1243901
gcuugaguccuuuguucuu

SEQ ID NO: 1449873 - RNA, 19 nt, Artificial Sequence
  Description of Artificial Sequence: Synthetic oligonucleotide
  Antisense strand to SEQ ID NO: 1449872
aagaacaaaggacucaagc

SEQ ID NO: 1449874 - RNA, 19 nt, Artificial Sequence
  Description of Artificial Sequence: Synthetic oligonucleotide
  Sense strand starting at position 2028 of SEQ ID NO: 1243901
uugaguccuuuguucuuga

SEQ ID NO: 1449875 - RNA, 19 nt, Artificial Sequence
  Description of Artificial Sequence: Synthetic oligonucleotide
  Antisense strand to SEQ ID NO: 1449874
ucaagaacaaaggacucaa

SEQ ID NO: 1449876 - RNA, 19 nt, Artificial Sequence
  Description of Artificial Sequence: Synthetic oligonucleotide
  Sense strand starting at position 2031 of SEQ ID NO: 1243901
aguccuuuguucuugagca

SEQ ID NO: 1449877 - RNA, 19 nt, Artificial Sequence
  Description of Artificial Sequence: Synthetic oligonucleotide
  Antisense strand to SEQ ID NO: 1449876
ugcucaagaacaaaggacu

SEQ ID NO: 1449878 - RNA, 19 nt, Artificial Sequence
  Description of Artificial Sequence: Synthetic oligonucleotide
  Sense strand starting at position 2033 of SEQ ID NO: 1243901
uccuuuguucuugagcaaa

SEQ ID NO: 1449879 - RNA, 19 nt, Artificial Sequence
  Description of Artificial Sequence: Synthetic oligonucleotide
  Antisense strand to SEQ ID NO: 1449878
uuugcucaagaacaaagga

SEQ ID NO: 1449880 - RNA, 19 nt, Artificial Sequence
  Description of Artificial Sequence: Synthetic oligonucleotide
  Sense strand starting at position 2035 of SEQ ID NO: 1243901
cuuuguucuugagcaaaga

SEQ ID NO: 1449881 - RNA, 19 nt, Artificial Sequence
  Description of Artificial Sequence: Synthetic oligonucleotide
  Antisense strand to SEQ ID NO: 1449880
ucuuugcucaagaacaaag

SEQ ID NO: 1449882 - RNA, 19 nt, Artificial Sequence
  Description of Artificial Sequence: Synthetic oligonucleotide
  Sense strand starting at position 2045 of SEQ ID NO: 1243901
gagcaaagacuguagcauu

SEQ ID NO: 1449883 - RNA, 19 nt, Artificial Sequence
  Description of Artificial Sequence: Synthetic oligonucleotide
  Antisense strand to SEQ ID NO: 1449882
aaugcuacagucuuugcuc

SEQ ID NO: 1449884 - RNA, 19 nt, Artificial Sequence
  Description of Artificial Sequence: Synthetic oligonucleotide
  Sense strand starting at position 2707 of SEQ ID NO: 1243901
gcgucugggagagaugaaa

SEQ ID NO: 1449885 - RNA, 19 nt, Artificial Sequence
  Description of Artificial Sequence: Synthetic oligonucleotide
  Antisense strand to SEQ ID NO: 1449884
uuucaucucucccagacgc

SEQ ID NO: 1449886 - RNA, 19 nt, Artificial Sequence
  Description of Artificial Sequence: Synthetic oligonucleotide
  Sense strand starting at position 2852 of SEQ ID NO: 1243901
cgcgucuccuaggugagaa

SEQ ID NO: 1449887 - RNA, 19 nt, Artificial Sequence
  Description of Artificial Sequence: Synthetic oligonucleotide
  Antisense strand to SEQ ID NO: 1449886
uucucaccuaggagacgcg

SEQ ID NO: 1449888 - RNA, 19 nt, Artificial Sequence
  Description of Artificial Sequence: Synthetic oligonucleotide
  Sense strand starting at position 2853 of SEQ ID NO: 1243901
gcgucuccuaggugagaaa

SEQ ID NO: 1449889 - RNA, 19 nt, Artificial Sequence
  Description of Artificial Sequence: Synthetic oligonucleotide
  Antisense strand to SEQ ID NO: 1449888
uuucucaccuaggagacgc

SEQ ID NO: 1449890 - RNA, 19 nt, Artificial Sequence
  Description of Artificial Sequence: Synthetic oligonucleotide
  Sense strand starting at position 2985 of SEQ ID NO: 1243901
gugggaaaggcugaauucu

SEQ ID NO: 1449891 - RNA, 19 nt, Artificial Sequence
  Description of Artificial Sequence: Synthetic oligonucleotide
  Antisense strand to SEQ ID NO: 1449890
agaauucagccuuucccac

SEQ ID NO: 1449892 - RNA, 19 nt, Artificial Sequence
  Description of Artificial Sequence: Synthetic oligonucleotide
  Sense strand starting at position 2991 of SEQ ID NO: 1243901
aaggcugaauucuggagaa

SEQ ID NO: 1449893 - RNA, 19 nt, Artificial Sequence
  Description of Artificial Sequence: Synthetic oligonucleotide
  Antisense strand to SEQ ID NO: 1449892
uucuccagaauucagccuu

SEQ ID NO: 1449894 - RNA, 19 nt, Artificial Sequence
  Description of Artificial Sequence: Synthetic oligonucleotide
  Sense strand starting at position 3286 of SEQ ID NO: 1243901
caaggaaauugggagaaau

SEQ ID NO: 1449895 - RNA, 19 nt, Artificial Sequence
  Description of Artificial Sequence: Synthetic oligonucleotide
  Antisense strand to SEQ ID NO: 1449894
auuucucccaauuuccuug

SEQ ID NO: 1449896 - RNA, 19 nt, Artificial Sequence
  Description of Artificial Sequence: Synthetic oligonucleotide
  Sense strand starting at position 3310 of SEQ ID NO: 1243901
cccuguccuuuggcaauua

SEQ ID NO: 1449897 - RNA, 19 nt, Artificial Sequence
  Description of Artificial Sequence: Synthetic oligonucleotide
  Antisense strand to SEQ ID NO: 1449896
uaauugccaaaggacaggg

SEQ ID NO: 1449898 - RNA, 19 nt, Artificial Sequence
  Description of Artificial Sequence: Synthetic oligonucleotide
  Sense strand starting at position 3440 of SEQ ID NO: 1243901
uggcuuguucagggaagcu

SEQ ID NO: 1449899 - RNA, 19 nt, Artificial Sequence
  Description of Artificial Sequence: Synthetic oligonucleotide
  Antisense strand to SEQ ID NO: 1449898
agcuucccugaacaagcca

SEQ ID NO: 1449900 - RNA, 19 nt, Artificial Sequence
  Description of Artificial Sequence: Synthetic oligonucleotide
  Sense strand starting at position 3734 of SEQ ID NO: 1243901
gggccuuccugagcgaaug

SEQ ID NO: 1449901 - RNA, 19 nt, Artificial Sequence
  Description of Artificial Sequence: Synthetic oligonucleotide
  Antisense strand to SEQ ID NO: 1449900
cauucgcucaggaaggccc

SEQ ID NO: 1449902 - RNA, 19 nt, Artificial Sequence
  Description of Artificial Sequence: Synthetic oligonucleotide
  Sense strand starting at position 3735 of SEQ ID NO: 1243901
ggccuuccugagcgaauga

SEQ ID NO: 1449903 - RNA, 19 nt, Artificial Sequence
  Description of Artificial Sequence: Synthetic oligonucleotide
  Antisense strand to SEQ ID NO: 1449902
ucauucgcucaggaaggcc

SEQ ID NO: 1449904 - RNA, 19 nt, Artificial Sequence
  Description of Artificial Sequence: Synthetic oligonucleotide
  Sense strand starting at position 194 of SEQ ID NO: 1243902
agguacuuggcauguggaa

SEQ ID NO: 1449905 - RNA, 19 nt, Artificial Sequence
  Description of Artificial Sequence: Synthetic oligonucleotide
  Antisense strand to SEQ ID NO: 1449904
uuccacaugccaaguaccu

SEQ ID NO: 1449906 - RNA, 19 nt, Artificial Sequence
  Description of Artificial Sequence: Synthetic oligonucleotide
  Sense strand starting at position 409 of SEQ ID NO: 1243902
cugccucaagcauagauua

SEQ ID NO: 1449907 - RNA, 19 nt, Artificial Sequence
  Description of Artificial Sequence: Synthetic oligonucleotide
  Antisense strand to SEQ ID NO: 1449906
uaaucuaugcuugaggcag

SEQ ID NO: 1449908 - RNA, 19 nt, Artificial Sequence
  Description of Artificial Sequence: Synthetic oligonucleotide
  Sense strand starting at position 480 of SEQ ID NO: 1243902
gguggagacggguguuagu

SEQ ID NO: 1449909 - RNA, 19 nt, Artificial Sequence
  Description of Artificial Sequence: Synthetic oligonucleotide
  Antisense strand to SEQ ID NO: 1449908
acuaacacccgucuccacc

SEQ ID NO: 1449910 - RNA, 19 nt, Artificial Sequence
  Description of Artificial Sequence: Synthetic oligonucleotide
  Sense strand starting at position 485 of SEQ ID NO: 1243902
agacggguguuaguggaua

SEQ ID NO: 1449911 - RNA, 19 nt, Artificial Sequence
  Description of Artificial Sequence: Synthetic oligonucleotide
  Antisense strand to SEQ ID NO: 1449910
uauccacuaacacccgucu

SEQ ID NO: 1449912 - RNA, 19 nt, Artificial Sequence
  Description of Artificial Sequence: Synthetic oligonucleotide
  Sense strand starting at position 496 of SEQ ID NO: 1243902
aguggauagcuccagucua

SEQ ID NO: 1449913 - RNA, 19 nt, Artificial Sequence
  Description of Artificial Sequence: Synthetic oligonucleotide
  Antisense strand to SEQ ID NO: 1449912
uagacuggagcuauccacu

SEQ ID NO: 1449914 - RNA, 19 nt, Artificial Sequence
  Description of Artificial Sequence: Synthetic oligonucleotide
  Sense strand starting at position 596 of SEQ ID NO: 1243902
agaauuaucuaggccaaac

SEQ ID NO: 1449915 - RNA, 19 nt, Artificial Sequence
  Description of Artificial Sequence: Synthetic oligonucleotide
  Antisense strand to SEQ ID NO: 1449914
guuuggccuagauaauucu

SEQ ID NO: 1449916 - RNA, 19 nt, Artificial Sequence
  Description of Artificial Sequence: Synthetic oligonucleotide
  Sense strand starting at position 615 of SEQ ID NO: 1243902
ugucaagagcgcuaauguu

SEQ ID NO: 1449917 - RNA, 19 nt, Artificial Sequence
  Description of Artificial Sequence: Synthetic oligonucleotide
  Antisense strand to SEQ ID NO: 1449916
aacauuagcgcucuugaca

SEQ ID NO: 1449918 - RNA, 19 nt, Artificial Sequence
  Description of Artificial Sequence: Synthetic oligonucleotide
  Sense strand starting at position 621 of SEQ ID NO: 1243902
gagcgcuaauguugagaaa

SEQ ID NO: 1449919 - RNA, 19 nt, Artificial Sequence
  Description of Artificial Sequence: Synthetic oligonucleotide
  Antisense strand to SEQ ID NO: 1449918
uuucucaacauuagcgcuc

SEQ ID NO: 1449920 - RNA, 19 nt, Artificial Sequence
  Description of Artificial Sequence: Synthetic oligonucleotide
  Sense strand starting at position 652 of SEQ ID NO: 1243902
gcuuuccuguccuuaaaug

SEQ ID NO: 1449921 - RNA, 19 nt, Artificial Sequence
  Description of Artificial Sequence: Synthetic oligonucleotide
  Antisense strand to SEQ ID NO: 1449920
cauuuaaggacaggaaagc

SEQ ID NO: 1449922 - RNA, 19 nt, Artificial Sequence
  Description of Artificial Sequence: Synthetic oligonucleotide
  Sense strand starting at position 666 of SEQ ID NO: 1243902
aaaugcaguuaugugaaga

SEQ ID NO: 1449923 - RNA, 19 nt, Artificial Sequence
  Description of Artificial Sequence: Synthetic oligonucleotide
  Antisense strand to SEQ ID NO: 1449922
ucuucacauaacugcauuu

SEQ ID NO: 1449924 - RNA, 19 nt, Artificial Sequence
  Description of Artificial Sequence: Synthetic oligonucleotide
  Sense strand starting at position 716 of SEQ ID NO: 1243902
ccuggcacucacugugauu

SEQ ID NO: 1449925 - RNA, 19 nt, Artificial Sequence
  Description of Artificial Sequence: Synthetic oligonucleotide
  Antisense strand to SEQ ID NO: 1449924
aaucacagugagugccagg

SEQ ID NO: 1449926 - RNA, 19 nt, Artificial Sequence
  Description of Artificial Sequence: Synthetic oligonucleotide
  Sense strand starting at position 718 of SEQ ID NO: 1243902
uggcacucacugugauuga

SEQ ID NO: 1449927 - RNA, 19 nt, Artificial Sequence
  Description of Artificial Sequence: Synthetic oligonucleotide
  Antisense strand to SEQ ID NO: 1449926
ucaaucacagugagugcca

SEQ ID NO: 1449928 - RNA, 19 nt, Artificial Sequence
  Description of Artificial Sequence: Synthetic oligonucleotide
  Sense strand starting at position 721 of SEQ ID NO: 1243902
cacucacugugauugagaa

SEQ ID NO: 1449929 - RNA, 19 nt, Artificial Sequence
  Description of Artificial Sequence: Synthetic oligonucleotide
  Antisense strand to SEQ ID NO: 1449928
uucucaaucacagugagug

SEQ ID NO: 1449930 - RNA, 19 nt, Artificial Sequence
  Description of Artificial Sequence: Synthetic oligonucleotide
  Sense strand starting at position 725 of SEQ ID NO: 1243902
cacugugauugagaacaca

SEQ ID NO: 1449931 - RNA, 19 nt, Artificial Sequence
  Description of Artificial Sequence: Synthetic oligonucleotide
  Antisense strand to SEQ ID NO: 1449930
uguguucucaaucacagug

SEQ ID NO: 1449932 - RNA, 19 nt, Artificial Sequence
  Description of Artificial Sequence: Synthetic oligonucleotide
  Sense strand starting at position 772 of SEQ ID NO: 1243902
cggcuaagcugaucuacuu

SEQ ID NO: 1449933 - RNA, 19 nt, Artificial Sequence
  Description of Artificial Sequence: Synthetic oligonucleotide
  Antisense strand to SEQ ID NO: 1449932
aaguagaucagcuuagccg

SEQ ID NO: 1449934 - RNA, 19 nt, Artificial Sequence
  Description of Artificial Sequence: Synthetic oligonucleotide
  Sense strand starting at position 877 of SEQ ID NO: 1243902
gccuuagcgcuuuacaaau

SEQ ID NO: 1449935 - RNA, 19 nt, Artificial Sequence
  Description of Artificial Sequence: Synthetic oligonucleotide
  Antisense strand to SEQ ID NO: 1449934
auuuguaaagcgcuaaggc

SEQ ID NO: 1449936 - RNA, 19 nt, Artificial Sequence
  Description of Artificial Sequence: Synthetic oligonucleotide
  Sense strand starting at position 883 of SEQ ID NO: 1243902
gcgcuuuacaaaugaacgu

SEQ ID NO: 1449937 - RNA, 19 nt, Artificial Sequence
  Description of Artificial Sequence: Synthetic oligonucleotide
  Antisense strand to SEQ ID NO: 1449936
acguucauuuguaaagcgc

SEQ ID NO: 1449938 - RNA, 19 nt, Artificial Sequence
  Description of Artificial Sequence: Synthetic oligonucleotide
  Sense strand starting at position 933 of SEQ ID NO: 1243902
uauuaagugguaugaauuc

SEQ ID NO: 1449939 - RNA, 19 nt, Artificial Sequence
  Description of Artificial Sequence: Synthetic oligonucleotide
  Antisense strand to SEQ ID NO: 1449938
gaauucauaccacuuaaua

SEQ ID NO: 1449940 - RNA, 19 nt, Artificial Sequence
  Description of Artificial Sequence: Synthetic oligonucleotide
  Sense strand starting at position 1068 of SEQ ID NO: 1243902
ggcuaacccuuguaauccu

SEQ ID NO: 1449941 - RNA, 19 nt, Artificial Sequence
  Description of Artificial Sequence: Synthetic oligonucleotide
  Antisense strand to SEQ ID NO: 1449940
aggauuacaaggguuagcc

SEQ ID NO: 1449942 - RNA, 19 nt, Artificial Sequence
  Description of Artificial Sequence: Synthetic oligonucleotide
  Sense strand starting at position 1368 of SEQ ID NO: 1243902
ggcuuaggguagggagaau

SEQ ID NO: 1449943 - RNA, 19 nt, Artificial Sequence
  Description of Artificial Sequence: Synthetic oligonucleotide
  Antisense strand to SEQ ID NO: 1449942
auucucccuacccuaagcc

SEQ ID NO: 1449944 - RNA, 19 nt, Artificial Sequence
  Description of Artificial Sequence: Synthetic oligonucleotide
  Sense strand starting at position 1416 of SEQ ID NO: 1243902
ggacaugacucugaacucu

SEQ ID NO: 1449945 - RNA, 19 nt, Artificial Sequence
  Description of Artificial Sequence: Synthetic oligonucleotide
  Antisense strand to SEQ ID NO: 1449944
agaguucagagucaugucc

SEQ ID NO: 1449946 - RNA, 19 nt, Artificial Sequence
  Description of Artificial Sequence: Synthetic oligonucleotide
  Sense strand starting at position 1447 of SEQ ID NO: 1243902
agagguguguggcaagaca

SEQ ID NO: 1449947 - RNA, 19 nt, Artificial Sequence
  Description of Artificial Sequence: Synthetic oligonucleotide
  Antisense strand to SEQ ID NO: 1449946
ugucuugccacacaccucu

SEQ ID NO: 1449948 - RNA, 19 nt, Artificial Sequence
  Description of Artificial Sequence: Synthetic oligonucleotide
  Sense strand starting at position 1486 of SEQ ID NO: 1243902
ggugacacguccuccauau

SEQ ID NO: 1449949 - RNA, 19 nt, Artificial Sequence
  Description of Artificial Sequence: Synthetic oligonucleotide
  Antisense strand to SEQ ID NO: 1449948
auauggaggacgugucacc

SEQ ID NO: 1449950 - RNA, 19 nt, Artificial Sequence
  Description of Artificial Sequence: Synthetic oligonucleotide
  Sense strand starting at position 1624 of SEQ ID NO: 1243902
cucggacuuucccaaaucu

SEQ ID NO: 1449951 - RNA, 19 nt, Artificial Sequence
  Description of Artificial Sequence: Synthetic oligonucleotide
  Antisense strand to SEQ ID NO: 1449950
agauuugggaaaguccgag

SEQ ID NO: 1449952 - RNA, 19 nt, Artificial Sequence
  Description of Artificial Sequence: Synthetic oligonucleotide
  Sense strand starting at position 1653 of SEQ ID NO: 1243902
ccuccauugcccuaaggau

SEQ ID NO: 1449953 - RNA, 19 nt, Artificial Sequence
  Description of Artificial Sequence: Synthetic oligonucleotide
  Antisense strand to SEQ ID NO: 1449952
auccuuagggcaauggagg

SEQ ID NO: 1449954 - RNA, 19 nt, Artificial Sequence
  Description of Artificial Sequence: Synthetic oligonucleotide
  Sense strand starting at position 1839 of SEQ ID NO: 1243902
uggagacgauuccucacua

SEQ ID NO: 1449955 - RNA, 19 nt, Artificial Sequence
  Description of Artificial Sequence: Synthetic oligonucleotide
  Antisense strand to SEQ ID NO: 1449954
uagugaggaaucgucucca

SEQ ID NO: 1449956 - RNA, 19 nt, Artificial Sequence
  Description of Artificial Sequence: Synthetic oligonucleotide
  Sense strand starting at position 2055 of SEQ ID NO: 1243902
guuggcguuacuugcagau

SEQ ID NO: 1449957 - RNA, 19 nt, Artificial Sequence
  Description of Artificial Sequence: Synthetic oligonucleotide
  Antisense strand to SEQ ID NO: 1449956
aucugcaaguaacgccaac

SEQ ID NO: 1449958 - RNA, 19 nt, Artificial Sequence
  Description of Artificial Sequence: Synthetic oligonucleotide
  Sense strand starting at position 2057 of SEQ ID NO: 1243902
uggcguuacuugcagauuu

SEQ ID NO: 1449959 - RNA, 19 nt, Artificial Sequence
  Description of Artificial Sequence: Synthetic oligonucleotide
  Antisense strand to SEQ ID NO: 1449958
aaaucugcaaguaacgcca

SEQ ID NO: 1449960 - RNA, 19 nt, Artificial Sequence
  Description of Artificial Sequence: Synthetic oligonucleotide
  Sense strand starting at position 2159 of SEQ ID NO: 1243902
cccagacucucuguugaaa

SEQ ID NO: 1449961 - RNA, 19 nt, Artificial Sequence
  Description of Artificial Sequence: Synthetic oligonucleotide
  Antisense strand to SEQ ID NO: 1449960
uuucaacagagagucuggg

SEQ ID NO: 1449962 - RNA, 19 nt, Artificial Sequence
  Description of Artificial Sequence: Synthetic oligonucleotide
  Sense strand starting at position 2250 of SEQ ID NO: 1243902
gggcauucggcucaaagcu

SEQ ID NO: 1449963 - RNA, 19 nt, Artificial Sequence
  Description of Artificial Sequence: Synthetic oligonucleotide
  Antisense strand to SEQ ID NO: 1449962
agcuuugagccgaaugccc

SEQ ID NO: 1449964 - RNA, 19 nt, Artificial Sequence
  Description of Artificial Sequence: Synthetic oligonucleotide
  Sense strand starting at position 2269 of SEQ ID NO: 1243902
ccacguagucucugcuaga

SEQ ID NO: 1449965 - RNA, 19 nt, Artificial Sequence
  Description of Artificial Sequence: Synthetic oligonucleotide
  Antisense strand to SEQ ID NO: 1449964
ucuagcagagacuacgugg

SEQ ID NO: 1449966 - RNA, 19 nt, Artificial Sequence
  Description of Artificial Sequence: Synthetic oligonucleotide
  Sense strand starting at position 2270 of SEQ ID NO: 1243902
cacguagucucugcuagac

SEQ ID NO: 1449967 - RNA, 19 nt, Artificial Sequence
  Description of Artificial Sequence: Synthetic oligonucleotide
  Antisense strand to SEQ ID NO: 1449966
gucuagcagagacuacgug

SEQ ID NO: 1449968 - RNA, 19 nt, Artificial Sequence
  Description of Artificial Sequence: Synthetic oligonucleotide
  Sense strand starting at position 2462 of SEQ ID NO: 1243902
ucagcuuccguuugccaaa

SEQ ID NO: 1449969 - RNA, 19 nt, Artificial Sequence
  Description of Artificial Sequence: Synthetic oligonucleotide
  Antisense strand to SEQ ID NO: 1449968
uuuggcaaacggaagcuga

SEQ ID NO: 1449970 - RNA, 19 nt, Artificial Sequence
  Description of Artificial Sequence: Synthetic oligonucleotide
  Sense strand starting at position 2465 of SEQ ID NO: 1243902
gcuuccguuugccaaacuu

SEQ ID NO: 1449971 - RNA, 19 nt, Artificial Sequence
  Description of Artificial Sequence: Synthetic oligonucleotide
  Antisense strand to SEQ ID NO: 1449970
aaguuuggcaaacggaagc

SEQ ID NO: 1449972 - RNA, 19 nt, Artificial Sequence
  Description of Artificial Sequence: Synthetic oligonucleotide
  Sense strand starting at position 3310 of SEQ ID NO: 1243902
uuguguuuguaguaaagau

SEQ ID NO: 1449973 - RNA, 19 nt, Artificial Sequence
  Description of Artificial Sequence: Synthetic oligonucleotide
  Antisense strand to SEQ ID NO: 1449972
aucuuuacuacaaacacaa

SEQ ID NO: 1449974 - RNA, 19 nt, Artificial Sequence
  Description of Artificial Sequence: Synthetic oligonucleotide
  Sense strand starting at position 3314 of SEQ ID NO: 1243902
guuuguaguaaagauggga

SEQ ID NO: 1449975 - RNA, 19 nt, Artificial Sequence
  Description of Artificial Sequence: Synthetic oligonucleotide
  Antisense strand to SEQ ID NO: 1449974
ucccaucuuuacuacaaac

SEQ ID NO: 1449976 - RNA, 19 nt, Artificial Sequence
  Description of Artificial Sequence: Synthetic oligonucleotide
  Sense strand starting at position 3471 of SEQ ID NO: 1243902
auuguuugcuacuaauaga

SEQ ID NO: 1449977 - RNA, 19 nt, Artificial Sequence
  Description of Artificial Sequence: Synthetic oligonucleotide
  Antisense strand to SEQ ID NO: 1449976
ucuauuaguagcaaacaau

SEQ ID NO: 1449978 - RNA, 19 nt, Artificial Sequence
  Description of Artificial Sequence: Synthetic oligonucleotide
  Sense strand starting at position 3474 of SEQ ID NO: 1243902
guuugcuacuaauagauaa

SEQ ID NO: 1449979 - RNA, 19 nt, Artificial Sequence
  Description of Artificial Sequence: Synthetic oligonucleotide
  Antisense strand to SEQ ID NO: 1449978
uuaucuauuaguagcaaac

SEQ ID NO: 1449980 - RNA, 19 nt, Artificial Sequence
  Description of Artificial Sequence: Synthetic oligonucleotide
  Sense strand starting at position 3502 of SEQ ID NO: 1243902
uuuguauaguaaccuucua

SEQ ID NO: 1449981 - RNA, 19 nt, Artificial Sequence
  Description of Artificial Sequence: Synthetic oligonucleotide
  Antisense strand to SEQ ID NO: 1449980
uagaagguuacuauacaaa

SEQ ID NO: 1449982 - RNA, 19 nt, Artificial Sequence
  Description of Artificial Sequence: Synthetic oligonucleotide
  Sense strand starting at position 3522 of SEQ ID NO: 1243902
uuuacaggcuugcuaaauu

SEQ ID NO: 1449983 - RNA, 19 nt, Artificial Sequence
  Description of Artificial Sequence: Synthetic oligonucleotide
  Antisense strand to SEQ ID NO: 1449982
aauuuagcaagccuguaaa

SEQ ID NO: 1449984 - RNA, 19 nt, Artificial Sequence
  Description of Artificial Sequence: Synthetic oligonucleotide
  Sense strand starting at position 254 of SEQ ID NO: 1243903
gacaauagcacacguggua

SEQ ID NO: 1449985 - RNA, 19 nt, Artificial Sequence
  Description of Artificial Sequence: Synthetic oligonucleotide
  Antisense strand to SEQ ID NO: 1449984
uaccacgugugcuauuguc

SEQ ID NO: 1449986 - RNA, 19 nt, Artificial Sequence
  Description of Artificial Sequence: Synthetic oligonucleotide
  Sense strand starting at position 269 of SEQ ID NO: 1243903
gguagaaugaauuggcaaa

SEQ ID NO: 1449987 - RNA, 19 nt, Artificial Sequence
  Description of Artificial Sequence: Synthetic oligonucleotide
  Antisense strand to SEQ ID NO: 1449986
uuugccaauucauucuacc

SEQ ID NO: 1449988 - RNA, 19 nt, Artificial Sequence
  Description of Artificial Sequence: Synthetic oligonucleotide
  Sense strand starting at position 291 of SEQ ID NO: 1243903
caugaaggugauggugaau

SEQ ID NO: 1449989 - RNA, 19 nt, Artificial Sequence
  Description of Artificial Sequence: Synthetic oligonucleotide
  Antisense strand to SEQ ID NO: 1449988
auucaccaucaccuucaug

SEQ ID NO: 1449990 - RNA, 19 nt, Artificial Sequence
  Description of Artificial Sequence: Synthetic oligonucleotide
  Sense strand starting at position 334 of SEQ ID NO: 1243903
acucgagucuaaguacuuu

SEQ ID NO: 1449991 - RNA, 19 nt, Artificial Sequence
  Description of Artificial Sequence: Synthetic oligonucleotide
  Antisense strand to SEQ ID NO: 1449990
aaaguacuuagacucgagu

SEQ ID NO: 1449992 - RNA, 19 nt, Artificial Sequence
  Description of Artificial Sequence: Synthetic oligonucleotide
  Sense strand starting at position 472 of SEQ ID NO: 1243903
agucucaccuuugagauca

SEQ ID NO: 1449993 - RNA, 19 nt, Artificial Sequence
  Description of Artificial Sequence: Synthetic oligonucleotide
  Antisense strand to SEQ ID NO: 1449992
ugaucucaaaggugagacu

SEQ ID NO: 1449994 - RNA, 19 nt, Artificial Sequence
  Description of Artificial Sequence: Synthetic oligonucleotide
  Sense strand starting at position 624 of SEQ ID NO: 1243903
auuccagaggcgugaaguu

SEQ ID NO: 1449995 - RNA, 19 nt, Artificial Sequence
  Description of Artificial Sequence: Synthetic oligonucleotide
  Antisense strand to SEQ ID NO: 1449994
aacuucacgccucuggaau

SEQ ID NO: 1449996 - RNA, 19 nt, Artificial Sequence
  Description of Artificial Sequence: Synthetic oligonucleotide
  Sense strand starting at position 656 of SEQ ID NO: 1243903
agcccuuucuccugggacu

SEQ ID NO: 1449997 - RNA, 19 nt, Artificial Sequence
  Description of Artificial Sequence: Synthetic oligonucleotide
  Antisense strand to SEQ ID NO: 1449996
agucccaggagaaagggcu

SEQ ID NO: 1449998 - RNA, 19 nt, Artificial Sequence
  Description of Artificial Sequence: Synthetic oligonucleotide
  Sense strand starting at position 688 of SEQ ID NO: 1243903
guaggugagacggagucau

SEQ ID NO: 1449999 - RNA, 19 nt, Artificial Sequence
  Description of Artificial Sequence: Synthetic oligonucleotide
  Antisense strand to SEQ ID NO: 1449998
augacuccgucucaccuac

SEQ ID NO: 1450000 - RNA, 19 nt, Artificial Sequence
  Description of Artificial Sequence: Synthetic oligonucleotide
  Sense strand starting at position 848 of SEQ ID NO: 1243903
aauuaccucguguaguaua

SEQ ID NO: 1450001 - RNA, 19 nt, Artificial Sequence
  Description of Artificial Sequence: Synthetic oligonucleotide
  Antisense strand to SEQ ID NO: 1450000
uauacuacacgagguaauu

SEQ ID NO: 1450002 - RNA, 19 nt, Artificial Sequence
  Description of Artificial Sequence: Synthetic oligonucleotide
  Sense strand starting at position 861 of SEQ ID NO: 1243903
aguauagacaccgauggua

SEQ ID NO: 1450003 - RNA, 19 nt, Artificial Sequence
  Description of Artificial Sequence: Synthetic oligonucleotide
  Antisense strand to SEQ ID NO: 1450002
uaccaucggugucuauacu

SEQ ID NO: 1450004 - RNA, 19 nt, Artificial Sequence
  Description of Artificial Sequence: Synthetic oligonucleotide
  Sense strand starting at position 888 of SEQ ID NO: 1243903
gguguuuccggagacgauu

SEQ ID NO: 1450005 - RNA, 19 nt, Artificial Sequence
  Description of Artificial Sequence: Synthetic oligonucleotide
  Antisense strand to SEQ ID NO: 1450004
aaucgucuccggaaacacc

SEQ ID NO: 1450006 - RNA, 19 nt, Artificial Sequence
  Description of Artificial Sequence: Synthetic oligonucleotide
  Sense strand starting at position 1450 of SEQ ID NO: 1243903
cgcucugacucccagacau

SEQ ID NO: 1450007 - RNA, 19 nt, Artificial Sequence
  Description of Artificial Sequence: Synthetic oligonucleotide
  Antisense strand to SEQ ID NO: 1450006
augucugggagucagagcg

SEQ ID NO: 1450008 - RNA, 19 nt, Artificial Sequence
  Description of Artificial Sequence: Synthetic oligonucleotide
  Sense strand starting at position 1701 of SEQ ID NO: 1243903
ccaggaaucuuggaagaaa

SEQ ID NO: 1450009 - RNA, 19 nt, Artificial Sequence
  Description of Artificial Sequence: Synthetic oligonucleotide
  Antisense strand to SEQ ID NO: 1450008
uuucuuccaagauuccugg

SEQ ID NO: 1450010 - RNA, 19 nt, Artificial Sequence
  Description of Artificial Sequence: Synthetic oligonucleotide
  Sense strand starting at position 2258 of SEQ ID NO: 1243903
aaccguucccgauaggauu

SEQ ID NO: 1450011 - RNA, 19 nt, Artificial Sequence
  Description of Artificial Sequence: Synthetic oligonucleotide
  Antisense strand to SEQ ID NO: 1450010
aauccuaucgggaacgguu

SEQ ID NO: 1450012 - RNA, 19 nt, Artificial Sequence
  Description of Artificial Sequence: Synthetic oligonucleotide
  Sense strand starting at position 2352 of SEQ ID NO: 1243903
accaucucaucccugagua

SEQ ID NO: 1450013 - RNA, 19 nt, Artificial Sequence
  Description of Artificial Sequence: Synthetic oligonucleotide
  Antisense strand to SEQ ID NO: 1450012
uacucagggaugagauggu

SEQ ID NO: 1450014 - RNA, 19 nt, Artificial Sequence
  Description of Artificial Sequence: Synthetic oligonucleotide
  Sense strand starting at position 2353 of SEQ ID NO: 1243903
ccaucucaucccugaguag

SEQ ID NO: 1450015 - RNA, 19 nt, Artificial Sequence
  Description of Artificial Sequence: Synthetic oligonucleotide
  Antisense strand to SEQ ID NO: 1450014
cuacucagggaugagaugg

SEQ ID NO: 1450016 - RNA, 19 nt, Artificial Sequence
  Description of Artificial Sequence: Synthetic oligonucleotide
  Sense strand starting at position 3306 of SEQ ID NO: 1243903
aggccaaucuggccugaaa

SEQ ID NO: 1450017 - RNA, 19 nt, Artificial Sequence
  Description of Artificial Sequence: Synthetic oligonucleotide
  Antisense strand to SEQ ID NO: 1450016
uuucaggccagauuggccu

SEQ ID NO: 1450018 - RNA, 19 nt, Artificial Sequence
  Description of Artificial Sequence: Synthetic oligonucleotide
  Sense strand starting at position 3369 of SEQ ID NO: 1243903
auguuuaaacauugcaaga

SEQ ID NO: 1450019 - RNA, 19 nt, Artificial Sequence
  Description of Artificial Sequence: Synthetic oligonucleotide
  Antisense strand to SEQ ID NO: 1450018
ucuugcaauguuuaaacau

SEQ ID NO: 1450020 - RNA, 19 nt, Artificial Sequence
  Description of Artificial Sequence: Synthetic oligonucleotide
  Sense strand starting at position 3371 of SEQ ID NO: 1243903
guuuaaacauugcaagaaa

SEQ ID NO: 1450021 - RNA, 19 nt, Artificial Sequence
  Description of Artificial Sequence: Synthetic oligonucleotide
  Antisense strand to SEQ ID NO: 1450020
uuucuugcaauguuuaaac

SEQ ID NO: 1450022 - RNA, 19 nt, Artificial Sequence
  Description of Artificial Sequence: Synthetic oligonucleotide
  Sense strand starting at position 3533 of SEQ ID NO: 1243903
gcccuuuacucagugaggu

SEQ ID NO: 1450023 - RNA, 19 nt, Artificial Sequence
  Description of Artificial Sequence: Synthetic oligonucleotide
  Antisense strand to SEQ ID NO: 1450022
accucacugaguaaagggc

SEQ ID NO: 1450024 - RNA, 19 nt, Artificial Sequence
  Description of Artificial Sequence: Synthetic oligonucleotide
  Sense strand starting at position 3534 of SEQ ID NO: 1243903
cccuuuacucagugagguu

SEQ ID NO: 1450025 - RNA, 19 nt, Artificial Sequence
  Description of Artificial Sequence: Synthetic oligonucleotide
  Antisense strand to SEQ ID NO: 1450024
aaccucacugaguaaaggg

SEQ ID NO: 1450026 - RNA, 19 nt, Artificial Sequence
  Description of Artificial Sequence: Synthetic oligonucleotide
  Sense strand starting at position 3543 of SEQ ID NO: 1243903
cagugagguuacuugccua

SEQ ID NO: 1450027 - RNA, 19 nt, Artificial Sequence
  Description of Artificial Sequence: Synthetic oligonucleotide
  Antisense strand to SEQ ID NO: 1450026
uaggcaaguaaccucacug

SEQ ID NO: 1450028 - RNA, 19 nt, Artificial Sequence
  Description of Artificial Sequence: Synthetic oligonucleotide
  Sense strand starting at position 3564 of SEQ ID NO: 1243903
cccguagguauuugaguuu

SEQ ID NO: 1450029 - RNA, 19 nt, Artificial Sequence
  Description of Artificial Sequence: Synthetic oligonucleotide
  Antisense strand to SEQ ID NO: 1450028
aaacucaaauaccuacggg

SEQ ID NO: 1450030 - RNA, 19 nt, Artificial Sequence
  Description of Artificial Sequence: Synthetic oligonucleotide
  Sense strand starting at position 3567 of SEQ ID NO: 1243903
guagguauuugaguuuggu

SEQ ID NO: 1450031 - RNA, 19 nt, Artificial Sequence
  Description of Artificial Sequence: Synthetic oligonucleotide
  Antisense strand to SEQ ID NO: 1450030
accaaacucaaauaccuac

SEQ ID NO: 1450032 - RNA, 19 nt, Artificial Sequence
  Description of Artificial Sequence: Synthetic oligonucleotide
  Sense strand starting at position 3570 of SEQ ID NO: 1243903
gguauuugaguuugguacu

SEQ ID NO: 1450033 - RNA, 19 nt, Artificial Sequence
  Description of Artificial Sequence: Synthetic oligonucleotide
  Antisense strand to SEQ ID NO: 1450032
aguaccaaacucaaauacc

SEQ ID NO: 1450034 - RNA, 19 nt, Artificial Sequence
  Description of Artificial Sequence: Synthetic oligonucleotide
  Sense strand starting at position 3877 of SEQ ID NO: 1243903
ccggcugcaucgguauaga

SEQ ID NO: 1450035 - RNA, 19 nt, Artificial Sequence
  Description of Artificial Sequence: Synthetic oligonucleotide
  Antisense strand to SEQ ID NO: 1450034
ucuauaccgaugcagccgg

SEQ ID NO: 1450036 - RNA, 19 nt, Artificial Sequence
  Description of Artificial Sequence: Synthetic oligonucleotide
  Sense strand starting at position 3880 of SEQ ID NO: 1243903
gcugcaucgguauagaaau

SEQ ID NO: 1450037 - RNA, 19 nt, Artificial Sequence
  Description of Artificial Sequence: Synthetic oligonucleotide
  Antisense strand to SEQ ID NO: 1450036
auuucuauaccgaugcagc

SEQ ID NO: 1450038 - RNA, 19 nt, Artificial Sequence
  Description of Artificial Sequence: Synthetic oligonucleotide
  Sense strand starting at position 3888 of SEQ ID NO: 1243903
gguauagaaaucugguauc

SEQ ID NO: 1450039 - RNA, 19 nt, Artificial Sequence
  Description of Artificial Sequence: Synthetic oligonucleotide
  Antisense strand to SEQ ID NO: 1450038
gauaccagauuucuauacc

SEQ ID NO: 1450040 - RNA, 19 nt, Artificial Sequence
  Description of Artificial Sequence: Synthetic oligonucleotide
  Sense strand starting at position 3891 of SEQ ID NO: 1243903
auagaaaucugguaucuga

SEQ ID NO: 1450041 - RNA, 19 nt, Artificial Sequence
  Description of Artificial Sequence: Synthetic oligonucleotide
  Antisense strand to SEQ ID NO: 1450040
ucagauaccagauuucuau

SEQ ID NO: 1450042 - RNA, 19 nt, Artificial Sequence
  Description of Artificial Sequence: Synthetic oligonucleotide
  Sense strand starting at position 7 of SEQ ID NO: 1243904
cgggccaauuguuauuauu

SEQ ID NO: 1450043 - RNA, 19 nt, Artificial Sequence
  Description of Artificial Sequence: Synthetic oligonucleotide
  Antisense strand to SEQ ID NO: 1450042
aauaauaacaauuggcccg

SEQ ID NO: 1450044 - RNA, 19 nt, Artificial Sequence
  Description of Artificial Sequence: Synthetic oligonucleotide
  Sense strand starting at position 94 of SEQ ID NO: 1243904
agguuagagagaugugauu

SEQ ID NO: 1450045 - RNA, 19 nt, Artificial Sequence
  Description of Artificial Sequence: Synthetic oligonucleotide
  Antisense strand to SEQ ID NO: 1450044
aaucacaucucucuaaccu

SEQ ID NO: 1450046 - RNA, 19 nt, Artificial Sequence
  Description of Artificial Sequence: Synthetic oligonucleotide
  Sense strand starting at position 207 of SEQ ID NO: 1243904
ggagcuaccuuauugaaca

SEQ ID NO: 1450047 - RNA, 19 nt, Artificial Sequence
  Description of Artificial Sequence: Synthetic oligonucleotide
  Antisense strand to SEQ ID NO: 1450046
uguucaauaagguagcucc

SEQ ID NO: 1450048 - RNA, 19 nt, Artificial Sequence
  Description of Artificial Sequence: Synthetic oligonucleotide
  Sense strand starting at position 314 of SEQ ID NO: 1243904
aacgaaaucugguccuaag

SEQ ID NO: 1450049 - RNA, 19 nt, Artificial Sequence
  Description of Artificial Sequence: Synthetic oligonucleotide
  Antisense strand to SEQ ID NO: 1450048
cuuaggaccagauuucguu

SEQ ID NO: 1450050 - RNA, 19 nt, Artificial Sequence
  Description of Artificial Sequence: Synthetic oligonucleotide
  Sense strand starting at position 317 of SEQ ID NO: 1243904
gaaaucugguccuaagagc

SEQ ID NO: 1450051 - RNA, 19 nt, Artificial Sequence
  Description of Artificial Sequence: Synthetic oligonucleotide
  Antisense strand to SEQ ID NO: 1450050
gcucuuaggaccagauuuc

SEQ ID NO: 1450052 - RNA, 19 nt, Artificial Sequence
  Description of Artificial Sequence: Synthetic oligonucleotide
  Sense strand starting at position 393 of SEQ ID NO: 1243904
ggcagccgucucuaauaaa

SEQ ID NO: 1450053 - RNA, 19 nt, Artificial Sequence
  Description of Artificial Sequence: Synthetic oligonucleotide
  Antisense strand to SEQ ID NO: 1450052
uuuauuagagacggcugcc

SEQ ID NO: 1450054 - RNA, 19 nt, Artificial Sequence
  Description of Artificial Sequence: Synthetic oligonucleotide
  Sense strand starting at position 396 of SEQ ID NO: 1243904
agccgucucuaauaaaucu

SEQ ID NO: 1450055 - RNA, 19 nt, Artificial Sequence
  Description of Artificial Sequence: Synthetic oligonucleotide
  Antisense strand to SEQ ID NO: 1450054
agauuuauuagagacggcu

SEQ ID NO: 1450056 - RNA, 19 nt, Artificial Sequence
  Description of Artificial Sequence: Synthetic oligonucleotide
  Sense strand starting at position 495 of SEQ ID NO: 1243904
uuuaaucugugacauugua

SEQ ID NO: 1450057 - RNA, 19 nt, Artificial Sequence
  Description of Artificial Sequence: Synthetic oligonucleotide
  Antisense strand to SEQ ID NO: 1450056
uacaaugucacagauuaaa

SEQ ID NO: 1450058 - RNA, 19 nt, Artificial Sequence
  Description of Artificial Sequence: Synthetic oligonucleotide
  Sense strand starting at position 1370 of SEQ ID NO: 1243904
ugauccucgcuccgugaua

SEQ ID NO: 1450059 - RNA, 19 nt, Artificial Sequence
  Description of Artificial Sequence: Synthetic oligonucleotide
  Antisense strand to SEQ ID NO: 1450058
uaucacggagcgaggauca

SEQ ID NO: 1450060 - RNA, 19 nt, Artificial Sequence
  Description of Artificial Sequence: Synthetic oligonucleotide
  Sense strand starting at position 1372 of SEQ ID NO: 1243904
auccucgcuccgugauaca

SEQ ID NO: 1450061 - RNA, 19 nt, Artificial Sequence
  Description of Artificial Sequence: Synthetic oligonucleotide
  Antisense strand to SEQ ID NO: 1450060
uguaucacggagcgaggau

SEQ ID NO: 1450062 - RNA, 19 nt, Artificial Sequence
  Description of Artificial Sequence: Synthetic oligonucleotide
  Sense strand starting at position 1530 of SEQ ID NO: 1243904
ggcuuucccacucgggaaa

SEQ ID NO: 1450063 - RNA, 19 nt, Artificial Sequence
  Description of Artificial Sequence: Synthetic oligonucleotide
  Antisense strand to SEQ ID NO: 1450062
uuucccgagugggaaagcc

SEQ ID NO: 1450064 - RNA, 19 nt, Artificial Sequence
  Description of Artificial Sequence: Synthetic oligonucleotide
  Sense strand starting at position 2421 of SEQ ID NO: 1243904
gcgggauucguccuugcga

SEQ ID NO: 1450065 - RNA, 19 nt, Artificial Sequence
  Description of Artificial Sequence: Synthetic oligonucleotide
  Antisense strand to SEQ ID NO: 1450064
ucgcaaggacgaaucccgc

SEQ ID NO: 1450066 - RNA, 19 nt, Artificial Sequence
  Description of Artificial Sequence: Synthetic oligonucleotide
  Sense strand starting at position 2931 of SEQ ID NO: 1243904
ggaagugcuguggguagau

SEQ ID NO: 1450067 - RNA, 19 nt, Artificial Sequence
  Description of Artificial Sequence: Synthetic oligonucleotide
  Antisense strand to SEQ ID NO: 1450066
aucuacccacagcacuucc

SEQ ID NO: 1450068 - RNA, 19 nt, Artificial Sequence
  Description of Artificial Sequence: Synthetic oligonucleotide
  Sense strand starting at position 2933 of SEQ ID NO: 1243904
aagugcuguggguagauaa

SEQ ID NO: 1450069 - RNA, 19 nt, Artificial Sequence
  Description of Artificial Sequence: Synthetic oligonucleotide
  Antisense strand to SEQ ID NO: 1450068
uuaucuacccacagcacuu

SEQ ID NO: 1450070 - RNA, 19 nt, Artificial Sequence
  Description of Artificial Sequence: Synthetic oligonucleotide
  Sense strand starting at position 2988 of SEQ ID NO: 1243904
aggguucuuuccugucuga

SEQ ID NO: 1450071 - RNA, 19 nt, Artificial Sequence
  Description of Artificial Sequence: Synthetic oligonucleotide
  Antisense strand to SEQ ID NO: 1450070
ucagacaggaaagaacccu

SEQ ID NO: 1450072 - RNA, 19 nt, Artificial Sequence
  Description of Artificial Sequence: Synthetic oligonucleotide
  Sense strand starting at position 3146 of SEQ ID NO: 1243904
gggagaccugcuuacuuga

SEQ ID NO: 1450073 - RNA, 19 nt, Artificial Sequence
  Description of Artificial Sequence: Synthetic oligonucleotide
  Antisense strand to SEQ ID NO: 1450072
ucaaguaagcaggucuccc

SEQ ID NO: 1450074 - RNA, 19 nt, Artificial Sequence
  Description of Artificial Sequence: Synthetic oligonucleotide
  Sense strand starting at position 3159 of SEQ ID NO: 1243904
acuugaaugcgcuuugugu

SEQ ID NO: 1450075 - RNA, 19 nt, Artificial Sequence
  Description of Artificial Sequence: Synthetic oligonucleotide
  Antisense strand to SEQ ID NO: 1450074
acacaaagcgcauucaagu

SEQ ID NO: 1450076 - RNA, 19 nt, Artificial Sequence
  Description of Artificial Sequence: Synthetic oligonucleotide
  Sense strand starting at position 3160 of SEQ ID NO: 1243904
cuugaaugcgcuuugugua

SEQ ID NO: 1450077 - RNA, 19 nt, Artificial Sequence
  Description of Artificial Sequence: Synthetic oligonucleotide
  Antisense strand to SEQ ID NO: 1450076
uacacaaagcgcauucaag

SEQ ID NO: 1450078 - RNA, 19 nt, Artificial Sequence
  Description of Artificial Sequence: Synthetic oligonucleotide
  Sense strand starting at position 3161 of SEQ ID NO: 1243904
uugaaugcgcuuuguguau

SEQ ID NO: 1450079 - RNA, 19 nt, Artificial Sequence
  Description of Artificial Sequence: Synthetic oligonucleotide
  Antisense strand to SEQ ID NO: 1450078
auacacaaagcgcauucaa

SEQ ID NO: 1450080 - RNA, 19 nt, Artificial Sequence
  Description of Artificial Sequence: Synthetic oligonucleotide
  Sense strand starting at position 3173 of SEQ ID NO: 1243904
uguguauugccuguguauu

SEQ ID NO: 1450081 - RNA, 19 nt, Artificial Sequence
  Description of Artificial Sequence: Synthetic oligonucleotide
  Antisense strand to SEQ ID NO: 1450080
aauacacaggcaauacaca

SEQ ID NO: 1450082 - RNA, 19 nt, Artificial Sequence
  Description of Artificial Sequence: Synthetic oligonucleotide
  Sense strand starting at position 3174 of SEQ ID NO: 1243904
guguauugccuguguauug

SEQ ID NO: 1450083 - RNA, 19 nt, Artificial Sequence
  Description of Artificial Sequence: Synthetic oligonucleotide
  Antisense strand to SEQ ID NO: 1450082
caauacacaggcaauacac

SEQ ID NO: 1450084 - RNA, 19 nt, Artificial Sequence
  Description of Artificial Sequence: Synthetic oligonucleotide
  Sense strand starting at position 3226 of SEQ ID NO: 1243904
ccaguacucgcuuaguaca

SEQ ID NO: 1450085 - RNA, 19 nt, Artificial Sequence
  Description of Artificial Sequence: Synthetic oligonucleotide
  Antisense strand to SEQ ID NO: 1450084
uguacuaagcgaguacugg

SEQ ID NO: 1450086 - RNA, 19 nt, Artificial Sequence
  Description of Artificial Sequence: Synthetic oligonucleotide
  Sense strand starting at position 3279 of SEQ ID NO: 1243904
aggcgugucagcugcauau

SEQ ID NO: 1450087 - RNA, 19 nt, Artificial Sequence
  Description of Artificial Sequence: Synthetic oligonucleotide
  Antisense strand to SEQ ID NO: 1450086
auaugcagcugacacgccu

SEQ ID NO: 1450088 - RNA, 19 nt, Artificial Sequence
  Description of Artificial Sequence: Synthetic oligonucleotide
  Sense strand starting at position 3427 of SEQ ID NO: 1243904
ggaggaaauuaauggauaa

SEQ ID NO: 1450089 - RNA, 19 nt, Artificial Sequence
  Description of Artificial Sequence: Synthetic oligonucleotide
  Antisense strand to SEQ ID NO: 1450088
uuauccauuaauuuccucc

SEQ ID NO: 1450090 - RNA, 19 nt, Artificial Sequence
  Description of Artificial Sequence: Synthetic oligonucleotide
  Sense strand starting at position 3456 of SEQ ID NO: 1243904
gaaacaguuuccuuagcgu

SEQ ID NO: 1450091 - RNA, 19 nt, Artificial Sequence
  Description of Artificial Sequence: Synthetic oligonucleotide
  Antisense strand to SEQ ID NO: 1450090
acgcuaaggaaacuguuuc

SEQ ID NO: 1450092 - RNA, 19 nt, Artificial Sequence
  Description of Artificial Sequence: Synthetic oligonucleotide
  Sense strand starting at position 3483 of SEQ ID NO: 1243904
gcagaaucccuguggauug

SEQ ID NO: 1450093 - RNA, 19 nt, Artificial Sequence
  Description of Artificial Sequence: Synthetic oligonucleotide
  Antisense strand to SEQ ID NO: 1450092
caauccacagggauucugc

SEQ ID NO: 1450094 - RNA, 19 nt, Artificial Sequence
  Description of Artificial Sequence: Synthetic oligonucleotide
  Sense strand starting at position 3484 of SEQ ID NO: 1243904
cagaaucccuguggauuga

SEQ ID NO: 1450095 - RNA, 19 nt, Artificial Sequence
  Description of Artificial Sequence: Synthetic oligonucleotide
  Antisense strand to SEQ ID NO: 1450094
ucaauccacagggauucug

SEQ ID NO: 1450096 - RNA, 19 nt, Artificial Sequence
  Description of Artificial Sequence: Synthetic oligonucleotide
  Sense strand starting at position 3507 of SEQ ID NO: 1243904
ggaacugagccauguccuu

SEQ ID NO: 1450097 - RNA, 19 nt, Artificial Sequence
  Description of Artificial Sequence: Synthetic oligonucleotide
  Antisense strand to SEQ ID NO: 1450096
aaggacauggcucaguucc

SEQ ID NO: 1450098 - RNA, 19 nt, Artificial Sequence
  Description of Artificial Sequence: Synthetic oligonucleotide
  Sense strand starting at position 3512 of SEQ ID NO: 1243904
ugagccauguccuuuguuu

SEQ ID NO: 1450099 - RNA, 19 nt, Artificial Sequence
  Description of Artificial Sequence: Synthetic oligonucleotide
  Antisense strand to SEQ ID NO: 1450098
aaacaaaggacauggcuca

SEQ ID NO: 1450100 - RNA, 19 nt, Artificial Sequence
  Description of Artificial Sequence: Synthetic oligonucleotide
  Sense strand starting at position 3523 of SEQ ID NO: 1243904
cuuuguuuggucuguggau

SEQ ID NO: 1450101 - RNA, 19 nt, Artificial Sequence
  Description of Artificial Sequence: Synthetic oligonucleotide
  Antisense strand to SEQ ID NO: 1450100
auccacagaccaaacaaag

SEQ ID NO: 1450102 - RNA, 19 nt, Artificial Sequence
  Description of Artificial Sequence: Synthetic oligonucleotide
  Sense strand starting at position 3524 of SEQ ID NO: 1243904
uuuguuuggucuguggauu

SEQ ID NO: 1450103 - RNA, 19 nt, Artificial Sequence
  Description of Artificial Sequence: Synthetic oligonucleotide
  Antisense strand to SEQ ID NO: 1450102
aauccacagaccaaacaaa

SEQ ID NO: 1450104 - RNA, 19 nt, Artificial Sequence
  Description of Artificial Sequence: Synthetic oligonucleotide
  Sense strand starting at position 3525 of SEQ ID NO: 1243904
uuguuuggucuguggauuu

SEQ ID NO: 1450105 - RNA, 19 nt, Artificial Sequence
  Description of Artificial Sequence: Synthetic oligonucleotide
  Antisense strand to SEQ ID NO: 1450104
aaauccacagaccaaacaa

SEQ ID NO: 1450106 - RNA, 19 nt, Artificial Sequence
  Description of Artificial Sequence: Synthetic oligonucleotide
  Sense strand starting at position 3581 of SEQ ID NO: 1243904
ugaguucccucgugagagc

SEQ ID NO: 1450107 - RNA, 19 nt, Artificial Sequence
  Description of Artificial Sequence: Synthetic oligonucleotide
  Antisense strand to SEQ ID NO: 1450106
gcucucacgagggaacuca

SEQ ID NO: 1450108 - RNA, 19 nt, Artificial Sequence
  Description of Artificial Sequence: Synthetic oligonucleotide
  Sense strand starting at position 3783 of SEQ ID NO: 1243904
gggugaggguguucugacu

SEQ ID NO: 1450109 - RNA, 19 nt, Artificial Sequence
  Description of Artificial Sequence: Synthetic oligonucleotide
  Antisense strand to SEQ ID NO: 1450108
agucagaacacccucaccc

SEQ ID NO: 1450110 - RNA, 19 nt, Artificial Sequence
  Description of Artificial Sequence: Synthetic oligonucleotide
  Sense strand starting at position 3789 of SEQ ID NO: 1243904
ggguguucugacugaggga

SEQ ID NO: 1450111 - RNA, 19 nt, Artificial Sequence
  Description of Artificial Sequence: Synthetic oligonucleotide
  Antisense strand to SEQ ID NO: 1450110
ucccucagucagaacaccc

SEQ ID NO: 1450112 - RNA, 19 nt, Artificial Sequence
  Description of Artificial Sequence: Synthetic oligonucleotide
  Sense strand starting at position 206 of SEQ ID NO: 1243905
gcaacuguaucagaacuag

SEQ ID NO: 1450113 - RNA, 19 nt, Artificial Sequence
  Description of Artificial Sequence: Synthetic oligonucleotide
  Antisense strand to SEQ ID NO: 1450112
cuaguucugauacaguugc

SEQ ID NO: 1450114 - RNA, 19 nt, Artificial Sequence
  Description of Artificial Sequence: Synthetic oligonucleotide
  Sense strand starting at position 341 of SEQ ID NO: 1243905
cccaguucucucugccaca

SEQ ID NO: 1450115 - RNA, 19 nt, Artificial Sequence
  Description of Artificial Sequence: Synthetic oligonucleotide
  Antisense strand to SEQ ID NO: 1450114
uguggcagagagaacuggg

SEQ ID NO: 1450116 - RNA, 19 nt, Artificial Sequence
  Description of Artificial Sequence: Synthetic oligonucleotide
  Sense strand starting at position 593 of SEQ ID NO: 1243905
acuagaaucccuugagcuc

SEQ ID NO: 1450117 - RNA, 19 nt, Artificial Sequence
  Description of Artificial Sequence: Synthetic oligonucleotide
  Antisense strand to SEQ ID NO: 1450116
gagcucaagggauucuagu

SEQ ID NO: 1450118 - RNA, 19 nt, Artificial Sequence
  Description of Artificial Sequence: Synthetic oligonucleotide
  Sense strand starting at position 594 of SEQ ID NO: 1243905
cuagaaucccuugagcuca

SEQ ID NO: 1450119 - RNA, 19 nt, Artificial Sequence
  Description of Artificial Sequence: Synthetic oligonucleotide
  Antisense strand to SEQ ID NO: 1450118
ugagcucaagggauucuag

SEQ ID NO: 1450120 - RNA, 19 nt, Artificial Sequence
  Description of Artificial Sequence: Synthetic oligonucleotide
  Sense strand starting at position 743 of SEQ ID NO: 1243905
cacgcacugcaguagaaua

SEQ ID NO: 1450121 - RNA, 19 nt, Artificial Sequence
  Description of Artificial Sequence: Synthetic oligonucleotide
  Antisense strand to SEQ ID NO: 1450120
uauucuacugcagugcgug

SEQ ID NO: 1450122 - RNA, 19 nt, Artificial Sequence
  Description of Artificial Sequence: Synthetic oligonucleotide
  Sense strand starting at position 913 of SEQ ID NO: 1243905
auggauguuugugucaaug

SEQ ID NO: 1450123 - RNA, 19 nt, Artificial Sequence
  Description of Artificial Sequence: Synthetic oligonucleotide
  Antisense strand to SEQ ID NO: 1450122
cauugacacaaacauccau

SEQ ID NO: 1450124 - RNA, 19 nt, Artificial Sequence
  Description of Artificial Sequence: Synthetic oligonucleotide
  Sense strand starting at position 915 of SEQ ID NO: 1243905
ggauguuugugucaaugga

SEQ ID NO: 1450125 - RNA, 19 nt, Artificial Sequence
  Description of Artificial Sequence: Synthetic oligonucleotide
  Antisense strand to SEQ ID NO: 1450124
uccauugacacaaacaucc

SEQ ID NO: 1450126 - RNA, 19 nt, Artificial Sequence
  Description of Artificial Sequence: Synthetic oligonucleotide
  Sense strand starting at position 1016 of SEQ ID NO: 1243905
gcauuuagcuagcuuucga

SEQ ID NO: 1450127 - RNA, 19 nt, Artificial Sequence
  Description of Artificial Sequence: Synthetic oligonucleotide
  Antisense strand to SEQ ID NO: 1450126
ucgaaagcuagcuaaaugc

SEQ ID NO: 1450128 - RNA, 19 nt, Artificial Sequence
  Description of Artificial Sequence: Synthetic oligonucleotide
  Sense strand starting at position 1065 of SEQ ID NO: 1243905
uguggucaucugcaaacuu

SEQ ID NO: 1450129 - RNA, 19 nt, Artificial Sequence
  Description of Artificial Sequence: Synthetic oligonucleotide
  Antisense strand to SEQ ID NO: 1450128
aaguuugcagaugaccaca

SEQ ID NO: 1450130 - RNA, 19 nt, Artificial Sequence
  Description of Artificial Sequence: Synthetic oligonucleotide
  Sense strand starting at position 1076 of SEQ ID NO: 1243905
gcaaacuucucugcaggga

SEQ ID NO: 1450131 - RNA, 19 nt, Artificial Sequence
  Description of Artificial Sequence: Synthetic oligonucleotide
  Antisense strand to SEQ ID NO: 1450130
ucccugcagagaaguuugc

SEQ ID NO: 1450132 - RNA, 19 nt, Artificial Sequence
  Description of Artificial Sequence: Synthetic oligonucleotide
  Sense strand starting at position 2034 of SEQ ID NO: 1243905
cgccgccuccuuuauuaga

SEQ ID NO: 1450133 - RNA, 19 nt, Artificial Sequence
  Description of Artificial Sequence: Synthetic oligonucleotide
  Antisense strand to SEQ ID NO: 1450132
ucuaauaaaggaggcggcg

SEQ ID NO: 1450134 - RNA, 19 nt, Artificial Sequence
  Description of Artificial Sequence: Synthetic oligonucleotide
  Sense strand starting at position 2036 of SEQ ID NO: 1243905
ccgccuccuuuauuagauu

SEQ ID NO: 1450135 - RNA, 19 nt, Artificial Sequence
  Description of Artificial Sequence: Synthetic oligonucleotide
  Antisense strand to SEQ ID NO: 1450134
aaucuaauaaaggaggcgg

SEQ ID NO: 1450136 - RNA, 19 nt, Artificial Sequence
  Description of Artificial Sequence: Synthetic oligonucleotide
  Sense strand starting at position 2078 of SEQ ID NO: 1243905
ggcagaaucugauuagcua

SEQ ID NO: 1450137 - RNA, 19 nt, Artificial Sequence
  Description of Artificial Sequence: Synthetic oligonucleotide
  Antisense strand to SEQ ID NO: 1450136
uagcuaaucagauucugcc

SEQ ID NO: 1450138 - RNA, 19 nt, Artificial Sequence
  Description of Artificial Sequence: Synthetic oligonucleotide
  Sense strand starting at position 2079 of SEQ ID NO: 1243905
gcagaaucugauuagcuac

SEQ ID NO: 1450139 - RNA, 19 nt, Artificial Sequence
  Description of Artificial Sequence: Synthetic oligonucleotide
  Antisense strand to SEQ ID NO: 1450138
guagcuaaucagauucugc

SEQ ID NO: 1450140 - RNA, 19 nt, Artificial Sequence
  Description of Artificial Sequence: Synthetic oligonucleotide
  Sense strand starting at position 2388 of SEQ ID NO: 1243905
ugugcuuggugugucagua

SEQ ID NO: 1450141 - RNA, 19 nt, Artificial Sequence
  Description of Artificial Sequence: Synthetic oligonucleotide
  Antisense strand to SEQ ID NO: 1450140
uacugacacaccaagcaca

SEQ ID NO: 1450142 - RNA, 19 nt, Artificial Sequence
  Description of Artificial Sequence: Synthetic oligonucleotide
  Sense strand starting at position 2479 of SEQ ID NO: 1243905
aaaugacacuguguggaua

SEQ ID NO: 1450143 - RNA, 19 nt, Artificial Sequence
  Description of Artificial Sequence: Synthetic oligonucleotide
  Antisense strand to SEQ ID NO: 1450142
uauccacacagugucauuu

SEQ ID NO: 1450144 - RNA, 19 nt, Artificial Sequence
  Description of Artificial Sequence: Synthetic oligonucleotide
  Sense strand starting at position 2672 of SEQ ID NO: 1243905
gcagaugagcuuugguaca

SEQ ID NO: 1450145 - RNA, 19 nt, Artificial Sequence
  Description of Artificial Sequence: Synthetic oligonucleotide
  Antisense strand to SEQ ID NO: 1450144
uguaccaaagcucaucugc

SEQ ID NO: 1450146 - RNA, 19 nt, Artificial Sequence
  Description of Artificial Sequence: Synthetic oligonucleotide
  Sense strand starting at position 2674 of SEQ ID NO: 1243905
agaugagcuuugguacaga

SEQ ID NO: 1450147 - RNA, 19 nt, Artificial Sequence
  Description of Artificial Sequence: Synthetic oligonucleotide
  Antisense strand to SEQ ID NO: 1450146
ucuguaccaaagcucaucu

SEQ ID NO: 1450148 - RNA, 19 nt, Artificial Sequence
  Description of Artificial Sequence: Synthetic oligonucleotide
  Sense strand starting at position 2789 of SEQ ID NO: 1243905
cuuugaugucugugggcaa

SEQ ID NO: 1450149 - RNA, 19 nt, Artificial Sequence
  Description of Artificial Sequence: Synthetic oligonucleotide
  Antisense strand to SEQ ID NO: 1450148
uugcccacagacaucaaag

SEQ ID NO: 1450150 - RNA, 19 nt, Artificial Sequence
  Description of Artificial Sequence: Synthetic oligonucleotide
  Sense strand starting at position 2882 of SEQ ID NO: 1243905
gguggugcugucagucuuu

SEQ ID NO: 1450151 - RNA, 19 nt, Artificial Sequence
  Description of Artificial Sequence: Synthetic oligonucleotide
  Antisense strand to SEQ ID NO: 1450150
aaagacugacagcaccacc

SEQ ID NO: 1450152 - RNA, 19 nt, Artificial Sequence
  Description of Artificial Sequence: Synthetic oligonucleotide
  Sense strand starting at position 2887 of SEQ ID NO: 1243905
ugcugucagucuuuccaga

SEQ ID NO: 1450153 - RNA, 19 nt, Artificial Sequence
  Description of Artificial Sequence: Synthetic oligonucleotide
  Antisense strand to SEQ ID NO: 1450152
ucuggaaagacugacagca

SEQ ID NO: 1450154 - RNA, 19 nt, Artificial Sequence
  Description of Artificial Sequence: Synthetic oligonucleotide
  Sense strand starting at position 2889 of SEQ ID NO: 1243905
cugucagucuuuccagaga

SEQ ID NO: 1450155 - RNA, 19 nt, Artificial Sequence
  Description of Artificial Sequence: Synthetic oligonucleotide
  Antisense strand to SEQ ID NO: 1450154
ucucuggaaagacugacag

SEQ ID NO: 1450156 - RNA, 19 nt, Artificial Sequence
  Description of Artificial Sequence: Synthetic oligonucleotide
  Sense strand starting at position 2892 of SEQ ID NO: 1243905
ucagucuuuccagagacug

SEQ ID NO: 1450157 - RNA, 19 nt, Artificial Sequence
  Description of Artificial Sequence: Synthetic oligonucleotide
  Antisense strand to SEQ ID NO: 1450156
cagucucuggaaagacuga

SEQ ID NO: 1450158 - RNA, 19 nt, Artificial Sequence
  Description of Artificial Sequence: Synthetic oligonucleotide
  Sense strand starting at position 2929 of SEQ ID NO: 1243905
guuggagcucacugaggaa

SEQ ID NO: 1450159 - RNA, 19 nt, Artificial Sequence
  Description of Artificial Sequence: Synthetic oligonucleotide
  Antisense strand to SEQ ID NO: 1450158
uuccucagugagcuccaac

SEQ ID NO: 1450160 - RNA, 19 nt, Artificial Sequence
  Description of Artificial Sequence: Synthetic oligonucleotide
  Sense strand starting at position 3041 of SEQ ID NO: 1243905
agcacuggugcgugcaaga

SEQ ID NO: 1450161 - RNA, 19 nt, Artificial Sequence
  Description of Artificial Sequence: Synthetic oligonucleotide
  Antisense strand to SEQ ID NO: 1450160
ucuugcacgcaccagugcu

SEQ ID NO: 1450162 - RNA, 19 nt, Artificial Sequence
  Description of Artificial Sequence: Synthetic oligonucleotide
  Sense strand starting at position 3270 of SEQ ID NO: 1243905
aucuaaguguaaggaugaa

SEQ ID NO: 1450163 - RNA, 19 nt, Artificial Sequence
  Description of Artificial Sequence: Synthetic oligonucleotide
  Antisense strand to SEQ ID NO: 1450162
uucauccuuacacuuagau

SEQ ID NO: 1450164 - RNA, 19 nt, Artificial Sequence
  Description of Artificial Sequence: Synthetic oligonucleotide
  Sense strand starting at position 3342 of SEQ ID NO: 1243905
ggcucugugcuuuacagga

SEQ ID NO: 1450165 - RNA, 19 nt, Artificial Sequence
  Description of Artificial Sequence: Synthetic oligonucleotide
  Antisense strand to SEQ ID NO: 1450164
uccuguaaagcacagagcc

SEQ ID NO: 1450166 - RNA, 19 nt, Artificial Sequence
  Description of Artificial Sequence: Synthetic oligonucleotide
  Sense strand starting at position 3346 of SEQ ID NO: 1243905
cugugcuuuacaggagaua

SEQ ID NO: 1450167 - RNA, 19 nt, Artificial Sequence
  Description of Artificial Sequence: Synthetic oligonucleotide
  Antisense strand to SEQ ID NO: 1450166
uaucuccuguaaagcacag

SEQ ID NO: 1450168 - RNA, 19 nt, Artificial Sequence
  Description of Artificial Sequence: Synthetic oligonucleotide
  Sense strand starting at position 3347 of SEQ ID NO: 1243905
ugugcuuuacaggagauaa

SEQ ID NO: 1450169 - RNA, 19 nt, Artificial Sequence
  Description of Artificial Sequence: Synthetic oligonucleotide
  Antisense strand to SEQ ID NO: 1450168
uuaucuccuguaaagcaca

SEQ ID NO: 1450170 - RNA, 19 nt, Artificial Sequence
  Description of Artificial Sequence: Synthetic oligonucleotide
  Sense strand starting at position 3411 of SEQ ID NO: 1243905
ggacauaauugauaaccca

SEQ ID NO: 1450171 - RNA, 19 nt, Artificial Sequence
  Description of Artificial Sequence: Synthetic oligonucleotide
  Antisense strand to SEQ ID NO: 1450170
uggguuaucaauuaugucc

SEQ ID NO: 1450172 - RNA, 19 nt, Artificial Sequence
  Description of Artificial Sequence: Synthetic oligonucleotide
  Sense strand starting at position 3479 of SEQ ID NO: 1243905
gauagacauucugguaucu

SEQ ID NO: 1450173 - RNA, 19 nt, Artificial Sequence
  Description of Artificial Sequence: Synthetic oligonucleotide
  Antisense strand to SEQ ID NO: 1450172
agauaccagaaugucuauc

SEQ ID NO: 1450174 - RNA, 19 nt, Artificial Sequence
  Description of Artificial Sequence: Synthetic oligonucleotide
  Sense strand starting at position 3520 of SEQ ID NO: 1243905
acaaaugugucugcugcau

SEQ ID NO: 1450175 - RNA, 19 nt, Artificial Sequence
  Description of Artificial Sequence: Synthetic oligonucleotide
  Antisense strand to SEQ ID NO: 1450174
augcagcagacacauuugu

SEQ ID NO: 1450176 - RNA, 19 nt, Artificial Sequence
  Description of Artificial Sequence: Synthetic oligonucleotide
  Sense strand starting at position 3547 of SEQ ID NO: 1243905
cuggacauugggugagauu

SEQ ID NO: 1450177 - RNA, 19 nt, Artificial Sequence
  Description of Artificial Sequence: Synthetic oligonucleotide
  Antisense strand to SEQ ID NO: 1450176
aaucucacccaauguccag

SEQ ID NO: 1450178 - RNA, 19 nt, Artificial Sequence
  Description of Artificial Sequence: Synthetic oligonucleotide
  Sense strand starting at position 3608 of SEQ ID NO: 1243905
cagucuugacagcaagaau

SEQ ID NO: 1450179 - RNA, 19 nt, Artificial Sequence
  Description of Artificial Sequence: Synthetic oligonucleotide
  Antisense strand to SEQ ID NO: 1450178
auucuugcugucaagacug

SEQ ID NO: 1450180 - RNA, 19 nt, Artificial Sequence
  Description of Artificial Sequence: Synthetic oligonucleotide
  Sense strand starting at position 3681 of SEQ ID NO: 1243905
ggcccucuguguucucaga

SEQ ID NO: 1450181 - RNA, 19 nt, Artificial Sequence
  Description of Artificial Sequence: Synthetic oligonucleotide
  Antisense strand to SEQ ID NO: 1450180
ucugagaacacagagggcc

SEQ ID NO: 1450182 - RNA, 19 nt, Artificial Sequence
  Description of Artificial Sequence: Synthetic oligonucleotide
  Sense strand starting at position 3689 of SEQ ID NO: 1243905
guguucucagagcagaacu

SEQ ID NO: 1450183 - RNA, 19 nt, Artificial Sequence
  Description of Artificial Sequence: Synthetic oligonucleotide
  Antisense strand to SEQ ID NO: 1450182
aguucugcucugagaacac

SEQ ID NO: 1450184 - RNA, 19 nt, Artificial Sequence
  Description of Artificial Sequence: Synthetic oligonucleotide
  Sense strand starting at position 3823 of SEQ ID NO: 1243905
cuugccuuccucugugaca

SEQ ID NO: 1450185 - RNA, 19 nt, Artificial Sequence
  Description of Artificial Sequence: Synthetic oligonucleotide
  Antisense strand to SEQ ID NO: 1450184
ugucacagaggaaggcaag

SEQ ID NO: 1450186 - RNA, 19 nt, Artificial Sequence
  Description of Artificial Sequence: Synthetic oligonucleotide
  Sense strand starting at position 3855 of SEQ ID NO: 1243905
gugacagaucucuggcagu

SEQ ID NO: 1450187 - RNA, 19 nt, Artificial Sequence
  Description of Artificial Sequence: Synthetic oligonucleotide
  Antisense strand to SEQ ID NO: 1450186
acugccagagaucugucac

SEQ ID NO: 1450188 - RNA, 19 nt, Artificial Sequence
  Description of Artificial Sequence: Synthetic oligonucleotide
  Sense strand starting at position 3878 of SEQ ID NO: 1243905
ggaucuuagagcugugaga

SEQ ID NO: 1450189 - RNA, 19 nt, Artificial Sequence
  Description of Artificial Sequence: Synthetic oligonucleotide
  Antisense strand to SEQ ID NO: 1450188
ucucacagcucuaagaucc

SEQ ID NO: 1450190 - RNA, 19 nt, Artificial Sequence
  Description of Artificial Sequence: Synthetic oligonucleotide
  Sense strand starting at position 3880 of SEQ ID NO: 1243905
aucuuagagcugugagagu

SEQ ID NO: 1450191 - RNA, 19 nt, Artificial Sequence
  Description of Artificial Sequence: Synthetic oligonucleotide
  Antisense strand to SEQ ID NO: 1450190
acucucacagcucuaagau

SEQ ID NO: 1450192 - RNA, 19 nt, Artificial Sequence
  Description of Artificial Sequence: Synthetic oligonucleotide
  Sense strand starting at position 30 of SEQ ID NO: 1243906
ggagcuaccuuauugaaca

SEQ ID NO: 1450193 - RNA, 19 nt, Artificial Sequence
  Description of Artificial Sequence: Synthetic oligonucleotide
  Antisense strand to SEQ ID NO: 1450192
uguucaauaagguagcucc

SEQ ID NO: 1450194 - RNA, 19 nt, Artificial Sequence
  Description of Artificial Sequence: Synthetic oligonucleotide
  Sense strand starting at position 137 of SEQ ID NO: 1243906
aacgaaaucugguccuaag

SEQ ID NO: 1450195 - RNA, 19 nt, Artificial Sequence
  Description of Artificial Sequence: Synthetic oligonucleotide
  Antisense strand to SEQ ID NO: 1450194
cuuaggaccagauuucguu

SEQ ID NO: 1450196 - RNA, 19 nt, Artificial Sequence
  Description of Artificial Sequence: Synthetic oligonucleotide
  Sense strand starting at position 140 of SEQ ID NO: 1243906
gaaaucugguccuaagagc

SEQ ID NO: 1450197 - RNA, 19 nt, Artificial Sequence
  Description of Artificial Sequence: Synthetic oligonucleotide
  Antisense strand to SEQ ID NO: 1450196
gcucuuaggaccagauuuc

SEQ ID NO: 1450198 - RNA, 19 nt, Artificial Sequence
  Description of Artificial Sequence: Synthetic oligonucleotide
  Sense strand starting at position 216 of SEQ ID NO: 1243906
ggcagccgucucuaauaaa

SEQ ID NO: 1450199 - RNA, 19 nt, Artificial Sequence
  Description of Artificial Sequence: Synthetic oligonucleotide
  Antisense strand to SEQ ID NO: 1450198
uuuauuagagacggcugcc

SEQ ID NO: 1450200 - RNA, 19 nt, Artificial Sequence
  Description of Artificial Sequence: Synthetic oligonucleotide
  Sense strand starting at position 219 of SEQ ID NO: 1243906
agccgucucuaauaaaucu

SEQ ID NO: 1450201 - RNA, 19 nt, Artificial Sequence
  Description of Artificial Sequence: Synthetic oligonucleotide
  Antisense strand to SEQ ID NO: 1450200
agauuuauuagagacggcu

SEQ ID NO: 1450202 - RNA, 19 nt, Artificial Sequence
  Description of Artificial Sequence: Synthetic oligonucleotide
  Sense strand starting at position 318 of SEQ ID NO: 1243906
uuuaaucugugacauugua

SEQ ID NO: 1450203 - RNA, 19 nt, Artificial Sequence
  Description of Artificial Sequence: Synthetic oligonucleotide
  Antisense strand to SEQ ID NO: 1450202
uacaaugucacagauuaaa

SEQ ID NO: 1450204 - RNA, 19 nt, Artificial Sequence
  Description of Artificial Sequence: Synthetic oligonucleotide
  Sense strand starting at position 1193 of SEQ ID NO: 1243906
ugauccucgcuccgugaua

SEQ ID NO: 1450205 - RNA, 19 nt, Artificial Sequence
  Description of Artificial Sequence: Synthetic oligonucleotide
  Antisense strand to SEQ ID NO: 1450204
uaucacggagcgaggauca

SEQ ID NO: 1450206 - RNA, 19 nt, Artificial Sequence
  Description of Artificial Sequence: Synthetic oligonucleotide
  Sense strand starting at position 1195 of SEQ ID NO: 1243906
auccucgcuccgugauaca

SEQ ID NO: 1450207 - RNA, 19 nt, Artificial Sequence
  Description of Artificial Sequence: Synthetic oligonucleotide
  Antisense strand to SEQ ID NO: 1450206
uguaucacggagcgaggau

SEQ ID NO: 1450208 - RNA, 19 nt, Artificial Sequence
  Description of Artificial Sequence: Synthetic oligonucleotide
  Sense strand starting at position 1353 of SEQ ID NO: 1243906
ggcuuucccacucgggaaa

SEQ ID NO: 1450209 - RNA, 19 nt, Artificial Sequence
  Description of Artificial Sequence: Synthetic oligonucleotide
  Antisense strand to SEQ ID NO: 1450208
uuucccgagugggaaagcc

SEQ ID NO: 1450210 - RNA, 19 nt, Artificial Sequence
  Description of Artificial Sequence: Synthetic oligonucleotide
  Sense strand starting at position 2244 of SEQ ID NO: 1243906
gcgggauucguccuugcga

SEQ ID NO: 1450211 - RNA, 19 nt, Artificial Sequence
  Description of Artificial Sequence: Synthetic oligonucleotide
  Antisense strand to SEQ ID NO: 1450210
ucgcaaggacgaaucccgc

SEQ ID NO: 1450212 - RNA, 19 nt, Artificial Sequence
  Description of Artificial Sequence: Synthetic oligonucleotide
  Sense strand starting at position 2754 of SEQ ID NO: 1243906
ggaagugcuguggguagau

SEQ ID NO: 1450213 - RNA, 19 nt, Artificial Sequence
  Description of Artificial Sequence: Synthetic oligonucleotide
  Antisense strand to SEQ ID NO: 1450212
aucuacccacagcacuucc

SEQ ID NO: 1450214 - RNA, 19 nt, Artificial Sequence
  Description of Artificial Sequence: Synthetic oligonucleotide
  Sense strand starting at position 2756 of SEQ ID NO: 1243906
aagugcuguggguagauaa

SEQ ID NO: 1450215 - RNA, 19 nt, Artificial Sequence
  Description of Artificial Sequence: Synthetic oligonucleotide
  Antisense strand to SEQ ID NO: 1450214
uuaucuacccacagcacuu

SEQ ID NO: 1450216 - RNA, 19 nt, Artificial Sequence
  Description of Artificial Sequence: Synthetic oligonucleotide
  Sense strand starting at position 2811 of SEQ ID NO: 1243906
aggguucuuuccugucuga

SEQ ID NO: 1450217 - RNA, 19 nt, Artificial Sequence
  Description of Artificial Sequence: Synthetic oligonucleotide
  Antisense strand to SEQ ID NO: 1450216
ucagacaggaaagaacccu

SEQ ID NO: 1450218 - RNA, 19 nt, Artificial Sequence
  Description of Artificial Sequence: Synthetic oligonucleotide
  Sense strand starting at position 2969 of SEQ ID NO: 1243906
gggagaccugcuuacuuga

SEQ ID NO: 1450219 - RNA, 19 nt, Artificial Sequence
  Description of Artificial Sequence: Synthetic oligonucleotide
  Antisense strand to SEQ ID NO: 1450218
ucaaguaagcaggucuccc

SEQ ID NO: 1450220 - RNA, 19 nt, Artificial Sequence
  Description of Artificial Sequence: Synthetic oligonucleotide
  Sense strand starting at position 2982 of SEQ ID NO: 1243906
acuugaaugcgcuuugugu

SEQ ID NO: 1450221 - RNA, 19 nt, Artificial Sequence
  Description of Artificial Sequence: Synthetic oligonucleotide
  Antisense strand to SEQ ID NO: 1450220
acacaaagcgcauucaagu

SEQ ID NO: 1450222 - RNA, 19 nt, Artificial Sequence
  Description of Artificial Sequence: Synthetic oligonucleotide
  Sense strand starting at position 2983 of SEQ ID NO: 1243906
cuugaaugcgcuuugugua

SEQ ID NO: 1450223 - RNA, 19 nt, Artificial Sequence
  Description of Artificial Sequence: Synthetic oligonucleotide
  Antisense strand to SEQ ID NO: 1450222
uacacaaagcgcauucaag

SEQ ID NO: 1450224 - RNA, 19 nt, Artificial Sequence
  Description of Artificial Sequence: Synthetic oligonucleotide
  Sense strand starting at position 2984 of SEQ ID NO: 1243906
uugaaugcgcuuuguguau

SEQ ID NO: 1450225 - RNA, 19 nt, Artificial Sequence
  Description of Artificial Sequence: Synthetic oligonucleotide
  Antisense strand to SEQ ID NO: 1450224
auacacaaagcgcauucaa

SEQ ID NO: 1450226 - RNA, 19 nt, Artificial Sequence
  Description of Artificial Sequence: Synthetic oligonucleotide
  Sense strand starting at position 2996 of SEQ ID NO: 1243906
uguguauugccuguguauu

SEQ ID NO: 1450227 - RNA, 19 nt, Artificial Sequence
  Description of Artificial Sequence: Synthetic oligonucleotide
  Antisense strand to SEQ ID NO: 1450226
aauacacaggcaauacaca

SEQ ID NO: 1450228 - RNA, 19 nt, Artificial Sequence
  Description of Artificial Sequence: Synthetic oligonucleotide
  Sense strand starting at position 2997 of SEQ ID NO: 1243906
guguauugccuguguauug

SEQ ID NO: 1450229 - RNA, 19 nt, Artificial Sequence
  Description of Artificial Sequence: Synthetic oligonucleotide
  Antisense strand to SEQ ID NO: 1450228
caauacacaggcaauacac

SEQ ID NO: 1450230 - RNA, 19 nt, Artificial Sequence
  Description of Artificial Sequence: Synthetic oligonucleotide
  Sense strand starting at position 3049 of SEQ ID NO: 1243906
ccaguacucgcuuaguaca

SEQ ID NO: 1450231 - RNA, 19 nt, Artificial Sequence
  Description of Artificial Sequence: Synthetic oligonucleotide
  Antisense strand to SEQ ID NO: 1450230
uguacuaagcgaguacugg

SEQ ID NO: 1450232 - RNA, 19 nt, Artificial Sequence
  Description of Artificial Sequence: Synthetic oligonucleotide
  Sense strand starting at position 3102 of SEQ ID NO: 1243906
aggcgugucagcugcauau

SEQ ID NO: 1450233 - RNA, 19 nt, Artificial Sequence
  Description of Artificial Sequence: Synthetic oligonucleotide
  Antisense strand to SEQ ID NO: 1450232
auaugcagcugacacgccu

SEQ ID NO: 1450234 - RNA, 19 nt, Artificial Sequence
  Description of Artificial Sequence: Synthetic oligonucleotide
  Sense strand starting at position 3250 of SEQ ID NO: 1243906
ggaggaaauuaauggauaa

SEQ ID NO: 1450235 - RNA, 19 nt, Artificial Sequence
  Description of Artificial Sequence: Synthetic oligonucleotide
  Antisense strand to SEQ ID NO: 1450234
uuauccauuaauuuccucc

SEQ ID NO: 1450236 - RNA, 19 nt, Artificial Sequence
  Description of Artificial Sequence: Synthetic oligonucleotide
  Sense strand starting at position 3279 of SEQ ID NO: 1243906
gaaacaguuuccuuagcgu

SEQ ID NO: 1450237 - RNA, 19 nt, Artificial Sequence
  Description of Artificial Sequence: Synthetic oligonucleotide
  Antisense strand to SEQ ID NO: 1450236
acgcuaaggaaacuguuuc

SEQ ID NO: 1450238 - RNA, 19 nt, Artificial Sequence
  Description of Artificial Sequence: Synthetic oligonucleotide
  Sense strand starting at position 3306 of SEQ ID NO: 1243906
gcagaaucccuguggauug

SEQ ID NO: 1450239 - RNA, 19 nt, Artificial Sequence
  Description of Artificial Sequence: Synthetic oligonucleotide
  Antisense strand to SEQ ID NO: 1450238
caauccacagggauucugc

SEQ ID NO: 1450240 - RNA, 19 nt, Artificial Sequence
  Description of Artificial Sequence: Synthetic oligonucleotide
  Sense strand starting at position 3307 of SEQ ID NO: 1243906
cagaaucccuguggauuga

SEQ ID NO: 1450241 - RNA, 19 nt, Artificial Sequence
  Description of Artificial Sequence: Synthetic oligonucleotide
  Antisense strand to SEQ ID NO: 1450240
ucaauccacagggauucug

SEQ ID NO: 1450242 - RNA, 19 nt, Artificial Sequence
  Description of Artificial Sequence: Synthetic oligonucleotide
  Sense strand starting at position 3330 of SEQ ID NO: 1243906
ggaacugagccauguccuu

SEQ ID NO: 1450243 - RNA, 19 nt, Artificial Sequence
  Description of Artificial Sequence: Synthetic oligonucleotide
  Antisense strand to SEQ ID NO: 1450242
aaggacauggcucaguucc

SEQ ID NO: 1450244 - RNA, 19 nt, Artificial Sequence
  Description of Artificial Sequence: Synthetic oligonucleotide
  Sense strand starting at position 3335 of SEQ ID NO: 1243906
ugagccauguccuuuguuu

SEQ ID NO: 1450245 - RNA, 19 nt, Artificial Sequence
  Description of Artificial Sequence: Synthetic oligonucleotide
  Antisense strand to SEQ ID NO: 1450244
aaacaaaggacauggcuca

SEQ ID NO: 1450246 - RNA, 19 nt, Artificial Sequence
  Description of Artificial Sequence: Synthetic oligonucleotide
  Sense strand starting at position 3346 of SEQ ID NO: 1243906
cuuuguuuggucuguggau

SEQ ID NO: 1450247 - RNA, 19 nt, Artificial Sequence
  Description of Artificial Sequence: Synthetic oligonucleotide
  Antisense strand to SEQ ID NO: 1450246
auccacagaccaaacaaag

SEQ ID NO: 1450248 - RNA, 19 nt, Artificial Sequence
  Description of Artificial Sequence: Synthetic oligonucleotide
  Sense strand starting at position 3347 of SEQ ID NO: 1243906
uuuguuuggucuguggauu

SEQ ID NO: 1450249 - RNA, 19 nt, Artificial Sequence
  Description of Artificial Sequence: Synthetic oligonucleotide
  Antisense strand to SEQ ID NO: 1450248
aauccacagaccaaacaaa

SEQ ID NO: 1450250 - RNA, 19 nt, Artificial Sequence
  Description of Artificial Sequence: Synthetic oligonucleotide
  Sense strand starting at position 3348 of SEQ ID NO: 1243906
uuguuuggucuguggauuu

SEQ ID NO: 1450251 - RNA, 19 nt, Artificial Sequence
  Description of Artificial Sequence: Synthetic oligonucleotide
  Antisense strand to SEQ ID NO: 1450250
aaauccacagaccaaacaa

SEQ ID NO: 1450252 - RNA, 19 nt, Artificial Sequence
  Description of Artificial Sequence: Synthetic oligonucleotide
  Sense strand starting at position 3404 of SEQ ID NO: 1243906
ugaguucccucgugagagc

SEQ ID NO: 1450253 - RNA, 19 nt, Artificial Sequence
  Description of Artificial Sequence: Synthetic oligonucleotide
  Antisense strand to SEQ ID NO: 1450252
gcucucacgagggaacuca

SEQ ID NO: 1450254 - RNA, 19 nt, Artificial Sequence
  Description of Artificial Sequence: Synthetic oligonucleotide
  Sense strand starting at position 3606 of SEQ ID NO: 1243906
gggugaggguguucugacu

SEQ ID NO: 1450255 - RNA, 19 nt, Artificial Sequence
  Description of Artificial Sequence: Synthetic oligonucleotide
  Antisense strand to SEQ ID NO: 1450254
agucagaacacccucaccc

SEQ ID NO: 1450256 - RNA, 19 nt, Artificial Sequence
  Description of Artificial Sequence: Synthetic oligonucleotide
  Sense strand starting at position 3612 of SEQ ID NO: 1243906
ggguguucugacugaggga

SEQ ID NO: 1450257 - RNA, 19 nt, Artificial Sequence
  Description of Artificial Sequence: Synthetic oligonucleotide
  Antisense strand to SEQ ID NO: 1450256
ucccucagucagaacaccc

SEQ ID NO: 1450258 - RNA, 19 nt, Artificial Sequence
  Description of Artificial Sequence: Synthetic oligonucleotide
  Sense strand starting at position 3893 of SEQ ID NO: 1243906
cccuuucuugaguggcaca

SEQ ID NO: 1450259 - RNA, 19 nt, Artificial Sequence
  Description of Artificial Sequence: Synthetic oligonucleotide
  Antisense strand to SEQ ID NO: 1450258
ugugccacucaagaaaggg

SEQ ID NO: 1450260 - RNA, 19 nt, Artificial Sequence
  Description of Artificial Sequence: Synthetic oligonucleotide
  Sense strand starting at position 3896 of SEQ ID NO: 1243906
uuucuugaguggcacaaga

SEQ ID NO: 1450261 - RNA, 19 nt, Artificial Sequence
  Description of Artificial Sequence: Synthetic oligonucleotide
  Antisense strand to SEQ ID NO: 1450260
ucuugugccacucaagaaa

SEQ ID NO: 1450262 - RNA, 19 nt, Artificial Sequence
  Description of Artificial Sequence: Synthetic oligonucleotide
  Sense strand starting at position 3925 of SEQ ID NO: 1243906
ggccuccugaguugugcua

SEQ ID NO: 1450263 - RNA, 19 nt, Artificial Sequence
  Description of Artificial Sequence: Synthetic oligonucleotide
  Antisense strand to SEQ ID NO: 1450262
uagcacaacucaggaggcc

SEQ ID NO: 1450264 - RNA, 19 nt, Artificial Sequence
  Description of Artificial Sequence: Synthetic oligonucleotide
  Sense strand starting at position 3936 of SEQ ID NO: 1243906
uugugcuaacgccuguaau

SEQ ID NO: 1450265 - RNA, 19 nt, Artificial Sequence
  Description of Artificial Sequence: Synthetic oligonucleotide
  Antisense strand to SEQ ID NO: 1450264
auuacaggcguuagcacaa

SEQ ID NO: 1450266 - RNA, 19 nt, Artificial Sequence
  Description of Artificial Sequence: Synthetic oligonucleotide
  Sense strand starting at position 3937 of SEQ ID NO: 1243906
ugugcuaacgccuguaauc

SEQ ID NO: 1450267 - RNA, 19 nt, Artificial Sequence
  Description of Artificial Sequence: Synthetic oligonucleotide
  Antisense strand to SEQ ID NO: 1450266
gauuacaggcguuagcaca

SEQ ID NO: 1450268 - RNA, 19 nt, Artificial Sequence
  Description of Artificial Sequence: Synthetic oligonucleotide
  Sense strand starting at position 437 of SEQ ID NO: 1243907
gugccucccuuggcagaua

SEQ ID NO: 1450269 - RNA, 19 nt, Artificial Sequence
  Description of Artificial Sequence: Synthetic oligonucleotide
  Antisense strand to SEQ ID NO: 1450268
uaucugccaagggaggcac

SEQ ID NO: 1450270 - RNA, 19 nt, Artificial Sequence
  Description of Artificial Sequence: Synthetic oligonucleotide
  Sense strand starting at position 652 of SEQ ID NO: 1243907
guguaagagcuucgaagga

SEQ ID NO: 1450271 - RNA, 19 nt, Artificial Sequence
  Description of Artificial Sequence: Synthetic oligonucleotide
  Antisense strand to SEQ ID NO: 1450270
uccuucgaagcucuuacac

SEQ ID NO: 1450272 - RNA, 19 nt, Artificial Sequence
  Description of Artificial Sequence: Synthetic oligonucleotide
  Sense strand starting at position 842 of SEQ ID NO: 1243907
aaauguugcccugaagauc

SEQ ID NO: 1450273 - RNA, 19 nt, Artificial Sequence
  Description of Artificial Sequence: Synthetic oligonucleotide
  Antisense strand to SEQ ID NO: 1450272
gaucuucagggcaacauuu

SEQ ID NO: 1450274 - RNA, 19 nt, Artificial Sequence
  Description of Artificial Sequence: Synthetic oligonucleotide
  Sense strand starting at position 853 of SEQ ID NO: 1243907
ugaagaucggccuggagau

SEQ ID NO: 1450275 - RNA, 19 nt, Artificial Sequence
  Description of Artificial Sequence: Synthetic oligonucleotide
  Antisense strand to SEQ ID NO: 1450274
aucuccaggccgaucuuca

SEQ ID NO: 1450276 - RNA, 19 nt, Artificial Sequence
  Description of Artificial Sequence: Synthetic oligonucleotide
  Sense strand starting at position 854 of SEQ ID NO: 1243907
gaagaucggccuggagauu

SEQ ID NO: 1450277 - RNA, 19 nt, Artificial Sequence
  Description of Artificial Sequence: Synthetic oligonucleotide
  Antisense strand to SEQ ID NO: 1450276
aaucuccaggccgaucuuc

SEQ ID NO: 1450278 - RNA, 19 nt, Artificial Sequence
  Description of Artificial Sequence: Synthetic oligonucleotide
  Sense strand starting at position 1333 of SEQ ID NO: 1243907
gcagcagguucccuugaaa

SEQ ID NO: 1450279 - RNA, 19 nt, Artificial Sequence
  Description of Artificial Sequence: Synthetic oligonucleotide
  Antisense strand to SEQ ID NO: 1450278
uuucaagggaaccugcugc

SEQ ID NO: 1450280 - RNA, 19 nt, Artificial Sequence
  Description of Artificial Sequence: Synthetic oligonucleotide
  Sense strand starting at position 1997 of SEQ ID NO: 1243907
gaaagaauguauucucgcu

SEQ ID NO: 1450281 - RNA, 19 nt, Artificial Sequence
  Description of Artificial Sequence: Synthetic oligonucleotide
  Antisense strand to SEQ ID NO: 1450280
agcgagaauacauucuuuc

SEQ ID NO: 1450282 - RNA, 19 nt, Artificial Sequence
  Description of Artificial Sequence: Synthetic oligonucleotide
  Sense strand starting at position 2003 of SEQ ID NO: 1243907
auguauucucgcuaaauuc

SEQ ID NO: 1450283 - RNA, 19 nt, Artificial Sequence
  Description of Artificial Sequence: Synthetic oligonucleotide
  Antisense strand to SEQ ID NO: 1450282
gaauuuagcgagaauacau

SEQ ID NO: 1450284 - RNA, 19 nt, Artificial Sequence
  Description of Artificial Sequence: Synthetic oligonucleotide
  Sense strand starting at position 2026 of SEQ ID NO: 1243907
uucuaaaggauguguaaga

SEQ ID NO: 1450285 - RNA, 19 nt, Artificial Sequence
  Description of Artificial Sequence: Synthetic oligonucleotide
  Antisense strand to SEQ ID NO: 1450284
ucuuacacauccuuuagaa

SEQ ID NO: 1450286 - RNA, 19 nt, Artificial Sequence
  Description of Artificial Sequence: Synthetic oligonucleotide
  Sense strand starting at position 2027 of SEQ ID NO: 1243907
ucuaaaggauguguaagaa

SEQ ID NO: 1450287 - RNA, 19 nt, Artificial Sequence
  Description of Artificial Sequence: Synthetic oligonucleotide
  Antisense strand to SEQ ID NO: 1450286
uucuuacacauccuuuaga

SEQ ID NO: 1450288 - RNA, 19 nt, Artificial Sequence
  Description of Artificial Sequence: Synthetic oligonucleotide
  Sense strand starting at position 2051 of SEQ ID NO: 1243907
agguaaaggucucgcgaua

SEQ ID NO: 1450289 - RNA, 19 nt, Artificial Sequence
  Description of Artificial Sequence: Synthetic oligonucleotide
  Antisense strand to SEQ ID NO: 1450288
uaucgcgagaccuuuaccu

SEQ ID NO: 1450290 - RNA, 19 nt, Artificial Sequence
  Description of Artificial Sequence: Synthetic oligonucleotide
  Sense strand starting at position 2056 of SEQ ID NO: 1243907
aaggucucgcgauaucuua

SEQ ID NO: 1450291 - RNA, 19 nt, Artificial Sequence
  Description of Artificial Sequence: Synthetic oligonucleotide
  Antisense strand to SEQ ID NO: 1450290
uaagauaucgcgagaccuu

SEQ ID NO: 1450292 - RNA, 19 nt, Artificial Sequence
  Description of Artificial Sequence: Synthetic oligonucleotide
  Sense strand starting at position 2070 of SEQ ID NO: 1243907
ucuuaagacauccggcgua

SEQ ID NO: 1450293 - RNA, 19 nt, Artificial Sequence
  Description of Artificial Sequence: Synthetic oligonucleotide
  Antisense strand to SEQ ID NO: 1450292
uacgccggaugucuuaaga

SEQ ID NO: 1450294 - RNA, 19 nt, Artificial Sequence
  Description of Artificial Sequence: Synthetic oligonucleotide
  Sense strand starting at position 2073 of SEQ ID NO: 1243907
uaagacauccggcguagua

SEQ ID NO: 1450295 - RNA, 19 nt, Artificial Sequence
  Description of Artificial Sequence: Synthetic oligonucleotide
  Antisense strand to SEQ ID NO: 1450294
uacuacgccggaugucuua

SEQ ID NO: 1450296 - RNA, 19 nt, Artificial Sequence
  Description of Artificial Sequence: Synthetic oligonucleotide
  Sense strand starting at position 2123 of SEQ ID NO: 1243907
ggagaagcucgcgagaucu

SEQ ID NO: 1450297 - RNA, 19 nt, Artificial Sequence
  Description of Artificial Sequence: Synthetic oligonucleotide
  Antisense strand to SEQ ID NO: 1450296
agaucucgcgagcuucucc

SEQ ID NO: 1450298 - RNA, 19 nt, Artificial Sequence
  Description of Artificial Sequence: Synthetic oligonucleotide
  Sense strand starting at position 2131 of SEQ ID NO: 1243907
ucgcgagaucugugccguu

SEQ ID NO: 1450299 - RNA, 19 nt, Artificial Sequence
  Description of Artificial Sequence: Synthetic oligonucleotide
  Antisense strand to SEQ ID NO: 1450298
aacggcacagaucucgcga

SEQ ID NO: 1450300 - RNA, 19 nt, Artificial Sequence
  Description of Artificial Sequence: Synthetic oligonucleotide
  Sense strand starting at position 2234 of SEQ ID NO: 1243907
ccugaaaggugcuuaggaa

SEQ ID NO: 1450301 - RNA, 19 nt, Artificial Sequence
  Description of Artificial Sequence: Synthetic oligonucleotide
  Antisense strand to SEQ ID NO: 1450300
uuccuaagcaccuuucagg

SEQ ID NO: 1450302 - RNA, 19 nt, Artificial Sequence
  Description of Artificial Sequence: Synthetic oligonucleotide
  Sense strand starting at position 2518 of SEQ ID NO: 1243907
gcggucugagcgcuuguua

SEQ ID NO: 1450303 - RNA, 19 nt, Artificial Sequence
  Description of Artificial Sequence: Synthetic oligonucleotide
  Antisense strand to SEQ ID NO: 1450302
uaacaagcgcucagaccgc

SEQ ID NO: 1450304 - RNA, 19 nt, Artificial Sequence
  Description of Artificial Sequence: Synthetic oligonucleotide
  Sense strand starting at position 2545 of SEQ ID NO: 1243907
gcaggauucggacggagag

SEQ ID NO: 1450305 - RNA, 19 nt, Artificial Sequence
  Description of Artificial Sequence: Synthetic oligonucleotide
  Antisense strand to SEQ ID NO: 1450304
cucuccguccgaauccugc

SEQ ID NO: 1450306 - RNA, 19 nt, Artificial Sequence
  Description of Artificial Sequence: Synthetic oligonucleotide
  Sense strand starting at position 2619 of SEQ ID NO: 1243907
agacuaugcgcauucgcau

SEQ ID NO: 1450307 - RNA, 19 nt, Artificial Sequence
  Description of Artificial Sequence: Synthetic oligonucleotide
  Antisense strand to SEQ ID NO: 1450306
augcgaaugcgcauagucu

SEQ ID NO: 1450308 - RNA, 19 nt, Artificial Sequence
  Description of Artificial Sequence: Synthetic oligonucleotide
  Sense strand starting at position 2625 of SEQ ID NO: 1243907
ugcgcauucgcaugacaga

SEQ ID NO: 1450309 - RNA, 19 nt, Artificial Sequence
  Description of Artificial Sequence: Synthetic oligonucleotide
  Antisense strand to SEQ ID NO: 1450308
ucugucaugcgaaugcgca

SEQ ID NO: 1450310 - RNA, 19 nt, Artificial Sequence
  Description of Artificial Sequence: Synthetic oligonucleotide
  Sense strand starting at position 2626 of SEQ ID NO: 1243907
gcgcauucgcaugacagau

SEQ ID NO: 1450311 - RNA, 19 nt, Artificial Sequence
  Description of Artificial Sequence: Synthetic oligonucleotide
  Antisense strand to SEQ ID NO: 1450310
aucugucaugcgaaugcgc

SEQ ID NO: 1450312 - RNA, 19 nt, Artificial Sequence
  Description of Artificial Sequence: Synthetic oligonucleotide
  Sense strand starting at position 2680 of SEQ ID NO: 1243907
ccgugacugcaaugucauc

SEQ ID NO: 1450313 - RNA, 19 nt, Artificial Sequence
  Description of Artificial Sequence: Synthetic oligonucleotide
  Antisense strand to SEQ ID NO: 1450312
gaugacauugcagucacgg

SEQ ID NO: 1450314 - RNA, 19 nt, Artificial Sequence
  Description of Artificial Sequence: Synthetic oligonucleotide
  Sense strand starting at position 2762 of SEQ ID NO: 1243907
gguaauguggcggaaccuu

SEQ ID NO: 1450315 - RNA, 19 nt, Artificial Sequence
  Description of Artificial Sequence: Synthetic oligonucleotide
  Antisense strand to SEQ ID NO: 1450314
aagguuccgccacauuacc

SEQ ID NO: 1450316 - RNA, 19 nt, Artificial Sequence
  Description of Artificial Sequence: Synthetic oligonucleotide
  Sense strand starting at position 2858 of SEQ ID NO: 1243907
gacugauucuggccuacuu

SEQ ID NO: 1450317 - RNA, 19 nt, Artificial Sequence
  Description of Artificial Sequence: Synthetic oligonucleotide
  Antisense strand to SEQ ID NO: 1450316
aaguaggccagaaucaguc

SEQ ID NO: 1450318 - RNA, 19 nt, Artificial Sequence
  Description of Artificial Sequence: Synthetic oligonucleotide
  Sense strand starting at position 2868 of SEQ ID NO: 1243907
ggccuacuuuccugaugcu

SEQ ID NO: 1450319 - RNA, 19 nt, Artificial Sequence
  Description of Artificial Sequence: Synthetic oligonucleotide
  Antisense strand to SEQ ID NO: 1450318
agcaucaggaaaguaggcc

SEQ ID NO: 1450320 - RNA, 19 nt, Artificial Sequence
  Description of Artificial Sequence: Synthetic oligonucleotide
  Sense strand starting at position 2877 of SEQ ID NO: 1243907
uccugaugcucugauccuu

SEQ ID NO: 1450321 - RNA, 19 nt, Artificial Sequence
  Description of Artificial Sequence: Synthetic oligonucleotide
  Antisense strand to SEQ ID NO: 1450320
aaggaucagagcaucagga

SEQ ID NO: 1450322 - RNA, 19 nt, Artificial Sequence
  Description of Artificial Sequence: Synthetic oligonucleotide
  Sense strand starting at position 2962 of SEQ ID NO: 1243907
caucguuuccauugaggug

SEQ ID NO: 1450323 - RNA, 19 nt, Artificial Sequence
  Description of Artificial Sequence: Synthetic oligonucleotide
  Antisense strand to SEQ ID NO: 1450322
caccucaauggaaacgaug

SEQ ID NO: 1450324 - RNA, 19 nt, Artificial Sequence
  Description of Artificial Sequence: Synthetic oligonucleotide
  Sense strand starting at position 3005 of SEQ ID NO: 1243907
ccguaucucugaccacgau

SEQ ID NO: 1450325 - RNA, 19 nt, Artificial Sequence
  Description of Artificial Sequence: Synthetic oligonucleotide
  Antisense strand to SEQ ID NO: 1450324
aucguggucagagauacgg

SEQ ID NO: 1450326 - RNA, 19 nt, Artificial Sequence
  Description of Artificial Sequence: Synthetic oligonucleotide
  Sense strand starting at position 3043 of SEQ ID NO: 1243907
ucauuaaacuuaugaccga

SEQ ID NO: 1450327 - RNA, 19 nt, Artificial Sequence
  Description of Artificial Sequence: Synthetic oligonucleotide
  Antisense strand to SEQ ID NO: 1450326
ucggucauaaguuuaauga

SEQ ID NO: 1450328 - RNA, 19 nt, Artificial Sequence
  Description of Artificial Sequence: Synthetic oligonucleotide
  Sense strand starting at position 3189 of SEQ ID NO: 1243907
gccaaagguucucucaagu

SEQ ID NO: 1450329 - RNA, 19 nt, Artificial Sequence
  Description of Artificial Sequence: Synthetic oligonucleotide
  Antisense strand to SEQ ID NO: 1450328
acuugagagaaccuuuggc

SEQ ID NO: 1450330 - RNA, 19 nt, Artificial Sequence
  Description of Artificial Sequence: Synthetic oligonucleotide
  Sense strand starting at position 3317 of SEQ ID NO: 1243907
gugucauccugcuccggaa

SEQ ID NO: 1450331 - RNA, 19 nt, Artificial Sequence
  Description of Artificial Sequence: Synthetic oligonucleotide
  Antisense strand to SEQ ID NO: 1450330
uuccggagcaggaugacac

SEQ ID NO: 1450332 - RNA, 19 nt, Artificial Sequence
  Description of Artificial Sequence: Synthetic oligonucleotide
  Sense strand starting at position 3481 of SEQ ID NO: 1243907
ggaacagaucucugagguc

SEQ ID NO: 1450333 - RNA, 19 nt, Artificial Sequence
  Description of Artificial Sequence: Synthetic oligonucleotide
  Antisense strand to SEQ ID NO: 1450332
gaccucagagaucuguucc

SEQ ID NO: 1450334 - RNA, 19 nt, Artificial Sequence
  Description of Artificial Sequence: Synthetic oligonucleotide
  Sense strand starting at position 3494 of SEQ ID NO: 1243907
gaggucuggccaggaagaa

SEQ ID NO: 1450335 - RNA, 19 nt, Artificial Sequence
  Description of Artificial Sequence: Synthetic oligonucleotide
  Antisense strand to SEQ ID NO: 1450334
uucuuccuggccagaccuc

SEQ ID NO: 1450336 - RNA, 19 nt, Artificial Sequence
  Description of Artificial Sequence: Synthetic oligonucleotide
  Sense strand starting at position 3608 of SEQ ID NO: 1243907
ggugauaguacuugugcca

SEQ ID NO: 1450337 - RNA, 19 nt, Artificial Sequence
  Description of Artificial Sequence: Synthetic oligonucleotide
  Antisense strand to SEQ ID NO: 1450336
uggcacaaguacuaucacc

SEQ ID NO: 1450338 - RNA, 19 nt, Artificial Sequence
  Description of Artificial Sequence: Synthetic oligonucleotide
  Sense strand starting at position 3641 of SEQ ID NO: 1243907
gagcgcguucaguucguua

SEQ ID NO: 1450339 - RNA, 19 nt, Artificial Sequence
  Description of Artificial Sequence: Synthetic oligonucleotide
  Antisense strand to SEQ ID NO: 1450338
uaacgaacugaacgcgcuc

SEQ ID NO: 1450340 - RNA, 19 nt, Artificial Sequence
  Description of Artificial Sequence: Synthetic oligonucleotide
  Sense strand starting at position 3643 of SEQ ID NO: 1243907
gcgcguucaguucguuaaa

SEQ ID NO: 1450341 - RNA, 19 nt, Artificial Sequence
  Description of Artificial Sequence: Synthetic oligonucleotide
  Antisense strand to SEQ ID NO: 1450340
uuuaacgaacugaacgcgc

SEQ ID NO: 1450342 - RNA, 19 nt, Artificial Sequence
  Description of Artificial Sequence: Synthetic oligonucleotide
  Sense strand starting at position 3644 of SEQ ID NO: 1243907
cgcguucaguucguuaaau

SEQ ID NO: 1450343 - RNA, 19 nt, Artificial Sequence
  Description of Artificial Sequence: Synthetic oligonucleotide
  Antisense strand to SEQ ID NO: 1450342
auuuaacgaacugaacgcg

SEQ ID NO: 1450344 - RNA, 19 nt, Artificial Sequence
  Description of Artificial Sequence: Synthetic oligonucleotide
  Sense strand starting at position 3645 of SEQ ID NO: 1243907
gcguucaguucguuaaauc

SEQ ID NO: 1450345 - RNA, 19 nt, Artificial Sequence
  Description of Artificial Sequence: Synthetic oligonucleotide
  Antisense strand to SEQ ID NO: 1450344
gauuuaacgaacugaacgc

SEQ ID NO: 1450346 - RNA, 19 nt, Artificial Sequence
  Description of Artificial Sequence: Synthetic oligonucleotide
  Sense strand starting at position 1 of SEQ ID NO: 1243908
guaaauaaagauggucaau

SEQ ID NO: 1450347 - RNA, 19 nt, Artificial Sequence
  Description of Artificial Sequence: Synthetic oligonucleotide
  Antisense strand to SEQ ID NO: 1450346
auugaccaucuuuauuuac

SEQ ID NO: 1450348 - RNA, 19 nt, Artificial Sequence
  Description of Artificial Sequence: Synthetic oligonucleotide
  Sense strand starting at position 76 of SEQ ID NO: 1243908
acuccagacaucgaagguu

SEQ ID NO: 1450349 - RNA, 19 nt, Artificial Sequence
  Description of Artificial Sequence: Synthetic oligonucleotide
  Antisense strand to SEQ ID NO: 1450348
aaccuucgaugucuggagu

SEQ ID NO: 1450350 - RNA, 19 nt, Artificial Sequence
  Description of Artificial Sequence: Synthetic oligonucleotide
  Sense strand starting at position 429 of SEQ ID NO: 1243908
agccuaguagcugaucuua

SEQ ID NO: 1450351 - RNA, 19 nt, Artificial Sequence
  Description of Artificial Sequence: Synthetic oligonucleotide
  Antisense strand to SEQ ID NO: 1450350
uaagaucagcuacuaggcu

SEQ ID NO: 1450352 - RNA, 19 nt, Artificial Sequence
  Description of Artificial Sequence: Synthetic oligonucleotide
  Sense strand starting at position 847 of SEQ ID NO: 1243908
aguccauauucugucagua

SEQ ID NO: 1450353 - RNA, 19 nt, Artificial Sequence
  Description of Artificial Sequence: Synthetic oligonucleotide
  Antisense strand to SEQ ID NO: 1450352
uacugacagaauauggacu

SEQ ID NO: 1450354 - RNA, 19 nt, Artificial Sequence
  Description of Artificial Sequence: Synthetic oligonucleotide
  Sense strand starting at position 955 of SEQ ID NO: 1243908
uuucuugaggccuaacaua

SEQ ID NO: 1450355 - RNA, 19 nt, Artificial Sequence
  Description of Artificial Sequence: Synthetic oligonucleotide
  Antisense strand to SEQ ID NO: 1450354
uauguuaggccucaagaaa

SEQ ID NO: 1450356 - RNA, 19 nt, Artificial Sequence
  Description of Artificial Sequence: Synthetic oligonucleotide
  Sense strand starting at position 977 of SEQ ID NO: 1243908
acaacuuuggucuacguau

SEQ ID NO: 1450357 - RNA, 19 nt, Artificial Sequence
  Description of Artificial Sequence: Synthetic oligonucleotide
  Antisense strand to SEQ ID NO: 1450356
auacguagaccaaaguugu

SEQ ID NO: 1450358 - RNA, 19 nt, Artificial Sequence
  Description of Artificial Sequence: Synthetic oligonucleotide
  Sense strand starting at position 979 of SEQ ID NO: 1243908
aacuuuggucuacguauca

SEQ ID NO: 1450359 - RNA, 19 nt, Artificial Sequence
  Description of Artificial Sequence: Synthetic oligonucleotide
  Antisense strand to SEQ ID NO: 1450358
ugauacguagaccaaaguu

SEQ ID NO: 1450360 - RNA, 19 nt, Artificial Sequence
  Description of Artificial Sequence: Synthetic oligonucleotide
  Sense strand starting at position 988 of SEQ ID NO: 1243908
cuacguaucaaggacugua

SEQ ID NO: 1450361 - RNA, 19 nt, Artificial Sequence
  Description of Artificial Sequence: Synthetic oligonucleotide
  Antisense strand to SEQ ID NO: 1450360
uacaguccuugauacguag

SEQ ID NO: 1450362 - RNA, 19 nt, Artificial Sequence
  Description of Artificial Sequence: Synthetic oligonucleotide
  Sense strand starting at position 1079 of SEQ ID NO: 1243908
aggaaugacucagaccaaa

SEQ ID NO: 1450363 - RNA, 19 nt, Artificial Sequence
  Description of Artificial Sequence: Synthetic oligonucleotide
  Antisense strand to SEQ ID NO: 1450362
uuuggucugagucauuccu

SEQ ID NO: 1450364 - RNA, 19 nt, Artificial Sequence
  Description of Artificial Sequence: Synthetic oligonucleotide
  Sense strand starting at position 1131 of SEQ ID NO: 1243908
auugaugcaugcucauaaa

SEQ ID NO: 1450365 - RNA, 19 nt, Artificial Sequence
  Description of Artificial Sequence: Synthetic oligonucleotide
  Antisense strand to SEQ ID NO: 1450364
uuuaugagcaugcaucaau

SEQ ID NO: 1450366 - RNA, 19 nt, Artificial Sequence
  Description of Artificial Sequence: Synthetic oligonucleotide
  Sense strand starting at position 1141 of SEQ ID NO: 1243908
gcucauaaaccauggauga

SEQ ID NO: 1450367 - RNA, 19 nt, Artificial Sequence
  Description of Artificial Sequence: Synthetic oligonucleotide
  Antisense strand to SEQ ID NO: 1450366
ucauccaugguuuaugagc

SEQ ID NO: 1450368 - RNA, 19 nt, Artificial Sequence
  Description of Artificial Sequence: Synthetic oligonucleotide
  Sense strand starting at position 1194 of SEQ ID NO: 1243908
gaaagauuauuugggacca

SEQ ID NO: 1450369 - RNA, 19 nt, Artificial Sequence
  Description of Artificial Sequence: Synthetic oligonucleotide
  Antisense strand to SEQ ID NO: 1450368
uggucccaaauaaucuuuc

SEQ ID NO: 1450370 - RNA, 19 nt, Artificial Sequence
  Description of Artificial Sequence: Synthetic oligonucleotide
  Sense strand starting at position 1372 of SEQ ID NO: 1243908
agacauguuucuccaaugu

SEQ ID NO: 1450371 - RNA, 19 nt, Artificial Sequence
  Description of Artificial Sequence: Synthetic oligonucleotide
  Antisense strand to SEQ ID NO: 1450370
acauuggagaaacaugucu

SEQ ID NO: 1450372 - RNA, 19 nt, Artificial Sequence
  Description of Artificial Sequence: Synthetic oligonucleotide
  Sense strand starting at position 1376 of SEQ ID NO: 1243908
auguuucuccaauguaagu

SEQ ID NO: 1450373 - RNA, 19 nt, Artificial Sequence
  Description of Artificial Sequence: Synthetic oligonucleotide
  Antisense strand to SEQ ID NO: 1450372
acuuacauuggagaaacau

SEQ ID NO: 1450374 - RNA, 19 nt, Artificial Sequence
  Description of Artificial Sequence: Synthetic oligonucleotide
  Sense strand starting at position 1597 of SEQ ID NO: 1243908
gugagcagccucgcugaua

SEQ ID NO: 1450375 - RNA, 19 nt, Artificial Sequence
  Description of Artificial Sequence: Synthetic oligonucleotide
  Antisense strand to SEQ ID NO: 1450374
uaucagcgaggcugcucac

SEQ ID NO: 1450376 - RNA, 19 nt, Artificial Sequence
  Description of Artificial Sequence: Synthetic oligonucleotide
  Sense strand starting at position 2463 of SEQ ID NO: 1243908
agacucguccucugggaaa

SEQ ID NO: 1450377 - RNA, 19 nt, Artificial Sequence
  Description of Artificial Sequence: Synthetic oligonucleotide
  Antisense strand to SEQ ID NO: 1450376
uuucccagaggacgagucu

SEQ ID NO: 1450378 - RNA, 19 nt, Artificial Sequence
  Description of Artificial Sequence: Synthetic oligonucleotide
  Sense strand starting at position 2465 of SEQ ID NO: 1243908
acucguccucugggaaauc

SEQ ID NO: 1450379 - RNA, 19 nt, Artificial Sequence
  Description of Artificial Sequence: Synthetic oligonucleotide
  Antisense strand to SEQ ID NO: 1450378
gauuucccagaggacgagu

SEQ ID NO: 1450380 - RNA, 19 nt, Artificial Sequence
  Description of Artificial Sequence: Synthetic oligonucleotide
  Sense strand starting at position 2513 of SEQ ID NO: 1243908
cgccuagcugucgugaguu

SEQ ID NO: 1450381 - RNA, 19 nt, Artificial Sequence
  Description of Artificial Sequence: Synthetic oligonucleotide
  Antisense strand to SEQ ID NO: 1450380
aacucacgacagcuaggcg

SEQ ID NO: 1450382 - RNA, 19 nt, Artificial Sequence
  Description of Artificial Sequence: Synthetic oligonucleotide
  Sense strand starting at position 2516 of SEQ ID NO: 1243908
cuagcugucgugaguuggu

SEQ ID NO: 1450383 - RNA, 19 nt, Artificial Sequence
  Description of Artificial Sequence: Synthetic oligonucleotide
  Antisense strand to SEQ ID NO: 1450382
accaacucacgacagcuag

SEQ ID NO: 1450384 - RNA, 19 nt, Artificial Sequence
  Description of Artificial Sequence: Synthetic oligonucleotide
  Sense strand starting at position 2963 of SEQ ID NO: 1243908
guuguuucgcuggcuggaa

SEQ ID NO: 1450385 - RNA, 19 nt, Artificial Sequence
  Description of Artificial Sequence: Synthetic oligonucleotide
  Antisense strand to SEQ ID NO: 1450384
uuccagccagcgaaacaac

SEQ ID NO: 1450386 - RNA, 19 nt, Artificial Sequence
  Description of Artificial Sequence: Synthetic oligonucleotide
  Sense strand starting at position 3227 of SEQ ID NO: 1243908
ucuuuaaccuauguuagag

SEQ ID NO: 1450387 - RNA, 19 nt, Artificial Sequence
  Description of Artificial Sequence: Synthetic oligonucleotide
  Antisense strand to SEQ ID NO: 1450386
cucuaacauagguuaaaga

SEQ ID NO: 1450388 - RNA, 19 nt, Artificial Sequence
  Description of Artificial Sequence: Synthetic oligonucleotide
  Sense strand starting at position 3237 of SEQ ID NO: 1243908
auguuagaggucuggaaag

SEQ ID NO: 1450389 - RNA, 19 nt, Artificial Sequence
  Description of Artificial Sequence: Synthetic oligonucleotide
  Antisense strand to SEQ ID NO: 1450388
cuuuccagaccucuaacau

SEQ ID NO: 1450390 - RNA, 19 nt, Artificial Sequence
  Description of Artificial Sequence: Synthetic oligonucleotide
  Sense strand starting at position 3239 of SEQ ID NO: 1243908
guuagaggucuggaaaguc

SEQ ID NO: 1450391 - RNA, 19 nt, Artificial Sequence
  Description of Artificial Sequence: Synthetic oligonucleotide
  Antisense strand to SEQ ID NO: 1450390
gacuuuccagaccucuaac

SEQ ID NO: 1450392 - RNA, 19 nt, Artificial Sequence
  Description of Artificial Sequence: Synthetic oligonucleotide
  Sense strand starting at position 3315 of SEQ ID NO: 1243908
uguuguaaugcagaccuuu

SEQ ID NO: 1450393 - RNA, 19 nt, Artificial Sequence
  Description of Artificial Sequence: Synthetic oligonucleotide
  Antisense strand to SEQ ID NO: 1450392
aaaggucugcauuacaaca

SEQ ID NO: 1450394 - RNA, 19 nt, Artificial Sequence
  Description of Artificial Sequence: Synthetic oligonucleotide
  Sense strand starting at position 3365 of SEQ ID NO: 1243908
ucuaucagauucucgaaca

SEQ ID NO: 1450395 - RNA, 19 nt, Artificial Sequence
  Description of Artificial Sequence: Synthetic oligonucleotide
  Antisense strand to SEQ ID NO: 1450394
uguucgagaaucugauaga

SEQ ID NO: 1450396 - RNA, 19 nt, Artificial Sequence
  Description of Artificial Sequence: Synthetic oligonucleotide
  Sense strand starting at position 3491 of SEQ ID NO: 1243908
gccgaauaaguguggaaag

SEQ ID NO: 1450397 - RNA, 19 nt, Artificial Sequence
  Description of Artificial Sequence: Synthetic oligonucleotide
  Antisense strand to SEQ ID NO: 1450396
cuuuccacacuuauucggc

SEQ ID NO: 1450398 - RNA, 19 nt, Artificial Sequence
  Description of Artificial Sequence: Synthetic oligonucleotide
  Sense strand starting at position 3583 of SEQ ID NO: 1243908
uacauacugguuuguagau

SEQ ID NO: 1450399 - RNA, 19 nt, Artificial Sequence
  Description of Artificial Sequence: Synthetic oligonucleotide
  Antisense strand to SEQ ID NO: 1450398
aucuacaaaccaguaugua

SEQ ID NO: 1450400 - RNA, 19 nt, Artificial Sequence
  Description of Artificial Sequence: Synthetic oligonucleotide
  Sense strand starting at position 3592 of SEQ ID NO: 1243908
guuuguagauccuuaaaga

SEQ ID NO: 1450401 - RNA, 19 nt, Artificial Sequence
  Description of Artificial Sequence: Synthetic oligonucleotide
  Antisense strand to SEQ ID NO: 1450400
ucuuuaaggaucuacaaac

SEQ ID NO: 1450402 - RNA, 19 nt, Artificial Sequence
  Description of Artificial Sequence: Synthetic oligonucleotide
  Sense strand starting at position 3647 of SEQ ID NO: 1243908
cgaaacugauaggcaaaua

SEQ ID NO: 1450403 - RNA, 19 nt, Artificial Sequence
  Description of Artificial Sequence: Synthetic oligonucleotide
  Antisense strand to SEQ ID NO: 1450402
uauuugccuaucaguuucg

SEQ ID NO: 1450404 - RNA, 19 nt, Artificial Sequence
  Description of Artificial Sequence: Synthetic oligonucleotide
  Sense strand starting at position 3663 of SEQ ID NO: 1243908
auaccagguuuccugugaa

SEQ ID NO: 1450405 - RNA, 19 nt, Artificial Sequence
  Description of Artificial Sequence: Synthetic oligonucleotide
  Antisense strand to SEQ ID NO: 1450404
uucacaggaaaccugguau

SEQ ID NO: 1450406 - RNA, 19 nt, Artificial Sequence
  Description of Artificial Sequence: Synthetic oligonucleotide
  Sense strand starting at position 3666 of SEQ ID NO: 1243908
ccagguuuccugugaauac

SEQ ID NO: 1450407 - RNA, 19 nt, Artificial Sequence
  Description of Artificial Sequence: Synthetic oligonucleotide
  Antisense strand to SEQ ID NO: 1450406
guauucacaggaaaccugg

SEQ ID NO: 1450408 - RNA, 19 nt, Artificial Sequence
  Description of Artificial Sequence: Synthetic oligonucleotide
  Sense strand starting at position 3673 of SEQ ID NO: 1243908
uccugugaauacuuguaau

SEQ ID NO: 1450409 - RNA, 19 nt, Artificial Sequence
  Description of Artificial Sequence: Synthetic oligonucleotide
  Antisense strand to SEQ ID NO: 1450408
auuacaaguauucacagga

SEQ ID NO: 1450410 - RNA, 19 nt, Artificial Sequence
  Description of Artificial Sequence: Synthetic oligonucleotide
  Sense strand starting at position 3714 of SEQ ID NO: 1243908
ccaagaucaugucugcuaa

SEQ ID NO: 1450411 - RNA, 19 nt, Artificial Sequence
  Description of Artificial Sequence: Synthetic oligonucleotide
  Antisense strand to SEQ ID NO: 1450410
uuagcagacaugaucuugg

SEQ ID NO: 1450412 - RNA, 19 nt, Artificial Sequence
  Description of Artificial Sequence: Synthetic oligonucleotide
  Sense strand starting at position 3715 of SEQ ID NO: 1243908
caagaucaugucugcuaag

SEQ ID NO: 1450413 - RNA, 19 nt, Artificial Sequence
  Description of Artificial Sequence: Synthetic oligonucleotide
  Antisense strand to SEQ ID NO: 1450412
cuuagcagacaugaucuug

SEQ ID NO: 1450414 - RNA, 19 nt, Artificial Sequence
  Description of Artificial Sequence: Synthetic oligonucleotide
  Sense strand starting at position 3716 of SEQ ID NO: 1243908
aagaucaugucugcuaagu

SEQ ID NO: 1450415 - RNA, 19 nt, Artificial Sequence
  Description of Artificial Sequence: Synthetic oligonucleotide
  Antisense strand to SEQ ID NO: 1450414
acuuagcagacaugaucuu

SEQ ID NO: 1450416 - RNA, 19 nt, Artificial Sequence
  Description of Artificial Sequence: Synthetic oligonucleotide
  Sense strand starting at position 3725 of SEQ ID NO: 1243908
ucugcuaagucauuaagag

SEQ ID NO: 1450417 - RNA, 19 nt, Artificial Sequence
  Description of Artificial Sequence: Synthetic oligonucleotide
  Antisense strand to SEQ ID NO: 1450416
cucuuaaugacuuagcaga

SEQ ID NO: 1450418 - RNA, 19 nt, Artificial Sequence
  Description of Artificial Sequence: Synthetic oligonucleotide
  Sense strand starting at position 3726 of SEQ ID NO: 1243908
cugcuaagucauuaagaga

SEQ ID NO: 1450419 - RNA, 19 nt, Artificial Sequence
  Description of Artificial Sequence: Synthetic oligonucleotide
  Antisense strand to SEQ ID NO: 1450418
ucucuuaaugacuuagcag

SEQ ID NO: 1450420 - RNA, 19 nt, Artificial Sequence
  Description of Artificial Sequence: Synthetic oligonucleotide
  Sense strand starting at position 3837 of SEQ ID NO: 1243908
aggguuacccagugaauca

SEQ ID NO: 1450421 - RNA, 19 nt, Artificial Sequence
  Description of Artificial Sequence: Synthetic oligonucleotide
  Antisense strand to SEQ ID NO: 1450420
ugauucacuggguaacccu

SEQ ID NO: 1450422 - RNA, 19 nt, Artificial Sequence
  Description of Artificial Sequence: Synthetic oligonucleotide
  Sense strand starting at position 3838 of SEQ ID NO: 1243908
ggguuacccagugaaucau

SEQ ID NO: 1450423 - RNA, 19 nt, Artificial Sequence
  Description of Artificial Sequence: Synthetic oligonucleotide
  Antisense strand to SEQ ID NO: 1450422
augauucacuggguaaccc

SEQ ID NO: 1450424 - RNA, 19 nt, Artificial Sequence
  Description of Artificial Sequence: Synthetic oligonucleotide
  Sense strand starting at position 3844 of SEQ ID NO: 1243908
cccagugaaucauuaguaa

SEQ ID NO: 1450425 - RNA, 19 nt, Artificial Sequence
  Description of Artificial Sequence: Synthetic oligonucleotide
  Antisense strand to SEQ ID NO: 1450424
uuacuaaugauucacuggg

SEQ ID NO: 1450426 - RNA, 19 nt, Artificial Sequence
  Description of Artificial Sequence: Synthetic oligonucleotide
  Sense strand starting at position 502 of SEQ ID NO: 1243909
uuucuugaggccuaacaua

SEQ ID NO: 1450427 - RNA, 19 nt, Artificial Sequence
  Description of Artificial Sequence: Synthetic oligonucleotide
  Antisense strand to SEQ ID NO: 1450426
uauguuaggccucaagaaa

SEQ ID NO: 1450428 - RNA, 19 nt, Artificial Sequence
  Description of Artificial Sequence: Synthetic oligonucleotide
  Sense strand starting at position 524 of SEQ ID NO: 1243909
acaacuuuggucuacguau

SEQ ID NO: 1450429 - RNA, 19 nt, Artificial Sequence
  Description of Artificial Sequence: Synthetic oligonucleotide
  Antisense strand to SEQ ID NO: 1450428
auacguagaccaaaguugu

SEQ ID NO: 1450430 - RNA, 19 nt, Artificial Sequence
  Description of Artificial Sequence: Synthetic oligonucleotide
  Sense strand starting at position 535 of SEQ ID NO: 1243909
cuacguaucaaggacugua

SEQ ID NO: 1450431 - RNA, 19 nt, Artificial Sequence
  Description of Artificial Sequence: Synthetic oligonucleotide
  Antisense strand to SEQ ID NO: 1450430
uacaguccuugauacguag

SEQ ID NO: 1450432 - RNA, 19 nt, Artificial Sequence
  Description of Artificial Sequence: Synthetic oligonucleotide
  Sense strand starting at position 626 of SEQ ID NO: 1243909
aggaaugacucagaccaaa

SEQ ID NO: 1450433 - RNA, 19 nt, Artificial Sequence
  Description of Artificial Sequence: Synthetic oligonucleotide
  Antisense strand to SEQ ID NO: 1450432
uuuggucugagucauuccu

SEQ ID NO: 1450434 - RNA, 19 nt, Artificial Sequence
  Description of Artificial Sequence: Synthetic oligonucleotide
  Sense strand starting at position 678 of SEQ ID NO: 1243909
auugaugcaugcucauaaa

SEQ ID NO: 1450435 - RNA, 19 nt, Artificial Sequence
  Description of Artificial Sequence: Synthetic oligonucleotide
  Antisense strand to SEQ ID NO: 1450434
uuuaugagcaugcaucaau

SEQ ID NO: 1450436 - RNA, 19 nt, Artificial Sequence
  Description of Artificial Sequence: Synthetic oligonucleotide
  Sense strand starting at position 688 of SEQ ID NO: 1243909
gcucauaaaccauggauga

SEQ ID NO: 1450437 - RNA, 19 nt, Artificial Sequence
  Description of Artificial Sequence: Synthetic oligonucleotide
  Antisense strand to SEQ ID NO: 1450436
ucauccaugguuuaugagc

SEQ ID NO: 1450438 - RNA, 19 nt, Artificial Sequence
  Description of Artificial Sequence: Synthetic oligonucleotide
  Sense strand starting at position 741 of SEQ ID NO: 1243909
gaaagauuauuugggacca

SEQ ID NO: 1450439 - RNA, 19 nt, Artificial Sequence
  Description of Artificial Sequence: Synthetic oligonucleotide
  Antisense strand to SEQ ID NO: 1450438
uggucccaaauaaucuuuc

SEQ ID NO: 1450440 - RNA, 19 nt, Artificial Sequence
  Description of Artificial Sequence: Synthetic oligonucleotide
  Sense strand starting at position 919 of SEQ ID NO: 1243909
agacauguuucuccaaugu

SEQ ID NO: 1450441 - RNA, 19 nt, Artificial Sequence
  Description of Artificial Sequence: Synthetic oligonucleotide
  Antisense strand to SEQ ID NO: 1450440
acauuggagaaacaugucu

SEQ ID NO: 1450442 - RNA, 19 nt, Artificial Sequence
  Description of Artificial Sequence: Synthetic oligonucleotide
  Sense strand starting at position 1144 of SEQ ID NO: 1243909
gugagcagccucgcugaua

SEQ ID NO: 1450443 - RNA, 19 nt, Artificial Sequence
  Description of Artificial Sequence: Synthetic oligonucleotide
  Antisense strand to SEQ ID NO: 1450442
uaucagcgaggcugcucac

SEQ ID NO: 1450444 - RNA, 19 nt, Artificial Sequence
  Description of Artificial Sequence: Synthetic oligonucleotide
  Sense strand starting at position 2010 of SEQ ID NO: 1243909
agacucguccucugggaaa

SEQ ID NO: 1450445 - RNA, 19 nt, Artificial Sequence
  Description of Artificial Sequence: Synthetic oligonucleotide
  Antisense strand to SEQ ID NO: 1450444
uuucccagaggacgagucu

SEQ ID NO: 1450446 - RNA, 19 nt, Artificial Sequence
  Description of Artificial Sequence: Synthetic oligonucleotide
  Sense strand starting at position 2012 of SEQ ID NO: 1243909
acucguccucugggaaauc

SEQ ID NO: 1450447 - RNA, 19 nt, Artificial Sequence
  Description of Artificial Sequence: Synthetic oligonucleotide
  Antisense strand to SEQ ID NO: 1450446
gauuucccagaggacgagu

SEQ ID NO: 1450448 - RNA, 19 nt, Artificial Sequence
  Description of Artificial Sequence: Synthetic oligonucleotide
  Sense strand starting at position 2060 of SEQ ID NO: 1243909
cgccuagcugucgugaguu

SEQ ID NO: 1450449 - RNA, 19 nt, Artificial Sequence
  Description of Artificial Sequence: Synthetic oligonucleotide
  Antisense strand to SEQ ID NO: 1450448
aacucacgacagcuaggcg

SEQ ID NO: 1450450 - RNA, 19 nt, Artificial Sequence
  Description of Artificial Sequence: Synthetic oligonucleotide
  Sense strand starting at position 2063 of SEQ ID NO: 1243909
cuagcugucgugaguuggu

SEQ ID NO: 1450451 - RNA, 19 nt, Artificial Sequence
  Description of Artificial Sequence: Synthetic oligonucleotide
  Antisense strand to SEQ ID NO: 1450450
accaacucacgacagcuag

SEQ ID NO: 1450452 - RNA, 19 nt, Artificial Sequence
  Description of Artificial Sequence: Synthetic oligonucleotide
  Sense strand starting at position 2510 of SEQ ID NO: 1243909
guuguuucgcuggcuggaa

SEQ ID NO: 1450453 - RNA, 19 nt, Artificial Sequence
  Description of Artificial Sequence: Synthetic oligonucleotide
  Antisense strand to SEQ ID NO: 1450452
uuccagccagcgaaacaac

SEQ ID NO: 1450454 - RNA, 19 nt, Artificial Sequence
  Description of Artificial Sequence: Synthetic oligonucleotide
  Sense strand starting at position 2774 of SEQ ID NO: 1243909
ucuuuaaccuauguuagag

SEQ ID NO: 1450455 - RNA, 19 nt, Artificial Sequence
  Description of Artificial Sequence: Synthetic oligonucleotide
  Antisense strand to SEQ ID NO: 1450454
cucuaacauagguuaaaga

SEQ ID NO: 1450456 - RNA, 19 nt, Artificial Sequence
  Description of Artificial Sequence: Synthetic oligonucleotide
  Sense strand starting at position 2784 of SEQ ID NO: 1243909
auguuagaggucuggaaag

SEQ ID NO: 1450457 - RNA, 19 nt, Artificial Sequence
  Description of Artificial Sequence: Synthetic oligonucleotide
  Antisense strand to SEQ ID NO: 1450456
cuuuccagaccucuaacau

SEQ ID NO: 1450458 - RNA, 19 nt, Artificial Sequence
  Description of Artificial Sequence: Synthetic oligonucleotide
  Sense strand starting at position 2786 of SEQ ID NO: 1243909
guuagaggucuggaaaguc

SEQ ID NO: 1450459 - RNA, 19 nt, Artificial Sequence
  Description of Artificial Sequence: Synthetic oligonucleotide
  Antisense strand to SEQ ID NO: 1450458
gacuuuccagaccucuaac

SEQ ID NO: 1450460 - RNA, 19 nt, Artificial Sequence
  Description of Artificial Sequence: Synthetic oligonucleotide
  Sense strand starting at position 2862 of SEQ ID NO: 1243909
uguuguaaugcagaccuuu

SEQ ID NO: 1450461 - RNA, 19 nt, Artificial Sequence
  Description of Artificial Sequence: Synthetic oligonucleotide
  Antisense strand to SEQ ID NO: 1450460
aaaggucugcauuacaaca

SEQ ID NO: 1450462 - RNA, 19 nt, Artificial Sequence
  Description of Artificial Sequence: Synthetic oligonucleotide
  Sense strand starting at position 2912 of SEQ ID NO: 1243909
ucuaucagauucucgaaca

SEQ ID NO: 1450463 - RNA, 19 nt, Artificial Sequence
  Description of Artificial Sequence: Synthetic oligonucleotide
  Antisense strand to SEQ ID NO: 1450462
uguucgagaaucugauaga

SEQ ID NO: 1450464 - RNA, 19 nt, Artificial Sequence
  Description of Artificial Sequence: Synthetic oligonucleotide
  Sense strand starting at position 3038 of SEQ ID NO: 1243909
gccgaauaaguguggaaag

SEQ ID NO: 1450465 - RNA, 19 nt, Artificial Sequence
  Description of Artificial Sequence: Synthetic oligonucleotide
  Antisense strand to SEQ ID NO: 1450464
cuuuccacacuuauucggc

SEQ ID NO: 1450466 - RNA, 19 nt, Artificial Sequence
  Description of Artificial Sequence: Synthetic oligonucleotide
  Sense strand starting at position 3130 of SEQ ID NO: 1243909
uacauacugguuuguagau

SEQ ID NO: 1450467 - RNA, 19 nt, Artificial Sequence
  Description of Artificial Sequence: Synthetic oligonucleotide
  Antisense strand to SEQ ID NO: 1450466
aucuacaaaccaguaugua

SEQ ID NO: 1450468 - RNA, 19 nt, Artificial Sequence
  Description of Artificial Sequence: Synthetic oligonucleotide
  Sense strand starting at position 3139 of SEQ ID NO: 1243909
guuuguagauccuuaaaga

SEQ ID NO: 1450469 - RNA, 19 nt, Artificial Sequence
  Description of Artificial Sequence: Synthetic oligonucleotide
  Antisense strand to SEQ ID NO: 1450468
ucuuuaaggaucuacaaac

SEQ ID NO: 1450470 - RNA, 19 nt, Artificial Sequence
  Description of Artificial Sequence: Synthetic oligonucleotide
  Sense strand starting at position 3194 of SEQ ID NO: 1243909
cgaaacugauaggcaaaua

SEQ ID NO: 1450471 - RNA, 19 nt, Artificial Sequence
  Description of Artificial Sequence: Synthetic oligonucleotide
  Antisense strand to SEQ ID NO: 1450470
uauuugccuaucaguuucg

SEQ ID NO: 1450472 - RNA, 19 nt, Artificial Sequence
  Description of Artificial Sequence: Synthetic oligonucleotide
  Sense strand starting at position 3210 of SEQ ID NO: 1243909
auaccagguuuccugugaa

SEQ ID NO: 1450473 - RNA, 19 nt, Artificial Sequence
  Description of Artificial Sequence: Synthetic oligonucleotide
  Antisense strand to SEQ ID NO: 1450472
uucacaggaaaccugguau

SEQ ID NO: 1450474 - RNA, 19 nt, Artificial Sequence
  Description of Artificial Sequence: Synthetic oligonucleotide
  Sense strand starting at position 3213 of SEQ ID NO: 1243909
ccagguuuccugugaauac

SEQ ID NO: 1450475 - RNA, 19 nt, Artificial Sequence
  Description of Artificial Sequence: Synthetic oligonucleotide
  Antisense strand to SEQ ID NO: 1450474
guauucacaggaaaccugg

SEQ ID NO: 1450476 - RNA, 19 nt, Artificial Sequence
  Description of Artificial Sequence: Synthetic oligonucleotide
  Sense strand starting at position 3220 of SEQ ID NO: 1243909
uccugugaauacuuguaau

SEQ ID NO: 1450477 - RNA, 19 nt, Artificial Sequence
  Description of Artificial Sequence: Synthetic oligonucleotide
  Antisense strand to SEQ ID NO: 1450476
auuacaaguauucacagga

SEQ ID NO: 1450478 - RNA, 19 nt, Artificial Sequence
  Description of Artificial Sequence: Synthetic oligonucleotide
  Sense strand starting at position 3261 of SEQ ID NO: 1243909
ccaagaucaugucugcuaa

SEQ ID NO: 1450479 - RNA, 19 nt, Artificial Sequence
  Description of Artificial Sequence: Synthetic oligonucleotide
  Antisense strand to SEQ ID NO: 1450478
uuagcagacaugaucuugg

SEQ ID NO: 1450480 - RNA, 19 nt, Artificial Sequence
  Description of Artificial Sequence: Synthetic oligonucleotide
  Sense strand starting at position 3262 of SEQ ID NO: 1243909
caagaucaugucugcuaag

SEQ ID NO: 1450481 - RNA, 19 nt, Artificial Sequence
  Description of Artificial Sequence: Synthetic oligonucleotide
  Antisense strand to SEQ ID NO: 1450480
cuuagcagacaugaucuug

SEQ ID NO: 1450482 - RNA, 19 nt, Artificial Sequence
  Description of Artificial Sequence: Synthetic oligonucleotide
  Sense strand starting at position 3263 of SEQ ID NO: 1243909
aagaucaugucugcuaagu

SEQ ID NO: 1450483 - RNA, 19 nt, Artificial Sequence
  Description of Artificial Sequence: Synthetic oligonucleotide
  Antisense strand to SEQ ID NO: 1450482
acuuagcagacaugaucuu

SEQ ID NO: 1450484 - RNA, 19 nt, Artificial Sequence
  Description of Artificial Sequence: Synthetic oligonucleotide
  Sense strand starting at position 3272 of SEQ ID NO: 1243909
ucugcuaagucauuaagag

SEQ ID NO: 1450485 - RNA, 19 nt, Artificial Sequence
  Description of Artificial Sequence: Synthetic oligonucleotide
  Antisense strand to SEQ ID NO: 1450484
cucuuaaugacuuagcaga

SEQ ID NO: 1450486 - RNA, 19 nt, Artificial Sequence
  Description of Artificial Sequence: Synthetic oligonucleotide
  Sense strand starting at position 3273 of SEQ ID NO: 1243909
cugcuaagucauuaagaga

SEQ ID NO: 1450487 - RNA, 19 nt, Artificial Sequence
  Description of Artificial Sequence: Synthetic oligonucleotide
  Antisense strand to SEQ ID NO: 1450486
ucucuuaaugacuuagcag

SEQ ID NO: 1450488 - RNA, 19 nt, Artificial Sequence
  Description of Artificial Sequence: Synthetic oligonucleotide
  Sense strand starting at position 3384 of SEQ ID NO: 1243909
aggguuacccagugaauca

SEQ ID NO: 1450489 - RNA, 19 nt, Artificial Sequence
  Description of Artificial Sequence: Synthetic oligonucleotide
  Antisense strand to SEQ ID NO: 1450488
ugauucacuggguaacccu

SEQ ID NO: 1450490 - RNA, 19 nt, Artificial Sequence
  Description of Artificial Sequence: Synthetic oligonucleotide
  Sense strand starting at position 3385 of SEQ ID NO: 1243909
ggguuacccagugaaucau

SEQ ID NO: 1450491 - RNA, 19 nt, Artificial Sequence
  Description of Artificial Sequence: Synthetic oligonucleotide
  Antisense strand to SEQ ID NO: 1450490
augauucacuggguaaccc

SEQ ID NO: 1450492 - RNA, 19 nt, Artificial Sequence
  Description of Artificial Sequence: Synthetic oligonucleotide
  Sense strand starting at position 3391 of SEQ ID NO: 1243909
cccagugaaucauuaguaa

SEQ ID NO: 1450493 - RNA, 19 nt, Artificial Sequence
  Description of Artificial Sequence: Synthetic oligonucleotide
  Antisense strand to SEQ ID NO: 1450492
uuacuaaugauucacuggg

SEQ ID NO: 1450494 - RNA, 19 nt, Artificial Sequence
  Description of Artificial Sequence: Synthetic oligonucleotide
  Sense strand starting at position 3537 of SEQ ID NO: 1243909
ugguuuacuccacacagca

SEQ ID NO: 1450495 - RNA, 19 nt, Artificial Sequence
  Description of Artificial Sequence: Synthetic oligonucleotide
  Antisense strand to SEQ ID NO: 1450494
ugcuguguggaguaaacca

SEQ ID NO: 1450496 - RNA, 19 nt, Artificial Sequence
  Description of Artificial Sequence: Synthetic oligonucleotide
  Sense strand starting at position 3726 of SEQ ID NO: 1243909
gaguuagccagucauguag

SEQ ID NO: 1450497 - RNA, 19 nt, Artificial Sequence
  Description of Artificial Sequence: Synthetic oligonucleotide
  Antisense strand to SEQ ID NO: 1450496
cuacaugacuggcuaacuc

SEQ ID NO: 1450498 - RNA, 19 nt, Artificial Sequence
  Description of Artificial Sequence: Synthetic oligonucleotide
  Sense strand starting at position 3732 of SEQ ID NO: 1243909
gccagucauguagaaucuu

SEQ ID NO: 1450499 - RNA, 19 nt, Artificial Sequence
  Description of Artificial Sequence: Synthetic oligonucleotide
  Antisense strand to SEQ ID NO: 1450498
aagauucuacaugacuggc

SEQ ID NO: 1450500 - RNA, 19 nt, Artificial Sequence
  Description of Artificial Sequence: Synthetic oligonucleotide
  Sense strand starting at position 3758 of SEQ ID NO: 1243909
cacgaaggguguguacaua

SEQ ID NO: 1450501 - RNA, 19 nt, Artificial Sequence
  Description of Artificial Sequence: Synthetic oligonucleotide
  Antisense strand to SEQ ID NO: 1450500
uauguacacacccuucgug

SEQ ID NO: 1450502 - RNA, 19 nt, Artificial Sequence
  Description of Artificial Sequence: Synthetic oligonucleotide
  Sense strand starting at position 3854 of SEQ ID NO: 1243909
uuaagaaugucuuccugua

SEQ ID NO: 1450503 - RNA, 19 nt, Artificial Sequence
  Description of Artificial Sequence: Synthetic oligonucleotide
  Antisense strand to SEQ ID NO: 1450502
uacaggaagacauucuuaa

SEQ ID NO: 1450504 - RNA, 19 nt, Artificial Sequence
  Description of Artificial Sequence: Synthetic oligonucleotide
  Sense strand starting at position 3867 of SEQ ID NO: 1243909
ccuguacauggccagaauu

SEQ ID NO: 1450505 - RNA, 19 nt, Artificial Sequence
  Description of Artificial Sequence: Synthetic oligonucleotide
  Antisense strand to SEQ ID NO: 1450504
aauucuggccauguacagg

SEQ ID NO: 1450506 - RNA, 19 nt, Artificial Sequence
  Description of Artificial Sequence: Synthetic oligonucleotide
  Sense strand starting at position 16 of SEQ ID NO: 1243910
gacccaugagugugccaga

SEQ ID NO: 1450507 - RNA, 19 nt, Artificial Sequence
  Description of Artificial Sequence: Synthetic oligonucleotide
  Antisense strand to SEQ ID NO: 1450506
ucuggcacacucauggguc

SEQ ID NO: 1450508 - RNA, 19 nt, Artificial Sequence
  Description of Artificial Sequence: Synthetic oligonucleotide
  Sense strand starting at position 21 of SEQ ID NO: 1243910
augagugugccagacgcau

SEQ ID NO: 1450509 - RNA, 19 nt, Artificial Sequence
  Description of Artificial Sequence: Synthetic oligonucleotide
  Antisense strand to SEQ ID NO: 1450508
augcgucuggcacacucau

SEQ ID NO: 1450510 - RNA, 19 nt, Artificial Sequence
  Description of Artificial Sequence: Synthetic oligonucleotide
  Sense strand starting at position 326 of SEQ ID NO: 1243910
aucugcuucugaguuggaa

SEQ ID NO: 1450511 - RNA, 19 nt, Artificial Sequence
  Description of Artificial Sequence: Synthetic oligonucleotide
  Antisense strand to SEQ ID NO: 1450510
uuccaacucagaagcagau

SEQ ID NO: 1450512 - RNA, 19 nt, Artificial Sequence
  Description of Artificial Sequence: Synthetic oligonucleotide
  Sense strand starting at position 328 of SEQ ID NO: 1243910
cugcuucugaguuggaauc

SEQ ID NO: 1450513 - RNA, 19 nt, Artificial Sequence
  Description of Artificial Sequence: Synthetic oligonucleotide
  Antisense strand to SEQ ID NO: 1450512
gauuccaacucagaagcag

SEQ ID NO: 1450514 - RNA, 19 nt, Artificial Sequence
  Description of Artificial Sequence: Synthetic oligonucleotide
  Sense strand starting at position 329 of SEQ ID NO: 1243910
ugcuucugaguuggaauca

SEQ ID NO: 1450515 - RNA, 19 nt, Artificial Sequence
  Description of Artificial Sequence: Synthetic oligonucleotide
  Antisense strand to SEQ ID NO: 1450514
ugauuccaacucagaagca

SEQ ID NO: 1450516 - RNA, 19 nt, Artificial Sequence
  Description of Artificial Sequence: Synthetic oligonucleotide
  Sense strand starting at position 428 of SEQ ID NO: 1243910
gguagucaaggaugcacua

SEQ ID NO: 1450517 - RNA, 19 nt, Artificial Sequence
  Description of Artificial Sequence: Synthetic oligonucleotide
  Antisense strand to SEQ ID NO: 1450516
uagugcauccuugacuacc

SEQ ID NO: 1450518 - RNA, 19 nt, Artificial Sequence
  Description of Artificial Sequence: Synthetic oligonucleotide
  Sense strand starting at position 499 of SEQ ID NO: 1243910
ccugcucuguccuagauuu

SEQ ID NO: 1450519 - RNA, 19 nt, Artificial Sequence
  Description of Artificial Sequence: Synthetic oligonucleotide
  Antisense strand to SEQ ID NO: 1450518
aaaucuaggacagagcagg

SEQ ID NO: 1450520 - RNA, 19 nt, Artificial Sequence
  Description of Artificial Sequence: Synthetic oligonucleotide
  Sense strand starting at position 520 of SEQ ID NO: 1243910
ccgcuuuccucugccaaga

SEQ ID NO: 1450521 - RNA, 19 nt, Artificial Sequence
  Description of Artificial Sequence: Synthetic oligonucleotide
  Antisense strand to SEQ ID NO: 1450520
ucuuggcagaggaaagcgg

SEQ ID NO: 1450522 - RNA, 19 nt, Artificial Sequence
  Description of Artificial Sequence: Synthetic oligonucleotide
  Sense strand starting at position 625 of SEQ ID NO: 1243910
uagcuagagucagugacua

SEQ ID NO: 1450523 - RNA, 19 nt, Artificial Sequence
  Description of Artificial Sequence: Synthetic oligonucleotide
  Antisense strand to SEQ ID NO: 1450522
uagucacugacucuagcua

SEQ ID NO: 1450524 - RNA, 19 nt, Artificial Sequence
  Description of Artificial Sequence: Synthetic oligonucleotide
  Sense strand starting at position 633 of SEQ ID NO: 1243910
gucagugacuagcuuucga

SEQ ID NO: 1450525 - RNA, 19 nt, Artificial Sequence
  Description of Artificial Sequence: Synthetic oligonucleotide
  Antisense strand to SEQ ID NO: 1450524
ucgaaagcuagucacugac

SEQ ID NO: 1450526 - RNA, 19 nt, Artificial Sequence
  Description of Artificial Sequence: Synthetic oligonucleotide
  Sense strand starting at position 646 of SEQ ID NO: 1243910
uuucgagacuuggacacau

SEQ ID NO: 1450527 - RNA, 19 nt, Artificial Sequence
  Description of Artificial Sequence: Synthetic oligonucleotide
  Antisense strand to SEQ ID NO: 1450526
auguguccaagucucgaaa

SEQ ID NO: 1450528 - RNA, 19 nt, Artificial Sequence
  Description of Artificial Sequence: Synthetic oligonucleotide
  Sense strand starting at position 694 of SEQ ID NO: 1243910
aagccuaggugugugaaga

SEQ ID NO: 1450529 - RNA, 19 nt, Artificial Sequence
  Description of Artificial Sequence: Synthetic oligonucleotide
  Antisense strand to SEQ ID NO: 1450528
ucuucacacaccuaggcuu

SEQ ID NO: 1450530 - RNA, 19 nt, Artificial Sequence
  Description of Artificial Sequence: Synthetic oligonucleotide
  Sense strand starting at position 695 of SEQ ID NO: 1243910
agccuaggugugugaagaa

SEQ ID NO: 1450531 - RNA, 19 nt, Artificial Sequence
  Description of Artificial Sequence: Synthetic oligonucleotide
  Antisense strand to SEQ ID NO: 1450530
uucuucacacaccuaggcu

SEQ ID NO: 1450532 - RNA, 19 nt, Artificial Sequence
  Description of Artificial Sequence: Synthetic oligonucleotide
  Sense strand starting at position 746 of SEQ ID NO: 1243910
gcauguagugccugaauga

SEQ ID NO: 1450533 - RNA, 19 nt, Artificial Sequence
  Description of Artificial Sequence: Synthetic oligonucleotide
  Antisense strand to SEQ ID NO: 1450532
ucauucaggcacuacaugc

SEQ ID NO: 1450534 - RNA, 19 nt, Artificial Sequence
  Description of Artificial Sequence: Synthetic oligonucleotide
  Sense strand starting at position 747 of SEQ ID NO: 1243910
cauguagugccugaaugac

SEQ ID NO: 1450535 - RNA, 19 nt, Artificial Sequence
  Description of Artificial Sequence: Synthetic oligonucleotide
  Antisense strand to SEQ ID NO: 1450534
gucauucaggcacuacaug

SEQ ID NO: 1450536 - RNA, 19 nt, Artificial Sequence
  Description of Artificial Sequence: Synthetic oligonucleotide
  Sense strand starting at position 986 of SEQ ID NO: 1243910
gggcucuccucuuucucaa

SEQ ID NO: 1450537 - RNA, 19 nt, Artificial Sequence
  Description of Artificial Sequence: Synthetic oligonucleotide
  Antisense strand to SEQ ID NO: 1450536
uugagaaagaggagagccc

SEQ ID NO: 1450538 - RNA, 19 nt, Artificial Sequence
  Description of Artificial Sequence: Synthetic oligonucleotide
  Sense strand starting at position 1017 of SEQ ID NO: 1243910
gcucucuguucuuccaaga

SEQ ID NO: 1450539 - RNA, 19 nt, Artificial Sequence
  Description of Artificial Sequence: Synthetic oligonucleotide
  Antisense strand to SEQ ID NO: 1450538
ucuuggaagaacagagagc

SEQ ID NO: 1450540 - RNA, 19 nt, Artificial Sequence
  Description of Artificial Sequence: Synthetic oligonucleotide
  Sense strand starting at position 1022 of SEQ ID NO: 1243910
cuguucuuccaagaggcuu

SEQ ID NO: 1450541 - RNA, 19 nt, Artificial Sequence
  Description of Artificial Sequence: Synthetic oligonucleotide
  Antisense strand to SEQ ID NO: 1450540
aagccucuuggaagaacag

SEQ ID NO: 1450542 - RNA, 19 nt, Artificial Sequence
  Description of Artificial Sequence: Synthetic oligonucleotide
  Sense strand starting at position 1274 of SEQ ID NO: 1243910
uuccuagauccuggugaac

SEQ ID NO: 1450543 - RNA, 19 nt, Artificial Sequence
  Description of Artificial Sequence: Synthetic oligonucleotide
  Antisense strand to SEQ ID NO: 1450542
guucaccaggaucuaggaa

SEQ ID NO: 1450544 - RNA, 19 nt, Artificial Sequence
  Description of Artificial Sequence: Synthetic oligonucleotide
  Sense strand starting at position 1625 of SEQ ID NO: 1243910
gcacuuucuccaugagcag

SEQ ID NO: 1450545 - RNA, 19 nt, Artificial Sequence
  Description of Artificial Sequence: Synthetic oligonucleotide
  Antisense strand to SEQ ID NO: 1450544
cugcucauggagaaagugc

SEQ ID NO: 1450546 - RNA, 19 nt, Artificial Sequence
  Description of Artificial Sequence: Synthetic oligonucleotide
  Sense strand starting at position 1868 of SEQ ID NO: 1243910
gggauguggucugcuggaa

SEQ ID NO: 1450547 - RNA, 19 nt, Artificial Sequence
  Description of Artificial Sequence: Synthetic oligonucleotide
  Antisense strand to SEQ ID NO: 1450546
uuccagcagaccacauccc

SEQ ID NO: 1450548 - RNA, 19 nt, Artificial Sequence
  Description of Artificial Sequence: Synthetic oligonucleotide
  Sense strand starting at position 2810 of SEQ ID NO: 1243910
gugagauugggccagaggu

SEQ ID NO: 1450549 - RNA, 19 nt, Artificial Sequence
  Description of Artificial Sequence: Synthetic oligonucleotide
  Antisense strand to SEQ ID NO: 1450548
accucuggcccaaucucac

SEQ ID NO: 1450550 - RNA, 19 nt, Artificial Sequence
  Description of Artificial Sequence: Synthetic oligonucleotide
  Sense strand starting at position 3312 of SEQ ID NO: 1243910
cugaacagcuucucaaagu

SEQ ID NO: 1450551 - RNA, 19 nt, Artificial Sequence
  Description of Artificial Sequence: Synthetic oligonucleotide
  Antisense strand to SEQ ID NO: 1450550
acuuugagaagcuguucag

SEQ ID NO: 1450552 - RNA, 19 nt, Artificial Sequence
  Description of Artificial Sequence: Synthetic oligonucleotide
  Sense strand starting at position 3385 of SEQ ID NO: 1243910
ggagaaaucguguaacuau

SEQ ID NO: 1450553 - RNA, 19 nt, Artificial Sequence
  Description of Artificial Sequence: Synthetic oligonucleotide
  Antisense strand to SEQ ID NO: 1450552
auaguuacacgauuucucc

SEQ ID NO: 1450554 - RNA, 19 nt, Artificial Sequence
  Description of Artificial Sequence: Synthetic oligonucleotide
  Sense strand starting at position 3427 of SEQ ID NO: 1243910
aauguaauauagucguaug

SEQ ID NO: 1450555 - RNA, 19 nt, Artificial Sequence
  Description of Artificial Sequence: Synthetic oligonucleotide
  Antisense strand to SEQ ID NO: 1450554
cauacgacuauauuacauu

SEQ ID NO: 1450556 - RNA, 19 nt, Artificial Sequence
  Description of Artificial Sequence: Synthetic oligonucleotide
  Sense strand starting at position 3432 of SEQ ID NO: 1243910
aauauagucguauggugua

SEQ ID NO: 1450557 - RNA, 19 nt, Artificial Sequence
  Description of Artificial Sequence: Synthetic oligonucleotide
  Antisense strand to SEQ ID NO: 1450556
uacaccauacgacuauauu

SEQ ID NO: 1450558 - RNA, 19 nt, Artificial Sequence
  Description of Artificial Sequence: Synthetic oligonucleotide
  Sense strand starting at position 3437 of SEQ ID NO: 1243910
agucguaugguguaggaau

SEQ ID NO: 1450559 - RNA, 19 nt, Artificial Sequence
  Description of Artificial Sequence: Synthetic oligonucleotide
  Antisense strand to SEQ ID NO: 1450558
auuccuacaccauacgacu

SEQ ID NO: 1450560 - RNA, 19 nt, Artificial Sequence
  Description of Artificial Sequence: Synthetic oligonucleotide
  Sense strand starting at position 3439 of SEQ ID NO: 1243910
ucguaugguguaggaauga

SEQ ID NO: 1450561 - RNA, 19 nt, Artificial Sequence
  Description of Artificial Sequence: Synthetic oligonucleotide
  Antisense strand to SEQ ID NO: 1450560
ucauuccuacaccauacga

SEQ ID NO: 1450562 - RNA, 19 nt, Artificial Sequence
  Description of Artificial Sequence: Synthetic oligonucleotide
  Sense strand starting at position 3450 of SEQ ID NO: 1243910
aggaaugaaucuguacagu

SEQ ID NO: 1450563 - RNA, 19 nt, Artificial Sequence
  Description of Artificial Sequence: Synthetic oligonucleotide
  Antisense strand to SEQ ID NO: 1450562
acuguacagauucauuccu

SEQ ID NO: 1450564 - RNA, 19 nt, Artificial Sequence
  Description of Artificial Sequence: Synthetic oligonucleotide
  Sense strand starting at position 3453 of SEQ ID NO: 1243910
aaugaaucuguacaguagu

SEQ ID NO: 1450565 - RNA, 19 nt, Artificial Sequence
  Description of Artificial Sequence: Synthetic oligonucleotide
  Antisense strand to SEQ ID NO: 1450564
acuacuguacagauucauu

SEQ ID NO: 1450566 - RNA, 19 nt, Artificial Sequence
  Description of Artificial Sequence: Synthetic oligonucleotide
  Sense strand starting at position 3456 of SEQ ID NO: 1243910
gaaucuguacaguagucua

SEQ ID NO: 1450567 - RNA, 19 nt, Artificial Sequence
  Description of Artificial Sequence: Synthetic oligonucleotide
  Antisense strand to SEQ ID NO: 1450566
uagacuacuguacagauuc

SEQ ID NO: 1450568 - RNA, 19 nt, Artificial Sequence
  Description of Artificial Sequence: Synthetic oligonucleotide
  Sense strand starting at position 3461 of SEQ ID NO: 1243910
uguacaguagucuagcaua

SEQ ID NO: 1450569 - RNA, 19 nt, Artificial Sequence
  Description of Artificial Sequence: Synthetic oligonucleotide
  Antisense strand to SEQ ID NO: 1450568
uaugcuagacuacuguaca

SEQ ID NO: 1450570 - RNA, 19 nt, Artificial Sequence
  Description of Artificial Sequence: Synthetic oligonucleotide
  Sense strand starting at position 3466 of SEQ ID NO: 1243910
aguagucuagcauauaauu

SEQ ID NO: 1450571 - RNA, 19 nt, Artificial Sequence
  Description of Artificial Sequence: Synthetic oligonucleotide
  Antisense strand to SEQ ID NO: 1450570
aauuauaugcuagacuacu

SEQ ID NO: 1450572 - RNA, 19 nt, Artificial Sequence
  Description of Artificial Sequence: Synthetic oligonucleotide
  Sense strand starting at position 3545 of SEQ ID NO: 1243910
gagggcguguaaucagaaa

SEQ ID NO: 1450573 - RNA, 19 nt, Artificial Sequence
  Description of Artificial Sequence: Synthetic oligonucleotide
  Antisense strand to SEQ ID NO: 1450572
uuucugauuacacgcccuc

SEQ ID NO: 1450574 - RNA, 19 nt, Artificial Sequence
  Description of Artificial Sequence: Synthetic oligonucleotide
  Sense strand starting at position 3571 of SEQ ID NO: 1243910
agaggauuguccagagggu

SEQ ID NO: 1450575 - RNA, 19 nt, Artificial Sequence
  Description of Artificial Sequence: Synthetic oligonucleotide
  Antisense strand to SEQ ID NO: 1450574
acccucuggacaauccucu

SEQ ID NO: 1450576 - RNA, 19 nt, Artificial Sequence
  Description of Artificial Sequence: Synthetic oligonucleotide
  Sense strand starting at position 3672 of SEQ ID NO: 1243910
ugaugcuuccacggugaca

SEQ ID NO: 1450577 - RNA, 19 nt, Artificial Sequence
  Description of Artificial Sequence: Synthetic oligonucleotide
  Antisense strand to SEQ ID NO: 1450576
ugucaccguggaagcauca

SEQ ID NO: 1450578 - RNA, 19 nt, Artificial Sequence
  Description of Artificial Sequence: Synthetic oligonucleotide
  Sense strand starting at position 3812 of SEQ ID NO: 1243910
ggcccuugcuccucuuuaa

SEQ ID NO: 1450579 - RNA, 19 nt, Artificial Sequence
  Description of Artificial Sequence: Synthetic oligonucleotide
  Antisense strand to SEQ ID NO: 1450578
uuaaagaggagcaagggcc

SEQ ID NO: 1450580 - RNA, 19 nt, Artificial Sequence
  Description of Artificial Sequence: Synthetic oligonucleotide
  Sense strand starting at position 3919 of SEQ ID NO: 1243910
cagcacauuuguuuagagu

SEQ ID NO: 1450581 - RNA, 19 nt, Artificial Sequence
  Description of Artificial Sequence: Synthetic oligonucleotide
  Antisense strand to SEQ ID NO: 1450580
acucuaaacaaaugugcug

SEQ ID NO: 1450582 - RNA, 19 nt, Artificial Sequence
  Description of Artificial Sequence: Synthetic oligonucleotide
  Sense strand starting at position 3957 of SEQ ID NO: 1243910
ggcccagucucaucagauc

SEQ ID NO: 1450583 - RNA, 19 nt, Artificial Sequence
  Description of Artificial Sequence: Synthetic oligonucleotide
  Antisense strand to SEQ ID NO: 1450582
gaucugaugagacugggcc

SEQ ID NO: 1450584 - RNA, 19 nt, Artificial Sequence
  Description of Artificial Sequence: Synthetic oligonucleotide
  Sense strand starting at position 3963 of SEQ ID NO: 1243910
gucucaucagaucgagacu

SEQ ID NO: 1450585 - RNA, 19 nt, Artificial Sequence
  Description of Artificial Sequence: Synthetic oligonucleotide
  Antisense strand to SEQ ID NO: 1450584
agucucgaucugaugagac

SEQ ID NO: 1450586 - RNA, 19 nt, Artificial Sequence
  Description of Artificial Sequence: Synthetic oligonucleotide
  Sense strand starting at position 571 of SEQ ID NO: 1243911
cuccacugcuguuucgaaa

SEQ ID NO: 1450587 - RNA, 19 nt, Artificial Sequence
  Description of Artificial Sequence: Synthetic oligonucleotide
  Antisense strand to SEQ ID NO: 1450586
uuucgaaacagcaguggag

SEQ ID NO: 1450588 - RNA, 19 nt, Artificial Sequence
  Description of Artificial Sequence: Synthetic oligonucleotide
  Sense strand starting at position 903 of SEQ ID NO: 1243911
uggcucagaucuguuuguu

SEQ ID NO: 1450589 - RNA, 19 nt, Artificial Sequence
  Description of Artificial Sequence: Synthetic oligonucleotide
  Antisense strand to SEQ ID NO: 1450588
aacaaacagaucugagcca

SEQ ID NO: 1450590 - RNA, 19 nt, Artificial Sequence
  Description of Artificial Sequence: Synthetic oligonucleotide
  Sense strand starting at position 908 of SEQ ID NO: 1243911
cagaucuguuuguuugcua

SEQ ID NO: 1450591 - RNA, 19 nt, Artificial Sequence
  Description of Artificial Sequence: Synthetic oligonucleotide
  Antisense strand to SEQ ID NO: 1450590
uagcaaacaaacagaucug

SEQ ID NO: 1450592 - RNA, 19 nt, Artificial Sequence
  Description of Artificial Sequence: Synthetic oligonucleotide
  Sense strand starting at position 919 of SEQ ID NO: 1243911
guuugcuagcccuuuguaa

SEQ ID NO: 1450593 - RNA, 19 nt, Artificial Sequence
  Description of Artificial Sequence: Synthetic oligonucleotide
  Antisense strand to SEQ ID NO: 1450592
uuacaaagggcuagcaaac

SEQ ID NO: 1450594 - RNA, 19 nt, Artificial Sequence
  Description of Artificial Sequence: Synthetic oligonucleotide
  Sense strand starting at position 921 of SEQ ID NO: 1243911
uugcuagcccuuuguaaug

SEQ ID NO: 1450595 - RNA, 19 nt, Artificial Sequence
  Description of Artificial Sequence: Synthetic oligonucleotide
  Antisense strand to SEQ ID NO: 1450594
cauuacaaagggcuagcaa

SEQ ID NO: 1450596 - RNA, 19 nt, Artificial Sequence
  Description of Artificial Sequence: Synthetic oligonucleotide
  Sense strand starting at position 931 of SEQ ID NO: 1243911
uuuguaaugcucugaauuu

SEQ ID NO: 1450597 - RNA, 19 nt, Artificial Sequence
  Description of Artificial Sequence: Synthetic oligonucleotide
  Antisense strand to SEQ ID NO: 1450596
aaauucagagcauuacaaa

SEQ ID NO: 1450598 - RNA, 19 nt, Artificial Sequence
  Description of Artificial Sequence: Synthetic oligonucleotide
  Sense strand starting at position 1003 of SEQ ID NO: 1243911
cauuaaacgcgacguacaa

SEQ ID NO: 1450599 - RNA, 19 nt, Artificial Sequence
  Description of Artificial Sequence: Synthetic oligonucleotide
  Antisense strand to SEQ ID NO: 1450598
uuguacgucgcguuuaaug

SEQ ID NO: 1450600 - RNA, 19 nt, Artificial Sequence
  Description of Artificial Sequence: Synthetic oligonucleotide
  Sense strand starting at position 1038 of SEQ ID NO: 1243911
auguguauugauggaaaga

SEQ ID NO: 1450601 - RNA, 19 nt, Artificial Sequence
  Description of Artificial Sequence: Synthetic oligonucleotide
  Antisense strand to SEQ ID NO: 1450600
ucuuuccaucaauacacau

SEQ ID NO: 1450602 - RNA, 19 nt, Artificial Sequence
  Description of Artificial Sequence: Synthetic oligonucleotide
  Sense strand starting at position 1059 of SEQ ID NO: 1243911
acuacucgugcccaggaaa

SEQ ID NO: 1450603 - RNA, 19 nt, Artificial Sequence
  Description of Artificial Sequence: Synthetic oligonucleotide
  Antisense strand to SEQ ID NO: 1450602
uuuccugggcacgaguagu

SEQ ID NO: 1450604 - RNA, 19 nt, Artificial Sequence
  Description of Artificial Sequence: Synthetic oligonucleotide
  Sense strand starting at position 1250 of SEQ ID NO: 1243911
gacacugaaugccuggaua

SEQ ID NO: 1450605 - RNA, 19 nt, Artificial Sequence
  Description of Artificial Sequence: Synthetic oligonucleotide
  Antisense strand to SEQ ID NO: 1450604
uauccaggcauucaguguc

SEQ ID NO: 1450606 - RNA, 19 nt, Artificial Sequence
  Description of Artificial Sequence: Synthetic oligonucleotide
  Sense strand starting at position 2021 of SEQ ID NO: 1243911
cuccuuucugcauggauaa

SEQ ID NO: 1450607 - RNA, 19 nt, Artificial Sequence
  Description of Artificial Sequence: Synthetic oligonucleotide
  Antisense strand to SEQ ID NO: 1450606
uuauccaugcagaaaggag

SEQ ID NO: 1450608 - RNA, 19 nt, Artificial Sequence
  Description of Artificial Sequence: Synthetic oligonucleotide
  Sense strand starting at position 2022 of SEQ ID NO: 1243911
uccuuucugcauggauaaa

SEQ ID NO: 1450609 - RNA, 19 nt, Artificial Sequence
  Description of Artificial Sequence: Synthetic oligonucleotide
  Antisense strand to SEQ ID NO: 1450608
uuuauccaugcagaaagga

SEQ ID NO: 1450610 - RNA, 19 nt, Artificial Sequence
  Description of Artificial Sequence: Synthetic oligonucleotide
  Sense strand starting at position 2177 of SEQ ID NO: 1243911
ggaggaguauccuuugcuc

SEQ ID NO: 1450611 - RNA, 19 nt, Artificial Sequence
  Description of Artificial Sequence: Synthetic oligonucleotide
  Antisense strand to SEQ ID NO: 1450610
gagcaaaggauacuccucc

SEQ ID NO: 1450612 - RNA, 19 nt, Artificial Sequence
  Description of Artificial Sequence: Synthetic oligonucleotide
  Sense strand starting at position 2334 of SEQ ID NO: 1243911
gaggacaccugccuauuau

SEQ ID NO: 1450613 - RNA, 19 nt, Artificial Sequence
  Description of Artificial Sequence: Synthetic oligonucleotide
  Antisense strand to SEQ ID NO: 1450612
auaauaggcagguguccuc

SEQ ID NO: 1450614 - RNA, 19 nt, Artificial Sequence
  Description of Artificial Sequence: Synthetic oligonucleotide
  Sense strand starting at position 2346 of SEQ ID NO: 1243911
cuauuaucagguuggaaug

SEQ ID NO: 1450615 - RNA, 19 nt, Artificial Sequence
  Description of Artificial Sequence: Synthetic oligonucleotide
  Antisense strand to SEQ ID NO: 1450614
cauuccaaccugauaauag

SEQ ID NO: 1450616 - RNA, 19 nt, Artificial Sequence
  Description of Artificial Sequence: Synthetic oligonucleotide
  Sense strand starting at position 2398 of SEQ ID NO: 1243911
gauggcuggugacaagaaa

SEQ ID NO: 1450617 - RNA, 19 nt, Artificial Sequence
  Description of Artificial Sequence: Synthetic oligonucleotide
  Antisense strand to SEQ ID NO: 1450616
uuucuugucaccagccauc

SEQ ID NO: 1450618 - RNA, 19 nt, Artificial Sequence
  Description of Artificial Sequence: Synthetic oligonucleotide
  Sense strand starting at position 2419 of SEQ ID NO: 1243911
uggcuacagccugaggaua

SEQ ID NO: 1450619 - RNA, 19 nt, Artificial Sequence
  Description of Artificial Sequence: Synthetic oligonucleotide
  Antisense strand to SEQ ID NO: 1450618
uauccucaggcuguagcca

SEQ ID NO: 1450620 - RNA, 19 nt, Artificial Sequence
  Description of Artificial Sequence: Synthetic oligonucleotide
  Sense strand starting at position 2479 of SEQ ID NO: 1243911
gccuguuaaacacgcagau

SEQ ID NO: 1450621 - RNA, 19 nt, Artificial Sequence
  Description of Artificial Sequence: Synthetic oligonucleotide
  Antisense strand to SEQ ID NO: 1450620
aucugcguguuuaacaggc

SEQ ID NO: 1450622 - RNA, 19 nt, Artificial Sequence
  Description of Artificial Sequence: Synthetic oligonucleotide
  Sense strand starting at position 2650 of SEQ ID NO: 1243911
aagggaaaucaccgugcua

SEQ ID NO: 1450623 - RNA, 19 nt, Artificial Sequence
  Description of Artificial Sequence: Synthetic oligonucleotide
  Antisense strand to SEQ ID NO: 1450622
uagcacggugauuucccuu

SEQ ID NO: 1450624 - RNA, 19 nt, Artificial Sequence
  Description of Artificial Sequence: Synthetic oligonucleotide
  Sense strand starting at position 2652 of SEQ ID NO: 1243911
gggaaaucaccgugcuaga

SEQ ID NO: 1450625 - RNA, 19 nt, Artificial Sequence
  Description of Artificial Sequence: Synthetic oligonucleotide
  Antisense strand to SEQ ID NO: 1450624
ucuagcacggugauuuccc

SEQ ID NO: 1450626 - RNA, 19 nt, Artificial Sequence
  Description of Artificial Sequence: Synthetic oligonucleotide
  Sense strand starting at position 2876 of SEQ ID NO: 1243911
aacuguccugguuaagaac

SEQ ID NO: 1450627 - RNA, 19 nt, Artificial Sequence
  Description of Artificial Sequence: Synthetic oligonucleotide
  Antisense strand to SEQ ID NO: 1450626
guucuuaaccaggacaguu

SEQ ID NO: 1450628 - RNA, 19 nt, Artificial Sequence
  Description of Artificial Sequence: Synthetic oligonucleotide
  Sense strand starting at position 2967 of SEQ ID NO: 1243911
gucuccugccguuaggaaa

SEQ ID NO: 1450629 - RNA, 19 nt, Artificial Sequence
  Description of Artificial Sequence: Synthetic oligonucleotide
  Antisense strand to SEQ ID NO: 1450628
uuuccuaacggcaggagac

SEQ ID NO: 1450630 - RNA, 19 nt, Artificial Sequence
  Description of Artificial Sequence: Synthetic oligonucleotide
  Sense strand starting at position 2975 of SEQ ID NO: 1243911
ccguuaggaaaucagucau

SEQ ID NO: 1450631 - RNA, 19 nt, Artificial Sequence
  Description of Artificial Sequence: Synthetic oligonucleotide
  Antisense strand to SEQ ID NO: 1450630
augacugauuuccuaacgg

SEQ ID NO: 1450632 - RNA, 19 nt, Artificial Sequence
  Description of Artificial Sequence: Synthetic oligonucleotide
  Sense strand starting at position 2981 of SEQ ID NO: 1243911
ggaaaucagucauggaagg

SEQ ID NO: 1450633 - RNA, 19 nt, Artificial Sequence
  Description of Artificial Sequence: Synthetic oligonucleotide
  Antisense strand to SEQ ID NO: 1450632
ccuuccaugacugauuucc

SEQ ID NO: 1450634 - RNA, 19 nt, Artificial Sequence
  Description of Artificial Sequence: Synthetic oligonucleotide
  Sense strand starting at position 3149 of SEQ ID NO: 1243911
acagccauagugugaacaa

SEQ ID NO: 1450635 - RNA, 19 nt, Artificial Sequence
  Description of Artificial Sequence: Synthetic oligonucleotide
  Antisense strand to SEQ ID NO: 1450634
uuguucacacuauggcugu

SEQ ID NO: 1450636 - RNA, 19 nt, Artificial Sequence
  Description of Artificial Sequence: Synthetic oligonucleotide
  Sense strand starting at position 3178 of SEQ ID NO: 1243911
gugucaagagaguaguacu

SEQ ID NO: 1450637 - RNA, 19 nt, Artificial Sequence
  Description of Artificial Sequence: Synthetic oligonucleotide
  Antisense strand to SEQ ID NO: 1450636
aguacuacucucuugacac

SEQ ID NO: 1450638 - RNA, 19 nt, Artificial Sequence
  Description of Artificial Sequence: Synthetic oligonucleotide
  Sense strand starting at position 3308 of SEQ ID NO: 1243911
ccuucucacugucuaguaa

SEQ ID NO: 1450639 - RNA, 19 nt, Artificial Sequence
  Description of Artificial Sequence: Synthetic oligonucleotide
  Antisense strand to SEQ ID NO: 1450638
uuacuagacagugagaagg

SEQ ID NO: 1450640 - RNA, 19 nt, Artificial Sequence
  Description of Artificial Sequence: Synthetic oligonucleotide
  Sense strand starting at position 3377 of SEQ ID NO: 1243911
ccaccagaguacucaguua

SEQ ID NO: 1450641 - RNA, 19 nt, Artificial Sequence
  Description of Artificial Sequence: Synthetic oligonucleotide
  Antisense strand to SEQ ID NO: 1450640
uaacugaguacucuggugg

SEQ ID NO: 1450642 - RNA, 19 nt, Artificial Sequence
  Description of Artificial Sequence: Synthetic oligonucleotide
  Sense strand starting at position 3450 of SEQ ID NO: 1243911
cgucgagucuuaccuccua

SEQ ID NO: 1450643 - RNA, 19 nt, Artificial Sequence
  Description of Artificial Sequence: Synthetic oligonucleotide
  Antisense strand to SEQ ID NO: 1450642
uaggagguaagacucgacg

SEQ ID NO: 1450644 - RNA, 19 nt, Artificial Sequence
  Description of Artificial Sequence: Synthetic oligonucleotide
  Sense strand starting at position 3503 of SEQ ID NO: 1243911
ugcucaguuuacccauauu

SEQ ID NO: 1450645 - RNA, 19 nt, Artificial Sequence
  Description of Artificial Sequence: Synthetic oligonucleotide
  Antisense strand to SEQ ID NO: 1450644
aauauggguaaacugagca

SEQ ID NO: 1450646 - RNA, 19 nt, Artificial Sequence
  Description of Artificial Sequence: Synthetic oligonucleotide
  Sense strand starting at position 3538 of SEQ ID NO: 1243911
ccuucuuuaucacuuggua

SEQ ID NO: 1450647 - RNA, 19 nt, Artificial Sequence
  Description of Artificial Sequence: Synthetic oligonucleotide
  Antisense strand to SEQ ID NO: 1450646
uaccaagugauaaagaagg

SEQ ID NO: 1450648 - RNA, 19 nt, Artificial Sequence
  Description of Artificial Sequence: Synthetic oligonucleotide
  Sense strand starting at position 3553 of SEQ ID NO: 1243911
gguaaauaaccaggugaua

SEQ ID NO: 1450649 - RNA, 19 nt, Artificial Sequence
  Description of Artificial Sequence: Synthetic oligonucleotide
  Antisense strand to SEQ ID NO: 1450648
uaucaccugguuauuuacc

SEQ ID NO: 1450650 - RNA, 19 nt, Artificial Sequence
  Description of Artificial Sequence: Synthetic oligonucleotide
  Sense strand starting at position 3558 of SEQ ID NO: 1243911
auaaccaggugauaaauua

SEQ ID NO: 1450651 - RNA, 19 nt, Artificial Sequence
  Description of Artificial Sequence: Synthetic oligonucleotide
  Antisense strand to SEQ ID NO: 1450650
uaauuuaucaccugguuau

SEQ ID NO: 1450652 - RNA, 19 nt, Artificial Sequence
  Description of Artificial Sequence: Synthetic oligonucleotide
  Sense strand starting at position 3566 of SEQ ID NO: 1243911
gugauaaauuacgugauac

SEQ ID NO: 1450653 - RNA, 19 nt, Artificial Sequence
  Description of Artificial Sequence: Synthetic oligonucleotide
  Antisense strand to SEQ ID NO: 1450652
guaucacguaauuuaucac

SEQ ID NO: 1450654 - RNA, 19 nt, Artificial Sequence
  Description of Artificial Sequence: Synthetic oligonucleotide
  Sense strand starting at position 3597 of SEQ ID NO: 1243911
ugaagacagccuggacuau

SEQ ID NO: 1450655 - RNA, 19 nt, Artificial Sequence
  Description of Artificial Sequence: Synthetic oligonucleotide
  Antisense strand to SEQ ID NO: 1450654
auaguccaggcugucuuca

SEQ ID NO: 1450656 - RNA, 19 nt, Artificial Sequence
  Description of Artificial Sequence: Synthetic oligonucleotide
  Sense strand starting at position 3624 of SEQ ID NO: 1243911
guuaucuaccaccauguuu

SEQ ID NO: 1450657 - RNA, 19 nt, Artificial Sequence
  Description of Artificial Sequence: Synthetic oligonucleotide
  Antisense strand to SEQ ID NO: 1450656
aaacauggugguagauaac

SEQ ID NO: 1450658 - RNA, 19 nt, Artificial Sequence
  Description of Artificial Sequence: Synthetic oligonucleotide
  Sense strand starting at position 3647 of SEQ ID NO: 1243911
gggauuucaugugagauua

SEQ ID NO: 1450659 - RNA, 19 nt, Artificial Sequence
  Description of Artificial Sequence: Synthetic oligonucleotide
  Antisense strand to SEQ ID NO: 1450658
uaaucucacaugaaauccc

SEQ ID NO: 1450660 - RNA, 19 nt, Artificial Sequence
  Description of Artificial Sequence: Synthetic oligonucleotide
  Sense strand starting at position 3824 of SEQ ID NO: 1243911
ugaguucugacccgugacu

SEQ ID NO: 1450661 - RNA, 19 nt, Artificial Sequence
  Description of Artificial Sequence: Synthetic oligonucleotide
  Antisense strand to SEQ ID NO: 1450660
agucacgggucagaacuca

SEQ ID NO: 1450662 - RNA, 19 nt, Artificial Sequence
  Description of Artificial Sequence: Synthetic oligonucleotide
  Sense strand starting at position 3833 of SEQ ID NO: 1243911
acccgugacucucuacaga

SEQ ID NO: 1450663 - RNA, 19 nt, Artificial Sequence
  Description of Artificial Sequence: Synthetic oligonucleotide
  Antisense strand to SEQ ID NO: 1450662
ucuguagagagucacgggu

SEQ ID NO: 1450664 - RNA, 19 nt, Artificial Sequence
  Description of Artificial Sequence: Synthetic oligonucleotide
  Sense strand starting at position 3836 of SEQ ID NO: 1243911
cgugacucucuacagaaga

SEQ ID NO: 1450665 - RNA, 19 nt, Artificial Sequence
  Description of Artificial Sequence: Synthetic oligonucleotide
  Antisense strand to SEQ ID NO: 1450664
ucuucuguagagagucacg

SEQ ID NO: 1450666 - RNA, 19 nt, Artificial Sequence
  Description of Artificial Sequence: Synthetic oligonucleotide
  Sense strand starting at position 141 of SEQ ID NO: 1243912
gguuaaggagagugauuaa

SEQ ID NO: 1450667 - RNA, 19 nt, Artificial Sequence
  Description of Artificial Sequence: Synthetic oligonucleotide
  Antisense strand to SEQ ID NO: 1450666
uuaaucacucuccuuaacc

SEQ ID NO: 1450668 - RNA, 19 nt, Artificial Sequence
  Description of Artificial Sequence: Synthetic oligonucleotide
  Sense strand starting at position 265 of SEQ ID NO: 1243912
cccaaauucucagucaagu

SEQ ID NO: 1450669 - RNA, 19 nt, Artificial Sequence
  Description of Artificial Sequence: Synthetic oligonucleotide
  Antisense strand to SEQ ID NO: 1450668
acuugacugagaauuuggg

SEQ ID NO: 1450670 - RNA, 19 nt, Artificial Sequence
  Description of Artificial Sequence: Synthetic oligonucleotide
  Sense strand starting at position 312 of SEQ ID NO: 1243912
acauaaggaucagaaaguu

SEQ ID NO: 1450671 - RNA, 19 nt, Artificial Sequence
  Description of Artificial Sequence: Synthetic oligonucleotide
  Antisense strand to SEQ ID NO: 1450670
aacuuucugauccuuaugu

SEQ ID NO: 1450672 - RNA, 19 nt, Artificial Sequence
  Description of Artificial Sequence: Synthetic oligonucleotide
  Sense strand starting at position 320 of SEQ ID NO: 1243912
aucagaaaguuugucuucu

SEQ ID NO: 1450673 - RNA, 19 nt, Artificial Sequence
  Description of Artificial Sequence: Synthetic oligonucleotide
  Antisense strand to SEQ ID NO: 1450672
agaagacaaacuuucugau

SEQ ID NO: 1450674 - RNA, 19 nt, Artificial Sequence
  Description of Artificial Sequence: Synthetic oligonucleotide
  Sense strand starting at position 321 of SEQ ID NO: 1243912
ucagaaaguuugucuucug

SEQ ID NO: 1450675 - RNA, 19 nt, Artificial Sequence
  Description of Artificial Sequence: Synthetic oligonucleotide
  Antisense strand to SEQ ID NO: 1450674
cagaagacaaacuuucuga

SEQ ID NO: 1450676 - RNA, 19 nt, Artificial Sequence
  Description of Artificial Sequence: Synthetic oligonucleotide
  Sense strand starting at position 322 of SEQ ID NO: 1243912
cagaaaguuugucuucugu

SEQ ID NO: 1450677 - RNA, 19 nt, Artificial Sequence
  Description of Artificial Sequence: Synthetic oligonucleotide
  Antisense strand to SEQ ID NO: 1450676
acagaagacaaacuuucug

SEQ ID NO: 1450678 - RNA, 19 nt, Artificial Sequence
  Description of Artificial Sequence: Synthetic oligonucleotide
  Sense strand starting at position 559 of SEQ ID NO: 1243912
gugugauaccaacaggcau

SEQ ID NO: 1450679 - RNA, 19 nt, Artificial Sequence
  Description of Artificial Sequence: Synthetic oligonucleotide
  Antisense strand to SEQ ID NO: 1450678
augccuguugguaucacac

SEQ ID NO: 1450680 - RNA, 19 nt, Artificial Sequence
  Description of Artificial Sequence: Synthetic oligonucleotide
  Sense strand starting at position 728 of SEQ ID NO: 1243912
ggcucuacggugaguggua

SEQ ID NO: 1450681 - RNA, 19 nt, Artificial Sequence
  Description of Artificial Sequence: Synthetic oligonucleotide
  Antisense strand to SEQ ID NO: 1450680
uaccacucaccguagagcc

SEQ ID NO: 1450682 - RNA, 19 nt, Artificial Sequence
  Description of Artificial Sequence: Synthetic oligonucleotide
  Sense strand starting at position 737 of SEQ ID NO: 1243912
gugagugguaucuacauuc

SEQ ID NO: 1450683 - RNA, 19 nt, Artificial Sequence
  Description of Artificial Sequence: Synthetic oligonucleotide
  Antisense strand to SEQ ID NO: 1450682
gaauguagauaccacucac

SEQ ID NO: 1450684 - RNA, 19 nt, Artificial Sequence
  Description of Artificial Sequence: Synthetic oligonucleotide
  Sense strand starting at position 744 of SEQ ID NO: 1243912
guaucuacauuccugucau

SEQ ID NO: 1450685 - RNA, 19 nt, Artificial Sequence
  Description of Artificial Sequence: Synthetic oligonucleotide
  Antisense strand to SEQ ID NO: 1450684
augacaggaauguagauac

SEQ ID NO: 1450686 - RNA, 19 nt, Artificial Sequence
  Description of Artificial Sequence: Synthetic oligonucleotide
  Sense strand starting at position 788 of SEQ ID NO: 1243912
acagaaucacccuguagac

SEQ ID NO: 1450687 - RNA, 19 nt, Artificial Sequence
  Description of Artificial Sequence: Synthetic oligonucleotide
  Antisense strand to SEQ ID NO: 1450686
gucuacagggugauucugu

SEQ ID NO: 1450688 - RNA, 19 nt, Artificial Sequence
  Description of Artificial Sequence: Synthetic oligonucleotide
  Sense strand starting at position 846 of SEQ ID NO: 1243912
aucuguuaccaaggugaag

SEQ ID NO: 1450689 - RNA, 19 nt, Artificial Sequence
  Description of Artificial Sequence: Synthetic oligonucleotide
  Antisense strand to SEQ ID NO: 1450688
cuucaccuugguaacagau

SEQ ID NO: 1450690 - RNA, 19 nt, Artificial Sequence
  Description of Artificial Sequence: Synthetic oligonucleotide
  Sense strand starting at position 1121 of SEQ ID NO: 1243912
ggagauaaccuuugaucuu

SEQ ID NO: 1450691 - RNA, 19 nt, Artificial Sequence
  Description of Artificial Sequence: Synthetic oligonucleotide
  Antisense strand to SEQ ID NO: 1450690
aagaucaaagguuaucucc

SEQ ID NO: 1450692 - RNA, 19 nt, Artificial Sequence
  Description of Artificial Sequence: Synthetic oligonucleotide
  Sense strand starting at position 1402 of SEQ ID NO: 1243912
gccaauuuguagcuagaau

SEQ ID NO: 1450693 - RNA, 19 nt, Artificial Sequence
  Description of Artificial Sequence: Synthetic oligonucleotide
  Antisense strand to SEQ ID NO: 1450692
auucuagcuacaaauuggc

SEQ ID NO: 1450694 - RNA, 19 nt, Artificial Sequence
  Description of Artificial Sequence: Synthetic oligonucleotide
  Sense strand starting at position 1467 of SEQ ID NO: 1243912
uugccacaugacugcuaaa

SEQ ID NO: 1450695 - RNA, 19 nt, Artificial Sequence
  Description of Artificial Sequence: Synthetic oligonucleotide
  Antisense strand to SEQ ID NO: 1450694
uuuagcagucauguggcaa

SEQ ID NO: 1450696 - RNA, 19 nt, Artificial Sequence
  Description of Artificial Sequence: Synthetic oligonucleotide
  Sense strand starting at position 1607 of SEQ ID NO: 1243912
uuuauucugagaugaggca

SEQ ID NO: 1450697 - RNA, 19 nt, Artificial Sequence
  Description of Artificial Sequence: Synthetic oligonucleotide
  Antisense strand to SEQ ID NO: 1450696
ugccucaucucagaauaaa

SEQ ID NO: 1450698 - RNA, 19 nt, Artificial Sequence
  Description of Artificial Sequence: Synthetic oligonucleotide
  Sense strand starting at position 1777 of SEQ ID NO: 1243912
acacuauugcuggagagcu

SEQ ID NO: 1450699 - RNA, 19 nt, Artificial Sequence
  Description of Artificial Sequence: Synthetic oligonucleotide
  Antisense strand to SEQ ID NO: 1450698
agcucuccagcaauagugu

SEQ ID NO: 1450700 - RNA, 19 nt, Artificial Sequence
  Description of Artificial Sequence: Synthetic oligonucleotide
  Sense strand starting at position 1790 of SEQ ID NO: 1243912
agagcugaggugugauuga

SEQ ID NO: 1450701 - RNA, 19 nt, Artificial Sequence
  Description of Artificial Sequence: Synthetic oligonucleotide
  Antisense strand to SEQ ID NO: 1450700
ucaaucacaccucagcucu

SEQ ID NO: 1450702 - RNA, 19 nt, Artificial Sequence
  Description of Artificial Sequence: Synthetic oligonucleotide
  Sense strand starting at position 1800 of SEQ ID NO: 1243912
ugugauugauuccuacagu

SEQ ID NO: 1450703 - RNA, 19 nt, Artificial Sequence
  Description of Artificial Sequence: Synthetic oligonucleotide
  Antisense strand to SEQ ID NO: 1450702
acuguaggaaucaaucaca

SEQ ID NO: 1450704 - RNA, 19 nt, Artificial Sequence
  Description of Artificial Sequence: Synthetic oligonucleotide
  Sense strand starting at position 1863 of SEQ ID NO: 1243912
aagaaaggugguggucaga

SEQ ID NO: 1450705 - RNA, 19 nt, Artificial Sequence
  Description of Artificial Sequence: Synthetic oligonucleotide
  Antisense strand to SEQ ID NO: 1450704
ucugaccaccaccuuucuu

SEQ ID NO: 1450706 - RNA, 19 nt, Artificial Sequence
  Description of Artificial Sequence: Synthetic oligonucleotide
  Sense strand starting at position 1970 of SEQ ID NO: 1243912
cuguguagccauuaggguu

SEQ ID NO: 1450707 - RNA, 19 nt, Artificial Sequence
  Description of Artificial Sequence: Synthetic oligonucleotide
  Antisense strand to SEQ ID NO: 1450706
aacccuaauggcuacacag

SEQ ID NO: 1450708 - RNA, 19 nt, Artificial Sequence
  Description of Artificial Sequence: Synthetic oligonucleotide
  Sense strand starting at position 2281 of SEQ ID NO: 1243912
aaagguuaaucugcaaggu

SEQ ID NO: 1450709 - RNA, 19 nt, Artificial Sequence
  Description of Artificial Sequence: Synthetic oligonucleotide
  Antisense strand to SEQ ID NO: 1450708
accuugcagauuaaccuuu

SEQ ID NO: 1450710 - RNA, 19 nt, Artificial Sequence
  Description of Artificial Sequence: Synthetic oligonucleotide
  Sense strand starting at position 2351 of SEQ ID NO: 1243912
uuuccaggguuccaauuua

SEQ ID NO: 1450711 - RNA, 19 nt, Artificial Sequence
  Description of Artificial Sequence: Synthetic oligonucleotide
  Antisense strand to SEQ ID NO: 1450710
uaaauuggaacccuggaaa

SEQ ID NO: 1450712 - RNA, 19 nt, Artificial Sequence
  Description of Artificial Sequence: Synthetic oligonucleotide
  Sense strand starting at position 2359 of SEQ ID NO: 1243912
guuccaauuuaaugaagag

SEQ ID NO: 1450713 - RNA, 19 nt, Artificial Sequence
  Description of Artificial Sequence: Synthetic oligonucleotide
  Antisense strand to SEQ ID NO: 1450712
cucuucauuaaauuggaac

SEQ ID NO: 1450714 - RNA, 19 nt, Artificial Sequence
  Description of Artificial Sequence: Synthetic oligonucleotide
  Sense strand starting at position 2464 of SEQ ID NO: 1243912
auuuaaauguugcuuugca

SEQ ID NO: 1450715 - RNA, 19 nt, Artificial Sequence
  Description of Artificial Sequence: Synthetic oligonucleotide
  Antisense strand to SEQ ID NO: 1450714
ugcaaagcaacauuuaaau

SEQ ID NO: 1450716 - RNA, 19 nt, Artificial Sequence
  Description of Artificial Sequence: Synthetic oligonucleotide
  Sense strand starting at position 2741 of SEQ ID NO: 1243912
ggaccacacuguccuaaau

SEQ ID NO: 1450717 - RNA, 19 nt, Artificial Sequence
  Description of Artificial Sequence: Synthetic oligonucleotide
  Antisense strand to SEQ ID NO: 1450716
auuuaggacaguguggucc

SEQ ID NO: 1450718 - RNA, 19 nt, Artificial Sequence
  Description of Artificial Sequence: Synthetic oligonucleotide
  Sense strand starting at position 2773 of SEQ ID NO: 1243912
gucaaaugaacguguccaa

SEQ ID NO: 1450719 - RNA, 19 nt, Artificial Sequence
  Description of Artificial Sequence: Synthetic oligonucleotide
  Antisense strand to SEQ ID NO: 1450718
uuggacacguucauuugac

SEQ ID NO: 1450720 - RNA, 19 nt, Artificial Sequence
  Description of Artificial Sequence: Synthetic oligonucleotide
  Sense strand starting at position 2807 of SEQ ID NO: 1243912
caggaugucucuuugaggu

SEQ ID NO: 1450721 - RNA, 19 nt, Artificial Sequence
  Description of Artificial Sequence: Synthetic oligonucleotide
  Antisense strand to SEQ ID NO: 1450720
accucaaagagacauccug

SEQ ID NO: 1450722 - RNA, 19 nt, Artificial Sequence
  Description of Artificial Sequence: Synthetic oligonucleotide
  Sense strand starting at position 3068 of SEQ ID NO: 1243912
caaggaggucauugccauu

SEQ ID NO: 1450723 - RNA, 19 nt, Artificial Sequence
  Description of Artificial Sequence: Synthetic oligonucleotide
  Antisense strand to SEQ ID NO: 1450722
aauggcaaugaccuccuug

SEQ ID NO: 1450724 - RNA, 19 nt, Artificial Sequence
  Description of Artificial Sequence: Synthetic oligonucleotide
  Sense strand starting at position 3440 of SEQ ID NO: 1243912
uggcgugagggcuaagaaa

SEQ ID NO: 1450725 - RNA, 19 nt, Artificial Sequence
  Description of Artificial Sequence: Synthetic oligonucleotide
  Antisense strand to SEQ ID NO: 1450724
uuucuuagcccucacgcca

SEQ ID NO: 1450726 - RNA, 19 nt, Artificial Sequence
  Description of Artificial Sequence: Synthetic oligonucleotide
  Sense strand starting at position 3504 of SEQ ID NO: 1243912
ccacauaccugugucaauc

SEQ ID NO: 1450727 - RNA, 19 nt, Artificial Sequence
  Description of Artificial Sequence: Synthetic oligonucleotide
  Antisense strand to SEQ ID NO: 1450726
gauugacacagguaugugg

SEQ ID NO: 1450728 - RNA, 19 nt, Artificial Sequence
  Description of Artificial Sequence: Synthetic oligonucleotide
  Sense strand starting at position 3570 of SEQ ID NO: 1243912
cuacccuauggguguaagu

SEQ ID NO: 1450729 - RNA, 19 nt, Artificial Sequence
  Description of Artificial Sequence: Synthetic oligonucleotide
  Antisense strand to SEQ ID NO: 1450728
acuuacacccauaggguag

SEQ ID NO: 1450730 - RNA, 19 nt, Artificial Sequence
  Description of Artificial Sequence: Synthetic oligonucleotide
  Sense strand starting at position 3572 of SEQ ID NO: 1243912
acccuauggguguaaguca

SEQ ID NO: 1450731 - RNA, 19 nt, Artificial Sequence
  Description of Artificial Sequence: Synthetic oligonucleotide
  Antisense strand to SEQ ID NO: 1450730
ugacuuacacccauagggu

SEQ ID NO: 1450732 - RNA, 19 nt, Artificial Sequence
  Description of Artificial Sequence: Synthetic oligonucleotide
  Sense strand starting at position 3587 of SEQ ID NO: 1243912
gucacuuugucucccagaa

SEQ ID NO: 1450733 - RNA, 19 nt, Artificial Sequence
  Description of Artificial Sequence: Synthetic oligonucleotide
  Antisense strand to SEQ ID NO: 1450732
uucugggagacaaagugac

SEQ ID NO: 1450734 - RNA, 19 nt, Artificial Sequence
  Description of Artificial Sequence: Synthetic oligonucleotide
  Sense strand starting at position 3609 of SEQ ID NO: 1243912
cccagugacuuauaauuug

SEQ ID NO: 1450735 - RNA, 19 nt, Artificial Sequence
  Description of Artificial Sequence: Synthetic oligonucleotide
  Antisense strand to SEQ ID NO: 1450734
caaauuauaagucacuggg

SEQ ID NO: 1450736 - RNA, 19 nt, Artificial Sequence
  Description of Artificial Sequence: Synthetic oligonucleotide
  Sense strand starting at position 3753 of SEQ ID NO: 1243912
gugaggaaugcgugaugga

SEQ ID NO: 1450737 - RNA, 19 nt, Artificial Sequence
  Description of Artificial Sequence: Synthetic oligonucleotide
  Antisense strand to SEQ ID NO: 1450736
uccaucacgcauuccucac

SEQ ID NO: 1450738 - RNA, 19 nt, Artificial Sequence
  Description of Artificial Sequence: Synthetic oligonucleotide
  Sense strand starting at position 3754 of SEQ ID NO: 1243912
ugaggaaugcgugauggaa

SEQ ID NO: 1450739 - RNA, 19 nt, Artificial Sequence
  Description of Artificial Sequence: Synthetic oligonucleotide
  Antisense strand to SEQ ID NO: 1450738
uuccaucacgcauuccuca

SEQ ID NO: 1450740 - RNA, 19 nt, Artificial Sequence
  Description of Artificial Sequence: Synthetic oligonucleotide
  Sense strand starting at position 3777 of SEQ ID NO: 1243912
uaaagcugugagcacaaau

SEQ ID NO: 1450741 - RNA, 19 nt, Artificial Sequence
  Description of Artificial Sequence: Synthetic oligonucleotide
  Antisense strand to SEQ ID NO: 1450740
auuugugcucacagcuuua

SEQ ID NO: 1450742 - RNA, 19 nt, Artificial Sequence
  Description of Artificial Sequence: Synthetic oligonucleotide
  Sense strand starting at position 3871 of SEQ ID NO: 1243912
caaugucaucauugacgca

SEQ ID NO: 1450743 - RNA, 19 nt, Artificial Sequence
  Description of Artificial Sequence: Synthetic oligonucleotide
  Antisense strand to SEQ ID NO: 1450742
ugcgucaaugaugacauug

SEQ ID NO: 1450744 - RNA, 19 nt, Artificial Sequence
  Description of Artificial Sequence: Synthetic oligonucleotide
  Sense strand starting at position 3897 of SEQ ID NO: 1243912
ugcauuuacugcuugccua

SEQ ID NO: 1450745 - RNA, 19 nt, Artificial Sequence
  Description of Artificial Sequence: Synthetic oligonucleotide
  Antisense strand to SEQ ID NO: 1450744
uaggcaagcaguaaaugca

SEQ ID NO: 1450746 - RNA, 19 nt, Artificial Sequence
  Description of Artificial Sequence: Synthetic oligonucleotide
  Sense strand starting at position 40 of SEQ ID NO: 1243913
gccuguaguccagguuaca

SEQ ID NO: 1450747 - RNA, 19 nt, Artificial Sequence
  Description of Artificial Sequence: Synthetic oligonucleotide
  Antisense strand to SEQ ID NO: 1450746
uguaaccuggacuacaggc

SEQ ID NO: 1450748 - RNA, 19 nt, Artificial Sequence
  Description of Artificial Sequence: Synthetic oligonucleotide
  Sense strand starting at position 110 of SEQ ID NO: 1243913
cgugcagugagcuaugaga

SEQ ID NO: 1450749 - RNA, 19 nt, Artificial Sequence
  Description of Artificial Sequence: Synthetic oligonucleotide
  Antisense strand to SEQ ID NO: 1450748
ucucauagcucacugcacg

SEQ ID NO: 1450750 - RNA, 19 nt, Artificial Sequence
  Description of Artificial Sequence: Synthetic oligonucleotide
  Sense strand starting at position 221 of SEQ ID NO: 1243913
cuuguuuacuuauaaggua

SEQ ID NO: 1450751 - RNA, 19 nt, Artificial Sequence
  Description of Artificial Sequence: Synthetic oligonucleotide
  Antisense strand to SEQ ID NO: 1450750
uaccuuauaaguaaacaag

SEQ ID NO: 1450752 - RNA, 19 nt, Artificial Sequence
  Description of Artificial Sequence: Synthetic oligonucleotide
  Sense strand starting at position 224 of SEQ ID NO: 1243913
guuuacuuauaagguaaca

SEQ ID NO: 1450753 - RNA, 19 nt, Artificial Sequence
  Description of Artificial Sequence: Synthetic oligonucleotide
  Antisense strand to SEQ ID NO: 1450752
uguuaccuuauaaguaaac

SEQ ID NO: 1450754 - RNA, 19 nt, Artificial Sequence
  Description of Artificial Sequence: Synthetic oligonucleotide
  Sense strand starting at position 571 of SEQ ID NO: 1243913
aggagaaucgcucagcuca

SEQ ID NO: 1450755 - RNA, 19 nt, Artificial Sequence
  Description of Artificial Sequence: Synthetic oligonucleotide
  Antisense strand to SEQ ID NO: 1450754
ugagcugagcgauucuccu

SEQ ID NO: 1450756 - RNA, 19 nt, Artificial Sequence
  Description of Artificial Sequence: Synthetic oligonucleotide
  Sense strand starting at position 850 of SEQ ID NO: 1243913
augucccauuaguuauuaa

SEQ ID NO: 1450757 - RNA, 19 nt, Artificial Sequence
  Description of Artificial Sequence: Synthetic oligonucleotide
  Antisense strand to SEQ ID NO: 1450756
uuaauaacuaaugggacau

SEQ ID NO: 1450758 - RNA, 19 nt, Artificial Sequence
  Description of Artificial Sequence: Synthetic oligonucleotide
  Sense strand starting at position 890 of SEQ ID NO: 1243913
gccacagaguucugcuuua

SEQ ID NO: 1450759 - RNA, 19 nt, Artificial Sequence
  Description of Artificial Sequence: Synthetic oligonucleotide
  Antisense strand to SEQ ID NO: 1450758
uaaagcagaacucuguggc

SEQ ID NO: 1450760 - RNA, 19 nt, Artificial Sequence
  Description of Artificial Sequence: Synthetic oligonucleotide
  Sense strand starting at position 904 of SEQ ID NO: 1243913
cuuuauuuguacuuugcua

SEQ ID NO: 1450761 - RNA, 19 nt, Artificial Sequence
  Description of Artificial Sequence: Synthetic oligonucleotide
  Antisense strand to SEQ ID NO: 1450760
uagcaaaguacaaauaaag

SEQ ID NO: 1450762 - RNA, 19 nt, Artificial Sequence
  Description of Artificial Sequence: Synthetic oligonucleotide
  Sense strand starting at position 1291 of SEQ ID NO: 1243913
cguucucauuucugaacaa

SEQ ID NO: 1450763 - RNA, 19 nt, Artificial Sequence
  Description of Artificial Sequence: Synthetic oligonucleotide
  Antisense strand to SEQ ID NO: 1450762
uuguucagaaaugagaacg

SEQ ID NO: 1450764 - RNA, 19 nt, Artificial Sequence
  Description of Artificial Sequence: Synthetic oligonucleotide
  Sense strand starting at position 2485 of SEQ ID NO: 1243913
ugcuguauguccuaaguuu

SEQ ID NO: 1450765 - RNA, 19 nt, Artificial Sequence
  Description of Artificial Sequence: Synthetic oligonucleotide
  Antisense strand to SEQ ID NO: 1450764
aaacuuaggacauacagca

SEQ ID NO: 1450766 - RNA, 19 nt, Artificial Sequence
  Description of Artificial Sequence: Synthetic oligonucleotide
  Sense strand starting at position 2887 of SEQ ID NO: 1243913
cuuucuuuaugacagagga

SEQ ID NO: 1450767 - RNA, 19 nt, Artificial Sequence
  Description of Artificial Sequence: Synthetic oligonucleotide
  Antisense strand to SEQ ID NO: 1450766
uccucugucauaaagaaag

SEQ ID NO: 1450768 - RNA, 19 nt, Artificial Sequence
  Description of Artificial Sequence: Synthetic oligonucleotide
  Sense strand starting at position 3085 of SEQ ID NO: 1243913
gcccaccuguccugaguuu

SEQ ID NO: 1450769 - RNA, 19 nt, Artificial Sequence
  Description of Artificial Sequence: Synthetic oligonucleotide
  Antisense strand to SEQ ID NO: 1450768
aaacucaggacaggugggc

SEQ ID NO: 1450770 - RNA, 19 nt, Artificial Sequence
  Description of Artificial Sequence: Synthetic oligonucleotide
  Sense strand starting at position 3468 of SEQ ID NO: 1243913
uuaccagauuguccaguuu

SEQ ID NO: 1450771 - RNA, 19 nt, Artificial Sequence
  Description of Artificial Sequence: Synthetic oligonucleotide
  Antisense strand to SEQ ID NO: 1450770
aaacuggacaaucugguaa

SEQ ID NO: 1450772 - RNA, 19 nt, Artificial Sequence
  Description of Artificial Sequence: Synthetic oligonucleotide
  Sense strand starting at position 3612 of SEQ ID NO: 1243913
ccacauugaccuggcaaau

SEQ ID NO: 1450773 - RNA, 19 nt, Artificial Sequence
  Description of Artificial Sequence: Synthetic oligonucleotide
  Antisense strand to SEQ ID NO: 1450772
auuugccaggucaaugugg

SEQ ID NO: 1450774 - RNA, 19 nt, Artificial Sequence
  Description of Artificial Sequence: Synthetic oligonucleotide
  Sense strand starting at position 3749 of SEQ ID NO: 1243913
guaucuucgagcuggcuuu

SEQ ID NO: 1450775 - RNA, 19 nt, Artificial Sequence
  Description of Artificial Sequence: Synthetic oligonucleotide
  Antisense strand to SEQ ID NO: 1450774
aaagccagcucgaagauac

SEQ ID NO: 1450776 - RNA, 19 nt, Artificial Sequence
  Description of Artificial Sequence: Synthetic oligonucleotide
  Sense strand starting at position 3763 of SEQ ID NO: 1243913
gcuuucuucccuuaucagu

SEQ ID NO: 1450777 - RNA, 19 nt, Artificial Sequence
  Description of Artificial Sequence: Synthetic oligonucleotide
  Antisense strand to SEQ ID NO: 1450776
acugauaagggaagaaagc

SEQ ID NO: 1450778 - RNA, 19 nt, Artificial Sequence
  Description of Artificial Sequence: Synthetic oligonucleotide
  Sense strand starting at position 3771 of SEQ ID NO: 1243913
cccuuaucaguaugcaagu

SEQ ID NO: 1450779 - RNA, 19 nt, Artificial Sequence
  Description of Artificial Sequence: Synthetic oligonucleotide
  Antisense strand to SEQ ID NO: 1450778
acuugcauacugauaaggg

SEQ ID NO: 1450780 - RNA, 19 nt, Artificial Sequence
  Description of Artificial Sequence: Synthetic oligonucleotide
  Sense strand starting at position 3800 of SEQ ID NO: 1243913
cucagcucuugcucaaaga

SEQ ID NO: 1450781 - RNA, 19 nt, Artificial Sequence
  Description of Artificial Sequence: Synthetic oligonucleotide
  Antisense strand to SEQ ID NO: 1450780
ucuuugagcaagagcugag

SEQ ID NO: 1450782 - RNA, 19 nt, Artificial Sequence
  Description of Artificial Sequence: Synthetic oligonucleotide
  Sense strand starting at position 3839 of SEQ ID NO: 1243913
cgauucagauggcauguua

SEQ ID NO: 1450783 - RNA, 19 nt, Artificial Sequence
  Description of Artificial Sequence: Synthetic oligonucleotide
  Antisense strand to SEQ ID NO: 1450782
uaacaugccaucugaaucg

SEQ ID NO: 1450784 - RNA, 19 nt, Artificial Sequence
  Description of Artificial Sequence: Synthetic oligonucleotide
  Sense strand starting at position 3921 of SEQ ID NO: 1243913
gagggauacugguauuacu

SEQ ID NO: 1450785 - RNA, 19 nt, Artificial Sequence
  Description of Artificial Sequence: Synthetic oligonucleotide
  Antisense strand to SEQ ID NO: 1450784
aguaauaccaguaucccuc

SEQ ID NO: 1450786 - RNA, 19 nt, Artificial Sequence
  Description of Artificial Sequence: Synthetic oligonucleotide
  Sense strand starting at position 3930 of SEQ ID NO: 1243913
ugguauuacugcuaaucac

SEQ ID NO: 1450787 - RNA, 19 nt, Artificial Sequence
  Description of Artificial Sequence: Synthetic oligonucleotide
  Antisense strand to SEQ ID NO: 1450786
gugauuagcaguaauacca

SEQ ID NO: 1450788 - RNA, 19 nt, Artificial Sequence
  Description of Artificial Sequence: Synthetic oligonucleotide
  Sense strand starting at position 3980 of SEQ ID NO: 1243913
ucuguucccuuauauuguu

SEQ ID NO: 1450789 - RNA, 19 nt, Artificial Sequence
  Description of Artificial Sequence: Synthetic oligonucleotide
  Antisense strand to SEQ ID NO: 1450788
aacaauauaagggaacaga

SEQ ID NO: 1450790 - RNA, 19 nt, Artificial Sequence
  Description of Artificial Sequence: Synthetic oligonucleotide
  Sense strand starting at position 204 of SEQ ID NO: 1243914
uuacuacaaggcugaaaua

SEQ ID NO: 1450791 - RNA, 19 nt, Artificial Sequence
  Description of Artificial Sequence: Synthetic oligonucleotide
  Antisense strand to SEQ ID NO: 1450790
uauuucagccuuguaguaa

SEQ ID NO: 1450792 - RNA, 19 nt, Artificial Sequence
  Description of Artificial Sequence: Synthetic oligonucleotide
  Sense strand starting at position 267 of SEQ ID NO: 1243914
ucuugaaguucuccagaga

SEQ ID NO: 1450793 - RNA, 19 nt, Artificial Sequence
  Description of Artificial Sequence: Synthetic oligonucleotide
  Antisense strand to SEQ ID NO: 1450792
ucucuggagaacuucaaga

SEQ ID NO: 1450794 - RNA, 19 nt, Artificial Sequence
  Description of Artificial Sequence: Synthetic oligonucleotide
  Sense strand starting at position 342 of SEQ ID NO: 1243914
ugaaguggauuacuguuua

SEQ ID NO: 1450795 - RNA, 19 nt, Artificial Sequence
  Description of Artificial Sequence: Synthetic oligonucleotide
  Antisense strand to SEQ ID NO: 1450794
uaaacaguaauccacuuca

SEQ ID NO: 1450796 - RNA, 19 nt, Artificial Sequence
  Description of Artificial Sequence: Synthetic oligonucleotide
  Sense strand starting at position 375 of SEQ ID NO: 1243914
gauggcauaucuguuaaca

SEQ ID NO: 1450797 - RNA, 19 nt, Artificial Sequence
  Description of Artificial Sequence: Synthetic oligonucleotide
  Antisense strand to SEQ ID NO: 1450796
uguuaacagauaugccauc

SEQ ID NO: 1450798 - RNA, 19 nt, Artificial Sequence
  Description of Artificial Sequence: Synthetic oligonucleotide
  Sense strand starting at position 713 of SEQ ID NO: 1243914
cggccaacuagaugauauu

SEQ ID NO: 1450799 - RNA, 19 nt, Artificial Sequence
  Description of Artificial Sequence: Synthetic oligonucleotide
  Antisense strand to SEQ ID NO: 1450798
aauaucaucuaguuggccg

SEQ ID NO: 1450800 - RNA, 19 nt, Artificial Sequence
  Description of Artificial Sequence: Synthetic oligonucleotide
  Sense strand starting at position 751 of SEQ ID NO: 1243914
agggaagugccaugugcua

SEQ ID NO: 1450801 - RNA, 19 nt, Artificial Sequence
  Description of Artificial Sequence: Synthetic oligonucleotide
  Antisense strand to SEQ ID NO: 1450800
uagcacauggcacuucccu

SEQ ID NO: 1450802 - RNA, 19 nt, Artificial Sequence
  Description of Artificial Sequence: Synthetic oligonucleotide
  Sense strand starting at position 753 of SEQ ID NO: 1243914
ggaagugccaugugcuaaa

SEQ ID NO: 1450803 - RNA, 19 nt, Artificial Sequence
  Description of Artificial Sequence: Synthetic oligonucleotide
  Antisense strand to SEQ ID NO: 1450802
uuuagcacauggcacuucc

SEQ ID NO: 1450804 - RNA, 19 nt, Artificial Sequence
  Description of Artificial Sequence: Synthetic oligonucleotide
  Sense strand starting at position 787 of SEQ ID NO: 1243914
gguagcaguguuuaacuua

SEQ ID NO: 1450805 - RNA, 19 nt, Artificial Sequence
  Description of Artificial Sequence: Synthetic oligonucleotide
  Antisense strand to SEQ ID NO: 1450804
uaaguuaaacacugcuacc

SEQ ID NO: 1450806 - RNA, 19 nt, Artificial Sequence
  Description of Artificial Sequence: Synthetic oligonucleotide
  Sense strand starting at position 816 of SEQ ID NO: 1243914
uguaaacaacuaugaaugu

SEQ ID NO: 1450807 - RNA, 19 nt, Artificial Sequence
  Description of Artificial Sequence: Synthetic oligonucleotide
  Antisense strand to SEQ ID NO: 1450806
acauucauaguuguuuaca

SEQ ID NO: 1450808 - RNA, 19 nt, Artificial Sequence
  Description of Artificial Sequence: Synthetic oligonucleotide
  Sense strand starting at position 871 of SEQ ID NO: 1243914
cuccacaucugucuguuaa

SEQ ID NO: 1450809 - RNA, 19 nt, Artificial Sequence
  Description of Artificial Sequence: Synthetic oligonucleotide
  Antisense strand to SEQ ID NO: 1450808
uuaacagacagauguggag

SEQ ID NO: 1450810 - RNA, 19 nt, Artificial Sequence
  Description of Artificial Sequence: Synthetic oligonucleotide
  Sense strand starting at position 872 of SEQ ID NO: 1243914
uccacaucugucuguuaau

SEQ ID NO: 1450811 - RNA, 19 nt, Artificial Sequence
  Description of Artificial Sequence: Synthetic oligonucleotide
  Antisense strand to SEQ ID NO: 1450810
auuaacagacagaugugga

SEQ ID NO: 1450812 - RNA, 19 nt, Artificial Sequence
  Description of Artificial Sequence: Synthetic oligonucleotide
  Sense strand starting at position 873 of SEQ ID NO: 1243914
ccacaucugucuguuaauc

SEQ ID NO: 1450813 - RNA, 19 nt, Artificial Sequence
  Description of Artificial Sequence: Synthetic oligonucleotide
  Antisense strand to SEQ ID NO: 1450812
gauuaacagacagaugugg

SEQ ID NO: 1450814 - RNA, 19 nt, Artificial Sequence
  Description of Artificial Sequence: Synthetic oligonucleotide
  Sense strand starting at position 1175 of SEQ ID NO: 1243914
uucggucuucuccaagaga

SEQ ID NO: 1450815 - RNA, 19 nt, Artificial Sequence
  Description of Artificial Sequence: Synthetic oligonucleotide
  Antisense strand to SEQ ID NO: 1450814
ucucuuggagaagaccgaa

SEQ ID NO: 1450816 - RNA, 19 nt, Artificial Sequence
  Description of Artificial Sequence: Synthetic oligonucleotide
  Sense strand starting at position 1293 of SEQ ID NO: 1243914
aggcaaucgucuccugaga

SEQ ID NO: 1450817 - RNA, 19 nt, Artificial Sequence
  Description of Artificial Sequence: Synthetic oligonucleotide
  Antisense strand to SEQ ID NO: 1450816
ucucaggagacgauugccu

SEQ ID NO: 1450818 - RNA, 19 nt, Artificial Sequence
  Description of Artificial Sequence: Synthetic oligonucleotide
  Sense strand starting at position 1999 of SEQ ID NO: 1243914
uacgguguccuuggaagga

SEQ ID NO: 1450819 - RNA, 19 nt, Artificial Sequence
  Description of Artificial Sequence: Synthetic oligonucleotide
  Antisense strand to SEQ ID NO: 1450818
uccuuccaaggacaccgua

SEQ ID NO: 1450820 - RNA, 19 nt, Artificial Sequence
  Description of Artificial Sequence: Synthetic oligonucleotide
  Sense strand starting at position 2001 of SEQ ID NO: 1243914
cgguguccuuggaaggaca

SEQ ID NO: 1450821 - RNA, 19 nt, Artificial Sequence
  Description of Artificial Sequence: Synthetic oligonucleotide
  Antisense strand to SEQ ID NO: 1450820
uguccuuccaaggacaccg

SEQ ID NO: 1450822 - RNA, 19 nt, Artificial Sequence
  Description of Artificial Sequence: Synthetic oligonucleotide
  Sense strand starting at position 2003 of SEQ ID NO: 1243914
guguccuuggaaggacaau

SEQ ID NO: 1450823 - RNA, 19 nt, Artificial Sequence
  Description of Artificial Sequence: Synthetic oligonucleotide
  Antisense strand to SEQ ID NO: 1450822
auuguccuuccaaggacac

SEQ ID NO: 1450824 - RNA, 19 nt, Artificial Sequence
  Description of Artificial Sequence: Synthetic oligonucleotide
  Sense strand starting at position 2023 of SEQ ID NO: 1243914
uuaguuucgcgauuccucu

SEQ ID NO: 1450825 - RNA, 19 nt, Artificial Sequence
  Description of Artificial Sequence: Synthetic oligonucleotide
  Antisense strand to SEQ ID NO: 1450824
agaggaaucgcgaaacuaa

SEQ ID NO: 1450826 - RNA, 19 nt, Artificial Sequence
  Description of Artificial Sequence: Synthetic oligonucleotide
  Sense strand starting at position 2029 of SEQ ID NO: 1243914
ucgcgauuccucuuuccgu

SEQ ID NO: 1450827 - RNA, 19 nt, Artificial Sequence
  Description of Artificial Sequence: Synthetic oligonucleotide
  Antisense strand to SEQ ID NO: 1450826
acggaaagaggaaucgcga

SEQ ID NO: 1450828 - RNA, 19 nt, Artificial Sequence
  Description of Artificial Sequence: Synthetic oligonucleotide
  Sense strand starting at position 2189 of SEQ ID NO: 1243914
uuccuagaaguuugaauac

SEQ ID NO: 1450829 - RNA, 19 nt, Artificial Sequence
  Description of Artificial Sequence: Synthetic oligonucleotide
  Antisense strand to SEQ ID NO: 1450828
guauucaaacuucuaggaa

SEQ ID NO: 1450830 - RNA, 19 nt, Artificial Sequence
  Description of Artificial Sequence: Synthetic oligonucleotide
  Sense strand starting at position 2225 of SEQ ID NO: 1243914
cuaacacuugcagagcauu

SEQ ID NO: 1450831 - RNA, 19 nt, Artificial Sequence
  Description of Artificial Sequence: Synthetic oligonucleotide
  Antisense strand to SEQ ID NO: 1450830
aaugcucugcaaguguuag

SEQ ID NO: 1450832 - RNA, 19 nt, Artificial Sequence
  Description of Artificial Sequence: Synthetic oligonucleotide
  Sense strand starting at position 2392 of SEQ ID NO: 1243914
uuagacugcuaauuagaga

SEQ ID NO: 1450833 - RNA, 19 nt, Artificial Sequence
  Description of Artificial Sequence: Synthetic oligonucleotide
  Antisense strand to SEQ ID NO: 1450832
ucucuaauuagcagucuaa

SEQ ID NO: 1450834 - RNA, 19 nt, Artificial Sequence
  Description of Artificial Sequence: Synthetic oligonucleotide
  Sense strand starting at position 2470 of SEQ ID NO: 1243914
uguacuuauccaggucaac

SEQ ID NO: 1450835 - RNA, 19 nt, Artificial Sequence
  Description of Artificial Sequence: Synthetic oligonucleotide
  Antisense strand to SEQ ID NO: 1450834
guugaccuggauaaguaca

SEQ ID NO: 1450836 - RNA, 19 nt, Artificial Sequence
  Description of Artificial Sequence: Synthetic oligonucleotide
  Sense strand starting at position 2710 of SEQ ID NO: 1243914
cuuaucucccuaggagauc

SEQ ID NO: 1450837 - RNA, 19 nt, Artificial Sequence
  Description of Artificial Sequence: Synthetic oligonucleotide
  Antisense strand to SEQ ID NO: 1450836
gaucuccuagggagauaag

SEQ ID NO: 1450838 - RNA, 19 nt, Artificial Sequence
  Description of Artificial Sequence: Synthetic oligonucleotide
  Sense strand starting at position 2792 of SEQ ID NO: 1243914
ccugucugaucuccagacu

SEQ ID NO: 1450839 - RNA, 19 nt, Artificial Sequence
  Description of Artificial Sequence: Synthetic oligonucleotide
  Antisense strand to SEQ ID NO: 1450838
agucuggagaucagacagg

SEQ ID NO: 1450840 - RNA, 19 nt, Artificial Sequence
  Description of Artificial Sequence: Synthetic oligonucleotide
  Sense strand starting at position 2795 of SEQ ID NO: 1243914
gucugaucuccagacucac

SEQ ID NO: 1450841 - RNA, 19 nt, Artificial Sequence
  Description of Artificial Sequence: Synthetic oligonucleotide
  Antisense strand to SEQ ID NO: 1450840
gugagucuggagaucagac

SEQ ID NO: 1450842 - RNA, 19 nt, Artificial Sequence
  Description of Artificial Sequence: Synthetic oligonucleotide
  Sense strand starting at position 2956 of SEQ ID NO: 1243914
uguuacuguuuacucaaau

SEQ ID NO: 1450843 - RNA, 19 nt, Artificial Sequence
  Description of Artificial Sequence: Synthetic oligonucleotide
  Antisense strand to SEQ ID NO: 1450842
auuugaguaaacaguaaca

SEQ ID NO: 1450844 - RNA, 19 nt, Artificial Sequence
  Description of Artificial Sequence: Synthetic oligonucleotide
  Sense strand starting at position 2957 of SEQ ID NO: 1243914
guuacuguuuacucaaaug

SEQ ID NO: 1450845 - RNA, 19 nt, Artificial Sequence
  Description of Artificial Sequence: Synthetic oligonucleotide
  Antisense strand to SEQ ID NO: 1450844
cauuugaguaaacaguaac

SEQ ID NO: 1450846 - RNA, 19 nt, Artificial Sequence
  Description of Artificial Sequence: Synthetic oligonucleotide
  Sense strand starting at position 3222 of SEQ ID NO: 1243914
cagcaaccagagugauagu

SEQ ID NO: 1450847 - RNA, 19 nt, Artificial Sequence
  Description of Artificial Sequence: Synthetic oligonucleotide
  Antisense strand to SEQ ID NO: 1450846
acuaucacucugguugcug

SEQ ID NO: 1450848 - RNA, 19 nt, Artificial Sequence
  Description of Artificial Sequence: Synthetic oligonucleotide
  Sense strand starting at position 3570 of SEQ ID NO: 1243914
gguagagguauauacagua

SEQ ID NO: 1450849 - RNA, 19 nt, Artificial Sequence
  Description of Artificial Sequence: Synthetic oligonucleotide
  Antisense strand to SEQ ID NO: 1450848
uacuguauauaccucuacc

SEQ ID NO: 1450850 - RNA, 19 nt, Artificial Sequence
  Description of Artificial Sequence: Synthetic oligonucleotide
  Sense strand starting at position 3600 of SEQ ID NO: 1243914
uaucucuuccagugggacu

SEQ ID NO: 1450851 - RNA, 19 nt, Artificial Sequence
  Description of Artificial Sequence: Synthetic oligonucleotide
  Antisense strand to SEQ ID NO: 1450850
agucccacuggaagagaua

SEQ ID NO: 1450852 - RNA, 19 nt, Artificial Sequence
  Description of Artificial Sequence: Synthetic oligonucleotide
  Sense strand starting at position 3638 of SEQ ID NO: 1243914
acaucucagcccugaugaa

SEQ ID NO: 1450853 - RNA, 19 nt, Artificial Sequence
  Description of Artificial Sequence: Synthetic oligonucleotide
  Antisense strand to SEQ ID NO: 1450852
uucaucagggcugagaugu

SEQ ID NO: 1450854 - RNA, 19 nt, Artificial Sequence
  Description of Artificial Sequence: Synthetic oligonucleotide
  Sense strand starting at position 3658 of SEQ ID NO: 1243914
gaacgaagccuuggccaua

SEQ ID NO: 1450855 - RNA, 19 nt, Artificial Sequence
  Description of Artificial Sequence: Synthetic oligonucleotide
  Antisense strand to SEQ ID NO: 1450854
uauggccaaggcuucguuc

SEQ ID NO: 1450856 - RNA, 19 nt, Artificial Sequence
  Description of Artificial Sequence: Synthetic oligonucleotide
  Sense strand starting at position 3680 of SEQ ID NO: 1243914
cuugcuuuggcucaugaaa

SEQ ID NO: 1450857 - RNA, 19 nt, Artificial Sequence
  Description of Artificial Sequence: Synthetic oligonucleotide
  Antisense strand to SEQ ID NO: 1450856
uuucaugagccaaagcaag

SEQ ID NO: 1450858 - RNA, 19 nt, Artificial Sequence
  Description of Artificial Sequence: Synthetic oligonucleotide
  Sense strand starting at position 3794 of SEQ ID NO: 1243914
aaagguaucugccucagca

SEQ ID NO: 1450859 - RNA, 19 nt, Artificial Sequence
  Description of Artificial Sequence: Synthetic oligonucleotide
  Antisense strand to SEQ ID NO: 1450858
ugcugaggcagauaccuuu

SEQ ID NO: 1450860 - RNA, 19 nt, Artificial Sequence
  Description of Artificial Sequence: Synthetic oligonucleotide
  Sense strand starting at position 3796 of SEQ ID NO: 1243914
agguaucugccucagcauu

SEQ ID NO: 1450861 - RNA, 19 nt, Artificial Sequence
  Description of Artificial Sequence: Synthetic oligonucleotide
  Antisense strand to SEQ ID NO: 1450860
aaugcugaggcagauaccu

SEQ ID NO: 1450862 - RNA, 19 nt, Artificial Sequence
  Description of Artificial Sequence: Synthetic oligonucleotide
  Sense strand starting at position 3807 of SEQ ID NO: 1243914
ucagcauuguuugcaauac

SEQ ID NO: 1450863 - RNA, 19 nt, Artificial Sequence
  Description of Artificial Sequence: Synthetic oligonucleotide
  Antisense strand to SEQ ID NO: 1450862
guauugcaaacaaugcuga

SEQ ID NO: 1450864 - RNA, 19 nt, Artificial Sequence
  Description of Artificial Sequence: Synthetic oligonucleotide
  Sense strand starting at position 3862 of SEQ ID NO: 1243914
cgggcaguagguuaaauaa

SEQ ID NO: 1450865 - RNA, 19 nt, Artificial Sequence
  Description of Artificial Sequence: Synthetic oligonucleotide
  Antisense strand to SEQ ID NO: 1450864
uuauuuaaccuacugcccg

SEQ ID NO: 1450866 - RNA, 19 nt, Artificial Sequence
  Description of Artificial Sequence: Synthetic oligonucleotide
  Sense strand starting at position 3878 of SEQ ID NO: 1243914
uaaauuaugguguagucau

SEQ ID NO: 1450867 - RNA, 19 nt, Artificial Sequence
  Description of Artificial Sequence: Synthetic oligonucleotide
  Antisense strand to SEQ ID NO: 1450866
augacuacaccauaauuua

SEQ ID NO: 1450868 - RNA, 19 nt, Artificial Sequence
  Description of Artificial Sequence: Synthetic oligonucleotide
  Sense strand starting at position 3889 of SEQ ID NO: 1243914
guagucauacugugcaaca

SEQ ID NO: 1450869 - RNA, 19 nt, Artificial Sequence
  Description of Artificial Sequence: Synthetic oligonucleotide
  Antisense strand to SEQ ID NO: 1450868
uguugcacaguaugacuac

SEQ ID NO: 1450870 - RNA, 19 nt, Artificial Sequence
  Description of Artificial Sequence: Synthetic oligonucleotide
  Sense strand starting at position 8 of SEQ ID NO: 1243915
agugcauauuccuuggauu

SEQ ID NO: 1450871 - RNA, 19 nt, Artificial Sequence
  Description of Artificial Sequence: Synthetic oligonucleotide
  Antisense strand to SEQ ID NO: 1450870
aauccaaggaauaugcacu

SEQ ID NO: 1450872 - RNA, 19 nt, Artificial Sequence
  Description of Artificial Sequence: Synthetic oligonucleotide
  Sense strand starting at position 9 of SEQ ID NO: 1243915
gugcauauuccuuggauuu

SEQ ID NO: 1450873 - RNA, 19 nt, Artificial Sequence
  Description of Artificial Sequence: Synthetic oligonucleotide
  Antisense strand to SEQ ID NO: 1450872
aaauccaaggaauaugcac

SEQ ID NO: 1450874 - RNA, 19 nt, Artificial Sequence
  Description of Artificial Sequence: Synthetic oligonucleotide
  Sense strand starting at position 21 of SEQ ID NO: 1243915
uggauuuguuuguaaauug

SEQ ID NO: 1450875 - RNA, 19 nt, Artificial Sequence
  Description of Artificial Sequence: Synthetic oligonucleotide
  Antisense strand to SEQ ID NO: 1450874
caauuuacaaacaaaucca

SEQ ID NO: 1450876 - RNA, 19 nt, Artificial Sequence
  Description of Artificial Sequence: Synthetic oligonucleotide
  Sense strand starting at position 47 of SEQ ID NO: 1243915
auguguaaugucuggacaa

SEQ ID NO: 1450877 - RNA, 19 nt, Artificial Sequence
  Description of Artificial Sequence: Synthetic oligonucleotide
  Antisense strand to SEQ ID NO: 1450876
uuguccagacauuacacau

SEQ ID NO: 1450878 - RNA, 19 nt, Artificial Sequence
  Description of Artificial Sequence: Synthetic oligonucleotide
  Sense strand starting at position 49 of SEQ ID NO: 1243915
guguaaugucuggacaaug

SEQ ID NO: 1450879 - RNA, 19 nt, Artificial Sequence
  Description of Artificial Sequence: Synthetic oligonucleotide
  Antisense strand to SEQ ID NO: 1450878
cauuguccagacauuacac

SEQ ID NO: 1450880 - RNA, 19 nt, Artificial Sequence
  Description of Artificial Sequence: Synthetic oligonucleotide
  Sense strand starting at position 317 of SEQ ID NO: 1243915
ucagccuugucacugaaca

SEQ ID NO: 1450881 - RNA, 19 nt, Artificial Sequence
  Description of Artificial Sequence: Synthetic oligonucleotide
  Antisense strand to SEQ ID NO: 1450880
uguucagugacaaggcuga

SEQ ID NO: 1450882 - RNA, 19 nt, Artificial Sequence
  Description of Artificial Sequence: Synthetic oligonucleotide
  Sense strand starting at position 702 of SEQ ID NO: 1243915
ggcauaaagcaggaguagu

SEQ ID NO: 1450883 - RNA, 19 nt, Artificial Sequence
  Description of Artificial Sequence: Synthetic oligonucleotide
  Antisense strand to SEQ ID NO: 1450882
acuacuccugcuuuaugcc

SEQ ID NO: 1450884 - RNA, 19 nt, Artificial Sequence
  Description of Artificial Sequence: Synthetic oligonucleotide
  Sense strand starting at position 900 of SEQ ID NO: 1243915
auugauguauguccagcaa

SEQ ID NO: 1450885 - RNA, 19 nt, Artificial Sequence
  Description of Artificial Sequence: Synthetic oligonucleotide
  Antisense strand to SEQ ID NO: 1450884
uugcuggacauacaucaau

SEQ ID NO: 1450886 - RNA, 19 nt, Artificial Sequence
  Description of Artificial Sequence: Synthetic oligonucleotide
  Sense strand starting at position 904 of SEQ ID NO: 1243915
auguauguccagcaagacu

SEQ ID NO: 1450887 - RNA, 19 nt, Artificial Sequence
  Description of Artificial Sequence: Synthetic oligonucleotide
  Antisense strand to SEQ ID NO: 1450886
agucuugcuggacauacau

SEQ ID NO: 1450888 - RNA, 19 nt, Artificial Sequence
  Description of Artificial Sequence: Synthetic oligonucleotide
  Sense strand starting at position 967 of SEQ ID NO: 1243915
gagauaaggcccugucauc

SEQ ID NO: 1450889 - RNA, 19 nt, Artificial Sequence
  Description of Artificial Sequence: Synthetic oligonucleotide
  Antisense strand to SEQ ID NO: 1450888
gaugacagggccuuaucuc

SEQ ID NO: 1450890 - RNA, 19 nt, Artificial Sequence
  Description of Artificial Sequence: Synthetic oligonucleotide
  Sense strand starting at position 1024 of SEQ ID NO: 1243915
ggccaagauuuccaaagag

SEQ ID NO: 1450891 - RNA, 19 nt, Artificial Sequence
  Description of Artificial Sequence: Synthetic oligonucleotide
  Antisense strand to SEQ ID NO: 1450890
cucuuuggaaaucuuggcc

SEQ ID NO: 1450892 - RNA, 19 nt, Artificial Sequence
  Description of Artificial Sequence: Synthetic oligonucleotide
  Sense strand starting at position 1033 of SEQ ID NO: 1243915
uuccaaagagauugcuuua

SEQ ID NO: 1450893 - RNA, 19 nt, Artificial Sequence
  Description of Artificial Sequence: Synthetic oligonucleotide
  Antisense strand to SEQ ID NO: 1450892
uaaagcaaucucuuuggaa

SEQ ID NO: 1450894 - RNA, 19 nt, Artificial Sequence
  Description of Artificial Sequence: Synthetic oligonucleotide
  Sense strand starting at position 1036 of SEQ ID NO: 1243915
caaagagauugcuuuagag

SEQ ID NO: 1450895 - RNA, 19 nt, Artificial Sequence
  Description of Artificial Sequence: Synthetic oligonucleotide
  Antisense strand to SEQ ID NO: 1450894
cucuaaagcaaucucuuug

SEQ ID NO: 1450896 - RNA, 19 nt, Artificial Sequence
  Description of Artificial Sequence: Synthetic oligonucleotide
  Sense strand starting at position 1152 of SEQ ID NO: 1243915
uguacaauagaucgucuua

SEQ ID NO: 1450897 - RNA, 19 nt, Artificial Sequence
  Description of Artificial Sequence: Synthetic oligonucleotide
  Antisense strand to SEQ ID NO: 1450896
uaagacgaucuauuguaca

SEQ ID NO: 1450898 - RNA, 19 nt, Artificial Sequence
  Description of Artificial Sequence: Synthetic oligonucleotide
  Sense strand starting at position 1207 of SEQ ID NO: 1243915
aauagaagcgccugcauuu

SEQ ID NO: 1450899 - RNA, 19 nt, Artificial Sequence
  Description of Artificial Sequence: Synthetic oligonucleotide
  Antisense strand to SEQ ID NO: 1450898
aaaugcaggcgcuucuauu

SEQ ID NO: 1450900 - RNA, 19 nt, Artificial Sequence
  Description of Artificial Sequence: Synthetic oligonucleotide
  Sense strand starting at position 1429 of SEQ ID NO: 1243915
caagaaugcugccuggauu

SEQ ID NO: 1450901 - RNA, 19 nt, Artificial Sequence
  Description of Artificial Sequence: Synthetic oligonucleotide
  Antisense strand to SEQ ID NO: 1450900
aauccaggcagcauucuug

SEQ ID NO: 1450902 - RNA, 19 nt, Artificial Sequence
  Description of Artificial Sequence: Synthetic oligonucleotide
  Sense strand starting at position 1430 of SEQ ID NO: 1243915
aagaaugcugccuggauua

SEQ ID NO: 1450903 - RNA, 19 nt, Artificial Sequence
  Description of Artificial Sequence: Synthetic oligonucleotide
  Antisense strand to SEQ ID NO: 1450902
uaauccaggcagcauucuu

SEQ ID NO: 1450904 - RNA, 19 nt, Artificial Sequence
  Description of Artificial Sequence: Synthetic oligonucleotide
  Sense strand starting at position 1432 of SEQ ID NO: 1243915
gaaugcugccuggauuaaa

SEQ ID NO: 1450905 - RNA, 19 nt, Artificial Sequence
  Description of Artificial Sequence: Synthetic oligonucleotide
  Antisense strand to SEQ ID NO: 1450904
uuuaauccaggcagcauuc

SEQ ID NO: 1450906 - RNA, 19 nt, Artificial Sequence
  Description of Artificial Sequence: Synthetic oligonucleotide
  Sense strand starting at position 2051 of SEQ ID NO: 1243915
guccuuucgaaaggauucu

SEQ ID NO: 1450907 - RNA, 19 nt, Artificial Sequence
  Description of Artificial Sequence: Synthetic oligonucleotide
  Antisense strand to SEQ ID NO: 1450906
agaauccuuucgaaaggac

SEQ ID NO: 1450908 - RNA, 19 nt, Artificial Sequence
  Description of Artificial Sequence: Synthetic oligonucleotide
  Sense strand starting at position 2089 of SEQ ID NO: 1243915
cggccguagcgucugaaau

SEQ ID NO: 1450909 - RNA, 19 nt, Artificial Sequence
  Description of Artificial Sequence: Synthetic oligonucleotide
  Antisense strand to SEQ ID NO: 1450908
auuucagacgcuacggccg

SEQ ID NO: 1450910 - RNA, 19 nt, Artificial Sequence
  Description of Artificial Sequence: Synthetic oligonucleotide
  Sense strand starting at position 2112 of SEQ ID NO: 1243915
ucgcuauuggguuaaaugu

SEQ ID NO: 1450911 - RNA, 19 nt, Artificial Sequence
  Description of Artificial Sequence: Synthetic oligonucleotide
  Antisense strand to SEQ ID NO: 1450910
acauuuaacccaauagcga

SEQ ID NO: 1450912 - RNA, 19 nt, Artificial Sequence
  Description of Artificial Sequence: Synthetic oligonucleotide
  Sense strand starting at position 2119 of SEQ ID NO: 1243915
uggguuaaauguuugucau

SEQ ID NO: 1450913 - RNA, 19 nt, Artificial Sequence
  Description of Artificial Sequence: Synthetic oligonucleotide
  Antisense strand to SEQ ID NO: 1450912
augacaaacauuuaaccca

SEQ ID NO: 1450914 - RNA, 19 nt, Artificial Sequence
  Description of Artificial Sequence: Synthetic oligonucleotide
  Sense strand starting at position 2120 of SEQ ID NO: 1243915
ggguuaaauguuugucauu

SEQ ID NO: 1450915 - RNA, 19 nt, Artificial Sequence
  Description of Artificial Sequence: Synthetic oligonucleotide
  Antisense strand to SEQ ID NO: 1450914
aaugacaaacauuuaaccc

SEQ ID NO: 1450916 - RNA, 19 nt, Artificial Sequence
  Description of Artificial Sequence: Synthetic oligonucleotide
  Sense strand starting at position 2121 of SEQ ID NO: 1243915
gguuaaauguuugucauug

SEQ ID NO: 1450917 - RNA, 19 nt, Artificial Sequence
  Description of Artificial Sequence: Synthetic oligonucleotide
  Antisense strand to SEQ ID NO: 1450916
caaugacaaacauuuaacc

SEQ ID NO: 1450918 - RNA, 19 nt, Artificial Sequence
  Description of Artificial Sequence: Synthetic oligonucleotide
  Sense strand starting at position 2192 of SEQ ID NO: 1243915
ggucauugguuggccaaga

SEQ ID NO: 1450919 - RNA, 19 nt, Artificial Sequence
  Description of Artificial Sequence: Synthetic oligonucleotide
  Antisense strand to SEQ ID NO: 1450918
ucuuggccaaccaaugacc

SEQ ID NO: 1450920 - RNA, 19 nt, Artificial Sequence
  Description of Artificial Sequence: Synthetic oligonucleotide
  Sense strand starting at position 2193 of SEQ ID NO: 1243915
gucauugguuggccaagau

SEQ ID NO: 1450921 - RNA, 19 nt, Artificial Sequence
  Description of Artificial Sequence: Synthetic oligonucleotide
  Antisense strand to SEQ ID NO: 1450920
aucuuggccaaccaaugac

SEQ ID NO: 1450922 - RNA, 19 nt, Artificial Sequence
  Description of Artificial Sequence: Synthetic oligonucleotide
  Sense strand starting at position 2210 of SEQ ID NO: 1243915
augucagucaggcagauaa

SEQ ID NO: 1450923 - RNA, 19 nt, Artificial Sequence
  Description of Artificial Sequence: Synthetic oligonucleotide
  Antisense strand to SEQ ID NO: 1450922
uuaucugccugacugacau

SEQ ID NO: 1450924 - RNA, 19 nt, Artificial Sequence
  Description of Artificial Sequence: Synthetic oligonucleotide
  Sense strand starting at position 2302 of SEQ ID NO: 1243915
aggccaagucucugagagu

SEQ ID NO: 1450925 - RNA, 19 nt, Artificial Sequence
  Description of Artificial Sequence: Synthetic oligonucleotide
  Antisense strand to SEQ ID NO: 1450924
acucucagagacuuggccu

SEQ ID NO: 1450926 - RNA, 19 nt, Artificial Sequence
  Description of Artificial Sequence: Synthetic oligonucleotide
  Sense strand starting at position 2400 of SEQ ID NO: 1243915
acaauucugccuuagugga

SEQ ID NO: 1450927 - RNA, 19 nt, Artificial Sequence
  Description of Artificial Sequence: Synthetic oligonucleotide
  Antisense strand to SEQ ID NO: 1450926
uccacuaaggcagaauugu

SEQ ID NO: 1450928 - RNA, 19 nt, Artificial Sequence
  Description of Artificial Sequence: Synthetic oligonucleotide
  Sense strand starting at position 2426 of SEQ ID NO: 1243915
cugacuuucgcgggacaga

SEQ ID NO: 1450929 - RNA, 19 nt, Artificial Sequence
  Description of Artificial Sequence: Synthetic oligonucleotide
  Antisense strand to SEQ ID NO: 1450928
ucugucccgcgaaagucag

SEQ ID NO: 1450930 - RNA, 19 nt, Artificial Sequence
  Description of Artificial Sequence: Synthetic oligonucleotide
  Sense strand starting at position 2751 of SEQ ID NO: 1243915
guaucugugccugugaguu

SEQ ID NO: 1450931 - RNA, 19 nt, Artificial Sequence
  Description of Artificial Sequence: Synthetic oligonucleotide
  Antisense strand to SEQ ID NO: 1450930
aacucacaggcacagauac

SEQ ID NO: 1450932 - RNA, 19 nt, Artificial Sequence
  Description of Artificial Sequence: Synthetic oligonucleotide
  Sense strand starting at position 2849 of SEQ ID NO: 1243915
gagguuuguauugaauugu

SEQ ID NO: 1450933 - RNA, 19 nt, Artificial Sequence
  Description of Artificial Sequence: Synthetic oligonucleotide
  Antisense strand to SEQ ID NO: 1450932
acaauucaauacaaaccuc

SEQ ID NO: 1450934 - RNA, 19 nt, Artificial Sequence
  Description of Artificial Sequence: Synthetic oligonucleotide
  Sense strand starting at position 2853 of SEQ ID NO: 1243915
uuuguauugaauuguugga

SEQ ID NO: 1450935 - RNA, 19 nt, Artificial Sequence
  Description of Artificial Sequence: Synthetic oligonucleotide
  Antisense strand to SEQ ID NO: 1450934
uccaacaauucaauacaaa

SEQ ID NO: 1450936 - RNA, 19 nt, Artificial Sequence
  Description of Artificial Sequence: Synthetic oligonucleotide
  Sense strand starting at position 2857 of SEQ ID NO: 1243915
uauugaauuguuggaugau

SEQ ID NO: 1450937 - RNA, 19 nt, Artificial Sequence
  Description of Artificial Sequence: Synthetic oligonucleotide
  Antisense strand to SEQ ID NO: 1450936
aucauccaacaauucaaua

SEQ ID NO: 1450938 - RNA, 19 nt, Artificial Sequence
  Description of Artificial Sequence: Synthetic oligonucleotide
  Sense strand starting at position 2860 of SEQ ID NO: 1243915
ugaauuguuggaugauaac

SEQ ID NO: 1450939 - RNA, 19 nt, Artificial Sequence
  Description of Artificial Sequence: Synthetic oligonucleotide
  Antisense strand to SEQ ID NO: 1450938
guuaucauccaacaauuca

SEQ ID NO: 1450940 - RNA, 19 nt, Artificial Sequence
  Description of Artificial Sequence: Synthetic oligonucleotide
  Sense strand starting at position 2949 of SEQ ID NO: 1243915
gugauaagggcucacugua

SEQ ID NO: 1450941 - RNA, 19 nt, Artificial Sequence
  Description of Artificial Sequence: Synthetic oligonucleotide
  Antisense strand to SEQ ID NO: 1450940
uacagugagcccuuaucac

SEQ ID NO: 1450942 - RNA, 19 nt, Artificial Sequence
  Description of Artificial Sequence: Synthetic oligonucleotide
  Sense strand starting at position 3077 of SEQ ID NO: 1243915
augagaucucuccauguug

SEQ ID NO: 1450943 - RNA, 19 nt, Artificial Sequence
  Description of Artificial Sequence: Synthetic oligonucleotide
  Antisense strand to SEQ ID NO: 1450942
caacauggagagaucucau

SEQ ID NO: 1450944 - RNA, 19 nt, Artificial Sequence
  Description of Artificial Sequence: Synthetic oligonucleotide
  Sense strand starting at position 3175 of SEQ ID NO: 1243915
ccaccauucugggcacuaa

SEQ ID NO: 1450945 - RNA, 19 nt, Artificial Sequence
  Description of Artificial Sequence: Synthetic oligonucleotide
  Antisense strand to SEQ ID NO: 1450944
uuagugcccagaauggugg

SEQ ID NO: 1450946 - RNA, 19 nt, Artificial Sequence
  Description of Artificial Sequence: Synthetic oligonucleotide
  Sense strand starting at position 3425 of SEQ ID NO: 1243915
accgcaucuggccaagaaa

SEQ ID NO: 1450947 - RNA, 19 nt, Artificial Sequence
  Description of Artificial Sequence: Synthetic oligonucleotide
  Antisense strand to SEQ ID NO: 1450946
uuucuuggccagaugcggu

SEQ ID NO: 1450948 - RNA, 19 nt, Artificial Sequence
  Description of Artificial Sequence: Synthetic oligonucleotide
  Sense strand starting at position 3875 of SEQ ID NO: 1243915
cuuaaagccuuauuaaggu

SEQ ID NO: 1450949 - RNA, 19 nt, Artificial Sequence
  Description of Artificial Sequence: Synthetic oligonucleotide
  Antisense strand to SEQ ID NO: 1450948
accuuaauaaggcuuuaag

SEQ ID NO: 1450950 - RNA, 19 nt, Artificial Sequence
  Description of Artificial Sequence: Synthetic oligonucleotide
  Sense strand starting at position 400 of SEQ ID NO: 1243916
gaaggagucucacucucuu

SEQ ID NO: 1450951 - RNA, 19 nt, Artificial Sequence
  Description of Artificial Sequence: Synthetic oligonucleotide
  Antisense strand to SEQ ID NO: 1450950
aagagagugagacuccuuc

SEQ ID NO: 1450952 - RNA, 19 nt, Artificial Sequence
  Description of Artificial Sequence: Synthetic oligonucleotide
  Sense strand starting at position 1069 of SEQ ID NO: 1243916
ccauuuccucaccguuaga

SEQ ID NO: 1450953 - RNA, 19 nt, Artificial Sequence
  Description of Artificial Sequence: Synthetic oligonucleotide
  Antisense strand to SEQ ID NO: 1450952
ucuaacggugaggaaaugg

SEQ ID NO: 1450954 - RNA, 19 nt, Artificial Sequence
  Description of Artificial Sequence: Synthetic oligonucleotide
  Sense strand starting at position 1072 of SEQ ID NO: 1243916
uuuccucaccguuagaauu

SEQ ID NO: 1450955 - RNA, 19 nt, Artificial Sequence
  Description of Artificial Sequence: Synthetic oligonucleotide
  Antisense strand to SEQ ID NO: 1450954
aauucuaacggugaggaaa

SEQ ID NO: 1450956 - RNA, 19 nt, Artificial Sequence
  Description of Artificial Sequence: Synthetic oligonucleotide
  Sense strand starting at position 1079 of SEQ ID NO: 1243916
accguuagaauugagacuu

SEQ ID NO: 1450957 - RNA, 19 nt, Artificial Sequence
  Description of Artificial Sequence: Synthetic oligonucleotide
  Antisense strand to SEQ ID NO: 1450956
aagucucaauucuaacggu

SEQ ID NO: 1450958 - RNA, 19 nt, Artificial Sequence
  Description of Artificial Sequence: Synthetic oligonucleotide
  Sense strand starting at position 1091 of SEQ ID NO: 1243916
gagacuuaaugucaaaguu

SEQ ID NO: 1450959 - RNA, 19 nt, Artificial Sequence
  Description of Artificial Sequence: Synthetic oligonucleotide
  Antisense strand to SEQ ID NO: 1450958
aacuuugacauuaagucuc

SEQ ID NO: 1450960 - RNA, 19 nt, Artificial Sequence
  Description of Artificial Sequence: Synthetic oligonucleotide
  Sense strand starting at position 1360 of SEQ ID NO: 1243916
cggagaugaucacucagcu

SEQ ID NO: 1450961 - RNA, 19 nt, Artificial Sequence
  Description of Artificial Sequence: Synthetic oligonucleotide
  Antisense strand to SEQ ID NO: 1450960
agcugagugaucaucuccg

SEQ ID NO: 1450962 - RNA, 19 nt, Artificial Sequence
  Description of Artificial Sequence: Synthetic oligonucleotide
  Sense strand starting at position 1446 of SEQ ID NO: 1243916
gagcaaacuugggaucgga

SEQ ID NO: 1450963 - RNA, 19 nt, Artificial Sequence
  Description of Artificial Sequence: Synthetic oligonucleotide
  Antisense strand to SEQ ID NO: 1450962
uccgaucccaaguuugcuc

SEQ ID NO: 1450964 - RNA, 19 nt, Artificial Sequence
  Description of Artificial Sequence: Synthetic oligonucleotide
  Sense strand starting at position 1550 of SEQ ID NO: 1243916
uuggucugauccugaguuu

SEQ ID NO: 1450965 - RNA, 19 nt, Artificial Sequence
  Description of Artificial Sequence: Synthetic oligonucleotide
  Antisense strand to SEQ ID NO: 1450964
aaacucaggaucagaccaa

SEQ ID NO: 1450966 - RNA, 19 nt, Artificial Sequence
  Description of Artificial Sequence: Synthetic oligonucleotide
  Sense strand starting at position 1553 of SEQ ID NO: 1243916
gucugauccugaguuugaa

SEQ ID NO: 1450967 - RNA, 19 nt, Artificial Sequence
  Description of Artificial Sequence: Synthetic oligonucleotide
  Antisense strand to SEQ ID NO: 1450966
uucaaacucaggaucagac

SEQ ID NO: 1450968 - RNA, 19 nt, Artificial Sequence
  Description of Artificial Sequence: Synthetic oligonucleotide
  Sense strand starting at position 1584 of SEQ ID NO: 1243916
agcccuuucuagcuguaaa

SEQ ID NO: 1450969 - RNA, 19 nt, Artificial Sequence
  Description of Artificial Sequence: Synthetic oligonucleotide
  Antisense strand to SEQ ID NO: 1450968
uuuacagcuagaaagggcu

SEQ ID NO: 1450970 - RNA, 19 nt, Artificial Sequence
  Description of Artificial Sequence: Synthetic oligonucleotide
  Sense strand starting at position 1610 of SEQ ID NO: 1243916
gcgcguccucagccguaaa

SEQ ID NO: 1450971 - RNA, 19 nt, Artificial Sequence
  Description of Artificial Sequence: Synthetic oligonucleotide
  Antisense strand to SEQ ID NO: 1450970
uuuacggcugaggacgcgc

SEQ ID NO: 1450972 - RNA, 19 nt, Artificial Sequence
  Description of Artificial Sequence: Synthetic oligonucleotide
  Sense strand starting at position 1654 of SEQ ID NO: 1243916
uaggguugcugucaagaca

SEQ ID NO: 1450973 - RNA, 19 nt, Artificial Sequence
  Description of Artificial Sequence: Synthetic oligonucleotide
  Antisense strand to SEQ ID NO: 1450972
ugucuugacagcaacccua

SEQ ID NO: 1450974 - RNA, 19 nt, Artificial Sequence
  Description of Artificial Sequence: Synthetic oligonucleotide
  Sense strand starting at position 1657 of SEQ ID NO: 1243916
gguugcugucaagacaaug

SEQ ID NO: 1450975 - RNA, 19 nt, Artificial Sequence
  Description of Artificial Sequence: Synthetic oligonucleotide
  Antisense strand to SEQ ID NO: 1450974
cauugucuugacagcaacc

SEQ ID NO: 1450976 - RNA, 19 nt, Artificial Sequence
  Description of Artificial Sequence: Synthetic oligonucleotide
  Sense strand starting at position 1669 of SEQ ID NO: 1243916
gacaaugggccguggauau

SEQ ID NO: 1450977 - RNA, 19 nt, Artificial Sequence
  Description of Artificial Sequence: Synthetic oligonucleotide
  Antisense strand to SEQ ID NO: 1450976
auauccacggcccauuguc

SEQ ID NO: 1450978 - RNA, 19 nt, Artificial Sequence
  Description of Artificial Sequence: Synthetic oligonucleotide
  Sense strand starting at position 1713 of SEQ ID NO: 1243916
gcauacgacgcgcucaaua

SEQ ID NO: 1450979 - RNA, 19 nt, Artificial Sequence
  Description of Artificial Sequence: Synthetic oligonucleotide
  Antisense strand to SEQ ID NO: 1450978
uauugagcgcgucguaugc

SEQ ID NO: 1450980 - RNA, 19 nt, Artificial Sequence
  Description of Artificial Sequence: Synthetic oligonucleotide
  Sense strand starting at position 1723 of SEQ ID NO: 1243916
cgcucaauacaucguaacu

SEQ ID NO: 1450981 - RNA, 19 nt, Artificial Sequence
  Description of Artificial Sequence: Synthetic oligonucleotide
  Antisense strand to SEQ ID NO: 1450980
aguuacgauguauugagcg

SEQ ID NO: 1450982 - RNA, 19 nt, Artificial Sequence
  Description of Artificial Sequence: Synthetic oligonucleotide
  Sense strand starting at position 1768 of SEQ ID NO: 1243916
cccacuaggccgcgaaauu

SEQ ID NO: 1450983 - RNA, 19 nt, Artificial Sequence
  Description of Artificial Sequence: Synthetic oligonucleotide
  Antisense strand to SEQ ID NO: 1450982
aauuucgcggccuaguggg

SEQ ID NO: 1450984 - RNA, 19 nt, Artificial Sequence
  Description of Artificial Sequence: Synthetic oligonucleotide
  Sense strand starting at position 2588 of SEQ ID NO: 1243916
ggguccuaacuucggauau

SEQ ID NO: 1450985 - RNA, 19 nt, Artificial Sequence
  Description of Artificial Sequence: Synthetic oligonucleotide
  Antisense strand to SEQ ID NO: 1450984
auauccgaaguuaggaccc

SEQ ID NO: 1450986 - RNA, 19 nt, Artificial Sequence
  Description of Artificial Sequence: Synthetic oligonucleotide
  Sense strand starting at position 2589 of SEQ ID NO: 1243916
gguccuaacuucggauaua

SEQ ID NO: 1450987 - RNA, 19 nt, Artificial Sequence
  Description of Artificial Sequence: Synthetic oligonucleotide
  Antisense strand to SEQ ID NO: 1450986
uauauccgaaguuaggacc

SEQ ID NO: 1450988 - RNA, 19 nt, Artificial Sequence
  Description of Artificial Sequence: Synthetic oligonucleotide
  Sense strand starting at position 2590 of SEQ ID NO: 1243916
guccuaacuucggauauaa

SEQ ID NO: 1450989 - RNA, 19 nt, Artificial Sequence
  Description of Artificial Sequence: Synthetic oligonucleotide
  Antisense strand to SEQ ID NO: 1450988
uuauauccgaaguuaggac

SEQ ID NO: 1450990 - RNA, 19 nt, Artificial Sequence
  Description of Artificial Sequence: Synthetic oligonucleotide
  Sense strand starting at position 2644 of SEQ ID NO: 1243916
aggugaucaugagcacuuu

SEQ ID NO: 1450991 - RNA, 19 nt, Artificial Sequence
  Description of Artificial Sequence: Synthetic oligonucleotide
  Antisense strand to SEQ ID NO: 1450990
aaagugcucaugaucaccu

SEQ ID NO: 1450992 - RNA, 19 nt, Artificial Sequence
  Description of Artificial Sequence: Synthetic oligonucleotide
  Sense strand starting at position 2679 of SEQ ID NO: 1243916
aagagcacuuugugggauu

SEQ ID NO: 1450993 - RNA, 19 nt, Artificial Sequence
  Description of Artificial Sequence: Synthetic oligonucleotide
  Antisense strand to SEQ ID NO: 1450992
aaucccacaaagugcucuu

SEQ ID NO: 1450994 - RNA, 19 nt, Artificial Sequence
  Description of Artificial Sequence: Synthetic oligonucleotide
  Sense strand starting at position 2680 of SEQ ID NO: 1243916
agagcacuuugugggauua

SEQ ID NO: 1450995 - RNA, 19 nt, Artificial Sequence
  Description of Artificial Sequence: Synthetic oligonucleotide
  Antisense strand to SEQ ID NO: 1450994
uaaucccacaaagugcucu

SEQ ID NO: 1450996 - RNA, 19 nt, Artificial Sequence
  Description of Artificial Sequence: Synthetic oligonucleotide
  Sense strand starting at position 2681 of SEQ ID NO: 1243916
gagcacuuugugggauuau

SEQ ID NO: 1450997 - RNA, 19 nt, Artificial Sequence
  Description of Artificial Sequence: Synthetic oligonucleotide
  Antisense strand to SEQ ID NO: 1450996
auaaucccacaaagugcuc

SEQ ID NO: 1450998 - RNA, 19 nt, Artificial Sequence
  Description of Artificial Sequence: Synthetic oligonucleotide
  Sense strand starting at position 2682 of SEQ ID NO: 1243916
agcacuuugugggauuauc

SEQ ID NO: 1450999 - RNA, 19 nt, Artificial Sequence
  Description of Artificial Sequence: Synthetic oligonucleotide
  Antisense strand to SEQ ID NO: 1450998
gauaaucccacaaagugcu

SEQ ID NO: 1451000 - RNA, 19 nt, Artificial Sequence
  Description of Artificial Sequence: Synthetic oligonucleotide
  Sense strand starting at position 2692 of SEQ ID NO: 1243916
gggauuaucucagcccgca

SEQ ID NO: 1451001 - RNA, 19 nt, Artificial Sequence
  Description of Artificial Sequence: Synthetic oligonucleotide
  Antisense strand to SEQ ID NO: 1451000
ugcgggcugagauaauccc

SEQ ID NO: 1451002 - RNA, 19 nt, Artificial Sequence
  Description of Artificial Sequence: Synthetic oligonucleotide
  Sense strand starting at position 2721 of SEQ ID NO: 1243916
gguggauacuaucaucauc

SEQ ID NO: 1451003 - RNA, 19 nt, Artificial Sequence
  Description of Artificial Sequence: Synthetic oligonucleotide
  Antisense strand to SEQ ID NO: 1451002
gaugaugauaguauccacc

SEQ ID NO: 1451004 - RNA, 19 nt, Artificial Sequence
  Description of Artificial Sequence: Synthetic oligonucleotide
  Sense strand starting at position 2758 of SEQ ID NO: 1243916
aaacuauguuuagcgguua

SEQ ID NO: 1451005 - RNA, 19 nt, Artificial Sequence
  Description of Artificial Sequence: Synthetic oligonucleotide
  Antisense strand to SEQ ID NO: 1451004
uaaccgcuaaacauaguuu

SEQ ID NO: 1451006 - RNA, 19 nt, Artificial Sequence
  Description of Artificial Sequence: Synthetic oligonucleotide
  Sense strand starting at position 2759 of SEQ ID NO: 1243916
aacuauguuuagcgguuaa

SEQ ID NO: 1451007 - RNA, 19 nt, Artificial Sequence
  Description of Artificial Sequence: Synthetic oligonucleotide
  Antisense strand to SEQ ID NO: 1451006
uuaaccgcuaaacauaguu

SEQ ID NO: 1451008 - RNA, 19 nt, Artificial Sequence
  Description of Artificial Sequence: Synthetic oligonucleotide
  Sense strand starting at position 2763 of SEQ ID NO: 1243916
auguuuagcgguuaaucca

SEQ ID NO: 1451009 - RNA, 19 nt, Artificial Sequence
  Description of Artificial Sequence: Synthetic oligonucleotide
  Antisense strand to SEQ ID NO: 1451008
uggauuaaccgcuaaacau

SEQ ID NO: 1451010 - RNA, 19 nt, Artificial Sequence
  Description of Artificial Sequence: Synthetic oligonucleotide
  Sense strand starting at position 2797 of SEQ ID NO: 1243916
aaagucaugugauugcaga

SEQ ID NO: 1451011 - RNA, 19 nt, Artificial Sequence
  Description of Artificial Sequence: Synthetic oligonucleotide
  Antisense strand to SEQ ID NO: 1451010
ucugcaaucacaugacuuu

SEQ ID NO: 1451012 - RNA, 19 nt, Artificial Sequence
  Description of Artificial Sequence: Synthetic oligonucleotide
  Sense strand starting at position 2798 of SEQ ID NO: 1243916
aagucaugugauugcagag

SEQ ID NO: 1451013 - RNA, 19 nt, Artificial Sequence
  Description of Artificial Sequence: Synthetic oligonucleotide
  Antisense strand to SEQ ID NO: 1451012
cucugcaaucacaugacuu

SEQ ID NO: 1451014 - RNA, 19 nt, Artificial Sequence
  Description of Artificial Sequence: Synthetic oligonucleotide
  Sense strand starting at position 2895 of SEQ ID NO: 1243916
ccgugcagcguuguugaaa

SEQ ID NO: 1451015 - RNA, 19 nt, Artificial Sequence
  Description of Artificial Sequence: Synthetic oligonucleotide
  Antisense strand to SEQ ID NO: 1451014
uuucaacaacgcugcacgg

SEQ ID NO: 1451016 - RNA, 19 nt, Artificial Sequence
  Description of Artificial Sequence: Synthetic oligonucleotide
  Sense strand starting at position 2898 of SEQ ID NO: 1243916
ugcagcguuguugaaagaa

SEQ ID NO: 1451017 - RNA, 19 nt, Artificial Sequence
  Description of Artificial Sequence: Synthetic oligonucleotide
  Antisense strand to SEQ ID NO: 1451016
uucuuucaacaacgcugca

SEQ ID NO: 1451018 - RNA, 19 nt, Artificial Sequence
  Description of Artificial Sequence: Synthetic oligonucleotide
  Sense strand starting at position 3071 of SEQ ID NO: 1243916
gugacaguguggucucauu

SEQ ID NO: 1451019 - RNA, 19 nt, Artificial Sequence
  Description of Artificial Sequence: Synthetic oligonucleotide
  Antisense strand to SEQ ID NO: 1451018
aaugagaccacacugucac

SEQ ID NO: 1451020 - RNA, 19 nt, Artificial Sequence
  Description of Artificial Sequence: Synthetic oligonucleotide
  Sense strand starting at position 3539 of SEQ ID NO: 1243916
guuaucuaguuaugccuca

SEQ ID NO: 1451021 - RNA, 19 nt, Artificial Sequence
  Description of Artificial Sequence: Synthetic oligonucleotide
  Antisense strand to SEQ ID NO: 1451020
ugaggcauaacuagauaac

SEQ ID NO: 1451022 - RNA, 19 nt, Artificial Sequence
  Description of Artificial Sequence: Synthetic oligonucleotide
  Sense strand starting at position 3544 of SEQ ID NO: 1243916
cuaguuaugccucacauau

SEQ ID NO: 1451023 - RNA, 19 nt, Artificial Sequence
  Description of Artificial Sequence: Synthetic oligonucleotide
  Antisense strand to SEQ ID NO: 1451022
auaugugaggcauaacuag

SEQ ID NO: 1451024 - RNA, 19 nt, Artificial Sequence
  Description of Artificial Sequence: Synthetic oligonucleotide
  Sense strand starting at position 3546 of SEQ ID NO: 1243916
aguuaugccucacauauag

SEQ ID NO: 1451025 - RNA, 19 nt, Artificial Sequence
  Description of Artificial Sequence: Synthetic oligonucleotide
  Antisense strand to SEQ ID NO: 1451024
cuauaugugaggcauaacu

SEQ ID NO: 1451026 - RNA, 19 nt, Artificial Sequence
  Description of Artificial Sequence: Synthetic oligonucleotide
  Sense strand starting at position 3555 of SEQ ID NO: 1243916
ucacauauagcaggaaguu

SEQ ID NO: 1451027 - RNA, 19 nt, Artificial Sequence
  Description of Artificial Sequence: Synthetic oligonucleotide
  Antisense strand to SEQ ID NO: 1451026
aacuuccugcuauauguga

SEQ ID NO: 1451028 - RNA, 19 nt, Artificial Sequence
  Description of Artificial Sequence: Synthetic oligonucleotide
  Sense strand starting at position 3978 of SEQ ID NO: 1243916
uggaaauccugaccuaggu

SEQ ID NO: 1451029 - RNA, 19 nt, Artificial Sequence
  Description of Artificial Sequence: Synthetic oligonucleotide
  Antisense strand to SEQ ID NO: 1451028
accuaggucaggauuucca

SEQ ID NO: 1451030 - RNA, 19 nt, Artificial Sequence
  Description of Artificial Sequence: Synthetic oligonucleotide
  Sense strand starting at position 202 of SEQ ID NO: 1243917
cccugagucagaugggaac

SEQ ID NO: 1451031 - RNA, 19 nt, Artificial Sequence
  Description of Artificial Sequence: Synthetic oligonucleotide
  Antisense strand to SEQ ID NO: 1451030
guucccaucugacucaggg

SEQ ID NO: 1451032 - RNA, 19 nt, Artificial Sequence
  Description of Artificial Sequence: Synthetic oligonucleotide
  Sense strand starting at position 252 of SEQ ID NO: 1243917
uugagaucuuucccaaagg

SEQ ID NO: 1451033 - RNA, 19 nt, Artificial Sequence
  Description of Artificial Sequence: Synthetic oligonucleotide
  Antisense strand to SEQ ID NO: 1451032
ccuuugggaaagaucucaa

SEQ ID NO: 1451034 - RNA, 19 nt, Artificial Sequence
  Description of Artificial Sequence: Synthetic oligonucleotide
  Sense strand starting at position 298 of SEQ ID NO: 1243917
gagcacucugaugguaaga

SEQ ID NO: 1451035 - RNA, 19 nt, Artificial Sequence
  Description of Artificial Sequence: Synthetic oligonucleotide
  Antisense strand to SEQ ID NO: 1451034
ucuuaccaucagagugcuc

SEQ ID NO: 1451036 - RNA, 19 nt, Artificial Sequence
  Description of Artificial Sequence: Synthetic oligonucleotide
  Sense strand starting at position 386 of SEQ ID NO: 1243917
gggcacuuaggcgagauua

SEQ ID NO: 1451037 - RNA, 19 nt, Artificial Sequence
  Description of Artificial Sequence: Synthetic oligonucleotide
  Antisense strand to SEQ ID NO: 1451036
uaaucucgccuaagugccc

SEQ ID NO: 1451038 - RNA, 19 nt, Artificial Sequence
  Description of Artificial Sequence: Synthetic oligonucleotide
  Sense strand starting at position 394 of SEQ ID NO: 1243917
aggcgagauuacucaauca

SEQ ID NO: 1451039 - RNA, 19 nt, Artificial Sequence
  Description of Artificial Sequence: Synthetic oligonucleotide
  Antisense strand to SEQ ID NO: 1451038
ugauugaguaaucucgccu

SEQ ID NO: 1451040 - RNA, 19 nt, Artificial Sequence
  Description of Artificial Sequence: Synthetic oligonucleotide
  Sense strand starting at position 544 of SEQ ID NO: 1243917
gagugaauaguguaucaga

SEQ ID NO: 1451041 - RNA, 19 nt, Artificial Sequence
  Description of Artificial Sequence: Synthetic oligonucleotide
  Antisense strand to SEQ ID NO: 1451040
ucugauacacuauucacuc

SEQ ID NO: 1451042 - RNA, 19 nt, Artificial Sequence
  Description of Artificial Sequence: Synthetic oligonucleotide
  Sense strand starting at position 617 of SEQ ID NO: 1243917
ggauuuguauaccgauuug

SEQ ID NO: 1451043 - RNA, 19 nt, Artificial Sequence
  Description of Artificial Sequence: Synthetic oligonucleotide
  Antisense strand to SEQ ID NO: 1451042
caaaucgguauacaaaucc

SEQ ID NO: 1451044 - RNA, 19 nt, Artificial Sequence
  Description of Artificial Sequence: Synthetic oligonucleotide
  Sense strand starting at position 648 of SEQ ID NO: 1243917
cuaugugacugugcaauuu

SEQ ID NO: 1451045 - RNA, 19 nt, Artificial Sequence
  Description of Artificial Sequence: Synthetic oligonucleotide
  Antisense strand to SEQ ID NO: 1451044
aaauugcacagucacauag

SEQ ID NO: 1451046 - RNA, 19 nt, Artificial Sequence
  Description of Artificial Sequence: Synthetic oligonucleotide
  Sense strand starting at position 1044 of SEQ ID NO: 1243917
auuguagacuuguugagag

SEQ ID NO: 1451047 - RNA, 19 nt, Artificial Sequence
  Description of Artificial Sequence: Synthetic oligonucleotide
  Antisense strand to SEQ ID NO: 1451046
cucucaacaagucuacaau

SEQ ID NO: 1451048 - RNA, 19 nt, Artificial Sequence
  Description of Artificial Sequence: Synthetic oligonucleotide
  Sense strand starting at position 1070 of SEQ ID NO: 1243917
ugagauaauguacgaaaug

SEQ ID NO: 1451049 - RNA, 19 nt, Artificial Sequence
  Description of Artificial Sequence: Synthetic oligonucleotide
  Antisense strand to SEQ ID NO: 1451048
cauuucguacauuaucuca

SEQ ID NO: 1451050 - RNA, 19 nt, Artificial Sequence
  Description of Artificial Sequence: Synthetic oligonucleotide
  Sense strand starting at position 1082 of SEQ ID NO: 1243917
cgaaaugccuuacuacaga

SEQ ID NO: 1451051 - RNA, 19 nt, Artificial Sequence
  Description of Artificial Sequence: Synthetic oligonucleotide
  Antisense strand to SEQ ID NO: 1451050
ucuguaguaaggcauuucg

SEQ ID NO: 1451052 - RNA, 19 nt, Artificial Sequence
  Description of Artificial Sequence: Synthetic oligonucleotide
  Sense strand starting at position 1320 of SEQ ID NO: 1243917
gugggaggauaccuugauu

SEQ ID NO: 1451053 - RNA, 19 nt, Artificial Sequence
  Description of Artificial Sequence: Synthetic oligonucleotide
  Antisense strand to SEQ ID NO: 1451052
aaucaagguauccucccac

SEQ ID NO: 1451054 - RNA, 19 nt, Artificial Sequence
  Description of Artificial Sequence: Synthetic oligonucleotide
  Sense strand starting at position 1498 of SEQ ID NO: 1243917
gagcuuggcgaagauaagu

SEQ ID NO: 1451055 - RNA, 19 nt, Artificial Sequence
  Description of Artificial Sequence: Synthetic oligonucleotide
  Antisense strand to SEQ ID NO: 1451054
acuuaucuucgccaagcuc

SEQ ID NO: 1451056 - RNA, 19 nt, Artificial Sequence
  Description of Artificial Sequence: Synthetic oligonucleotide
  Sense strand starting at position 1674 of SEQ ID NO: 1243917
ccaggagucaacuaggcuu

SEQ ID NO: 1451057 - RNA, 19 nt, Artificial Sequence
  Description of Artificial Sequence: Synthetic oligonucleotide
  Antisense strand to SEQ ID NO: 1451056
aagccuaguugacuccugg

SEQ ID NO: 1451058 - RNA, 19 nt, Artificial Sequence
  Description of Artificial Sequence: Synthetic oligonucleotide
  Sense strand starting at position 1771 of SEQ ID NO: 1243917
ucacuuacccgggaaacgu

SEQ ID NO: 1451059 - RNA, 19 nt, Artificial Sequence
  Description of Artificial Sequence: Synthetic oligonucleotide
  Antisense strand to SEQ ID NO: 1451058
acguuucccggguaaguga

SEQ ID NO: 1451060 - RNA, 19 nt, Artificial Sequence
  Description of Artificial Sequence: Synthetic oligonucleotide
  Sense strand starting at position 2058 of SEQ ID NO: 1243917
gugauuccuggguauugua

SEQ ID NO: 1451061 - RNA, 19 nt, Artificial Sequence
  Description of Artificial Sequence: Synthetic oligonucleotide
  Antisense strand to SEQ ID NO: 1451060
uacaauacccaggaaucac

SEQ ID NO: 1451062 - RNA, 19 nt, Artificial Sequence
  Description of Artificial Sequence: Synthetic oligonucleotide
  Sense strand starting at position 2416 of SEQ ID NO: 1243917
ggaagucaccgggagcuua

SEQ ID NO: 1451063 - RNA, 19 nt, Artificial Sequence
  Description of Artificial Sequence: Synthetic oligonucleotide
  Antisense strand to SEQ ID NO: 1451062
uaagcucccggugacuucc

SEQ ID NO: 1451064 - RNA, 19 nt, Artificial Sequence
  Description of Artificial Sequence: Synthetic oligonucleotide
  Sense strand starting at position 2460 of SEQ ID NO: 1243917
uuggcuaagucacuaggau

SEQ ID NO: 1451065 - RNA, 19 nt, Artificial Sequence
  Description of Artificial Sequence: Synthetic oligonucleotide
  Antisense strand to SEQ ID NO: 1451064
auccuagugacuuagccaa

SEQ ID NO: 1451066 - RNA, 19 nt, Artificial Sequence
  Description of Artificial Sequence: Synthetic oligonucleotide
  Sense strand starting at position 2461 of SEQ ID NO: 1243917
uggcuaagucacuaggauu

SEQ ID NO: 1451067 - RNA, 19 nt, Artificial Sequence
  Description of Artificial Sequence: Synthetic oligonucleotide
  Antisense strand to SEQ ID NO: 1451066
aauccuagugacuuagcca

SEQ ID NO: 1451068 - RNA, 19 nt, Artificial Sequence
  Description of Artificial Sequence: Synthetic oligonucleotide
  Sense strand starting at position 2498 of SEQ ID NO: 1243917
uugccuuugucauuuacca

SEQ ID NO: 1451069 - RNA, 19 nt, Artificial Sequence
  Description of Artificial Sequence: Synthetic oligonucleotide
  Antisense strand to SEQ ID NO: 1451068
ugguaaaugacaaaggcaa

SEQ ID NO: 1451070 - RNA, 19 nt, Artificial Sequence
  Description of Artificial Sequence: Synthetic oligonucleotide
  Sense strand starting at position 2520 of SEQ ID NO: 1243917
gugggugcucuggauauua

SEQ ID NO: 1451071 - RNA, 19 nt, Artificial Sequence
  Description of Artificial Sequence: Synthetic oligonucleotide
  Antisense strand to SEQ ID NO: 1451070
uaauauccagagcacccac

SEQ ID NO: 1451072 - RNA, 19 nt, Artificial Sequence
  Description of Artificial Sequence: Synthetic oligonucleotide
  Sense strand starting at position 2522 of SEQ ID NO: 1243917
gggugcucuggauauuaag

SEQ ID NO: 1451073 - RNA, 19 nt, Artificial Sequence
  Description of Artificial Sequence: Synthetic oligonucleotide
  Antisense strand to SEQ ID NO: 1451072
cuuaauauccagagcaccc

SEQ ID NO: 1451074 - RNA, 19 nt, Artificial Sequence
  Description of Artificial Sequence: Synthetic oligonucleotide
  Sense strand starting at position 2687 of SEQ ID NO: 1243917
agggaacguuacuuauaga

SEQ ID NO: 1451075 - RNA, 19 nt, Artificial Sequence
  Description of Artificial Sequence: Synthetic oligonucleotide
  Antisense strand to SEQ ID NO: 1451074
ucuauaaguaacguucccu

SEQ ID NO: 1451076 - RNA, 19 nt, Artificial Sequence
  Description of Artificial Sequence: Synthetic oligonucleotide
  Sense strand starting at position 2706 of SEQ ID NO: 1243917
cguguuguuugaacaacgu

SEQ ID NO: 1451077 - RNA, 19 nt, Artificial Sequence
  Description of Artificial Sequence: Synthetic oligonucleotide
  Antisense strand to SEQ ID NO: 1451076
acguuguucaaacaacacg

SEQ ID NO: 1451078 - RNA, 19 nt, Artificial Sequence
  Description of Artificial Sequence: Synthetic oligonucleotide
  Sense strand starting at position 2716 of SEQ ID NO: 1243917
gaacaacgugacuagcaau

SEQ ID NO: 1451079 - RNA, 19 nt, Artificial Sequence
  Description of Artificial Sequence: Synthetic oligonucleotide
  Antisense strand to SEQ ID NO: 1451078
auugcuagucacguuguuc

SEQ ID NO: 1451080 - RNA, 19 nt, Artificial Sequence
  Description of Artificial Sequence: Synthetic oligonucleotide
  Sense strand starting at position 2872 of SEQ ID NO: 1243917
uguaauuaacgguauggua

SEQ ID NO: 1451081 - RNA, 19 nt, Artificial Sequence
  Description of Artificial Sequence: Synthetic oligonucleotide
  Antisense strand to SEQ ID NO: 1451080
uaccauaccguuaauuaca

SEQ ID NO: 1451082 - RNA, 19 nt, Artificial Sequence
  Description of Artificial Sequence: Synthetic oligonucleotide
  Sense strand starting at position 2874 of SEQ ID NO: 1243917
uaauuaacgguaugguaau

SEQ ID NO: 1451083 - RNA, 19 nt, Artificial Sequence
  Description of Artificial Sequence: Synthetic oligonucleotide
  Antisense strand to SEQ ID NO: 1451082
auuaccauaccguuaauua

SEQ ID NO: 1451084 - RNA, 19 nt, Artificial Sequence
  Description of Artificial Sequence: Synthetic oligonucleotide
  Sense strand starting at position 2933 of SEQ ID NO: 1243917
aaguauccugaacgauaua

SEQ ID NO: 1451085 - RNA, 19 nt, Artificial Sequence
  Description of Artificial Sequence: Synthetic oligonucleotide
  Antisense strand to SEQ ID NO: 1451084
uauaucguucaggauacuu

SEQ ID NO: 1451086 - RNA, 19 nt, Artificial Sequence
  Description of Artificial Sequence: Synthetic oligonucleotide
  Sense strand starting at position 2957 of SEQ ID NO: 1243917
auaauuaagucuucgaaca

SEQ ID NO: 1451087 - RNA, 19 nt, Artificial Sequence
  Description of Artificial Sequence: Synthetic oligonucleotide
  Antisense strand to SEQ ID NO: 1451086
uguucgaagacuuaauuau

SEQ ID NO: 1451088 - RNA, 19 nt, Artificial Sequence
  Description of Artificial Sequence: Synthetic oligonucleotide
  Sense strand starting at position 3013 of SEQ ID NO: 1243917
ucaagaaaugagcgauguu

SEQ ID NO: 1451089 - RNA, 19 nt, Artificial Sequence
  Description of Artificial Sequence: Synthetic oligonucleotide
  Antisense strand to SEQ ID NO: 1451088
aacaucgcucauuucuuga

SEQ ID NO: 1451090 - RNA, 19 nt, Artificial Sequence
  Description of Artificial Sequence: Synthetic oligonucleotide
  Sense strand starting at position 3014 of SEQ ID NO: 1243917
caagaaaugagcgauguug

SEQ ID NO: 1451091 - RNA, 19 nt, Artificial Sequence
  Description of Artificial Sequence: Synthetic oligonucleotide
  Antisense strand to SEQ ID NO: 1451090
caacaucgcucauuucuug

SEQ ID NO: 1451092 - RNA, 19 nt, Artificial Sequence
  Description of Artificial Sequence: Synthetic oligonucleotide
  Sense strand starting at position 3030 of SEQ ID NO: 1243917
uuguuucuuggagaguauu

SEQ ID NO: 1451093 - RNA, 19 nt, Artificial Sequence
  Description of Artificial Sequence: Synthetic oligonucleotide
  Antisense strand to SEQ ID NO: 1451092
aauacucuccaagaaacaa

SEQ ID NO: 1451094 - RNA, 19 nt, Artificial Sequence
  Description of Artificial Sequence: Synthetic oligonucleotide
  Sense strand starting at position 3288 of SEQ ID NO: 1243917
acugaaagucgugagagau

SEQ ID NO: 1451095 - RNA, 19 nt, Artificial Sequence
  Description of Artificial Sequence: Synthetic oligonucleotide
  Antisense strand to SEQ ID NO: 1451094
aucucucacgacuuucagu

SEQ ID NO: 1451096 - RNA, 19 nt, Artificial Sequence
  Description of Artificial Sequence: Synthetic oligonucleotide
  Sense strand starting at position 3346 of SEQ ID NO: 1243917
uuucguagccagcuuguua

SEQ ID NO: 1451097 - RNA, 19 nt, Artificial Sequence
  Description of Artificial Sequence: Synthetic oligonucleotide
  Antisense strand to SEQ ID NO: 1451096
uaacaagcuggcuacgaaa

SEQ ID NO: 1451098 - RNA, 19 nt, Artificial Sequence
  Description of Artificial Sequence: Synthetic oligonucleotide
  Sense strand starting at position 3347 of SEQ ID NO: 1243917
uucguagccagcuuguuau

SEQ ID NO: 1451099 - RNA, 19 nt, Artificial Sequence
  Description of Artificial Sequence: Synthetic oligonucleotide
  Antisense strand to SEQ ID NO: 1451098
auaacaagcuggcuacgaa

SEQ ID NO: 1451100 - RNA, 19 nt, Artificial Sequence
  Description of Artificial Sequence: Synthetic oligonucleotide
  Sense strand starting at position 3376 of SEQ ID NO: 1243917
gguggcagugcagauauaa

SEQ ID NO: 1451101 - RNA, 19 nt, Artificial Sequence
  Description of Artificial Sequence: Synthetic oligonucleotide
  Antisense strand to SEQ ID NO: 1451100
uuauaucugcacugccacc

SEQ ID NO: 1451102 - RNA, 19 nt, Artificial Sequence
  Description of Artificial Sequence: Synthetic oligonucleotide
  Sense strand starting at position 3409 of SEQ ID NO: 1243917
aggacugcguagaagagau

SEQ ID NO: 1451103 - RNA, 19 nt, Artificial Sequence
  Description of Artificial Sequence: Synthetic oligonucleotide
  Antisense strand to SEQ ID NO: 1451102
aucucuucuacgcaguccu

SEQ ID NO: 1451104 - RNA, 19 nt, Artificial Sequence
  Description of Artificial Sequence: Synthetic oligonucleotide
  Sense strand starting at position 3523 of SEQ ID NO: 1243917
ugcaguacucaguaacaug

SEQ ID NO: 1451105 - RNA, 19 nt, Artificial Sequence
  Description of Artificial Sequence: Synthetic oligonucleotide
  Antisense strand to SEQ ID NO: 1451104
cauguuacugaguacugca

SEQ ID NO: 1451106 - RNA, 19 nt, Artificial Sequence
  Description of Artificial Sequence: Synthetic oligonucleotide
  Sense strand starting at position 3598 of SEQ ID NO: 1243917
ccauauagccuaggcauuu

SEQ ID NO: 1451107 - RNA, 19 nt, Artificial Sequence
  Description of Artificial Sequence: Synthetic oligonucleotide
  Antisense strand to SEQ ID NO: 1451106
aaaugccuaggcuauaugg

SEQ ID NO: 1451108 - RNA, 19 nt, Artificial Sequence
  Description of Artificial Sequence: Synthetic oligonucleotide
  Sense strand starting at position 3729 of SEQ ID NO: 1243917
cuguauuuaagugguuuau

SEQ ID NO: 1451109 - RNA, 19 nt, Artificial Sequence
  Description of Artificial Sequence: Synthetic oligonucleotide
  Antisense strand to SEQ ID NO: 1451108
auaaaccacuuaaauacag

SEQ ID NO: 1451110 - RNA, 19 nt, Artificial Sequence
  Description of Artificial Sequence: Synthetic oligonucleotide
  Sense strand starting at position 544 of SEQ ID NO: 1243918
gaaggagucucacucucuu

SEQ ID NO: 1451111 - RNA, 19 nt, Artificial Sequence
  Description of Artificial Sequence: Synthetic oligonucleotide
  Antisense strand to SEQ ID NO: 1451110
aagagagugagacuccuuc

SEQ ID NO: 1451112 - RNA, 19 nt, Artificial Sequence
  Description of Artificial Sequence: Synthetic oligonucleotide
  Sense strand starting at position 1213 of SEQ ID NO: 1243918
ccauuuccucaccguuaga

SEQ ID NO: 1451113 - RNA, 19 nt, Artificial Sequence
  Description of Artificial Sequence: Synthetic oligonucleotide
  Antisense strand to SEQ ID NO: 1451112
ucuaacggugaggaaaugg

SEQ ID NO: 1451114 - RNA, 19 nt, Artificial Sequence
  Description of Artificial Sequence: Synthetic oligonucleotide
  Sense strand starting at position 1216 of SEQ ID NO: 1243918
uuuccucaccguuagaauu

SEQ ID NO: 1451115 - RNA, 19 nt, Artificial Sequence
  Description of Artificial Sequence: Synthetic oligonucleotide
  Antisense strand to SEQ ID NO: 1451114
aauucuaacggugaggaaa

SEQ ID NO: 1451116 - RNA, 19 nt, Artificial Sequence
  Description of Artificial Sequence: Synthetic oligonucleotide
  Sense strand starting at position 1223 of SEQ ID NO: 1243918
accguuagaauugagacuu

SEQ ID NO: 1451117 - RNA, 19 nt, Artificial Sequence
  Description of Artificial Sequence: Synthetic oligonucleotide
  Antisense strand to SEQ ID NO: 1451116
aagucucaauucuaacggu

SEQ ID NO: 1451118 - RNA, 19 nt, Artificial Sequence
  Description of Artificial Sequence: Synthetic oligonucleotide
  Sense strand starting at position 1235 of SEQ ID NO: 1243918
gagacuuaaugucaaaguu

SEQ ID NO: 1451119 - RNA, 19 nt, Artificial Sequence
  Description of Artificial Sequence: Synthetic oligonucleotide
  Antisense strand to SEQ ID NO: 1451118
aacuuugacauuaagucuc

SEQ ID NO: 1451120 - RNA, 19 nt, Artificial Sequence
  Description of Artificial Sequence: Synthetic oligonucleotide
  Sense strand starting at position 1504 of SEQ ID NO: 1243918
cggagaugaucacucagcu

SEQ ID NO: 1451121 - RNA, 19 nt, Artificial Sequence
  Description of Artificial Sequence: Synthetic oligonucleotide
  Antisense strand to SEQ ID NO: 1451120
agcugagugaucaucuccg

SEQ ID NO: 1451122 - RNA, 19 nt, Artificial Sequence
  Description of Artificial Sequence: Synthetic oligonucleotide
  Sense strand starting at position 1590 of SEQ ID NO: 1243918
gagcaaacuugggaucgga

SEQ ID NO: 1451123 - RNA, 19 nt, Artificial Sequence
  Description of Artificial Sequence: Synthetic oligonucleotide
  Antisense strand to SEQ ID NO: 1451122
uccgaucccaaguuugcuc

SEQ ID NO: 1451124 - RNA, 19 nt, Artificial Sequence
  Description of Artificial Sequence: Synthetic oligonucleotide
  Sense strand starting at position 1694 of SEQ ID NO: 1243918
uuggucugauccugaguuu

SEQ ID NO: 1451125 - RNA, 19 nt, Artificial Sequence
  Description of Artificial Sequence: Synthetic oligonucleotide
  Antisense strand to SEQ ID NO: 1451124
aaacucaggaucagaccaa

SEQ ID NO: 1451126 - RNA, 19 nt, Artificial Sequence
  Description of Artificial Sequence: Synthetic oligonucleotide
  Sense strand starting at position 1697 of SEQ ID NO: 1243918
gucugauccugaguuugaa

SEQ ID NO: 1451127 - RNA, 19 nt, Artificial Sequence
  Description of Artificial Sequence: Synthetic oligonucleotide
  Antisense strand to SEQ ID NO: 1451126
uucaaacucaggaucagac

SEQ ID NO: 1451128 - RNA, 19 nt, Artificial Sequence
  Description of Artificial Sequence: Synthetic oligonucleotide
  Sense strand starting at position 1728 of SEQ ID NO: 1243918
agcccuuucuagcuguaaa

SEQ ID NO: 1451129 - RNA, 19 nt, Artificial Sequence
  Description of Artificial Sequence: Synthetic oligonucleotide
  Antisense strand to SEQ ID NO: 1451128
uuuacagcuagaaagggcu

SEQ ID NO: 1451130 - RNA, 19 nt, Artificial Sequence
  Description of Artificial Sequence: Synthetic oligonucleotide
  Sense strand starting at position 1754 of SEQ ID NO: 1243918
gcgcguccucagccguaaa

SEQ ID NO: 1451131 - RNA, 19 nt, Artificial Sequence
  Description of Artificial Sequence: Synthetic oligonucleotide
  Antisense strand to SEQ ID NO: 1451130
uuuacggcugaggacgcgc

SEQ ID NO: 1451132 - RNA, 19 nt, Artificial Sequence
  Description of Artificial Sequence: Synthetic oligonucleotide
  Sense strand starting at position 1798 of SEQ ID NO: 1243918
uaggguugcugucaagaca

SEQ ID NO: 1451133 - RNA, 19 nt, Artificial Sequence
  Description of Artificial Sequence: Synthetic oligonucleotide
  Antisense strand to SEQ ID NO: 1451132
ugucuugacagcaacccua

SEQ ID NO: 1451134 - RNA, 19 nt, Artificial Sequence
  Description of Artificial Sequence: Synthetic oligonucleotide
  Sense strand starting at position 1801 of SEQ ID NO: 1243918
gguugcugucaagacaaug

SEQ ID NO: 1451135 - RNA, 19 nt, Artificial Sequence
  Description of Artificial Sequence: Synthetic oligonucleotide
  Antisense strand to SEQ ID NO: 1451134
cauugucuugacagcaacc

SEQ ID NO: 1451136 - RNA, 19 nt, Artificial Sequence
  Description of Artificial Sequence: Synthetic oligonucleotide
  Sense strand starting at position 1813 of SEQ ID NO: 1243918
gacaaugggccguggauau

SEQ ID NO: 1451137 - RNA, 19 nt, Artificial Sequence
  Description of Artificial Sequence: Synthetic oligonucleotide
  Antisense strand to SEQ ID NO: 1451136
auauccacggcccauuguc

SEQ ID NO: 1451138 - RNA, 19 nt, Artificial Sequence
  Description of Artificial Sequence: Synthetic oligonucleotide
  Sense strand starting at position 1857 of SEQ ID NO: 1243918
gcauacgacgcgcucaaua

SEQ ID NO: 1451139 - RNA, 19 nt, Artificial Sequence
  Description of Artificial Sequence: Synthetic oligonucleotide
  Antisense strand to SEQ ID NO: 1451138
uauugagcgcgucguaugc

SEQ ID NO: 1451140 - RNA, 19 nt, Artificial Sequence
  Description of Artificial Sequence: Synthetic oligonucleotide
  Sense strand starting at position 1867 of SEQ ID NO: 1243918
cgcucaauacaucguaacu

SEQ ID NO: 1451141 - RNA, 19 nt, Artificial Sequence
  Description of Artificial Sequence: Synthetic oligonucleotide
  Antisense strand to SEQ ID NO: 1451140
aguuacgauguauugagcg

SEQ ID NO: 1451142 - RNA, 19 nt, Artificial Sequence
  Description of Artificial Sequence: Synthetic oligonucleotide
  Sense strand starting at position 1912 of SEQ ID NO: 1243918
cccacuaggccgcgaaauu

SEQ ID NO: 1451143 - RNA, 19 nt, Artificial Sequence
  Description of Artificial Sequence: Synthetic oligonucleotide
  Antisense strand to SEQ ID NO: 1451142
aauuucgcggccuaguggg

SEQ ID NO: 1451144 - RNA, 19 nt, Artificial Sequence
  Description of Artificial Sequence: Synthetic oligonucleotide
  Sense strand starting at position 2732 of SEQ ID NO: 1243918
ggguccuaacuucggauau

SEQ ID NO: 1451145 - RNA, 19 nt, Artificial Sequence
  Description of Artificial Sequence: Synthetic oligonucleotide
  Antisense strand to SEQ ID NO: 1451144
auauccgaaguuaggaccc

SEQ ID NO: 1451146 - RNA, 19 nt, Artificial Sequence
  Description of Artificial Sequence: Synthetic oligonucleotide
  Sense strand starting at position 2733 of SEQ ID NO: 1243918
gguccuaacuucggauaua

SEQ ID NO: 1451147 - RNA, 19 nt, Artificial Sequence
  Description of Artificial Sequence: Synthetic oligonucleotide
  Antisense strand to SEQ ID NO: 1451146
uauauccgaaguuaggacc

SEQ ID NO: 1451148 - RNA, 19 nt, Artificial Sequence
  Description of Artificial Sequence: Synthetic oligonucleotide
  Sense strand starting at position 2734 of SEQ ID NO: 1243918
guccuaacuucggauauaa

SEQ ID NO: 1451149 - RNA, 19 nt, Artificial Sequence
  Description of Artificial Sequence: Synthetic oligonucleotide
  Antisense strand to SEQ ID NO: 1451148
uuauauccgaaguuaggac

SEQ ID NO: 1451150 - RNA, 19 nt, Artificial Sequence
  Description of Artificial Sequence: Synthetic oligonucleotide
  Sense strand starting at position 2788 of SEQ ID NO: 1243918
aggugaucaugagcacuuu

SEQ ID NO: 1451151 - RNA, 19 nt, Artificial Sequence
  Description of Artificial Sequence: Synthetic oligonucleotide
  Antisense strand to SEQ ID NO: 1451150
aaagugcucaugaucaccu

SEQ ID NO: 1451152 - RNA, 19 nt, Artificial Sequence
  Description of Artificial Sequence: Synthetic oligonucleotide
  Sense strand starting at position 2823 of SEQ ID NO: 1243918
aagagcacuuugugggauu

SEQ ID NO: 1451153 - RNA, 19 nt, Artificial Sequence
  Description of Artificial Sequence: Synthetic oligonucleotide
  Antisense strand to SEQ ID NO: 1451152
aaucccacaaagugcucuu

SEQ ID NO: 1451154 - RNA, 19 nt, Artificial Sequence
  Description of Artificial Sequence: Synthetic oligonucleotide
  Sense strand starting at position 2824 of SEQ ID NO: 1243918
agagcacuuugugggauua

SEQ ID NO: 1451155 - RNA, 19 nt, Artificial Sequence
  Description of Artificial Sequence: Synthetic oligonucleotide
  Antisense strand to SEQ ID NO: 1451154
uaaucccacaaagugcucu

SEQ ID NO: 1451156 - RNA, 19 nt, Artificial Sequence
  Description of Artificial Sequence: Synthetic oligonucleotide
  Sense strand starting at position 2825 of SEQ ID NO: 1243918
gagcacuuugugggauuau

SEQ ID NO: 1451157 - RNA, 19 nt, Artificial Sequence
  Description of Artificial Sequence: Synthetic oligonucleotide
  Antisense strand to SEQ ID NO: 1451156
auaaucccacaaagugcuc

SEQ ID NO: 1451158 - RNA, 19 nt, Artificial Sequence
  Description of Artificial Sequence: Synthetic oligonucleotide
  Sense strand starting at position 2826 of SEQ ID NO: 1243918
agcacuuugugggauuauc

SEQ ID NO: 1451159 - RNA, 19 nt, Artificial Sequence
  Description of Artificial Sequence: Synthetic oligonucleotide
  Antisense strand to SEQ ID NO: 1451158
gauaaucccacaaagugcu

SEQ ID NO: 1451160 - RNA, 19 nt, Artificial Sequence
  Description of Artificial Sequence: Synthetic oligonucleotide
  Sense strand starting at position 2836 of SEQ ID NO: 1243918
gggauuaucucagcccgca

SEQ ID NO: 1451161 - RNA, 19 nt, Artificial Sequence
  Description of Artificial Sequence: Synthetic oligonucleotide
  Antisense strand to SEQ ID NO: 1451160
ugcgggcugagauaauccc

SEQ ID NO: 1451162 - RNA, 19 nt, Artificial Sequence
  Description of Artificial Sequence: Synthetic oligonucleotide
  Sense strand starting at position 2865 of SEQ ID NO: 1243918
gguggauacuaucaucauc

SEQ ID NO: 1451163 - RNA, 19 nt, Artificial Sequence
  Description of Artificial Sequence: Synthetic oligonucleotide
  Antisense strand to SEQ ID NO: 1451162
gaugaugauaguauccacc

SEQ ID NO: 1451164 - RNA, 19 nt, Artificial Sequence
  Description of Artificial Sequence: Synthetic oligonucleotide
  Sense strand starting at position 2902 of SEQ ID NO: 1243918
aaacuauguuuagcgguua

SEQ ID NO: 1451165 - RNA, 19 nt, Artificial Sequence
  Description of Artificial Sequence: Synthetic oligonucleotide
  Antisense strand to SEQ ID NO: 1451164
uaaccgcuaaacauaguuu

SEQ ID NO: 1451166 - RNA, 19 nt, Artificial Sequence
  Description of Artificial Sequence: Synthetic oligonucleotide
  Sense strand starting at position 2903 of SEQ ID NO: 1243918
aacuauguuuagcgguuaa

SEQ ID NO: 1451167 - RNA, 19 nt, Artificial Sequence
  Description of Artificial Sequence: Synthetic oligonucleotide
  Antisense strand to SEQ ID NO: 1451166
uuaaccgcuaaacauaguu

SEQ ID NO: 1451168 - RNA, 19 nt, Artificial Sequence
  Description of Artificial Sequence: Synthetic oligonucleotide
  Sense strand starting at position 2907 of SEQ ID NO: 1243918
auguuuagcgguuaaucca

SEQ ID NO: 1451169 - RNA, 19 nt, Artificial Sequence
  Description of Artificial Sequence: Synthetic oligonucleotide
  Antisense strand to SEQ ID NO: 1451168
uggauuaaccgcuaaacau

SEQ ID NO: 1451170 - RNA, 19 nt, Artificial Sequence
  Description of Artificial Sequence: Synthetic oligonucleotide
  Sense strand starting at position 2941 of SEQ ID NO: 1243918
aaagucaugugauugcaga

SEQ ID NO: 1451171 - RNA, 19 nt, Artificial Sequence
  Description of Artificial Sequence: Synthetic oligonucleotide
  Antisense strand to SEQ ID NO: 1451170
ucugcaaucacaugacuuu

SEQ ID NO: 1451172 - RNA, 19 nt, Artificial Sequence
  Description of Artificial Sequence: Synthetic oligonucleotide
  Sense strand starting at position 2942 of SEQ ID NO: 1243918
aagucaugugauugcagag

SEQ ID NO: 1451173 - RNA, 19 nt, Artificial Sequence
  Description of Artificial Sequence: Synthetic oligonucleotide
  Antisense strand to SEQ ID NO: 1451172
cucugcaaucacaugacuu

SEQ ID NO: 1451174 - RNA, 19 nt, Artificial Sequence
  Description of Artificial Sequence: Synthetic oligonucleotide
  Sense strand starting at position 3039 of SEQ ID NO: 1243918
ccgugcagcguuguugaaa

SEQ ID NO: 1451175 - RNA, 19 nt, Artificial Sequence
  Description of Artificial Sequence: Synthetic oligonucleotide
  Antisense strand to SEQ ID NO: 1451174
uuucaacaacgcugcacgg

SEQ ID NO: 1451176 - RNA, 19 nt, Artificial Sequence
  Description of Artificial Sequence: Synthetic oligonucleotide
  Sense strand starting at position 3042 of SEQ ID NO: 1243918
ugcagcguuguugaaagaa

SEQ ID NO: 1451177 - RNA, 19 nt, Artificial Sequence
  Description of Artificial Sequence: Synthetic oligonucleotide
  Antisense strand to SEQ ID NO: 1451176
uucuuucaacaacgcugca

SEQ ID NO: 1451178 - RNA, 19 nt, Artificial Sequence
  Description of Artificial Sequence: Synthetic oligonucleotide
  Sense strand starting at position 3215 of SEQ ID NO: 1243918
gugacaguguggucucauu

SEQ ID NO: 1451179 - RNA, 19 nt, Artificial Sequence
  Description of Artificial Sequence: Synthetic oligonucleotide
  Antisense strand to SEQ ID NO: 1451178
aaugagaccacacugucac

SEQ ID NO: 1451180 - RNA, 19 nt, Artificial Sequence
  Description of Artificial Sequence: Synthetic oligonucleotide
  Sense strand starting at position 3683 of SEQ ID NO: 1243918
guuaucuaguuaugccuca

SEQ ID NO: 1451181 - RNA, 19 nt, Artificial Sequence
  Description of Artificial Sequence: Synthetic oligonucleotide
  Antisense strand to SEQ ID NO: 1451180
ugaggcauaacuagauaac

SEQ ID NO: 1451182 - RNA, 19 nt, Artificial Sequence
  Description of Artificial Sequence: Synthetic oligonucleotide
  Sense strand starting at position 3688 of SEQ ID NO: 1243918
cuaguuaugccucacauau

SEQ ID NO: 1451183 - RNA, 19 nt, Artificial Sequence
  Description of Artificial Sequence: Synthetic oligonucleotide
  Antisense strand to SEQ ID NO: 1451182
auaugugaggcauaacuag

SEQ ID NO: 1451184 - RNA, 19 nt, Artificial Sequence
  Description of Artificial Sequence: Synthetic oligonucleotide
  Sense strand starting at position 3690 of SEQ ID NO: 1243918
aguuaugccucacauauag

SEQ ID NO: 1451185 - RNA, 19 nt, Artificial Sequence
  Description of Artificial Sequence: Synthetic oligonucleotide
  Antisense strand to SEQ ID NO: 1451184
cuauaugugaggcauaacu

SEQ ID NO: 1451186 - RNA, 19 nt, Artificial Sequence
  Description of Artificial Sequence: Synthetic oligonucleotide
  Sense strand starting at position 3699 of SEQ ID NO: 1243918
ucacauauagcaggaaguu

SEQ ID NO: 1451187 - RNA, 19 nt, Artificial Sequence
  Description of Artificial Sequence: Synthetic oligonucleotide
  Antisense strand to SEQ ID NO: 1451186
aacuuccugcuauauguga

SEQ ID NO: 1451188 - RNA, 19 nt, Artificial Sequence
  Description of Artificial Sequence: Synthetic oligonucleotide
  Sense strand starting at position 85 of SEQ ID NO: 1243919
cuuggauuggaaugugaau

SEQ ID NO: 1451189 - RNA, 19 nt, Artificial Sequence
  Description of Artificial Sequence: Synthetic oligonucleotide
  Antisense strand to SEQ ID NO: 1451188
auucacauuccaauccaag

SEQ ID NO: 1451190 - RNA, 19 nt, Artificial Sequence
  Description of Artificial Sequence: Synthetic oligonucleotide
  Sense strand starting at position 87 of SEQ ID NO: 1243919
uggauuggaaugugaaugu

SEQ ID NO: 1451191 - RNA, 19 nt, Artificial Sequence
  Description of Artificial Sequence: Synthetic oligonucleotide
  Antisense strand to SEQ ID NO: 1451190
acauucacauuccaaucca

SEQ ID NO: 1451192 - RNA, 19 nt, Artificial Sequence
  Description of Artificial Sequence: Synthetic oligonucleotide
  Sense strand starting at position 91 of SEQ ID NO: 1243919
uuggaaugugaaugucaug

SEQ ID NO: 1451193 - RNA, 19 nt, Artificial Sequence
  Description of Artificial Sequence: Synthetic oligonucleotide
  Antisense strand to SEQ ID NO: 1451192
caugacauucacauuccaa

SEQ ID NO: 1451194 - RNA, 19 nt, Artificial Sequence
  Description of Artificial Sequence: Synthetic oligonucleotide
  Sense strand starting at position 98 of SEQ ID NO: 1243919
gugaaugucaugggucucu

SEQ ID NO: 1451195 - RNA, 19 nt, Artificial Sequence
  Description of Artificial Sequence: Synthetic oligonucleotide
  Antisense strand to SEQ ID NO: 1451194
agagacccaugacauucac

SEQ ID NO: 1451196 - RNA, 19 nt, Artificial Sequence
  Description of Artificial Sequence: Synthetic oligonucleotide
  Sense strand starting at position 196 of SEQ ID NO: 1243919
ucagguuuauuggagggau

SEQ ID NO: 1451197 - RNA, 19 nt, Artificial Sequence
  Description of Artificial Sequence: Synthetic oligonucleotide
  Antisense strand to SEQ ID NO: 1451196
aucccuccaauaaaccuga

SEQ ID NO: 1451198 - RNA, 19 nt, Artificial Sequence
  Description of Artificial Sequence: Synthetic oligonucleotide
  Sense strand starting at position 198 of SEQ ID NO: 1243919
agguuuauuggagggauug

SEQ ID NO: 1451199 - RNA, 19 nt, Artificial Sequence
  Description of Artificial Sequence: Synthetic oligonucleotide
  Antisense strand to SEQ ID NO: 1451198
caaucccuccaauaaaccu

SEQ ID NO: 1451200 - RNA, 19 nt, Artificial Sequence
  Description of Artificial Sequence: Synthetic oligonucleotide
  Sense strand starting at position 319 of SEQ ID NO: 1243919
uucggucacucagcagaaa

SEQ ID NO: 1451201 - RNA, 19 nt, Artificial Sequence
  Description of Artificial Sequence: Synthetic oligonucleotide
  Antisense strand to SEQ ID NO: 1451200
uuucugcugagugaccgaa

SEQ ID NO: 1451202 - RNA, 19 nt, Artificial Sequence
  Description of Artificial Sequence: Synthetic oligonucleotide
  Sense strand starting at position 510 of SEQ ID NO: 1243919
ugggauucgguucagcaua

SEQ ID NO: 1451203 - RNA, 19 nt, Artificial Sequence
  Description of Artificial Sequence: Synthetic oligonucleotide
  Antisense strand to SEQ ID NO: 1451202
uaugcugaaccgaauccca

SEQ ID NO: 1451204 - RNA, 19 nt, Artificial Sequence
  Description of Artificial Sequence: Synthetic oligonucleotide
  Sense strand starting at position 976 of SEQ ID NO: 1243919
gcuggcaucacucacgaga

SEQ ID NO: 1451205 - RNA, 19 nt, Artificial Sequence
  Description of Artificial Sequence: Synthetic oligonucleotide
  Antisense strand to SEQ ID NO: 1451204
ucucgugagugaugccagc

SEQ ID NO: 1451206 - RNA, 19 nt, Artificial Sequence
  Description of Artificial Sequence: Synthetic oligonucleotide
  Sense strand starting at position 979 of SEQ ID NO: 1243919
ggcaucacucacgagaauu

SEQ ID NO: 1451207 - RNA, 19 nt, Artificial Sequence
  Description of Artificial Sequence: Synthetic oligonucleotide
  Antisense strand to SEQ ID NO: 1451206
aauucucgugagugaugcc

SEQ ID NO: 1451208 - RNA, 19 nt, Artificial Sequence
  Description of Artificial Sequence: Synthetic oligonucleotide
  Sense strand starting at position 1083 of SEQ ID NO: 1243919
agacccuggucagagauua

SEQ ID NO: 1451209 - RNA, 19 nt, Artificial Sequence
  Description of Artificial Sequence: Synthetic oligonucleotide
  Antisense strand to SEQ ID NO: 1451208
uaaucucugaccagggucu

SEQ ID NO: 1451210 - RNA, 19 nt, Artificial Sequence
  Description of Artificial Sequence: Synthetic oligonucleotide
  Sense strand starting at position 1400 of SEQ ID NO: 1243919
cggacaaguaaaggaguua

SEQ ID NO: 1451211 - RNA, 19 nt, Artificial Sequence
  Description of Artificial Sequence: Synthetic oligonucleotide
  Antisense strand to SEQ ID NO: 1451210
uaacuccuuuacuuguccg

SEQ ID NO: 1451212 - RNA, 19 nt, Artificial Sequence
  Description of Artificial Sequence: Synthetic oligonucleotide
  Sense strand starting at position 1758 of SEQ ID NO: 1243919
ggacaaggcugucaagauc

SEQ ID NO: 1451213 - RNA, 19 nt, Artificial Sequence
  Description of Artificial Sequence: Synthetic oligonucleotide
  Antisense strand to SEQ ID NO: 1451212
gaucuugacagccuugucc

SEQ ID NO: 1451214 - RNA, 19 nt, Artificial Sequence
  Description of Artificial Sequence: Synthetic oligonucleotide
  Sense strand starting at position 2123 of SEQ ID NO: 1243919
cagugauuggccgaaagga

SEQ ID NO: 1451215 - RNA, 19 nt, Artificial Sequence
  Description of Artificial Sequence: Synthetic oligonucleotide
  Antisense strand to SEQ ID NO: 1451214
uccuuucggccaaucacug

SEQ ID NO: 1451216 - RNA, 19 nt, Artificial Sequence
  Description of Artificial Sequence: Synthetic oligonucleotide
  Sense strand starting at position 2213 of SEQ ID NO: 1243919
caucuuccgugcuugaaau

SEQ ID NO: 1451217 - RNA, 19 nt, Artificial Sequence
  Description of Artificial Sequence: Synthetic oligonucleotide
  Antisense strand to SEQ ID NO: 1451216
auuucaagcacggaagaug

SEQ ID NO: 1451218 - RNA, 19 nt, Artificial Sequence
  Description of Artificial Sequence: Synthetic oligonucleotide
  Sense strand starting at position 2214 of SEQ ID NO: 1243919
aucuuccgugcuugaaauc

SEQ ID NO: 1451219 - RNA, 19 nt, Artificial Sequence
  Description of Artificial Sequence: Synthetic oligonucleotide
  Antisense strand to SEQ ID NO: 1451218
gauuucaagcacggaagau

SEQ ID NO: 1451220 - RNA, 19 nt, Artificial Sequence
  Description of Artificial Sequence: Synthetic oligonucleotide
  Sense strand starting at position 2220 of SEQ ID NO: 1243919
cgugcuugaaaucgacgua

SEQ ID NO: 1451221 - RNA, 19 nt, Artificial Sequence
  Description of Artificial Sequence: Synthetic oligonucleotide
  Antisense strand to SEQ ID NO: 1451220
uacgucgauuucaagcacg

SEQ ID NO: 1451222 - RNA, 19 nt, Artificial Sequence
  Description of Artificial Sequence: Synthetic oligonucleotide
  Sense strand starting at position 2223 of SEQ ID NO: 1243919
gcuugaaaucgacguagug

SEQ ID NO: 1451223 - RNA, 19 nt, Artificial Sequence
  Description of Artificial Sequence: Synthetic oligonucleotide
  Antisense strand to SEQ ID NO: 1451222
cacuacgucgauuucaagc

SEQ ID NO: 1451224 - RNA, 19 nt, Artificial Sequence
  Description of Artificial Sequence: Synthetic oligonucleotide
  Sense strand starting at position 2225 of SEQ ID NO: 1243919
uugaaaucgacguagugga

SEQ ID NO: 1451225 - RNA, 19 nt, Artificial Sequence
  Description of Artificial Sequence: Synthetic oligonucleotide
  Antisense strand to SEQ ID NO: 1451224
uccacuacgucgauuucaa

SEQ ID NO: 1451226 - RNA, 19 nt, Artificial Sequence
  Description of Artificial Sequence: Synthetic oligonucleotide
  Sense strand starting at position 2265 of SEQ ID NO: 1243919
cugccaagauuauugcaaa

SEQ ID NO: 1451227 - RNA, 19 nt, Artificial Sequence
  Description of Artificial Sequence: Synthetic oligonucleotide
  Antisense strand to SEQ ID NO: 1451226
uuugcaauaaucuuggcag

SEQ ID NO: 1451228 - RNA, 19 nt, Artificial Sequence
  Description of Artificial Sequence: Synthetic oligonucleotide
  Sense strand starting at position 2285 of SEQ ID NO: 1243919
agacgauguggugguuaau

SEQ ID NO: 1451229 - RNA, 19 nt, Artificial Sequence
  Description of Artificial Sequence: Synthetic oligonucleotide
  Antisense strand to SEQ ID NO: 1451228
auuaaccaccacaucgucu

SEQ ID NO: 1451230 - RNA, 19 nt, Artificial Sequence
  Description of Artificial Sequence: Synthetic oligonucleotide
  Sense strand starting at position 2288 of SEQ ID NO: 1243919
cgauguggugguuaauauc

SEQ ID NO: 1451231 - RNA, 19 nt, Artificial Sequence
  Description of Artificial Sequence: Synthetic oligonucleotide
  Antisense strand to SEQ ID NO: 1451230
gauauuaaccaccacaucg

SEQ ID NO: 1451232 - RNA, 19 nt, Artificial Sequence
  Description of Artificial Sequence: Synthetic oligonucleotide
  Sense strand starting at position 2295 of SEQ ID NO: 1243919
gugguuaauaucggaaaga

SEQ ID NO: 1451233 - RNA, 19 nt, Artificial Sequence
  Description of Artificial Sequence: Synthetic oligonucleotide
  Antisense strand to SEQ ID NO: 1451232
ucuuuccgauauuaaccac

SEQ ID NO: 1451234 - RNA, 19 nt, Artificial Sequence
  Description of Artificial Sequence: Synthetic oligonucleotide
  Sense strand starting at position 2296 of SEQ ID NO: 1243919
ugguuaauaucggaaagaa

SEQ ID NO: 1451235 - RNA, 19 nt, Artificial Sequence
  Description of Artificial Sequence: Synthetic oligonucleotide
  Antisense strand to SEQ ID NO: 1451234
uucuuuccgauauuaacca

SEQ ID NO: 1451236 - RNA, 19 nt, Artificial Sequence
  Description of Artificial Sequence: Synthetic oligonucleotide
  Sense strand starting at position 2306 of SEQ ID NO: 1243919
cggaaagaaugugugguua

SEQ ID NO: 1451237 - RNA, 19 nt, Artificial Sequence
  Description of Artificial Sequence: Synthetic oligonucleotide
  Antisense strand to SEQ ID NO: 1451236
uaaccacacauucuuuccg

SEQ ID NO: 1451238 - RNA, 19 nt, Artificial Sequence
  Description of Artificial Sequence: Synthetic oligonucleotide
  Sense strand starting at position 2319 of SEQ ID NO: 1243919
ugguuaauaucaggaagaa

SEQ ID NO: 1451239 - RNA, 19 nt, Artificial Sequence
  Description of Artificial Sequence: Synthetic oligonucleotide
  Antisense strand to SEQ ID NO: 1451238
uucuuccugauauuaacca

SEQ ID NO: 1451240 - RNA, 19 nt, Artificial Sequence
  Description of Artificial Sequence: Synthetic oligonucleotide
  Sense strand starting at position 2359 of SEQ ID NO: 1243919
gggcuaacauuucuuguuu

SEQ ID NO: 1451241 - RNA, 19 nt, Artificial Sequence
  Description of Artificial Sequence: Synthetic oligonucleotide
  Antisense strand to SEQ ID NO: 1451240
aaacaagaaauguuagccc

SEQ ID NO: 1451242 - RNA, 19 nt, Artificial Sequence
  Description of Artificial Sequence: Synthetic oligonucleotide
  Sense strand starting at position 2492 of SEQ ID NO: 1243919
accaacuacgucuggagaa

SEQ ID NO: 1451243 - RNA, 19 nt, Artificial Sequence
  Description of Artificial Sequence: Synthetic oligonucleotide
  Antisense strand to SEQ ID NO: 1451242
uucuccagacguaguuggu

SEQ ID NO: 1451244 - RNA, 19 nt, Artificial Sequence
  Description of Artificial Sequence: Synthetic oligonucleotide
  Sense strand starting at position 2538 of SEQ ID NO: 1243919
ucaucugugggcgaaggau

SEQ ID NO: 1451245 - RNA, 19 nt, Artificial Sequence
  Description of Artificial Sequence: Synthetic oligonucleotide
  Antisense strand to SEQ ID NO: 1451244
auccuucgcccacagauga

SEQ ID NO: 1451246 - RNA, 19 nt, Artificial Sequence
  Description of Artificial Sequence: Synthetic oligonucleotide
  Sense strand starting at position 2547 of SEQ ID NO: 1243919
ggcgaaggauuaccuagau

SEQ ID NO: 1451247 - RNA, 19 nt, Artificial Sequence
  Description of Artificial Sequence: Synthetic oligonucleotide
  Antisense strand to SEQ ID NO: 1451246
aucuagguaauccuucgcc

SEQ ID NO: 1451248 - RNA, 19 nt, Artificial Sequence
  Description of Artificial Sequence: Synthetic oligonucleotide
  Sense strand starting at position 2953 of SEQ ID NO: 1243919
ugaucaugaucauggauaa

SEQ ID NO: 1451249 - RNA, 19 nt, Artificial Sequence
  Description of Artificial Sequence: Synthetic oligonucleotide
  Antisense strand to SEQ ID NO: 1451248
uuauccaugaucaugauca

SEQ ID NO: 1451250 - RNA, 19 nt, Artificial Sequence
  Description of Artificial Sequence: Synthetic oligonucleotide
  Sense strand starting at position 3046 of SEQ ID NO: 1243919
uagggacauugugagaagu

SEQ ID NO: 1451251 - RNA, 19 nt, Artificial Sequence
  Description of Artificial Sequence: Synthetic oligonucleotide
  Antisense strand to SEQ ID NO: 1451250
acuucucacaaugucccua

SEQ ID NO: 1451252 - RNA, 19 nt, Artificial Sequence
  Description of Artificial Sequence: Synthetic oligonucleotide
  Sense strand starting at position 3080 of SEQ ID NO: 1243919
aggugagcccucugucacu

SEQ ID NO: 1451253 - RNA, 19 nt, Artificial Sequence
  Description of Artificial Sequence: Synthetic oligonucleotide
  Antisense strand to SEQ ID NO: 1451252
agugacagagggcucaccu

SEQ ID NO: 1451254 - RNA, 19 nt, Artificial Sequence
  Description of Artificial Sequence: Synthetic oligonucleotide
  Sense strand starting at position 3134 of SEQ ID NO: 1243919
gcaguaaugccguugucug

SEQ ID NO: 1451255 - RNA, 19 nt, Artificial Sequence
  Description of Artificial Sequence: Synthetic oligonucleotide
  Antisense strand to SEQ ID NO: 1451254
cagacaacggcauuacugc

SEQ ID NO: 1451256 - RNA, 19 nt, Artificial Sequence
  Description of Artificial Sequence: Synthetic oligonucleotide
  Sense strand starting at position 3160 of SEQ ID NO: 1243919
acccguuacuuagaagacu

SEQ ID NO: 1451257 - RNA, 19 nt, Artificial Sequence
  Description of Artificial Sequence: Synthetic oligonucleotide
  Antisense strand to SEQ ID NO: 1451256
agucuucuaaguaacgggu

SEQ ID NO: 1451258 - RNA, 19 nt, Artificial Sequence
  Description of Artificial Sequence: Synthetic oligonucleotide
  Sense strand starting at position 3443 of SEQ ID NO: 1243919
agaagaaagcgcugaugua

SEQ ID NO: 1451259 - RNA, 19 nt, Artificial Sequence
  Description of Artificial Sequence: Synthetic oligonucleotide
  Antisense strand to SEQ ID NO: 1451258
uacaucagcgcuuucuucu

SEQ ID NO: 1451260 - RNA, 19 nt, Artificial Sequence
  Description of Artificial Sequence: Synthetic oligonucleotide
  Sense strand starting at position 3444 of SEQ ID NO: 1243919
gaagaaagcgcugauguau

SEQ ID NO: 1451261 - RNA, 19 nt, Artificial Sequence
  Description of Artificial Sequence: Synthetic oligonucleotide
  Antisense strand to SEQ ID NO: 1451260
auacaucagcgcuuucuuc

SEQ ID NO: 1451262 - RNA, 19 nt, Artificial Sequence
  Description of Artificial Sequence: Synthetic oligonucleotide
  Sense strand starting at position 3534 of SEQ ID NO: 1243919
ccuugucaaucacuuggaa

SEQ ID NO: 1451263 - RNA, 19 nt, Artificial Sequence
  Description of Artificial Sequence: Synthetic oligonucleotide
  Antisense strand to SEQ ID NO: 1451262
uuccaagugauugacaagg

SEQ ID NO: 1451264 - RNA, 19 nt, Artificial Sequence
  Description of Artificial Sequence: Synthetic oligonucleotide
  Sense strand starting at position 3537 of SEQ ID NO: 1243919
ugucaaucacuuggaagau

SEQ ID NO: 1451265 - RNA, 19 nt, Artificial Sequence
  Description of Artificial Sequence: Synthetic oligonucleotide
  Antisense strand to SEQ ID NO: 1451264
aucuuccaagugauugaca

SEQ ID NO: 1451266 - RNA, 19 nt, Artificial Sequence
  Description of Artificial Sequence: Synthetic oligonucleotide
  Sense strand starting at position 3538 of SEQ ID NO: 1243919
gucaaucacuuggaagauu

SEQ ID NO: 1451267 - RNA, 19 nt, Artificial Sequence
  Description of Artificial Sequence: Synthetic oligonucleotide
  Antisense strand to SEQ ID NO: 1451266
aaucuuccaagugauugac

SEQ ID NO: 1451268 - RNA, 19 nt, Artificial Sequence
  Description of Artificial Sequence: Synthetic oligonucleotide
  Sense strand starting at position 79 of SEQ ID NO: 1243920
aagaguucuagugacagug

SEQ ID NO: 1451269 - RNA, 19 nt, Artificial Sequence
  Description of Artificial Sequence: Synthetic oligonucleotide
  Antisense strand to SEQ ID NO: 1451268
cacugucacuagaacucuu

SEQ ID NO: 1451270 - RNA, 19 nt, Artificial Sequence
  Description of Artificial Sequence: Synthetic oligonucleotide
  Sense strand starting at position 87 of SEQ ID NO: 1243920
uagugacagugauuagcau

SEQ ID NO: 1451271 - RNA, 19 nt, Artificial Sequence
  Description of Artificial Sequence: Synthetic oligonucleotide
  Antisense strand to SEQ ID NO: 1451270
augcuaaucacugucacua

SEQ ID NO: 1451272 - RNA, 19 nt, Artificial Sequence
  Description of Artificial Sequence: Synthetic oligonucleotide
  Sense strand starting at position 111 of SEQ ID NO: 1243920
cuacauauacuuugagagu

SEQ ID NO: 1451273 - RNA, 19 nt, Artificial Sequence
  Description of Artificial Sequence: Synthetic oligonucleotide
  Antisense strand to SEQ ID NO: 1451272
acucucaaaguauauguag

SEQ ID NO: 1451274 - RNA, 19 nt, Artificial Sequence
  Description of Artificial Sequence: Synthetic oligonucleotide
  Sense strand starting at position 146 of SEQ ID NO: 1243920
acaggucaguucuuugaug

SEQ ID NO: 1451275 - RNA, 19 nt, Artificial Sequence
  Description of Artificial Sequence: Synthetic oligonucleotide
  Antisense strand to SEQ ID NO: 1451274
caucaaagaacugaccugu

SEQ ID NO: 1451276 - RNA, 19 nt, Artificial Sequence
  Description of Artificial Sequence: Synthetic oligonucleotide
  Sense strand starting at position 147 of SEQ ID NO: 1243920
caggucaguucuuugauga

SEQ ID NO: 1451277 - RNA, 19 nt, Artificial Sequence
  Description of Artificial Sequence: Synthetic oligonucleotide
  Antisense strand to SEQ ID NO: 1451276
ucaucaaagaacugaccug

SEQ ID NO: 1451278 - RNA, 19 nt, Artificial Sequence
  Description of Artificial Sequence: Synthetic oligonucleotide
  Sense strand starting at position 148 of SEQ ID NO: 1243920
aggucaguucuuugaugag

SEQ ID NO: 1451279 - RNA, 19 nt, Artificial Sequence
  Description of Artificial Sequence: Synthetic oligonucleotide
  Antisense strand to SEQ ID NO: 1451278
cucaucaaagaacugaccu

SEQ ID NO: 1451280 - RNA, 19 nt, Artificial Sequence
  Description of Artificial Sequence: Synthetic oligonucleotide
  Sense strand starting at position 182 of SEQ ID NO: 1243920
ucaagaacguaaucacauu

SEQ ID NO: 1451281 - RNA, 19 nt, Artificial Sequence
  Description of Artificial Sequence: Synthetic oligonucleotide
  Antisense strand to SEQ ID NO: 1451280
aaugugauuacguucuuga

SEQ ID NO: 1451282 - RNA, 19 nt, Artificial Sequence
  Description of Artificial Sequence: Synthetic oligonucleotide
  Sense strand starting at position 217 of SEQ ID NO: 1243920
aaguaaaugcuagguuaug

SEQ ID NO: 1451283 - RNA, 19 nt, Artificial Sequence
  Description of Artificial Sequence: Synthetic oligonucleotide
  Antisense strand to SEQ ID NO: 1451282
cauaaccuagcauuuacuu

SEQ ID NO: 1451284 - RNA, 19 nt, Artificial Sequence
  Description of Artificial Sequence: Synthetic oligonucleotide
  Sense strand starting at position 371 of SEQ ID NO: 1243920
uuaucauuccucugaucga

SEQ ID NO: 1451285 - RNA, 19 nt, Artificial Sequence
  Description of Artificial Sequence: Synthetic oligonucleotide
  Antisense strand to SEQ ID NO: 1451284
ucgaucagaggaaugauaa

SEQ ID NO: 1451286 - RNA, 19 nt, Artificial Sequence
  Description of Artificial Sequence: Synthetic oligonucleotide
  Sense strand starting at position 374 of SEQ ID NO: 1243920
ucauuccucugaucgaaac

SEQ ID NO: 1451287 - RNA, 19 nt, Artificial Sequence
  Description of Artificial Sequence: Synthetic oligonucleotide
  Antisense strand to SEQ ID NO: 1451286
guuucgaucagaggaauga

SEQ ID NO: 1451288 - RNA, 19 nt, Artificial Sequence
  Description of Artificial Sequence: Synthetic oligonucleotide
  Sense strand starting at position 924 of SEQ ID NO: 1243920
gcuucuuccagguacagga

SEQ ID NO: 1451289 - RNA, 19 nt, Artificial Sequence
  Description of Artificial Sequence: Synthetic oligonucleotide
  Antisense strand to SEQ ID NO: 1451288
uccuguaccuggaagaagc

SEQ ID NO: 1451290 - RNA, 19 nt, Artificial Sequence
  Description of Artificial Sequence: Synthetic oligonucleotide
  Sense strand starting at position 992 of SEQ ID NO: 1243920
acgaaacacucauugcuca

SEQ ID NO: 1451291 - RNA, 19 nt, Artificial Sequence
  Description of Artificial Sequence: Synthetic oligonucleotide
  Antisense strand to SEQ ID NO: 1451290
ugagcaaugaguguuucgu

SEQ ID NO: 1451292 - RNA, 19 nt, Artificial Sequence
  Description of Artificial Sequence: Synthetic oligonucleotide
  Sense strand starting at position 1161 of SEQ ID NO: 1243920
gauaacugccuauaggagu

SEQ ID NO: 1451293 - RNA, 19 nt, Artificial Sequence
  Description of Artificial Sequence: Synthetic oligonucleotide
  Antisense strand to SEQ ID NO: 1451292
acuccuauaggcaguuauc

SEQ ID NO: 1451294 - RNA, 19 nt, Artificial Sequence
  Description of Artificial Sequence: Synthetic oligonucleotide
  Sense strand starting at position 1200 of SEQ ID NO: 1243920
cagugaugagaauguaauu

SEQ ID NO: 1451295 - RNA, 19 nt, Artificial Sequence
  Description of Artificial Sequence: Synthetic oligonucleotide
  Antisense strand to SEQ ID NO: 1451294
aauuacauucucaucacug

SEQ ID NO: 1451296 - RNA, 19 nt, Artificial Sequence
  Description of Artificial Sequence: Synthetic oligonucleotide
  Sense strand starting at position 1464 of SEQ ID NO: 1243920
gccuccuugggucagaauu

SEQ ID NO: 1451297 - RNA, 19 nt, Artificial Sequence
  Description of Artificial Sequence: Synthetic oligonucleotide
  Antisense strand to SEQ ID NO: 1451296
aauucugacccaaggaggc

SEQ ID NO: 1451298 - RNA, 19 nt, Artificial Sequence
  Description of Artificial Sequence: Synthetic oligonucleotide
  Sense strand starting at position 1489 of SEQ ID NO: 1243920
gcgcuauuccugcccugga

SEQ ID NO: 1451299 - RNA, 19 nt, Artificial Sequence
  Description of Artificial Sequence: Synthetic oligonucleotide
  Antisense strand to SEQ ID NO: 1451298
uccagggcaggaauagcgc

SEQ ID NO: 1451300 - RNA, 19 nt, Artificial Sequence
  Description of Artificial Sequence: Synthetic oligonucleotide
  Sense strand starting at position 1781 of SEQ ID NO: 1243920
gcggccuugcguccagaaa

SEQ ID NO: 1451301 - RNA, 19 nt, Artificial Sequence
  Description of Artificial Sequence: Synthetic oligonucleotide
  Antisense strand to SEQ ID NO: 1451300
uuucuggacgcaaggccgc

SEQ ID NO: 1451302 - RNA, 19 nt, Artificial Sequence
  Description of Artificial Sequence: Synthetic oligonucleotide
  Sense strand starting at position 2117 of SEQ ID NO: 1243920
cucacaggcuccucagaua

SEQ ID NO: 1451303 - RNA, 19 nt, Artificial Sequence
  Description of Artificial Sequence: Synthetic oligonucleotide
  Antisense strand to SEQ ID NO: 1451302
uaucugaggagccugugag

SEQ ID NO: 1451304 - RNA, 19 nt, Artificial Sequence
  Description of Artificial Sequence: Synthetic oligonucleotide
  Sense strand starting at position 2189 of SEQ ID NO: 1243920
ugggucugcgaaugaagaa

SEQ ID NO: 1451305 - RNA, 19 nt, Artificial Sequence
  Description of Artificial Sequence: Synthetic oligonucleotide
  Antisense strand to SEQ ID NO: 1451304
uucuucauucgcagaccca

SEQ ID NO: 1451306 - RNA, 19 nt, Artificial Sequence
  Description of Artificial Sequence: Synthetic oligonucleotide
  Sense strand starting at position 2190 of SEQ ID NO: 1243920
gggucugcgaaugaagaaa

SEQ ID NO: 1451307 - RNA, 19 nt, Artificial Sequence
  Description of Artificial Sequence: Synthetic oligonucleotide
  Antisense strand to SEQ ID NO: 1451306
uuucuucauucgcagaccc

SEQ ID NO: 1451308 - RNA, 19 nt, Artificial Sequence
  Description of Artificial Sequence: Synthetic oligonucleotide
  Sense strand starting at position 2272 of SEQ ID NO: 1243920
acaugaacaugccuauagu

SEQ ID NO: 1451309 - RNA, 19 nt, Artificial Sequence
  Description of Artificial Sequence: Synthetic oligonucleotide
  Antisense strand to SEQ ID NO: 1451308
acuauaggcauguucaugu

SEQ ID NO: 1451310 - RNA, 19 nt, Artificial Sequence
  Description of Artificial Sequence: Synthetic oligonucleotide
  Sense strand starting at position 2275 of SEQ ID NO: 1243920
ugaacaugccuauaguuua

SEQ ID NO: 1451311 - RNA, 19 nt, Artificial Sequence
  Description of Artificial Sequence: Synthetic oligonucleotide
  Antisense strand to SEQ ID NO: 1451310
uaaacuauaggcauguuca

SEQ ID NO: 1451312 - RNA, 19 nt, Artificial Sequence
  Description of Artificial Sequence: Synthetic oligonucleotide
  Sense strand starting at position 2383 of SEQ ID NO: 1243920
uuccgugugacgucaacuu

SEQ ID NO: 1451313 - RNA, 19 nt, Artificial Sequence
  Description of Artificial Sequence: Synthetic oligonucleotide
  Antisense strand to SEQ ID NO: 1451312
aaguugacgucacacggaa

SEQ ID NO: 1451314 - RNA, 19 nt, Artificial Sequence
  Description of Artificial Sequence: Synthetic oligonucleotide
  Sense strand starting at position 2402 of SEQ ID NO: 1243920
gacggaauccuagguagga

SEQ ID NO: 1451315 - RNA, 19 nt, Artificial Sequence
  Description of Artificial Sequence: Synthetic oligonucleotide
  Antisense strand to SEQ ID NO: 1451314
uccuaccuaggauuccguc

SEQ ID NO: 1451316 - RNA, 19 nt, Artificial Sequence
  Description of Artificial Sequence: Synthetic oligonucleotide
  Sense strand starting at position 2511 of SEQ ID NO: 1243920
gagggaggucucgcgcuuu

SEQ ID NO: 1451317 - RNA, 19 nt, Artificial Sequence
  Description of Artificial Sequence: Synthetic oligonucleotide
  Antisense strand to SEQ ID NO: 1451316
aaagcgcgagaccucccuc

SEQ ID NO: 1451318 - RNA, 19 nt, Artificial Sequence
  Description of Artificial Sequence: Synthetic oligonucleotide
  Sense strand starting at position 2829 of SEQ ID NO: 1243920
cggugacuccgaguugcuu

SEQ ID NO: 1451319 - RNA, 19 nt, Artificial Sequence
  Description of Artificial Sequence: Synthetic oligonucleotide
  Antisense strand to SEQ ID NO: 1451318
aagcaacucggagucaccg

SEQ ID NO: 1451320 - RNA, 19 nt, Artificial Sequence
  Description of Artificial Sequence: Synthetic oligonucleotide
  Sense strand starting at position 2865 of SEQ ID NO: 1243920
gguugagauaauuguaaug

SEQ ID NO: 1451321 - RNA, 19 nt, Artificial Sequence
  Description of Artificial Sequence: Synthetic oligonucleotide
  Antisense strand to SEQ ID NO: 1451320
cauuacaauuaucucaacc

SEQ ID NO: 1451322 - RNA, 19 nt, Artificial Sequence
  Description of Artificial Sequence: Synthetic oligonucleotide
  Sense strand starting at position 2932 of SEQ ID NO: 1243920
ggcagaguuagaggaaaug

SEQ ID NO: 1451323 - RNA, 19 nt, Artificial Sequence
  Description of Artificial Sequence: Synthetic oligonucleotide
  Antisense strand to SEQ ID NO: 1451322
cauuuccucuaacucugcc

SEQ ID NO: 1451324 - RNA, 19 nt, Artificial Sequence
  Description of Artificial Sequence: Synthetic oligonucleotide
  Sense strand starting at position 3109 of SEQ ID NO: 1243920
agaggaaagucugcaugau

SEQ ID NO: 1451325 - RNA, 19 nt, Artificial Sequence
  Description of Artificial Sequence: Synthetic oligonucleotide
  Antisense strand to SEQ ID NO: 1451324
aucaugcagacuuuccucu

SEQ ID NO: 1451326 - RNA, 19 nt, Artificial Sequence
  Description of Artificial Sequence: Synthetic oligonucleotide
  Sense strand starting at position 3119 of SEQ ID NO: 1243920
cugcaugauuuccagaaua

SEQ ID NO: 1451327 - RNA, 19 nt, Artificial Sequence
  Description of Artificial Sequence: Synthetic oligonucleotide
  Antisense strand to SEQ ID NO: 1451326
uauucuggaaaucaugcag

SEQ ID NO: 1451328 - RNA, 19 nt, Artificial Sequence
  Description of Artificial Sequence: Synthetic oligonucleotide
  Sense strand starting at position 3222 of SEQ ID NO: 1243920
agacucagucgcugaggaa

SEQ ID NO: 1451329 - RNA, 19 nt, Artificial Sequence
  Description of Artificial Sequence: Synthetic oligonucleotide
  Antisense strand to SEQ ID NO: 1451328
uuccucagcgacugagucu

SEQ ID NO: 1451330 - RNA, 19 nt, Artificial Sequence
  Description of Artificial Sequence: Synthetic oligonucleotide
  Sense strand starting at position 3237 of SEQ ID NO: 1243920
ggaacuauuggaugagcuu

SEQ ID NO: 1451331 - RNA, 19 nt, Artificial Sequence
  Description of Artificial Sequence: Synthetic oligonucleotide
  Antisense strand to SEQ ID NO: 1451330
aagcucauccaauaguucc

SEQ ID NO: 1451332 - RNA, 19 nt, Artificial Sequence
  Description of Artificial Sequence: Synthetic oligonucleotide
  Sense strand starting at position 3243 of SEQ ID NO: 1243920
auuggaugagcuugcagaa

SEQ ID NO: 1451333 - RNA, 19 nt, Artificial Sequence
  Description of Artificial Sequence: Synthetic oligonucleotide
  Antisense strand to SEQ ID NO: 1451332
uucugcaagcucauccaau

SEQ ID NO: 1451334 - RNA, 19 nt, Artificial Sequence
  Description of Artificial Sequence: Synthetic oligonucleotide
  Sense strand starting at position 3278 of SEQ ID NO: 1243920
uuguuagcgcuugugugaa

SEQ ID NO: 1451335 - RNA, 19 nt, Artificial Sequence
  Description of Artificial Sequence: Synthetic oligonucleotide
  Antisense strand to SEQ ID NO: 1451334
uucacacaagcgcuaacaa

SEQ ID NO: 1451336 - RNA, 19 nt, Artificial Sequence
  Description of Artificial Sequence: Synthetic oligonucleotide
  Sense strand starting at position 3388 of SEQ ID NO: 1243920
ggagacuucuaagagggaa

SEQ ID NO: 1451337 - RNA, 19 nt, Artificial Sequence
  Description of Artificial Sequence: Synthetic oligonucleotide
  Antisense strand to SEQ ID NO: 1451336
uucccucuuagaagucucc

SEQ ID NO: 1451338 - RNA, 19 nt, Artificial Sequence
  Description of Artificial Sequence: Synthetic oligonucleotide
  Sense strand starting at position 3427 of SEQ ID NO: 1243920
ggaugauuguaaccuaaau

SEQ ID NO: 1451339 - RNA, 19 nt, Artificial Sequence
  Description of Artificial Sequence: Synthetic oligonucleotide
  Antisense strand to SEQ ID NO: 1451338
auuuagguuacaaucaucc

SEQ ID NO: 1451340 - RNA, 19 nt, Artificial Sequence
  Description of Artificial Sequence: Synthetic oligonucleotide
  Sense strand starting at position 3449 of SEQ ID NO: 1243920
cuugaaggaucuccauuau

SEQ ID NO: 1451341 - RNA, 19 nt, Artificial Sequence
  Description of Artificial Sequence: Synthetic oligonucleotide
  Antisense strand to SEQ ID NO: 1451340
auaauggagauccuucaag

SEQ ID NO: 1451342 - RNA, 19 nt, Artificial Sequence
  Description of Artificial Sequence: Synthetic oligonucleotide
  Sense strand starting at position 3462 of SEQ ID NO: 1243920
cauuauagugcugaguuau

SEQ ID NO: 1451343 - RNA, 19 nt, Artificial Sequence
  Description of Artificial Sequence: Synthetic oligonucleotide
  Antisense strand to SEQ ID NO: 1451342
auaacucagcacuauaaug

SEQ ID NO: 1451344 - RNA, 19 nt, Artificial Sequence
  Description of Artificial Sequence: Synthetic oligonucleotide
  Sense strand starting at position 3497 of SEQ ID NO: 1243920
uggugugaauauucuaauu

SEQ ID NO: 1451345 - RNA, 19 nt, Artificial Sequence
  Description of Artificial Sequence: Synthetic oligonucleotide
  Antisense strand to SEQ ID NO: 1451344
aauuagaauauucacacca

SEQ ID NO: 1451346 - RNA, 19 nt, Artificial Sequence
  Description of Artificial Sequence: Synthetic oligonucleotide
  Sense strand starting at position 3526 of SEQ ID NO: 1243920
uuugaaaugaucggaucuu

SEQ ID NO: 1451347 - RNA, 19 nt, Artificial Sequence
  Description of Artificial Sequence: Synthetic oligonucleotide
  Antisense strand to SEQ ID NO: 1451346
aagauccgaucauuucaaa

SEQ ID NO: 1451348 - RNA, 19 nt, Artificial Sequence
  Description of Artificial Sequence: Synthetic oligonucleotide
  Sense strand starting at position 261 of SEQ ID NO: 1243921
agaauccacgaucgaguua

SEQ ID NO: 1451349 - RNA, 19 nt, Artificial Sequence
  Description of Artificial Sequence: Synthetic oligonucleotide
  Antisense strand to SEQ ID NO: 1451348
uaacucgaucguggauucu

SEQ ID NO: 1451350 - RNA, 19 nt, Artificial Sequence
  Description of Artificial Sequence: Synthetic oligonucleotide
  Sense strand starting at position 327 of SEQ ID NO: 1243921
aaaucagggugcucuugau

SEQ ID NO: 1451351 - RNA, 19 nt, Artificial Sequence
  Description of Artificial Sequence: Synthetic oligonucleotide
  Antisense strand to SEQ ID NO: 1451350
aucaagagcacccugauuu

SEQ ID NO: 1451352 - RNA, 19 nt, Artificial Sequence
  Description of Artificial Sequence: Synthetic oligonucleotide
  Sense strand starting at position 363 of SEQ ID NO: 1243921
uuaggcagcucaucaagau

SEQ ID NO: 1451353 - RNA, 19 nt, Artificial Sequence
  Description of Artificial Sequence: Synthetic oligonucleotide
  Antisense strand to SEQ ID NO: 1451352
aucuugaugagcugccuaa

SEQ ID NO: 1451354 - RNA, 19 nt, Artificial Sequence
  Description of Artificial Sequence: Synthetic oligonucleotide
  Sense strand starting at position 517 of SEQ ID NO: 1243921
auacccagguuucuguaua

SEQ ID NO: 1451355 - RNA, 19 nt, Artificial Sequence
  Description of Artificial Sequence: Synthetic oligonucleotide
  Antisense strand to SEQ ID NO: 1451354
uauacagaaaccuggguau

SEQ ID NO: 1451356 - RNA, 19 nt, Artificial Sequence
  Description of Artificial Sequence: Synthetic oligonucleotide
  Sense strand starting at position 640 of SEQ ID NO: 1243921
aguuaacauuucccguagu

SEQ ID NO: 1451357 - RNA, 19 nt, Artificial Sequence
  Description of Artificial Sequence: Synthetic oligonucleotide
  Antisense strand to SEQ ID NO: 1451356
acuacgggaaauguuaacu

SEQ ID NO: 1451358 - RNA, 19 nt, Artificial Sequence
  Description of Artificial Sequence: Synthetic oligonucleotide
  Sense strand starting at position 682 of SEQ ID NO: 1243921
auguaaacagccugggauu

SEQ ID NO: 1451359 - RNA, 19 nt, Artificial Sequence
  Description of Artificial Sequence: Synthetic oligonucleotide
  Antisense strand to SEQ ID NO: 1451358
aaucccaggcuguuuacau

SEQ ID NO: 1451360 - RNA, 19 nt, Artificial Sequence
  Description of Artificial Sequence: Synthetic oligonucleotide
  Sense strand starting at position 733 of SEQ ID NO: 1243921
ggaaacuugucacccacau

SEQ ID NO: 1451361 - RNA, 19 nt, Artificial Sequence
  Description of Artificial Sequence: Synthetic oligonucleotide
  Antisense strand to SEQ ID NO: 1451360
augugggugacaaguuucc

SEQ ID NO: 1451362 - RNA, 19 nt, Artificial Sequence
  Description of Artificial Sequence: Synthetic oligonucleotide
  Sense strand starting at position 857 of SEQ ID NO: 1243921
gagcaucacgacgauguua

SEQ ID NO: 1451363 - RNA, 19 nt, Artificial Sequence
  Description of Artificial Sequence: Synthetic oligonucleotide
  Antisense strand to SEQ ID NO: 1451362
uaacaucgucgugaugcuc

SEQ ID NO: 1451364 - RNA, 19 nt, Artificial Sequence
  Description of Artificial Sequence: Synthetic oligonucleotide
  Sense strand starting at position 926 of SEQ ID NO: 1243921
aguacagucagcgauaaca

SEQ ID NO: 1451365 - RNA, 19 nt, Artificial Sequence
  Description of Artificial Sequence: Synthetic oligonucleotide
  Antisense strand to SEQ ID NO: 1451364
uguuaucgcugacuguacu

SEQ ID NO: 1451366 - RNA, 19 nt, Artificial Sequence
  Description of Artificial Sequence: Synthetic oligonucleotide
  Sense strand starting at position 928 of SEQ ID NO: 1243921
uacagucagcgauaacaga

SEQ ID NO: 1451367 - RNA, 19 nt, Artificial Sequence
  Description of Artificial Sequence: Synthetic oligonucleotide
  Antisense strand to SEQ ID NO: 1451366
ucuguuaucgcugacugua

SEQ ID NO: 1451368 - RNA, 19 nt, Artificial Sequence
  Description of Artificial Sequence: Synthetic oligonucleotide
  Sense strand starting at position 1002 of SEQ ID NO: 1243921
gguagagcuccggaucaac

SEQ ID NO: 1451369 - RNA, 19 nt, Artificial Sequence
  Description of Artificial Sequence: Synthetic oligonucleotide
  Antisense strand to SEQ ID NO: 1451368
guugauccggagcucuacc

SEQ ID NO: 1451370 - RNA, 19 nt, Artificial Sequence
  Description of Artificial Sequence: Synthetic oligonucleotide
  Sense strand starting at position 1548 of SEQ ID NO: 1243921
cugugacgugaauaucaaa

SEQ ID NO: 1451371 - RNA, 19 nt, Artificial Sequence
  Description of Artificial Sequence: Synthetic oligonucleotide
  Antisense strand to SEQ ID NO: 1451370
uuugauauucacgucacag

SEQ ID NO: 1451372 - RNA, 19 nt, Artificial Sequence
  Description of Artificial Sequence: Synthetic oligonucleotide
  Sense strand starting at position 1814 of SEQ ID NO: 1243921
uggaaauggccucgaugac

SEQ ID NO: 1451373 - RNA, 19 nt, Artificial Sequence
  Description of Artificial Sequence: Synthetic oligonucleotide
  Antisense strand to SEQ ID NO: 1451372
gucaucgaggccauuucca

SEQ ID NO: 1451374 - RNA, 19 nt, Artificial Sequence
  Description of Artificial Sequence: Synthetic oligonucleotide
  Sense strand starting at position 1894 of SEQ ID NO: 1243921
cuacuagagaccgguagaa

SEQ ID NO: 1451375 - RNA, 19 nt, Artificial Sequence
  Description of Artificial Sequence: Synthetic oligonucleotide
  Antisense strand to SEQ ID NO: 1451374
uucuaccggucucuaguag

SEQ ID NO: 1451376 - RNA, 19 nt, Artificial Sequence
  Description of Artificial Sequence: Synthetic oligonucleotide
  Sense strand starting at position 2230 of SEQ ID NO: 1243921
uguuuacgucuccaaagag

SEQ ID NO: 1451377 - RNA, 19 nt, Artificial Sequence
  Description of Artificial Sequence: Synthetic oligonucleotide
  Antisense strand to SEQ ID NO: 1451376
cucuuuggagacguaaaca

SEQ ID NO: 1451378 - RNA, 19 nt, Artificial Sequence
  Description of Artificial Sequence: Synthetic oligonucleotide
  Sense strand starting at position 2377 of SEQ ID NO: 1243921
gaaauagcucaccggaagu

SEQ ID NO: 1451379 - RNA, 19 nt, Artificial Sequence
  Description of Artificial Sequence: Synthetic oligonucleotide
  Antisense strand to SEQ ID NO: 1451378
acuuccggugagcuauuuc

SEQ ID NO: 1451380 - RNA, 19 nt, Artificial Sequence
  Description of Artificial Sequence: Synthetic oligonucleotide
  Sense strand starting at position 2487 of SEQ ID NO: 1243921
ggcggagaauggucucuaa

SEQ ID NO: 1451381 - RNA, 19 nt, Artificial Sequence
  Description of Artificial Sequence: Synthetic oligonucleotide
  Antisense strand to SEQ ID NO: 1451380
uuagagaccauucuccgcc

SEQ ID NO: 1451382 - RNA, 19 nt, Artificial Sequence
  Description of Artificial Sequence: Synthetic oligonucleotide
  Sense strand starting at position 2490 of SEQ ID NO: 1243921
ggagaauggucucuaaacu

SEQ ID NO: 1451383 - RNA, 19 nt, Artificial Sequence
  Description of Artificial Sequence: Synthetic oligonucleotide
  Antisense strand to SEQ ID NO: 1451382
aguuuagagaccauucucc

SEQ ID NO: 1451384 - RNA, 19 nt, Artificial Sequence
  Description of Artificial Sequence: Synthetic oligonucleotide
  Sense strand starting at position 2522 of SEQ ID NO: 1243921
ccguuucacguccugugaa

SEQ ID NO: 1451385 - RNA, 19 nt, Artificial Sequence
  Description of Artificial Sequence: Synthetic oligonucleotide
  Antisense strand to SEQ ID NO: 1451384
uucacaggacgugaaacgg

SEQ ID NO: 1451386 - RNA, 19 nt, Artificial Sequence
  Description of Artificial Sequence: Synthetic oligonucleotide
  Sense strand starting at position 2771 of SEQ ID NO: 1243921
ccaguauguguggacugaa

SEQ ID NO: 1451387 - RNA, 19 nt, Artificial Sequence
  Description of Artificial Sequence: Synthetic oligonucleotide
  Antisense strand to SEQ ID NO: 1451386
uucaguccacacauacugg

SEQ ID NO: 1451388 - RNA, 19 nt, Artificial Sequence
  Description of Artificial Sequence: Synthetic oligonucleotide
  Sense strand starting at position 2942 of SEQ ID NO: 1243921
caguaugcugugggagaga

SEQ ID NO: 1451389 - RNA, 19 nt, Artificial Sequence
  Description of Artificial Sequence: Synthetic oligonucleotide
  Antisense strand to SEQ ID NO: 1451388
ucucucccacagcauacug

SEQ ID NO: 1451390 - RNA, 19 nt, Artificial Sequence
  Description of Artificial Sequence: Synthetic oligonucleotide
  Sense strand starting at position 3118 of SEQ ID NO: 1243921
uuguauuggucuuuaaagg

SEQ ID NO: 1451391 - RNA, 19 nt, Artificial Sequence
  Description of Artificial Sequence: Synthetic oligonucleotide
  Antisense strand to SEQ ID NO: 1451390
ccuuuaaagaccaauacaa

SEQ ID NO: 1451392 - RNA, 19 nt, Artificial Sequence
  Description of Artificial Sequence: Synthetic oligonucleotide
  Sense strand starting at position 3119 of SEQ ID NO: 1243921
uguauuggucuuuaaagga

SEQ ID NO: 1451393 - RNA, 19 nt, Artificial Sequence
  Description of Artificial Sequence: Synthetic oligonucleotide
  Antisense strand to SEQ ID NO: 1451392
uccuuuaaagaccaauaca

SEQ ID NO: 1451394 - RNA, 19 nt, Artificial Sequence
  Description of Artificial Sequence: Synthetic oligonucleotide
  Sense strand starting at position 3135 of SEQ ID NO: 1243921
ggaacagcauucuuaagau

SEQ ID NO: 1451395 - RNA, 19 nt, Artificial Sequence
  Description of Artificial Sequence: Synthetic oligonucleotide
  Antisense strand to SEQ ID NO: 1451394
aucuuaagaaugcuguucc

SEQ ID NO: 1451396 - RNA, 19 nt, Artificial Sequence
  Description of Artificial Sequence: Synthetic oligonucleotide
  Sense strand starting at position 3262 of SEQ ID NO: 1243921
agcgaauuaauuugguugu

SEQ ID NO: 1451397 - RNA, 19 nt, Artificial Sequence
  Description of Artificial Sequence: Synthetic oligonucleotide
  Antisense strand to SEQ ID NO: 1451396
acaaccaaauuaauucgcu

SEQ ID NO: 1451398 - RNA, 19 nt, Artificial Sequence
  Description of Artificial Sequence: Synthetic oligonucleotide
  Sense strand starting at position 3264 of SEQ ID NO: 1243921
cgaauuaauuugguugucu

SEQ ID NO: 1451399 - RNA, 19 nt, Artificial Sequence
  Description of Artificial Sequence: Synthetic oligonucleotide
  Antisense strand to SEQ ID NO: 1451398
agacaaccaaauuaauucg

SEQ ID NO: 1451400 - RNA, 19 nt, Artificial Sequence
  Description of Artificial Sequence: Synthetic oligonucleotide
  Sense strand starting at position 3431 of SEQ ID NO: 1243921
uggagauguuuguuucuaa

SEQ ID NO: 1451401 - RNA, 19 nt, Artificial Sequence
  Description of Artificial Sequence: Synthetic oligonucleotide
  Antisense strand to SEQ ID NO: 1451400
uuagaaacaaacaucucca

SEQ ID NO: 1451402 - RNA, 19 nt, Artificial Sequence
  Description of Artificial Sequence: Synthetic oligonucleotide
  Sense strand starting at position 3432 of SEQ ID NO: 1243921
ggagauguuuguuucuaau

SEQ ID NO: 1451403 - RNA, 19 nt, Artificial Sequence
  Description of Artificial Sequence: Synthetic oligonucleotide
  Antisense strand to SEQ ID NO: 1451402
auuagaaacaaacaucucc

SEQ ID NO: 1451404 - RNA, 19 nt, Artificial Sequence
  Description of Artificial Sequence: Synthetic oligonucleotide
  Sense strand starting at position 3434 of SEQ ID NO: 1243921
agauguuuguuucuaauac

SEQ ID NO: 1451405 - RNA, 19 nt, Artificial Sequence
  Description of Artificial Sequence: Synthetic oligonucleotide
  Antisense strand to SEQ ID NO: 1451404
guauuagaaacaaacaucu

SEQ ID NO: 1451406 - RNA, 19 nt, Artificial Sequence
  Description of Artificial Sequence: Synthetic oligonucleotide
  Sense strand starting at position 3445 of SEQ ID NO: 1243921
ucuaauaccgauugaaagu

SEQ ID NO: 1451407 - RNA, 19 nt, Artificial Sequence
  Description of Artificial Sequence: Synthetic oligonucleotide
  Antisense strand to SEQ ID NO: 1451406
acuuucaaucgguauuaga

SEQ ID NO: 1451408 - RNA, 19 nt, Artificial Sequence
  Description of Artificial Sequence: Synthetic oligonucleotide
  Sense strand starting at position 3522 of SEQ ID NO: 1243921
ugguacagaaaccguuaaa

SEQ ID NO: 1451409 - RNA, 19 nt, Artificial Sequence
  Description of Artificial Sequence: Synthetic oligonucleotide
  Antisense strand to SEQ ID NO: 1451408
uuuaacgguuucuguacca

SEQ ID NO: 1451410 - RNA, 19 nt, Artificial Sequence
  Description of Artificial Sequence: Synthetic oligonucleotide
  Sense strand starting at position 3575 of SEQ ID NO: 1243921
gaaugugguacgcaggaaa

SEQ ID NO: 1451411 - RNA, 19 nt, Artificial Sequence
  Description of Artificial Sequence: Synthetic oligonucleotide
  Antisense strand to SEQ ID NO: 1451410
uuuccugcguaccacauuc

SEQ ID NO: 1451412 - RNA, 19 nt, Artificial Sequence
  Description of Artificial Sequence: Synthetic oligonucleotide
  Sense strand starting at position 3588 of SEQ ID NO: 1243921
aggaaacgucaacaguauu

SEQ ID NO: 1451413 - RNA, 19 nt, Artificial Sequence
  Description of Artificial Sequence: Synthetic oligonucleotide
  Antisense strand to SEQ ID NO: 1451412
aauacuguugacguuuccu

SEQ ID NO: 1451414 - RNA, 19 nt, Artificial Sequence
  Description of Artificial Sequence: Synthetic oligonucleotide
  Sense strand starting at position 3591 of SEQ ID NO: 1243921
aaacgucaacaguauugau

SEQ ID NO: 1451415 - RNA, 19 nt, Artificial Sequence
  Description of Artificial Sequence: Synthetic oligonucleotide
  Antisense strand to SEQ ID NO: 1451414
aucaauacuguugacguuu

SEQ ID NO: 1451416 - RNA, 19 nt, Artificial Sequence
  Description of Artificial Sequence: Synthetic oligonucleotide
  Sense strand starting at position 3762 of SEQ ID NO: 1243921
cccugacuugcacaagaua

SEQ ID NO: 1451417 - RNA, 19 nt, Artificial Sequence
  Description of Artificial Sequence: Synthetic oligonucleotide
  Antisense strand to SEQ ID NO: 1451416
uaucuugugcaagucaggg

SEQ ID NO: 1451418 - RNA, 19 nt, Artificial Sequence
  Description of Artificial Sequence: Synthetic oligonucleotide
  Sense strand starting at position 3771 of SEQ ID NO: 1243921
gcacaagauaauuggguaa

SEQ ID NO: 1451419 - RNA, 19 nt, Artificial Sequence
  Description of Artificial Sequence: Synthetic oligonucleotide
  Antisense strand to SEQ ID NO: 1451418
uuacccaauuaucuugugc

SEQ ID NO: 1451420 - RNA, 19 nt, Artificial Sequence
  Description of Artificial Sequence: Synthetic oligonucleotide
  Sense strand starting at position 3844 of SEQ ID NO: 1243921
guaaccucggauuaucauu

SEQ ID NO: 1451421 - RNA, 19 nt, Artificial Sequence
  Description of Artificial Sequence: Synthetic oligonucleotide
  Antisense strand to SEQ ID NO: 1451420
aaugauaauccgagguuac

SEQ ID NO: 1451422 - RNA, 19 nt, Artificial Sequence
  Description of Artificial Sequence: Synthetic oligonucleotide
  Sense strand starting at position 3849 of SEQ ID NO: 1243921
cucggauuaucauuaaacu

SEQ ID NO: 1451423 - RNA, 19 nt, Artificial Sequence
  Description of Artificial Sequence: Synthetic oligonucleotide
  Antisense strand to SEQ ID NO: 1451422
aguuuaaugauaauccgag

SEQ ID NO: 1451424 - RNA, 19 nt, Artificial Sequence
  Description of Artificial Sequence: Synthetic oligonucleotide
  Sense strand starting at position 3924 of SEQ ID NO: 1243921
ccauguaaggcuuauauaa

SEQ ID NO: 1451425 - RNA, 19 nt, Artificial Sequence
  Description of Artificial Sequence: Synthetic oligonucleotide
  Antisense strand to SEQ ID NO: 1451424
uuauauaagccuuacaugg

SEQ ID NO: 1451426 - RNA, 19 nt, Artificial Sequence
  Description of Artificial Sequence: Synthetic oligonucleotide
  Sense strand starting at position 3931 of SEQ ID NO: 1243921
aggcuuauauaaguaacuu

SEQ ID NO: 1451427 - RNA, 19 nt, Artificial Sequence
  Description of Artificial Sequence: Synthetic oligonucleotide
  Antisense strand to SEQ ID NO: 1451426
aaguuacuuauauaagccu

SEQ ID NO: 1451428 - RNA, 19 nt, Artificial Sequence
  Description of Artificial Sequence: Synthetic oligonucleotide
  Sense strand starting at position 416 of SEQ ID NO: 1243922
ugguauucugcagaaauaa

SEQ ID NO: 1451429 - RNA, 19 nt, Artificial Sequence
  Description of Artificial Sequence: Synthetic oligonucleotide
  Antisense strand to SEQ ID NO: 1451428
uuauuucugcagaauacca

SEQ ID NO: 1451430 - RNA, 19 nt, Artificial Sequence
  Description of Artificial Sequence: Synthetic oligonucleotide
  Sense strand starting at position 533 of SEQ ID NO: 1243922
gugccaucagcugacaaau

SEQ ID NO: 1451431 - RNA, 19 nt, Artificial Sequence
  Description of Artificial Sequence: Synthetic oligonucleotide
  Antisense strand to SEQ ID NO: 1451430
auuugucagcugauggcac

SEQ ID NO: 1451432 - RNA, 19 nt, Artificial Sequence
  Description of Artificial Sequence: Synthetic oligonucleotide
  Sense strand starting at position 542 of SEQ ID NO: 1243922
gcugacaaaugaccuuauu

SEQ ID NO: 1451433 - RNA, 19 nt, Artificial Sequence
  Description of Artificial Sequence: Synthetic oligonucleotide
  Antisense strand to SEQ ID NO: 1451432
aauaaggucauuugucagc

SEQ ID NO: 1451434 - RNA, 19 nt, Artificial Sequence
  Description of Artificial Sequence: Synthetic oligonucleotide
  Sense strand starting at position 765 of SEQ ID NO: 1243922
gggacagacuucuuguuuc

SEQ ID NO: 1451435 - RNA, 19 nt, Artificial Sequence
  Description of Artificial Sequence: Synthetic oligonucleotide
  Antisense strand to SEQ ID NO: 1451434
gaaacaagaagucuguccc

SEQ ID NO: 1451436 - RNA, 19 nt, Artificial Sequence
  Description of Artificial Sequence: Synthetic oligonucleotide
  Sense strand starting at position 961 of SEQ ID NO: 1243922
cuaacaggugucuggacaa

SEQ ID NO: 1451437 - RNA, 19 nt, Artificial Sequence
  Description of Artificial Sequence: Synthetic oligonucleotide
  Antisense strand to SEQ ID NO: 1451436
uuguccagacaccuguuag

SEQ ID NO: 1451438 - RNA, 19 nt, Artificial Sequence
  Description of Artificial Sequence: Synthetic oligonucleotide
  Sense strand starting at position 1066 of SEQ ID NO: 1243922
gcagauuucuaagcauguu

SEQ ID NO: 1451439 - RNA, 19 nt, Artificial Sequence
  Description of Artificial Sequence: Synthetic oligonucleotide
  Antisense strand to SEQ ID NO: 1451438
aacaugcuuagaaaucugc

SEQ ID NO: 1451440 - RNA, 19 nt, Artificial Sequence
  Description of Artificial Sequence: Synthetic oligonucleotide
  Sense strand starting at position 1132 of SEQ ID NO: 1243922
caguauuacgaaugagaaa

SEQ ID NO: 1451441 - RNA, 19 nt, Artificial Sequence
  Description of Artificial Sequence: Synthetic oligonucleotide
  Antisense strand to SEQ ID NO: 1451440
uuucucauucguaauacug

SEQ ID NO: 1451442 - RNA, 19 nt, Artificial Sequence
  Description of Artificial Sequence: Synthetic oligonucleotide
  Sense strand starting at position 1157 of SEQ ID NO: 1243922
gcauucggaaauuaaguaa

SEQ ID NO: 1451443 - RNA, 19 nt, Artificial Sequence
  Description of Artificial Sequence: Synthetic oligonucleotide
  Antisense strand to SEQ ID NO: 1451442
uuacuuaauuuccgaaugc

SEQ ID NO: 1451444 - RNA, 19 nt, Artificial Sequence
  Description of Artificial Sequence: Synthetic oligonucleotide
  Sense strand starting at position 1173 of SEQ ID NO: 1243922
uaacuugagguaggucuaa

SEQ ID NO: 1451445 - RNA, 19 nt, Artificial Sequence
  Description of Artificial Sequence: Synthetic oligonucleotide
  Antisense strand to SEQ ID NO: 1451444
uuagaccuaccucaaguua

SEQ ID NO: 1451446 - RNA, 19 nt, Artificial Sequence
  Description of Artificial Sequence: Synthetic oligonucleotide
  Sense strand starting at position 1228 of SEQ ID NO: 1243922
auaaucuggcuccagaguu

SEQ ID NO: 1451447 - RNA, 19 nt, Artificial Sequence
  Description of Artificial Sequence: Synthetic oligonucleotide
  Antisense strand to SEQ ID NO: 1451446
aacucuggagccagauuau

SEQ ID NO: 1451448 - RNA, 19 nt, Artificial Sequence
  Description of Artificial Sequence: Synthetic oligonucleotide
  Sense strand starting at position 1370 of SEQ ID NO: 1243922
acuacuucucuagguaaga

SEQ ID NO: 1451449 - RNA, 19 nt, Artificial Sequence
  Description of Artificial Sequence: Synthetic oligonucleotide
  Antisense strand to SEQ ID NO: 1451448
ucuuaccuagagaaguagu

SEQ ID NO: 1451450 - RNA, 19 nt, Artificial Sequence
  Description of Artificial Sequence: Synthetic oligonucleotide
  Sense strand starting at position 1371 of SEQ ID NO: 1243922
cuacuucucuagguaagag

SEQ ID NO: 1451451 - RNA, 19 nt, Artificial Sequence
  Description of Artificial Sequence: Synthetic oligonucleotide
  Antisense strand to SEQ ID NO: 1451450
cucuuaccuagagaaguag

SEQ ID NO: 1451452 - RNA, 19 nt, Artificial Sequence
  Description of Artificial Sequence: Synthetic oligonucleotide
  Sense strand starting at position 1895 of SEQ ID NO: 1243922
aagcgucucgugucgaauu

SEQ ID NO: 1451453 - RNA, 19 nt, Artificial Sequence
  Description of Artificial Sequence: Synthetic oligonucleotide
  Antisense strand to SEQ ID NO: 1451452
aauucgacacgagacgcuu

SEQ ID NO: 1451454 - RNA, 19 nt, Artificial Sequence
  Description of Artificial Sequence: Synthetic oligonucleotide
  Sense strand starting at position 2097 of SEQ ID NO: 1243922
ucguguacuccgucauuau

SEQ ID NO: 1451455 - RNA, 19 nt, Artificial Sequence
  Description of Artificial Sequence: Synthetic oligonucleotide
  Antisense strand to SEQ ID NO: 1451454
auaaugacggaguacacga

SEQ ID NO: 1451456 - RNA, 19 nt, Artificial Sequence
  Description of Artificial Sequence: Synthetic oligonucleotide
  Sense strand starting at position 2100 of SEQ ID NO: 1243922
uguacuccgucauuauuua

SEQ ID NO: 1451457 - RNA, 19 nt, Artificial Sequence
  Description of Artificial Sequence: Synthetic oligonucleotide
  Antisense strand to SEQ ID NO: 1451456
uaaauaaugacggaguaca

SEQ ID NO: 1451458 - RNA, 19 nt, Artificial Sequence
  Description of Artificial Sequence: Synthetic oligonucleotide
  Sense strand starting at position 2306 of SEQ ID NO: 1243922
uguucuagacuuugaggga

SEQ ID NO: 1451459 - RNA, 19 nt, Artificial Sequence
  Description of Artificial Sequence: Synthetic oligonucleotide
  Antisense strand to SEQ ID NO: 1451458
ucccucaaagucuagaaca

SEQ ID NO: 1451460 - RNA, 19 nt, Artificial Sequence
  Description of Artificial Sequence: Synthetic oligonucleotide
  Sense strand starting at position 2347 of SEQ ID NO: 1243922
agauuccucuucuuacgaa

SEQ ID NO: 1451461 - RNA, 19 nt, Artificial Sequence
  Description of Artificial Sequence: Synthetic oligonucleotide
  Antisense strand to SEQ ID NO: 1451460
uucguaagaagaggaaucu

SEQ ID NO: 1451462 - RNA, 19 nt, Artificial Sequence
  Description of Artificial Sequence: Synthetic oligonucleotide
  Sense strand starting at position 2472 of SEQ ID NO: 1243922
ugaugagggagcugacuua

SEQ ID NO: 1451463 - RNA, 19 nt, Artificial Sequence
  Description of Artificial Sequence: Synthetic oligonucleotide
  Antisense strand to SEQ ID NO: 1451462
uaagucagcucccucauca

SEQ ID NO: 1451464 - RNA, 19 nt, Artificial Sequence
  Description of Artificial Sequence: Synthetic oligonucleotide
  Sense strand starting at position 2479 of SEQ ID NO: 1243922
ggagcugacuuagugaaau

SEQ ID NO: 1451465 - RNA, 19 nt, Artificial Sequence
  Description of Artificial Sequence: Synthetic oligonucleotide
  Antisense strand to SEQ ID NO: 1451464
auuucacuaagucagcucc

SEQ ID NO: 1451466 - RNA, 19 nt, Artificial Sequence
  Description of Artificial Sequence: Synthetic oligonucleotide
  Sense strand starting at position 2714 of SEQ ID NO: 1243922
uuguaacaaggucauagua

SEQ ID NO: 1451467 - RNA, 19 nt, Artificial Sequence
  Description of Artificial Sequence: Synthetic oligonucleotide
  Antisense strand to SEQ ID NO: 1451466
uacuaugaccuuguuacaa

SEQ ID NO: 1451468 - RNA, 19 nt, Artificial Sequence
  Description of Artificial Sequence: Synthetic oligonucleotide
  Sense strand starting at position 2823 of SEQ ID NO: 1243922
uuauuacaucuguacgaaa

SEQ ID NO: 1451469 - RNA, 19 nt, Artificial Sequence
  Description of Artificial Sequence: Synthetic oligonucleotide
  Antisense strand to SEQ ID NO: 1451468
uuucguacagauguaauaa

SEQ ID NO: 1451470 - RNA, 19 nt, Artificial Sequence
  Description of Artificial Sequence: Synthetic oligonucleotide
  Sense strand starting at position 2825 of SEQ ID NO: 1243922
auuacaucuguacgaaauu

SEQ ID NO: 1451471 - RNA, 19 nt, Artificial Sequence
  Description of Artificial Sequence: Synthetic oligonucleotide
  Antisense strand to SEQ ID NO: 1451470
aauuucguacagauguaau

SEQ ID NO: 1451472 - RNA, 19 nt, Artificial Sequence
  Description of Artificial Sequence: Synthetic oligonucleotide
  Sense strand starting at position 2862 of SEQ ID NO: 1243922
cucccucuucuggaaugua

SEQ ID NO: 1451473 - RNA, 19 nt, Artificial Sequence
  Description of Artificial Sequence: Synthetic oligonucleotide
  Antisense strand to SEQ ID NO: 1451472
uacauuccagaagagggag

SEQ ID NO: 1451474 - RNA, 19 nt, Artificial Sequence
  Description of Artificial Sequence: Synthetic oligonucleotide
  Sense strand starting at position 2876 of SEQ ID NO: 1243922
auguaagucccugagcaca

SEQ ID NO: 1451475 - RNA, 19 nt, Artificial Sequence
  Description of Artificial Sequence: Synthetic oligonucleotide
  Antisense strand to SEQ ID NO: 1451474
ugugcucagggacuuacau

SEQ ID NO: 1451476 - RNA, 19 nt, Artificial Sequence
  Description of Artificial Sequence: Synthetic oligonucleotide
  Sense strand starting at position 2884 of SEQ ID NO: 1243922
cccugagcacagggauaua

SEQ ID NO: 1451477 - RNA, 19 nt, Artificial Sequence
  Description of Artificial Sequence: Synthetic oligonucleotide
  Antisense strand to SEQ ID NO: 1451476
uauaucccugugcucaggg

SEQ ID NO: 1451478 - RNA, 19 nt, Artificial Sequence
  Description of Artificial Sequence: Synthetic oligonucleotide
  Sense strand starting at position 2932 of SEQ ID NO: 1243922
gugcacuuuggugaaugaa

SEQ ID NO: 1451479 - RNA, 19 nt, Artificial Sequence
  Description of Artificial Sequence: Synthetic oligonucleotide
  Antisense strand to SEQ ID NO: 1451478
uucauucaccaaagugcac

SEQ ID NO: 1451480 - RNA, 19 nt, Artificial Sequence
  Description of Artificial Sequence: Synthetic oligonucleotide
  Sense strand starting at position 3015 of SEQ ID NO: 1243922
guggaaacagguuagucaa

SEQ ID NO: 1451481 - RNA, 19 nt, Artificial Sequence
  Description of Artificial Sequence: Synthetic oligonucleotide
  Antisense strand to SEQ ID NO: 1451480
uugacuaaccuguuuccac

SEQ ID NO: 1451482 - RNA, 19 nt, Artificial Sequence
  Description of Artificial Sequence: Synthetic oligonucleotide
  Sense strand starting at position 3018 of SEQ ID NO: 1243922
gaaacagguuagucaaagu

SEQ ID NO: 1451483 - RNA, 19 nt, Artificial Sequence
  Description of Artificial Sequence: Synthetic oligonucleotide
  Antisense strand to SEQ ID NO: 1451482
acuuugacuaaccuguuuc

SEQ ID NO: 1451484 - RNA, 19 nt, Artificial Sequence
  Description of Artificial Sequence: Synthetic oligonucleotide
  Sense strand starting at position 3029 of SEQ ID NO: 1243922
gucaaaguagaaugaugau

SEQ ID NO: 1451485 - RNA, 19 nt, Artificial Sequence
  Description of Artificial Sequence: Synthetic oligonucleotide
  Antisense strand to SEQ ID NO: 1451484
aucaucauucuacuuugac

SEQ ID NO: 1451486 - RNA, 19 nt, Artificial Sequence
  Description of Artificial Sequence: Synthetic oligonucleotide
  Sense strand starting at position 3065 of SEQ ID NO: 1243922
gguaucugugcugagagag

SEQ ID NO: 1451487 - RNA, 19 nt, Artificial Sequence
  Description of Artificial Sequence: Synthetic oligonucleotide
  Antisense strand to SEQ ID NO: 1451486
cucucucagcacagauacc

SEQ ID NO: 1451488 - RNA, 19 nt, Artificial Sequence
  Description of Artificial Sequence: Synthetic oligonucleotide
  Sense strand starting at position 3088 of SEQ ID NO: 1243922
auggauuagaucuggcaug

SEQ ID NO: 1451489 - RNA, 19 nt, Artificial Sequence
  Description of Artificial Sequence: Synthetic oligonucleotide
  Antisense strand to SEQ ID NO: 1451488
caugccagaucuaauccau

SEQ ID NO: 1451490 - RNA, 19 nt, Artificial Sequence
  Description of Artificial Sequence: Synthetic oligonucleotide
  Sense strand starting at position 3247 of SEQ ID NO: 1243922
ggcuuucugguacaaguga

SEQ ID NO: 1451491 - RNA, 19 nt, Artificial Sequence
  Description of Artificial Sequence: Synthetic oligonucleotide
  Antisense strand to SEQ ID NO: 1451490
ucacuuguaccagaaagcc

SEQ ID NO: 1451492 - RNA, 19 nt, Artificial Sequence
  Description of Artificial Sequence: Synthetic oligonucleotide
  Sense strand starting at position 3277 of SEQ ID NO: 1243922
uggaaucaauuguuauguu

SEQ ID NO: 1451493 - RNA, 19 nt, Artificial Sequence
  Description of Artificial Sequence: Synthetic oligonucleotide
  Antisense strand to SEQ ID NO: 1451492
aacauaacaauugauucca

SEQ ID NO: 1451494 - RNA, 19 nt, Artificial Sequence
  Description of Artificial Sequence: Synthetic oligonucleotide
  Sense strand starting at position 3320 of SEQ ID NO: 1243922
aguugacuuuaaguggaga

SEQ ID NO: 1451495 - RNA, 19 nt, Artificial Sequence
  Description of Artificial Sequence: Synthetic oligonucleotide
  Antisense strand to SEQ ID NO: 1451494
ucuccacuuaaagucaacu

SEQ ID NO: 1451496 - RNA, 19 nt, Artificial Sequence
  Description of Artificial Sequence: Synthetic oligonucleotide
  Sense strand starting at position 3322 of SEQ ID NO: 1243922
uugacuuuaaguggagaca

SEQ ID NO: 1451497 - RNA, 19 nt, Artificial Sequence
  Description of Artificial Sequence: Synthetic oligonucleotide
  Antisense strand to SEQ ID NO: 1451496
ugucuccacuuaaagucaa

SEQ ID NO: 1451498 - RNA, 19 nt, Artificial Sequence
  Description of Artificial Sequence: Synthetic oligonucleotide
  Sense strand starting at position 3437 of SEQ ID NO: 1243922
ggaguuguaccauauaagc

SEQ ID NO: 1451499 - RNA, 19 nt, Artificial Sequence
  Description of Artificial Sequence: Synthetic oligonucleotide
  Antisense strand to SEQ ID NO: 1451498
gcuuauaugguacaacucc

SEQ ID NO: 1451500 - RNA, 19 nt, Artificial Sequence
  Description of Artificial Sequence: Synthetic oligonucleotide
  Sense strand starting at position 3510 of SEQ ID NO: 1243922
cuugaaauuguauggguga

SEQ ID NO: 1451501 - RNA, 19 nt, Artificial Sequence
  Description of Artificial Sequence: Synthetic oligonucleotide
  Antisense strand to SEQ ID NO: 1451500
ucacccauacaauuucaag

SEQ ID NO: 1451502 - RNA, 19 nt, Artificial Sequence
  Description of Artificial Sequence: Synthetic oligonucleotide
  Sense strand starting at position 3512 of SEQ ID NO: 1243922
ugaaauuguaugggugagu

SEQ ID NO: 1451503 - RNA, 19 nt, Artificial Sequence
  Description of Artificial Sequence: Synthetic oligonucleotide
  Antisense strand to SEQ ID NO: 1451502
acucacccauacaauuuca

SEQ ID NO: 1451504 - RNA, 19 nt, Artificial Sequence
  Description of Artificial Sequence: Synthetic oligonucleotide
  Sense strand starting at position 3521 of SEQ ID NO: 1243922
augggugaguccuuuacaa

SEQ ID NO: 1451505 - RNA, 19 nt, Artificial Sequence
  Description of Artificial Sequence: Synthetic oligonucleotide
  Antisense strand to SEQ ID NO: 1451504
uuguaaaggacucacccau

SEQ ID NO: 1451506 - RNA, 19 nt, Artificial Sequence
  Description of Artificial Sequence: Synthetic oligonucleotide
  Sense strand starting at position 3523 of SEQ ID NO: 1243922
gggugaguccuuuacaauc

SEQ ID NO: 1451507 - RNA, 19 nt, Artificial Sequence
  Description of Artificial Sequence: Synthetic oligonucleotide
  Antisense strand to SEQ ID NO: 1451506
gauuguaaaggacucaccc

SEQ ID NO: 1451508 - RNA, 19 nt, Artificial Sequence
  Description of Artificial Sequence: Synthetic oligonucleotide
  Sense strand starting at position 430 of SEQ ID NO: 1243923
accauauagcuuuagaugu

SEQ ID NO: 1451509 - RNA, 19 nt, Artificial Sequence
  Description of Artificial Sequence: Synthetic oligonucleotide
  Antisense strand to SEQ ID NO: 1451508
acaucuaaagcuauauggu

SEQ ID NO: 1451510 - RNA, 19 nt, Artificial Sequence
  Description of Artificial Sequence: Synthetic oligonucleotide
  Sense strand starting at position 437 of SEQ ID NO: 1243923
agcuuuagauguuuggaau

SEQ ID NO: 1451511 - RNA, 19 nt, Artificial Sequence
  Description of Artificial Sequence: Synthetic oligonucleotide
  Antisense strand to SEQ ID NO: 1451510
auuccaaacaucuaaagcu

SEQ ID NO: 1451512 - RNA, 19 nt, Artificial Sequence
  Description of Artificial Sequence: Synthetic oligonucleotide
  Sense strand starting at position 438 of SEQ ID NO: 1243923
gcuuuagauguuuggaauu

SEQ ID NO: 1451513 - RNA, 19 nt, Artificial Sequence
  Description of Artificial Sequence: Synthetic oligonucleotide
  Antisense strand to SEQ ID NO: 1451512
aauuccaaacaucuaaagc

SEQ ID NO: 1451514 - RNA, 19 nt, Artificial Sequence
  Description of Artificial Sequence: Synthetic oligonucleotide
  Sense strand starting at position 452 of SEQ ID NO: 1243923
gaauuugguuaguaugauc

SEQ ID NO: 1451515 - RNA, 19 nt, Artificial Sequence
  Description of Artificial Sequence: Synthetic oligonucleotide
  Antisense strand to SEQ ID NO: 1451514
gaucauacuaaccaaauuc

SEQ ID NO: 1451516 - RNA, 19 nt, Artificial Sequence
  Description of Artificial Sequence: Synthetic oligonucleotide
  Sense strand starting at position 457 of SEQ ID NO: 1243923
ugguuaguaugaucugauc

SEQ ID NO: 1451517 - RNA, 19 nt, Artificial Sequence
  Description of Artificial Sequence: Synthetic oligonucleotide
  Antisense strand to SEQ ID NO: 1451516
gaucagaucauacuaacca

SEQ ID NO: 1451518 - RNA, 19 nt, Artificial Sequence
  Description of Artificial Sequence: Synthetic oligonucleotide
  Sense strand starting at position 580 of SEQ ID NO: 1243923
uaaggccaucccugugaga

SEQ ID NO: 1451519 - RNA, 19 nt, Artificial Sequence
  Description of Artificial Sequence: Synthetic oligonucleotide
  Antisense strand to SEQ ID NO: 1451518
ucucacagggauggccuua

SEQ ID NO: 1451520 - RNA, 19 nt, Artificial Sequence
  Description of Artificial Sequence: Synthetic oligonucleotide
  Sense strand starting at position 582 of SEQ ID NO: 1243923
aggccaucccugugagaca

SEQ ID NO: 1451521 - RNA, 19 nt, Artificial Sequence
  Description of Artificial Sequence: Synthetic oligonucleotide
  Antisense strand to SEQ ID NO: 1451520
ugucucacagggauggccu

SEQ ID NO: 1451522 - RNA, 19 nt, Artificial Sequence
  Description of Artificial Sequence: Synthetic oligonucleotide
  Sense strand starting at position 637 of SEQ ID NO: 1243923
ggacaacguuaagucuaaa

SEQ ID NO: 1451523 - RNA, 19 nt, Artificial Sequence
  Description of Artificial Sequence: Synthetic oligonucleotide
  Antisense strand to SEQ ID NO: 1451522
uuuagacuuaacguugucc

SEQ ID NO: 1451524 - RNA, 19 nt, Artificial Sequence
  Description of Artificial Sequence: Synthetic oligonucleotide
  Sense strand starting at position 763 of SEQ ID NO: 1243923
uguugaggagcuugagaau

SEQ ID NO: 1451525 - RNA, 19 nt, Artificial Sequence
  Description of Artificial Sequence: Synthetic oligonucleotide
  Antisense strand to SEQ ID NO: 1451524
auucucaagcuccucaaca

SEQ ID NO: 1451526 - RNA, 19 nt, Artificial Sequence
  Description of Artificial Sequence: Synthetic oligonucleotide
  Sense strand starting at position 835 of SEQ ID NO: 1243923
gcuuuauauccugacaagg

SEQ ID NO: 1451527 - RNA, 19 nt, Artificial Sequence
  Description of Artificial Sequence: Synthetic oligonucleotide
  Antisense strand to SEQ ID NO: 1451526
ccuugucaggauauaaagc

SEQ ID NO: 1451528 - RNA, 19 nt, Artificial Sequence
  Description of Artificial Sequence: Synthetic oligonucleotide
  Sense strand starting at position 906 of SEQ ID NO: 1243923
aggauuugcuacuaaacag

SEQ ID NO: 1451529 - RNA, 19 nt, Artificial Sequence
  Description of Artificial Sequence: Synthetic oligonucleotide
  Antisense strand to SEQ ID NO: 1451528
cuguuuaguagcaaauccu

SEQ ID NO: 1451530 - RNA, 19 nt, Artificial Sequence
  Description of Artificial Sequence: Synthetic oligonucleotide
  Sense strand starting at position 975 of SEQ ID NO: 1243923
acuugaaaguguuuaaaga

SEQ ID NO: 1451531 - RNA, 19 nt, Artificial Sequence
  Description of Artificial Sequence: Synthetic oligonucleotide
  Antisense strand to SEQ ID NO: 1451530
ucuuuaaacacuuucaagu

SEQ ID NO: 1451532 - RNA, 19 nt, Artificial Sequence
  Description of Artificial Sequence: Synthetic oligonucleotide
  Sense strand starting at position 1138 of SEQ ID NO: 1243923
gucacuuagacgugauuuc

SEQ ID NO: 1451533 - RNA, 19 nt, Artificial Sequence
  Description of Artificial Sequence: Synthetic oligonucleotide
  Antisense strand to SEQ ID NO: 1451532
gaaaucacgucuaagugac

SEQ ID NO: 1451534 - RNA, 19 nt, Artificial Sequence
  Description of Artificial Sequence: Synthetic oligonucleotide
  Sense strand starting at position 1148 of SEQ ID NO: 1243923
cgugauuuccuuuaagccu

SEQ ID NO: 1451535 - RNA, 19 nt, Artificial Sequence
  Description of Artificial Sequence: Synthetic oligonucleotide
  Antisense strand to SEQ ID NO: 1451534
aggcuuaaaggaaaucacg

SEQ ID NO: 1451536 - RNA, 19 nt, Artificial Sequence
  Description of Artificial Sequence: Synthetic oligonucleotide
  Sense strand starting at position 1201 of SEQ ID NO: 1243923
auucucuaggauugguaga

SEQ ID NO: 1451537 - RNA, 19 nt, Artificial Sequence
  Description of Artificial Sequence: Synthetic oligonucleotide
  Antisense strand to SEQ ID NO: 1451536
ucuaccaauccuagagaau

SEQ ID NO: 1451538 - RNA, 19 nt, Artificial Sequence
  Description of Artificial Sequence: Synthetic oligonucleotide
  Sense strand starting at position 1202 of SEQ ID NO: 1243923
uucucuaggauugguagaa

SEQ ID NO: 1451539 - RNA, 19 nt, Artificial Sequence
  Description of Artificial Sequence: Synthetic oligonucleotide
  Antisense strand to SEQ ID NO: 1451538
uucuaccaauccuagagaa

SEQ ID NO: 1451540 - RNA, 19 nt, Artificial Sequence
  Description of Artificial Sequence: Synthetic oligonucleotide
  Sense strand starting at position 1203 of SEQ ID NO: 1243923
ucucuaggauugguagaau

SEQ ID NO: 1451541 - RNA, 19 nt, Artificial Sequence
  Description of Artificial Sequence: Synthetic oligonucleotide
  Antisense strand to SEQ ID NO: 1451540
auucuaccaauccuagaga

SEQ ID NO: 1451542 - RNA, 19 nt, Artificial Sequence
  Description of Artificial Sequence: Synthetic oligonucleotide
  Sense strand starting at position 1212 of SEQ ID NO: 1243923
uugguagaauucuuuguau

SEQ ID NO: 1451543 - RNA, 19 nt, Artificial Sequence
  Description of Artificial Sequence: Synthetic oligonucleotide
  Antisense strand to SEQ ID NO: 1451542
auacaaagaauucuaccaa

SEQ ID NO: 1451544 - RNA, 19 nt, Artificial Sequence
  Description of Artificial Sequence: Synthetic oligonucleotide
  Sense strand starting at position 1214 of SEQ ID NO: 1243923
gguagaauucuuuguaucc

SEQ ID NO: 1451545 - RNA, 19 nt, Artificial Sequence
  Description of Artificial Sequence: Synthetic oligonucleotide
  Antisense strand to SEQ ID NO: 1451544
ggauacaaagaauucuacc

SEQ ID NO: 1451546 - RNA, 19 nt, Artificial Sequence
  Description of Artificial Sequence: Synthetic oligonucleotide
  Sense strand starting at position 1215 of SEQ ID NO: 1243923
guagaauucuuuguauccu

SEQ ID NO: 1451547 - RNA, 19 nt, Artificial Sequence
  Description of Artificial Sequence: Synthetic oligonucleotide
  Antisense strand to SEQ ID NO: 1451546
aggauacaaagaauucuac

SEQ ID NO: 1451548 - RNA, 19 nt, Artificial Sequence
  Description of Artificial Sequence: Synthetic oligonucleotide
  Sense strand starting at position 1377 of SEQ ID NO: 1243923
gaaacagcuguaugaaaca

SEQ ID NO: 1451549 - RNA, 19 nt, Artificial Sequence
  Description of Artificial Sequence: Synthetic oligonucleotide
  Antisense strand to SEQ ID NO: 1451548
uguuucauacagcuguuuc

SEQ ID NO: 1451550 - RNA, 19 nt, Artificial Sequence
  Description of Artificial Sequence: Synthetic oligonucleotide
  Sense strand starting at position 1569 of SEQ ID NO: 1243923
cucacuagucaccauggua

SEQ ID NO: 1451551 - RNA, 19 nt, Artificial Sequence
  Description of Artificial Sequence: Synthetic oligonucleotide
  Antisense strand to SEQ ID NO: 1451550
uaccauggugacuagugag

SEQ ID NO: 1451552 - RNA, 19 nt, Artificial Sequence
  Description of Artificial Sequence: Synthetic oligonucleotide
  Sense strand starting at position 1615 of SEQ ID NO: 1243923
acacauuucuuggguggga

SEQ ID NO: 1451553 - RNA, 19 nt, Artificial Sequence
  Description of Artificial Sequence: Synthetic oligonucleotide
  Antisense strand to SEQ ID NO: 1451552
ucccacccaagaaaugugu

SEQ ID NO: 1451554 - RNA, 19 nt, Artificial Sequence
  Description of Artificial Sequence: Synthetic oligonucleotide
  Sense strand starting at position 2565 of SEQ ID NO: 1243923
ggcauaagcgucuucgcga

SEQ ID NO: 1451555 - RNA, 19 nt, Artificial Sequence
  Description of Artificial Sequence: Synthetic oligonucleotide
  Antisense strand to SEQ ID NO: 1451554
ucgcgaagacgcuuaugcc

SEQ ID NO: 1451556 - RNA, 19 nt, Artificial Sequence
  Description of Artificial Sequence: Synthetic oligonucleotide
  Sense strand starting at position 2870 of SEQ ID NO: 1243923
cagucagugcccgaagaga

SEQ ID NO: 1451557 - RNA, 19 nt, Artificial Sequence
  Description of Artificial Sequence: Synthetic oligonucleotide
  Antisense strand to SEQ ID NO: 1451556
ucucuucgggcacugacug

SEQ ID NO: 1451558 - RNA, 19 nt, Artificial Sequence
  Description of Artificial Sequence: Synthetic oligonucleotide
  Sense strand starting at position 2913 of SEQ ID NO: 1243923
ggaguuaaucaaggaagug

SEQ ID NO: 1451559 - RNA, 19 nt, Artificial Sequence
  Description of Artificial Sequence: Synthetic oligonucleotide
  Antisense strand to SEQ ID NO: 1451558
cacuuccuugauuaacucc

SEQ ID NO: 1451560 - RNA, 19 nt, Artificial Sequence
  Description of Artificial Sequence: Synthetic oligonucleotide
  Sense strand starting at position 2914 of SEQ ID NO: 1243923
gaguuaaucaaggaagugu

SEQ ID NO: 1451561 - RNA, 19 nt, Artificial Sequence
  Description of Artificial Sequence: Synthetic oligonucleotide
  Antisense strand to SEQ ID NO: 1451560
acacuuccuugauuaacuc

SEQ ID NO: 1451562 - RNA, 19 nt, Artificial Sequence
  Description of Artificial Sequence: Synthetic oligonucleotide
  Sense strand starting at position 3635 of SEQ ID NO: 1243923
gcaugagcuaucgugcuca

SEQ ID NO: 1451563 - RNA, 19 nt, Artificial Sequence
  Description of Artificial Sequence: Synthetic oligonucleotide
  Antisense strand to SEQ ID NO: 1451562
ugagcacgauagcucaugc

SEQ ID NO: 1451564 - RNA, 19 nt, Artificial Sequence
  Description of Artificial Sequence: Synthetic oligonucleotide
  Sense strand starting at position 3647 of SEQ ID NO: 1243923
gugcucagccuacaaacau

SEQ ID NO: 1451565 - RNA, 19 nt, Artificial Sequence
  Description of Artificial Sequence: Synthetic oligonucleotide
  Antisense strand to SEQ ID NO: 1451564
auguuuguaggcugagcac

SEQ ID NO: 1451566 - RNA, 19 nt, Artificial Sequence
  Description of Artificial Sequence: Synthetic oligonucleotide
  Sense strand starting at position 3669 of SEQ ID NO: 1243923
uucuuaagauuggcugcau

SEQ ID NO: 1451567 - RNA, 19 nt, Artificial Sequence
  Description of Artificial Sequence: Synthetic oligonucleotide
  Antisense strand to SEQ ID NO: 1451566
augcagccaaucuuaagaa

SEQ ID NO: 1451568 - RNA, 19 nt, Artificial Sequence
  Description of Artificial Sequence: Synthetic oligonucleotide
  Sense strand starting at position 3696 of SEQ ID NO: 1243923
cccauaagauuugacugua

SEQ ID NO: 1451569 - RNA, 19 nt, Artificial Sequence
  Description of Artificial Sequence: Synthetic oligonucleotide
  Antisense strand to SEQ ID NO: 1451568
uacagucaaaucuuauggg

SEQ ID NO: 1451570 - RNA, 19 nt, Artificial Sequence
  Description of Artificial Sequence: Synthetic oligonucleotide
  Sense strand starting at position 3708 of SEQ ID NO: 1243923
gacuguacugcuuauugca

SEQ ID NO: 1451571 - RNA, 19 nt, Artificial Sequence
  Description of Artificial Sequence: Synthetic oligonucleotide
  Antisense strand to SEQ ID NO: 1451570
ugcaauaagcaguacaguc

SEQ ID NO: 1451572 - RNA, 19 nt, Artificial Sequence
  Description of Artificial Sequence: Synthetic oligonucleotide
  Sense strand starting at position 3759 of SEQ ID NO: 1243923
ugauaauugaaguagcagu

SEQ ID NO: 1451573 - RNA, 19 nt, Artificial Sequence
  Description of Artificial Sequence: Synthetic oligonucleotide
  Antisense strand to SEQ ID NO: 1451572
acugcuacuucaauuauca

SEQ ID NO: 1451574 - RNA, 19 nt, Artificial Sequence
  Description of Artificial Sequence: Synthetic oligonucleotide
  Sense strand starting at position 3786 of SEQ ID NO: 1243923
gcuaauugccuuuaucuga

SEQ ID NO: 1451575 - RNA, 19 nt, Artificial Sequence
  Description of Artificial Sequence: Synthetic oligonucleotide
  Antisense strand to SEQ ID NO: 1451574
ucagauaaaggcaauuagc

SEQ ID NO: 1451576 - RNA, 19 nt, Artificial Sequence
  Description of Artificial Sequence: Synthetic oligonucleotide
  Sense strand starting at position 3861 of SEQ ID NO: 1243923
aaagaugccuagguugaau

SEQ ID NO: 1451577 - RNA, 19 nt, Artificial Sequence
  Description of Artificial Sequence: Synthetic oligonucleotide
  Antisense strand to SEQ ID NO: 1451576
auucaaccuaggcaucuuu

SEQ ID NO: 1451578 - RNA, 19 nt, Artificial Sequence
  Description of Artificial Sequence: Synthetic oligonucleotide
  Sense strand starting at position 3914 of SEQ ID NO: 1243923
ccuagauguuuauauuuga

SEQ ID NO: 1451579 - RNA, 19 nt, Artificial Sequence
  Description of Artificial Sequence: Synthetic oligonucleotide
  Antisense strand to SEQ ID NO: 1451578
ucaaauauaaacaucuagg

SEQ ID NO: 1451580 - RNA, 19 nt, Artificial Sequence
  Description of Artificial Sequence: Synthetic oligonucleotide
  Sense strand starting at position 3919 of SEQ ID NO: 1243923
auguuuauauuugagagga

SEQ ID NO: 1451581 - RNA, 19 nt, Artificial Sequence
  Description of Artificial Sequence: Synthetic oligonucleotide
  Antisense strand to SEQ ID NO: 1451580
uccucucaaauauaaacau

SEQ ID NO: 1451582 - RNA, 19 nt, Artificial Sequence
  Description of Artificial Sequence: Synthetic oligonucleotide
  Sense strand starting at position 3921 of SEQ ID NO: 1243923
guuuauauuugagaggaau

SEQ ID NO: 1451583 - RNA, 19 nt, Artificial Sequence
  Description of Artificial Sequence: Synthetic oligonucleotide
  Antisense strand to SEQ ID NO: 1451582
auuccucucaaauauaaac

SEQ ID NO: 1451584 - RNA, 19 nt, Artificial Sequence
  Description of Artificial Sequence: Synthetic oligonucleotide
  Sense strand starting at position 3932 of SEQ ID NO: 1243923
agaggaauuacucgcagac

SEQ ID NO: 1451585 - RNA, 19 nt, Artificial Sequence
  Description of Artificial Sequence: Synthetic oligonucleotide
  Antisense strand to SEQ ID NO: 1451584
gucugcgaguaauuccucu

SEQ ID NO: 1451586 - RNA, 19 nt, Artificial Sequence
  Description of Artificial Sequence: Synthetic oligonucleotide
  Sense strand starting at position 3969 of SEQ ID NO: 1243923
ggguuauaaagcugacaag

SEQ ID NO: 1451587 - RNA, 19 nt, Artificial Sequence
  Description of Artificial Sequence: Synthetic oligonucleotide
  Antisense strand to SEQ ID NO: 1451586
cuugucagcuuuauaaccc

SEQ ID NO: 1451588 - RNA, 19 nt, Artificial Sequence
  Description of Artificial Sequence: Synthetic oligonucleotide
  Sense strand starting at position 15 of SEQ ID NO: 1243924
ggcuaaguguuaguccaga

SEQ ID NO: 1451589 - RNA, 19 nt, Artificial Sequence
  Description of Artificial Sequence: Synthetic oligonucleotide
  Antisense strand to SEQ ID NO: 1451588
ucuggacuaacacuuagcc

SEQ ID NO: 1451590 - RNA, 19 nt, Artificial Sequence
  Description of Artificial Sequence: Synthetic oligonucleotide
  Sense strand starting at position 24 of SEQ ID NO: 1243924
uuaguccagagcuggaaau

SEQ ID NO: 1451591 - RNA, 19 nt, Artificial Sequence
  Description of Artificial Sequence: Synthetic oligonucleotide
  Antisense strand to SEQ ID NO: 1451590
auuuccagcucuggacuaa

SEQ ID NO: 1451592 - RNA, 19 nt, Artificial Sequence
  Description of Artificial Sequence: Synthetic oligonucleotide
  Sense strand starting at position 102 of SEQ ID NO: 1243924
ugaacugaguuagaauaga

SEQ ID NO: 1451593 - RNA, 19 nt, Artificial Sequence
  Description of Artificial Sequence: Synthetic oligonucleotide
  Antisense strand to SEQ ID NO: 1451592
ucuauucuaacucaguuca

SEQ ID NO: 1451594 - RNA, 19 nt, Artificial Sequence
  Description of Artificial Sequence: Synthetic oligonucleotide
  Sense strand starting at position 116 of SEQ ID NO: 1243924
auagaucauuugcaaagca

SEQ ID NO: 1451595 - RNA, 19 nt, Artificial Sequence
  Description of Artificial Sequence: Synthetic oligonucleotide
  Antisense strand to SEQ ID NO: 1451594
ugcuuugcaaaugaucuau

SEQ ID NO: 1451596 - RNA, 19 nt, Artificial Sequence
  Description of Artificial Sequence: Synthetic oligonucleotide
  Sense strand starting at position 210 of SEQ ID NO: 1243924
auguguuguccagugugua

SEQ ID NO: 1451597 - RNA, 19 nt, Artificial Sequence
  Description of Artificial Sequence: Synthetic oligonucleotide
  Antisense strand to SEQ ID NO: 1451596
uacacacuggacaacacau

SEQ ID NO: 1451598 - RNA, 19 nt, Artificial Sequence
  Description of Artificial Sequence: Synthetic oligonucleotide
  Sense strand starting at position 215 of SEQ ID NO: 1243924
uuguccaguguguauauaa

SEQ ID NO: 1451599 - RNA, 19 nt, Artificial Sequence
  Description of Artificial Sequence: Synthetic oligonucleotide
  Antisense strand to SEQ ID NO: 1451598
uuauauacacacuggacaa

SEQ ID NO: 1451600 - RNA, 19 nt, Artificial Sequence
  Description of Artificial Sequence: Synthetic oligonucleotide
  Sense strand starting at position 252 of SEQ ID NO: 1243924
uggcuuaaucaaggucacu

SEQ ID NO: 1451601 - RNA, 19 nt, Artificial Sequence
  Description of Artificial Sequence: Synthetic oligonucleotide
  Antisense strand to SEQ ID NO: 1451600
agugaccuugauuaagcca

SEQ ID NO: 1451602 - RNA, 19 nt, Artificial Sequence
  Description of Artificial Sequence: Synthetic oligonucleotide
  Sense strand starting at position 338 of SEQ ID NO: 1243924
gaguauauuucgcuauggu

SEQ ID NO: 1451603 - RNA, 19 nt, Artificial Sequence
  Description of Artificial Sequence: Synthetic oligonucleotide
  Antisense strand to SEQ ID NO: 1451602
accauagcgaaauauacuc

SEQ ID NO: 1451604 - RNA, 19 nt, Artificial Sequence
  Description of Artificial Sequence: Synthetic oligonucleotide
  Sense strand starting at position 386 of SEQ ID NO: 1243924
aagugcugccuuggaauga

SEQ ID NO: 1451605 - RNA, 19 nt, Artificial Sequence
  Description of Artificial Sequence: Synthetic oligonucleotide
  Antisense strand to SEQ ID NO: 1451604
ucauuccaaggcagcacuu

SEQ ID NO: 1451606 - RNA, 19 nt, Artificial Sequence
  Description of Artificial Sequence: Synthetic oligonucleotide
  Sense strand starting at position 516 of SEQ ID NO: 1243924
gauaaucgauaggaacaaa

SEQ ID NO: 1451607 - RNA, 19 nt, Artificial Sequence
  Description of Artificial Sequence: Synthetic oligonucleotide
  Antisense strand to SEQ ID NO: 1451606
uuuguuccuaucgauuauc

SEQ ID NO: 1451608 - RNA, 19 nt, Artificial Sequence
  Description of Artificial Sequence: Synthetic oligonucleotide
  Sense strand starting at position 691 of SEQ ID NO: 1243924
gcacaaacucagggauguu

SEQ ID NO: 1451609 - RNA, 19 nt, Artificial Sequence
  Description of Artificial Sequence: Synthetic oligonucleotide
  Antisense strand to SEQ ID NO: 1451608
aacaucccugaguuugugc

SEQ ID NO: 1451610 - RNA, 19 nt, Artificial Sequence
  Description of Artificial Sequence: Synthetic oligonucleotide
  Sense strand starting at position 694 of SEQ ID NO: 1243924
caaacucagggauguuuau

SEQ ID NO: 1451611 - RNA, 19 nt, Artificial Sequence
  Description of Artificial Sequence: Synthetic oligonucleotide
  Antisense strand to SEQ ID NO: 1451610
auaaacaucccugaguuug

SEQ ID NO: 1451612 - RNA, 19 nt, Artificial Sequence
  Description of Artificial Sequence: Synthetic oligonucleotide
  Sense strand starting at position 732 of SEQ ID NO: 1243924
aaaugaguuuaggucauca

SEQ ID NO: 1451613 - RNA, 19 nt, Artificial Sequence
  Description of Artificial Sequence: Synthetic oligonucleotide
  Antisense strand to SEQ ID NO: 1451612
ugaugaccuaaacucauuu

SEQ ID NO: 1451614 - RNA, 19 nt, Artificial Sequence
  Description of Artificial Sequence: Synthetic oligonucleotide
  Sense strand starting at position 736 of SEQ ID NO: 1243924
gaguuuaggucaucagcag

SEQ ID NO: 1451615 - RNA, 19 nt, Artificial Sequence
  Description of Artificial Sequence: Synthetic oligonucleotide
  Antisense strand to SEQ ID NO: 1451614
cugcugaugaccuaaacuc

SEQ ID NO: 1451616 - RNA, 19 nt, Artificial Sequence
  Description of Artificial Sequence: Synthetic oligonucleotide
  Sense strand starting at position 737 of SEQ ID NO: 1243924
aguuuaggucaucagcaga

SEQ ID NO: 1451617 - RNA, 19 nt, Artificial Sequence
  Description of Artificial Sequence: Synthetic oligonucleotide
  Antisense strand to SEQ ID NO: 1451616
ucugcugaugaccuaaacu

SEQ ID NO: 1451618 - RNA, 19 nt, Artificial Sequence
  Description of Artificial Sequence: Synthetic oligonucleotide
  Sense strand starting at position 740 of SEQ ID NO: 1243924
uuaggucaucagcagagau

SEQ ID NO: 1451619 - RNA, 19 nt, Artificial Sequence
  Description of Artificial Sequence: Synthetic oligonucleotide
  Antisense strand to SEQ ID NO: 1451618
aucucugcugaugaccuaa

SEQ ID NO: 1451620 - RNA, 19 nt, Artificial Sequence
  Description of Artificial Sequence: Synthetic oligonucleotide
  Sense strand starting at position 814 of SEQ ID NO: 1243924
gacagugaguguccacgaa

SEQ ID NO: 1451621 - RNA, 19 nt, Artificial Sequence
  Description of Artificial Sequence: Synthetic oligonucleotide
  Antisense strand to SEQ ID NO: 1451620
uucguggacacucacuguc

SEQ ID NO: 1451622 - RNA, 19 nt, Artificial Sequence
  Description of Artificial Sequence: Synthetic oligonucleotide
  Sense strand starting at position 829 of SEQ ID NO: 1243924
cgaagaccauaccuguaau

SEQ ID NO: 1451623 - RNA, 19 nt, Artificial Sequence
  Description of Artificial Sequence: Synthetic oligonucleotide
  Antisense strand to SEQ ID NO: 1451622
auuacagguauggucuucg

SEQ ID NO: 1451624 - RNA, 19 nt, Artificial Sequence
  Description of Artificial Sequence: Synthetic oligonucleotide
  Sense strand starting at position 835 of SEQ ID NO: 1243924
ccauaccuguaaucgcaaa

SEQ ID NO: 1451625 - RNA, 19 nt, Artificial Sequence
  Description of Artificial Sequence: Synthetic oligonucleotide
  Antisense strand to SEQ ID NO: 1451624
uuugcgauuacagguaugg

SEQ ID NO: 1451626 - RNA, 19 nt, Artificial Sequence
  Description of Artificial Sequence: Synthetic oligonucleotide
  Sense strand starting at position 2192 of SEQ ID NO: 1243924
gggcguuugagaggaugga

SEQ ID NO: 1451627 - RNA, 19 nt, Artificial Sequence
  Description of Artificial Sequence: Synthetic oligonucleotide
  Antisense strand to SEQ ID NO: 1451626
uccauccucucaaacgccc

SEQ ID NO: 1451628 - RNA, 19 nt, Artificial Sequence
  Description of Artificial Sequence: Synthetic oligonucleotide
  Sense strand starting at position 3022 of SEQ ID NO: 1243924
gcggacuuccucuagcaua

SEQ ID NO: 1451629 - RNA, 19 nt, Artificial Sequence
  Description of Artificial Sequence: Synthetic oligonucleotide
  Antisense strand to SEQ ID NO: 1451628
uaugcuagaggaaguccgc

SEQ ID NO: 1451630 - RNA, 19 nt, Artificial Sequence
  Description of Artificial Sequence: Synthetic oligonucleotide
  Sense strand starting at position 3246 of SEQ ID NO: 1243924
uguguaugugcguauauuu

SEQ ID NO: 1451631 - RNA, 19 nt, Artificial Sequence
  Description of Artificial Sequence: Synthetic oligonucleotide
  Antisense strand to SEQ ID NO: 1451630
aaauauacgcacauacaca

SEQ ID NO: 1451632 - RNA, 19 nt, Artificial Sequence
  Description of Artificial Sequence: Synthetic oligonucleotide
  Sense strand starting at position 3253 of SEQ ID NO: 1243924
gugcguauauuuguauuaa

SEQ ID NO: 1451633 - RNA, 19 nt, Artificial Sequence
  Description of Artificial Sequence: Synthetic oligonucleotide
  Antisense strand to SEQ ID NO: 1451632
uuaauacaaauauacgcac

SEQ ID NO: 1451634 - RNA, 19 nt, Artificial Sequence
  Description of Artificial Sequence: Synthetic oligonucleotide
  Sense strand starting at position 3326 of SEQ ID NO: 1243924
auacuauuguaauagggaa

SEQ ID NO: 1451635 - RNA, 19 nt, Artificial Sequence
  Description of Artificial Sequence: Synthetic oligonucleotide
  Antisense strand to SEQ ID NO: 1451634
uucccuauuacaauaguau

SEQ ID NO: 1451636 - RNA, 19 nt, Artificial Sequence
  Description of Artificial Sequence: Synthetic oligonucleotide
  Sense strand starting at position 3366 of SEQ ID NO: 1243924
cugaacuuugugcagaagu

SEQ ID NO: 1451637 - RNA, 19 nt, Artificial Sequence
  Description of Artificial Sequence: Synthetic oligonucleotide
  Antisense strand to SEQ ID NO: 1451636
acuucugcacaaaguucag

SEQ ID NO: 1451638 - RNA, 19 nt, Artificial Sequence
  Description of Artificial Sequence: Synthetic oligonucleotide
  Sense strand starting at position 3379 of SEQ ID NO: 1243924
agaagugacuagguguuua

SEQ ID NO: 1451639 - RNA, 19 nt, Artificial Sequence
  Description of Artificial Sequence: Synthetic oligonucleotide
  Antisense strand to SEQ ID NO: 1451638
uaaacaccuagucacuucu

SEQ ID NO: 1451640 - RNA, 19 nt, Artificial Sequence
  Description of Artificial Sequence: Synthetic oligonucleotide
  Sense strand starting at position 3383 of SEQ ID NO: 1243924
gugacuagguguuuaagag

SEQ ID NO: 1451641 - RNA, 19 nt, Artificial Sequence
  Description of Artificial Sequence: Synthetic oligonucleotide
  Antisense strand to SEQ ID NO: 1451640
cucuuaaacaccuagucac

SEQ ID NO: 1451642 - RNA, 19 nt, Artificial Sequence
  Description of Artificial Sequence: Synthetic oligonucleotide
  Sense strand starting at position 3433 of SEQ ID NO: 1243924
ggaacucaguagucaggaa

SEQ ID NO: 1451643 - RNA, 19 nt, Artificial Sequence
  Description of Artificial Sequence: Synthetic oligonucleotide
  Antisense strand to SEQ ID NO: 1451642
uuccugacuacugaguucc

SEQ ID NO: 1451644 - RNA, 19 nt, Artificial Sequence
  Description of Artificial Sequence: Synthetic oligonucleotide
  Sense strand starting at position 3437 of SEQ ID NO: 1243924
cucaguagucaggaaagug

SEQ ID NO: 1451645 - RNA, 19 nt, Artificial Sequence
  Description of Artificial Sequence: Synthetic oligonucleotide
  Antisense strand to SEQ ID NO: 1451644
cacuuuccugacuacugag

SEQ ID NO: 1451646 - RNA, 19 nt, Artificial Sequence
  Description of Artificial Sequence: Synthetic oligonucleotide
  Sense strand starting at position 3502 of SEQ ID NO: 1243924
ccuguuagauggcuguuau

SEQ ID NO: 1451647 - RNA, 19 nt, Artificial Sequence
  Description of Artificial Sequence: Synthetic oligonucleotide
  Antisense strand to SEQ ID NO: 1451646
auaacagccaucuaacagg

SEQ ID NO: 1451648 - RNA, 19 nt, Artificial Sequence
  Description of Artificial Sequence: Synthetic oligonucleotide
  Sense strand starting at position 3503 of SEQ ID NO: 1243924
cuguuagauggcuguuaug

SEQ ID NO: 1451649 - RNA, 19 nt, Artificial Sequence
  Description of Artificial Sequence: Synthetic oligonucleotide
  Antisense strand to SEQ ID NO: 1451648
cauaacagccaucuaacag

SEQ ID NO: 1451650 - RNA, 19 nt, Artificial Sequence
  Description of Artificial Sequence: Synthetic oligonucleotide
  Sense strand starting at position 3606 of SEQ ID NO: 1243924
gguucuugagaaggauacu

SEQ ID NO: 1451651 - RNA, 19 nt, Artificial Sequence
  Description of Artificial Sequence: Synthetic oligonucleotide
  Antisense strand to SEQ ID NO: 1451650
aguauccuucucaagaacc

SEQ ID NO: 1451652 - RNA, 19 nt, Artificial Sequence
  Description of Artificial Sequence: Synthetic oligonucleotide
  Sense strand starting at position 3616 of SEQ ID NO: 1243924
aaggauacuccugaugugu

SEQ ID NO: 1451653 - RNA, 19 nt, Artificial Sequence
  Description of Artificial Sequence: Synthetic oligonucleotide
  Antisense strand to SEQ ID NO: 1451652
acacaucaggaguauccuu

SEQ ID NO: 1451654 - RNA, 19 nt, Artificial Sequence
  Description of Artificial Sequence: Synthetic oligonucleotide
  Sense strand starting at position 3639 of SEQ ID NO: 1243924
gacauuacaucccagagag

SEQ ID NO: 1451655 - RNA, 19 nt, Artificial Sequence
  Description of Artificial Sequence: Synthetic oligonucleotide
  Antisense strand to SEQ ID NO: 1451654
cucucugggauguaauguc

SEQ ID NO: 1451656 - RNA, 19 nt, Artificial Sequence
  Description of Artificial Sequence: Synthetic oligonucleotide
  Sense strand starting at position 3693 of SEQ ID NO: 1243924
uguuguuguuaacucuuua

SEQ ID NO: 1451657 - RNA, 19 nt, Artificial Sequence
  Description of Artificial Sequence: Synthetic oligonucleotide
  Antisense strand to SEQ ID NO: 1451656
uaaagaguuaacaacaaca

SEQ ID NO: 1451658 - RNA, 19 nt, Artificial Sequence
  Description of Artificial Sequence: Synthetic oligonucleotide
  Sense strand starting at position 3697 of SEQ ID NO: 1243924
guuguuaacucuuuaagaa

SEQ ID NO: 1451659 - RNA, 19 nt, Artificial Sequence
  Description of Artificial Sequence: Synthetic oligonucleotide
  Antisense strand to SEQ ID NO: 1451658
uucuuaaagaguuaacaac

SEQ ID NO: 1451660 - RNA, 19 nt, Artificial Sequence
  Description of Artificial Sequence: Synthetic oligonucleotide
  Sense strand starting at position 3734 of SEQ ID NO: 1243924
uuguaagguguuggcaaua

SEQ ID NO: 1451661 - RNA, 19 nt, Artificial Sequence
  Description of Artificial Sequence: Synthetic oligonucleotide
  Antisense strand to SEQ ID NO: 1451660
uauugccaacaccuuacaa

SEQ ID NO: 1451662 - RNA, 19 nt, Artificial Sequence
  Description of Artificial Sequence: Synthetic oligonucleotide
  Sense strand starting at position 3739 of SEQ ID NO: 1243924
agguguuggcaauagccaa

SEQ ID NO: 1451663 - RNA, 19 nt, Artificial Sequence
  Description of Artificial Sequence: Synthetic oligonucleotide
  Antisense strand to SEQ ID NO: 1451662
uuggcuauugccaacaccu

SEQ ID NO: 1451664 - RNA, 19 nt, Artificial Sequence
  Description of Artificial Sequence: Synthetic oligonucleotide
  Sense strand starting at position 3773 of SEQ ID NO: 1243924
gcagcuuucccaggaagau

SEQ ID NO: 1451665 - RNA, 19 nt, Artificial Sequence
  Description of Artificial Sequence: Synthetic oligonucleotide
  Antisense strand to SEQ ID NO: 1451664
aucuuccugggaaagcugc

SEQ ID NO: 1451666 - RNA, 19 nt, Artificial Sequence
  Description of Artificial Sequence: Synthetic oligonucleotide
  Sense strand starting at position 3822 of SEQ ID NO: 1243924
ugcagcuuugagcaguuaa

SEQ ID NO: 1451667 - RNA, 19 nt, Artificial Sequence
  Description of Artificial Sequence: Synthetic oligonucleotide
  Antisense strand to SEQ ID NO: 1451666
uuaacugcucaaagcugca

SEQ ID NO: 1451668 - RNA, 19 nt, Artificial Sequence
  Description of Artificial Sequence: Synthetic oligonucleotide
  Sense strand starting at position 83 of SEQ ID NO: 1243925
ggugucuugggacauucuu

SEQ ID NO: 1451669 - RNA, 19 nt, Artificial Sequence
  Description of Artificial Sequence: Synthetic oligonucleotide
  Antisense strand to SEQ ID NO: 1451668
aagaaugucccaagacacc

SEQ ID NO: 1451670 - RNA, 19 nt, Artificial Sequence
  Description of Artificial Sequence: Synthetic oligonucleotide
  Sense strand starting at position 107 of SEQ ID NO: 1243925
cuuugacuuucugugaguu

SEQ ID NO: 1451671 - RNA, 19 nt, Artificial Sequence
  Description of Artificial Sequence: Synthetic oligonucleotide
  Antisense strand to SEQ ID NO: 1451670
aacucacagaaagucaaag

SEQ ID NO: 1451672 - RNA, 19 nt, Artificial Sequence
  Description of Artificial Sequence: Synthetic oligonucleotide
  Sense strand starting at position 129 of SEQ ID NO: 1243925
aagguauaguccucugaga

SEQ ID NO: 1451673 - RNA, 19 nt, Artificial Sequence
  Description of Artificial Sequence: Synthetic oligonucleotide
  Antisense strand to SEQ ID NO: 1451672
ucucagaggacuauaccuu

SEQ ID NO: 1451674 - RNA, 19 nt, Artificial Sequence
  Description of Artificial Sequence: Synthetic oligonucleotide
  Sense strand starting at position 131 of SEQ ID NO: 1243925
gguauaguccucugagaau

SEQ ID NO: 1451675 - RNA, 19 nt, Artificial Sequence
  Description of Artificial Sequence: Synthetic oligonucleotide
  Antisense strand to SEQ ID NO: 1451674
auucucagaggacuauacc

SEQ ID NO: 1451676 - RNA, 19 nt, Artificial Sequence
  Description of Artificial Sequence: Synthetic oligonucleotide
  Sense strand starting at position 384 of SEQ ID NO: 1243925
uguauuucucccugucacu

SEQ ID NO: 1451677 - RNA, 19 nt, Artificial Sequence
  Description of Artificial Sequence: Synthetic oligonucleotide
  Antisense strand to SEQ ID NO: 1451676
agugacagggagaaauaca

SEQ ID NO: 1451678 - RNA, 19 nt, Artificial Sequence
  Description of Artificial Sequence: Synthetic oligonucleotide
  Sense strand starting at position 639 of SEQ ID NO: 1243925
uguuuaaucccuggccuga

SEQ ID NO: 1451679 - RNA, 19 nt, Artificial Sequence
  Description of Artificial Sequence: Synthetic oligonucleotide
  Antisense strand to SEQ ID NO: 1451678
ucaggccagggauuaaaca

SEQ ID NO: 1451680 - RNA, 19 nt, Artificial Sequence
  Description of Artificial Sequence: Synthetic oligonucleotide
  Sense strand starting at position 686 of SEQ ID NO: 1243925
uccugagcuccucagaaua

SEQ ID NO: 1451681 - RNA, 19 nt, Artificial Sequence
  Description of Artificial Sequence: Synthetic oligonucleotide
  Antisense strand to SEQ ID NO: 1451680
uauucugaggagcucagga

SEQ ID NO: 1451682 - RNA, 19 nt, Artificial Sequence
  Description of Artificial Sequence: Synthetic oligonucleotide
  Sense strand starting at position 740 of SEQ ID NO: 1243925
ccaggugaccuugggauua

SEQ ID NO: 1451683 - RNA, 19 nt, Artificial Sequence
  Description of Artificial Sequence: Synthetic oligonucleotide
  Antisense strand to SEQ ID NO: 1451682
uaaucccaaggucaccugg

SEQ ID NO: 1451684 - RNA, 19 nt, Artificial Sequence
  Description of Artificial Sequence: Synthetic oligonucleotide
  Sense strand starting at position 751 of SEQ ID NO: 1243925
ugggauuaucuggguuaua

SEQ ID NO: 1451685 - RNA, 19 nt, Artificial Sequence
  Description of Artificial Sequence: Synthetic oligonucleotide
  Antisense strand to SEQ ID NO: 1451684
uauaacccagauaauccca

SEQ ID NO: 1451686 - RNA, 19 nt, Artificial Sequence
  Description of Artificial Sequence: Synthetic oligonucleotide
  Sense strand starting at position 752 of SEQ ID NO: 1243925
gggauuaucuggguuauaa

SEQ ID NO: 1451687 - RNA, 19 nt, Artificial Sequence
  Description of Artificial Sequence: Synthetic oligonucleotide
  Antisense strand to SEQ ID NO: 1451686
uuauaacccagauaauccc

SEQ ID NO: 1451688 - RNA, 19 nt, Artificial Sequence
  Description of Artificial Sequence: Synthetic oligonucleotide
  Sense strand starting at position 763 of SEQ ID NO: 1243925
gguuauaaagcauaccuuu

SEQ ID NO: 1451689 - RNA, 19 nt, Artificial Sequence
  Description of Artificial Sequence: Synthetic oligonucleotide
  Antisense strand to SEQ ID NO: 1451688
aaagguaugcuuuauaacc

SEQ ID NO: 1451690 - RNA, 19 nt, Artificial Sequence
  Description of Artificial Sequence: Synthetic oligonucleotide
  Sense strand starting at position 1079 of SEQ ID NO: 1243925
agguuuccgcccgauuuca

SEQ ID NO: 1451691 - RNA, 19 nt, Artificial Sequence
  Description of Artificial Sequence: Synthetic oligonucleotide
  Antisense strand to SEQ ID NO: 1451690
ugaaaucgggcggaaaccu

SEQ ID NO: 1451692 - RNA, 19 nt, Artificial Sequence
  Description of Artificial Sequence: Synthetic oligonucleotide
  Sense strand starting at position 1201 of SEQ ID NO: 1243925
ggcugaggcucuucaguaa

SEQ ID NO: 1451693 - RNA, 19 nt, Artificial Sequence
  Description of Artificial Sequence: Synthetic oligonucleotide
  Antisense strand to SEQ ID NO: 1451692
uuacugaagagccucagcc

SEQ ID NO: 1451694 - RNA, 19 nt, Artificial Sequence
  Description of Artificial Sequence: Synthetic oligonucleotide
  Sense strand starting at position 1507 of SEQ ID NO: 1243925
aagggagaagccugccuua

SEQ ID NO: 1451695 - RNA, 19 nt, Artificial Sequence
  Description of Artificial Sequence: Synthetic oligonucleotide
  Antisense strand to SEQ ID NO: 1451694
uaaggcaggcuucucccuu

SEQ ID NO: 1451696 - RNA, 19 nt, Artificial Sequence
  Description of Artificial Sequence: Synthetic oligonucleotide
  Sense strand starting at position 2363 of SEQ ID NO: 1243925
accugaucccuuggcuuua

SEQ ID NO: 1451697 - RNA, 19 nt, Artificial Sequence
  Description of Artificial Sequence: Synthetic oligonucleotide
  Antisense strand to SEQ ID NO: 1451696
uaaagccaagggaucaggu

SEQ ID NO: 1451698 - RNA, 19 nt, Artificial Sequence
  Description of Artificial Sequence: Synthetic oligonucleotide
  Sense strand starting at position 2426 of SEQ ID NO: 1243925
gguauucugucccuaaaug

SEQ ID NO: 1451699 - RNA, 19 nt, Artificial Sequence
  Description of Artificial Sequence: Synthetic oligonucleotide
  Antisense strand to SEQ ID NO: 1451698
cauuuagggacagaauacc

SEQ ID NO: 1451700 - RNA, 19 nt, Artificial Sequence
  Description of Artificial Sequence: Synthetic oligonucleotide
  Sense strand starting at position 2603 of SEQ ID NO: 1243925
ugagauggcacauauuagu

SEQ ID NO: 1451701 - RNA, 19 nt, Artificial Sequence
  Description of Artificial Sequence: Synthetic oligonucleotide
  Antisense strand to SEQ ID NO: 1451700
acuaauaugugccaucuca

SEQ ID NO: 1451702 - RNA, 19 nt, Artificial Sequence
  Description of Artificial Sequence: Synthetic oligonucleotide
  Sense strand starting at position 2640 of SEQ ID NO: 1243925
aguauacugacguggugaa

SEQ ID NO: 1451703 - RNA, 19 nt, Artificial Sequence
  Description of Artificial Sequence: Synthetic oligonucleotide
  Antisense strand to SEQ ID NO: 1451702
uucaccacgucaguauacu

SEQ ID NO: 1451704 - RNA, 19 nt, Artificial Sequence
  Description of Artificial Sequence: Synthetic oligonucleotide
  Sense strand starting at position 2682 of SEQ ID NO: 1243925
ccagucuuacgccagggau

SEQ ID NO: 1451705 - RNA, 19 nt, Artificial Sequence
  Description of Artificial Sequence: Synthetic oligonucleotide
  Antisense strand to SEQ ID NO: 1451704
aucccuggcguaagacugg

SEQ ID NO: 1451706 - RNA, 19 nt, Artificial Sequence
  Description of Artificial Sequence: Synthetic oligonucleotide
  Sense strand starting at position 2697 of SEQ ID NO: 1243925
ggaugugcuccucaacugu

SEQ ID NO: 1451707 - RNA, 19 nt, Artificial Sequence
  Description of Artificial Sequence: Synthetic oligonucleotide
  Antisense strand to SEQ ID NO: 1451706
acaguugaggagcacaucc

SEQ ID NO: 1451708 - RNA, 19 nt, Artificial Sequence
  Description of Artificial Sequence: Synthetic oligonucleotide
  Sense strand starting at position 2864 of SEQ ID NO: 1243925
aauggaguaagcggugaau

SEQ ID NO: 1451709 - RNA, 19 nt, Artificial Sequence
  Description of Artificial Sequence: Synthetic oligonucleotide
  Antisense strand to SEQ ID NO: 1451708
auucaccgcuuacuccauu

SEQ ID NO: 1451710 - RNA, 19 nt, Artificial Sequence
  Description of Artificial Sequence: Synthetic oligonucleotide
  Sense strand starting at position 3000 of SEQ ID NO: 1243925
gacucuuaacaguggugaa

SEQ ID NO: 1451711 - RNA, 19 nt, Artificial Sequence
  Description of Artificial Sequence: Synthetic oligonucleotide
  Antisense strand to SEQ ID NO: 1451710
uucaccacuguuaagaguc

SEQ ID NO: 1451712 - RNA, 19 nt, Artificial Sequence
  Description of Artificial Sequence: Synthetic oligonucleotide
  Sense strand starting at position 3001 of SEQ ID NO: 1243925
acucuuaacaguggugaag

SEQ ID NO: 1451713 - RNA, 19 nt, Artificial Sequence
  Description of Artificial Sequence: Synthetic oligonucleotide
  Antisense strand to SEQ ID NO: 1451712
cuucaccacuguuaagagu

SEQ ID NO: 1451714 - RNA, 19 nt, Artificial Sequence
  Description of Artificial Sequence: Synthetic oligonucleotide
  Sense strand starting at position 3047 of SEQ ID NO: 1243925
gugggagacccacagucau

SEQ ID NO: 1451715 - RNA, 19 nt, Artificial Sequence
  Description of Artificial Sequence: Synthetic oligonucleotide
  Antisense strand to SEQ ID NO: 1451714
augacugugggucucccac

SEQ ID NO: 1451716 - RNA, 19 nt, Artificial Sequence
  Description of Artificial Sequence: Synthetic oligonucleotide
  Sense strand starting at position 3282 of SEQ ID NO: 1243925
agaaguacugauuguccca

SEQ ID NO: 1451717 - RNA, 19 nt, Artificial Sequence
  Description of Artificial Sequence: Synthetic oligonucleotide
  Antisense strand to SEQ ID NO: 1451716
ugggacaaucaguacuucu

SEQ ID NO: 1451718 - RNA, 19 nt, Artificial Sequence
  Description of Artificial Sequence: Synthetic oligonucleotide
  Sense strand starting at position 3285 of SEQ ID NO: 1243925
aguacugauugucccauga

SEQ ID NO: 1451719 - RNA, 19 nt, Artificial Sequence
  Description of Artificial Sequence: Synthetic oligonucleotide
  Antisense strand to SEQ ID NO: 1451718
ucaugggacaaucaguacu

SEQ ID NO: 1451720 - RNA, 19 nt, Artificial Sequence
  Description of Artificial Sequence: Synthetic oligonucleotide
  Sense strand starting at position 3418 of SEQ ID NO: 1243925
ggaacucucuccuuuagua

SEQ ID NO: 1451721 - RNA, 19 nt, Artificial Sequence
  Description of Artificial Sequence: Synthetic oligonucleotide
  Antisense strand to SEQ ID NO: 1451720
uacuaaaggagagaguucc

SEQ ID NO: 1451722 - RNA, 19 nt, Artificial Sequence
  Description of Artificial Sequence: Synthetic oligonucleotide
  Sense strand starting at position 3440 of SEQ ID NO: 1243925
acagcugugacaggaguaa

SEQ ID NO: 1451723 - RNA, 19 nt, Artificial Sequence
  Description of Artificial Sequence: Synthetic oligonucleotide
  Antisense strand to SEQ ID NO: 1451722
uuacuccugucacagcugu

SEQ ID NO: 1451724 - RNA, 19 nt, Artificial Sequence
  Description of Artificial Sequence: Synthetic oligonucleotide
  Sense strand starting at position 3462 of SEQ ID NO: 1243925
guaagaccacagugacuuu

SEQ ID NO: 1451725 - RNA, 19 nt, Artificial Sequence
  Description of Artificial Sequence: Synthetic oligonucleotide
  Antisense strand to SEQ ID NO: 1451724
aaagucacuguggucuuac

SEQ ID NO: 1451726 - RNA, 19 nt, Artificial Sequence
  Description of Artificial Sequence: Synthetic oligonucleotide
  Sense strand starting at position 3473 of SEQ ID NO: 1243925
gugacuuuguuacuggaua

SEQ ID NO: 1451727 - RNA, 19 nt, Artificial Sequence
  Description of Artificial Sequence: Synthetic oligonucleotide
  Antisense strand to SEQ ID NO: 1451726
uauccaguaacaaagucac

SEQ ID NO: 1451728 - RNA, 19 nt, Artificial Sequence
  Description of Artificial Sequence: Synthetic oligonucleotide
  Sense strand starting at position 3568 of SEQ ID NO: 1243925
gucuuacauguugagcaau

SEQ ID NO: 1451729 - RNA, 19 nt, Artificial Sequence
  Description of Artificial Sequence: Synthetic oligonucleotide
  Antisense strand to SEQ ID NO: 1451728
auugcucaacauguaagac

SEQ ID NO: 1451730 - RNA, 19 nt, Artificial Sequence
  Description of Artificial Sequence: Synthetic oligonucleotide
  Sense strand starting at position 3570 of SEQ ID NO: 1243925
cuuacauguugagcaauua

SEQ ID NO: 1451731 - RNA, 19 nt, Artificial Sequence
  Description of Artificial Sequence: Synthetic oligonucleotide
  Antisense strand to SEQ ID NO: 1451730
uaauugcucaacauguaag

SEQ ID NO: 1451732 - RNA, 19 nt, Artificial Sequence
  Description of Artificial Sequence: Synthetic oligonucleotide
  Sense strand starting at position 3595 of SEQ ID NO: 1243925
gggcaacccuugguugaaa

SEQ ID NO: 1451733 - RNA, 19 nt, Artificial Sequence
  Description of Artificial Sequence: Synthetic oligonucleotide
  Antisense strand to SEQ ID NO: 1451732
uuucaaccaaggguugccc

SEQ ID NO: 1451734 - RNA, 19 nt, Artificial Sequence
  Description of Artificial Sequence: Synthetic oligonucleotide
  Sense strand starting at position 3596 of SEQ ID NO: 1243925
ggcaacccuugguugaaau

SEQ ID NO: 1451735 - RNA, 19 nt, Artificial Sequence
  Description of Artificial Sequence: Synthetic oligonucleotide
  Antisense strand to SEQ ID NO: 1451734
auuucaaccaaggguugcc

SEQ ID NO: 1451736 - RNA, 19 nt, Artificial Sequence
  Description of Artificial Sequence: Synthetic oligonucleotide
  Sense strand starting at position 3597 of SEQ ID NO: 1243925
gcaacccuugguugaaauu

SEQ ID NO: 1451737 - RNA, 19 nt, Artificial Sequence
  Description of Artificial Sequence: Synthetic oligonucleotide
  Antisense strand to SEQ ID NO: 1451736
aauuucaaccaaggguugc

SEQ ID NO: 1451738 - RNA, 19 nt, Artificial Sequence
  Description of Artificial Sequence: Synthetic oligonucleotide
  Sense strand starting at position 3606 of SEQ ID NO: 1243925
gguugaaauucugccaagu

SEQ ID NO: 1451739 - RNA, 19 nt, Artificial Sequence
  Description of Artificial Sequence: Synthetic oligonucleotide
  Antisense strand to SEQ ID NO: 1451738
acuuggcagaauuucaacc

SEQ ID NO: 1451740 - RNA, 19 nt, Artificial Sequence
  Description of Artificial Sequence: Synthetic oligonucleotide
  Sense strand starting at position 3656 of SEQ ID NO: 1243925
cucugaauuuaagaaguac

SEQ ID NO: 1451741 - RNA, 19 nt, Artificial Sequence
  Description of Artificial Sequence: Synthetic oligonucleotide
  Antisense strand to SEQ ID NO: 1451740
guacuucuuaaauucagag

SEQ ID NO: 1451742 - RNA, 19 nt, Artificial Sequence
  Description of Artificial Sequence: Synthetic oligonucleotide
  Sense strand starting at position 3795 of SEQ ID NO: 1243925
aguugucaauucucaucaa

SEQ ID NO: 1451743 - RNA, 19 nt, Artificial Sequence
  Description of Artificial Sequence: Synthetic oligonucleotide
  Antisense strand to SEQ ID NO: 1451742
uugaugagaauugacaacu

SEQ ID NO: 1451744 - RNA, 19 nt, Artificial Sequence
  Description of Artificial Sequence: Synthetic oligonucleotide
  Sense strand starting at position 3798 of SEQ ID NO: 1243925
ugucaauucucaucaaagg

SEQ ID NO: 1451745 - RNA, 19 nt, Artificial Sequence
  Description of Artificial Sequence: Synthetic oligonucleotide
  Antisense strand to SEQ ID NO: 1451744
ccuuugaugagaauugaca

SEQ ID NO: 1451746 - RNA, 19 nt, Artificial Sequence
  Description of Artificial Sequence: Synthetic oligonucleotide
  Sense strand starting at position 3917 of SEQ ID NO: 1243925
gccacauauuaaguagaaa

SEQ ID NO: 1451747 - RNA, 19 nt, Artificial Sequence
  Description of Artificial Sequence: Synthetic oligonucleotide
  Antisense strand to SEQ ID NO: 1451746
uuucuacuuaauauguggc

SEQ ID NO: 1451748 - RNA, 19 nt, Artificial Sequence
  Description of Artificial Sequence: Synthetic oligonucleotide
  Sense strand starting at position 55 of SEQ ID NO: 1243926
gcguuugaagucaagacgu

SEQ ID NO: 1451749 - RNA, 19 nt, Artificial Sequence
  Description of Artificial Sequence: Synthetic oligonucleotide
  Antisense strand to SEQ ID NO: 1451748
acgucuugacuucaaacgc

SEQ ID NO: 1451750 - RNA, 19 nt, Artificial Sequence
  Description of Artificial Sequence: Synthetic oligonucleotide
  Sense strand starting at position 422 of SEQ ID NO: 1243926
cggcauuguggaugaggau

SEQ ID NO: 1451751 - RNA, 19 nt, Artificial Sequence
  Description of Artificial Sequence: Synthetic oligonucleotide
  Antisense strand to SEQ ID NO: 1451750
auccucauccacaaugccg

SEQ ID NO: 1451752 - RNA, 19 nt, Artificial Sequence
  Description of Artificial Sequence: Synthetic oligonucleotide
  Sense strand starting at position 506 of SEQ ID NO: 1243926
aguccaaggccaugaagau

SEQ ID NO: 1451753 - RNA, 19 nt, Artificial Sequence
  Description of Artificial Sequence: Synthetic oligonucleotide
  Antisense strand to SEQ ID NO: 1451752
aucuucauggccuuggacu

SEQ ID NO: 1451754 - RNA, 19 nt, Artificial Sequence
  Description of Artificial Sequence: Synthetic oligonucleotide
  Sense strand starting at position 658 of SEQ ID NO: 1243926
ugucuuagaguguacuaga

SEQ ID NO: 1451755 - RNA, 19 nt, Artificial Sequence
  Description of Artificial Sequence: Synthetic oligonucleotide
  Antisense strand to SEQ ID NO: 1451754
ucuaguacacucuaagaca

SEQ ID NO: 1451756 - RNA, 19 nt, Artificial Sequence
  Description of Artificial Sequence: Synthetic oligonucleotide
  Sense strand starting at position 663 of SEQ ID NO: 1243926
uagaguguacuagauaagu

SEQ ID NO: 1451757 - RNA, 19 nt, Artificial Sequence
  Description of Artificial Sequence: Synthetic oligonucleotide
  Antisense strand to SEQ ID NO: 1451756
acuuaucuaguacacucua

SEQ ID NO: 1451758 - RNA, 19 nt, Artificial Sequence
  Description of Artificial Sequence: Synthetic oligonucleotide
  Sense strand starting at position 665 of SEQ ID NO: 1243926
gaguguacuagauaagugu

SEQ ID NO: 1451759 - RNA, 19 nt, Artificial Sequence
  Description of Artificial Sequence: Synthetic oligonucleotide
  Antisense strand to SEQ ID NO: 1451758
acacuuaucuaguacacuc

SEQ ID NO: 1451760 - RNA, 19 nt, Artificial Sequence
  Description of Artificial Sequence: Synthetic oligonucleotide
  Sense strand starting at position 671 of SEQ ID NO: 1243926
acuagauaaguguguggau

SEQ ID NO: 1451761 - RNA, 19 nt, Artificial Sequence
  Description of Artificial Sequence: Synthetic oligonucleotide
  Antisense strand to SEQ ID NO: 1451760
auccacacacuuaucuagu

SEQ ID NO: 1451762 - RNA, 19 nt, Artificial Sequence
  Description of Artificial Sequence: Synthetic oligonucleotide
  Sense strand starting at position 672 of SEQ ID NO: 1243926
cuagauaaguguguggauu

SEQ ID NO: 1451763 - RNA, 19 nt, Artificial Sequence
  Description of Artificial Sequence: Synthetic oligonucleotide
  Antisense strand to SEQ ID NO: 1451762
aauccacacacuuaucuag

SEQ ID NO: 1451764 - RNA, 19 nt, Artificial Sequence
  Description of Artificial Sequence: Synthetic oligonucleotide
  Sense strand starting at position 673 of SEQ ID NO: 1243926
uagauaaguguguggauuc

SEQ ID NO: 1451765 - RNA, 19 nt, Artificial Sequence
  Description of Artificial Sequence: Synthetic oligonucleotide
  Antisense strand to SEQ ID NO: 1451764
gaauccacacacuuaucua

SEQ ID NO: 1451766 - RNA, 19 nt, Artificial Sequence
  Description of Artificial Sequence: Synthetic oligonucleotide
  Sense strand starting at position 1001 of SEQ ID NO: 1243926
uccaaaggcuauucugaca

SEQ ID NO: 1451767 - RNA, 19 nt, Artificial Sequence
  Description of Artificial Sequence: Synthetic oligonucleotide
  Antisense strand to SEQ ID NO: 1451766
ugucagaauagccuuugga

SEQ ID NO: 1451768 - RNA, 19 nt, Artificial Sequence
  Description of Artificial Sequence: Synthetic oligonucleotide
  Sense strand starting at position 1149 of SEQ ID NO: 1243926
gugcuccagccucauuaaa

SEQ ID NO: 1451769 - RNA, 19 nt, Artificial Sequence
  Description of Artificial Sequence: Synthetic oligonucleotide
  Antisense strand to SEQ ID NO: 1451768
uuuaaugaggcuggagcac

SEQ ID NO: 1451770 - RNA, 19 nt, Artificial Sequence
  Description of Artificial Sequence: Synthetic oligonucleotide
  Sense strand starting at position 2150 of SEQ ID NO: 1243926
aggugugugccugugugaa

SEQ ID NO: 1451771 - RNA, 19 nt, Artificial Sequence
  Description of Artificial Sequence: Synthetic oligonucleotide
  Antisense strand to SEQ ID NO: 1451770
uucacacaggcacacaccu

SEQ ID NO: 1451772 - RNA, 19 nt, Artificial Sequence
  Description of Artificial Sequence: Synthetic oligonucleotide
  Sense strand starting at position 2236 of SEQ ID NO: 1243926
cuuguaugugaaugaucuc

SEQ ID NO: 1451773 - RNA, 19 nt, Artificial Sequence
  Description of Artificial Sequence: Synthetic oligonucleotide
  Antisense strand to SEQ ID NO: 1451772
gagaucauucacauacaag

SEQ ID NO: 1451774 - RNA, 19 nt, Artificial Sequence
  Description of Artificial Sequence: Synthetic oligonucleotide
  Sense strand starting at position 2239 of SEQ ID NO: 1243926
guaugugaaugaucucuag

SEQ ID NO: 1451775 - RNA, 19 nt, Artificial Sequence
  Description of Artificial Sequence: Synthetic oligonucleotide
  Antisense strand to SEQ ID NO: 1451774
cuagagaucauucacauac

SEQ ID NO: 1451776 - RNA, 19 nt, Artificial Sequence
  Description of Artificial Sequence: Synthetic oligonucleotide
  Sense strand starting at position 2242 of SEQ ID NO: 1243926
ugugaaugaucucuaggug

SEQ ID NO: 1451777 - RNA, 19 nt, Artificial Sequence
  Description of Artificial Sequence: Synthetic oligonucleotide
  Antisense strand to SEQ ID NO: 1451776
caccuagagaucauucaca

SEQ ID NO: 1451778 - RNA, 19 nt, Artificial Sequence
  Description of Artificial Sequence: Synthetic oligonucleotide
  Sense strand starting at position 2243 of SEQ ID NO: 1243926
gugaaugaucucuaggugu

SEQ ID NO: 1451779 - RNA, 19 nt, Artificial Sequence
  Description of Artificial Sequence: Synthetic oligonucleotide
  Antisense strand to SEQ ID NO: 1451778
acaccuagagaucauucac

SEQ ID NO: 1451780 - RNA, 19 nt, Artificial Sequence
  Description of Artificial Sequence: Synthetic oligonucleotide
  Sense strand starting at position 2246 of SEQ ID NO: 1243926
aaugaucucuaggugugua

SEQ ID NO: 1451781 - RNA, 19 nt, Artificial Sequence
  Description of Artificial Sequence: Synthetic oligonucleotide
  Antisense strand to SEQ ID NO: 1451780
uacacaccuagagaucauu

SEQ ID NO: 1451782 - RNA, 19 nt, Artificial Sequence
  Description of Artificial Sequence: Synthetic oligonucleotide
  Sense strand starting at position 2351 of SEQ ID NO: 1243926
guuugugugcauucuggca

SEQ ID NO: 1451783 - RNA, 19 nt, Artificial Sequence
  Description of Artificial Sequence: Synthetic oligonucleotide
  Antisense strand to SEQ ID NO: 1451782
ugccagaaugcacacaaac

SEQ ID NO: 1451784 - RNA, 19 nt, Artificial Sequence
  Description of Artificial Sequence: Synthetic oligonucleotide
  Sense strand starting at position 2420 of SEQ ID NO: 1243926
cuugcauaucuccauaugu

SEQ ID NO: 1451785 - RNA, 19 nt, Artificial Sequence
  Description of Artificial Sequence: Synthetic oligonucleotide
  Antisense strand to SEQ ID NO: 1451784
acauauggagauaugcaag

SEQ ID NO: 1451786 - RNA, 19 nt, Artificial Sequence
  Description of Artificial Sequence: Synthetic oligonucleotide
  Sense strand starting at position 2422 of SEQ ID NO: 1243926
ugcauaucuccauauguuu

SEQ ID NO: 1451787 - RNA, 19 nt, Artificial Sequence
  Description of Artificial Sequence: Synthetic oligonucleotide
  Antisense strand to SEQ ID NO: 1451786
aaacauauggagauaugca

SEQ ID NO: 1451788 - RNA, 19 nt, Artificial Sequence
  Description of Artificial Sequence: Synthetic oligonucleotide
  Sense strand starting at position 2433 of SEQ ID NO: 1243926
auauguuuacucgaggugu

SEQ ID NO: 1451789 - RNA, 19 nt, Artificial Sequence
  Description of Artificial Sequence: Synthetic oligonucleotide
  Antisense strand to SEQ ID NO: 1451788
acaccucgaguaaacauau

SEQ ID NO: 1451790 - RNA, 19 nt, Artificial Sequence
  Description of Artificial Sequence: Synthetic oligonucleotide
  Sense strand starting at position 2476 of SEQ ID NO: 1243926
aaguuagguguguacauga

SEQ ID NO: 1451791 - RNA, 19 nt, Artificial Sequence
  Description of Artificial Sequence: Synthetic oligonucleotide
  Antisense strand to SEQ ID NO: 1451790
ucauguacacaccuaacuu

SEQ ID NO: 1451792 - RNA, 19 nt, Artificial Sequence
  Description of Artificial Sequence: Synthetic oligonucleotide
  Sense strand starting at position 2481 of SEQ ID NO: 1243926
agguguguacaugaauaca

SEQ ID NO: 1451793 - RNA, 19 nt, Artificial Sequence
  Description of Artificial Sequence: Synthetic oligonucleotide
  Antisense strand to SEQ ID NO: 1451792
uguauucauguacacaccu

SEQ ID NO: 1451794 - RNA, 19 nt, Artificial Sequence
  Description of Artificial Sequence: Synthetic oligonucleotide
  Sense strand starting at position 2507 of SEQ ID NO: 1243926
cuuugagucuaguccuaga

SEQ ID NO: 1451795 - RNA, 19 nt, Artificial Sequence
  Description of Artificial Sequence: Synthetic oligonucleotide
  Antisense strand to SEQ ID NO: 1451794
ucuaggacuagacucaaag

SEQ ID NO: 1451796 - RNA, 19 nt, Artificial Sequence
  Description of Artificial Sequence: Synthetic oligonucleotide
  Sense strand starting at position 2512 of SEQ ID NO: 1243926
agucuaguccuagaugcuu

SEQ ID NO: 1451797 - RNA, 19 nt, Artificial Sequence
  Description of Artificial Sequence: Synthetic oligonucleotide
  Antisense strand to SEQ ID NO: 1451796
aagcaucuaggacuagacu

SEQ ID NO: 1451798 - RNA, 19 nt, Artificial Sequence
  Description of Artificial Sequence: Synthetic oligonucleotide
  Sense strand starting at position 3245 of SEQ ID NO: 1243926
augguucucauaggugaua

SEQ ID NO: 1451799 - RNA, 19 nt, Artificial Sequence
  Description of Artificial Sequence: Synthetic oligonucleotide
  Antisense strand to SEQ ID NO: 1451798
uaucaccuaugagaaccau

SEQ ID NO: 1451800 - RNA, 19 nt, Artificial Sequence
  Description of Artificial Sequence: Synthetic oligonucleotide
  Sense strand starting at position 3246 of SEQ ID NO: 1243926
ugguucucauaggugauaa

SEQ ID NO: 1451801 - RNA, 19 nt, Artificial Sequence
  Description of Artificial Sequence: Synthetic oligonucleotide
  Antisense strand to SEQ ID NO: 1451800
uuaucaccuaugagaacca

SEQ ID NO: 1451802 - RNA, 19 nt, Artificial Sequence
  Description of Artificial Sequence: Synthetic oligonucleotide
  Sense strand starting at position 3247 of SEQ ID NO: 1243926
gguucucauaggugauaag

SEQ ID NO: 1451803 - RNA, 19 nt, Artificial Sequence
  Description of Artificial Sequence: Synthetic oligonucleotide
  Antisense strand to SEQ ID NO: 1451802
cuuaucaccuaugagaacc

SEQ ID NO: 1451804 - RNA, 19 nt, Artificial Sequence
  Description of Artificial Sequence: Synthetic oligonucleotide
  Sense strand starting at position 3348 of SEQ ID NO: 1243926
agaccauuccagggcagaa

SEQ ID NO: 1451805 - RNA, 19 nt, Artificial Sequence
  Description of Artificial Sequence: Synthetic oligonucleotide
  Antisense strand to SEQ ID NO: 1451804
uucugcccuggaauggucu

SEQ ID NO: 1451806 - RNA, 19 nt, Artificial Sequence
  Description of Artificial Sequence: Synthetic oligonucleotide
  Sense strand starting at position 3434 of SEQ ID NO: 1243926
uguaguuagacuuggaaau

SEQ ID NO: 1451807 - RNA, 19 nt, Artificial Sequence
  Description of Artificial Sequence: Synthetic oligonucleotide
  Antisense strand to SEQ ID NO: 1451806
auuuccaagucuaacuaca

SEQ ID NO: 1451808 - RNA, 19 nt, Artificial Sequence
  Description of Artificial Sequence: Synthetic oligonucleotide
  Sense strand starting at position 3435 of SEQ ID NO: 1243926
guaguuagacuuggaaauu

SEQ ID NO: 1451809 - RNA, 19 nt, Artificial Sequence
  Description of Artificial Sequence: Synthetic oligonucleotide
  Antisense strand to SEQ ID NO: 1451808
aauuuccaagucuaacuac

SEQ ID NO: 1451810 - RNA, 19 nt, Artificial Sequence
  Description of Artificial Sequence: Synthetic oligonucleotide
  Sense strand starting at position 3467 of SEQ ID NO: 1243926
auacaaguuucuguccuua

SEQ ID NO: 1451811 - RNA, 19 nt, Artificial Sequence
  Description of Artificial Sequence: Synthetic oligonucleotide
  Antisense strand to SEQ ID NO: 1451810
uaaggacagaaacuuguau

SEQ ID NO: 1451812 - RNA, 19 nt, Artificial Sequence
  Description of Artificial Sequence: Synthetic oligonucleotide
  Sense strand starting at position 3471 of SEQ ID NO: 1243926
aaguuucuguccuuaggga

SEQ ID NO: 1451813 - RNA, 19 nt, Artificial Sequence
  Description of Artificial Sequence: Synthetic oligonucleotide
  Antisense strand to SEQ ID NO: 1451812
ucccuaaggacagaaacuu

SEQ ID NO: 1451814 - RNA, 19 nt, Artificial Sequence
  Description of Artificial Sequence: Synthetic oligonucleotide
  Sense strand starting at position 3532 of SEQ ID NO: 1243926
ccugcaugggcagaugaaa

SEQ ID NO: 1451815 - RNA, 19 nt, Artificial Sequence
  Description of Artificial Sequence: Synthetic oligonucleotide
  Antisense strand to SEQ ID NO: 1451814
uuucaucugcccaugcagg

SEQ ID NO: 1451816 - RNA, 19 nt, Artificial Sequence
  Description of Artificial Sequence: Synthetic oligonucleotide
  Sense strand starting at position 3706 of SEQ ID NO: 1243926
acaaacagugcuggaauau

SEQ ID NO: 1451817 - RNA, 19 nt, Artificial Sequence
  Description of Artificial Sequence: Synthetic oligonucleotide
  Antisense strand to SEQ ID NO: 1451816
auauuccagcacuguuugu

SEQ ID NO: 1451818 - RNA, 19 nt, Artificial Sequence
  Description of Artificial Sequence: Synthetic oligonucleotide
  Sense strand starting at position 3729 of SEQ ID NO: 1243926
agaggugcucuccaucuga

SEQ ID NO: 1451819 - RNA, 19 nt, Artificial Sequence
  Description of Artificial Sequence: Synthetic oligonucleotide
  Antisense strand to SEQ ID NO: 1451818
ucagauggagagcaccucu

SEQ ID NO: 1451820 - RNA, 19 nt, Artificial Sequence
  Description of Artificial Sequence: Synthetic oligonucleotide
  Sense strand starting at position 3882 of SEQ ID NO: 1243926
auagcaguuguagagaagu

SEQ ID NO: 1451821 - RNA, 19 nt, Artificial Sequence
  Description of Artificial Sequence: Synthetic oligonucleotide
  Antisense strand to SEQ ID NO: 1451820
acuucucuacaacugcuau

SEQ ID NO: 1451822 - RNA, 19 nt, Artificial Sequence
  Description of Artificial Sequence: Synthetic oligonucleotide
  Sense strand starting at position 3884 of SEQ ID NO: 1243926
agcaguuguagagaagugu

SEQ ID NO: 1451823 - RNA, 19 nt, Artificial Sequence
  Description of Artificial Sequence: Synthetic oligonucleotide
  Antisense strand to SEQ ID NO: 1451822
acacuucucuacaacugcu

SEQ ID NO: 1451824 - RNA, 19 nt, Artificial Sequence
  Description of Artificial Sequence: Synthetic oligonucleotide
  Sense strand starting at position 3893 of SEQ ID NO: 1243926
agagaagugugacugcaga

SEQ ID NO: 1451825 - RNA, 19 nt, Artificial Sequence
  Description of Artificial Sequence: Synthetic oligonucleotide
  Antisense strand to SEQ ID NO: 1451824
ucugcagucacacuucucu

SEQ ID NO: 1451826 - RNA, 19 nt, Artificial Sequence
  Description of Artificial Sequence: Synthetic oligonucleotide
  Sense strand starting at position 3920 of SEQ ID NO: 1243926
cuagaagugacaggucaag

SEQ ID NO: 1451827 - RNA, 19 nt, Artificial Sequence
  Description of Artificial Sequence: Synthetic oligonucleotide
  Antisense strand to SEQ ID NO: 1451826
cuugaccugucacuucuag

SEQ ID NO: 1451828 - RNA, 19 nt, Artificial Sequence
  Description of Artificial Sequence: Synthetic oligonucleotide
  Sense strand starting at position 792 of SEQ ID NO: 1243927
ggcuaauagcucuaugccu

SEQ ID NO: 1451829 - RNA, 19 nt, Artificial Sequence
  Description of Artificial Sequence: Synthetic oligonucleotide
  Antisense strand to SEQ ID NO: 1451828
aggcauagagcuauuagcc

SEQ ID NO: 1451830 - RNA, 19 nt, Artificial Sequence
  Description of Artificial Sequence: Synthetic oligonucleotide
  Sense strand starting at position 800 of SEQ ID NO: 1243927
gcucuaugccuuuggauaa

SEQ ID NO: 1451831 - RNA, 19 nt, Artificial Sequence
  Description of Artificial Sequence: Synthetic oligonucleotide
  Antisense strand to SEQ ID NO: 1451830
uuauccaaaggcauagagc

SEQ ID NO: 1451832 - RNA, 19 nt, Artificial Sequence
  Description of Artificial Sequence: Synthetic oligonucleotide
  Sense strand starting at position 1075 of SEQ ID NO: 1243927
gcaacaguguaagcaagaa

SEQ ID NO: 1451833 - RNA, 19 nt, Artificial Sequence
  Description of Artificial Sequence: Synthetic oligonucleotide
  Antisense strand to SEQ ID NO: 1451832
uucuugcuuacacuguugc

SEQ ID NO: 1451834 - RNA, 19 nt, Artificial Sequence
  Description of Artificial Sequence: Synthetic oligonucleotide
  Sense strand starting at position 1079 of SEQ ID NO: 1243927
caguguaagcaagaauucu

SEQ ID NO: 1451835 - RNA, 19 nt, Artificial Sequence
  Description of Artificial Sequence: Synthetic oligonucleotide
  Antisense strand to SEQ ID NO: 1451834
agaauucuugcuuacacug

SEQ ID NO: 1451836 - RNA, 19 nt, Artificial Sequence
  Description of Artificial Sequence: Synthetic oligonucleotide
  Sense strand starting at position 1100 of SEQ ID NO: 1243927
uuacuaaauguaugagugu

SEQ ID NO: 1451837 - RNA, 19 nt, Artificial Sequence
  Description of Artificial Sequence: Synthetic oligonucleotide
  Antisense strand to SEQ ID NO: 1451836
acacucauacauuuaguaa

SEQ ID NO: 1451838 - RNA, 19 nt, Artificial Sequence
  Description of Artificial Sequence: Synthetic oligonucleotide
  Sense strand starting at position 1106 of SEQ ID NO: 1243927
aauguaugagugugugaaa

SEQ ID NO: 1451839 - RNA, 19 nt, Artificial Sequence
  Description of Artificial Sequence: Synthetic oligonucleotide
  Antisense strand to SEQ ID NO: 1451838
uuucacacacucauacauu

SEQ ID NO: 1451840 - RNA, 19 nt, Artificial Sequence
  Description of Artificial Sequence: Synthetic oligonucleotide
  Sense strand starting at position 1198 of SEQ ID NO: 1243927
agcauuauguggcuaccau

SEQ ID NO: 1451841 - RNA, 19 nt, Artificial Sequence
  Description of Artificial Sequence: Synthetic oligonucleotide
  Antisense strand to SEQ ID NO: 1451840
augguagccacauaaugcu

SEQ ID NO: 1451842 - RNA, 19 nt, Artificial Sequence
  Description of Artificial Sequence: Synthetic oligonucleotide
  Sense strand starting at position 1199 of SEQ ID NO: 1243927
gcauuauguggcuaccauu

SEQ ID NO: 1451843 - RNA, 19 nt, Artificial Sequence
  Description of Artificial Sequence: Synthetic oligonucleotide
  Antisense strand to SEQ ID NO: 1451842
aaugguagccacauaaugc

SEQ ID NO: 1451844 - RNA, 19 nt, Artificial Sequence
  Description of Artificial Sequence: Synthetic oligonucleotide
  Sense strand starting at position 1206 of SEQ ID NO: 1243927
guggcuaccauuuguugaa

SEQ ID NO: 1451845 - RNA, 19 nt, Artificial Sequence
  Description of Artificial Sequence: Synthetic oligonucleotide
  Antisense strand to SEQ ID NO: 1451844
uucaacaaaugguagccac

SEQ ID NO: 1451846 - RNA, 19 nt, Artificial Sequence
  Description of Artificial Sequence: Synthetic oligonucleotide
  Sense strand starting at position 1301 of SEQ ID NO: 1243927
ugggcuuguuacucccaaa

SEQ ID NO: 1451847 - RNA, 19 nt, Artificial Sequence
  Description of Artificial Sequence: Synthetic oligonucleotide
  Antisense strand to SEQ ID NO: 1451846
uuugggaguaacaagccca

SEQ ID NO: 1451848 - RNA, 19 nt, Artificial Sequence
  Description of Artificial Sequence: Synthetic oligonucleotide
  Sense strand starting at position 1585 of SEQ ID NO: 1243927
cgcagaaaugugggaauaa

SEQ ID NO: 1451849 - RNA, 19 nt, Artificial Sequence
  Description of Artificial Sequence: Synthetic oligonucleotide
  Antisense strand to SEQ ID NO: 1451848
uuauucccacauuucugcg

SEQ ID NO: 1451850 - RNA, 19 nt, Artificial Sequence
  Description of Artificial Sequence: Synthetic oligonucleotide
  Sense strand starting at position 1630 of SEQ ID NO: 1243927
gcgcgaggccuuucacaca

SEQ ID NO: 1451851 - RNA, 19 nt, Artificial Sequence
  Description of Artificial Sequence: Synthetic oligonucleotide
  Antisense strand to SEQ ID NO: 1451850
ugugugaaaggccucgcgc

SEQ ID NO: 1451852 - RNA, 19 nt, Artificial Sequence
  Description of Artificial Sequence: Synthetic oligonucleotide
  Sense strand starting at position 2132 of SEQ ID NO: 1243927
ucaucuuccggagggaaau

SEQ ID NO: 1451853 - RNA, 19 nt, Artificial Sequence
  Description of Artificial Sequence: Synthetic oligonucleotide
  Antisense strand to SEQ ID NO: 1451852
auuucccuccggaagauga

SEQ ID NO: 1451854 - RNA, 19 nt, Artificial Sequence
  Description of Artificial Sequence: Synthetic oligonucleotide
  Sense strand starting at position 2133 of SEQ ID NO: 1243927
caucuuccggagggaaauu

SEQ ID NO: 1451855 - RNA, 19 nt, Artificial Sequence
  Description of Artificial Sequence: Synthetic oligonucleotide
  Antisense strand to SEQ ID NO: 1451854
aauuucccuccggaagaug

SEQ ID NO: 1451856 - RNA, 19 nt, Artificial Sequence
  Description of Artificial Sequence: Synthetic oligonucleotide
  Sense strand starting at position 2175 of SEQ ID NO: 1243927
guggacuuccggcgaagaa

SEQ ID NO: 1451857 - RNA, 19 nt, Artificial Sequence
  Description of Artificial Sequence: Synthetic oligonucleotide
  Antisense strand to SEQ ID NO: 1451856
uucuucgccggaaguccac

SEQ ID NO: 1451858 - RNA, 19 nt, Artificial Sequence
  Description of Artificial Sequence: Synthetic oligonucleotide
  Sense strand starting at position 2190 of SEQ ID NO: 1243927
agaacacaguuggagaauu

SEQ ID NO: 1451859 - RNA, 19 nt, Artificial Sequence
  Description of Artificial Sequence: Synthetic oligonucleotide
  Antisense strand to SEQ ID NO: 1451858
aauucuccaacuguguucu

SEQ ID NO: 1451860 - RNA, 19 nt, Artificial Sequence
  Description of Artificial Sequence: Synthetic oligonucleotide
  Sense strand starting at position 2210 of SEQ ID NO: 1243927
acgauacaguuaucaagau

SEQ ID NO: 1451861 - RNA, 19 nt, Artificial Sequence
  Description of Artificial Sequence: Synthetic oligonucleotide
  Antisense strand to SEQ ID NO: 1451860
aucuugauaacuguaucgu

SEQ ID NO: 1451862 - RNA, 19 nt, Artificial Sequence
  Description of Artificial Sequence: Synthetic oligonucleotide
  Sense strand starting at position 2245 of SEQ ID NO: 1243927
uaaucagaacagugugaua

SEQ ID NO: 1451863 - RNA, 19 nt, Artificial Sequence
  Description of Artificial Sequence: Synthetic oligonucleotide
  Antisense strand to SEQ ID NO: 1451862
uaucacacuguucugauua

SEQ ID NO: 1451864 - RNA, 19 nt, Artificial Sequence
  Description of Artificial Sequence: Synthetic oligonucleotide
  Sense strand starting at position 2247 of SEQ ID NO: 1243927
aucagaacagugugauaac

SEQ ID NO: 1451865 - RNA, 19 nt, Artificial Sequence
  Description of Artificial Sequence: Synthetic oligonucleotide
  Antisense strand to SEQ ID NO: 1451864
guuaucacacuguucugau

SEQ ID NO: 1451866 - RNA, 19 nt, Artificial Sequence
  Description of Artificial Sequence: Synthetic oligonucleotide
  Sense strand starting at position 2346 of SEQ ID NO: 1243927
acaaguagccacuguaaug

SEQ ID NO: 1451867 - RNA, 19 nt, Artificial Sequence
  Description of Artificial Sequence: Synthetic oligonucleotide
  Antisense strand to SEQ ID NO: 1451866
cauuacaguggcuacuugu

SEQ ID NO: 1451868 - RNA, 19 nt, Artificial Sequence
  Description of Artificial Sequence: Synthetic oligonucleotide
  Sense strand starting at position 2386 of SEQ ID NO: 1243927
uauauagugcuaggucaau

SEQ ID NO: 1451869 - RNA, 19 nt, Artificial Sequence
  Description of Artificial Sequence: Synthetic oligonucleotide
  Antisense strand to SEQ ID NO: 1451868
auugaccuagcacuauaua

SEQ ID NO: 1451870 - RNA, 19 nt, Artificial Sequence
  Description of Artificial Sequence: Synthetic oligonucleotide
  Sense strand starting at position 2456 of SEQ ID NO: 1243927
auucuagacggaugguaga

SEQ ID NO: 1451871 - RNA, 19 nt, Artificial Sequence
  Description of Artificial Sequence: Synthetic oligonucleotide
  Antisense strand to SEQ ID NO: 1451870
ucuaccauccgucuagaau

SEQ ID NO: 1451872 - RNA, 19 nt, Artificial Sequence
  Description of Artificial Sequence: Synthetic oligonucleotide
  Sense strand starting at position 2469 of SEQ ID NO: 1243927
gguagaccugaaugugaac

SEQ ID NO: 1451873 - RNA, 19 nt, Artificial Sequence
  Description of Artificial Sequence: Synthetic oligonucleotide
  Antisense strand to SEQ ID NO: 1451872
guucacauucaggucuacc

SEQ ID NO: 1451874 - RNA, 19 nt, Artificial Sequence
  Description of Artificial Sequence: Synthetic oligonucleotide
  Sense strand starting at position 2589 of SEQ ID NO: 1243927
ugauaaauugggugucugu

SEQ ID NO: 1451875 - RNA, 19 nt, Artificial Sequence
  Description of Artificial Sequence: Synthetic oligonucleotide
  Antisense strand to SEQ ID NO: 1451874
acagacacccaauuuauca

SEQ ID NO: 1451876 - RNA, 19 nt, Artificial Sequence
  Description of Artificial Sequence: Synthetic oligonucleotide
  Sense strand starting at position 2598 of SEQ ID NO: 1243927
gggugucuguaacuauaag

SEQ ID NO: 1451877 - RNA, 19 nt, Artificial Sequence
  Description of Artificial Sequence: Synthetic oligonucleotide
  Antisense strand to SEQ ID NO: 1451876
cuuauaguuacagacaccc

SEQ ID NO: 1451878 - RNA, 19 nt, Artificial Sequence
  Description of Artificial Sequence: Synthetic oligonucleotide
  Sense strand starting at position 2599 of SEQ ID NO: 1243927
ggugucuguaacuauaaga

SEQ ID NO: 1451879 - RNA, 19 nt, Artificial Sequence
  Description of Artificial Sequence: Synthetic oligonucleotide
  Antisense strand to SEQ ID NO: 1451878
ucuuauaguuacagacacc

SEQ ID NO: 1451880 - RNA, 19 nt, Artificial Sequence
  Description of Artificial Sequence: Synthetic oligonucleotide
  Sense strand starting at position 2703 of SEQ ID NO: 1243927
ucagaauauguacguacuu

SEQ ID NO: 1451881 - RNA, 19 nt, Artificial Sequence
  Description of Artificial Sequence: Synthetic oligonucleotide
  Antisense strand to SEQ ID NO: 1451880
aaguacguacauauucuga

SEQ ID NO: 1451882 - RNA, 19 nt, Artificial Sequence
  Description of Artificial Sequence: Synthetic oligonucleotide
  Sense strand starting at position 2782 of SEQ ID NO: 1243927
agaggauauugagagagua

SEQ ID NO: 1451883 - RNA, 19 nt, Artificial Sequence
  Description of Artificial Sequence: Synthetic oligonucleotide
  Antisense strand to SEQ ID NO: 1451882
uacucucucaauauccucu

SEQ ID NO: 1451884 - RNA, 19 nt, Artificial Sequence
  Description of Artificial Sequence: Synthetic oligonucleotide
  Sense strand starting at position 2876 of SEQ ID NO: 1243927
ggcaaauguguguaaggug

SEQ ID NO: 1451885 - RNA, 19 nt, Artificial Sequence
  Description of Artificial Sequence: Synthetic oligonucleotide
  Antisense strand to SEQ ID NO: 1451884
caccuuacacacauuugcc

SEQ ID NO: 1451886 - RNA, 19 nt, Artificial Sequence
  Description of Artificial Sequence: Synthetic oligonucleotide
  Sense strand starting at position 2996 of SEQ ID NO: 1243927
agcaauuauguauguauuc

SEQ ID NO: 1451887 - RNA, 19 nt, Artificial Sequence
  Description of Artificial Sequence: Synthetic oligonucleotide
  Antisense strand to SEQ ID NO: 1451886
gaauacauacauaauugcu

SEQ ID NO: 1451888 - RNA, 19 nt, Artificial Sequence
  Description of Artificial Sequence: Synthetic oligonucleotide
  Sense strand starting at position 3209 of SEQ ID NO: 1243927
uccauuguucuggaaacuc

SEQ ID NO: 1451889 - RNA, 19 nt, Artificial Sequence
  Description of Artificial Sequence: Synthetic oligonucleotide
  Antisense strand to SEQ ID NO: 1451888
gaguuuccagaacaaugga

SEQ ID NO: 1451890 - RNA, 19 nt, Artificial Sequence
  Description of Artificial Sequence: Synthetic oligonucleotide
  Sense strand starting at position 3227 of SEQ ID NO: 1243927
cuagauuccugcuugccaa

SEQ ID NO: 1451891 - RNA, 19 nt, Artificial Sequence
  Description of Artificial Sequence: Synthetic oligonucleotide
  Antisense strand to SEQ ID NO: 1451890
uuggcaagcaggaaucuag

SEQ ID NO: 1451892 - RNA, 19 nt, Artificial Sequence
  Description of Artificial Sequence: Synthetic oligonucleotide
  Sense strand starting at position 3255 of SEQ ID NO: 1243927
uuugaauauccuuguagca

SEQ ID NO: 1451893 - RNA, 19 nt, Artificial Sequence
  Description of Artificial Sequence: Synthetic oligonucleotide
  Antisense strand to SEQ ID NO: 1451892
ugcuacaaggauauucaaa

SEQ ID NO: 1451894 - RNA, 19 nt, Artificial Sequence
  Description of Artificial Sequence: Synthetic oligonucleotide
  Sense strand starting at position 3278 of SEQ ID NO: 1243927
caauaugaaccguaaggca

SEQ ID NO: 1451895 - RNA, 19 nt, Artificial Sequence
  Description of Artificial Sequence: Synthetic oligonucleotide
  Antisense strand to SEQ ID NO: 1451894
ugccuuacgguucauauug

SEQ ID NO: 1451896 - RNA, 19 nt, Artificial Sequence
  Description of Artificial Sequence: Synthetic oligonucleotide
  Sense strand starting at position 3753 of SEQ ID NO: 1243927
cugguaacaccugagucuu

SEQ ID NO: 1451897 - RNA, 19 nt, Artificial Sequence
  Description of Artificial Sequence: Synthetic oligonucleotide
  Antisense strand to SEQ ID NO: 1451896
aagacucagguguuaccag

SEQ ID NO: 1451898 - RNA, 19 nt, Artificial Sequence
  Description of Artificial Sequence: Synthetic oligonucleotide
  Sense strand starting at position 3755 of SEQ ID NO: 1243927
gguaacaccugagucuuua

SEQ ID NO: 1451899 - RNA, 19 nt, Artificial Sequence
  Description of Artificial Sequence: Synthetic oligonucleotide
  Antisense strand to SEQ ID NO: 1451898
uaaagacucagguguuacc

SEQ ID NO: 1451900 - RNA, 19 nt, Artificial Sequence
  Description of Artificial Sequence: Synthetic oligonucleotide
  Sense strand starting at position 3767 of SEQ ID NO: 1243927
gucuuuauugcaugacuaa

SEQ ID NO: 1451901 - RNA, 19 nt, Artificial Sequence
  Description of Artificial Sequence: Synthetic oligonucleotide
  Antisense strand to SEQ ID NO: 1451900
uuagucaugcaauaaagac

SEQ ID NO: 1451902 - RNA, 19 nt, Artificial Sequence
  Description of Artificial Sequence: Synthetic oligonucleotide
  Sense strand starting at position 3768 of SEQ ID NO: 1243927
ucuuuauugcaugacuaag

SEQ ID NO: 1451903 - RNA, 19 nt, Artificial Sequence
  Description of Artificial Sequence: Synthetic oligonucleotide
  Antisense strand to SEQ ID NO: 1451902
cuuagucaugcaauaaaga

SEQ ID NO: 1451904 - RNA, 19 nt, Artificial Sequence
  Description of Artificial Sequence: Synthetic oligonucleotide
  Sense strand starting at position 3906 of SEQ ID NO: 1243927
ugaauugcaucugccaaau

SEQ ID NO: 1451905 - RNA, 19 nt, Artificial Sequence
  Description of Artificial Sequence: Synthetic oligonucleotide
  Antisense strand to SEQ ID NO: 1451904
auuuggcagaugcaauuca

SEQ ID NO: 1451906 - RNA, 19 nt, Artificial Sequence
  Description of Artificial Sequence: Synthetic oligonucleotide
  Sense strand starting at position 3944 of SEQ ID NO: 1243927
cuucgcagccaggauauua

SEQ ID NO: 1451907 - RNA, 19 nt, Artificial Sequence
  Description of Artificial Sequence: Synthetic oligonucleotide
  Antisense strand to SEQ ID NO: 1451906
uaauauccuggcugcgaag

SEQ ID NO: 1451908 - RNA, 19 nt, Artificial Sequence
  Description of Artificial Sequence: Synthetic oligonucleotide
  Sense strand starting at position 6 of SEQ ID NO: 1243928
gagcguauucuccaaccau

SEQ ID NO: 1451909 - RNA, 19 nt, Artificial Sequence
  Description of Artificial Sequence: Synthetic oligonucleotide
  Antisense strand to SEQ ID NO: 1451908
augguuggagaauacgcuc

SEQ ID NO: 1451910 - RNA, 19 nt, Artificial Sequence
  Description of Artificial Sequence: Synthetic oligonucleotide
  Sense strand starting at position 415 of SEQ ID NO: 1243928
agacaaaggugcgcuauuu

SEQ ID NO: 1451911 - RNA, 19 nt, Artificial Sequence
  Description of Artificial Sequence: Synthetic oligonucleotide
  Antisense strand to SEQ ID NO: 1451910
aaauagcgcaccuuugucu

SEQ ID NO: 1451912 - RNA, 19 nt, Artificial Sequence
  Description of Artificial Sequence: Synthetic oligonucleotide
  Sense strand starting at position 458 of SEQ ID NO: 1243928
uucuguucugaauagcuuu

SEQ ID NO: 1451913 - RNA, 19 nt, Artificial Sequence
  Description of Artificial Sequence: Synthetic oligonucleotide
  Antisense strand to SEQ ID NO: 1451912
aaagcuauucagaacagaa

SEQ ID NO: 1451914 - RNA, 19 nt, Artificial Sequence
  Description of Artificial Sequence: Synthetic oligonucleotide
  Sense strand starting at position 536 of SEQ ID NO: 1243928
gucugauugacagaugugu

SEQ ID NO: 1451915 - RNA, 19 nt, Artificial Sequence
  Description of Artificial Sequence: Synthetic oligonucleotide
  Antisense strand to SEQ ID NO: 1451914
acacaucugucaaucagac

SEQ ID NO: 1451916 - RNA, 19 nt, Artificial Sequence
  Description of Artificial Sequence: Synthetic oligonucleotide
  Sense strand starting at position 617 of SEQ ID NO: 1243928
ggauauccucucugggaau

SEQ ID NO: 1451917 - RNA, 19 nt, Artificial Sequence
  Description of Artificial Sequence: Synthetic oligonucleotide
  Antisense strand to SEQ ID NO: 1451916
auucccagagaggauaucc

SEQ ID NO: 1451918 - RNA, 19 nt, Artificial Sequence
  Description of Artificial Sequence: Synthetic oligonucleotide
  Sense strand starting at position 637 of SEQ ID NO: 1243928
gugugugagacucaucuag

SEQ ID NO: 1451919 - RNA, 19 nt, Artificial Sequence
  Description of Artificial Sequence: Synthetic oligonucleotide
  Antisense strand to SEQ ID NO: 1451918
cuagaugagucucacacac

SEQ ID NO: 1451920 - RNA, 19 nt, Artificial Sequence
  Description of Artificial Sequence: Synthetic oligonucleotide
  Sense strand starting at position 664 of SEQ ID NO: 1243928
uagagagccuagucuaucu

SEQ ID NO: 1451921 - RNA, 19 nt, Artificial Sequence
  Description of Artificial Sequence: Synthetic oligonucleotide
  Antisense strand to SEQ ID NO: 1451920
agauagacuaggcucucua

SEQ ID NO: 1451922 - RNA, 19 nt, Artificial Sequence
  Description of Artificial Sequence: Synthetic oligonucleotide
  Sense strand starting at position 929 of SEQ ID NO: 1243928
cuuacugaguuacuaauga

SEQ ID NO: 1451923 - RNA, 19 nt, Artificial Sequence
  Description of Artificial Sequence: Synthetic oligonucleotide
  Antisense strand to SEQ ID NO: 1451922
ucauuaguaacucaguaag

SEQ ID NO: 1451924 - RNA, 19 nt, Artificial Sequence
  Description of Artificial Sequence: Synthetic oligonucleotide
  Sense strand starting at position 961 of SEQ ID NO: 1243928
ugggaucuaugcucuauua

SEQ ID NO: 1451925 - RNA, 19 nt, Artificial Sequence
  Description of Artificial Sequence: Synthetic oligonucleotide
  Antisense strand to SEQ ID NO: 1451924
uaauagagcauagauccca

SEQ ID NO: 1451926 - RNA, 19 nt, Artificial Sequence
  Description of Artificial Sequence: Synthetic oligonucleotide
  Sense strand starting at position 963 of SEQ ID NO: 1243928
ggaucuaugcucuauuaaa

SEQ ID NO: 1451927 - RNA, 19 nt, Artificial Sequence
  Description of Artificial Sequence: Synthetic oligonucleotide
  Antisense strand to SEQ ID NO: 1451926
uuuaauagagcauagaucc

SEQ ID NO: 1451928 - RNA, 19 nt, Artificial Sequence
  Description of Artificial Sequence: Synthetic oligonucleotide
  Sense strand starting at position 1033 of SEQ ID NO: 1243928
guacuaccauugucuggaa

SEQ ID NO: 1451929 - RNA, 19 nt, Artificial Sequence
  Description of Artificial Sequence: Synthetic oligonucleotide
  Antisense strand to SEQ ID NO: 1451928
uuccagacaaugguaguac

SEQ ID NO: 1451930 - RNA, 19 nt, Artificial Sequence
  Description of Artificial Sequence: Synthetic oligonucleotide
  Sense strand starting at position 1102 of SEQ ID NO: 1243928
cauagaugucaccagcaga

SEQ ID NO: 1451931 - RNA, 19 nt, Artificial Sequence
  Description of Artificial Sequence: Synthetic oligonucleotide
  Antisense strand to SEQ ID NO: 1451930
ucugcuggugacaucuaug

SEQ ID NO: 1451932 - RNA, 19 nt, Artificial Sequence
  Description of Artificial Sequence: Synthetic oligonucleotide
  Sense strand starting at position 1147 of SEQ ID NO: 1243928
aggaguugcaaaugcaaau

SEQ ID NO: 1451933 - RNA, 19 nt, Artificial Sequence
  Description of Artificial Sequence: Synthetic oligonucleotide
  Antisense strand to SEQ ID NO: 1451932
auuugcauuugcaacuccu

SEQ ID NO: 1451934 - RNA, 19 nt, Artificial Sequence
  Description of Artificial Sequence: Synthetic oligonucleotide
  Sense strand starting at position 1288 of SEQ ID NO: 1243928
auuacuaacccuugaguga

SEQ ID NO: 1451935 - RNA, 19 nt, Artificial Sequence
  Description of Artificial Sequence: Synthetic oligonucleotide
  Antisense strand to SEQ ID NO: 1451934
ucacucaaggguuaguaau

SEQ ID NO: 1451936 - RNA, 19 nt, Artificial Sequence
  Description of Artificial Sequence: Synthetic oligonucleotide
  Sense strand starting at position 1289 of SEQ ID NO: 1243928
uuacuaacccuugagugau

SEQ ID NO: 1451937 - RNA, 19 nt, Artificial Sequence
  Description of Artificial Sequence: Synthetic oligonucleotide
  Antisense strand to SEQ ID NO: 1451936
aucacucaaggguuaguaa

SEQ ID NO: 1451938 - RNA, 19 nt, Artificial Sequence
  Description of Artificial Sequence: Synthetic oligonucleotide
  Sense strand starting at position 1291 of SEQ ID NO: 1243928
acuaacccuugagugauau

SEQ ID NO: 1451939 - RNA, 19 nt, Artificial Sequence
  Description of Artificial Sequence: Synthetic oligonucleotide
  Antisense strand to SEQ ID NO: 1451938
auaucacucaaggguuagu

SEQ ID NO: 1451940 - RNA, 19 nt, Artificial Sequence
  Description of Artificial Sequence: Synthetic oligonucleotide
  Sense strand starting at position 1356 of SEQ ID NO: 1243928
ucguuuauuccucacaaug

SEQ ID NO: 1451941 - RNA, 19 nt, Artificial Sequence
  Description of Artificial Sequence: Synthetic oligonucleotide
  Antisense strand to SEQ ID NO: 1451940
cauugugaggaauaaacga

SEQ ID NO: 1451942 - RNA, 19 nt, Artificial Sequence
  Description of Artificial Sequence: Synthetic oligonucleotide
  Sense strand starting at position 1398 of SEQ ID NO: 1243928
uuauccucgccuuacagau

SEQ ID NO: 1451943 - RNA, 19 nt, Artificial Sequence
  Description of Artificial Sequence: Synthetic oligonucleotide
  Antisense strand to SEQ ID NO: 1451942
aucuguaaggcgaggauaa

SEQ ID NO: 1451944 - RNA, 19 nt, Artificial Sequence
  Description of Artificial Sequence: Synthetic oligonucleotide
  Sense strand starting at position 1402 of SEQ ID NO: 1243928
ccucgccuuacagaugaga

SEQ ID NO: 1451945 - RNA, 19 nt, Artificial Sequence
  Description of Artificial Sequence: Synthetic oligonucleotide
  Antisense strand to SEQ ID NO: 1451944
ucucaucuguaaggcgagg

SEQ ID NO: 1451946 - RNA, 19 nt, Artificial Sequence
  Description of Artificial Sequence: Synthetic oligonucleotide
  Sense strand starting at position 1404 of SEQ ID NO: 1243928
ucgccuuacagaugagaag

SEQ ID NO: 1451947 - RNA, 19 nt, Artificial Sequence
  Description of Artificial Sequence: Synthetic oligonucleotide
  Antisense strand to SEQ ID NO: 1451946
cuucucaucuguaaggcga

SEQ ID NO: 1451948 - RNA, 19 nt, Artificial Sequence
  Description of Artificial Sequence: Synthetic oligonucleotide
  Sense strand starting at position 1405 of SEQ ID NO: 1243928
cgccuuacagaugagaagu

SEQ ID NO: 1451949 - RNA, 19 nt, Artificial Sequence
  Description of Artificial Sequence: Synthetic oligonucleotide
  Antisense strand to SEQ ID NO: 1451948
acuucucaucuguaaggcg

SEQ ID NO: 1451950 - RNA, 19 nt, Artificial Sequence
  Description of Artificial Sequence: Synthetic oligonucleotide
  Sense strand starting at position 1422 of SEQ ID NO: 1243928
guuuaaggcagagaaguga

SEQ ID NO: 1451951 - RNA, 19 nt, Artificial Sequence
  Description of Artificial Sequence: Synthetic oligonucleotide
  Antisense strand to SEQ ID NO: 1451950
ucacuucucugccuuaaac

SEQ ID NO: 1451952 - RNA, 19 nt, Artificial Sequence
  Description of Artificial Sequence: Synthetic oligonucleotide
  Sense strand starting at position 1670 of SEQ ID NO: 1243928
augggaaacuugcugguua

SEQ ID NO: 1451953 - RNA, 19 nt, Artificial Sequence
  Description of Artificial Sequence: Synthetic oligonucleotide
  Antisense strand to SEQ ID NO: 1451952
uaaccagcaaguuucccau

SEQ ID NO: 1451954 - RNA, 19 nt, Artificial Sequence
  Description of Artificial Sequence: Synthetic oligonucleotide
  Sense strand starting at position 1672 of SEQ ID NO: 1243928
gggaaacuugcugguuaau

SEQ ID NO: 1451955 - RNA, 19 nt, Artificial Sequence
  Description of Artificial Sequence: Synthetic oligonucleotide
  Antisense strand to SEQ ID NO: 1451954
auuaaccagcaaguuuccc

SEQ ID NO: 1451956 - RNA, 19 nt, Artificial Sequence
  Description of Artificial Sequence: Synthetic oligonucleotide
  Sense strand starting at position 1674 of SEQ ID NO: 1243928
gaaacuugcugguuaauga

SEQ ID NO: 1451957 - RNA, 19 nt, Artificial Sequence
  Description of Artificial Sequence: Synthetic oligonucleotide
  Antisense strand to SEQ ID NO: 1451956
ucauuaaccagcaaguuuc

SEQ ID NO: 1451958 - RNA, 19 nt, Artificial Sequence
  Description of Artificial Sequence: Synthetic oligonucleotide
  Sense strand starting at position 1906 of SEQ ID NO: 1243928
uggacaccucuugguaaau

SEQ ID NO: 1451959 - RNA, 19 nt, Artificial Sequence
  Description of Artificial Sequence: Synthetic oligonucleotide
  Antisense strand to SEQ ID NO: 1451958
auuuaccaagaggugucca

SEQ ID NO: 1451960 - RNA, 19 nt, Artificial Sequence
  Description of Artificial Sequence: Synthetic oligonucleotide
  Sense strand starting at position 1907 of SEQ ID NO: 1243928
ggacaccucuugguaaaug

SEQ ID NO: 1451961 - RNA, 19 nt, Artificial Sequence
  Description of Artificial Sequence: Synthetic oligonucleotide
  Antisense strand to SEQ ID NO: 1451960
cauuuaccaagaggugucc

SEQ ID NO: 1451962 - RNA, 19 nt, Artificial Sequence
  Description of Artificial Sequence: Synthetic oligonucleotide
  Sense strand starting at position 2016 of SEQ ID NO: 1243928
gggauuggcuuugcaaaga

SEQ ID NO: 1451963 - RNA, 19 nt, Artificial Sequence
  Description of Artificial Sequence: Synthetic oligonucleotide
  Antisense strand to SEQ ID NO: 1451962
ucuuugcaaagccaauccc

SEQ ID NO: 1451964 - RNA, 19 nt, Artificial Sequence
  Description of Artificial Sequence: Synthetic oligonucleotide
  Sense strand starting at position 2151 of SEQ ID NO: 1243928
auaggaaguuacucacagu

SEQ ID NO: 1451965 - RNA, 19 nt, Artificial Sequence
  Description of Artificial Sequence: Synthetic oligonucleotide
  Antisense strand to SEQ ID NO: 1451964
acugugaguaacuuccuau

SEQ ID NO: 1451966 - RNA, 19 nt, Artificial Sequence
  Description of Artificial Sequence: Synthetic oligonucleotide
  Sense strand starting at position 2208 of SEQ ID NO: 1243928
cccagugguuaauuacaaa

SEQ ID NO: 1451967 - RNA, 19 nt, Artificial Sequence
  Description of Artificial Sequence: Synthetic oligonucleotide
  Antisense strand to SEQ ID NO: 1451966
uuuguaauuaaccacuggg

SEQ ID NO: 1451968 - RNA, 19 nt, Artificial Sequence
  Description of Artificial Sequence: Synthetic oligonucleotide
  Sense strand starting at position 2323 of SEQ ID NO: 1243928
aaaggcugucaggguaaau

SEQ ID NO: 1451969 - RNA, 19 nt, Artificial Sequence
  Description of Artificial Sequence: Synthetic oligonucleotide
  Antisense strand to SEQ ID NO: 1451968
auuuacccugacagccuuu

SEQ ID NO: 1451970 - RNA, 19 nt, Artificial Sequence
  Description of Artificial Sequence: Synthetic oligonucleotide
  Sense strand starting at position 2579 of SEQ ID NO: 1243928
uuugcuuucuaauuggaga

SEQ ID NO: 1451971 - RNA, 19 nt, Artificial Sequence
  Description of Artificial Sequence: Synthetic oligonucleotide
  Antisense strand to SEQ ID NO: 1451970
ucuccaauuagaaagcaaa

SEQ ID NO: 1451972 - RNA, 19 nt, Artificial Sequence
  Description of Artificial Sequence: Synthetic oligonucleotide
  Sense strand starting at position 2581 of SEQ ID NO: 1243928
ugcuuucuaauuggagaug

SEQ ID NO: 1451973 - RNA, 19 nt, Artificial Sequence
  Description of Artificial Sequence: Synthetic oligonucleotide
  Antisense strand to SEQ ID NO: 1451972
caucuccaauuagaaagca

SEQ ID NO: 1451974 - RNA, 19 nt, Artificial Sequence
  Description of Artificial Sequence: Synthetic oligonucleotide
  Sense strand starting at position 2664 of SEQ ID NO: 1243928
caggaaauaucagaaagag

SEQ ID NO: 1451975 - RNA, 19 nt, Artificial Sequence
  Description of Artificial Sequence: Synthetic oligonucleotide
  Antisense strand to SEQ ID NO: 1451974
cucuuucugauauuuccug

SEQ ID NO: 1451976 - RNA, 19 nt, Artificial Sequence
  Description of Artificial Sequence: Synthetic oligonucleotide
  Sense strand starting at position 2824 of SEQ ID NO: 1243928
ucuuuagcgguugaggaua

SEQ ID NO: 1451977 - RNA, 19 nt, Artificial Sequence
  Description of Artificial Sequence: Synthetic oligonucleotide
  Antisense strand to SEQ ID NO: 1451976
uauccucaaccgcuaaaga

SEQ ID NO: 1451978 - RNA, 19 nt, Artificial Sequence
  Description of Artificial Sequence: Synthetic oligonucleotide
  Sense strand starting at position 2971 of SEQ ID NO: 1243928
guccuaauuugugcgguaa

SEQ ID NO: 1451979 - RNA, 19 nt, Artificial Sequence
  Description of Artificial Sequence: Synthetic oligonucleotide
  Antisense strand to SEQ ID NO: 1451978
uuaccgcacaaauuaggac

SEQ ID NO: 1451980 - RNA, 19 nt, Artificial Sequence
  Description of Artificial Sequence: Synthetic oligonucleotide
  Sense strand starting at position 2972 of SEQ ID NO: 1243928
uccuaauuugugcgguaaa

SEQ ID NO: 1451981 - RNA, 19 nt, Artificial Sequence
  Description of Artificial Sequence: Synthetic oligonucleotide
  Antisense strand to SEQ ID NO: 1451980
uuuaccgcacaaauuagga

SEQ ID NO: 1451982 - RNA, 19 nt, Artificial Sequence
  Description of Artificial Sequence: Synthetic oligonucleotide
  Sense strand starting at position 3373 of SEQ ID NO: 1243928
gaggguagcuacuuccuaa

SEQ ID NO: 1451983 - RNA, 19 nt, Artificial Sequence
  Description of Artificial Sequence: Synthetic oligonucleotide
  Antisense strand to SEQ ID NO: 1451982
uuaggaaguagcuacccuc

SEQ ID NO: 1451984 - RNA, 19 nt, Artificial Sequence
  Description of Artificial Sequence: Synthetic oligonucleotide
  Sense strand starting at position 3845 of SEQ ID NO: 1243928
uuuagugauguggagucau

SEQ ID NO: 1451985 - RNA, 19 nt, Artificial Sequence
  Description of Artificial Sequence: Synthetic oligonucleotide
  Antisense strand to SEQ ID NO: 1451984
augacuccacaucacuaaa

SEQ ID NO: 1451986 - RNA, 19 nt, Artificial Sequence
  Description of Artificial Sequence: Synthetic oligonucleotide
  Sense strand starting at position 3853 of SEQ ID NO: 1243928
uguggagucauuggugaca

SEQ ID NO: 1451987 - RNA, 19 nt, Artificial Sequence
  Description of Artificial Sequence: Synthetic oligonucleotide
  Antisense strand to SEQ ID NO: 1451986
ugucaccaaugacuccaca

SEQ ID NO: 1451988 - RNA, 19 nt, Artificial Sequence
  Description of Artificial Sequence: Synthetic oligonucleotide
  Sense strand starting at position 70 of SEQ ID NO: 1243929
aauggacucuugguuugaa

SEQ ID NO: 1451989 - RNA, 19 nt, Artificial Sequence
  Description of Artificial Sequence: Synthetic oligonucleotide
  Antisense strand to SEQ ID NO: 1451988
uucaaaccaagaguccauu

SEQ ID NO: 1451990 - RNA, 19 nt, Artificial Sequence
  Description of Artificial Sequence: Synthetic oligonucleotide
  Sense strand starting at position 71 of SEQ ID NO: 1243929
auggacucuugguuugaaa

SEQ ID NO: 1451991 - RNA, 19 nt, Artificial Sequence
  Description of Artificial Sequence: Synthetic oligonucleotide
  Antisense strand to SEQ ID NO: 1451990
uuucaaaccaagaguccau

SEQ ID NO: 1451992 - RNA, 19 nt, Artificial Sequence
  Description of Artificial Sequence: Synthetic oligonucleotide
  Sense strand starting at position 521 of SEQ ID NO: 1243929
cgaccagagacauguuaag

SEQ ID NO: 1451993 - RNA, 19 nt, Artificial Sequence
  Description of Artificial Sequence: Synthetic oligonucleotide
  Antisense strand to SEQ ID NO: 1451992
cuuaacaugucucuggucg

SEQ ID NO: 1451994 - RNA, 19 nt, Artificial Sequence
  Description of Artificial Sequence: Synthetic oligonucleotide
  Sense strand starting at position 547 of SEQ ID NO: 1243929
cccacucuggccgggaaua

SEQ ID NO: 1451995 - RNA, 19 nt, Artificial Sequence
  Description of Artificial Sequence: Synthetic oligonucleotide
  Antisense strand to SEQ ID NO: 1451994
uauucccggccagaguggg

SEQ ID NO: 1451996 - RNA, 19 nt, Artificial Sequence
  Description of Artificial Sequence: Synthetic oligonucleotide
  Sense strand starting at position 548 of SEQ ID NO: 1243929
ccacucuggccgggaauau

SEQ ID NO: 1451997 - RNA, 19 nt, Artificial Sequence
  Description of Artificial Sequence: Synthetic oligonucleotide
  Antisense strand to SEQ ID NO: 1451996
auauucccggccagagugg

SEQ ID NO: 1451998 - RNA, 19 nt, Artificial Sequence
  Description of Artificial Sequence: Synthetic oligonucleotide
  Sense strand starting at position 561 of SEQ ID NO: 1243929
gaauaugccagccgggaau

SEQ ID NO: 1451999 - RNA, 19 nt, Artificial Sequence
  Description of Artificial Sequence: Synthetic oligonucleotide
  Antisense strand to SEQ ID NO: 1451998
auucccggcuggcauauuc

SEQ ID NO: 1452000 - RNA, 19 nt, Artificial Sequence
  Description of Artificial Sequence: Synthetic oligonucleotide
  Sense strand starting at position 754 of SEQ ID NO: 1243929
aagggcuccugaccgaaau

SEQ ID NO: 1452001 - RNA, 19 nt, Artificial Sequence
  Description of Artificial Sequence: Synthetic oligonucleotide
  Antisense strand to SEQ ID NO: 1452000
auuucggucaggagcccuu

SEQ ID NO: 1452002 - RNA, 19 nt, Artificial Sequence
  Description of Artificial Sequence: Synthetic oligonucleotide
  Sense strand starting at position 908 of SEQ ID NO: 1243929
ccaguauaaccggacuuga

SEQ ID NO: 1452003 - RNA, 19 nt, Artificial Sequence
  Description of Artificial Sequence: Synthetic oligonucleotide
  Antisense strand to SEQ ID NO: 1452002
ucaaguccgguuauacugg

SEQ ID NO: 1452004 - RNA, 19 nt, Artificial Sequence
  Description of Artificial Sequence: Synthetic oligonucleotide
  Sense strand starting at position 1395 of SEQ ID NO: 1243929
gguauucagguuuguugaa

SEQ ID NO: 1452005 - RNA, 19 nt, Artificial Sequence
  Description of Artificial Sequence: Synthetic oligonucleotide
  Antisense strand to SEQ ID NO: 1452004
uucaacaaaccugaauacc

SEQ ID NO: 1452006 - RNA, 19 nt, Artificial Sequence
  Description of Artificial Sequence: Synthetic oligonucleotide
  Sense strand starting at position 1429 of SEQ ID NO: 1243929
gauugagaggcauguaaga

SEQ ID NO: 1452007 - RNA, 19 nt, Artificial Sequence
  Description of Artificial Sequence: Synthetic oligonucleotide
  Antisense strand to SEQ ID NO: 1452006
ucuuacaugccucucaauc

SEQ ID NO: 1452008 - RNA, 19 nt, Artificial Sequence
  Description of Artificial Sequence: Synthetic oligonucleotide
  Sense strand starting at position 2548 of SEQ ID NO: 1243929
cgcaaacgugcauugucua

SEQ ID NO: 1452009 - RNA, 19 nt, Artificial Sequence
  Description of Artificial Sequence: Synthetic oligonucleotide
  Antisense strand to SEQ ID NO: 1452008
uagacaaugcacguuugcg

SEQ ID NO: 1452010 - RNA, 19 nt, Artificial Sequence
  Description of Artificial Sequence: Synthetic oligonucleotide
  Sense strand starting at position 2580 of SEQ ID NO: 1243929
cuuauaaguuaugugguau

SEQ ID NO: 1452011 - RNA, 19 nt, Artificial Sequence
  Description of Artificial Sequence: Synthetic oligonucleotide
  Antisense strand to SEQ ID NO: 1452010
auaccacauaacuuauaag

SEQ ID NO: 1452012 - RNA, 19 nt, Artificial Sequence
  Description of Artificial Sequence: Synthetic oligonucleotide
  Sense strand starting at position 2594 of SEQ ID NO: 1243929
gguauauacugguuauuag

SEQ ID NO: 1452013 - RNA, 19 nt, Artificial Sequence
  Description of Artificial Sequence: Synthetic oligonucleotide
  Antisense strand to SEQ ID NO: 1452012
cuaauaaccaguauauacc

SEQ ID NO: 1452014 - RNA, 19 nt, Artificial Sequence
  Description of Artificial Sequence: Synthetic oligonucleotide
  Sense strand starting at position 2595 of SEQ ID NO: 1243929
guauauacugguuauuaga

SEQ ID NO: 1452015 - RNA, 19 nt, Artificial Sequence
  Description of Artificial Sequence: Synthetic oligonucleotide
  Antisense strand to SEQ ID NO: 1452014
ucuaauaaccaguauauac

SEQ ID NO: 1452016 - RNA, 19 nt, Artificial Sequence
  Description of Artificial Sequence: Synthetic oligonucleotide
  Sense strand starting at position 2632 of SEQ ID NO: 1243929
uuaagaaauugagucaucu

SEQ ID NO: 1452017 - RNA, 19 nt, Artificial Sequence
  Description of Artificial Sequence: Synthetic oligonucleotide
  Antisense strand to SEQ ID NO: 1452016
agaugacucaauuucuuaa

SEQ ID NO: 1452018 - RNA, 19 nt, Artificial Sequence
  Description of Artificial Sequence: Synthetic oligonucleotide
  Sense strand starting at position 2636 of SEQ ID NO: 1243929
gaaauugagucaucuuagu

SEQ ID NO: 1452019 - RNA, 19 nt, Artificial Sequence
  Description of Artificial Sequence: Synthetic oligonucleotide
  Antisense strand to SEQ ID NO: 1452018
acuaagaugacucaauuuc

SEQ ID NO: 1452020 - RNA, 19 nt, Artificial Sequence
  Description of Artificial Sequence: Synthetic oligonucleotide
  Sense strand starting at position 2641 of SEQ ID NO: 1243929
ugagucaucuuagucauuc

SEQ ID NO: 1452021 - RNA, 19 nt, Artificial Sequence
  Description of Artificial Sequence: Synthetic oligonucleotide
  Antisense strand to SEQ ID NO: 1452020
gaaugacuaagaugacuca

SEQ ID NO: 1452022 - RNA, 19 nt, Artificial Sequence
  Description of Artificial Sequence: Synthetic oligonucleotide
  Sense strand starting at position 2684 of SEQ ID NO: 1243929
ugaucaucuuguguuacag

SEQ ID NO: 1452023 - RNA, 19 nt, Artificial Sequence
  Description of Artificial Sequence: Synthetic oligonucleotide
  Antisense strand to SEQ ID NO: 1452022
cuguaacacaagaugauca

SEQ ID NO: 1452024 - RNA, 19 nt, Artificial Sequence
  Description of Artificial Sequence: Synthetic oligonucleotide
  Sense strand starting at position 2765 of SEQ ID NO: 1243929
ggucgccuccaguaauaca

SEQ ID NO: 1452025 - RNA, 19 nt, Artificial Sequence
  Description of Artificial Sequence: Synthetic oligonucleotide
  Antisense strand to SEQ ID NO: 1452024
uguauuacuggaggcgacc

SEQ ID NO: 1452026 - RNA, 19 nt, Artificial Sequence
  Description of Artificial Sequence: Synthetic oligonucleotide
  Sense strand starting at position 2935 of SEQ ID NO: 1243929
guaggauuauaacuaguuc

SEQ ID NO: 1452027 - RNA, 19 nt, Artificial Sequence
  Description of Artificial Sequence: Synthetic oligonucleotide
  Antisense strand to SEQ ID NO: 1452026
gaacuaguuauaauccuac

SEQ ID NO: 1452028 - RNA, 19 nt, Artificial Sequence
  Description of Artificial Sequence: Synthetic oligonucleotide
  Sense strand starting at position 3020 of SEQ ID NO: 1243929
uugcucuuacaggaaaugu

SEQ ID NO: 1452029 - RNA, 19 nt, Artificial Sequence
  Description of Artificial Sequence: Synthetic oligonucleotide
  Antisense strand to SEQ ID NO: 1452028
acauuuccuguaagagcaa

SEQ ID NO: 1452030 - RNA, 19 nt, Artificial Sequence
  Description of Artificial Sequence: Synthetic oligonucleotide
  Sense strand starting at position 3047 of SEQ ID NO: 1243929
gagaauacaccguaagcuu

SEQ ID NO: 1452031 - RNA, 19 nt, Artificial Sequence
  Description of Artificial Sequence: Synthetic oligonucleotide
  Antisense strand to SEQ ID NO: 1452030
aagcuuacgguguauucuc

SEQ ID NO: 1452032 - RNA, 19 nt, Artificial Sequence
  Description of Artificial Sequence: Synthetic oligonucleotide
  Sense strand starting at position 3093 of SEQ ID NO: 1243929
gcucguuuccaugaaacuc

SEQ ID NO: 1452033 - RNA, 19 nt, Artificial Sequence
  Description of Artificial Sequence: Synthetic oligonucleotide
  Antisense strand to SEQ ID NO: 1452032
gaguuucauggaaacgagc

SEQ ID NO: 1452034 - RNA, 19 nt, Artificial Sequence
  Description of Artificial Sequence: Synthetic oligonucleotide
  Sense strand starting at position 3133 of SEQ ID NO: 1243929
cccgugauucgugagagag

SEQ ID NO: 1452035 - RNA, 19 nt, Artificial Sequence
  Description of Artificial Sequence: Synthetic oligonucleotide
  Antisense strand to SEQ ID NO: 1452034
cucucucacgaaucacggg

SEQ ID NO: 1452036 - RNA, 19 nt, Artificial Sequence
  Description of Artificial Sequence: Synthetic oligonucleotide
  Sense strand starting at position 3134 of SEQ ID NO: 1243929
ccgugauucgugagagagc

SEQ ID NO: 1452037 - RNA, 19 nt, Artificial Sequence
  Description of Artificial Sequence: Synthetic oligonucleotide
  Antisense strand to SEQ ID NO: 1452036
gcucucucacgaaucacgg

SEQ ID NO: 1452038 - RNA, 19 nt, Artificial Sequence
  Description of Artificial Sequence: Synthetic oligonucleotide
  Sense strand starting at position 3141 of SEQ ID NO: 1243929
ucgugagagagcuagucua

SEQ ID NO: 1452039 - RNA, 19 nt, Artificial Sequence
  Description of Artificial Sequence: Synthetic oligonucleotide
  Antisense strand to SEQ ID NO: 1452038
uagacuagcucucucacga

SEQ ID NO: 1452040 - RNA, 19 nt, Artificial Sequence
  Description of Artificial Sequence: Synthetic oligonucleotide
  Sense strand starting at position 3260 of SEQ ID NO: 1243929
agcagcagauuuguguuua

SEQ ID NO: 1452041 - RNA, 19 nt, Artificial Sequence
  Description of Artificial Sequence: Synthetic oligonucleotide
  Antisense strand to SEQ ID NO: 1452040
uaaacacaaaucugcugcu

SEQ ID NO: 1452042 - RNA, 19 nt, Artificial Sequence
  Description of Artificial Sequence: Synthetic oligonucleotide
  Sense strand starting at position 3412 of SEQ ID NO: 1243929
ugcuuuccagaguaacuua

SEQ ID NO: 1452043 - RNA, 19 nt, Artificial Sequence
  Description of Artificial Sequence: Synthetic oligonucleotide
  Antisense strand to SEQ ID NO: 1452042
uaaguuacucuggaaagca

SEQ ID NO: 1452044 - RNA, 19 nt, Artificial Sequence
  Description of Artificial Sequence: Synthetic oligonucleotide
  Sense strand starting at position 3436 of SEQ ID NO: 1243929
ggaguccgauguuccaaau

SEQ ID NO: 1452045 - RNA, 19 nt, Artificial Sequence
  Description of Artificial Sequence: Synthetic oligonucleotide
  Antisense strand to SEQ ID NO: 1452044
auuuggaacaucggacucc

SEQ ID NO: 1452046 - RNA, 19 nt, Artificial Sequence
  Description of Artificial Sequence: Synthetic oligonucleotide
  Sense strand starting at position 3473 of SEQ ID NO: 1243929
aauguaaauggguggacuu

SEQ ID NO: 1452047 - RNA, 19 nt, Artificial Sequence
  Description of Artificial Sequence: Synthetic oligonucleotide
  Antisense strand to SEQ ID NO: 1452046
aaguccacccauuuacauu

SEQ ID NO: 1452048 - RNA, 19 nt, Artificial Sequence
  Description of Artificial Sequence: Synthetic oligonucleotide
  Sense strand starting at position 3474 of SEQ ID NO: 1243929
auguaaauggguggacuua

SEQ ID NO: 1452049 - RNA, 19 nt, Artificial Sequence
  Description of Artificial Sequence: Synthetic oligonucleotide
  Antisense strand to SEQ ID NO: 1452048
uaaguccacccauuuacau

SEQ ID NO: 1452050 - RNA, 19 nt, Artificial Sequence
  Description of Artificial Sequence: Synthetic oligonucleotide
  Sense strand starting at position 3475 of SEQ ID NO: 1243929
uguaaauggguggacuuau

SEQ ID NO: 1452051 - RNA, 19 nt, Artificial Sequence
  Description of Artificial Sequence: Synthetic oligonucleotide
  Antisense strand to SEQ ID NO: 1452050
auaaguccacccauuuaca

SEQ ID NO: 1452052 - RNA, 19 nt, Artificial Sequence
  Description of Artificial Sequence: Synthetic oligonucleotide
  Sense strand starting at position 3486 of SEQ ID NO: 1243929
ggacuuauuucuugaugga

SEQ ID NO: 1452053 - RNA, 19 nt, Artificial Sequence
  Description of Artificial Sequence: Synthetic oligonucleotide
  Antisense strand to SEQ ID NO: 1452052
uccaucaagaaauaagucc

SEQ ID NO: 1452054 - RNA, 19 nt, Artificial Sequence
  Description of Artificial Sequence: Synthetic oligonucleotide
  Sense strand starting at position 3550 of SEQ ID NO: 1243929
ggcugucauguagaccuau

SEQ ID NO: 1452055 - RNA, 19 nt, Artificial Sequence
  Description of Artificial Sequence: Synthetic oligonucleotide
  Antisense strand to SEQ ID NO: 1452054
auaggucuacaugacagcc

SEQ ID NO: 1452056 - RNA, 19 nt, Artificial Sequence
  Description of Artificial Sequence: Synthetic oligonucleotide
  Sense strand starting at position 3691 of SEQ ID NO: 1243929
gguaacaaaucuguaggua

SEQ ID NO: 1452057 - RNA, 19 nt, Artificial Sequence
  Description of Artificial Sequence: Synthetic oligonucleotide
  Antisense strand to SEQ ID NO: 1452056
uaccuacagauuuguuacc

SEQ ID NO: 1452058 - RNA, 19 nt, Artificial Sequence
  Description of Artificial Sequence: Synthetic oligonucleotide
  Sense strand starting at position 3692 of SEQ ID NO: 1243929
guaacaaaucuguagguaa

SEQ ID NO: 1452059 - RNA, 19 nt, Artificial Sequence
  Description of Artificial Sequence: Synthetic oligonucleotide
  Antisense strand to SEQ ID NO: 1452058
uuaccuacagauuuguuac

SEQ ID NO: 1452060 - RNA, 19 nt, Artificial Sequence
  Description of Artificial Sequence: Synthetic oligonucleotide
  Sense strand starting at position 3703 of SEQ ID NO: 1243929
guagguaacucauccauaa

SEQ ID NO: 1452061 - RNA, 19 nt, Artificial Sequence
  Description of Artificial Sequence: Synthetic oligonucleotide
  Antisense strand to SEQ ID NO: 1452060
uuauggaugaguuaccuac

SEQ ID NO: 1452062 - RNA, 19 nt, Artificial Sequence
  Description of Artificial Sequence: Synthetic oligonucleotide
  Sense strand starting at position 3849 of SEQ ID NO: 1243929
gcuguuucuccugaagaag

SEQ ID NO: 1452063 - RNA, 19 nt, Artificial Sequence
  Description of Artificial Sequence: Synthetic oligonucleotide
  Antisense strand to SEQ ID NO: 1452062
cuucuucaggagaaacagc

SEQ ID NO: 1452064 - RNA, 19 nt, Artificial Sequence
  Description of Artificial Sequence: Synthetic oligonucleotide
  Sense strand starting at position 3923 of SEQ ID NO: 1243929
agagaauauccugguucuu

SEQ ID NO: 1452065 - RNA, 19 nt, Artificial Sequence
  Description of Artificial Sequence: Synthetic oligonucleotide
  Antisense strand to SEQ ID NO: 1452064
aagaaccaggauauucucu

SEQ ID NO: 1452066 - RNA, 19 nt, Artificial Sequence
  Description of Artificial Sequence: Synthetic oligonucleotide
  Sense strand starting at position 3977 of SEQ ID NO: 1243929
uuaacuugucugggauggu

SEQ ID NO: 1452067 - RNA, 19 nt, Artificial Sequence
  Description of Artificial Sequence: Synthetic oligonucleotide
  Antisense strand to SEQ ID NO: 1452066
accaucccagacaaguuaa

SEQ ID NO: 1452068 - RNA, 19 nt, Artificial Sequence
  Description of Artificial Sequence: Synthetic oligonucleotide
  Sense strand starting at position 188 of SEQ ID NO: 1243930
guggaacuucaguaugagu

SEQ ID NO: 1452069 - RNA, 19 nt, Artificial Sequence
  Description of Artificial Sequence: Synthetic oligonucleotide
  Antisense strand to SEQ ID NO: 1452068
acucauacugaaguuccac

SEQ ID NO: 1452070 - RNA, 19 nt, Artificial Sequence
  Description of Artificial Sequence: Synthetic oligonucleotide
  Sense strand starting at position 298 of SEQ ID NO: 1243930
guaauuuguuaguuggcuu

SEQ ID NO: 1452071 - RNA, 19 nt, Artificial Sequence
  Description of Artificial Sequence: Synthetic oligonucleotide
  Antisense strand to SEQ ID NO: 1452070
aagccaacuaacaaauuac

SEQ ID NO: 1452072 - RNA, 19 nt, Artificial Sequence
  Description of Artificial Sequence: Synthetic oligonucleotide
  Sense strand starting at position 346 of SEQ ID NO: 1243930
accugauaaugcucuagag

SEQ ID NO: 1452073 - RNA, 19 nt, Artificial Sequence
  Description of Artificial Sequence: Synthetic oligonucleotide
  Antisense strand to SEQ ID NO: 1452072
cucuagagcauuaucaggu

SEQ ID NO: 1452074 - RNA, 19 nt, Artificial Sequence
  Description of Artificial Sequence: Synthetic oligonucleotide
  Sense strand starting at position 432 of SEQ ID NO: 1243930
guauccaaugguuaauagu

SEQ ID NO: 1452075 - RNA, 19 nt, Artificial Sequence
  Description of Artificial Sequence: Synthetic oligonucleotide
  Antisense strand to SEQ ID NO: 1452074
acuauuaaccauuggauac

SEQ ID NO: 1452076 - RNA, 19 nt, Artificial Sequence
  Description of Artificial Sequence: Synthetic oligonucleotide
  Sense strand starting at position 448 of SEQ ID NO: 1243930
agucuacugcuagacaacu

SEQ ID NO: 1452077 - RNA, 19 nt, Artificial Sequence
  Description of Artificial Sequence: Synthetic oligonucleotide
  Antisense strand to SEQ ID NO: 1452076
aguugucuagcaguagacu

SEQ ID NO: 1452078 - RNA, 19 nt, Artificial Sequence
  Description of Artificial Sequence: Synthetic oligonucleotide
  Sense strand starting at position 634 of SEQ ID NO: 1243930
gcaaauacugggcaaucau

SEQ ID NO: 1452079 - RNA, 19 nt, Artificial Sequence
  Description of Artificial Sequence: Synthetic oligonucleotide
  Antisense strand to SEQ ID NO: 1452078
augauugcccaguauuugc

SEQ ID NO: 1452080 - RNA, 19 nt, Artificial Sequence
  Description of Artificial Sequence: Synthetic oligonucleotide
  Sense strand starting at position 1003 of SEQ ID NO: 1243930
cgggaucauccaugacuuc

SEQ ID NO: 1452081 - RNA, 19 nt, Artificial Sequence
  Description of Artificial Sequence: Synthetic oligonucleotide
  Antisense strand to SEQ ID NO: 1452080
gaagucauggaugaucccg

SEQ ID NO: 1452082 - RNA, 19 nt, Artificial Sequence
  Description of Artificial Sequence: Synthetic oligonucleotide
  Sense strand starting at position 1010 of SEQ ID NO: 1243930
auccaugacuucucaguua

SEQ ID NO: 1452083 - RNA, 19 nt, Artificial Sequence
  Description of Artificial Sequence: Synthetic oligonucleotide
  Antisense strand to SEQ ID NO: 1452082
uaacugagaagucauggau

SEQ ID NO: 1452084 - RNA, 19 nt, Artificial Sequence
  Description of Artificial Sequence: Synthetic oligonucleotide
  Sense strand starting at position 1024 of SEQ ID NO: 1243930
aguuaaaucgcucauguaa

SEQ ID NO: 1452085 - RNA, 19 nt, Artificial Sequence
  Description of Artificial Sequence: Synthetic oligonucleotide
  Antisense strand to SEQ ID NO: 1452084
uuacaugagcgauuuaacu

SEQ ID NO: 1452086 - RNA, 19 nt, Artificial Sequence
  Description of Artificial Sequence: Synthetic oligonucleotide
  Sense strand starting at position 1039 of SEQ ID NO: 1243930
guaagugagcguuaaugag

SEQ ID NO: 1452087 - RNA, 19 nt, Artificial Sequence
  Description of Artificial Sequence: Synthetic oligonucleotide
  Antisense strand to SEQ ID NO: 1452086
cucauuaacgcucacuuac

SEQ ID NO: 1452088 - RNA, 19 nt, Artificial Sequence
  Description of Artificial Sequence: Synthetic oligonucleotide
  Sense strand starting at position 1048 of SEQ ID NO: 1243930
cguuaaugagcgcaauuug

SEQ ID NO: 1452089 - RNA, 19 nt, Artificial Sequence
  Description of Artificial Sequence: Synthetic oligonucleotide
  Antisense strand to SEQ ID NO: 1452088
caaauugcgcucauuaacg

SEQ ID NO: 1452090 - RNA, 19 nt, Artificial Sequence
  Description of Artificial Sequence: Synthetic oligonucleotide
  Sense strand starting at position 1059 of SEQ ID NO: 1243930
gcaauuuguaagugagggu

SEQ ID NO: 1452091 - RNA, 19 nt, Artificial Sequence
  Description of Artificial Sequence: Synthetic oligonucleotide
  Antisense strand to SEQ ID NO: 1452090
acccucacuuacaaauugc

SEQ ID NO: 1452092 - RNA, 19 nt, Artificial Sequence
  Description of Artificial Sequence: Synthetic oligonucleotide
  Sense strand starting at position 1063 of SEQ ID NO: 1243930
uuuguaagugaggguuaau

SEQ ID NO: 1452093 - RNA, 19 nt, Artificial Sequence
  Description of Artificial Sequence: Synthetic oligonucleotide
  Antisense strand to SEQ ID NO: 1452092
auuaacccucacuuacaaa

SEQ ID NO: 1452094 - RNA, 19 nt, Artificial Sequence
  Description of Artificial Sequence: Synthetic oligonucleotide
  Sense strand starting at position 1072 of SEQ ID NO: 1243930
gaggguuaaugagcccaga

SEQ ID NO: 1452095 - RNA, 19 nt, Artificial Sequence
  Description of Artificial Sequence: Synthetic oligonucleotide
  Antisense strand to SEQ ID NO: 1452094
ucugggcucauuaacccuc

SEQ ID NO: 1452096 - RNA, 19 nt, Artificial Sequence
  Description of Artificial Sequence: Synthetic oligonucleotide
  Sense strand starting at position 1101 of SEQ ID NO: 1243930
ggugaaauccagcaacuug

SEQ ID NO: 1452097 - RNA, 19 nt, Artificial Sequence
  Description of Artificial Sequence: Synthetic oligonucleotide
  Antisense strand to SEQ ID NO: 1452096
caaguugcuggauuucacc

SEQ ID NO: 1452098 - RNA, 19 nt, Artificial Sequence
  Description of Artificial Sequence: Synthetic oligonucleotide
  Sense strand starting at position 1157 of SEQ ID NO: 1243930
gcaaguauagcucaaggca

SEQ ID NO: 1452099 - RNA, 19 nt, Artificial Sequence
  Description of Artificial Sequence: Synthetic oligonucleotide
  Antisense strand to SEQ ID NO: 1452098
ugccuugagcuauacuugc

SEQ ID NO: 1452100 - RNA, 19 nt, Artificial Sequence
  Description of Artificial Sequence: Synthetic oligonucleotide
  Sense strand starting at position 1355 of SEQ ID NO: 1243930
guggguaaccauggaaacu

SEQ ID NO: 1452101 - RNA, 19 nt, Artificial Sequence
  Description of Artificial Sequence: Synthetic oligonucleotide
  Antisense strand to SEQ ID NO: 1452100
aguuuccaugguuacccac

SEQ ID NO: 1452102 - RNA, 19 nt, Artificial Sequence
  Description of Artificial Sequence: Synthetic oligonucleotide
  Sense strand starting at position 1469 of SEQ ID NO: 1243930
cuaugagccuguuuaagaa

SEQ ID NO: 1452103 - RNA, 19 nt, Artificial Sequence
  Description of Artificial Sequence: Synthetic oligonucleotide
  Antisense strand to SEQ ID NO: 1452102
uucuuaaacaggcucauag

SEQ ID NO: 1452104 - RNA, 19 nt, Artificial Sequence
  Description of Artificial Sequence: Synthetic oligonucleotide
  Sense strand starting at position 1574 of SEQ ID NO: 1243930
aggcaaagugcucauugga

SEQ ID NO: 1452105 - RNA, 19 nt, Artificial Sequence
  Description of Artificial Sequence: Synthetic oligonucleotide
  Antisense strand to SEQ ID NO: 1452104
uccaaugagcacuuugccu

SEQ ID NO: 1452106 - RNA, 19 nt, Artificial Sequence
  Description of Artificial Sequence: Synthetic oligonucleotide
  Sense strand starting at position 2200 of SEQ ID NO: 1243930
cacacuugacacgauguaa

SEQ ID NO: 1452107 - RNA, 19 nt, Artificial Sequence
  Description of Artificial Sequence: Synthetic oligonucleotide
  Antisense strand to SEQ ID NO: 1452106
uuacaucgugucaagugug

SEQ ID NO: 1452108 - RNA, 19 nt, Artificial Sequence
  Description of Artificial Sequence: Synthetic oligonucleotide
  Sense strand starting at position 2248 of SEQ ID NO: 1243930
cagagugcugcguuccuca

SEQ ID NO: 1452109 - RNA, 19 nt, Artificial Sequence
  Description of Artificial Sequence: Synthetic oligonucleotide
  Antisense strand to SEQ ID NO: 1452108
ugaggaacgcagcacucug

SEQ ID NO: 1452110 - RNA, 19 nt, Artificial Sequence
  Description of Artificial Sequence: Synthetic oligonucleotide
  Sense strand starting at position 2518 of SEQ ID NO: 1243930
gugggcugucaauauuugu

SEQ ID NO: 1452111 - RNA, 19 nt, Artificial Sequence
  Description of Artificial Sequence: Synthetic oligonucleotide
  Antisense strand to SEQ ID NO: 1452110
acaaauauugacagcccac

SEQ ID NO: 1452112 - RNA, 19 nt, Artificial Sequence
  Description of Artificial Sequence: Synthetic oligonucleotide
  Sense strand starting at position 2521 of SEQ ID NO: 1243930
ggcugucaauauuuguuga

SEQ ID NO: 1452113 - RNA, 19 nt, Artificial Sequence
  Description of Artificial Sequence: Synthetic oligonucleotide
  Antisense strand to SEQ ID NO: 1452112
ucaacaaauauugacagcc

SEQ ID NO: 1452114 - RNA, 19 nt, Artificial Sequence
  Description of Artificial Sequence: Synthetic oligonucleotide
  Sense strand starting at position 2600 of SEQ ID NO: 1243930
aggugcauuccuuggaaac

SEQ ID NO: 1452115 - RNA, 19 nt, Artificial Sequence
  Description of Artificial Sequence: Synthetic oligonucleotide
  Antisense strand to SEQ ID NO: 1452114
guuuccaaggaaugcaccu

SEQ ID NO: 1452116 - RNA, 19 nt, Artificial Sequence
  Description of Artificial Sequence: Synthetic oligonucleotide
  Sense strand starting at position 2601 of SEQ ID NO: 1243930
ggugcauuccuuggaaacc

SEQ ID NO: 1452117 - RNA, 19 nt, Artificial Sequence
  Description of Artificial Sequence: Synthetic oligonucleotide
  Antisense strand to SEQ ID NO: 1452116
gguuuccaaggaaugcacc

SEQ ID NO: 1452118 - RNA, 19 nt, Artificial Sequence
  Description of Artificial Sequence: Synthetic oligonucleotide
  Sense strand starting at position 2695 of SEQ ID NO: 1243930
aggucuuucuggucuagag

SEQ ID NO: 1452119 - RNA, 19 nt, Artificial Sequence
  Description of Artificial Sequence: Synthetic oligonucleotide
  Antisense strand to SEQ ID NO: 1452118
cucuagaccagaaagaccu

SEQ ID NO: 1452120 - RNA, 19 nt, Artificial Sequence
  Description of Artificial Sequence: Synthetic oligonucleotide
  Sense strand starting at position 2754 of SEQ ID NO: 1243930
uugcaaugugaacaagauu

SEQ ID NO: 1452121 - RNA, 19 nt, Artificial Sequence
  Description of Artificial Sequence: Synthetic oligonucleotide
  Antisense strand to SEQ ID NO: 1452120
aaucuuguucacauugcaa

SEQ ID NO: 1452122 - RNA, 19 nt, Artificial Sequence
  Description of Artificial Sequence: Synthetic oligonucleotide
  Sense strand starting at position 2765 of SEQ ID NO: 1243930
acaagauuguuuguuggac

SEQ ID NO: 1452123 - RNA, 19 nt, Artificial Sequence
  Description of Artificial Sequence: Synthetic oligonucleotide
  Antisense strand to SEQ ID NO: 1452122
guccaacaaacaaucuugu

SEQ ID NO: 1452124 - RNA, 19 nt, Artificial Sequence
  Description of Artificial Sequence: Synthetic oligonucleotide
  Sense strand starting at position 2766 of SEQ ID NO: 1243930
caagauuguuuguuggacu

SEQ ID NO: 1452125 - RNA, 19 nt, Artificial Sequence
  Description of Artificial Sequence: Synthetic oligonucleotide
  Antisense strand to SEQ ID NO: 1452124
aguccaacaaacaaucuug

SEQ ID NO: 1452126 - RNA, 19 nt, Artificial Sequence
  Description of Artificial Sequence: Synthetic oligonucleotide
  Sense strand starting at position 2800 of SEQ ID NO: 1243930
cuguuagaauuagccaaca

SEQ ID NO: 1452127 - RNA, 19 nt, Artificial Sequence
  Description of Artificial Sequence: Synthetic oligonucleotide
  Antisense strand to SEQ ID NO: 1452126
uguuggcuaauucuaacag

SEQ ID NO: 1452128 - RNA, 19 nt, Artificial Sequence
  Description of Artificial Sequence: Synthetic oligonucleotide
  Sense strand starting at position 2948 of SEQ ID NO: 1243930
ugaagucauggccaugcau

SEQ ID NO: 1452129 - RNA, 19 nt, Artificial Sequence
  Description of Artificial Sequence: Synthetic oligonucleotide
  Antisense strand to SEQ ID NO: 1452128
augcauggccaugacuuca

SEQ ID NO: 1452130 - RNA, 19 nt, Artificial Sequence
  Description of Artificial Sequence: Synthetic oligonucleotide
  Sense strand starting at position 3410 of SEQ ID NO: 1243930
gagaacauuccagguuucu

SEQ ID NO: 1452131 - RNA, 19 nt, Artificial Sequence
  Description of Artificial Sequence: Synthetic oligonucleotide
  Antisense strand to SEQ ID NO: 1452130
agaaaccuggaauguucuc

SEQ ID NO: 1452132 - RNA, 19 nt, Artificial Sequence
  Description of Artificial Sequence: Synthetic oligonucleotide
  Sense strand starting at position 3452 of SEQ ID NO: 1243930
agccuucuggaucauguua

SEQ ID NO: 1452133 - RNA, 19 nt, Artificial Sequence
  Description of Artificial Sequence: Synthetic oligonucleotide
  Antisense strand to SEQ ID NO: 1452132
uaacaugauccagaaggcu

SEQ ID NO: 1452134 - RNA, 19 nt, Artificial Sequence
  Description of Artificial Sequence: Synthetic oligonucleotide
  Sense strand starting at position 3533 of SEQ ID NO: 1243930
agguauugguaaucucagu

SEQ ID NO: 1452135 - RNA, 19 nt, Artificial Sequence
  Description of Artificial Sequence: Synthetic oligonucleotide
  Antisense strand to SEQ ID NO: 1452134
acugagauuaccaauaccu

SEQ ID NO: 1452136 - RNA, 19 nt, Artificial Sequence
  Description of Artificial Sequence: Synthetic oligonucleotide
  Sense strand starting at position 3565 of SEQ ID NO: 1243930
gcaucucuaucagugauau

SEQ ID NO: 1452137 - RNA, 19 nt, Artificial Sequence
  Description of Artificial Sequence: Synthetic oligonucleotide
  Antisense strand to SEQ ID NO: 1452136
auaucacugauagagaugc

SEQ ID NO: 1452138 - RNA, 19 nt, Artificial Sequence
  Description of Artificial Sequence: Synthetic oligonucleotide
  Sense strand starting at position 3637 of SEQ ID NO: 1243930
agcucauaguagucaaauc

SEQ ID NO: 1452139 - RNA, 19 nt, Artificial Sequence
  Description of Artificial Sequence: Synthetic oligonucleotide
  Antisense strand to SEQ ID NO: 1452138
gauuugacuacuaugagcu

SEQ ID NO: 1452140 - RNA, 19 nt, Artificial Sequence
  Description of Artificial Sequence: Synthetic oligonucleotide
  Sense strand starting at position 3679 of SEQ ID NO: 1243930
acaauacugguuugaacuu

SEQ ID NO: 1452141 - RNA, 19 nt, Artificial Sequence
  Description of Artificial Sequence: Synthetic oligonucleotide
  Antisense strand to SEQ ID NO: 1452140
aaguucaaaccaguauugu

SEQ ID NO: 1452142 - RNA, 19 nt, Artificial Sequence
  Description of Artificial Sequence: Synthetic oligonucleotide
  Sense strand starting at position 3733 of SEQ ID NO: 1243930
accugcuaagcuggagaua

SEQ ID NO: 1452143 - RNA, 19 nt, Artificial Sequence
  Description of Artificial Sequence: Synthetic oligonucleotide
  Antisense strand to SEQ ID NO: 1452142
uaucuccagcuuagcaggu

SEQ ID NO: 1452144 - RNA, 19 nt, Artificial Sequence
  Description of Artificial Sequence: Synthetic oligonucleotide
  Sense strand starting at position 3969 of SEQ ID NO: 1243930
caggcaauaguugguauua

SEQ ID NO: 1452145 - RNA, 19 nt, Artificial Sequence
  Description of Artificial Sequence: Synthetic oligonucleotide
  Antisense strand to SEQ ID NO: 1452144
uaauaccaacuauugccug

SEQ ID NO: 1452146 - RNA, 19 nt, Artificial Sequence
  Description of Artificial Sequence: Synthetic oligonucleotide
  Sense strand starting at position 3970 of SEQ ID NO: 1243930
aggcaauaguugguauuaa

SEQ ID NO: 1452147 - RNA, 19 nt, Artificial Sequence
  Description of Artificial Sequence: Synthetic oligonucleotide
  Antisense strand to SEQ ID NO: 1452146
uuaauaccaacuauugccu

SEQ ID NO: 1452148 - RNA, 19 nt, Artificial Sequence
  Description of Artificial Sequence: Synthetic oligonucleotide
  Sense strand starting at position 75 of SEQ ID NO: 1243931
ggcugugcccucuggaguu

SEQ ID NO: 1452149 - RNA, 19 nt, Artificial Sequence
  Description of Artificial Sequence: Synthetic oligonucleotide
  Antisense strand to SEQ ID NO: 1452148
aacuccagagggcacagcc

SEQ ID NO: 1452150 - RNA, 19 nt, Artificial Sequence
  Description of Artificial Sequence: Synthetic oligonucleotide
  Sense strand starting at position 89 of SEQ ID NO: 1243931
gaguuuaaguucuagguac

SEQ ID NO: 1452151 - RNA, 19 nt, Artificial Sequence
  Description of Artificial Sequence: Synthetic oligonucleotide
  Antisense strand to SEQ ID NO: 1452150
guaccuagaacuuaaacuc

SEQ ID NO: 1452152 - RNA, 19 nt, Artificial Sequence
  Description of Artificial Sequence: Synthetic oligonucleotide
  Sense strand starting at position 91 of SEQ ID NO: 1243931
guuuaaguucuagguacug

SEQ ID NO: 1452153 - RNA, 19 nt, Artificial Sequence
  Description of Artificial Sequence: Synthetic oligonucleotide
  Antisense strand to SEQ ID NO: 1452152
caguaccuagaacuuaaac

SEQ ID NO: 1452154 - RNA, 19 nt, Artificial Sequence
  Description of Artificial Sequence: Synthetic oligonucleotide
  Sense strand starting at position 109 of SEQ ID NO: 1243931
ggcucaugaugacguugua

SEQ ID NO: 1452155 - RNA, 19 nt, Artificial Sequence
  Description of Artificial Sequence: Synthetic oligonucleotide
  Antisense strand to SEQ ID NO: 1452154
uacaacgucaucaugagcc

SEQ ID NO: 1452156 - RNA, 19 nt, Artificial Sequence
  Description of Artificial Sequence: Synthetic oligonucleotide
  Sense strand starting at position 112 of SEQ ID NO: 1243931
ucaugaugacguuguagac

SEQ ID NO: 1452157 - RNA, 19 nt, Artificial Sequence
  Description of Artificial Sequence: Synthetic oligonucleotide
  Antisense strand to SEQ ID NO: 1452156
gucuacaacgucaucauga

SEQ ID NO: 1452158 - RNA, 19 nt, Artificial Sequence
  Description of Artificial Sequence: Synthetic oligonucleotide
  Sense strand starting at position 204 of SEQ ID NO: 1243931
gugaccuauguuugcaaag

SEQ ID NO: 1452159 - RNA, 19 nt, Artificial Sequence
  Description of Artificial Sequence: Synthetic oligonucleotide
  Antisense strand to SEQ ID NO: 1452158
cuuugcaaacauaggucac

SEQ ID NO: 1452160 - RNA, 19 nt, Artificial Sequence
  Description of Artificial Sequence: Synthetic oligonucleotide
  Sense strand starting at position 321 of SEQ ID NO: 1243931
agggaagacuucuuuccau

SEQ ID NO: 1452161 - RNA, 19 nt, Artificial Sequence
  Description of Artificial Sequence: Synthetic oligonucleotide
  Antisense strand to SEQ ID NO: 1452160
auggaaagaagucuucccu

SEQ ID NO: 1452162 - RNA, 19 nt, Artificial Sequence
  Description of Artificial Sequence: Synthetic oligonucleotide
  Sense strand starting at position 381 of SEQ ID NO: 1243931
ggccuaagauccuacacga

SEQ ID NO: 1452163 - RNA, 19 nt, Artificial Sequence
  Description of Artificial Sequence: Synthetic oligonucleotide
  Antisense strand to SEQ ID NO: 1452162
ucguguaggaucuuaggcc

SEQ ID NO: 1452164 - RNA, 19 nt, Artificial Sequence
  Description of Artificial Sequence: Synthetic oligonucleotide
  Sense strand starting at position 404 of SEQ ID NO: 1243931
ccggccuguuucuacuaga

SEQ ID NO: 1452165 - RNA, 19 nt, Artificial Sequence
  Description of Artificial Sequence: Synthetic oligonucleotide
  Antisense strand to SEQ ID NO: 1452164
ucuaguagaaacaggccgg

SEQ ID NO: 1452166 - RNA, 19 nt, Artificial Sequence
  Description of Artificial Sequence: Synthetic oligonucleotide
  Sense strand starting at position 407 of SEQ ID NO: 1243931
gccuguuucuacuagagug

SEQ ID NO: 1452167 - RNA, 19 nt, Artificial Sequence
  Description of Artificial Sequence: Synthetic oligonucleotide
  Antisense strand to SEQ ID NO: 1452166
cacucuaguagaaacaggc

SEQ ID NO: 1452168 - RNA, 19 nt, Artificial Sequence
  Description of Artificial Sequence: Synthetic oligonucleotide
  Sense strand starting at position 1087 of SEQ ID NO: 1243931
gcagccagaugaugauauu

SEQ ID NO: 1452169 - RNA, 19 nt, Artificial Sequence
  Description of Artificial Sequence: Synthetic oligonucleotide
  Antisense strand to SEQ ID NO: 1452168
aauaucaucaucuggcugc

SEQ ID NO: 1452170 - RNA, 19 nt, Artificial Sequence
  Description of Artificial Sequence: Synthetic oligonucleotide
  Sense strand starting at position 1090 of SEQ ID NO: 1243931
gccagaugaugauauucuu

SEQ ID NO: 1452171 - RNA, 19 nt, Artificial Sequence
  Description of Artificial Sequence: Synthetic oligonucleotide
  Antisense strand to SEQ ID NO: 1452170
aagaauaucaucaucuggc

SEQ ID NO: 1452172 - RNA, 19 nt, Artificial Sequence
  Description of Artificial Sequence: Synthetic oligonucleotide
  Sense strand starting at position 1150 of SEQ ID NO: 1243931
gaagcuccauucugggaau

SEQ ID NO: 1452173 - RNA, 19 nt, Artificial Sequence
  Description of Artificial Sequence: Synthetic oligonucleotide
  Antisense strand to SEQ ID NO: 1452172
auucccagaauggagcuuc

SEQ ID NO: 1452174 - RNA, 19 nt, Artificial Sequence
  Description of Artificial Sequence: Synthetic oligonucleotide
  Sense strand starting at position 1372 of SEQ ID NO: 1243931
ggacucaccugcucuagua

SEQ ID NO: 1452175 - RNA, 19 nt, Artificial Sequence
  Description of Artificial Sequence: Synthetic oligonucleotide
  Antisense strand to SEQ ID NO: 1452174
uacuagagcaggugagucc

SEQ ID NO: 1452176 - RNA, 19 nt, Artificial Sequence
  Description of Artificial Sequence: Synthetic oligonucleotide
  Sense strand starting at position 1543 of SEQ ID NO: 1243931
aaagaaccguuugugcuaa

SEQ ID NO: 1452177 - RNA, 19 nt, Artificial Sequence
  Description of Artificial Sequence: Synthetic oligonucleotide
  Antisense strand to SEQ ID NO: 1452176
uuagcacaaacgguucuuu

SEQ ID NO: 1452178 - RNA, 19 nt, Artificial Sequence
  Description of Artificial Sequence: Synthetic oligonucleotide
  Sense strand starting at position 1547 of SEQ ID NO: 1243931
aaccguuugugcuaacagu

SEQ ID NO: 1452179 - RNA, 19 nt, Artificial Sequence
  Description of Artificial Sequence: Synthetic oligonucleotide
  Antisense strand to SEQ ID NO: 1452178
acuguuagcacaaacgguu

SEQ ID NO: 1452180 - RNA, 19 nt, Artificial Sequence
  Description of Artificial Sequence: Synthetic oligonucleotide
  Sense strand starting at position 1657 of SEQ ID NO: 1243931
acagcuccauucugggaau

SEQ ID NO: 1452181 - RNA, 19 nt, Artificial Sequence
  Description of Artificial Sequence: Synthetic oligonucleotide
  Antisense strand to SEQ ID NO: 1452180
auucccagaauggagcugu

SEQ ID NO: 1452182 - RNA, 19 nt, Artificial Sequence
  Description of Artificial Sequence: Synthetic oligonucleotide
  Sense strand starting at position 2412 of SEQ ID NO: 1243931
agggauuaaugccagggaa

SEQ ID NO: 1452183 - RNA, 19 nt, Artificial Sequence
  Description of Artificial Sequence: Synthetic oligonucleotide
  Antisense strand to SEQ ID NO: 1452182
uucccuggcauuaaucccu

SEQ ID NO: 1452184 - RNA, 19 nt, Artificial Sequence
  Description of Artificial Sequence: Synthetic oligonucleotide
  Sense strand starting at position 2414 of SEQ ID NO: 1243931
ggauuaaugccagggaaug

SEQ ID NO: 1452185 - RNA, 19 nt, Artificial Sequence
  Description of Artificial Sequence: Synthetic oligonucleotide
  Antisense strand to SEQ ID NO: 1452184
cauucccuggcauuaaucc

SEQ ID NO: 1452186 - RNA, 19 nt, Artificial Sequence
  Description of Artificial Sequence: Synthetic oligonucleotide
  Sense strand starting at position 2554 of SEQ ID NO: 1243931
caguucugguccucaggga

SEQ ID NO: 1452187 - RNA, 19 nt, Artificial Sequence
  Description of Artificial Sequence: Synthetic oligonucleotide
  Antisense strand to SEQ ID NO: 1452186
ucccugaggaccagaacug

SEQ ID NO: 1452188 - RNA, 19 nt, Artificial Sequence
  Description of Artificial Sequence: Synthetic oligonucleotide
  Sense strand starting at position 2555 of SEQ ID NO: 1243931
aguucugguccucagggaa

SEQ ID NO: 1452189 - RNA, 19 nt, Artificial Sequence
  Description of Artificial Sequence: Synthetic oligonucleotide
  Antisense strand to SEQ ID NO: 1452188
uucccugaggaccagaacu

SEQ ID NO: 1452190 - RNA, 19 nt, Artificial Sequence
  Description of Artificial Sequence: Synthetic oligonucleotide
  Sense strand starting at position 2905 of SEQ ID NO: 1243931
caaagaugggccuacuugu

SEQ ID NO: 1452191 - RNA, 19 nt, Artificial Sequence
  Description of Artificial Sequence: Synthetic oligonucleotide
  Antisense strand to SEQ ID NO: 1452190
acaaguaggcccaucuuug

SEQ ID NO: 1452192 - RNA, 19 nt, Artificial Sequence
  Description of Artificial Sequence: Synthetic oligonucleotide
  Sense strand starting at position 2911 of SEQ ID NO: 1243931
ugggccuacuugucaauga

SEQ ID NO: 1452193 - RNA, 19 nt, Artificial Sequence
  Description of Artificial Sequence: Synthetic oligonucleotide
  Antisense strand to SEQ ID NO: 1452192
ucauugacaaguaggccca

SEQ ID NO: 1452194 - RNA, 19 nt, Artificial Sequence
  Description of Artificial Sequence: Synthetic oligonucleotide
  Sense strand starting at position 2936 of SEQ ID NO: 1243931
ccuccuugagcuugaagua

SEQ ID NO: 1452195 - RNA, 19 nt, Artificial Sequence
  Description of Artificial Sequence: Synthetic oligonucleotide
  Antisense strand to SEQ ID NO: 1452194
uacuucaagcucaaggagg

SEQ ID NO: 1452196 - RNA, 19 nt, Artificial Sequence
  Description of Artificial Sequence: Synthetic oligonucleotide
  Sense strand starting at position 3004 of SEQ ID NO: 1243931
ggguuguacucgcgacagu

SEQ ID NO: 1452197 - RNA, 19 nt, Artificial Sequence
  Description of Artificial Sequence: Synthetic oligonucleotide
  Antisense strand to SEQ ID NO: 1452196
acugucgcgaguacaaccc

SEQ ID NO: 1452198 - RNA, 19 nt, Artificial Sequence
  Description of Artificial Sequence: Synthetic oligonucleotide
  Sense strand starting at position 3005 of SEQ ID NO: 1243931
gguuguacucgcgacaguu

SEQ ID NO: 1452199 - RNA, 19 nt, Artificial Sequence
  Description of Artificial Sequence: Synthetic oligonucleotide
  Antisense strand to SEQ ID NO: 1452198
aacugucgcgaguacaacc

SEQ ID NO: 1452200 - RNA, 19 nt, Artificial Sequence
  Description of Artificial Sequence: Synthetic oligonucleotide
  Sense strand starting at position 3276 of SEQ ID NO: 1243931
agcggaugaccucguagua

SEQ ID NO: 1452201 - RNA, 19 nt, Artificial Sequence
  Description of Artificial Sequence: Synthetic oligonucleotide
  Antisense strand to SEQ ID NO: 1452200
uacuacgaggucauccgcu

SEQ ID NO: 1452202 - RNA, 19 nt, Artificial Sequence
  Description of Artificial Sequence: Synthetic oligonucleotide
  Sense strand starting at position 3651 of SEQ ID NO: 1243931
gccugucucuccugcaaag

SEQ ID NO: 1452203 - RNA, 19 nt, Artificial Sequence
  Description of Artificial Sequence: Synthetic oligonucleotide
  Antisense strand to SEQ ID NO: 1452202
cuuugcaggagagacaggc

SEQ ID NO: 1452204 - RNA, 19 nt, Artificial Sequence
  Description of Artificial Sequence: Synthetic oligonucleotide
  Sense strand starting at position 3676 of SEQ ID NO: 1243931
gugggagaaugucucuaag

SEQ ID NO: 1452205 - RNA, 19 nt, Artificial Sequence
  Description of Artificial Sequence: Synthetic oligonucleotide
  Antisense strand to SEQ ID NO: 1452204
cuuagagacauucucccac

SEQ ID NO: 1452206 - RNA, 19 nt, Artificial Sequence
  Description of Artificial Sequence: Synthetic oligonucleotide
  Sense strand starting at position 3766 of SEQ ID NO: 1243931
gaacgcucuccacagggau

SEQ ID NO: 1452207 - RNA, 19 nt, Artificial Sequence
  Description of Artificial Sequence: Synthetic oligonucleotide
  Antisense strand to SEQ ID NO: 1452206
aucccuguggagagcguuc

SEQ ID NO: 1452208 - RNA, 19 nt, Artificial Sequence
  Description of Artificial Sequence: Synthetic oligonucleotide
  Sense strand starting at position 3838 of SEQ ID NO: 1243931
gggccuguuugcgcucaau

SEQ ID NO: 1452209 - RNA, 19 nt, Artificial Sequence
  Description of Artificial Sequence: Synthetic oligonucleotide
  Antisense strand to SEQ ID NO: 1452208
auugagcgcaaacaggccc

SEQ ID NO: 1452210 - RNA, 19 nt, Artificial Sequence
  Description of Artificial Sequence: Synthetic oligonucleotide
  Sense strand starting at position 3840 of SEQ ID NO: 1243931
gccuguuugcgcucaauca

SEQ ID NO: 1452211 - RNA, 19 nt, Artificial Sequence
  Description of Artificial Sequence: Synthetic oligonucleotide
  Antisense strand to SEQ ID NO: 1452210
ugauugagcgcaaacaggc

SEQ ID NO: 1452212 - RNA, 19 nt, Artificial Sequence
  Description of Artificial Sequence: Synthetic oligonucleotide
  Sense strand starting at position 3852 of SEQ ID NO: 1243931
ucaaucagcuucuugauga

SEQ ID NO: 1452213 - RNA, 19 nt, Artificial Sequence
  Description of Artificial Sequence: Synthetic oligonucleotide
  Antisense strand to SEQ ID NO: 1452212
ucaucaagaagcugauuga

SEQ ID NO: 1452214 - RNA, 19 nt, Artificial Sequence
  Description of Artificial Sequence: Synthetic oligonucleotide
  Sense strand starting at position 3862 of SEQ ID NO: 1243931
ucuugaugaucugagggaa

SEQ ID NO: 1452215 - RNA, 19 nt, Artificial Sequence
  Description of Artificial Sequence: Synthetic oligonucleotide
  Antisense strand to SEQ ID NO: 1452214
uucccucagaucaucaaga

SEQ ID NO: 1452216 - RNA, 19 nt, Artificial Sequence
  Description of Artificial Sequence: Synthetic oligonucleotide
  Sense strand starting at position 74 of SEQ ID NO: 1243932
ucugcaaauuaauugagau

SEQ ID NO: 1452217 - RNA, 19 nt, Artificial Sequence
  Description of Artificial Sequence: Synthetic oligonucleotide
  Antisense strand to SEQ ID NO: 1452216
aucucaauuaauuugcaga

SEQ ID NO: 1452218 - RNA, 19 nt, Artificial Sequence
  Description of Artificial Sequence: Synthetic oligonucleotide
  Sense strand starting at position 86 of SEQ ID NO: 1243932
uugagaucuuuagcuauaa

SEQ ID NO: 1452219 - RNA, 19 nt, Artificial Sequence
  Description of Artificial Sequence: Synthetic oligonucleotide
  Antisense strand to SEQ ID NO: 1452218
uuauagcuaaagaucucaa

SEQ ID NO: 1452220 - RNA, 19 nt, Artificial Sequence
  Description of Artificial Sequence: Synthetic oligonucleotide
  Sense strand starting at position 87 of SEQ ID NO: 1243932
ugagaucuuuagcuauaaa

SEQ ID NO: 1452221 - RNA, 19 nt, Artificial Sequence
  Description of Artificial Sequence: Synthetic oligonucleotide
  Antisense strand to SEQ ID NO: 1452220
uuuauagcuaaagaucuca

SEQ ID NO: 1452222 - RNA, 19 nt, Artificial Sequence
  Description of Artificial Sequence: Synthetic oligonucleotide
  Sense strand starting at position 124 of SEQ ID NO: 1243932
aguuuauacuucgcucuau

SEQ ID NO: 1452223 - RNA, 19 nt, Artificial Sequence
  Description of Artificial Sequence: Synthetic oligonucleotide
  Antisense strand to SEQ ID NO: 1452222
auagagcgaaguauaaacu

SEQ ID NO: 1452224 - RNA, 19 nt, Artificial Sequence
  Description of Artificial Sequence: Synthetic oligonucleotide
  Sense strand starting at position 125 of SEQ ID NO: 1243932
guuuauacuucgcucuauu

SEQ ID NO: 1452225 - RNA, 19 nt, Artificial Sequence
  Description of Artificial Sequence: Synthetic oligonucleotide
  Antisense strand to SEQ ID NO: 1452224
aauagagcgaaguauaaac

SEQ ID NO: 1452226 - RNA, 19 nt, Artificial Sequence
  Description of Artificial Sequence: Synthetic oligonucleotide
  Sense strand starting at position 188 of SEQ ID NO: 1243932
gguuaaugucaauaacuuu

SEQ ID NO: 1452227 - RNA, 19 nt, Artificial Sequence
  Description of Artificial Sequence: Synthetic oligonucleotide
  Antisense strand to SEQ ID NO: 1452226
aaaguuauugacauuaacc

SEQ ID NO: 1452228 - RNA, 19 nt, Artificial Sequence
  Description of Artificial Sequence: Synthetic oligonucleotide
  Sense strand starting at position 260 of SEQ ID NO: 1243932
aagguaagcucccugaaag

SEQ ID NO: 1452229 - RNA, 19 nt, Artificial Sequence
  Description of Artificial Sequence: Synthetic oligonucleotide
  Antisense strand to SEQ ID NO: 1452228
cuuucagggagcuuaccuu

SEQ ID NO: 1452230 - RNA, 19 nt, Artificial Sequence
  Description of Artificial Sequence: Synthetic oligonucleotide
  Sense strand starting at position 400 of SEQ ID NO: 1243932
agaagaauccugcgggaaa

SEQ ID NO: 1452231 - RNA, 19 nt, Artificial Sequence
  Description of Artificial Sequence: Synthetic oligonucleotide
  Antisense strand to SEQ ID NO: 1452230
uuucccgcaggauucuucu

SEQ ID NO: 1452232 - RNA, 19 nt, Artificial Sequence
  Description of Artificial Sequence: Synthetic oligonucleotide
  Sense strand starting at position 584 of SEQ ID NO: 1243932
aaaggucacucgucuaacu

SEQ ID NO: 1452233 - RNA, 19 nt, Artificial Sequence
  Description of Artificial Sequence: Synthetic oligonucleotide
  Antisense strand to SEQ ID NO: 1452232
aguuagacgagugaccuuu

SEQ ID NO: 1452234 - RNA, 19 nt, Artificial Sequence
  Description of Artificial Sequence: Synthetic oligonucleotide
  Sense strand starting at position 647 of SEQ ID NO: 1243932
gguugaugacuuuaucuuc

SEQ ID NO: 1452235 - RNA, 19 nt, Artificial Sequence
  Description of Artificial Sequence: Synthetic oligonucleotide
  Antisense strand to SEQ ID NO: 1452234
gaagauaaagucaucaacc

SEQ ID NO: 1452236 - RNA, 19 nt, Artificial Sequence
  Description of Artificial Sequence: Synthetic oligonucleotide
  Sense strand starting at position 792 of SEQ ID NO: 1243932
guacguaccaaaggucaau

SEQ ID NO: 1452237 - RNA, 19 nt, Artificial Sequence
  Description of Artificial Sequence: Synthetic oligonucleotide
  Antisense strand to SEQ ID NO: 1452236
auugaccuuugguacguac

SEQ ID NO: 1452238 - RNA, 19 nt, Artificial Sequence
  Description of Artificial Sequence: Synthetic oligonucleotide
  Sense strand starting at position 954 of SEQ ID NO: 1243932
gugacugguguuuaagaca

SEQ ID NO: 1452239 - RNA, 19 nt, Artificial Sequence
  Description of Artificial Sequence: Synthetic oligonucleotide
  Antisense strand to SEQ ID NO: 1452238
ugucuuaaacaccagucac

SEQ ID NO: 1452240 - RNA, 19 nt, Artificial Sequence
  Description of Artificial Sequence: Synthetic oligonucleotide
  Sense strand starting at position 961 of SEQ ID NO: 1243932
guguuuaagacauaguaca

SEQ ID NO: 1452241 - RNA, 19 nt, Artificial Sequence
  Description of Artificial Sequence: Synthetic oligonucleotide
  Antisense strand to SEQ ID NO: 1452240
uguacuaugucuuaaacac

SEQ ID NO: 1452242 - RNA, 19 nt, Artificial Sequence
  Description of Artificial Sequence: Synthetic oligonucleotide
  Sense strand starting at position 1308 of SEQ ID NO: 1243932
cgcuaacuacuaugucaca

SEQ ID NO: 1452243 - RNA, 19 nt, Artificial Sequence
  Description of Artificial Sequence: Synthetic oligonucleotide
  Antisense strand to SEQ ID NO: 1452242
ugugacauaguaguuagcg

SEQ ID NO: 1452244 - RNA, 19 nt, Artificial Sequence
  Description of Artificial Sequence: Synthetic oligonucleotide
  Sense strand starting at position 1330 of SEQ ID NO: 1243932
uggcgugaagaccaaauaa

SEQ ID NO: 1452245 - RNA, 19 nt, Artificial Sequence
  Description of Artificial Sequence: Synthetic oligonucleotide
  Antisense strand to SEQ ID NO: 1452244
uuauuuggucuucacgcca

SEQ ID NO: 1452246 - RNA, 19 nt, Artificial Sequence
  Description of Artificial Sequence: Synthetic oligonucleotide
  Sense strand starting at position 1444 of SEQ ID NO: 1243932
guuguuguuaaacauguuu

SEQ ID NO: 1452247 - RNA, 19 nt, Artificial Sequence
  Description of Artificial Sequence: Synthetic oligonucleotide
  Antisense strand to SEQ ID NO: 1452246
aaacauguuuaacaacaac

SEQ ID NO: 1452248 - RNA, 19 nt, Artificial Sequence
  Description of Artificial Sequence: Synthetic oligonucleotide
  Sense strand starting at position 1523 of SEQ ID NO: 1243932
cugacagcucugggaaagu

SEQ ID NO: 1452249 - RNA, 19 nt, Artificial Sequence
  Description of Artificial Sequence: Synthetic oligonucleotide
  Antisense strand to SEQ ID NO: 1452248
acuuucccagagcugucag

SEQ ID NO: 1452250 - RNA, 19 nt, Artificial Sequence
  Description of Artificial Sequence: Synthetic oligonucleotide
  Sense strand starting at position 1532 of SEQ ID NO: 1243932
cugggaaaguuucuaaagu

SEQ ID NO: 1452251 - RNA, 19 nt, Artificial Sequence
  Description of Artificial Sequence: Synthetic oligonucleotide
  Antisense strand to SEQ ID NO: 1452250
acuuuagaaacuuucccag

SEQ ID NO: 1452252 - RNA, 19 nt, Artificial Sequence
  Description of Artificial Sequence: Synthetic oligonucleotide
  Sense strand starting at position 1976 of SEQ ID NO: 1243932
cuuuguuuacgguaaauug

SEQ ID NO: 1452253 - RNA, 19 nt, Artificial Sequence
  Description of Artificial Sequence: Synthetic oligonucleotide
  Antisense strand to SEQ ID NO: 1452252
caauuuaccguaaacaaag

SEQ ID NO: 1452254 - RNA, 19 nt, Artificial Sequence
  Description of Artificial Sequence: Synthetic oligonucleotide
  Sense strand starting at position 2023 of SEQ ID NO: 1243932
caggauggaucauagagau

SEQ ID NO: 1452255 - RNA, 19 nt, Artificial Sequence
  Description of Artificial Sequence: Synthetic oligonucleotide
  Antisense strand to SEQ ID NO: 1452254
aucucuaugauccauccug

SEQ ID NO: 1452256 - RNA, 19 nt, Artificial Sequence
  Description of Artificial Sequence: Synthetic oligonucleotide
  Sense strand starting at position 2065 of SEQ ID NO: 1243932
ggacaacuagaguggguua

SEQ ID NO: 1452257 - RNA, 19 nt, Artificial Sequence
  Description of Artificial Sequence: Synthetic oligonucleotide
  Antisense strand to SEQ ID NO: 1452256
uaacccacucuaguugucc

SEQ ID NO: 1452258 - RNA, 19 nt, Artificial Sequence
  Description of Artificial Sequence: Synthetic oligonucleotide
  Sense strand starting at position 2102 of SEQ ID NO: 1243932
gcccucuacaggcgagaaa

SEQ ID NO: 1452259 - RNA, 19 nt, Artificial Sequence
  Description of Artificial Sequence: Synthetic oligonucleotide
  Antisense strand to SEQ ID NO: 1452258
uuucucgccuguagagggc

SEQ ID NO: 1452260 - RNA, 19 nt, Artificial Sequence
  Description of Artificial Sequence: Synthetic oligonucleotide
  Sense strand starting at position 2304 of SEQ ID NO: 1243932
uacuguggauccgcaaauu

SEQ ID NO: 1452261 - RNA, 19 nt, Artificial Sequence
  Description of Artificial Sequence: Synthetic oligonucleotide
  Antisense strand to SEQ ID NO: 1452260
aauuugcggauccacagua

SEQ ID NO: 1452262 - RNA, 19 nt, Artificial Sequence
  Description of Artificial Sequence: Synthetic oligonucleotide
  Sense strand starting at position 2327 of SEQ ID NO: 1243932
gccucacuucuuugugguu

SEQ ID NO: 1452263 - RNA, 19 nt, Artificial Sequence
  Description of Artificial Sequence: Synthetic oligonucleotide
  Antisense strand to SEQ ID NO: 1452262
aaccacaaagaagugaggc

SEQ ID NO: 1452264 - RNA, 19 nt, Artificial Sequence
  Description of Artificial Sequence: Synthetic oligonucleotide
  Sense strand starting at position 2360 of SEQ ID NO: 1243932
ucaagugacccuugacaag

SEQ ID NO: 1452265 - RNA, 19 nt, Artificial Sequence
  Description of Artificial Sequence: Synthetic oligonucleotide
  Antisense strand to SEQ ID NO: 1452264
cuugucaagggucacuuga

SEQ ID NO: 1452266 - RNA, 19 nt, Artificial Sequence
  Description of Artificial Sequence: Synthetic oligonucleotide
  Sense strand starting at position 2816 of SEQ ID NO: 1243932
guuggagugaccugaguuc

SEQ ID NO: 1452267 - RNA, 19 nt, Artificial Sequence
  Description of Artificial Sequence: Synthetic oligonucleotide
  Antisense strand to SEQ ID NO: 1452266
gaacucaggucacuccaac

SEQ ID NO: 1452268 - RNA, 19 nt, Artificial Sequence
  Description of Artificial Sequence: Synthetic oligonucleotide
  Sense strand starting at position 2909 of SEQ ID NO: 1243932
agaugauggucacagaacu

SEQ ID NO: 1452269 - RNA, 19 nt, Artificial Sequence
  Description of Artificial Sequence: Synthetic oligonucleotide
  Antisense strand to SEQ ID NO: 1452268
aguucugugaccaucaucu

SEQ ID NO: 1452270 - RNA, 19 nt, Artificial Sequence
  Description of Artificial Sequence: Synthetic oligonucleotide
  Sense strand starting at position 2934 of SEQ ID NO: 1243932
uggucugucaagcacagau

SEQ ID NO: 1452271 - RNA, 19 nt, Artificial Sequence
  Description of Artificial Sequence: Synthetic oligonucleotide
  Antisense strand to SEQ ID NO: 1452270
aucugugcuugacagacca

SEQ ID NO: 1452272 - RNA, 19 nt, Artificial Sequence
  Description of Artificial Sequence: Synthetic oligonucleotide
  Sense strand starting at position 3023 of SEQ ID NO: 1243932
uuuccuguguccucucaga

SEQ ID NO: 1452273 - RNA, 19 nt, Artificial Sequence
  Description of Artificial Sequence: Synthetic oligonucleotide
  Antisense strand to SEQ ID NO: 1452272
ucugagaggacacaggaaa

SEQ ID NO: 1452274 - RNA, 19 nt, Artificial Sequence
  Description of Artificial Sequence: Synthetic oligonucleotide
  Sense strand starting at position 3387 of SEQ ID NO: 1243932
aaauaucagcugugcugua

SEQ ID NO: 1452275 - RNA, 19 nt, Artificial Sequence
  Description of Artificial Sequence: Synthetic oligonucleotide
  Antisense strand to SEQ ID NO: 1452274
uacagcacagcugauauuu

SEQ ID NO: 1452276 - RNA, 19 nt, Artificial Sequence
  Description of Artificial Sequence: Synthetic oligonucleotide
  Sense strand starting at position 3388 of SEQ ID NO: 1243932
aauaucagcugugcuguaa

SEQ ID NO: 1452277 - RNA, 19 nt, Artificial Sequence
  Description of Artificial Sequence: Synthetic oligonucleotide
  Antisense strand to SEQ ID NO: 1452276
uuacagcacagcugauauu

SEQ ID NO: 1452278 - RNA, 19 nt, Artificial Sequence
  Description of Artificial Sequence: Synthetic oligonucleotide
  Sense strand starting at position 3401 of SEQ ID NO: 1243932
cuguaaguccaaggucaua

SEQ ID NO: 1452279 - RNA, 19 nt, Artificial Sequence
  Description of Artificial Sequence: Synthetic oligonucleotide
  Antisense strand to SEQ ID NO: 1452278
uaugaccuuggacuuacag

SEQ ID NO: 1452280 - RNA, 19 nt, Artificial Sequence
  Description of Artificial Sequence: Synthetic oligonucleotide
  Sense strand starting at position 3499 of SEQ ID NO: 1243932
acuccagugcucuguguga

SEQ ID NO: 1452281 - RNA, 19 nt, Artificial Sequence
  Description of Artificial Sequence: Synthetic oligonucleotide
  Antisense strand to SEQ ID NO: 1452280
ucacacagagcacuggagu

SEQ ID NO: 1452282 - RNA, 19 nt, Artificial Sequence
  Description of Artificial Sequence: Synthetic oligonucleotide
  Sense strand starting at position 3501 of SEQ ID NO: 1243932
uccagugcucugugugaug

SEQ ID NO: 1452283 - RNA, 19 nt, Artificial Sequence
  Description of Artificial Sequence: Synthetic oligonucleotide
  Antisense strand to SEQ ID NO: 1452282
caucacacagagcacugga

SEQ ID NO: 1452284 - RNA, 19 nt, Artificial Sequence
  Description of Artificial Sequence: Synthetic oligonucleotide
  Sense strand starting at position 3510 of SEQ ID NO: 1243932
cugugugaugaguaaggaa

SEQ ID NO: 1452285 - RNA, 19 nt, Artificial Sequence
  Description of Artificial Sequence: Synthetic oligonucleotide
  Antisense strand to SEQ ID NO: 1452284
uuccuuacucaucacacag

SEQ ID NO: 1452286 - RNA, 19 nt, Artificial Sequence
  Description of Artificial Sequence: Synthetic oligonucleotide
  Sense strand starting at position 3545 of SEQ ID NO: 1243932
gugaauggcucuccaauca

SEQ ID NO: 1452287 - RNA, 19 nt, Artificial Sequence
  Description of Artificial Sequence: Synthetic oligonucleotide
  Antisense strand to SEQ ID NO: 1452286
ugauuggagagccauucac

SEQ ID NO: 1452288 - RNA, 19 nt, Artificial Sequence
  Description of Artificial Sequence: Synthetic oligonucleotide
  Sense strand starting at position 3574 of SEQ ID NO: 1243932
ggaaaucagucucccacuu

SEQ ID NO: 1452289 - RNA, 19 nt, Artificial Sequence
  Description of Artificial Sequence: Synthetic oligonucleotide
  Antisense strand to SEQ ID NO: 1452288
aagugggagacugauuucc

SEQ ID NO: 1452290 - RNA, 19 nt, Artificial Sequence
  Description of Artificial Sequence: Synthetic oligonucleotide
  Sense strand starting at position 3722 of SEQ ID NO: 1243932
uuuccagguuccuaaggaa

SEQ ID NO: 1452291 - RNA, 19 nt, Artificial Sequence
  Description of Artificial Sequence: Synthetic oligonucleotide
  Antisense strand to SEQ ID NO: 1452290
uuccuuaggaaccuggaaa

SEQ ID NO: 1452292 - RNA, 19 nt, Artificial Sequence
  Description of Artificial Sequence: Synthetic oligonucleotide
  Sense strand starting at position 3848 of SEQ ID NO: 1243932
ccagcuuggaguuacgauu

SEQ ID NO: 1452293 - RNA, 19 nt, Artificial Sequence
  Description of Artificial Sequence: Synthetic oligonucleotide
  Antisense strand to SEQ ID NO: 1452292
aaucguaacuccaagcugg

SEQ ID NO: 1452294 - RNA, 19 nt, Artificial Sequence
  Description of Artificial Sequence: Synthetic oligonucleotide
  Sense strand starting at position 3872 of SEQ ID NO: 1243932
ggcuuauucuaucugaugu

SEQ ID NO: 1452295 - RNA, 19 nt, Artificial Sequence
  Description of Artificial Sequence: Synthetic oligonucleotide
  Antisense strand to SEQ ID NO: 1452294
acaucagauagaauaagcc

SEQ ID NO: 1452296 - RNA, 19 nt, Artificial Sequence
  Description of Artificial Sequence: Synthetic oligonucleotide
  Sense strand starting at position 151 of SEQ ID NO: 1243933
gaguuuguggcagggaaca

SEQ ID NO: 1452297 - RNA, 19 nt, Artificial Sequence
  Description of Artificial Sequence: Synthetic oligonucleotide
  Antisense strand to SEQ ID NO: 1452296
uguucccugccacaaacuc

SEQ ID NO: 1452298 - RNA, 19 nt, Artificial Sequence
  Description of Artificial Sequence: Synthetic oligonucleotide
  Sense strand starting at position 513 of SEQ ID NO: 1243933
ccaguaaccucaguaacuu

SEQ ID NO: 1452299 - RNA, 19 nt, Artificial Sequence
  Description of Artificial Sequence: Synthetic oligonucleotide
  Antisense strand to SEQ ID NO: 1452298
aaguuacugagguuacugg

SEQ ID NO: 1452300 - RNA, 19 nt, Artificial Sequence
  Description of Artificial Sequence: Synthetic oligonucleotide
  Sense strand starting at position 522 of SEQ ID NO: 1243933
ucaguaacuucggucauaa

SEQ ID NO: 1452301 - RNA, 19 nt, Artificial Sequence
  Description of Artificial Sequence: Synthetic oligonucleotide
  Antisense strand to SEQ ID NO: 1452300
uuaugaccgaaguuacuga

SEQ ID NO: 1452302 - RNA, 19 nt, Artificial Sequence
  Description of Artificial Sequence: Synthetic oligonucleotide
  Sense strand starting at position 636 of SEQ ID NO: 1243933
ucucuugaucagggcuaga

SEQ ID NO: 1452303 - RNA, 19 nt, Artificial Sequence
  Description of Artificial Sequence: Synthetic oligonucleotide
  Antisense strand to SEQ ID NO: 1452302
ucuagcccugaucaagaga

SEQ ID NO: 1452304 - RNA, 19 nt, Artificial Sequence
  Description of Artificial Sequence: Synthetic oligonucleotide
  Sense strand starting at position 849 of SEQ ID NO: 1243933
gguccauucccucagguga

SEQ ID NO: 1452305 - RNA, 19 nt, Artificial Sequence
  Description of Artificial Sequence: Synthetic oligonucleotide
  Antisense strand to SEQ ID NO: 1452304
ucaccugagggaauggacc

SEQ ID NO: 1452306 - RNA, 19 nt, Artificial Sequence
  Description of Artificial Sequence: Synthetic oligonucleotide
  Sense strand starting at position 980 of SEQ ID NO: 1243933
ccacgagaugcuuguucua

SEQ ID NO: 1452307 - RNA, 19 nt, Artificial Sequence
  Description of Artificial Sequence: Synthetic oligonucleotide
  Antisense strand to SEQ ID NO: 1452306
uagaacaagcaucucgugg

SEQ ID NO: 1452308 - RNA, 19 nt, Artificial Sequence
  Description of Artificial Sequence: Synthetic oligonucleotide
  Sense strand starting at position 982 of SEQ ID NO: 1243933
acgagaugcuuguucuaga

SEQ ID NO: 1452309 - RNA, 19 nt, Artificial Sequence
  Description of Artificial Sequence: Synthetic oligonucleotide
  Antisense strand to SEQ ID NO: 1452308
ucuagaacaagcaucucgu

SEQ ID NO: 1452310 - RNA, 19 nt, Artificial Sequence
  Description of Artificial Sequence: Synthetic oligonucleotide
  Sense strand starting at position 983 of SEQ ID NO: 1243933
cgagaugcuuguucuagag

SEQ ID NO: 1452311 - RNA, 19 nt, Artificial Sequence
  Description of Artificial Sequence: Synthetic oligonucleotide
  Antisense strand to SEQ ID NO: 1452310
cucuagaacaagcaucucg

SEQ ID NO: 1452312 - RNA, 19 nt, Artificial Sequence
  Description of Artificial Sequence: Synthetic oligonucleotide
  Sense strand starting at position 1505 of SEQ ID NO: 1243933
uuaccuugguugucacuau

SEQ ID NO: 1452313 - RNA, 19 nt, Artificial Sequence
  Description of Artificial Sequence: Synthetic oligonucleotide
  Antisense strand to SEQ ID NO: 1452312
auagugacaaccaagguaa

SEQ ID NO: 1452314 - RNA, 19 nt, Artificial Sequence
  Description of Artificial Sequence: Synthetic oligonucleotide
  Sense strand starting at position 2069 of SEQ ID NO: 1243933
gggugccuuggcagaguua

SEQ ID NO: 1452315 - RNA, 19 nt, Artificial Sequence
  Description of Artificial Sequence: Synthetic oligonucleotide
  Antisense strand to SEQ ID NO: 1452314
uaacucugccaaggcaccc

SEQ ID NO: 1452316 - RNA, 19 nt, Artificial Sequence
  Description of Artificial Sequence: Synthetic oligonucleotide
  Sense strand starting at position 2070 of SEQ ID NO: 1243933
ggugccuuggcagaguuaa

SEQ ID NO: 1452317 - RNA, 19 nt, Artificial Sequence
  Description of Artificial Sequence: Synthetic oligonucleotide
  Antisense strand to SEQ ID NO: 1452316
uuaacucugccaaggcacc

SEQ ID NO: 1452318 - RNA, 19 nt, Artificial Sequence
  Description of Artificial Sequence: Synthetic oligonucleotide
  Sense strand starting at position 2081 of SEQ ID NO: 1243933
agaguuaacuccuucugug

SEQ ID NO: 1452319 - RNA, 19 nt, Artificial Sequence
  Description of Artificial Sequence: Synthetic oligonucleotide
  Antisense strand to SEQ ID NO: 1452318
cacagaaggaguuaacucu

SEQ ID NO: 1452320 - RNA, 19 nt, Artificial Sequence
  Description of Artificial Sequence: Synthetic oligonucleotide
  Sense strand starting at position 2254 of SEQ ID NO: 1243933
gggagcacccacgguuauu

SEQ ID NO: 1452321 - RNA, 19 nt, Artificial Sequence
  Description of Artificial Sequence: Synthetic oligonucleotide
  Antisense strand to SEQ ID NO: 1452320
aauaaccgugggugcuccc

SEQ ID NO: 1452322 - RNA, 19 nt, Artificial Sequence
  Description of Artificial Sequence: Synthetic oligonucleotide
  Sense strand starting at position 2354 of SEQ ID NO: 1243933
cuaguucucccucagguuu

SEQ ID NO: 1452323 - RNA, 19 nt, Artificial Sequence
  Description of Artificial Sequence: Synthetic oligonucleotide
  Antisense strand to SEQ ID NO: 1452322
aaaccugagggagaacuag

SEQ ID NO: 1452324 - RNA, 19 nt, Artificial Sequence
  Description of Artificial Sequence: Synthetic oligonucleotide
  Sense strand starting at position 2392 of SEQ ID NO: 1243933
aguuaagcccuagacucuu

SEQ ID NO: 1452325 - RNA, 19 nt, Artificial Sequence
  Description of Artificial Sequence: Synthetic oligonucleotide
  Antisense strand to SEQ ID NO: 1452324
aagagucuagggcuuaacu

SEQ ID NO: 1452326 - RNA, 19 nt, Artificial Sequence
  Description of Artificial Sequence: Synthetic oligonucleotide
  Sense strand starting at position 2405 of SEQ ID NO: 1243933
acucuuuagugccugaaac

SEQ ID NO: 1452327 - RNA, 19 nt, Artificial Sequence
  Description of Artificial Sequence: Synthetic oligonucleotide
  Antisense strand to SEQ ID NO: 1452326
guuucaggcacuaaagagu

SEQ ID NO: 1452328 - RNA, 19 nt, Artificial Sequence
  Description of Artificial Sequence: Synthetic oligonucleotide
  Sense strand starting at position 2406 of SEQ ID NO: 1243933
cucuuuagugccugaaacu

SEQ ID NO: 1452329 - RNA, 19 nt, Artificial Sequence
  Description of Artificial Sequence: Synthetic oligonucleotide
  Antisense strand to SEQ ID NO: 1452328
aguuucaggcacuaaagag

SEQ ID NO: 1452330 - RNA, 19 nt, Artificial Sequence
  Description of Artificial Sequence: Synthetic oligonucleotide
  Sense strand starting at position 2407 of SEQ ID NO: 1243933
ucuuuagugccugaaacug

SEQ ID NO: 1452331 - RNA, 19 nt, Artificial Sequence
  Description of Artificial Sequence: Synthetic oligonucleotide
  Antisense strand to SEQ ID NO: 1452330
caguuucaggcacuaaaga

SEQ ID NO: 1452332 - RNA, 19 nt, Artificial Sequence
  Description of Artificial Sequence: Synthetic oligonucleotide
  Sense strand starting at position 2549 of SEQ ID NO: 1243933
cagguaauauuagugauau

SEQ ID NO: 1452333 - RNA, 19 nt, Artificial Sequence
  Description of Artificial Sequence: Synthetic oligonucleotide
  Antisense strand to SEQ ID NO: 1452332
auaucacuaauauuaccug

SEQ ID NO: 1452334 - RNA, 19 nt, Artificial Sequence
  Description of Artificial Sequence: Synthetic oligonucleotide
  Sense strand starting at position 2632 of SEQ ID NO: 1243933
cugacucucugagagggaa

SEQ ID NO: 1452335 - RNA, 19 nt, Artificial Sequence
  Description of Artificial Sequence: Synthetic oligonucleotide
  Antisense strand to SEQ ID NO: 1452334
uucccucucagagagucag

SEQ ID NO: 1452336 - RNA, 19 nt, Artificial Sequence
  Description of Artificial Sequence: Synthetic oligonucleotide
  Sense strand starting at position 2656 of SEQ ID NO: 1243933
auaauaguccaggaugucu

SEQ ID NO: 1452337 - RNA, 19 nt, Artificial Sequence
  Description of Artificial Sequence: Synthetic oligonucleotide
  Antisense strand to SEQ ID NO: 1452336
agacauccuggacuauuau

SEQ ID NO: 1452338 - RNA, 19 nt, Artificial Sequence
  Description of Artificial Sequence: Synthetic oligonucleotide
  Sense strand starting at position 2944 of SEQ ID NO: 1243933
ggaagaggucgcuaugcag

SEQ ID NO: 1452339 - RNA, 19 nt, Artificial Sequence
  Description of Artificial Sequence: Synthetic oligonucleotide
  Antisense strand to SEQ ID NO: 1452338
cugcauagcgaccucuucc

SEQ ID NO: 1452340 - RNA, 19 nt, Artificial Sequence
  Description of Artificial Sequence: Synthetic oligonucleotide
  Sense strand starting at position 3221 of SEQ ID NO: 1243933
ccucuuggucucugggaca

SEQ ID NO: 1452341 - RNA, 19 nt, Artificial Sequence
  Description of Artificial Sequence: Synthetic oligonucleotide
  Antisense strand to SEQ ID NO: 1452340
ugucccagagaccaagagg

SEQ ID NO: 1452342 - RNA, 19 nt, Artificial Sequence
  Description of Artificial Sequence: Synthetic oligonucleotide
  Sense strand starting at position 3307 of SEQ ID NO: 1243933
aaauuccagcugugaguaa

SEQ ID NO: 1452343 - RNA, 19 nt, Artificial Sequence
  Description of Artificial Sequence: Synthetic oligonucleotide
  Antisense strand to SEQ ID NO: 1452342
uuacucacagcuggaauuu

SEQ ID NO: 1452344 - RNA, 19 nt, Artificial Sequence
  Description of Artificial Sequence: Synthetic oligonucleotide
  Sense strand starting at position 3311 of SEQ ID NO: 1243933
uccagcugugaguaaagua

SEQ ID NO: 1452345 - RNA, 19 nt, Artificial Sequence
  Description of Artificial Sequence: Synthetic oligonucleotide
  Antisense strand to SEQ ID NO: 1452344
uacuuuacucacagcugga

SEQ ID NO: 1452346 - RNA, 19 nt, Artificial Sequence
  Description of Artificial Sequence: Synthetic oligonucleotide
  Sense strand starting at position 3574 of SEQ ID NO: 1243933
gguagaaauuguuugggac

SEQ ID NO: 1452347 - RNA, 19 nt, Artificial Sequence
  Description of Artificial Sequence: Synthetic oligonucleotide
  Antisense strand to SEQ ID NO: 1452346
gucccaaacaauuucuacc

SEQ ID NO: 1452348 - RNA, 19 nt, Artificial Sequence
  Description of Artificial Sequence: Synthetic oligonucleotide
  Sense strand starting at position 3575 of SEQ ID NO: 1243933
guagaaauuguuugggacu

SEQ ID NO: 1452349 - RNA, 19 nt, Artificial Sequence
  Description of Artificial Sequence: Synthetic oligonucleotide
  Antisense strand to SEQ ID NO: 1452348
agucccaaacaauuucuac

SEQ ID NO: 1452350 - RNA, 19 nt, Artificial Sequence
  Description of Artificial Sequence: Synthetic oligonucleotide
  Sense strand starting at position 3637 of SEQ ID NO: 1243933
gcaggagaauuccugcagu

SEQ ID NO: 1452351 - RNA, 19 nt, Artificial Sequence
  Description of Artificial Sequence: Synthetic oligonucleotide
  Antisense strand to SEQ ID NO: 1452350
acugcaggaauucuccugc

SEQ ID NO: 1452352 - RNA, 19 nt, Artificial Sequence
  Description of Artificial Sequence: Synthetic oligonucleotide
  Sense strand starting at position 3788 of SEQ ID NO: 1243933
gucuuccuacugugaaacu

SEQ ID NO: 1452353 - RNA, 19 nt, Artificial Sequence
  Description of Artificial Sequence: Synthetic oligonucleotide
  Antisense strand to SEQ ID NO: 1452352
aguuucacaguaggaagac

SEQ ID NO: 1452354 - RNA, 19 nt, Artificial Sequence
  Description of Artificial Sequence: Synthetic oligonucleotide
  Sense strand starting at position 3803 of SEQ ID NO: 1243933
aacuguagcuguuccaaga

SEQ ID NO: 1452355 - RNA, 19 nt, Artificial Sequence
  Description of Artificial Sequence: Synthetic oligonucleotide
  Antisense strand to SEQ ID NO: 1452354
ucuuggaacagcuacaguu

SEQ ID NO: 1452356 - RNA, 19 nt, Artificial Sequence
  Description of Artificial Sequence: Synthetic oligonucleotide
  Sense strand starting at position 3812 of SEQ ID NO: 1243933
uguuccaagaguuagugaa

SEQ ID NO: 1452357 - RNA, 19 nt, Artificial Sequence
  Description of Artificial Sequence: Synthetic oligonucleotide
  Antisense strand to SEQ ID NO: 1452356
uucacuaacucuuggaaca

SEQ ID NO: 1452358 - RNA, 19 nt, Artificial Sequence
  Description of Artificial Sequence: Synthetic oligonucleotide
  Sense strand starting at position 3814 of SEQ ID NO: 1243933
uuccaagaguuagugaaug

SEQ ID NO: 1452359 - RNA, 19 nt, Artificial Sequence
  Description of Artificial Sequence: Synthetic oligonucleotide
  Antisense strand to SEQ ID NO: 1452358
cauucacuaacucuuggaa

SEQ ID NO: 1452360 - RNA, 19 nt, Artificial Sequence
  Description of Artificial Sequence: Synthetic oligonucleotide
  Sense strand starting at position 3819 of SEQ ID NO: 1243933
agaguuagugaauggccua

SEQ ID NO: 1452361 - RNA, 19 nt, Artificial Sequence
  Description of Artificial Sequence: Synthetic oligonucleotide
  Antisense strand to SEQ ID NO: 1452360
uaggccauucacuaacucu

SEQ ID NO: 1452362 - RNA, 19 nt, Artificial Sequence
  Description of Artificial Sequence: Synthetic oligonucleotide
  Sense strand starting at position 3822 of SEQ ID NO: 1243933
guuagugaauggccuacau

SEQ ID NO: 1452363 - RNA, 19 nt, Artificial Sequence
  Description of Artificial Sequence: Synthetic oligonucleotide
  Antisense strand to SEQ ID NO: 1452362
auguaggccauucacuaac

SEQ ID NO: 1452364 - RNA, 19 nt, Artificial Sequence
  Description of Artificial Sequence: Synthetic oligonucleotide
  Sense strand starting at position 3824 of SEQ ID NO: 1243933
uagugaauggccuacaucu

SEQ ID NO: 1452365 - RNA, 19 nt, Artificial Sequence
  Description of Artificial Sequence: Synthetic oligonucleotide
  Antisense strand to SEQ ID NO: 1452364
agauguaggccauucacua

SEQ ID NO: 1452366 - RNA, 19 nt, Artificial Sequence
  Description of Artificial Sequence: Synthetic oligonucleotide
  Sense strand starting at position 3826 of SEQ ID NO: 1243933
gugaauggccuacaucuca

SEQ ID NO: 1452367 - RNA, 19 nt, Artificial Sequence
  Description of Artificial Sequence: Synthetic oligonucleotide
  Antisense strand to SEQ ID NO: 1452366
ugagauguaggccauucac

SEQ ID NO: 1452368 - RNA, 19 nt, Artificial Sequence
  Description of Artificial Sequence: Synthetic oligonucleotide
  Sense strand starting at position 3831 of SEQ ID NO: 1243933
uggccuacaucucagaaga

SEQ ID NO: 1452369 - RNA, 19 nt, Artificial Sequence
  Description of Artificial Sequence: Synthetic oligonucleotide
  Antisense strand to SEQ ID NO: 1452368
ucuucugagauguaggcca

SEQ ID NO: 1452370 - RNA, 19 nt, Artificial Sequence
  Description of Artificial Sequence: Synthetic oligonucleotide
  Sense strand starting at position 3833 of SEQ ID NO: 1243933
gccuacaucucagaagaau

SEQ ID NO: 1452371 - RNA, 19 nt, Artificial Sequence
  Description of Artificial Sequence: Synthetic oligonucleotide
  Antisense strand to SEQ ID NO: 1452370
auucuucugagauguaggc

SEQ ID NO: 1452372 - RNA, 19 nt, Artificial Sequence
  Description of Artificial Sequence: Synthetic oligonucleotide
  Sense strand starting at position 3909 of SEQ ID NO: 1243933
uguguuggccgagauagau

SEQ ID NO: 1452373 - RNA, 19 nt, Artificial Sequence
  Description of Artificial Sequence: Synthetic oligonucleotide
  Antisense strand to SEQ ID NO: 1452372
aucuaucucggccaacaca

SEQ ID NO: 1452374 - RNA, 19 nt, Artificial Sequence
  Description of Artificial Sequence: Synthetic oligonucleotide
  Sense strand starting at position 3940 of SEQ ID NO: 1243933
ccuagagucugucuuucca

SEQ ID NO: 1452375 - RNA, 19 nt, Artificial Sequence
  Description of Artificial Sequence: Synthetic oligonucleotide
  Antisense strand to SEQ ID NO: 1452374
uggaaagacagacucuagg

SEQ ID NO: 1452376 - RNA, 19 nt, Artificial Sequence
  Description of Artificial Sequence: Synthetic oligonucleotide
  Sense strand starting at position 108 of SEQ ID NO: 1243934
cagguaauauuagugauau

SEQ ID NO: 1452377 - RNA, 19 nt, Artificial Sequence
  Description of Artificial Sequence: Synthetic oligonucleotide
  Antisense strand to SEQ ID NO: 1452376
auaucacuaauauuaccug

SEQ ID NO: 1452378 - RNA, 19 nt, Artificial Sequence
  Description of Artificial Sequence: Synthetic oligonucleotide
  Sense strand starting at position 191 of SEQ ID NO: 1243934
cugacucucugagagggaa

SEQ ID NO: 1452379 - RNA, 19 nt, Artificial Sequence
  Description of Artificial Sequence: Synthetic oligonucleotide
  Antisense strand to SEQ ID NO: 1452378
uucccucucagagagucag

SEQ ID NO: 1452380 - RNA, 19 nt, Artificial Sequence
  Description of Artificial Sequence: Synthetic oligonucleotide
  Sense strand starting at position 215 of SEQ ID NO: 1243934
auaauaguccaggaugucu

SEQ ID NO: 1452381 - RNA, 19 nt, Artificial Sequence
  Description of Artificial Sequence: Synthetic oligonucleotide
  Antisense strand to SEQ ID NO: 1452380
agacauccuggacuauuau

SEQ ID NO: 1452382 - RNA, 19 nt, Artificial Sequence
  Description of Artificial Sequence: Synthetic oligonucleotide
  Sense strand starting at position 503 of SEQ ID NO: 1243934
ggaagaggucgcuaugcag

SEQ ID NO: 1452383 - RNA, 19 nt, Artificial Sequence
  Description of Artificial Sequence: Synthetic oligonucleotide
  Antisense strand to SEQ ID NO: 1452382
cugcauagcgaccucuucc

SEQ ID NO: 1452384 - RNA, 19 nt, Artificial Sequence
  Description of Artificial Sequence: Synthetic oligonucleotide
  Sense strand starting at position 780 of SEQ ID NO: 1243934
ccucuuggucucugggaca

SEQ ID NO: 1452385 - RNA, 19 nt, Artificial Sequence
  Description of Artificial Sequence: Synthetic oligonucleotide
  Antisense strand to SEQ ID NO: 1452384
ugucccagagaccaagagg

SEQ ID NO: 1452386 - RNA, 19 nt, Artificial Sequence
  Description of Artificial Sequence: Synthetic oligonucleotide
  Sense strand starting at position 866 of SEQ ID NO: 1243934
aaauuccagcugugaguaa

SEQ ID NO: 1452387 - RNA, 19 nt, Artificial Sequence
  Description of Artificial Sequence: Synthetic oligonucleotide
  Antisense strand to SEQ ID NO: 1452386
uuacucacagcuggaauuu

SEQ ID NO: 1452388 - RNA, 19 nt, Artificial Sequence
  Description of Artificial Sequence: Synthetic oligonucleotide
  Sense strand starting at position 870 of SEQ ID NO: 1243934
uccagcugugaguaaagua

SEQ ID NO: 1452389 - RNA, 19 nt, Artificial Sequence
  Description of Artificial Sequence: Synthetic oligonucleotide
  Antisense strand to SEQ ID NO: 1452388
uacuuuacucacagcugga

SEQ ID NO: 1452390 - RNA, 19 nt, Artificial Sequence
  Description of Artificial Sequence: Synthetic oligonucleotide
  Sense strand starting at position 1133 of SEQ ID NO: 1243934
gguagaaauuguuugggac

SEQ ID NO: 1452391 - RNA, 19 nt, Artificial Sequence
  Description of Artificial Sequence: Synthetic oligonucleotide
  Antisense strand to SEQ ID NO: 1452390
gucccaaacaauuucuacc

SEQ ID NO: 1452392 - RNA, 19 nt, Artificial Sequence
  Description of Artificial Sequence: Synthetic oligonucleotide
  Sense strand starting at position 1134 of SEQ ID NO: 1243934
guagaaauuguuugggacu

SEQ ID NO: 1452393 - RNA, 19 nt, Artificial Sequence
  Description of Artificial Sequence: Synthetic oligonucleotide
  Antisense strand to SEQ ID NO: 1452392
agucccaaacaauuucuac

SEQ ID NO: 1452394 - RNA, 19 nt, Artificial Sequence
  Description of Artificial Sequence: Synthetic oligonucleotide
  Sense strand starting at position 1196 of SEQ ID NO: 1243934
gcaggagaauuccugcagu

SEQ ID NO: 1452395 - RNA, 19 nt, Artificial Sequence
  Description of Artificial Sequence: Synthetic oligonucleotide
  Antisense strand to SEQ ID NO: 1452394
acugcaggaauucuccugc

SEQ ID NO: 1452396 - RNA, 19 nt, Artificial Sequence
  Description of Artificial Sequence: Synthetic oligonucleotide
  Sense strand starting at position 1347 of SEQ ID NO: 1243934
gucuuccuacugugaaacu

SEQ ID NO: 1452397 - RNA, 19 nt, Artificial Sequence
  Description of Artificial Sequence: Synthetic oligonucleotide
  Antisense strand to SEQ ID NO: 1452396
aguuucacaguaggaagac

SEQ ID NO: 1452398 - RNA, 19 nt, Artificial Sequence
  Description of Artificial Sequence: Synthetic oligonucleotide
  Sense strand starting at position 1362 of SEQ ID NO: 1243934
aacuguagcuguuccaaga

SEQ ID NO: 1452399 - RNA, 19 nt, Artificial Sequence
  Description of Artificial Sequence: Synthetic oligonucleotide
  Antisense strand to SEQ ID NO: 1452398
ucuuggaacagcuacaguu

SEQ ID NO: 1452400 - RNA, 19 nt, Artificial Sequence
  Description of Artificial Sequence: Synthetic oligonucleotide
  Sense strand starting at position 1371 of SEQ ID NO: 1243934
uguuccaagaguuagugaa

SEQ ID NO: 1452401 - RNA, 19 nt, Artificial Sequence
  Description of Artificial Sequence: Synthetic oligonucleotide
  Antisense strand to SEQ ID NO: 1452400
uucacuaacucuuggaaca

SEQ ID NO: 1452402 - RNA, 19 nt, Artificial Sequence
  Description of Artificial Sequence: Synthetic oligonucleotide
  Sense strand starting at position 1373 of SEQ ID NO: 1243934
uuccaagaguuagugaaug

SEQ ID NO: 1452403 - RNA, 19 nt, Artificial Sequence
  Description of Artificial Sequence: Synthetic oligonucleotide
  Antisense strand to SEQ ID NO: 1452402
cauucacuaacucuuggaa

SEQ ID NO: 1452404 - RNA, 19 nt, Artificial Sequence
  Description of Artificial Sequence: Synthetic oligonucleotide
  Sense strand starting at position 1378 of SEQ ID NO: 1243934
agaguuagugaauggccua

SEQ ID NO: 1452405 - RNA, 19 nt, Artificial Sequence
  Description of Artificial Sequence: Synthetic oligonucleotide
  Antisense strand to SEQ ID NO: 1452404
uaggccauucacuaacucu

SEQ ID NO: 1452406 - RNA, 19 nt, Artificial Sequence
  Description of Artificial Sequence: Synthetic oligonucleotide
  Sense strand starting at position 1381 of SEQ ID NO: 1243934
guuagugaauggccuacau

SEQ ID NO: 1452407 - RNA, 19 nt, Artificial Sequence
  Description of Artificial Sequence: Synthetic oligonucleotide
  Antisense strand to SEQ ID NO: 1452406
auguaggccauucacuaac

SEQ ID NO: 1452408 - RNA, 19 nt, Artificial Sequence
  Description of Artificial Sequence: Synthetic oligonucleotide
  Sense strand starting at position 1383 of SEQ ID NO: 1243934
uagugaauggccuacaucu

SEQ ID NO: 1452409 - RNA, 19 nt, Artificial Sequence
  Description of Artificial Sequence: Synthetic oligonucleotide
  Antisense strand to SEQ ID NO: 1452408
agauguaggccauucacua

SEQ ID NO: 1452410 - RNA, 19 nt, Artificial Sequence
  Description of Artificial Sequence: Synthetic oligonucleotide
  Sense strand starting at position 1385 of SEQ ID NO: 1243934
gugaauggccuacaucuca

SEQ ID NO: 1452411 - RNA, 19 nt, Artificial Sequence
  Description of Artificial Sequence: Synthetic oligonucleotide
  Antisense strand to SEQ ID NO: 1452410
ugagauguaggccauucac

SEQ ID NO: 1452412 - RNA, 19 nt, Artificial Sequence
  Description of Artificial Sequence: Synthetic oligonucleotide
  Sense strand starting at position 1468 of SEQ ID NO: 1243934
uguguuggccgagauagau

SEQ ID NO: 1452413 - RNA, 19 nt, Artificial Sequence
  Description of Artificial Sequence: Synthetic oligonucleotide
  Antisense strand to SEQ ID NO: 1452412
aucuaucucggccaacaca

SEQ ID NO: 1452414 - RNA, 19 nt, Artificial Sequence
  Description of Artificial Sequence: Synthetic oligonucleotide
  Sense strand starting at position 1499 of SEQ ID NO: 1243934
ccuagagucugucuuucca

SEQ ID NO: 1452415 - RNA, 19 nt, Artificial Sequence
  Description of Artificial Sequence: Synthetic oligonucleotide
  Antisense strand to SEQ ID NO: 1452414
uggaaagacagacucuagg

SEQ ID NO: 1452416 - RNA, 19 nt, Artificial Sequence
  Description of Artificial Sequence: Synthetic oligonucleotide
  Sense strand starting at position 2542 of SEQ ID NO: 1243934
cucucugcccaggaaucua

SEQ ID NO: 1452417 - RNA, 19 nt, Artificial Sequence
  Description of Artificial Sequence: Synthetic oligonucleotide
  Antisense strand to SEQ ID NO: 1452416
uagauuccugggcagagag

SEQ ID NO: 1452418 - RNA, 19 nt, Artificial Sequence
  Description of Artificial Sequence: Synthetic oligonucleotide
  Sense strand starting at position 2708 of SEQ ID NO: 1243934
cucugcagugcucaacgaa

SEQ ID NO: 1452419 - RNA, 19 nt, Artificial Sequence
  Description of Artificial Sequence: Synthetic oligonucleotide
  Antisense strand to SEQ ID NO: 1452418
uucguugagcacugcagag

SEQ ID NO: 1452420 - RNA, 19 nt, Artificial Sequence
  Description of Artificial Sequence: Synthetic oligonucleotide
  Sense strand starting at position 2770 of SEQ ID NO: 1243934
guuucuucgagguaaggaa

SEQ ID NO: 1452421 - RNA, 19 nt, Artificial Sequence
  Description of Artificial Sequence: Synthetic oligonucleotide
  Antisense strand to SEQ ID NO: 1452420
uuccuuaccucgaagaaac

SEQ ID NO: 1452422 - RNA, 19 nt, Artificial Sequence
  Description of Artificial Sequence: Synthetic oligonucleotide
  Sense strand starting at position 2807 of SEQ ID NO: 1243934
cuggugagguguuuggaga

SEQ ID NO: 1452423 - RNA, 19 nt, Artificial Sequence
  Description of Artificial Sequence: Synthetic oligonucleotide
  Antisense strand to SEQ ID NO: 1452422
ucuccaaacaccucaccag

SEQ ID NO: 1452424 - RNA, 19 nt, Artificial Sequence
  Description of Artificial Sequence: Synthetic oligonucleotide
  Sense strand starting at position 2808 of SEQ ID NO: 1243934
uggugagguguuuggagau

SEQ ID NO: 1452425 - RNA, 19 nt, Artificial Sequence
  Description of Artificial Sequence: Synthetic oligonucleotide
  Antisense strand to SEQ ID NO: 1452424
aucuccaaacaccucacca

SEQ ID NO: 1452426 - RNA, 19 nt, Artificial Sequence
  Description of Artificial Sequence: Synthetic oligonucleotide
  Sense strand starting at position 2811 of SEQ ID NO: 1243934
ugagguguuuggagauguu

SEQ ID NO: 1452427 - RNA, 19 nt, Artificial Sequence
  Description of Artificial Sequence: Synthetic oligonucleotide
  Antisense strand to SEQ ID NO: 1452426
aacaucuccaaacaccuca

SEQ ID NO: 1452428 - RNA, 19 nt, Artificial Sequence
  Description of Artificial Sequence: Synthetic oligonucleotide
  Sense strand starting at position 2814 of SEQ ID NO: 1243934
gguguuuggagauguuaag

SEQ ID NO: 1452429 - RNA, 19 nt, Artificial Sequence
  Description of Artificial Sequence: Synthetic oligonucleotide
  Antisense strand to SEQ ID NO: 1452428
cuuaacaucuccaaacacc

SEQ ID NO: 1452430 - RNA, 19 nt, Artificial Sequence
  Description of Artificial Sequence: Synthetic oligonucleotide
  Sense strand starting at position 2820 of SEQ ID NO: 1243934
uggagauguuaagcucaaa

SEQ ID NO: 1452431 - RNA, 19 nt, Artificial Sequence
  Description of Artificial Sequence: Synthetic oligonucleotide
  Antisense strand to SEQ ID NO: 1452430
uuugagcuuaacaucucca

SEQ ID NO: 1452432 - RNA, 19 nt, Artificial Sequence
  Description of Artificial Sequence: Synthetic oligonucleotide
  Sense strand starting at position 3092 of SEQ ID NO: 1243934
gggcuaaggucucuucuaa

SEQ ID NO: 1452433 - RNA, 19 nt, Artificial Sequence
  Description of Artificial Sequence: Synthetic oligonucleotide
  Antisense strand to SEQ ID NO: 1452432
uuagaagagaccuuagccc

SEQ ID NO: 1452434 - RNA, 19 nt, Artificial Sequence
  Description of Artificial Sequence: Synthetic oligonucleotide
  Sense strand starting at position 3126 of SEQ ID NO: 1243934
gccugugggauggauguua

SEQ ID NO: 1452435 - RNA, 19 nt, Artificial Sequence
  Description of Artificial Sequence: Synthetic oligonucleotide
  Antisense strand to SEQ ID NO: 1452434
uaacauccaucccacaggc

SEQ ID NO: 1452436 - RNA, 19 nt, Artificial Sequence
  Description of Artificial Sequence: Synthetic oligonucleotide
  Sense strand starting at position 3134 of SEQ ID NO: 1243934
gauggauguuaacugucca

SEQ ID NO: 1452437 - RNA, 19 nt, Artificial Sequence
  Description of Artificial Sequence: Synthetic oligonucleotide
  Antisense strand to SEQ ID NO: 1452436
uggacaguuaacauccauc

SEQ ID NO: 1452438 - RNA, 19 nt, Artificial Sequence
  Description of Artificial Sequence: Synthetic oligonucleotide
  Sense strand starting at position 3139 of SEQ ID NO: 1243934
auguuaacuguccaaacau

SEQ ID NO: 1452439 - RNA, 19 nt, Artificial Sequence
  Description of Artificial Sequence: Synthetic oligonucleotide
  Antisense strand to SEQ ID NO: 1452438
auguuuggacaguuaacau

SEQ ID NO: 1452440 - RNA, 19 nt, Artificial Sequence
  Description of Artificial Sequence: Synthetic oligonucleotide
  Sense strand starting at position 3208 of SEQ ID NO: 1243934
guucccaaguccuuacaaa

SEQ ID NO: 1452441 - RNA, 19 nt, Artificial Sequence
  Description of Artificial Sequence: Synthetic oligonucleotide
  Antisense strand to SEQ ID NO: 1452440
uuuguaaggacuugggaac

SEQ ID NO: 1452442 - RNA, 19 nt, Artificial Sequence
  Description of Artificial Sequence: Synthetic oligonucleotide
  Sense strand starting at position 3238 of SEQ ID NO: 1243934
gggauugccuaacaauaga

SEQ ID NO: 1452443 - RNA, 19 nt, Artificial Sequence
  Description of Artificial Sequence: Synthetic oligonucleotide
  Antisense strand to SEQ ID NO: 1452442
ucuauuguuaggcaauccc

SEQ ID NO: 1452444 - RNA, 19 nt, Artificial Sequence
  Description of Artificial Sequence: Synthetic oligonucleotide
  Sense strand starting at position 3672 of SEQ ID NO: 1243934
cugggcuuggcacagauua

SEQ ID NO: 1452445 - RNA, 19 nt, Artificial Sequence
  Description of Artificial Sequence: Synthetic oligonucleotide
  Antisense strand to SEQ ID NO: 1452444
uaaucugugccaagcccag

SEQ ID NO: 1452446 - RNA, 19 nt, Artificial Sequence
  Description of Artificial Sequence: Synthetic oligonucleotide
  Sense strand starting at position 3700 of SEQ ID NO: 1243934
gcacuuagauuaucagaug

SEQ ID NO: 1452447 - RNA, 19 nt, Artificial Sequence
  Description of Artificial Sequence: Synthetic oligonucleotide
  Antisense strand to SEQ ID NO: 1452446
caucugauaaucuaagugc

SEQ ID NO: 1452448 - RNA, 19 nt, Artificial Sequence
  Description of Artificial Sequence: Synthetic oligonucleotide
  Sense strand starting at position 3709 of SEQ ID NO: 1243934
uuaucagauggcugagcau

SEQ ID NO: 1452449 - RNA, 19 nt, Artificial Sequence
  Description of Artificial Sequence: Synthetic oligonucleotide
  Antisense strand to SEQ ID NO: 1452448
augcucagccaucugauaa

SEQ ID NO: 1452450 - RNA, 19 nt, Artificial Sequence
  Description of Artificial Sequence: Synthetic oligonucleotide
  Sense strand starting at position 3790 of SEQ ID NO: 1243934
uggauacucccagguguua

SEQ ID NO: 1452451 - RNA, 19 nt, Artificial Sequence
  Description of Artificial Sequence: Synthetic oligonucleotide
  Antisense strand to SEQ ID NO: 1452450
uaacaccugggaguaucca

SEQ ID NO: 1452452 - RNA, 19 nt, Artificial Sequence
  Description of Artificial Sequence: Synthetic oligonucleotide
  Sense strand starting at position 3854 of SEQ ID NO: 1243934
cuuugaagcucaucagaac

SEQ ID NO: 1452453 - RNA, 19 nt, Artificial Sequence
  Description of Artificial Sequence: Synthetic oligonucleotide
  Antisense strand to SEQ ID NO: 1452452
guucugaugagcuucaaag

SEQ ID NO: 1452454 - RNA, 19 nt, Artificial Sequence
  Description of Artificial Sequence: Synthetic oligonucleotide
  Sense strand starting at position 3855 of SEQ ID NO: 1243934
uuugaagcucaucagaacu

SEQ ID NO: 1452455 - RNA, 19 nt, Artificial Sequence
  Description of Artificial Sequence: Synthetic oligonucleotide
  Antisense strand to SEQ ID NO: 1452454
aguucugaugagcuucaaa

SEQ ID NO: 1452456 - RNA, 19 nt, Artificial Sequence
  Description of Artificial Sequence: Synthetic oligonucleotide
  Sense strand starting at position 271 of SEQ ID NO: 1243935
gcugguagcuggaguagau

SEQ ID NO: 1452457 - RNA, 19 nt, Artificial Sequence
  Description of Artificial Sequence: Synthetic oligonucleotide
  Antisense strand to SEQ ID NO: 1452456
aucuacuccagcuaccagc

SEQ ID NO: 1452458 - RNA, 19 nt, Artificial Sequence
  Description of Artificial Sequence: Synthetic oligonucleotide
  Sense strand starting at position 1115 of SEQ ID NO: 1243935
cugcgacuugaucgaggau

SEQ ID NO: 1452459 - RNA, 19 nt, Artificial Sequence
  Description of Artificial Sequence: Synthetic oligonucleotide
  Antisense strand to SEQ ID NO: 1452458
auccucgaucaagucgcag

SEQ ID NO: 1452460 - RNA, 19 nt, Artificial Sequence
  Description of Artificial Sequence: Synthetic oligonucleotide
  Sense strand starting at position 1138 of SEQ ID NO: 1243935
ugcugaaaugcccacgaaa

SEQ ID NO: 1452461 - RNA, 19 nt, Artificial Sequence
  Description of Artificial Sequence: Synthetic oligonucleotide
  Antisense strand to SEQ ID NO: 1452460
uuucgugggcauuucagca

SEQ ID NO: 1452462 - RNA, 19 nt, Artificial Sequence
  Description of Artificial Sequence: Synthetic oligonucleotide
  Sense strand starting at position 1140 of SEQ ID NO: 1243935
cugaaaugcccacgaaauc

SEQ ID NO: 1452463 - RNA, 19 nt, Artificial Sequence
  Description of Artificial Sequence: Synthetic oligonucleotide
  Antisense strand to SEQ ID NO: 1452462
gauuucgugggcauuucag

SEQ ID NO: 1452464 - RNA, 19 nt, Artificial Sequence
  Description of Artificial Sequence: Synthetic oligonucleotide
  Sense strand starting at position 1141 of SEQ ID NO: 1243935
ugaaaugcccacgaaauca

SEQ ID NO: 1452465 - RNA, 19 nt, Artificial Sequence
  Description of Artificial Sequence: Synthetic oligonucleotide
  Antisense strand to SEQ ID NO: 1452464
ugauuucgugggcauuuca

SEQ ID NO: 1452466 - RNA, 19 nt, Artificial Sequence
  Description of Artificial Sequence: Synthetic oligonucleotide
  Sense strand starting at position 1166 of SEQ ID NO: 1243935
uucggagguuuccuaacaa

SEQ ID NO: 1452467 - RNA, 19 nt, Artificial Sequence
  Description of Artificial Sequence: Synthetic oligonucleotide
  Antisense strand to SEQ ID NO: 1452466
uuguuaggaaaccuccgaa

SEQ ID NO: 1452468 - RNA, 19 nt, Artificial Sequence
  Description of Artificial Sequence: Synthetic oligonucleotide
  Sense strand starting at position 1502 of SEQ ID NO: 1243935
ggaggcuccguagguauau

SEQ ID NO: 1452469 - RNA, 19 nt, Artificial Sequence
  Description of Artificial Sequence: Synthetic oligonucleotide
  Antisense strand to SEQ ID NO: 1452468
auauaccuacggagccucc

SEQ ID NO: 1452470 - RNA, 19 nt, Artificial Sequence
  Description of Artificial Sequence: Synthetic oligonucleotide
  Sense strand starting at position 1503 of SEQ ID NO: 1243935
gaggcuccguagguauauu

SEQ ID NO: 1452471 - RNA, 19 nt, Artificial Sequence
  Description of Artificial Sequence: Synthetic oligonucleotide
  Antisense strand to SEQ ID NO: 1452470
aauauaccuacggagccuc

SEQ ID NO: 1452472 - RNA, 19 nt, Artificial Sequence
  Description of Artificial Sequence: Synthetic oligonucleotide
  Sense strand starting at position 1520 of SEQ ID NO: 1243935
uuccgacuugggcgaguaa

SEQ ID NO: 1452473 - RNA, 19 nt, Artificial Sequence
  Description of Artificial Sequence: Synthetic oligonucleotide
  Antisense strand to SEQ ID NO: 1452472
uuacucgcccaagucggaa

SEQ ID NO: 1452474 - RNA, 19 nt, Artificial Sequence
  Description of Artificial Sequence: Synthetic oligonucleotide
  Sense strand starting at position 1549 of SEQ ID NO: 1243935
cugcaagcccauugagauu

SEQ ID NO: 1452475 - RNA, 19 nt, Artificial Sequence
  Description of Artificial Sequence: Synthetic oligonucleotide
  Antisense strand to SEQ ID NO: 1452474
aaucucaaugggcuugcag

SEQ ID NO: 1452476 - RNA, 19 nt, Artificial Sequence
  Description of Artificial Sequence: Synthetic oligonucleotide
  Sense strand starting at position 1555 of SEQ ID NO: 1243935
gcccauugagauugaauug

SEQ ID NO: 1452477 - RNA, 19 nt, Artificial Sequence
  Description of Artificial Sequence: Synthetic oligonucleotide
  Antisense strand to SEQ ID NO: 1452476
caauucaaucucaaugggc

SEQ ID NO: 1452478 - RNA, 19 nt, Artificial Sequence
  Description of Artificial Sequence: Synthetic oligonucleotide
  Sense strand starting at position 1560 of SEQ ID NO: 1243935
uugagauugaauugguggu

SEQ ID NO: 1452479 - RNA, 19 nt, Artificial Sequence
  Description of Artificial Sequence: Synthetic oligonucleotide
  Antisense strand to SEQ ID NO: 1452478
accaccaauucaaucucaa

SEQ ID NO: 1452480 - RNA, 19 nt, Artificial Sequence
  Description of Artificial Sequence: Synthetic oligonucleotide
  Sense strand starting at position 1564 of SEQ ID NO: 1243935
gauugaauuggugguggua

SEQ ID NO: 1452481 - RNA, 19 nt, Artificial Sequence
  Description of Artificial Sequence: Synthetic oligonucleotide
  Antisense strand to SEQ ID NO: 1452480
uaccaccaccaauucaauc

SEQ ID NO: 1452482 - RNA, 19 nt, Artificial Sequence
  Description of Artificial Sequence: Synthetic oligonucleotide
  Sense strand starting at position 1609 of SEQ ID NO: 1243935
agggcuggcccgaguagua

SEQ ID NO: 1452483 - RNA, 19 nt, Artificial Sequence
  Description of Artificial Sequence: Synthetic oligonucleotide
  Antisense strand to SEQ ID NO: 1452482
uacuacucgggccagcccu

SEQ ID NO: 1452484 - RNA, 19 nt, Artificial Sequence
  Description of Artificial Sequence: Synthetic oligonucleotide
  Sense strand starting at position 1654 of SEQ ID NO: 1243935
ccaggucagugacagaaga

SEQ ID NO: 1452485 - RNA, 19 nt, Artificial Sequence
  Description of Artificial Sequence: Synthetic oligonucleotide
  Antisense strand to SEQ ID NO: 1452484
ucuucugucacugaccugg

SEQ ID NO: 1452486 - RNA, 19 nt, Artificial Sequence
  Description of Artificial Sequence: Synthetic oligonucleotide
  Sense strand starting at position 1723 of SEQ ID NO: 1243935
uggagaugucggugaggau

SEQ ID NO: 1452487 - RNA, 19 nt, Artificial Sequence
  Description of Artificial Sequence: Synthetic oligonucleotide
  Antisense strand to SEQ ID NO: 1452486
auccucaccgacaucucca

SEQ ID NO: 1452488 - RNA, 19 nt, Artificial Sequence
  Description of Artificial Sequence: Synthetic oligonucleotide
  Sense strand starting at position 1747 of SEQ ID NO: 1243935
ugagcuugcgaucgaagga

SEQ ID NO: 1452489 - RNA, 19 nt, Artificial Sequence
  Description of Artificial Sequence: Synthetic oligonucleotide
  Antisense strand to SEQ ID NO: 1452488
uccuucgaucgcaagcuca

SEQ ID NO: 1452490 - RNA, 19 nt, Artificial Sequence
  Description of Artificial Sequence: Synthetic oligonucleotide
  Sense strand starting at position 2021 of SEQ ID NO: 1243935
cgguuauagacucaauagu

SEQ ID NO: 1452491 - RNA, 19 nt, Artificial Sequence
  Description of Artificial Sequence: Synthetic oligonucleotide
  Antisense strand to SEQ ID NO: 1452490
acuauugagucuauaaccg

SEQ ID NO: 1452492 - RNA, 19 nt, Artificial Sequence
  Description of Artificial Sequence: Synthetic oligonucleotide
  Sense strand starting at position 2189 of SEQ ID NO: 1243935
cagucuuuguuguuacuca

SEQ ID NO: 1452493 - RNA, 19 nt, Artificial Sequence
  Description of Artificial Sequence: Synthetic oligonucleotide
  Antisense strand to SEQ ID NO: 1452492
ugaguaacaacaaagacug

SEQ ID NO: 1452494 - RNA, 19 nt, Artificial Sequence
  Description of Artificial Sequence: Synthetic oligonucleotide
  Sense strand starting at position 2266 of SEQ ID NO: 1243935
ccagauaaguucucugaag

SEQ ID NO: 1452495 - RNA, 19 nt, Artificial Sequence
  Description of Artificial Sequence: Synthetic oligonucleotide
  Antisense strand to SEQ ID NO: 1452494
cuucagagaacuuaucugg

SEQ ID NO: 1452496 - RNA, 19 nt, Artificial Sequence
  Description of Artificial Sequence: Synthetic oligonucleotide
  Sense strand starting at position 2267 of SEQ ID NO: 1243935
cagauaaguucucugaagg

SEQ ID NO: 1452497 - RNA, 19 nt, Artificial Sequence
  Description of Artificial Sequence: Synthetic oligonucleotide
  Antisense strand to SEQ ID NO: 1452496
ccuucagagaacuuaucug

SEQ ID NO: 1452498 - RNA, 19 nt, Artificial Sequence
  Description of Artificial Sequence: Synthetic oligonucleotide
  Sense strand starting at position 2329 of SEQ ID NO: 1243935
caggaucugucagucuguu

SEQ ID NO: 1452499 - RNA, 19 nt, Artificial Sequence
  Description of Artificial Sequence: Synthetic oligonucleotide
  Antisense strand to SEQ ID NO: 1452498
aacagacugacagauccug

SEQ ID NO: 1452500 - RNA, 19 nt, Artificial Sequence
  Description of Artificial Sequence: Synthetic oligonucleotide
  Sense strand starting at position 2411 of SEQ ID NO: 1243935
guguguuuguggaaagaga

SEQ ID NO: 1452501 - RNA, 19 nt, Artificial Sequence
  Description of Artificial Sequence: Synthetic oligonucleotide
  Antisense strand to SEQ ID NO: 1452500
ucucuuuccacaaacacac

SEQ ID NO: 1452502 - RNA, 19 nt, Artificial Sequence
  Description of Artificial Sequence: Synthetic oligonucleotide
  Sense strand starting at position 2418 of SEQ ID NO: 1243935
uguggaaagagauggucua

SEQ ID NO: 1452503 - RNA, 19 nt, Artificial Sequence
  Description of Artificial Sequence: Synthetic oligonucleotide
  Antisense strand to SEQ ID NO: 1452502
uagaccaucucuuuccaca

SEQ ID NO: 1452504 - RNA, 19 nt, Artificial Sequence
  Description of Artificial Sequence: Synthetic oligonucleotide
  Sense strand starting at position 2419 of SEQ ID NO: 1243935
guggaaagagauggucuaa

SEQ ID NO: 1452505 - RNA, 19 nt, Artificial Sequence
  Description of Artificial Sequence: Synthetic oligonucleotide
  Antisense strand to SEQ ID NO: 1452504
uuagaccaucucuuuccac

SEQ ID NO: 1452506 - RNA, 19 nt, Artificial Sequence
  Description of Artificial Sequence: Synthetic oligonucleotide
  Sense strand starting at position 2581 of SEQ ID NO: 1243935
ggugaaagagaauguuuga

SEQ ID NO: 1452507 - RNA, 19 nt, Artificial Sequence
  Description of Artificial Sequence: Synthetic oligonucleotide
  Antisense strand to SEQ ID NO: 1452506
ucaaacauucucuuucacc

SEQ ID NO: 1452508 - RNA, 19 nt, Artificial Sequence
  Description of Artificial Sequence: Synthetic oligonucleotide
  Sense strand starting at position 2641 of SEQ ID NO: 1243935
uugcuauuauauccuugua

SEQ ID NO: 1452509 - RNA, 19 nt, Artificial Sequence
  Description of Artificial Sequence: Synthetic oligonucleotide
  Antisense strand to SEQ ID NO: 1452508
uacaaggauauaauagcaa

SEQ ID NO: 1452510 - RNA, 19 nt, Artificial Sequence
  Description of Artificial Sequence: Synthetic oligonucleotide
  Sense strand starting at position 2643 of SEQ ID NO: 1243935
gcuauuauauccuuguauu

SEQ ID NO: 1452511 - RNA, 19 nt, Artificial Sequence
  Description of Artificial Sequence: Synthetic oligonucleotide
  Antisense strand to SEQ ID NO: 1452510
aauacaaggauauaauagc

SEQ ID NO: 1452512 - RNA, 19 nt, Artificial Sequence
  Description of Artificial Sequence: Synthetic oligonucleotide
  Sense strand starting at position 2728 of SEQ ID NO: 1243935
augucuugagccuaugaaa

SEQ ID NO: 1452513 - RNA, 19 nt, Artificial Sequence
  Description of Artificial Sequence: Synthetic oligonucleotide
  Antisense strand to SEQ ID NO: 1452512
uuucauaggcucaagacau

SEQ ID NO: 1452514 - RNA, 19 nt, Artificial Sequence
  Description of Artificial Sequence: Synthetic oligonucleotide
  Sense strand starting at position 2761 of SEQ ID NO: 1243935
cuaggaggauccuauugga

SEQ ID NO: 1452515 - RNA, 19 nt, Artificial Sequence
  Description of Artificial Sequence: Synthetic oligonucleotide
  Antisense strand to SEQ ID NO: 1452514
uccaauaggauccuccuag

SEQ ID NO: 1452516 - RNA, 19 nt, Artificial Sequence
  Description of Artificial Sequence: Synthetic oligonucleotide
  Sense strand starting at position 2786 of SEQ ID NO: 1243935
gaagcagaccuguguggau

SEQ ID NO: 1452517 - RNA, 19 nt, Artificial Sequence
  Description of Artificial Sequence: Synthetic oligonucleotide
  Antisense strand to SEQ ID NO: 1452516
auccacacaggucugcuuc

SEQ ID NO: 1452518 - RNA, 19 nt, Artificial Sequence
  Description of Artificial Sequence: Synthetic oligonucleotide
  Sense strand starting at position 2788 of SEQ ID NO: 1243935
agcagaccuguguggauuu

SEQ ID NO: 1452519 - RNA, 19 nt, Artificial Sequence
  Description of Artificial Sequence: Synthetic oligonucleotide
  Antisense strand to SEQ ID NO: 1452518
aaauccacacaggucugcu

SEQ ID NO: 1452520 - RNA, 19 nt, Artificial Sequence
  Description of Artificial Sequence: Synthetic oligonucleotide
  Sense strand starting at position 2852 of SEQ ID NO: 1243935
ucuccaaagcuauguaugu

SEQ ID NO: 1452521 - RNA, 19 nt, Artificial Sequence
  Description of Artificial Sequence: Synthetic oligonucleotide
  Antisense strand to SEQ ID NO: 1452520
acauacauagcuuuggaga

SEQ ID NO: 1452522 - RNA, 19 nt, Artificial Sequence
  Description of Artificial Sequence: Synthetic oligonucleotide
  Sense strand starting at position 2887 of SEQ ID NO: 1243935
cccagucuugcugaaggua

SEQ ID NO: 1452523 - RNA, 19 nt, Artificial Sequence
  Description of Artificial Sequence: Synthetic oligonucleotide
  Antisense strand to SEQ ID NO: 1452522
uaccuucagcaagacuggg

SEQ ID NO: 1452524 - RNA, 19 nt, Artificial Sequence
  Description of Artificial Sequence: Synthetic oligonucleotide
  Sense strand starting at position 2955 of SEQ ID NO: 1243935
gugacugugugcuucagua

SEQ ID NO: 1452525 - RNA, 19 nt, Artificial Sequence
  Description of Artificial Sequence: Synthetic oligonucleotide
  Antisense strand to SEQ ID NO: 1452524
uacugaagcacacagucac

SEQ ID NO: 1452526 - RNA, 19 nt, Artificial Sequence
  Description of Artificial Sequence: Synthetic oligonucleotide
  Sense strand starting at position 3062 of SEQ ID NO: 1243935
gggugugugaugugaggau

SEQ ID NO: 1452527 - RNA, 19 nt, Artificial Sequence
  Description of Artificial Sequence: Synthetic oligonucleotide
  Antisense strand to SEQ ID NO: 1452526
auccucacaucacacaccc

SEQ ID NO: 1452528 - RNA, 19 nt, Artificial Sequence
  Description of Artificial Sequence: Synthetic oligonucleotide
  Sense strand starting at position 3071 of SEQ ID NO: 1243935
augugaggauuucaugugu

SEQ ID NO: 1452529 - RNA, 19 nt, Artificial Sequence
  Description of Artificial Sequence: Synthetic oligonucleotide
  Antisense strand to SEQ ID NO: 1452528
acacaugaaauccucacau

SEQ ID NO: 1452530 - RNA, 19 nt, Artificial Sequence
  Description of Artificial Sequence: Synthetic oligonucleotide
  Sense strand starting at position 3082 of SEQ ID NO: 1243935
ucauguguuccacaguauc

SEQ ID NO: 1452531 - RNA, 19 nt, Artificial Sequence
  Description of Artificial Sequence: Synthetic oligonucleotide
  Antisense strand to SEQ ID NO: 1452530
gauacuguggaacacauga

SEQ ID NO: 1452532 - RNA, 19 nt, Artificial Sequence
  Description of Artificial Sequence: Synthetic oligonucleotide
  Sense strand starting at position 3241 of SEQ ID NO: 1243935
gcuguacugcuccacugaa

SEQ ID NO: 1452533 - RNA, 19 nt, Artificial Sequence
  Description of Artificial Sequence: Synthetic oligonucleotide
  Antisense strand to SEQ ID NO: 1452532
uucaguggagcaguacagc

SEQ ID NO: 1452534 - RNA, 19 nt, Artificial Sequence
  Description of Artificial Sequence: Synthetic oligonucleotide
  Sense strand starting at position 3693 of SEQ ID NO: 1243935
ggcuuugagagcugcaguu

SEQ ID NO: 1452535 - RNA, 19 nt, Artificial Sequence
  Description of Artificial Sequence: Synthetic oligonucleotide
  Antisense strand to SEQ ID NO: 1452534
aacugcagcucucaaagcc

SEQ ID NO: 1452536 - RNA, 19 nt, Artificial Sequence
  Description of Artificial Sequence: Synthetic oligonucleotide
  Sense strand starting at position 1058 of SEQ ID NO: 1243936
gaucuuuaccuucgggaag

SEQ ID NO: 1452537 - RNA, 19 nt, Artificial Sequence
  Description of Artificial Sequence: Synthetic oligonucleotide
  Antisense strand to SEQ ID NO: 1452536
cuucccgaagguaaagauc

SEQ ID NO: 1452538 - RNA, 19 nt, Artificial Sequence
  Description of Artificial Sequence: Synthetic oligonucleotide
  Sense strand starting at position 1059 of SEQ ID NO: 1243936
aucuuuaccuucgggaaga

SEQ ID NO: 1452539 - RNA, 19 nt, Artificial Sequence
  Description of Artificial Sequence: Synthetic oligonucleotide
  Antisense strand to SEQ ID NO: 1452538
ucuucccgaagguaaagau

SEQ ID NO: 1452540 - RNA, 19 nt, Artificial Sequence
  Description of Artificial Sequence: Synthetic oligonucleotide
  Sense strand starting at position 1060 of SEQ ID NO: 1243936
ucuuuaccuucgggaagaa

SEQ ID NO: 1452541 - RNA, 19 nt, Artificial Sequence
  Description of Artificial Sequence: Synthetic oligonucleotide
  Antisense strand to SEQ ID NO: 1452540
uucuucccgaagguaaaga

SEQ ID NO: 1452542 - RNA, 19 nt, Artificial Sequence
  Description of Artificial Sequence: Synthetic oligonucleotide
  Sense strand starting at position 1089 of SEQ ID NO: 1243936
aaugaaagaucaggaggaa

SEQ ID NO: 1452543 - RNA, 19 nt, Artificial Sequence
  Description of Artificial Sequence: Synthetic oligonucleotide
  Antisense strand to SEQ ID NO: 1452542
uuccuccugaucuuucauu

SEQ ID NO: 1452544 - RNA, 19 nt, Artificial Sequence
  Description of Artificial Sequence: Synthetic oligonucleotide
  Sense strand starting at position 1178 of SEQ ID NO: 1243936
ucccuaggcugggaacauu

SEQ ID NO: 1452545 - RNA, 19 nt, Artificial Sequence
  Description of Artificial Sequence: Synthetic oligonucleotide
  Antisense strand to SEQ ID NO: 1452544
aauguucccagccuaggga

SEQ ID NO: 1452546 - RNA, 19 nt, Artificial Sequence
  Description of Artificial Sequence: Synthetic oligonucleotide
  Sense strand starting at position 1217 of SEQ ID NO: 1243936
ccaggagccuucugaguuc

SEQ ID NO: 1452547 - RNA, 19 nt, Artificial Sequence
  Description of Artificial Sequence: Synthetic oligonucleotide
  Antisense strand to SEQ ID NO: 1452546
gaacucagaaggcuccugg

SEQ ID NO: 1452548 - RNA, 19 nt, Artificial Sequence
  Description of Artificial Sequence: Synthetic oligonucleotide
  Sense strand starting at position 1374 of SEQ ID NO: 1243936
ccuggagaacugugacaac

SEQ ID NO: 1452549 - RNA, 19 nt, Artificial Sequence
  Description of Artificial Sequence: Synthetic oligonucleotide
  Antisense strand to SEQ ID NO: 1452548
guugucacaguucuccagg

SEQ ID NO: 1452550 - RNA, 19 nt, Artificial Sequence
  Description of Artificial Sequence: Synthetic oligonucleotide
  Sense strand starting at position 2128 of SEQ ID NO: 1243936
gagcaaugcucagaggcuu

SEQ ID NO: 1452551 - RNA, 19 nt, Artificial Sequence
  Description of Artificial Sequence: Synthetic oligonucleotide
  Antisense strand to SEQ ID NO: 1452550
aagccucugagcauugcuc

SEQ ID NO: 1452552 - RNA, 19 nt, Artificial Sequence
  Description of Artificial Sequence: Synthetic oligonucleotide
  Sense strand starting at position 2541 of SEQ ID NO: 1243936
cgccuagcucuccaggaau

SEQ ID NO: 1452553 - RNA, 19 nt, Artificial Sequence
  Description of Artificial Sequence: Synthetic oligonucleotide
  Antisense strand to SEQ ID NO: 1452552
auuccuggagagcuaggcg

SEQ ID NO: 1452554 - RNA, 19 nt, Artificial Sequence
  Description of Artificial Sequence: Synthetic oligonucleotide
  Sense strand starting at position 2619 of SEQ ID NO: 1243936
ggguuucuguucuuccaag

SEQ ID NO: 1452555 - RNA, 19 nt, Artificial Sequence
  Description of Artificial Sequence: Synthetic oligonucleotide
  Antisense strand to SEQ ID NO: 1452554
cuuggaagaacagaaaccc

SEQ ID NO: 1452556 - RNA, 19 nt, Artificial Sequence
  Description of Artificial Sequence: Synthetic oligonucleotide
  Sense strand starting at position 3154 of SEQ ID NO: 1243936
gcugaauucgcauagcccu

SEQ ID NO: 1452557 - RNA, 19 nt, Artificial Sequence
  Description of Artificial Sequence: Synthetic oligonucleotide
  Antisense strand to SEQ ID NO: 1452556
agggcuaugcgaauucagc

SEQ ID NO: 1452558 - RNA, 19 nt, Artificial Sequence
  Description of Artificial Sequence: Synthetic oligonucleotide
  Sense strand starting at position 3203 of SEQ ID NO: 1243936
ccaaguuccuucccggaca

SEQ ID NO: 1452559 - RNA, 19 nt, Artificial Sequence
  Description of Artificial Sequence: Synthetic oligonucleotide
  Antisense strand to SEQ ID NO: 1452558
uguccgggaaggaacuugg

SEQ ID NO: 1452560 - RNA, 19 nt, Artificial Sequence
  Description of Artificial Sequence: Synthetic oligonucleotide
  Sense strand starting at position 3453 of SEQ ID NO: 1243936
ccaguuccagcagagaaau

SEQ ID NO: 1452561 - RNA, 19 nt, Artificial Sequence
  Description of Artificial Sequence: Synthetic oligonucleotide
  Antisense strand to SEQ ID NO: 1452560
auuucucugcuggaacugg

SEQ ID NO: 1452562 - RNA, 19 nt, Artificial Sequence
  Description of Artificial Sequence: Synthetic oligonucleotide
  Sense strand starting at position 3473 of SEQ ID NO: 1243936
cuagaaauguauucuaagg

SEQ ID NO: 1452563 - RNA, 19 nt, Artificial Sequence
  Description of Artificial Sequence: Synthetic oligonucleotide
  Antisense strand to SEQ ID NO: 1452562
ccuuagaauacauuucuag

SEQ ID NO: 1452564 - RNA, 19 nt, Artificial Sequence
  Description of Artificial Sequence: Synthetic oligonucleotide
  Sense strand starting at position 3475 of SEQ ID NO: 1243936
agaaauguauucuaaggaa

SEQ ID NO: 1452565 - RNA, 19 nt, Artificial Sequence
  Description of Artificial Sequence: Synthetic oligonucleotide
  Antisense strand to SEQ ID NO: 1452564
uuccuuagaauacauuucu

SEQ ID NO: 1452566 - RNA, 19 nt, Artificial Sequence
  Description of Artificial Sequence: Synthetic oligonucleotide
  Sense strand starting at position 3487 of SEQ ID NO: 1243936
uaaggaaaucugggugugu

SEQ ID NO: 1452567 - RNA, 19 nt, Artificial Sequence
  Description of Artificial Sequence: Synthetic oligonucleotide
  Antisense strand to SEQ ID NO: 1452566
acacacccagauuuccuua

SEQ ID NO: 1452568 - RNA, 19 nt, Artificial Sequence
  Description of Artificial Sequence: Synthetic oligonucleotide
  Sense strand starting at position 3553 of SEQ ID NO: 1243936
ccacucuguuguccuuaga

SEQ ID NO: 1452569 - RNA, 19 nt, Artificial Sequence
  Description of Artificial Sequence: Synthetic oligonucleotide
  Antisense strand to SEQ ID NO: 1452568
ucuaaggacaacagagugg

SEQ ID NO: 1452570 - RNA, 19 nt, Artificial Sequence
  Description of Artificial Sequence: Synthetic oligonucleotide
  Sense strand starting at position 3556 of SEQ ID NO: 1243936
cucuguuguccuuagaucu

SEQ ID NO: 1452571 - RNA, 19 nt, Artificial Sequence
  Description of Artificial Sequence: Synthetic oligonucleotide
  Antisense strand to SEQ ID NO: 1452570
agaucuaaggacaacagag

SEQ ID NO: 1452572 - RNA, 19 nt, Artificial Sequence
  Description of Artificial Sequence: Synthetic oligonucleotide
  Sense strand starting at position 3563 of SEQ ID NO: 1243936
guccuuagaucucagacaa

SEQ ID NO: 1452573 - RNA, 19 nt, Artificial Sequence
  Description of Artificial Sequence: Synthetic oligonucleotide
  Antisense strand to SEQ ID NO: 1452572
uugucugagaucuaaggac

SEQ ID NO: 1452574 - RNA, 19 nt, Artificial Sequence
  Description of Artificial Sequence: Synthetic oligonucleotide
  Sense strand starting at position 3620 of SEQ ID NO: 1243936
aggacaaggucaugauauu

SEQ ID NO: 1452575 - RNA, 19 nt, Artificial Sequence
  Description of Artificial Sequence: Synthetic oligonucleotide
  Antisense strand to SEQ ID NO: 1452574
aauaucaugaccuuguccu

SEQ ID NO: 1452576 - RNA, 19 nt, Artificial Sequence
  Description of Artificial Sequence: Synthetic oligonucleotide
  Sense strand starting at position 3792 of SEQ ID NO: 1243936
aguucugucacagaaggca

SEQ ID NO: 1452577 - RNA, 19 nt, Artificial Sequence
  Description of Artificial Sequence: Synthetic oligonucleotide
  Antisense strand to SEQ ID NO: 1452576
ugccuucugugacagaacu

SEQ ID NO: 1452578 - RNA, 19 nt, Artificial Sequence
  Description of Artificial Sequence: Synthetic oligonucleotide
  Sense strand starting at position 3885 of SEQ ID NO: 1243936
caaagaaguugagcuucua

SEQ ID NO: 1452579 - RNA, 19 nt, Artificial Sequence
  Description of Artificial Sequence: Synthetic oligonucleotide
  Antisense strand to SEQ ID NO: 1452578
uagaagcucaacuucuuug

SEQ ID NO: 1452580 - RNA, 19 nt, Artificial Sequence
  Description of Artificial Sequence: Synthetic oligonucleotide
  Sense strand starting at position 3900 of SEQ ID NO: 1243936
ucuaaauccuagggucacu

SEQ ID NO: 1452581 - RNA, 19 nt, Artificial Sequence
  Description of Artificial Sequence: Synthetic oligonucleotide
  Antisense strand to SEQ ID NO: 1452580
agugacccuaggauuuaga

SEQ ID NO: 1452582 - RNA, 19 nt, Artificial Sequence
  Description of Artificial Sequence: Synthetic oligonucleotide
  Sense strand starting at position 3912 of SEQ ID NO: 1243936
ggucacuucuggcucugau

SEQ ID NO: 1452583 - RNA, 19 nt, Artificial Sequence
  Description of Artificial Sequence: Synthetic oligonucleotide
  Antisense strand to SEQ ID NO: 1452582
aucagagccagaagugacc

SEQ ID NO: 1452584 - RNA, 19 nt, Artificial Sequence
  Description of Artificial Sequence: Synthetic oligonucleotide
  Sense strand starting at position 3921 of SEQ ID NO: 1243936
uggcucugaugguuuguga

SEQ ID NO: 1452585 - RNA, 19 nt, Artificial Sequence
  Description of Artificial Sequence: Synthetic oligonucleotide
  Antisense strand to SEQ ID NO: 1452584
ucacaaaccaucagagcca

SEQ ID NO: 1452586 - RNA, 19 nt, Artificial Sequence
  Description of Artificial Sequence: Synthetic oligonucleotide
  Sense strand starting at position 3924 of SEQ ID NO: 1243936
cucugaugguuugugagca

SEQ ID NO: 1452587 - RNA, 19 nt, Artificial Sequence
  Description of Artificial Sequence: Synthetic oligonucleotide
  Antisense strand to SEQ ID NO: 1452586
ugcucacaaaccaucagag

SEQ ID NO: 1452588 - RNA, 19 nt, Artificial Sequence
  Description of Artificial Sequence: Synthetic oligonucleotide
  Sense strand starting at position 3925 of SEQ ID NO: 1243936
ucugaugguuugugagcau

SEQ ID NO: 1452589 - RNA, 19 nt, Artificial Sequence
  Description of Artificial Sequence: Synthetic oligonucleotide
  Antisense strand to SEQ ID NO: 1452588
augcucacaaaccaucaga

SEQ ID NO: 1452590 - RNA, 19 nt, Artificial Sequence
  Description of Artificial Sequence: Synthetic oligonucleotide
  Sense strand starting at position 3929 of SEQ ID NO: 1243936
augguuugugagcauguca

SEQ ID NO: 1452591 - RNA, 19 nt, Artificial Sequence
  Description of Artificial Sequence: Synthetic oligonucleotide
  Antisense strand to SEQ ID NO: 1452590
ugacaugcucacaaaccau

SEQ ID NO: 1452592 - RNA, 19 nt, Artificial Sequence
  Description of Artificial Sequence: Synthetic oligonucleotide
  Sense strand starting at position 3966 of SEQ ID NO: 1243936
ggaagaugucuugguccug

SEQ ID NO: 1452593 - RNA, 19 nt, Artificial Sequence
  Description of Artificial Sequence: Synthetic oligonucleotide
  Antisense strand to SEQ ID NO: 1452592
caggaccaagacaucuucc

SEQ ID NO: 1452594 - RNA, 19 nt, Artificial Sequence
  Description of Artificial Sequence: Synthetic oligonucleotide
  Sense strand starting at position 3967 of SEQ ID NO: 1243936
gaagaugucuugguccuga

SEQ ID NO: 1452595 - RNA, 19 nt, Artificial Sequence
  Description of Artificial Sequence: Synthetic oligonucleotide
  Antisense strand to SEQ ID NO: 1452594
ucaggaccaagacaucuuc

SEQ ID NO: 1452596 - RNA, 19 nt, Artificial Sequence
  Description of Artificial Sequence: Synthetic oligonucleotide
  Sense strand starting at position 3972 of SEQ ID NO: 1243936
ugucuugguccugagcuga

SEQ ID NO: 1452597 - RNA, 19 nt, Artificial Sequence
  Description of Artificial Sequence: Synthetic oligonucleotide
  Antisense strand to SEQ ID NO: 1452596
ucagcucaggaccaagaca

SEQ ID NO: 1452598 - RNA, 19 nt, Artificial Sequence
  Description of Artificial Sequence: Synthetic oligonucleotide
  Sense strand starting at position 224 of SEQ ID NO: 1243937
aguucugucacagaaggca

SEQ ID NO: 1452599 - RNA, 19 nt, Artificial Sequence
  Description of Artificial Sequence: Synthetic oligonucleotide
  Antisense strand to SEQ ID NO: 1452598
ugccuucugugacagaacu

SEQ ID NO: 1452600 - RNA, 19 nt, Artificial Sequence
  Description of Artificial Sequence: Synthetic oligonucleotide
  Sense strand starting at position 317 of SEQ ID NO: 1243937
caaagaaguugagcuucua

SEQ ID NO: 1452601 - RNA, 19 nt, Artificial Sequence
  Description of Artificial Sequence: Synthetic oligonucleotide
  Antisense strand to SEQ ID NO: 1452600
uagaagcucaacuucuuug

SEQ ID NO: 1452602 - RNA, 19 nt, Artificial Sequence
  Description of Artificial Sequence: Synthetic oligonucleotide
  Sense strand starting at position 344 of SEQ ID NO: 1243937
ggucacuucuggcucugau

SEQ ID NO: 1452603 - RNA, 19 nt, Artificial Sequence
  Description of Artificial Sequence: Synthetic oligonucleotide
  Antisense strand to SEQ ID NO: 1452602
aucagagccagaagugacc

SEQ ID NO: 1452604 - RNA, 19 nt, Artificial Sequence
  Description of Artificial Sequence: Synthetic oligonucleotide
  Sense strand starting at position 361 of SEQ ID NO: 1243937
augguuugugagcauguca

SEQ ID NO: 1452605 - RNA, 19 nt, Artificial Sequence
  Description of Artificial Sequence: Synthetic oligonucleotide
  Antisense strand to SEQ ID NO: 1452604
ugacaugcucacaaaccau

SEQ ID NO: 1452606 - RNA, 19 nt, Artificial Sequence
  Description of Artificial Sequence: Synthetic oligonucleotide
  Sense strand starting at position 398 of SEQ ID NO: 1243937
ggaagaugucuugguccug

SEQ ID NO: 1452607 - RNA, 19 nt, Artificial Sequence
  Description of Artificial Sequence: Synthetic oligonucleotide
  Antisense strand to SEQ ID NO: 1452606
caggaccaagacaucuucc

SEQ ID NO: 1452608 - RNA, 19 nt, Artificial Sequence
  Description of Artificial Sequence: Synthetic oligonucleotide
  Sense strand starting at position 399 of SEQ ID NO: 1243937
gaagaugucuugguccuga

SEQ ID NO: 1452609 - RNA, 19 nt, Artificial Sequence
  Description of Artificial Sequence: Synthetic oligonucleotide
  Antisense strand to SEQ ID NO: 1452608
ucaggaccaagacaucuuc

SEQ ID NO: 1452610 - RNA, 19 nt, Artificial Sequence
  Description of Artificial Sequence: Synthetic oligonucleotide
  Sense strand starting at position 404 of SEQ ID NO: 1243937
ugucuugguccugagcuga

SEQ ID NO: 1452611 - RNA, 19 nt, Artificial Sequence
  Description of Artificial Sequence: Synthetic oligonucleotide
  Antisense strand to SEQ ID NO: 1452610
ucagcucaggaccaagaca

SEQ ID NO: 1452612 - RNA, 19 nt, Artificial Sequence
  Description of Artificial Sequence: Synthetic oligonucleotide
  Sense strand starting at position 417 of SEQ ID NO: 1243937
agcugacuccagugaaguc

SEQ ID NO: 1452613 - RNA, 19 nt, Artificial Sequence
  Description of Artificial Sequence: Synthetic oligonucleotide
  Antisense strand to SEQ ID NO: 1452612
gacuucacuggagucagcu

SEQ ID NO: 1452614 - RNA, 19 nt, Artificial Sequence
  Description of Artificial Sequence: Synthetic oligonucleotide
  Sense strand starting at position 559 of SEQ ID NO: 1243937
gauugugggcaaugccaua

SEQ ID NO: 1452615 - RNA, 19 nt, Artificial Sequence
  Description of Artificial Sequence: Synthetic oligonucleotide
  Antisense strand to SEQ ID NO: 1452614
uauggcauugcccacaauc

SEQ ID NO: 1452616 - RNA, 19 nt, Artificial Sequence
  Description of Artificial Sequence: Synthetic oligonucleotide
  Sense strand starting at position 662 of SEQ ID NO: 1243937
gcacuuucucaggagcuca

SEQ ID NO: 1452617 - RNA, 19 nt, Artificial Sequence
  Description of Artificial Sequence: Synthetic oligonucleotide
  Antisense strand to SEQ ID NO: 1452616
ugagcuccugagaaagugc

SEQ ID NO: 1452618 - RNA, 19 nt, Artificial Sequence
  Description of Artificial Sequence: Synthetic oligonucleotide
  Sense strand starting at position 699 of SEQ ID NO: 1243937
ggaacuguggccuaaccua

SEQ ID NO: 1452619 - RNA, 19 nt, Artificial Sequence
  Description of Artificial Sequence: Synthetic oligonucleotide
  Antisense strand to SEQ ID NO: 1452618
uagguuaggccacaguucc

SEQ ID NO: 1452620 - RNA, 19 nt, Artificial Sequence
  Description of Artificial Sequence: Synthetic oligonucleotide
  Sense strand starting at position 785 of SEQ ID NO: 1243937
gggagagaugagcgacuuu

SEQ ID NO: 1452621 - RNA, 19 nt, Artificial Sequence
  Description of Artificial Sequence: Synthetic oligonucleotide
  Antisense strand to SEQ ID NO: 1452620
aaagucgcucaucucuccc

SEQ ID NO: 1452622 - RNA, 19 nt, Artificial Sequence
  Description of Artificial Sequence: Synthetic oligonucleotide
  Sense strand starting at position 942 of SEQ ID NO: 1243937
cagaauaagccucgauguc

SEQ ID NO: 1452623 - RNA, 19 nt, Artificial Sequence
  Description of Artificial Sequence: Synthetic oligonucleotide
  Antisense strand to SEQ ID NO: 1452622
gacaucgaggcuuauucug

SEQ ID NO: 1452624 - RNA, 19 nt, Artificial Sequence
  Description of Artificial Sequence: Synthetic oligonucleotide
  Sense strand starting at position 943 of SEQ ID NO: 1243937
agaauaagccucgaugucu

SEQ ID NO: 1452625 - RNA, 19 nt, Artificial Sequence
  Description of Artificial Sequence: Synthetic oligonucleotide
  Antisense strand to SEQ ID NO: 1452624
agacaucgaggcuuauucu

SEQ ID NO: 1452626 - RNA, 19 nt, Artificial Sequence
  Description of Artificial Sequence: Synthetic oligonucleotide
  Sense strand starting at position 995 of SEQ ID NO: 1243937
aguguuuggcuugaucacu

SEQ ID NO: 1452627 - RNA, 19 nt, Artificial Sequence
  Description of Artificial Sequence: Synthetic oligonucleotide
  Antisense strand to SEQ ID NO: 1452626
agugaucaagccaaacacu

SEQ ID NO: 1452628 - RNA, 19 nt, Artificial Sequence
  Description of Artificial Sequence: Synthetic oligonucleotide
  Sense strand starting at position 2103 of SEQ ID NO: 1243937
gcuguagagaagugguaaa

SEQ ID NO: 1452629 - RNA, 19 nt, Artificial Sequence
  Description of Artificial Sequence: Synthetic oligonucleotide
  Antisense strand to SEQ ID NO: 1452628
uuuaccacuucucuacagc

SEQ ID NO: 1452630 - RNA, 19 nt, Artificial Sequence
  Description of Artificial Sequence: Synthetic oligonucleotide
  Sense strand starting at position 2210 of SEQ ID NO: 1243937
ccaggaaccucgguuauaa

SEQ ID NO: 1452631 - RNA, 19 nt, Artificial Sequence
  Description of Artificial Sequence: Synthetic oligonucleotide
  Antisense strand to SEQ ID NO: 1452630
uuauaaccgagguuccugg

SEQ ID NO: 1452632 - RNA, 19 nt, Artificial Sequence
  Description of Artificial Sequence: Synthetic oligonucleotide
  Sense strand starting at position 2218 of SEQ ID NO: 1243937
cucgguuauaauggcagaa

SEQ ID NO: 1452633 - RNA, 19 nt, Artificial Sequence
  Description of Artificial Sequence: Synthetic oligonucleotide
  Antisense strand to SEQ ID NO: 1452632
uucugccauuauaaccgag

SEQ ID NO: 1452634 - RNA, 19 nt, Artificial Sequence
  Description of Artificial Sequence: Synthetic oligonucleotide
  Sense strand starting at position 2231 of SEQ ID NO: 1243937
gcagaaaugcuagagaggu

SEQ ID NO: 1452635 - RNA, 19 nt, Artificial Sequence
  Description of Artificial Sequence: Synthetic oligonucleotide
  Antisense strand to SEQ ID NO: 1452634
accucucuagcauuucugc

SEQ ID NO: 1452636 - RNA, 19 nt, Artificial Sequence
  Description of Artificial Sequence: Synthetic oligonucleotide
  Sense strand starting at position 2427 of SEQ ID NO: 1243937
uuagucagcgcgucggaau

SEQ ID NO: 1452637 - RNA, 19 nt, Artificial Sequence
  Description of Artificial Sequence: Synthetic oligonucleotide
  Antisense strand to SEQ ID NO: 1452636
auuccgacgcgcugacuaa

SEQ ID NO: 1452638 - RNA, 19 nt, Artificial Sequence
  Description of Artificial Sequence: Synthetic oligonucleotide
  Sense strand starting at position 2788 of SEQ ID NO: 1243937
ggagaugaguccaguugga

SEQ ID NO: 1452639 - RNA, 19 nt, Artificial Sequence
  Description of Artificial Sequence: Synthetic oligonucleotide
  Antisense strand to SEQ ID NO: 1452638
uccaacuggacucaucucc

SEQ ID NO: 1452640 - RNA, 19 nt, Artificial Sequence
  Description of Artificial Sequence: Synthetic oligonucleotide
  Sense strand starting at position 2912 of SEQ ID NO: 1243937
ggacacguguccacguaua

SEQ ID NO: 1452641 - RNA, 19 nt, Artificial Sequence
  Description of Artificial Sequence: Synthetic oligonucleotide
  Antisense strand to SEQ ID NO: 1452640
uauacguggacacgugucc

SEQ ID NO: 1452642 - RNA, 19 nt, Artificial Sequence
  Description of Artificial Sequence: Synthetic oligonucleotide
  Sense strand starting at position 2939 of SEQ ID NO: 1243937
uauugacacguguacacaa

SEQ ID NO: 1452643 - RNA, 19 nt, Artificial Sequence
  Description of Artificial Sequence: Synthetic oligonucleotide
  Antisense strand to SEQ ID NO: 1452642
uuguguacacgugucaaua

SEQ ID NO: 1452644 - RNA, 19 nt, Artificial Sequence
  Description of Artificial Sequence: Synthetic oligonucleotide
  Sense strand starting at position 3088 of SEQ ID NO: 1243937
ggcugugauguguauacau

SEQ ID NO: 1452645 - RNA, 19 nt, Artificial Sequence
  Description of Artificial Sequence: Synthetic oligonucleotide
  Antisense strand to SEQ ID NO: 1452644
auguauacacaucacagcc

SEQ ID NO: 1452646 - RNA, 19 nt, Artificial Sequence
  Description of Artificial Sequence: Synthetic oligonucleotide
  Sense strand starting at position 3090 of SEQ ID NO: 1243937
cugugauguguauacaucu

SEQ ID NO: 1452647 - RNA, 19 nt, Artificial Sequence
  Description of Artificial Sequence: Synthetic oligonucleotide
  Antisense strand to SEQ ID NO: 1452646
agauguauacacaucacag

SEQ ID NO: 1452648 - RNA, 19 nt, Artificial Sequence
  Description of Artificial Sequence: Synthetic oligonucleotide
  Sense strand starting at position 3191 of SEQ ID NO: 1243937
aagucaaaucacuggugua

SEQ ID NO: 1452649 - RNA, 19 nt, Artificial Sequence
  Description of Artificial Sequence: Synthetic oligonucleotide
  Antisense strand to SEQ ID NO: 1452648
uacaccagugauuugacuu

SEQ ID NO: 1452650 - RNA, 19 nt, Artificial Sequence
  Description of Artificial Sequence: Synthetic oligonucleotide
  Sense strand starting at position 3192 of SEQ ID NO: 1243937
agucaaaucacugguguac

SEQ ID NO: 1452651 - RNA, 19 nt, Artificial Sequence
  Description of Artificial Sequence: Synthetic oligonucleotide
  Antisense strand to SEQ ID NO: 1452650
guacaccagugauuugacu

SEQ ID NO: 1452652 - RNA, 19 nt, Artificial Sequence
  Description of Artificial Sequence: Synthetic oligonucleotide
  Sense strand starting at position 3255 of SEQ ID NO: 1243937
guguuccugcucuaugaga

SEQ ID NO: 1452653 - RNA, 19 nt, Artificial Sequence
  Description of Artificial Sequence: Synthetic oligonucleotide
  Antisense strand to SEQ ID NO: 1452652
ucucauagagcaggaacac

SEQ ID NO: 1452654 - RNA, 19 nt, Artificial Sequence
  Description of Artificial Sequence: Synthetic oligonucleotide
  Sense strand starting at position 3257 of SEQ ID NO: 1243937
guuccugcucuaugagaaa

SEQ ID NO: 1452655 - RNA, 19 nt, Artificial Sequence
  Description of Artificial Sequence: Synthetic oligonucleotide
  Antisense strand to SEQ ID NO: 1452654
uuucucauagagcaggaac

SEQ ID NO: 1452656 - RNA, 19 nt, Artificial Sequence
  Description of Artificial Sequence: Synthetic oligonucleotide
  Sense strand starting at position 3304 of SEQ ID NO: 1243937
uauguuagaugugucccua

SEQ ID NO: 1452657 - RNA, 19 nt, Artificial Sequence
  Description of Artificial Sequence: Synthetic oligonucleotide
  Antisense strand to SEQ ID NO: 1452656
uagggacacaucuaacaua

SEQ ID NO: 1452658 - RNA, 19 nt, Artificial Sequence
  Description of Artificial Sequence: Synthetic oligonucleotide
  Sense strand starting at position 3308 of SEQ ID NO: 1243937
uuagaugugucccuaaacu

SEQ ID NO: 1452659 - RNA, 19 nt, Artificial Sequence
  Description of Artificial Sequence: Synthetic oligonucleotide
  Antisense strand to SEQ ID NO: 1452658
aguuuagggacacaucuaa

SEQ ID NO: 1452660 - RNA, 19 nt, Artificial Sequence
  Description of Artificial Sequence: Synthetic oligonucleotide
  Sense strand starting at position 3430 of SEQ ID NO: 1243937
agcguucagagugaaggua

SEQ ID NO: 1452661 - RNA, 19 nt, Artificial Sequence
  Description of Artificial Sequence: Synthetic oligonucleotide
  Antisense strand to SEQ ID NO: 1452660
uaccuucacucugaacgcu

SEQ ID NO: 1452662 - RNA, 19 nt, Artificial Sequence
  Description of Artificial Sequence: Synthetic oligonucleotide
  Sense strand starting at position 3442 of SEQ ID NO: 1243937
gaagguagcccucguagaa

SEQ ID NO: 1452663 - RNA, 19 nt, Artificial Sequence
  Description of Artificial Sequence: Synthetic oligonucleotide
  Antisense strand to SEQ ID NO: 1452662
uucuacgagggcuaccuuc

SEQ ID NO: 1452664 - RNA, 19 nt, Artificial Sequence
  Description of Artificial Sequence: Synthetic oligonucleotide
  Sense strand starting at position 3451 of SEQ ID NO: 1243937
ccucguagaacugggagau

SEQ ID NO: 1452665 - RNA, 19 nt, Artificial Sequence
  Description of Artificial Sequence: Synthetic oligonucleotide
  Antisense strand to SEQ ID NO: 1452664
aucucccaguucuacgagg

SEQ ID NO: 1452666 - RNA, 19 nt, Artificial Sequence
  Description of Artificial Sequence: Synthetic oligonucleotide
  Sense strand starting at position 3687 of SEQ ID NO: 1243937
acuugagcccuggauguua

SEQ ID NO: 1452667 - RNA, 19 nt, Artificial Sequence
  Description of Artificial Sequence: Synthetic oligonucleotide
  Antisense strand to SEQ ID NO: 1452666
uaacauccagggcucaagu

SEQ ID NO: 1452668 - RNA, 19 nt, Artificial Sequence
  Description of Artificial Sequence: Synthetic oligonucleotide
  Sense strand starting at position 3757 of SEQ ID NO: 1243937
gugagacucuaugucgaaa

SEQ ID NO: 1452669 - RNA, 19 nt, Artificial Sequence
  Description of Artificial Sequence: Synthetic oligonucleotide
  Antisense strand to SEQ ID NO: 1452668
uuucgacauagagucucac

SEQ ID NO: 1452670 - RNA, 19 nt, Artificial Sequence
  Description of Artificial Sequence: Synthetic oligonucleotide
  Sense strand starting at position 3812 of SEQ ID NO: 1243937
ggcagcagccuggaagaau

SEQ ID NO: 1452671 - RNA, 19 nt, Artificial Sequence
  Description of Artificial Sequence: Synthetic oligonucleotide
  Antisense strand to SEQ ID NO: 1452670
auucuuccaggcugcugcc

SEQ ID NO: 1452672 - RNA, 19 nt, Artificial Sequence
  Description of Artificial Sequence: Synthetic oligonucleotide
  Sense strand starting at position 3858 of SEQ ID NO: 1243937
gcccaagccuccuuagaca

SEQ ID NO: 1452673 - RNA, 19 nt, Artificial Sequence
  Description of Artificial Sequence: Synthetic oligonucleotide
  Antisense strand to SEQ ID NO: 1452672
ugucuaaggaggcuugggc

SEQ ID NO: 1452674 - RNA, 19 nt, Artificial Sequence
  Description of Artificial Sequence: Synthetic oligonucleotide
  Sense strand starting at position 3904 of SEQ ID NO: 1243937
gguugaaguucagucaggu

SEQ ID NO: 1452675 - RNA, 19 nt, Artificial Sequence
  Description of Artificial Sequence: Synthetic oligonucleotide
  Antisense strand to SEQ ID NO: 1452674
accugacugaacuucaacc

SEQ ID NO: 1452676 - RNA, 19 nt, Artificial Sequence
  Description of Artificial Sequence: Synthetic oligonucleotide
  Sense strand starting at position 3973 of SEQ ID NO: 1243937
aauagauagaggugaguuu

SEQ ID NO: 1452677 - RNA, 19 nt, Artificial Sequence
  Description of Artificial Sequence: Synthetic oligonucleotide
  Antisense strand to SEQ ID NO: 1452676
aaacucaccucuaucuauu

SEQ ID NO: 1452678 - RNA, 19 nt, Artificial Sequence
  Description of Artificial Sequence: Synthetic oligonucleotide
  Sense strand starting at position 111 of SEQ ID NO: 1243938
cccagaguaugugugaaac

SEQ ID NO: 1452679 - RNA, 19 nt, Artificial Sequence
  Description of Artificial Sequence: Synthetic oligonucleotide
  Antisense strand to SEQ ID NO: 1452678
guuucacacauacucuggg

SEQ ID NO: 1452680 - RNA, 19 nt, Artificial Sequence
  Description of Artificial Sequence: Synthetic oligonucleotide
  Sense strand starting at position 117 of SEQ ID NO: 1243938
guaugugugaaacgcaaga

SEQ ID NO: 1452681 - RNA, 19 nt, Artificial Sequence
  Description of Artificial Sequence: Synthetic oligonucleotide
  Antisense strand to SEQ ID NO: 1452680
ucuugcguuucacacauac

SEQ ID NO: 1452682 - RNA, 19 nt, Artificial Sequence
  Description of Artificial Sequence: Synthetic oligonucleotide
  Sense strand starting at position 271 of SEQ ID NO: 1243938
cugcaaauuccugacagac

SEQ ID NO: 1452683 - RNA, 19 nt, Artificial Sequence
  Description of Artificial Sequence: Synthetic oligonucleotide
  Antisense strand to SEQ ID NO: 1452682
gucugucaggaauuugcag

SEQ ID NO: 1452684 - RNA, 19 nt, Artificial Sequence
  Description of Artificial Sequence: Synthetic oligonucleotide
  Sense strand starting at position 379 of SEQ ID NO: 1243938
aguuuaggcaagugaggua

SEQ ID NO: 1452685 - RNA, 19 nt, Artificial Sequence
  Description of Artificial Sequence: Synthetic oligonucleotide
  Antisense strand to SEQ ID NO: 1452684
uaccucacuugccuaaacu

SEQ ID NO: 1452686 - RNA, 19 nt, Artificial Sequence
  Description of Artificial Sequence: Synthetic oligonucleotide
  Sense strand starting at position 610 of SEQ ID NO: 1243938
caucacaaucugggaggua

SEQ ID NO: 1452687 - RNA, 19 nt, Artificial Sequence
  Description of Artificial Sequence: Synthetic oligonucleotide
  Antisense strand to SEQ ID NO: 1452686
uaccucccagauugugaug

SEQ ID NO: 1452688 - RNA, 19 nt, Artificial Sequence
  Description of Artificial Sequence: Synthetic oligonucleotide
  Sense strand starting at position 611 of SEQ ID NO: 1243938
aucacaaucugggagguau

SEQ ID NO: 1452689 - RNA, 19 nt, Artificial Sequence
  Description of Artificial Sequence: Synthetic oligonucleotide
  Antisense strand to SEQ ID NO: 1452688
auaccucccagauugugau

SEQ ID NO: 1452690 - RNA, 19 nt, Artificial Sequence
  Description of Artificial Sequence: Synthetic oligonucleotide
  Sense strand starting at position 962 of SEQ ID NO: 1243938
ccaaacaucucugagagag

SEQ ID NO: 1452691 - RNA, 19 nt, Artificial Sequence
  Description of Artificial Sequence: Synthetic oligonucleotide
  Antisense strand to SEQ ID NO: 1452690
cucucucagagauguuugg

SEQ ID NO: 1452692 - RNA, 19 nt, Artificial Sequence
  Description of Artificial Sequence: Synthetic oligonucleotide
  Sense strand starting at position 1047 of SEQ ID NO: 1243938
caggcacaucugugaaaga

SEQ ID NO: 1452693 - RNA, 19 nt, Artificial Sequence
  Description of Artificial Sequence: Synthetic oligonucleotide
  Antisense strand to SEQ ID NO: 1452692
ucuuucacagaugugccug

SEQ ID NO: 1452694 - RNA, 19 nt, Artificial Sequence
  Description of Artificial Sequence: Synthetic oligonucleotide
  Sense strand starting at position 1115 of SEQ ID NO: 1243938
ggagaugacucguucacca

SEQ ID NO: 1452695 - RNA, 19 nt, Artificial Sequence
  Description of Artificial Sequence: Synthetic oligonucleotide
  Antisense strand to SEQ ID NO: 1452694
uggugaacgagucaucucc

SEQ ID NO: 1452696 - RNA, 19 nt, Artificial Sequence
  Description of Artificial Sequence: Synthetic oligonucleotide
  Sense strand starting at position 1244 of SEQ ID NO: 1243938
gcccgaguccuggaagguu

SEQ ID NO: 1452697 - RNA, 19 nt, Artificial Sequence
  Description of Artificial Sequence: Synthetic oligonucleotide
  Antisense strand to SEQ ID NO: 1452696
aaccuuccaggacucgggc

SEQ ID NO: 1452698 - RNA, 19 nt, Artificial Sequence
  Description of Artificial Sequence: Synthetic oligonucleotide
  Sense strand starting at position 1257 of SEQ ID NO: 1243938
aagguuccugauuggaagu

SEQ ID NO: 1452699 - RNA, 19 nt, Artificial Sequence
  Description of Artificial Sequence: Synthetic oligonucleotide
  Antisense strand to SEQ ID NO: 1452698
acuuccaaucaggaaccuu

SEQ ID NO: 1452700 - RNA, 19 nt, Artificial Sequence
  Description of Artificial Sequence: Synthetic oligonucleotide
  Sense strand starting at position 1306 of SEQ ID NO: 1243938
agggaaacauccucugguu

SEQ ID NO: 1452701 - RNA, 19 nt, Artificial Sequence
  Description of Artificial Sequence: Synthetic oligonucleotide
  Antisense strand to SEQ ID NO: 1452700
aaccagaggauguuucccu

SEQ ID NO: 1452702 - RNA, 19 nt, Artificial Sequence
  Description of Artificial Sequence: Synthetic oligonucleotide
  Sense strand starting at position 1308 of SEQ ID NO: 1243938
ggaaacauccucugguuua

SEQ ID NO: 1452703 - RNA, 19 nt, Artificial Sequence
  Description of Artificial Sequence: Synthetic oligonucleotide
  Antisense strand to SEQ ID NO: 1452702
uaaaccagaggauguuucc

SEQ ID NO: 1452704 - RNA, 19 nt, Artificial Sequence
  Description of Artificial Sequence: Synthetic oligonucleotide
  Sense strand starting at position 1999 of SEQ ID NO: 1243938
acauaacuucugggagucu

SEQ ID NO: 1452705 - RNA, 19 nt, Artificial Sequence
  Description of Artificial Sequence: Synthetic oligonucleotide
  Antisense strand to SEQ ID NO: 1452704
agacucccagaaguuaugu

SEQ ID NO: 1452706 - RNA, 19 nt, Artificial Sequence
  Description of Artificial Sequence: Synthetic oligonucleotide
  Sense strand starting at position 2111 of SEQ ID NO: 1243938
uggaaaggcucuuagauga

SEQ ID NO: 1452707 - RNA, 19 nt, Artificial Sequence
  Description of Artificial Sequence: Synthetic oligonucleotide
  Antisense strand to SEQ ID NO: 1452706
ucaucuaagagccuuucca

SEQ ID NO: 1452708 - RNA, 19 nt, Artificial Sequence
  Description of Artificial Sequence: Synthetic oligonucleotide
  Sense strand starting at position 2116 of SEQ ID NO: 1243938
aggcucuuagaugaucauu

SEQ ID NO: 1452709 - RNA, 19 nt, Artificial Sequence
  Description of Artificial Sequence: Synthetic oligonucleotide
  Antisense strand to SEQ ID NO: 1452708
aaugaucaucuaagagccu

SEQ ID NO: 1452710 - RNA, 19 nt, Artificial Sequence
  Description of Artificial Sequence: Synthetic oligonucleotide
  Sense strand starting at position 2259 of SEQ ID NO: 1243938
cugagaaguuaggacaaca

SEQ ID NO: 1452711 - RNA, 19 nt, Artificial Sequence
  Description of Artificial Sequence: Synthetic oligonucleotide
  Antisense strand to SEQ ID NO: 1452710
uguuguccuaacuucucag

SEQ ID NO: 1452712 - RNA, 19 nt, Artificial Sequence
  Description of Artificial Sequence: Synthetic oligonucleotide
  Sense strand starting at position 2393 of SEQ ID NO: 1243938
ggaagacauuaucucuguu

SEQ ID NO: 1452713 - RNA, 19 nt, Artificial Sequence
  Description of Artificial Sequence: Synthetic oligonucleotide
  Antisense strand to SEQ ID NO: 1452712
aacagagauaaugucuucc

SEQ ID NO: 1452714 - RNA, 19 nt, Artificial Sequence
  Description of Artificial Sequence: Synthetic oligonucleotide
  Sense strand starting at position 2396 of SEQ ID NO: 1243938
agacauuaucucuguuuac

SEQ ID NO: 1452715 - RNA, 19 nt, Artificial Sequence
  Description of Artificial Sequence: Synthetic oligonucleotide
  Antisense strand to SEQ ID NO: 1452714
guaaacagagauaaugucu

SEQ ID NO: 1452716 - RNA, 19 nt, Artificial Sequence
  Description of Artificial Sequence: Synthetic oligonucleotide
  Sense strand starting at position 2413 of SEQ ID NO: 1243938
acaauaaggugaucuugua

SEQ ID NO: 1452717 - RNA, 19 nt, Artificial Sequence
  Description of Artificial Sequence: Synthetic oligonucleotide
  Antisense strand to SEQ ID NO: 1452716
uacaagaucaccuuauugu

SEQ ID NO: 1452718 - RNA, 19 nt, Artificial Sequence
  Description of Artificial Sequence: Synthetic oligonucleotide
  Sense strand starting at position 2420 of SEQ ID NO: 1243938
ggugaucuuguauguagaa

SEQ ID NO: 1452719 - RNA, 19 nt, Artificial Sequence
  Description of Artificial Sequence: Synthetic oligonucleotide
  Antisense strand to SEQ ID NO: 1452718
uucuacauacaagaucacc

SEQ ID NO: 1452720 - RNA, 19 nt, Artificial Sequence
  Description of Artificial Sequence: Synthetic oligonucleotide
  Sense strand starting at position 2486 of SEQ ID NO: 1243938
aaguuugcaguauacaaga

SEQ ID NO: 1452721 - RNA, 19 nt, Artificial Sequence
  Description of Artificial Sequence: Synthetic oligonucleotide
  Antisense strand to SEQ ID NO: 1452720
ucuuguauacugcaaacuu

SEQ ID NO: 1452722 - RNA, 19 nt, Artificial Sequence
  Description of Artificial Sequence: Synthetic oligonucleotide
  Sense strand starting at position 2543 of SEQ ID NO: 1243938
ugaacaaucugaugaugaa

SEQ ID NO: 1452723 - RNA, 19 nt, Artificial Sequence
  Description of Artificial Sequence: Synthetic oligonucleotide
  Antisense strand to SEQ ID NO: 1452722
uucaucaucagauuguuca

SEQ ID NO: 1452724 - RNA, 19 nt, Artificial Sequence
  Description of Artificial Sequence: Synthetic oligonucleotide
  Sense strand starting at position 2703 of SEQ ID NO: 1243938
aguguuaagacuuguacac

SEQ ID NO: 1452725 - RNA, 19 nt, Artificial Sequence
  Description of Artificial Sequence: Synthetic oligonucleotide
  Antisense strand to SEQ ID NO: 1452724
guguacaagucuuaacacu

SEQ ID NO: 1452726 - RNA, 19 nt, Artificial Sequence
  Description of Artificial Sequence: Synthetic oligonucleotide
  Sense strand starting at position 2788 of SEQ ID NO: 1243938
ggguuagaagauuguuaag

SEQ ID NO: 1452727 - RNA, 19 nt, Artificial Sequence
  Description of Artificial Sequence: Synthetic oligonucleotide
  Antisense strand to SEQ ID NO: 1452726
cuuaacaaucuucuaaccc

SEQ ID NO: 1452728 - RNA, 19 nt, Artificial Sequence
  Description of Artificial Sequence: Synthetic oligonucleotide
  Sense strand starting at position 2790 of SEQ ID NO: 1243938
guuagaagauuguuaagac

SEQ ID NO: 1452729 - RNA, 19 nt, Artificial Sequence
  Description of Artificial Sequence: Synthetic oligonucleotide
  Antisense strand to SEQ ID NO: 1452728
gucuuaacaaucuucuaac

SEQ ID NO: 1452730 - RNA, 19 nt, Artificial Sequence
  Description of Artificial Sequence: Synthetic oligonucleotide
  Sense strand starting at position 3122 of SEQ ID NO: 1243938
ugacgacaguucuccucaa

SEQ ID NO: 1452731 - RNA, 19 nt, Artificial Sequence
  Description of Artificial Sequence: Synthetic oligonucleotide
  Antisense strand to SEQ ID NO: 1452730
uugaggagaacugucguca

SEQ ID NO: 1452732 - RNA, 19 nt, Artificial Sequence
  Description of Artificial Sequence: Synthetic oligonucleotide
  Sense strand starting at position 3126 of SEQ ID NO: 1243938
gacaguucuccucaaguug

SEQ ID NO: 1452733 - RNA, 19 nt, Artificial Sequence
  Description of Artificial Sequence: Synthetic oligonucleotide
  Antisense strand to SEQ ID NO: 1452732
caacuugaggagaacuguc

SEQ ID NO: 1452734 - RNA, 19 nt, Artificial Sequence
  Description of Artificial Sequence: Synthetic oligonucleotide
  Sense strand starting at position 3137 of SEQ ID NO: 1243938
ucaaguugaucugcagauu

SEQ ID NO: 1452735 - RNA, 19 nt, Artificial Sequence
  Description of Artificial Sequence: Synthetic oligonucleotide
  Antisense strand to SEQ ID NO: 1452734
aaucugcagaucaacuuga

SEQ ID NO: 1452736 - RNA, 19 nt, Artificial Sequence
  Description of Artificial Sequence: Synthetic oligonucleotide
  Sense strand starting at position 3260 of SEQ ID NO: 1243938
agaacaaagucugaagaca

SEQ ID NO: 1452737 - RNA, 19 nt, Artificial Sequence
  Description of Artificial Sequence: Synthetic oligonucleotide
  Antisense strand to SEQ ID NO: 1452736
ugucuucagacuuuguucu

SEQ ID NO: 1452738 - RNA, 19 nt, Artificial Sequence
  Description of Artificial Sequence: Synthetic oligonucleotide
  Sense strand starting at position 3328 of SEQ ID NO: 1243938
gugcuaccagcauaacaau

SEQ ID NO: 1452739 - RNA, 19 nt, Artificial Sequence
  Description of Artificial Sequence: Synthetic oligonucleotide
  Antisense strand to SEQ ID NO: 1452738
auuguuaugcugguagcac

SEQ ID NO: 1452740 - RNA, 19 nt, Artificial Sequence
  Description of Artificial Sequence: Synthetic oligonucleotide
  Sense strand starting at position 3402 of SEQ ID NO: 1243938
ggacgauugaguuagcaaa

SEQ ID NO: 1452741 - RNA, 19 nt, Artificial Sequence
  Description of Artificial Sequence: Synthetic oligonucleotide
  Antisense strand to SEQ ID NO: 1452740
uuugcuaacucaaucgucc

SEQ ID NO: 1452742 - RNA, 19 nt, Artificial Sequence
  Description of Artificial Sequence: Synthetic oligonucleotide
  Sense strand starting at position 3524 of SEQ ID NO: 1243938
cgccaucuacacgaauuaa

SEQ ID NO: 1452743 - RNA, 19 nt, Artificial Sequence
  Description of Artificial Sequence: Synthetic oligonucleotide
  Antisense strand to SEQ ID NO: 1452742
uuaauucguguagauggcg

SEQ ID NO: 1452744 - RNA, 19 nt, Artificial Sequence
  Description of Artificial Sequence: Synthetic oligonucleotide
  Sense strand starting at position 3535 of SEQ ID NO: 1243938
cgaauuaacucagcauaga

SEQ ID NO: 1452745 - RNA, 19 nt, Artificial Sequence
  Description of Artificial Sequence: Synthetic oligonucleotide
  Antisense strand to SEQ ID NO: 1452744
ucuaugcugaguuaauucg

SEQ ID NO: 1452746 - RNA, 19 nt, Artificial Sequence
  Description of Artificial Sequence: Synthetic oligonucleotide
  Sense strand starting at position 3546 of SEQ ID NO: 1243938
agcauagauuaacagaaug

SEQ ID NO: 1452747 - RNA, 19 nt, Artificial Sequence
  Description of Artificial Sequence: Synthetic oligonucleotide
  Antisense strand to SEQ ID NO: 1452746
cauucuguuaaucuaugcu

SEQ ID NO: 1452748 - RNA, 19 nt, Artificial Sequence
  Description of Artificial Sequence: Synthetic oligonucleotide
  Sense strand starting at position 3564 of SEQ ID NO: 1243938
gcaagagccaaauguaaga

SEQ ID NO: 1452749 - RNA, 19 nt, Artificial Sequence
  Description of Artificial Sequence: Synthetic oligonucleotide
  Antisense strand to SEQ ID NO: 1452748
ucuuacauuuggcucuugc

SEQ ID NO: 1452750 - RNA, 19 nt, Artificial Sequence
  Description of Artificial Sequence: Synthetic oligonucleotide
  Sense strand starting at position 3638 of SEQ ID NO: 1243938
aggcaaugaugucuuacau

SEQ ID NO: 1452751 - RNA, 19 nt, Artificial Sequence
  Description of Artificial Sequence: Synthetic oligonucleotide
  Antisense strand to SEQ ID NO: 1452750
auguaagacaucauugccu

SEQ ID NO: 1452752 - RNA, 19 nt, Artificial Sequence
  Description of Artificial Sequence: Synthetic oligonucleotide
  Sense strand starting at position 3801 of SEQ ID NO: 1243938
ugacaagggacuugucgua

SEQ ID NO: 1452753 - RNA, 19 nt, Artificial Sequence
  Description of Artificial Sequence: Synthetic oligonucleotide
  Antisense strand to SEQ ID NO: 1452752
uacgacaagucccuuguca

SEQ ID NO: 1452754 - RNA, 19 nt, Artificial Sequence
  Description of Artificial Sequence: Synthetic oligonucleotide
  Sense strand starting at position 3890 of SEQ ID NO: 1243938
ccaguaugcacauggaaag

SEQ ID NO: 1452755 - RNA, 19 nt, Artificial Sequence
  Description of Artificial Sequence: Synthetic oligonucleotide
  Antisense strand to SEQ ID NO: 1452754
cuuuccaugugcauacugg

SEQ ID NO: 1452756 - RNA, 19 nt, Artificial Sequence
  Description of Artificial Sequence: Synthetic oligonucleotide
  Sense strand starting at position 3902 of SEQ ID NO: 1243938
uggaaagcagcuugauauc

SEQ ID NO: 1452757 - RNA, 19 nt, Artificial Sequence
  Description of Artificial Sequence: Synthetic oligonucleotide
  Antisense strand to SEQ ID NO: 1452756
gauaucaagcugcuuucca

SEQ ID NO: 1452758 - RNA, 19 nt, Artificial Sequence
  Description of Artificial Sequence: Synthetic oligonucleotide
  Sense strand starting at position 22 of SEQ ID NO: 1243939
aggaacaaaugagauauaa

SEQ ID NO: 1452759 - RNA, 19 nt, Artificial Sequence
  Description of Artificial Sequence: Synthetic oligonucleotide
  Antisense strand to SEQ ID NO: 1452758
uuauaucucauuuguuccu

SEQ ID NO: 1452760 - RNA, 19 nt, Artificial Sequence
  Description of Artificial Sequence: Synthetic oligonucleotide
  Sense strand starting at position 188 of SEQ ID NO: 1243939
auccaacucccuugggaaa

SEQ ID NO: 1452761 - RNA, 19 nt, Artificial Sequence
  Description of Artificial Sequence: Synthetic oligonucleotide
  Antisense strand to SEQ ID NO: 1452760
uuucccaagggaguuggau

SEQ ID NO: 1452762 - RNA, 19 nt, Artificial Sequence
  Description of Artificial Sequence: Synthetic oligonucleotide
  Sense strand starting at position 751 of SEQ ID NO: 1243939
ggcagaaauccuugcuguu

SEQ ID NO: 1452763 - RNA, 19 nt, Artificial Sequence
  Description of Artificial Sequence: Synthetic oligonucleotide
  Antisense strand to SEQ ID NO: 1452762
aacagcaaggauuucugcc

SEQ ID NO: 1452764 - RNA, 19 nt, Artificial Sequence
  Description of Artificial Sequence: Synthetic oligonucleotide
  Sense strand starting at position 927 of SEQ ID NO: 1243939
aggauacauucugcacauu

SEQ ID NO: 1452765 - RNA, 19 nt, Artificial Sequence
  Description of Artificial Sequence: Synthetic oligonucleotide
  Antisense strand to SEQ ID NO: 1452764
aaugugcagaauguauccu

SEQ ID NO: 1452766 - RNA, 19 nt, Artificial Sequence
  Description of Artificial Sequence: Synthetic oligonucleotide
  Sense strand starting at position 1053 of SEQ ID NO: 1243939
agcuacuaucaguguaaag

SEQ ID NO: 1452767 - RNA, 19 nt, Artificial Sequence
  Description of Artificial Sequence: Synthetic oligonucleotide
  Antisense strand to SEQ ID NO: 1452766
cuuuacacugauaguagcu

SEQ ID NO: 1452768 - RNA, 19 nt, Artificial Sequence
  Description of Artificial Sequence: Synthetic oligonucleotide
  Sense strand starting at position 1092 of SEQ ID NO: 1243939
ggucuacacuuagcucaua

SEQ ID NO: 1452769 - RNA, 19 nt, Artificial Sequence
  Description of Artificial Sequence: Synthetic oligonucleotide
  Antisense strand to SEQ ID NO: 1452768
uaugagcuaaguguagacc

SEQ ID NO: 1452770 - RNA, 19 nt, Artificial Sequence
  Description of Artificial Sequence: Synthetic oligonucleotide
  Sense strand starting at position 1210 of SEQ ID NO: 1243939
aggaaucccucaggucaaa

SEQ ID NO: 1452771 - RNA, 19 nt, Artificial Sequence
  Description of Artificial Sequence: Synthetic oligonucleotide
  Antisense strand to SEQ ID NO: 1452770
uuugaccugagggauuccu

SEQ ID NO: 1452772 - RNA, 19 nt, Artificial Sequence
  Description of Artificial Sequence: Synthetic oligonucleotide
  Sense strand starting at position 1236 of SEQ ID NO: 1243939
gaggcugccucguuaaacu

SEQ ID NO: 1452773 - RNA, 19 nt, Artificial Sequence
  Description of Artificial Sequence: Synthetic oligonucleotide
  Antisense strand to SEQ ID NO: 1452772
aguuuaacgaggcagccuc

SEQ ID NO: 1452774 - RNA, 19 nt, Artificial Sequence
  Description of Artificial Sequence: Synthetic oligonucleotide
  Sense strand starting at position 1270 of SEQ ID NO: 1243939
cuagacuucuuuccuguca

SEQ ID NO: 1452775 - RNA, 19 nt, Artificial Sequence
  Description of Artificial Sequence: Synthetic oligonucleotide
  Antisense strand to SEQ ID NO: 1452774
ugacaggaaagaagucuag

SEQ ID NO: 1452776 - RNA, 19 nt, Artificial Sequence
  Description of Artificial Sequence: Synthetic oligonucleotide
  Sense strand starting at position 1388 of SEQ ID NO: 1243939
ggauucaaaggguggcaaa

SEQ ID NO: 1452777 - RNA, 19 nt, Artificial Sequence
  Description of Artificial Sequence: Synthetic oligonucleotide
  Antisense strand to SEQ ID NO: 1452776
uuugccacccuuugaaucc

SEQ ID NO: 1452778 - RNA, 19 nt, Artificial Sequence
  Description of Artificial Sequence: Synthetic oligonucleotide
  Sense strand starting at position 1572 of SEQ ID NO: 1243939
uggugaacuccugguauau

SEQ ID NO: 1452779 - RNA, 19 nt, Artificial Sequence
  Description of Artificial Sequence: Synthetic oligonucleotide
  Antisense strand to SEQ ID NO: 1452778
auauaccaggaguucacca

SEQ ID NO: 1452780 - RNA, 19 nt, Artificial Sequence
  Description of Artificial Sequence: Synthetic oligonucleotide
  Sense strand starting at position 1583 of SEQ ID NO: 1243939
ugguauauugugggaaauu

SEQ ID NO: 1452781 - RNA, 19 nt, Artificial Sequence
  Description of Artificial Sequence: Synthetic oligonucleotide
  Antisense strand to SEQ ID NO: 1452780
aauuucccacaauauacca

SEQ ID NO: 1452782 - RNA, 19 nt, Artificial Sequence
  Description of Artificial Sequence: Synthetic oligonucleotide
  Sense strand starting at position 1584 of SEQ ID NO: 1243939
gguauauugugggaaauuu

SEQ ID NO: 1452783 - RNA, 19 nt, Artificial Sequence
  Description of Artificial Sequence: Synthetic oligonucleotide
  Antisense strand to SEQ ID NO: 1452782
aaauuucccacaauauacc

SEQ ID NO: 1452784 - RNA, 19 nt, Artificial Sequence
  Description of Artificial Sequence: Synthetic oligonucleotide
  Sense strand starting at position 1705 of SEQ ID NO: 1243939
gcccguuuccugcccagaa

SEQ ID NO: 1452785 - RNA, 19 nt, Artificial Sequence
  Description of Artificial Sequence: Synthetic oligonucleotide
  Antisense strand to SEQ ID NO: 1452784
uucugggcaggaaacgggc

SEQ ID NO: 1452786 - RNA, 19 nt, Artificial Sequence
  Description of Artificial Sequence: Synthetic oligonucleotide
  Sense strand starting at position 2923 of SEQ ID NO: 1243939
cugggucuaucgcuuugaa

SEQ ID NO: 1452787 - RNA, 19 nt, Artificial Sequence
  Description of Artificial Sequence: Synthetic oligonucleotide
  Antisense strand to SEQ ID NO: 1452786
uucaaagcgauagacccag

SEQ ID NO: 1452788 - RNA, 19 nt, Artificial Sequence
  Description of Artificial Sequence: Synthetic oligonucleotide
  Sense strand starting at position 2926 of SEQ ID NO: 1243939
ggucuaucgcuuugaaguc

SEQ ID NO: 1452789 - RNA, 19 nt, Artificial Sequence
  Description of Artificial Sequence: Synthetic oligonucleotide
  Antisense strand to SEQ ID NO: 1452788
gacuucaaagcgauagacc

SEQ ID NO: 1452790 - RNA, 19 nt, Artificial Sequence
  Description of Artificial Sequence: Synthetic oligonucleotide
  Sense strand starting at position 2976 of SEQ ID NO: 1243939
ugaggucucuuagcagagu

SEQ ID NO: 1452791 - RNA, 19 nt, Artificial Sequence
  Description of Artificial Sequence: Synthetic oligonucleotide
  Antisense strand to SEQ ID NO: 1452790
acucugcuaagagaccuca

SEQ ID NO: 1452792 - RNA, 19 nt, Artificial Sequence
  Description of Artificial Sequence: Synthetic oligonucleotide
  Sense strand starting at position 2999 of SEQ ID NO: 1243939
ugaggaacucugugcuaau

SEQ ID NO: 1452793 - RNA, 19 nt, Artificial Sequence
  Description of Artificial Sequence: Synthetic oligonucleotide
  Antisense strand to SEQ ID NO: 1452792
auuagcacagaguuccuca

SEQ ID NO: 1452794 - RNA, 19 nt, Artificial Sequence
  Description of Artificial Sequence: Synthetic oligonucleotide
  Sense strand starting at position 3000 of SEQ ID NO: 1243939
gaggaacucugugcuaaug

SEQ ID NO: 1452795 - RNA, 19 nt, Artificial Sequence
  Description of Artificial Sequence: Synthetic oligonucleotide
  Antisense strand to SEQ ID NO: 1452794
cauuagcacagaguuccuc

SEQ ID NO: 1452796 - RNA, 19 nt, Artificial Sequence
  Description of Artificial Sequence: Synthetic oligonucleotide
  Sense strand starting at position 3008 of SEQ ID NO: 1243939
cugugcuaaugguuaagau

SEQ ID NO: 1452797 - RNA, 19 nt, Artificial Sequence
  Description of Artificial Sequence: Synthetic oligonucleotide
  Antisense strand to SEQ ID NO: 1452796
aucuuaaccauuagcacag

SEQ ID NO: 1452798 - RNA, 19 nt, Artificial Sequence
  Description of Artificial Sequence: Synthetic oligonucleotide
  Sense strand starting at position 3009 of SEQ ID NO: 1243939
ugugcuaaugguuaagauc

SEQ ID NO: 1452799 - RNA, 19 nt, Artificial Sequence
  Description of Artificial Sequence: Synthetic oligonucleotide
  Antisense strand to SEQ ID NO: 1452798
gaucuuaaccauuagcaca

SEQ ID NO: 1452800 - RNA, 19 nt, Artificial Sequence
  Description of Artificial Sequence: Synthetic oligonucleotide
  Sense strand starting at position 3017 of SEQ ID NO: 1243939
ugguuaagaucagucagga

SEQ ID NO: 1452801 - RNA, 19 nt, Artificial Sequence
  Description of Artificial Sequence: Synthetic oligonucleotide
  Antisense strand to SEQ ID NO: 1452800
uccugacugaucuuaacca

SEQ ID NO: 1452802 - RNA, 19 nt, Artificial Sequence
  Description of Artificial Sequence: Synthetic oligonucleotide
  Sense strand starting at position 3021 of SEQ ID NO: 1243939
uaagaucagucaggaucau

SEQ ID NO: 1452803 - RNA, 19 nt, Artificial Sequence
  Description of Artificial Sequence: Synthetic oligonucleotide
  Antisense strand to SEQ ID NO: 1452802
augauccugacugaucuua

SEQ ID NO: 1452804 - RNA, 19 nt, Artificial Sequence
  Description of Artificial Sequence: Synthetic oligonucleotide
  Sense strand starting at position 3061 of SEQ ID NO: 1243939
gagaacagauuggaagaaa

SEQ ID NO: 1452805 - RNA, 19 nt, Artificial Sequence
  Description of Artificial Sequence: Synthetic oligonucleotide
  Antisense strand to SEQ ID NO: 1452804
uuucuuccaaucuguucuc

SEQ ID NO: 1452806 - RNA, 19 nt, Artificial Sequence
  Description of Artificial Sequence: Synthetic oligonucleotide
  Sense strand starting at position 3110 of SEQ ID NO: 1243939
caaauugugucaugaggaa

SEQ ID NO: 1452807 - RNA, 19 nt, Artificial Sequence
  Description of Artificial Sequence: Synthetic oligonucleotide
  Antisense strand to SEQ ID NO: 1452806
uuccucaugacacaauuug

SEQ ID NO: 1452808 - RNA, 19 nt, Artificial Sequence
  Description of Artificial Sequence: Synthetic oligonucleotide
  Sense strand starting at position 3157 of SEQ ID NO: 1243939
aguggugccucucucagaa

SEQ ID NO: 1452809 - RNA, 19 nt, Artificial Sequence
  Description of Artificial Sequence: Synthetic oligonucleotide
  Antisense strand to SEQ ID NO: 1452808
uucugagagaggcaccacu

SEQ ID NO: 1452810 - RNA, 19 nt, Artificial Sequence
  Description of Artificial Sequence: Synthetic oligonucleotide
  Sense strand starting at position 3202 of SEQ ID NO: 1243939
ucggacaggugcucagaau

SEQ ID NO: 1452811 - RNA, 19 nt, Artificial Sequence
  Description of Artificial Sequence: Synthetic oligonucleotide
  Antisense strand to SEQ ID NO: 1452810
auucugagcaccuguccga

SEQ ID NO: 1452812 - RNA, 19 nt, Artificial Sequence
  Description of Artificial Sequence: Synthetic oligonucleotide
  Sense strand starting at position 3326 of SEQ ID NO: 1243939
gaucucagguuaugaauuu

SEQ ID NO: 1452813 - RNA, 19 nt, Artificial Sequence
  Description of Artificial Sequence: Synthetic oligonucleotide
  Antisense strand to SEQ ID NO: 1452812
aaauucauaaccugagauc

SEQ ID NO: 1452814 - RNA, 19 nt, Artificial Sequence
  Description of Artificial Sequence: Synthetic oligonucleotide
  Sense strand starting at position 3355 of SEQ ID NO: 1243939
ggauuuguacuuugcucca

SEQ ID NO: 1452815 - RNA, 19 nt, Artificial Sequence
  Description of Artificial Sequence: Synthetic oligonucleotide
  Antisense strand to SEQ ID NO: 1452814
uggagcaaaguacaaaucc

SEQ ID NO: 1452816 - RNA, 19 nt, Artificial Sequence
  Description of Artificial Sequence: Synthetic oligonucleotide
  Sense strand starting at position 3360 of SEQ ID NO: 1243939
uguacuuugcuccaaggaa

SEQ ID NO: 1452817 - RNA, 19 nt, Artificial Sequence
  Description of Artificial Sequence: Synthetic oligonucleotide
  Antisense strand to SEQ ID NO: 1452816
uuccuuggagcaaaguaca

SEQ ID NO: 1452818 - RNA, 19 nt, Artificial Sequence
  Description of Artificial Sequence: Synthetic oligonucleotide
  Sense strand starting at position 3382 of SEQ ID NO: 1243939
cguucuguuaggccagcaa

SEQ ID NO: 1452819 - RNA, 19 nt, Artificial Sequence
  Description of Artificial Sequence: Synthetic oligonucleotide
  Antisense strand to SEQ ID NO: 1452818
uugcuggccuaacagaacg

SEQ ID NO: 1452820 - RNA, 19 nt, Artificial Sequence
  Description of Artificial Sequence: Synthetic oligonucleotide
  Sense strand starting at position 3424 of SEQ ID NO: 1243939
ggaggcuuccuccaucagu

SEQ ID NO: 1452821 - RNA, 19 nt, Artificial Sequence
  Description of Artificial Sequence: Synthetic oligonucleotide
  Antisense strand to SEQ ID NO: 1452820
acugauggaggaagccucc

SEQ ID NO: 1452822 - RNA, 19 nt, Artificial Sequence
  Description of Artificial Sequence: Synthetic oligonucleotide
  Sense strand starting at position 3433 of SEQ ID NO: 1243939
cuccaucagucuccagaga

SEQ ID NO: 1452823 - RNA, 19 nt, Artificial Sequence
  Description of Artificial Sequence: Synthetic oligonucleotide
  Antisense strand to SEQ ID NO: 1452822
ucucuggagacugauggag

SEQ ID NO: 1452824 - RNA, 19 nt, Artificial Sequence
  Description of Artificial Sequence: Synthetic oligonucleotide
  Sense strand starting at position 3462 of SEQ ID NO: 1243939
ugcgcuuuccugccucaaa

SEQ ID NO: 1452825 - RNA, 19 nt, Artificial Sequence
  Description of Artificial Sequence: Synthetic oligonucleotide
  Antisense strand to SEQ ID NO: 1452824
uuugaggcaggaaagcgca

SEQ ID NO: 1452826 - RNA, 19 nt, Artificial Sequence
  Description of Artificial Sequence: Synthetic oligonucleotide
  Sense strand starting at position 3463 of SEQ ID NO: 1243939
gcgcuuuccugccucaaac

SEQ ID NO: 1452827 - RNA, 19 nt, Artificial Sequence
  Description of Artificial Sequence: Synthetic oligonucleotide
  Antisense strand to SEQ ID NO: 1452826
guuugaggcaggaaagcgc

SEQ ID NO: 1452828 - RNA, 19 nt, Artificial Sequence
  Description of Artificial Sequence: Synthetic oligonucleotide
  Sense strand starting at position 3542 of SEQ ID NO: 1243939
gaggaacugcucugcuaag

SEQ ID NO: 1452829 - RNA, 19 nt, Artificial Sequence
  Description of Artificial Sequence: Synthetic oligonucleotide
  Antisense strand to SEQ ID NO: 1452828
cuuagcagagcaguuccuc

SEQ ID NO: 1452830 - RNA, 19 nt, Artificial Sequence
  Description of Artificial Sequence: Synthetic oligonucleotide
  Sense strand starting at position 3543 of SEQ ID NO: 1243939
aggaacugcucugcuaagu

SEQ ID NO: 1452831 - RNA, 19 nt, Artificial Sequence
  Description of Artificial Sequence: Synthetic oligonucleotide
  Antisense strand to SEQ ID NO: 1452830
acuuagcagagcaguuccu

SEQ ID NO: 1452832 - RNA, 19 nt, Artificial Sequence
  Description of Artificial Sequence: Synthetic oligonucleotide
  Sense strand starting at position 3568 of SEQ ID NO: 1243939
ucacucuaguacuaggaaa

SEQ ID NO: 1452833 - RNA, 19 nt, Artificial Sequence
  Description of Artificial Sequence: Synthetic oligonucleotide
  Antisense strand to SEQ ID NO: 1452832
uuuccuaguacuagaguga

SEQ ID NO: 1452834 - RNA, 19 nt, Artificial Sequence
  Description of Artificial Sequence: Synthetic oligonucleotide
  Sense strand starting at position 3618 of SEQ ID NO: 1243939
guauaaauccagcaguauu

SEQ ID NO: 1452835 - RNA, 19 nt, Artificial Sequence
  Description of Artificial Sequence: Synthetic oligonucleotide
  Antisense strand to SEQ ID NO: 1452834
aauacugcuggauuuauac

SEQ ID NO: 1452836 - RNA, 19 nt, Artificial Sequence
  Description of Artificial Sequence: Synthetic oligonucleotide
  Sense strand starting at position 3657 of SEQ ID NO: 1243939
agcagcugguauccuuaaa

SEQ ID NO: 1452837 - RNA, 19 nt, Artificial Sequence
  Description of Artificial Sequence: Synthetic oligonucleotide
  Antisense strand to SEQ ID NO: 1452836
uuuaaggauaccagcugcu

SEQ ID NO: 1452838 - RNA, 19 nt, Artificial Sequence
  Description of Artificial Sequence: Synthetic oligonucleotide
  Sense strand starting at position 21 of SEQ ID NO: 1243940
guuaaauccugucucugaa

SEQ ID NO: 1452839 - RNA, 19 nt, Artificial Sequence
  Description of Artificial Sequence: Synthetic oligonucleotide
  Antisense strand to SEQ ID NO: 1452838
uucagagacaggauuuaac

SEQ ID NO: 1452840 - RNA, 19 nt, Artificial Sequence
  Description of Artificial Sequence: Synthetic oligonucleotide
  Sense strand starting at position 53 of SEQ ID NO: 1243940
ugcucucaguaucuugaaa

SEQ ID NO: 1452841 - RNA, 19 nt, Artificial Sequence
  Description of Artificial Sequence: Synthetic oligonucleotide
  Antisense strand to SEQ ID NO: 1452840
uuucaagauacugagagca

SEQ ID NO: 1452842 - RNA, 19 nt, Artificial Sequence
  Description of Artificial Sequence: Synthetic oligonucleotide
  Sense strand starting at position 210 of SEQ ID NO: 1243940
uagagaagcugaucuaagu

SEQ ID NO: 1452843 - RNA, 19 nt, Artificial Sequence
  Description of Artificial Sequence: Synthetic oligonucleotide
  Antisense strand to SEQ ID NO: 1452842
acuuagaucagcuucucua

SEQ ID NO: 1452844 - RNA, 19 nt, Artificial Sequence
  Description of Artificial Sequence: Synthetic oligonucleotide
  Sense strand starting at position 271 of SEQ ID NO: 1243940
agaccauucuguuuguuaa

SEQ ID NO: 1452845 - RNA, 19 nt, Artificial Sequence
  Description of Artificial Sequence: Synthetic oligonucleotide
  Antisense strand to SEQ ID NO: 1452844
uuaacaaacagaauggucu

SEQ ID NO: 1452846 - RNA, 19 nt, Artificial Sequence
  Description of Artificial Sequence: Synthetic oligonucleotide
  Sense strand starting at position 549 of SEQ ID NO: 1243940
agcuccuuggaguaagcau

SEQ ID NO: 1452847 - RNA, 19 nt, Artificial Sequence
  Description of Artificial Sequence: Synthetic oligonucleotide
  Antisense strand to SEQ ID NO: 1452846
augcuuacuccaaggagcu

SEQ ID NO: 1452848 - RNA, 19 nt, Artificial Sequence
  Description of Artificial Sequence: Synthetic oligonucleotide
  Sense strand starting at position 576 of SEQ ID NO: 1243940
ugggaauaguucuuuggua

SEQ ID NO: 1452849 - RNA, 19 nt, Artificial Sequence
  Description of Artificial Sequence: Synthetic oligonucleotide
  Antisense strand to SEQ ID NO: 1452848
uaccaaagaacuauuccca

SEQ ID NO: 1452850 - RNA, 19 nt, Artificial Sequence
  Description of Artificial Sequence: Synthetic oligonucleotide
  Sense strand starting at position 577 of SEQ ID NO: 1243940
gggaauaguucuuugguau

SEQ ID NO: 1452851 - RNA, 19 nt, Artificial Sequence
  Description of Artificial Sequence: Synthetic oligonucleotide
  Antisense strand to SEQ ID NO: 1452850
auaccaaagaacuauuccc

SEQ ID NO: 1452852 - RNA, 19 nt, Artificial Sequence
  Description of Artificial Sequence: Synthetic oligonucleotide
  Sense strand starting at position 578 of SEQ ID NO: 1243940
ggaauaguucuuugguauu

SEQ ID NO: 1452853 - RNA, 19 nt, Artificial Sequence
  Description of Artificial Sequence: Synthetic oligonucleotide
  Antisense strand to SEQ ID NO: 1452852
aauaccaaagaacuauucc

SEQ ID NO: 1452854 - RNA, 19 nt, Artificial Sequence
  Description of Artificial Sequence: Synthetic oligonucleotide
  Sense strand starting at position 588 of SEQ ID NO: 1243940
uuugguauucccuauagca

SEQ ID NO: 1452855 - RNA, 19 nt, Artificial Sequence
  Description of Artificial Sequence: Synthetic oligonucleotide
  Antisense strand to SEQ ID NO: 1452854
ugcuauagggaauaccaaa

SEQ ID NO: 1452856 - RNA, 19 nt, Artificial Sequence
  Description of Artificial Sequence: Synthetic oligonucleotide
  Sense strand starting at position 749 of SEQ ID NO: 1243940
caggaaucucucuggagca

SEQ ID NO: 1452857 - RNA, 19 nt, Artificial Sequence
  Description of Artificial Sequence: Synthetic oligonucleotide
  Antisense strand to SEQ ID NO: 1452856
ugcuccagagagauuccug

SEQ ID NO: 1452858 - RNA, 19 nt, Artificial Sequence
  Description of Artificial Sequence: Synthetic oligonucleotide
  Sense strand starting at position 761 of SEQ ID NO: 1243940
uggagcacuucccugaaau

SEQ ID NO: 1452859 - RNA, 19 nt, Artificial Sequence
  Description of Artificial Sequence: Synthetic oligonucleotide
  Antisense strand to SEQ ID NO: 1452858
auuucagggaagugcucca

SEQ ID NO: 1452860 - RNA, 19 nt, Artificial Sequence
  Description of Artificial Sequence: Synthetic oligonucleotide
  Sense strand starting at position 762 of SEQ ID NO: 1243940
ggagcacuucccugaaauc

SEQ ID NO: 1452861 - RNA, 19 nt, Artificial Sequence
  Description of Artificial Sequence: Synthetic oligonucleotide
  Antisense strand to SEQ ID NO: 1452860
gauuucagggaagugcucc

SEQ ID NO: 1452862 - RNA, 19 nt, Artificial Sequence
  Description of Artificial Sequence: Synthetic oligonucleotide
  Sense strand starting at position 924 of SEQ ID NO: 1243940
agggcugaccuuugcuaaa

SEQ ID NO: 1452863 - RNA, 19 nt, Artificial Sequence
  Description of Artificial Sequence: Synthetic oligonucleotide
  Antisense strand to SEQ ID NO: 1452862
uuuagcaaaggucagcccu

SEQ ID NO: 1452864 - RNA, 19 nt, Artificial Sequence
  Description of Artificial Sequence: Synthetic oligonucleotide
  Sense strand starting at position 937 of SEQ ID NO: 1243940
gcuaaaugguugguaauga

SEQ ID NO: 1452865 - RNA, 19 nt, Artificial Sequence
  Description of Artificial Sequence: Synthetic oligonucleotide
  Antisense strand to SEQ ID NO: 1452864
ucauuaccaaccauuuagc

SEQ ID NO: 1452866 - RNA, 19 nt, Artificial Sequence
  Description of Artificial Sequence: Synthetic oligonucleotide
  Sense strand starting at position 945 of SEQ ID NO: 1243940
guugguaaugaaugaauga

SEQ ID NO: 1452867 - RNA, 19 nt, Artificial Sequence
  Description of Artificial Sequence: Synthetic oligonucleotide
  Antisense strand to SEQ ID NO: 1452866
ucauucauucauuaccaac

SEQ ID NO: 1452868 - RNA, 19 nt, Artificial Sequence
  Description of Artificial Sequence: Synthetic oligonucleotide
  Sense strand starting at position 1007 of SEQ ID NO: 1243940
uuaacugcucuccagaagu

SEQ ID NO: 1452869 - RNA, 19 nt, Artificial Sequence
  Description of Artificial Sequence: Synthetic oligonucleotide
  Antisense strand to SEQ ID NO: 1452868
acuucuggagagcaguuaa

SEQ ID NO: 1452870 - RNA, 19 nt, Artificial Sequence
  Description of Artificial Sequence: Synthetic oligonucleotide
  Sense strand starting at position 1020 of SEQ ID NO: 1243940
agaaguaggcacuguuuau

SEQ ID NO: 1452871 - RNA, 19 nt, Artificial Sequence
  Description of Artificial Sequence: Synthetic oligonucleotide
  Antisense strand to SEQ ID NO: 1452870
auaaacagugccuacuucu

SEQ ID NO: 1452872 - RNA, 19 nt, Artificial Sequence
  Description of Artificial Sequence: Synthetic oligonucleotide
  Sense strand starting at position 1128 of SEQ ID NO: 1243940
gggauuacgagaggcugau

SEQ ID NO: 1452873 - RNA, 19 nt, Artificial Sequence
  Description of Artificial Sequence: Synthetic oligonucleotide
  Antisense strand to SEQ ID NO: 1452872
aucagccucucguaauccc

SEQ ID NO: 1452874 - RNA, 19 nt, Artificial Sequence
  Description of Artificial Sequence: Synthetic oligonucleotide
  Sense strand starting at position 2123 of SEQ ID NO: 1243940
agugucugccugguguauu

SEQ ID NO: 1452875 - RNA, 19 nt, Artificial Sequence
  Description of Artificial Sequence: Synthetic oligonucleotide
  Antisense strand to SEQ ID NO: 1452874
aauacaccaggcagacacu

SEQ ID NO: 1452876 - RNA, 19 nt, Artificial Sequence
  Description of Artificial Sequence: Synthetic oligonucleotide
  Sense strand starting at position 2310 of SEQ ID NO: 1243940
augugcaauccagacuuaa

SEQ ID NO: 1452877 - RNA, 19 nt, Artificial Sequence
  Description of Artificial Sequence: Synthetic oligonucleotide
  Antisense strand to SEQ ID NO: 1452876
uuaagucuggauugcacau

SEQ ID NO: 1452878 - RNA, 19 nt, Artificial Sequence
  Description of Artificial Sequence: Synthetic oligonucleotide
  Sense strand starting at position 2479 of SEQ ID NO: 1243940
gccuauaaaggaggugaaa

SEQ ID NO: 1452879 - RNA, 19 nt, Artificial Sequence
  Description of Artificial Sequence: Synthetic oligonucleotide
  Antisense strand to SEQ ID NO: 1452878
uuucaccuccuuuauaggc

SEQ ID NO: 1452880 - RNA, 19 nt, Artificial Sequence
  Description of Artificial Sequence: Synthetic oligonucleotide
  Sense strand starting at position 2501 of SEQ ID NO: 1243940
gcucgucccacugaggaaa

SEQ ID NO: 1452881 - RNA, 19 nt, Artificial Sequence
  Description of Artificial Sequence: Synthetic oligonucleotide
  Antisense strand to SEQ ID NO: 1452880
uuuccucagugggacgagc

SEQ ID NO: 1452882 - RNA, 19 nt, Artificial Sequence
  Description of Artificial Sequence: Synthetic oligonucleotide
  Sense strand starting at position 2572 of SEQ ID NO: 1243940
aguuauaucgaacagcuca

SEQ ID NO: 1452883 - RNA, 19 nt, Artificial Sequence
  Description of Artificial Sequence: Synthetic oligonucleotide
  Antisense strand to SEQ ID NO: 1452882
ugagcuguucgauauaacu

SEQ ID NO: 1452884 - RNA, 19 nt, Artificial Sequence
  Description of Artificial Sequence: Synthetic oligonucleotide
  Sense strand starting at position 2657 of SEQ ID NO: 1243940
aaggcaugugcuuaaucuu

SEQ ID NO: 1452885 - RNA, 19 nt, Artificial Sequence
  Description of Artificial Sequence: Synthetic oligonucleotide
  Antisense strand to SEQ ID NO: 1452884
aagauuaagcacaugccuu

SEQ ID NO: 1452886 - RNA, 19 nt, Artificial Sequence
  Description of Artificial Sequence: Synthetic oligonucleotide
  Sense strand starting at position 2795 of SEQ ID NO: 1243940
cugauccucuggucucaga

SEQ ID NO: 1452887 - RNA, 19 nt, Artificial Sequence
  Description of Artificial Sequence: Synthetic oligonucleotide
  Antisense strand to SEQ ID NO: 1452886
ucugagaccagaggaucag

SEQ ID NO: 1452888 - RNA, 19 nt, Artificial Sequence
  Description of Artificial Sequence: Synthetic oligonucleotide
  Sense strand starting at position 2884 of SEQ ID NO: 1243940
ucucgcuguguuguccaaa

SEQ ID NO: 1452889 - RNA, 19 nt, Artificial Sequence
  Description of Artificial Sequence: Synthetic oligonucleotide
  Antisense strand to SEQ ID NO: 1452888
uuuggacaacacagcgaga

SEQ ID NO: 1452890 - RNA, 19 nt, Artificial Sequence
  Description of Artificial Sequence: Synthetic oligonucleotide
  Sense strand starting at position 2993 of SEQ ID NO: 1243940
uugacuuccauggguauga

SEQ ID NO: 1452891 - RNA, 19 nt, Artificial Sequence
  Description of Artificial Sequence: Synthetic oligonucleotide
  Antisense strand to SEQ ID NO: 1452890
ucauacccauggaagucaa

SEQ ID NO: 1452892 - RNA, 19 nt, Artificial Sequence
  Description of Artificial Sequence: Synthetic oligonucleotide
  Sense strand starting at position 3083 of SEQ ID NO: 1243940
ugcccuauaccuggauauu

SEQ ID NO: 1452893 - RNA, 19 nt, Artificial Sequence
  Description of Artificial Sequence: Synthetic oligonucleotide
  Antisense strand to SEQ ID NO: 1452892
aauauccagguauagggca

SEQ ID NO: 1452894 - RNA, 19 nt, Artificial Sequence
  Description of Artificial Sequence: Synthetic oligonucleotide
  Sense strand starting at position 3084 of SEQ ID NO: 1243940
gcccuauaccuggauauug

SEQ ID NO: 1452895 - RNA, 19 nt, Artificial Sequence
  Description of Artificial Sequence: Synthetic oligonucleotide
  Antisense strand to SEQ ID NO: 1452894
caauauccagguauagggc

SEQ ID NO: 1452896 - RNA, 19 nt, Artificial Sequence
  Description of Artificial Sequence: Synthetic oligonucleotide
  Sense strand starting at position 3130 of SEQ ID NO: 1243940
cuugccugaccucagaaau

SEQ ID NO: 1452897 - RNA, 19 nt, Artificial Sequence
  Description of Artificial Sequence: Synthetic oligonucleotide
  Antisense strand to SEQ ID NO: 1452896
auuucugaggucaggcaag

SEQ ID NO: 1452898 - RNA, 19 nt, Artificial Sequence
  Description of Artificial Sequence: Synthetic oligonucleotide
  Sense strand starting at position 3199 of SEQ ID NO: 1243940
ggcccuuugcaugcaugua

SEQ ID NO: 1452899 - RNA, 19 nt, Artificial Sequence
  Description of Artificial Sequence: Synthetic oligonucleotide
  Antisense strand to SEQ ID NO: 1452898
uacaugcaugcaaagggcc

SEQ ID NO: 1452900 - RNA, 19 nt, Artificial Sequence
  Description of Artificial Sequence: Synthetic oligonucleotide
  Sense strand starting at position 3265 of SEQ ID NO: 1243940
gcaugaggucugcaggacu

SEQ ID NO: 1452901 - RNA, 19 nt, Artificial Sequence
  Description of Artificial Sequence: Synthetic oligonucleotide
  Antisense strand to SEQ ID NO: 1452900
aguccugcagaccucaugc

SEQ ID NO: 1452902 - RNA, 19 nt, Artificial Sequence
  Description of Artificial Sequence: Synthetic oligonucleotide
  Sense strand starting at position 3555 of SEQ ID NO: 1243940
ucaucauugcuggauuaaa

SEQ ID NO: 1452903 - RNA, 19 nt, Artificial Sequence
  Description of Artificial Sequence: Synthetic oligonucleotide
  Antisense strand to SEQ ID NO: 1452902
uuuaauccagcaaugauga

SEQ ID NO: 1452904 - RNA, 19 nt, Artificial Sequence
  Description of Artificial Sequence: Synthetic oligonucleotide
  Sense strand starting at position 3728 of SEQ ID NO: 1243940
auaggaaggcaucguuauu

SEQ ID NO: 1452905 - RNA, 19 nt, Artificial Sequence
  Description of Artificial Sequence: Synthetic oligonucleotide
  Antisense strand to SEQ ID NO: 1452904
aauaacgaugccuuccuau

SEQ ID NO: 1452906 - RNA, 19 nt, Artificial Sequence
  Description of Artificial Sequence: Synthetic oligonucleotide
  Sense strand starting at position 3785 of SEQ ID NO: 1243940
ucauguuucguauacagag

SEQ ID NO: 1452907 - RNA, 19 nt, Artificial Sequence
  Description of Artificial Sequence: Synthetic oligonucleotide
  Antisense strand to SEQ ID NO: 1452906
cucuguauacgaaacauga

SEQ ID NO: 1452908 - RNA, 19 nt, Artificial Sequence
  Description of Artificial Sequence: Synthetic oligonucleotide
  Sense strand starting at position 3856 of SEQ ID NO: 1243940
ccgcacuguggcucuauua

SEQ ID NO: 1452909 - RNA, 19 nt, Artificial Sequence
  Description of Artificial Sequence: Synthetic oligonucleotide
  Antisense strand to SEQ ID NO: 1452908
uaauagagccacagugcgg

SEQ ID NO: 1452910 - RNA, 19 nt, Artificial Sequence
  Description of Artificial Sequence: Synthetic oligonucleotide
  Sense strand starting at position 3857 of SEQ ID NO: 1243940
cgcacuguggcucuauuau

SEQ ID NO: 1452911 - RNA, 19 nt, Artificial Sequence
  Description of Artificial Sequence: Synthetic oligonucleotide
  Antisense strand to SEQ ID NO: 1452910
auaauagagccacagugcg

SEQ ID NO: 1452912 - RNA, 19 nt, Artificial Sequence
  Description of Artificial Sequence: Synthetic oligonucleotide
  Sense strand starting at position 3923 of SEQ ID NO: 1243940
aacaaaggagucugugaau

SEQ ID NO: 1452913 - RNA, 19 nt, Artificial Sequence
  Description of Artificial Sequence: Synthetic oligonucleotide
  Antisense strand to SEQ ID NO: 1452912
auucacagacuccuuuguu

SEQ ID NO: 1452914 - RNA, 19 nt, Artificial Sequence
  Description of Artificial Sequence: Synthetic oligonucleotide
  Sense strand starting at position 3929 of SEQ ID NO: 1243940
ggagucugugaauaugacu

SEQ ID NO: 1452915 - RNA, 19 nt, Artificial Sequence
  Description of Artificial Sequence: Synthetic oligonucleotide
  Antisense strand to SEQ ID NO: 1452914
agucauauucacagacucc

SEQ ID NO: 1452916 - RNA, 19 nt, Artificial Sequence
  Description of Artificial Sequence: Synthetic oligonucleotide
  Sense strand starting at position 3934 of SEQ ID NO: 1243940
cugugaauaugacuuaaag

SEQ ID NO: 1452917 - RNA, 19 nt, Artificial Sequence
  Description of Artificial Sequence: Synthetic oligonucleotide
  Antisense strand to SEQ ID NO: 1452916
cuuuaagucauauucacag

SEQ ID NO: 1452918 - RNA, 19 nt, Artificial Sequence
  Description of Artificial Sequence: Synthetic oligonucleotide
  Sense strand starting at position 86 of SEQ ID NO: 1243941
guggcagcucuaccguaau

SEQ ID NO: 1452919 - RNA, 19 nt, Artificial Sequence
  Description of Artificial Sequence: Synthetic oligonucleotide
  Antisense strand to SEQ ID NO: 1452918
auuacgguagagcugccac

SEQ ID NO: 1452920 - RNA, 19 nt, Artificial Sequence
  Description of Artificial Sequence: Synthetic oligonucleotide
  Sense strand starting at position 132 of SEQ ID NO: 1243941
cagagauacggaggccaua

SEQ ID NO: 1452921 - RNA, 19 nt, Artificial Sequence
  Description of Artificial Sequence: Synthetic oligonucleotide
  Antisense strand to SEQ ID NO: 1452920
uauggccuccguaucucug

SEQ ID NO: 1452922 - RNA, 19 nt, Artificial Sequence
  Description of Artificial Sequence: Synthetic oligonucleotide
  Sense strand starting at position 320 of SEQ ID NO: 1243941
ugucucuaccuagaacgaa

SEQ ID NO: 1452923 - RNA, 19 nt, Artificial Sequence
  Description of Artificial Sequence: Synthetic oligonucleotide
  Antisense strand to SEQ ID NO: 1452922
uucguucuagguagagaca

SEQ ID NO: 1452924 - RNA, 19 nt, Artificial Sequence
  Description of Artificial Sequence: Synthetic oligonucleotide
  Sense strand starting at position 364 of SEQ ID NO: 1243941
auaaucuggcaauaagcau

SEQ ID NO: 1452925 - RNA, 19 nt, Artificial Sequence
  Description of Artificial Sequence: Synthetic oligonucleotide
  Antisense strand to SEQ ID NO: 1452924
augcuuauugccagauuau

SEQ ID NO: 1452926 - RNA, 19 nt, Artificial Sequence
  Description of Artificial Sequence: Synthetic oligonucleotide
  Sense strand starting at position 392 of SEQ ID NO: 1243941
aagguauauuguuccugga

SEQ ID NO: 1452927 - RNA, 19 nt, Artificial Sequence
  Description of Artificial Sequence: Synthetic oligonucleotide
  Antisense strand to SEQ ID NO: 1452926
uccaggaacaauauaccuu

SEQ ID NO: 1452928 - RNA, 19 nt, Artificial Sequence
  Description of Artificial Sequence: Synthetic oligonucleotide
  Sense strand starting at position 512 of SEQ ID NO: 1243941
ggugguaugcuggaacaga

SEQ ID NO: 1452929 - RNA, 19 nt, Artificial Sequence
  Description of Artificial Sequence: Synthetic oligonucleotide
  Antisense strand to SEQ ID NO: 1452928
ucuguuccagcauaccacc

SEQ ID NO: 1452930 - RNA, 19 nt, Artificial Sequence
  Description of Artificial Sequence: Synthetic oligonucleotide
  Sense strand starting at position 642 of SEQ ID NO: 1243941
ugucaucacuucccaggau

SEQ ID NO: 1452931 - RNA, 19 nt, Artificial Sequence
  Description of Artificial Sequence: Synthetic oligonucleotide
  Antisense strand to SEQ ID NO: 1452930
auccugggaagugaugaca

SEQ ID NO: 1452932 - RNA, 19 nt, Artificial Sequence
  Description of Artificial Sequence: Synthetic oligonucleotide
  Sense strand starting at position 688 of SEQ ID NO: 1243941
uaggaaguuauugagguuu

SEQ ID NO: 1452933 - RNA, 19 nt, Artificial Sequence
  Description of Artificial Sequence: Synthetic oligonucleotide
  Antisense strand to SEQ ID NO: 1452932
aaaccucaauaacuuccua

SEQ ID NO: 1452934 - RNA, 19 nt, Artificial Sequence
  Description of Artificial Sequence: Synthetic oligonucleotide
  Sense strand starting at position 902 of SEQ ID NO: 1243941
ucaacuguggauggaguua

SEQ ID NO: 1452935 - RNA, 19 nt, Artificial Sequence
  Description of Artificial Sequence: Synthetic oligonucleotide
  Antisense strand to SEQ ID NO: 1452934
uaacuccauccacaguuga

SEQ ID NO: 1452936 - RNA, 19 nt, Artificial Sequence
  Description of Artificial Sequence: Synthetic oligonucleotide
  Sense strand starting at position 999 of SEQ ID NO: 1243941
uagguagacuuucuagaag

SEQ ID NO: 1452937 - RNA, 19 nt, Artificial Sequence
  Description of Artificial Sequence: Synthetic oligonucleotide
  Antisense strand to SEQ ID NO: 1452936
cuucuagaaagucuaccua

SEQ ID NO: 1452938 - RNA, 19 nt, Artificial Sequence
  Description of Artificial Sequence: Synthetic oligonucleotide
  Sense strand starting at position 1011 of SEQ ID NO: 1243941
cuagaagaaccuugcuaag

SEQ ID NO: 1452939 - RNA, 19 nt, Artificial Sequence
  Description of Artificial Sequence: Synthetic oligonucleotide
  Antisense strand to SEQ ID NO: 1452938
cuuagcaagguucuucuag

SEQ ID NO: 1452940 - RNA, 19 nt, Artificial Sequence
  Description of Artificial Sequence: Synthetic oligonucleotide
  Sense strand starting at position 1069 of SEQ ID NO: 1243941
ucagacucauugucuaaga

SEQ ID NO: 1452941 - RNA, 19 nt, Artificial Sequence
  Description of Artificial Sequence: Synthetic oligonucleotide
  Antisense strand to SEQ ID NO: 1452940
ucuuagacaaugagucuga

SEQ ID NO: 1452942 - RNA, 19 nt, Artificial Sequence
  Description of Artificial Sequence: Synthetic oligonucleotide
  Sense strand starting at position 1131 of SEQ ID NO: 1243941
agacuagccagaggaguuu

SEQ ID NO: 1452943 - RNA, 19 nt, Artificial Sequence
  Description of Artificial Sequence: Synthetic oligonucleotide
  Antisense strand to SEQ ID NO: 1452942
aaacuccucuggcuagucu

SEQ ID NO: 1452944 - RNA, 19 nt, Artificial Sequence
  Description of Artificial Sequence: Synthetic oligonucleotide
  Sense strand starting at position 1335 of SEQ ID NO: 1243941
gagacagucaggugcagau

SEQ ID NO: 1452945 - RNA, 19 nt, Artificial Sequence
  Description of Artificial Sequence: Synthetic oligonucleotide
  Antisense strand to SEQ ID NO: 1452944
aucugcaccugacugucuc

SEQ ID NO: 1452946 - RNA, 19 nt, Artificial Sequence
  Description of Artificial Sequence: Synthetic oligonucleotide
  Sense strand starting at position 1360 of SEQ ID NO: 1243941
ggcauccugcucuaaggau

SEQ ID NO: 1452947 - RNA, 19 nt, Artificial Sequence
  Description of Artificial Sequence: Synthetic oligonucleotide
  Antisense strand to SEQ ID NO: 1452946
auccuuagagcaggaugcc

SEQ ID NO: 1452948 - RNA, 19 nt, Artificial Sequence
  Description of Artificial Sequence: Synthetic oligonucleotide
  Sense strand starting at position 1369 of SEQ ID NO: 1243941
cucuaaggaugugucugaa

SEQ ID NO: 1452949 - RNA, 19 nt, Artificial Sequence
  Description of Artificial Sequence: Synthetic oligonucleotide
  Antisense strand to SEQ ID NO: 1452948
uucagacacauccuuagag

SEQ ID NO: 1452950 - RNA, 19 nt, Artificial Sequence
  Description of Artificial Sequence: Synthetic oligonucleotide
  Sense strand starting at position 1372 of SEQ ID NO: 1243941
uaaggaugugucugaauag

SEQ ID NO: 1452951 - RNA, 19 nt, Artificial Sequence
  Description of Artificial Sequence: Synthetic oligonucleotide
  Antisense strand to SEQ ID NO: 1452950
cuauucagacacauccuua

SEQ ID NO: 1452952 - RNA, 19 nt, Artificial Sequence
  Description of Artificial Sequence: Synthetic oligonucleotide
  Sense strand starting at position 1397 of SEQ ID NO: 1243941
agucccuugccuuaaagau

SEQ ID NO: 1452953 - RNA, 19 nt, Artificial Sequence
  Description of Artificial Sequence: Synthetic oligonucleotide
  Antisense strand to SEQ ID NO: 1452952
aucuuuaaggcaagggacu

SEQ ID NO: 1452954 - RNA, 19 nt, Artificial Sequence
  Description of Artificial Sequence: Synthetic oligonucleotide
  Sense strand starting at position 1492 of SEQ ID NO: 1243941
acaauauucugggcacaug

SEQ ID NO: 1452955 - RNA, 19 nt, Artificial Sequence
  Description of Artificial Sequence: Synthetic oligonucleotide
  Antisense strand to SEQ ID NO: 1452954
caugugcccagaauauugu

SEQ ID NO: 1452956 - RNA, 19 nt, Artificial Sequence
  Description of Artificial Sequence: Synthetic oligonucleotide
  Sense strand starting at position 1567 of SEQ ID NO: 1243941
auuucugugcuaugcuuaa

SEQ ID NO: 1452957 - RNA, 19 nt, Artificial Sequence
  Description of Artificial Sequence: Synthetic oligonucleotide
  Antisense strand to SEQ ID NO: 1452956
uuaagcauagcacagaaau

SEQ ID NO: 1452958 - RNA, 19 nt, Artificial Sequence
  Description of Artificial Sequence: Synthetic oligonucleotide
  Sense strand starting at position 1625 of SEQ ID NO: 1243941
aacggagcuuauuugugua

SEQ ID NO: 1452959 - RNA, 19 nt, Artificial Sequence
  Description of Artificial Sequence: Synthetic oligonucleotide
  Antisense strand to SEQ ID NO: 1452958
uacacaaauaagcuccguu

SEQ ID NO: 1452960 - RNA, 19 nt, Artificial Sequence
  Description of Artificial Sequence: Synthetic oligonucleotide
  Sense strand starting at position 1629 of SEQ ID NO: 1243941
gagcuuauuuguguaacua

SEQ ID NO: 1452961 - RNA, 19 nt, Artificial Sequence
  Description of Artificial Sequence: Synthetic oligonucleotide
  Antisense strand to SEQ ID NO: 1452960
uaguuacacaaauaagcuc

SEQ ID NO: 1452962 - RNA, 19 nt, Artificial Sequence
  Description of Artificial Sequence: Synthetic oligonucleotide
  Sense strand starting at position 1665 of SEQ ID NO: 1243941
uuuaguucucuggagaguu

SEQ ID NO: 1452963 - RNA, 19 nt, Artificial Sequence
  Description of Artificial Sequence: Synthetic oligonucleotide
  Antisense strand to SEQ ID NO: 1452962
aacucuccagagaacuaaa

SEQ ID NO: 1452964 - RNA, 19 nt, Artificial Sequence
  Description of Artificial Sequence: Synthetic oligonucleotide
  Sense strand starting at position 2014 of SEQ ID NO: 1243941
cugccuuaagaccaggauu

SEQ ID NO: 1452965 - RNA, 19 nt, Artificial Sequence
  Description of Artificial Sequence: Synthetic oligonucleotide
  Antisense strand to SEQ ID NO: 1452964
aauccuggucuuaaggcag

SEQ ID NO: 1452966 - RNA, 19 nt, Artificial Sequence
  Description of Artificial Sequence: Synthetic oligonucleotide
  Sense strand starting at position 2197 of SEQ ID NO: 1243941
ucacuaucugaauggcauu

SEQ ID NO: 1452967 - RNA, 19 nt, Artificial Sequence
  Description of Artificial Sequence: Synthetic oligonucleotide
  Antisense strand to SEQ ID NO: 1452966
aaugccauucagauaguga

SEQ ID NO: 1452968 - RNA, 19 nt, Artificial Sequence
  Description of Artificial Sequence: Synthetic oligonucleotide
  Sense strand starting at position 2260 of SEQ ID NO: 1243941
uguagauuccaugaaggcu

SEQ ID NO: 1452969 - RNA, 19 nt, Artificial Sequence
  Description of Artificial Sequence: Synthetic oligonucleotide
  Antisense strand to SEQ ID NO: 1452968
agccuucauggaaucuaca

SEQ ID NO: 1452970 - RNA, 19 nt, Artificial Sequence
  Description of Artificial Sequence: Synthetic oligonucleotide
  Sense strand starting at position 2493 of SEQ ID NO: 1243941
gcacguuaucugcugugga

SEQ ID NO: 1452971 - RNA, 19 nt, Artificial Sequence
  Description of Artificial Sequence: Synthetic oligonucleotide
  Antisense strand to SEQ ID NO: 1452970
uccacagcagauaacgugc

SEQ ID NO: 1452972 - RNA, 19 nt, Artificial Sequence
  Description of Artificial Sequence: Synthetic oligonucleotide
  Sense strand starting at position 2498 of SEQ ID NO: 1243941
uuaucugcuguggauugaa

SEQ ID NO: 1452973 - RNA, 19 nt, Artificial Sequence
  Description of Artificial Sequence: Synthetic oligonucleotide
  Antisense strand to SEQ ID NO: 1452972
uucaauccacagcagauaa

SEQ ID NO: 1452974 - RNA, 19 nt, Artificial Sequence
  Description of Artificial Sequence: Synthetic oligonucleotide
  Sense strand starting at position 2635 of SEQ ID NO: 1243941
uuucuuuaugugcaaagaa

SEQ ID NO: 1452975 - RNA, 19 nt, Artificial Sequence
  Description of Artificial Sequence: Synthetic oligonucleotide
  Antisense strand to SEQ ID NO: 1452974
uucuuugcacauaaagaaa

SEQ ID NO: 1452976 - RNA, 19 nt, Artificial Sequence
  Description of Artificial Sequence: Synthetic oligonucleotide
  Sense strand starting at position 2758 of SEQ ID NO: 1243941
ggagaacaaauauguguua

SEQ ID NO: 1452977 - RNA, 19 nt, Artificial Sequence
  Description of Artificial Sequence: Synthetic oligonucleotide
  Antisense strand to SEQ ID NO: 1452976
uaacacauauuuguucucc

SEQ ID NO: 1452978 - RNA, 19 nt, Artificial Sequence
  Description of Artificial Sequence: Synthetic oligonucleotide
  Sense strand starting at position 2759 of SEQ ID NO: 1243941
gagaacaaauauguguuau

SEQ ID NO: 1452979 - RNA, 19 nt, Artificial Sequence
  Description of Artificial Sequence: Synthetic oligonucleotide
  Antisense strand to SEQ ID NO: 1452978
auaacacauauuuguucuc

SEQ ID NO: 1452980 - RNA, 19 nt, Artificial Sequence
  Description of Artificial Sequence: Synthetic oligonucleotide
  Sense strand starting at position 3790 of SEQ ID NO: 1243941
ucagauggauuccuccuau

SEQ ID NO: 1452981 - RNA, 19 nt, Artificial Sequence
  Description of Artificial Sequence: Synthetic oligonucleotide
  Antisense strand to SEQ ID NO: 1452980
auaggaggaauccaucuga

SEQ ID NO: 1452982 - RNA, 19 nt, Artificial Sequence
  Description of Artificial Sequence: Synthetic oligonucleotide
  Sense strand starting at position 3802 of SEQ ID NO: 1243941
cuccuaugucuaggaugag

SEQ ID NO: 1452983 - RNA, 19 nt, Artificial Sequence
  Description of Artificial Sequence: Synthetic oligonucleotide
  Antisense strand to SEQ ID NO: 1452982
cucauccuagacauaggag

SEQ ID NO: 1452984 - RNA, 19 nt, Artificial Sequence
  Description of Artificial Sequence: Synthetic oligonucleotide
  Sense strand starting at position 3812 of SEQ ID NO: 1243941
uaggaugagcccugggauu

SEQ ID NO: 1452985 - RNA, 19 nt, Artificial Sequence
  Description of Artificial Sequence: Synthetic oligonucleotide
  Antisense strand to SEQ ID NO: 1452984
aaucccagggcucauccua

SEQ ID NO: 1452986 - RNA, 19 nt, Artificial Sequence
  Description of Artificial Sequence: Synthetic oligonucleotide
  Sense strand starting at position 3814 of SEQ ID NO: 1243941
ggaugagcccugggauucu

SEQ ID NO: 1452987 - RNA, 19 nt, Artificial Sequence
  Description of Artificial Sequence: Synthetic oligonucleotide
  Antisense strand to SEQ ID NO: 1452986
agaaucccagggcucaucc

SEQ ID NO: 1452988 - RNA, 19 nt, Artificial Sequence
  Description of Artificial Sequence: Synthetic oligonucleotide
  Sense strand starting at position 3837 of SEQ ID NO: 1243941
ugcacuaauguugggaaca

SEQ ID NO: 1452989 - RNA, 19 nt, Artificial Sequence
  Description of Artificial Sequence: Synthetic oligonucleotide
  Antisense strand to SEQ ID NO: 1452988
uguucccaacauuagugca

SEQ ID NO: 1452990 - RNA, 19 nt, Artificial Sequence
  Description of Artificial Sequence: Synthetic oligonucleotide
  Sense strand starting at position 3929 of SEQ ID NO: 1243941
augccuguugugucaaugu

SEQ ID NO: 1452991 - RNA, 19 nt, Artificial Sequence
  Description of Artificial Sequence: Synthetic oligonucleotide
  Antisense strand to SEQ ID NO: 1452990
acauugacacaacaggcau

SEQ ID NO: 1452992 - RNA, 19 nt, Artificial Sequence
  Description of Artificial Sequence: Synthetic oligonucleotide
  Sense strand starting at position 3940 of SEQ ID NO: 1243941
gucaauguagauuaguaca

SEQ ID NO: 1452993 - RNA, 19 nt, Artificial Sequence
  Description of Artificial Sequence: Synthetic oligonucleotide
  Antisense strand to SEQ ID NO: 1452992
uguacuaaucuacauugac

SEQ ID NO: 1452994 - RNA, 19 nt, Artificial Sequence
  Description of Artificial Sequence: Synthetic oligonucleotide
  Sense strand starting at position 3945 of SEQ ID NO: 1243941
uguagauuaguacauuaug

SEQ ID NO: 1452995 - RNA, 19 nt, Artificial Sequence
  Description of Artificial Sequence: Synthetic oligonucleotide
  Antisense strand to SEQ ID NO: 1452994
cauaauguacuaaucuaca

SEQ ID NO: 1452996 - RNA, 19 nt, Artificial Sequence
  Description of Artificial Sequence: Synthetic oligonucleotide
  Sense strand starting at position 3983 of SEQ ID NO: 1243941
cagugaagugucuggagga

SEQ ID NO: 1452997 - RNA, 19 nt, Artificial Sequence
  Description of Artificial Sequence: Synthetic oligonucleotide
  Antisense strand to SEQ ID NO: 1452996
uccuccagacacuucacug

SEQ ID NO: 1452998 - RNA, 19 nt, Artificial Sequence
  Description of Artificial Sequence: Synthetic oligonucleotide
  Sense strand starting at position 402 of SEQ ID NO: 1243942
gugauauuggcucacucca

SEQ ID NO: 1452999 - RNA, 19 nt, Artificial Sequence
  Description of Artificial Sequence: Synthetic oligonucleotide
  Antisense strand to SEQ ID NO: 1452998
uggagugagccaauaucac

SEQ ID NO: 1453000 - RNA, 19 nt, Artificial Sequence
  Description of Artificial Sequence: Synthetic oligonucleotide
  Sense strand starting at position 917 of SEQ ID NO: 1243942
ccaggauagcacuaagcau

SEQ ID NO: 1453001 - RNA, 19 nt, Artificial Sequence
  Description of Artificial Sequence: Synthetic oligonucleotide
  Antisense strand to SEQ ID NO: 1453000
augcuuagugcuauccugg

SEQ ID NO: 1453002 - RNA, 19 nt, Artificial Sequence
  Description of Artificial Sequence: Synthetic oligonucleotide
  Sense strand starting at position 1045 of SEQ ID NO: 1243942
uguggucuccuugacggaa

SEQ ID NO: 1453003 - RNA, 19 nt, Artificial Sequence
  Description of Artificial Sequence: Synthetic oligonucleotide
  Antisense strand to SEQ ID NO: 1453002
uuccgucaaggagaccaca

SEQ ID NO: 1453004 - RNA, 19 nt, Artificial Sequence
  Description of Artificial Sequence: Synthetic oligonucleotide
  Sense strand starting at position 1048 of SEQ ID NO: 1243942
ggucuccuugacggaaaga

SEQ ID NO: 1453005 - RNA, 19 nt, Artificial Sequence
  Description of Artificial Sequence: Synthetic oligonucleotide
  Antisense strand to SEQ ID NO: 1453004
ucuuuccgucaaggagacc

SEQ ID NO: 1453006 - RNA, 19 nt, Artificial Sequence
  Description of Artificial Sequence: Synthetic oligonucleotide
  Sense strand starting at position 1058 of SEQ ID NO: 1243942
acggaaagacuguggucuu

SEQ ID NO: 1453007 - RNA, 19 nt, Artificial Sequence
  Description of Artificial Sequence: Synthetic oligonucleotide
  Antisense strand to SEQ ID NO: 1453006
aagaccacagucuuuccgu

SEQ ID NO: 1453008 - RNA, 19 nt, Artificial Sequence
  Description of Artificial Sequence: Synthetic oligonucleotide
  Sense strand starting at position 1299 of SEQ ID NO: 1243942
gguucaagagaauguggua

SEQ ID NO: 1453009 - RNA, 19 nt, Artificial Sequence
  Description of Artificial Sequence: Synthetic oligonucleotide
  Antisense strand to SEQ ID NO: 1453008
uaccacauucucuugaacc

SEQ ID NO: 1453010 - RNA, 19 nt, Artificial Sequence
  Description of Artificial Sequence: Synthetic oligonucleotide
  Sense strand starting at position 1311 of SEQ ID NO: 1243942
ugugguaaaccuugaccuu

SEQ ID NO: 1453011 - RNA, 19 nt, Artificial Sequence
  Description of Artificial Sequence: Synthetic oligonucleotide
  Antisense strand to SEQ ID NO: 1453010
aaggucaagguuuaccaca

SEQ ID NO: 1453012 - RNA, 19 nt, Artificial Sequence
  Description of Artificial Sequence: Synthetic oligonucleotide
  Sense strand starting at position 1374 of SEQ ID NO: 1243942
cuguaugaccucgaucaca

SEQ ID NO: 1453013 - RNA, 19 nt, Artificial Sequence
  Description of Artificial Sequence: Synthetic oligonucleotide
  Antisense strand to SEQ ID NO: 1453012
ugugaucgaggucauacag

SEQ ID NO: 1453014 - RNA, 19 nt, Artificial Sequence
  Description of Artificial Sequence: Synthetic oligonucleotide
  Sense strand starting at position 1484 of SEQ ID NO: 1243942
ucccucuauccugagcaga

SEQ ID NO: 1453015 - RNA, 19 nt, Artificial Sequence
  Description of Artificial Sequence: Synthetic oligonucleotide
  Antisense strand to SEQ ID NO: 1453014
ucugcucaggauagaggga

SEQ ID NO: 1453016 - RNA, 19 nt, Artificial Sequence
  Description of Artificial Sequence: Synthetic oligonucleotide
  Sense strand starting at position 1486 of SEQ ID NO: 1243942
ccucuauccugagcagaaa

SEQ ID NO: 1453017 - RNA, 19 nt, Artificial Sequence
  Description of Artificial Sequence: Synthetic oligonucleotide
  Antisense strand to SEQ ID NO: 1453016
uuucugcucaggauagagg

SEQ ID NO: 1453018 - RNA, 19 nt, Artificial Sequence
  Description of Artificial Sequence: Synthetic oligonucleotide
  Sense strand starting at position 1798 of SEQ ID NO: 1243942
gaggaauguuuggcacucu

SEQ ID NO: 1453019 - RNA, 19 nt, Artificial Sequence
  Description of Artificial Sequence: Synthetic oligonucleotide
  Antisense strand to SEQ ID NO: 1453018
agagugccaaacauuccuc

SEQ ID NO: 1453020 - RNA, 19 nt, Artificial Sequence
  Description of Artificial Sequence: Synthetic oligonucleotide
  Sense strand starting at position 1822 of SEQ ID NO: 1243942
guuauuacccuguaagucu

SEQ ID NO: 1453021 - RNA, 19 nt, Artificial Sequence
  Description of Artificial Sequence: Synthetic oligonucleotide
  Antisense strand to SEQ ID NO: 1453020
agacuuacaggguaauaac

SEQ ID NO: 1453022 - RNA, 19 nt, Artificial Sequence
  Description of Artificial Sequence: Synthetic oligonucleotide
  Sense strand starting at position 2108 of SEQ ID NO: 1243942
gaggucuccugaguuagga

SEQ ID NO: 1453023 - RNA, 19 nt, Artificial Sequence
  Description of Artificial Sequence: Synthetic oligonucleotide
  Antisense strand to SEQ ID NO: 1453022
uccuaacucaggagaccuc

SEQ ID NO: 1453024 - RNA, 19 nt, Artificial Sequence
  Description of Artificial Sequence: Synthetic oligonucleotide
  Sense strand starting at position 2110 of SEQ ID NO: 1243942
ggucuccugaguuaggaga

SEQ ID NO: 1453025 - RNA, 19 nt, Artificial Sequence
  Description of Artificial Sequence: Synthetic oligonucleotide
  Antisense strand to SEQ ID NO: 1453024
ucuccuaacucaggagacc

SEQ ID NO: 1453026 - RNA, 19 nt, Artificial Sequence
  Description of Artificial Sequence: Synthetic oligonucleotide
  Sense strand starting at position 2136 of SEQ ID NO: 1243942
accaauagguugguaacau

SEQ ID NO: 1453027 - RNA, 19 nt, Artificial Sequence
  Description of Artificial Sequence: Synthetic oligonucleotide
  Antisense strand to SEQ ID NO: 1453026
auguuaccaaccuauuggu

SEQ ID NO: 1453028 - RNA, 19 nt, Artificial Sequence
  Description of Artificial Sequence: Synthetic oligonucleotide
  Sense strand starting at position 2219 of SEQ ID NO: 1243942
augcauuugcaucgagcaa

SEQ ID NO: 1453029 - RNA, 19 nt, Artificial Sequence
  Description of Artificial Sequence: Synthetic oligonucleotide
  Antisense strand to SEQ ID NO: 1453028
uugcucgaugcaaaugcau

SEQ ID NO: 1453030 - RNA, 19 nt, Artificial Sequence
  Description of Artificial Sequence: Synthetic oligonucleotide
  Sense strand starting at position 2257 of SEQ ID NO: 1243942
gaagaauagucagugcuug

SEQ ID NO: 1453031 - RNA, 19 nt, Artificial Sequence
  Description of Artificial Sequence: Synthetic oligonucleotide
  Antisense strand to SEQ ID NO: 1453030
caagcacugacuauucuuc

SEQ ID NO: 1453032 - RNA, 19 nt, Artificial Sequence
  Description of Artificial Sequence: Synthetic oligonucleotide
  Sense strand starting at position 2261 of SEQ ID NO: 1243942
aauagucagugcuugggaa

SEQ ID NO: 1453033 - RNA, 19 nt, Artificial Sequence
  Description of Artificial Sequence: Synthetic oligonucleotide
  Antisense strand to SEQ ID NO: 1453032
uucccaagcacugacuauu

SEQ ID NO: 1453034 - RNA, 19 nt, Artificial Sequence
  Description of Artificial Sequence: Synthetic oligonucleotide
  Sense strand starting at position 2453 of SEQ ID NO: 1243942
auggaaacuccuugggagu

SEQ ID NO: 1453035 - RNA, 19 nt, Artificial Sequence
  Description of Artificial Sequence: Synthetic oligonucleotide
  Antisense strand to SEQ ID NO: 1453034
acucccaaggaguuuccau

SEQ ID NO: 1453036 - RNA, 19 nt, Artificial Sequence
  Description of Artificial Sequence: Synthetic oligonucleotide
  Sense strand starting at position 2454 of SEQ ID NO: 1243942
uggaaacuccuugggagua

SEQ ID NO: 1453037 - RNA, 19 nt, Artificial Sequence
  Description of Artificial Sequence: Synthetic oligonucleotide
  Antisense strand to SEQ ID NO: 1453036
uacucccaaggaguuucca

SEQ ID NO: 1453038 - RNA, 19 nt, Artificial Sequence
  Description of Artificial Sequence: Synthetic oligonucleotide
  Sense strand starting at position 2805 of SEQ ID NO: 1243942
gggugauuggcacgaaaug

SEQ ID NO: 1453039 - RNA, 19 nt, Artificial Sequence
  Description of Artificial Sequence: Synthetic oligonucleotide
  Antisense strand to SEQ ID NO: 1453038
cauuucgugccaaucaccc

SEQ ID NO: 1453040 - RNA, 19 nt, Artificial Sequence
  Description of Artificial Sequence: Synthetic oligonucleotide
  Sense strand starting at position 2806 of SEQ ID NO: 1243942
ggugauuggcacgaaaugu

SEQ ID NO: 1453041 - RNA, 19 nt, Artificial Sequence
  Description of Artificial Sequence: Synthetic oligonucleotide
  Antisense strand to SEQ ID NO: 1453040
acauuucgugccaaucacc

SEQ ID NO: 1453042 - RNA, 19 nt, Artificial Sequence
  Description of Artificial Sequence: Synthetic oligonucleotide
  Sense strand starting at position 2862 of SEQ ID NO: 1243942
gagucauguuucucaggga

SEQ ID NO: 1453043 - RNA, 19 nt, Artificial Sequence
  Description of Artificial Sequence: Synthetic oligonucleotide
  Antisense strand to SEQ ID NO: 1453042
ucccugagaaacaugacuc

SEQ ID NO: 1453044 - RNA, 19 nt, Artificial Sequence
  Description of Artificial Sequence: Synthetic oligonucleotide
  Sense strand starting at position 2866 of SEQ ID NO: 1243942
cauguuucucagggaguua

SEQ ID NO: 1453045 - RNA, 19 nt, Artificial Sequence
  Description of Artificial Sequence: Synthetic oligonucleotide
  Antisense strand to SEQ ID NO: 1453044
uaacucccugagaaacaug

SEQ ID NO: 1453046 - RNA, 19 nt, Artificial Sequence
  Description of Artificial Sequence: Synthetic oligonucleotide
  Sense strand starting at position 2867 of SEQ ID NO: 1243942
auguuucucagggaguuaa

SEQ ID NO: 1453047 - RNA, 19 nt, Artificial Sequence
  Description of Artificial Sequence: Synthetic oligonucleotide
  Antisense strand to SEQ ID NO: 1453046
uuaacucccugagaaacau

SEQ ID NO: 1453048 - RNA, 19 nt, Artificial Sequence
  Description of Artificial Sequence: Synthetic oligonucleotide
  Sense strand starting at position 2886 of SEQ ID NO: 1243942
ggcaauugcgaucauguaa

SEQ ID NO: 1453049 - RNA, 19 nt, Artificial Sequence
  Description of Artificial Sequence: Synthetic oligonucleotide
  Antisense strand to SEQ ID NO: 1453048
uuacaugaucgcaauugcc

SEQ ID NO: 1453050 - RNA, 19 nt, Artificial Sequence
  Description of Artificial Sequence: Synthetic oligonucleotide
  Sense strand starting at position 3067 of SEQ ID NO: 1243942
aggauuaagugagagacaa

SEQ ID NO: 1453051 - RNA, 19 nt, Artificial Sequence
  Description of Artificial Sequence: Synthetic oligonucleotide
  Antisense strand to SEQ ID NO: 1453050
uugucucucacuuaauccu

SEQ ID NO: 1453052 - RNA, 19 nt, Artificial Sequence
  Description of Artificial Sequence: Synthetic oligonucleotide
  Sense strand starting at position 3147 of SEQ ID NO: 1243942
gaaugagguuaucccgagu

SEQ ID NO: 1453053 - RNA, 19 nt, Artificial Sequence
  Description of Artificial Sequence: Synthetic oligonucleotide
  Antisense strand to SEQ ID NO: 1453052
acucgggauaaccucauuc

SEQ ID NO: 1453054 - RNA, 19 nt, Artificial Sequence
  Description of Artificial Sequence: Synthetic oligonucleotide
  Sense strand starting at position 3150 of SEQ ID NO: 1243942
ugagguuaucccgaguuca

SEQ ID NO: 1453055 - RNA, 19 nt, Artificial Sequence
  Description of Artificial Sequence: Synthetic oligonucleotide
  Antisense strand to SEQ ID NO: 1453054
ugaacucgggauaaccuca

SEQ ID NO: 1453056 - RNA, 19 nt, Artificial Sequence
  Description of Artificial Sequence: Synthetic oligonucleotide
  Sense strand starting at position 3168 of SEQ ID NO: 1243942
agaugcugacaucggaaau

SEQ ID NO: 1453057 - RNA, 19 nt, Artificial Sequence
  Description of Artificial Sequence: Synthetic oligonucleotide
  Antisense strand to SEQ ID NO: 1453056
auuuccgaugucagcaucu

SEQ ID NO: 1453058 - RNA, 19 nt, Artificial Sequence
  Description of Artificial Sequence: Synthetic oligonucleotide
  Sense strand starting at position 3202 of SEQ ID NO: 1243942
agaggagugcgucauccaa

SEQ ID NO: 1453059 - RNA, 19 nt, Artificial Sequence
  Description of Artificial Sequence: Synthetic oligonucleotide
  Antisense strand to SEQ ID NO: 1453058
uuggaugacgcacuccucu

SEQ ID NO: 1453060 - RNA, 19 nt, Artificial Sequence
  Description of Artificial Sequence: Synthetic oligonucleotide
  Sense strand starting at position 3206 of SEQ ID NO: 1243942
gagugcgucauccaagaag

SEQ ID NO: 1453061 - RNA, 19 nt, Artificial Sequence
  Description of Artificial Sequence: Synthetic oligonucleotide
  Antisense strand to SEQ ID NO: 1453060
cuucuuggaugacgcacuc

SEQ ID NO: 1453062 - RNA, 19 nt, Artificial Sequence
  Description of Artificial Sequence: Synthetic oligonucleotide
  Sense strand starting at position 3213 of SEQ ID NO: 1243942
ucauccaagaagugggauu

SEQ ID NO: 1453063 - RNA, 19 nt, Artificial Sequence
  Description of Artificial Sequence: Synthetic oligonucleotide
  Antisense strand to SEQ ID NO: 1453062
aaucccacuucuuggauga

SEQ ID NO: 1453064 - RNA, 19 nt, Artificial Sequence
  Description of Artificial Sequence: Synthetic oligonucleotide
  Sense strand starting at position 3260 of SEQ ID NO: 1243942
uuaugaguugcagggaaga

SEQ ID NO: 1453065 - RNA, 19 nt, Artificial Sequence
  Description of Artificial Sequence: Synthetic oligonucleotide
  Antisense strand to SEQ ID NO: 1453064
ucuucccugcaacucauaa

SEQ ID NO: 1453066 - RNA, 19 nt, Artificial Sequence
  Description of Artificial Sequence: Synthetic oligonucleotide
  Sense strand starting at position 3336 of SEQ ID NO: 1243942
ggcagucgucauggaagaa

SEQ ID NO: 1453067 - RNA, 19 nt, Artificial Sequence
  Description of Artificial Sequence: Synthetic oligonucleotide
  Antisense strand to SEQ ID NO: 1453066
uucuuccaugacgacugcc

SEQ ID NO: 1453068 - RNA, 19 nt, Artificial Sequence
  Description of Artificial Sequence: Synthetic oligonucleotide
  Sense strand starting at position 3337 of SEQ ID NO: 1243942
gcagucgucauggaagaaa

SEQ ID NO: 1453069 - RNA, 19 nt, Artificial Sequence
  Description of Artificial Sequence: Synthetic oligonucleotide
  Antisense strand to SEQ ID NO: 1453068
uuucuuccaugacgacugc

SEQ ID NO: 1453070 - RNA, 19 nt, Artificial Sequence
  Description of Artificial Sequence: Synthetic oligonucleotide
  Sense strand starting at position 3495 of SEQ ID NO: 1243942
gacagcuuuccaugggaag

SEQ ID NO: 1453071 - RNA, 19 nt, Artificial Sequence
  Description of Artificial Sequence: Synthetic oligonucleotide
  Antisense strand to SEQ ID NO: 1453070
cuucccauggaaagcuguc

SEQ ID NO: 1453072 - RNA, 19 nt, Artificial Sequence
  Description of Artificial Sequence: Synthetic oligonucleotide
  Sense strand starting at position 3522 of SEQ ID NO: 1243942
ggguuugggaucugugaaa

SEQ ID NO: 1453073 - RNA, 19 nt, Artificial Sequence
  Description of Artificial Sequence: Synthetic oligonucleotide
  Antisense strand to SEQ ID NO: 1453072
uuucacagaucccaaaccc

SEQ ID NO: 1453074 - RNA, 19 nt, Artificial Sequence
  Description of Artificial Sequence: Synthetic oligonucleotide
  Sense strand starting at position 3739 of SEQ ID NO: 1243942
ccaguuucucgggacaaag

SEQ ID NO: 1453075 - RNA, 19 nt, Artificial Sequence
  Description of Artificial Sequence: Synthetic oligonucleotide
  Antisense strand to SEQ ID NO: 1453074
cuuugucccgagaaacugg

SEQ ID NO: 1453076 - RNA, 19 nt, Artificial Sequence
  Description of Artificial Sequence: Synthetic oligonucleotide
  Sense strand starting at position 3837 of SEQ ID NO: 1243942
uguggucagaggugaauca

SEQ ID NO: 1453077 - RNA, 19 nt, Artificial Sequence
  Description of Artificial Sequence: Synthetic oligonucleotide
  Antisense strand to SEQ ID NO: 1453076
ugauucaccucugaccaca

SEQ ID NO: 1453078 - RNA, 19 nt, Artificial Sequence
  Description of Artificial Sequence: Synthetic oligonucleotide
  Sense strand starting at position 135 of SEQ ID NO: 1243943
gaaauaagguaguuuaccu

SEQ ID NO: 1453079 - RNA, 19 nt, Artificial Sequence
  Description of Artificial Sequence: Synthetic oligonucleotide
  Antisense strand to SEQ ID NO: 1453078
agguaaacuaccuuauuuc

SEQ ID NO: 1453080 - RNA, 19 nt, Artificial Sequence
  Description of Artificial Sequence: Synthetic oligonucleotide
  Sense strand starting at position 188 of SEQ ID NO: 1243943
gugugauguggucacauua

SEQ ID NO: 1453081 - RNA, 19 nt, Artificial Sequence
  Description of Artificial Sequence: Synthetic oligonucleotide
  Antisense strand to SEQ ID NO: 1453080
uaaugugaccacaucacac

SEQ ID NO: 1453082 - RNA, 19 nt, Artificial Sequence
  Description of Artificial Sequence: Synthetic oligonucleotide
  Sense strand starting at position 269 of SEQ ID NO: 1243943
ccucuaaggcugugauuga

SEQ ID NO: 1453083 - RNA, 19 nt, Artificial Sequence
  Description of Artificial Sequence: Synthetic oligonucleotide
  Antisense strand to SEQ ID NO: 1453082
ucaaucacagccuuagagg

SEQ ID NO: 1453084 - RNA, 19 nt, Artificial Sequence
  Description of Artificial Sequence: Synthetic oligonucleotide
  Sense strand starting at position 273 of SEQ ID NO: 1243943
uaaggcugugauugaagaa

SEQ ID NO: 1453085 - RNA, 19 nt, Artificial Sequence
  Description of Artificial Sequence: Synthetic oligonucleotide
  Antisense strand to SEQ ID NO: 1453084
uucuucaaucacagccuua

SEQ ID NO: 1453086 - RNA, 19 nt, Artificial Sequence
  Description of Artificial Sequence: Synthetic oligonucleotide
  Sense strand starting at position 361 of SEQ ID NO: 1243943
caaugaguagggugaguuu

SEQ ID NO: 1453087 - RNA, 19 nt, Artificial Sequence
  Description of Artificial Sequence: Synthetic oligonucleotide
  Antisense strand to SEQ ID NO: 1453086
aaacucacccuacucauug

SEQ ID NO: 1453088 - RNA, 19 nt, Artificial Sequence
  Description of Artificial Sequence: Synthetic oligonucleotide
  Sense strand starting at position 842 of SEQ ID NO: 1243943
auguauaaggguugaugau

SEQ ID NO: 1453089 - RNA, 19 nt, Artificial Sequence
  Description of Artificial Sequence: Synthetic oligonucleotide
  Antisense strand to SEQ ID NO: 1453088
aucaucaacccuuauacau

SEQ ID NO: 1453090 - RNA, 19 nt, Artificial Sequence
  Description of Artificial Sequence: Synthetic oligonucleotide
  Sense strand starting at position 865 of SEQ ID NO: 1243943
agcuuuaaauaucuaggaa

SEQ ID NO: 1453091 - RNA, 19 nt, Artificial Sequence
  Description of Artificial Sequence: Synthetic oligonucleotide
  Antisense strand to SEQ ID NO: 1453090
uuccuagauauuuaaagcu

SEQ ID NO: 1453092 - RNA, 19 nt, Artificial Sequence
  Description of Artificial Sequence: Synthetic oligonucleotide
  Sense strand starting at position 869 of SEQ ID NO: 1243943
uuaaauaucuaggaagaag

SEQ ID NO: 1453093 - RNA, 19 nt, Artificial Sequence
  Description of Artificial Sequence: Synthetic oligonucleotide
  Antisense strand to SEQ ID NO: 1453092
cuucuuccuagauauuuaa

SEQ ID NO: 1453094 - RNA, 19 nt, Artificial Sequence
  Description of Artificial Sequence: Synthetic oligonucleotide
  Sense strand starting at position 1049 of SEQ ID NO: 1243943
cuauucauugcguccgagu

SEQ ID NO: 1453095 - RNA, 19 nt, Artificial Sequence
  Description of Artificial Sequence: Synthetic oligonucleotide
  Antisense strand to SEQ ID NO: 1453094
acucggacgcaaugaauag

SEQ ID NO: 1453096 - RNA, 19 nt, Artificial Sequence
  Description of Artificial Sequence: Synthetic oligonucleotide
  Sense strand starting at position 1177 of SEQ ID NO: 1243943
acgggcuugguaugaagau

SEQ ID NO: 1453097 - RNA, 19 nt, Artificial Sequence
  Description of Artificial Sequence: Synthetic oligonucleotide
  Antisense strand to SEQ ID NO: 1453096
aucuucauaccaagcccgu

SEQ ID NO: 1453098 - RNA, 19 nt, Artificial Sequence
  Description of Artificial Sequence: Synthetic oligonucleotide
  Sense strand starting at position 1192 of SEQ ID NO: 1243943
agauauaaaguauguugca

SEQ ID NO: 1453099 - RNA, 19 nt, Artificial Sequence
  Description of Artificial Sequence: Synthetic oligonucleotide
  Antisense strand to SEQ ID NO: 1453098
ugcaacauacuuuauaucu

SEQ ID NO: 1453100 - RNA, 19 nt, Artificial Sequence
  Description of Artificial Sequence: Synthetic oligonucleotide
  Sense strand starting at position 1193 of SEQ ID NO: 1243943
gauauaaaguauguugcaa

SEQ ID NO: 1453101 - RNA, 19 nt, Artificial Sequence
  Description of Artificial Sequence: Synthetic oligonucleotide
  Antisense strand to SEQ ID NO: 1453100
uugcaacauacuuuauauc

SEQ ID NO: 1453102 - RNA, 19 nt, Artificial Sequence
  Description of Artificial Sequence: Synthetic oligonucleotide
  Sense strand starting at position 1215 of SEQ ID NO: 1243943
gacugagggcacuguagau

SEQ ID NO: 1453103 - RNA, 19 nt, Artificial Sequence
  Description of Artificial Sequence: Synthetic oligonucleotide
  Antisense strand to SEQ ID NO: 1453102
aucuacagugcccucaguc

SEQ ID NO: 1453104 - RNA, 19 nt, Artificial Sequence
  Description of Artificial Sequence: Synthetic oligonucleotide
  Sense strand starting at position 1305 of SEQ ID NO: 1243943
ucaauucugcuuuaggauu

SEQ ID NO: 1453105 - RNA, 19 nt, Artificial Sequence
  Description of Artificial Sequence: Synthetic oligonucleotide
  Antisense strand to SEQ ID NO: 1453104
aauccuaaagcagaauuga

SEQ ID NO: 1453106 - RNA, 19 nt, Artificial Sequence
  Description of Artificial Sequence: Synthetic oligonucleotide
  Sense strand starting at position 1509 of SEQ ID NO: 1243943
uuccuuggugcuuaacuua

SEQ ID NO: 1453107 - RNA, 19 nt, Artificial Sequence
  Description of Artificial Sequence: Synthetic oligonucleotide
  Antisense strand to SEQ ID NO: 1453106
uaaguuaagcaccaaggaa

SEQ ID NO: 1453108 - RNA, 19 nt, Artificial Sequence
  Description of Artificial Sequence: Synthetic oligonucleotide
  Sense strand starting at position 1512 of SEQ ID NO: 1243943
cuuggugcuuaacuuaaga

SEQ ID NO: 1453109 - RNA, 19 nt, Artificial Sequence
  Description of Artificial Sequence: Synthetic oligonucleotide
  Antisense strand to SEQ ID NO: 1453108
ucuuaaguuaagcaccaag

SEQ ID NO: 1453110 - RNA, 19 nt, Artificial Sequence
  Description of Artificial Sequence: Synthetic oligonucleotide
  Sense strand starting at position 1536 of SEQ ID NO: 1243943
cagugcugggaaggauaaa

SEQ ID NO: 1453111 - RNA, 19 nt, Artificial Sequence
  Description of Artificial Sequence: Synthetic oligonucleotide
  Antisense strand to SEQ ID NO: 1453110
uuuauccuucccagcacug

SEQ ID NO: 1453112 - RNA, 19 nt, Artificial Sequence
  Description of Artificial Sequence: Synthetic oligonucleotide
  Sense strand starting at position 1575 of SEQ ID NO: 1243943
ggaagaggagucugacgua

SEQ ID NO: 1453113 - RNA, 19 nt, Artificial Sequence
  Description of Artificial Sequence: Synthetic oligonucleotide
  Antisense strand to SEQ ID NO: 1453112
uacgucagacuccucuucc

SEQ ID NO: 1453114 - RNA, 19 nt, Artificial Sequence
  Description of Artificial Sequence: Synthetic oligonucleotide
  Sense strand starting at position 1582 of SEQ ID NO: 1243943
gagucugacguagagaaca

SEQ ID NO: 1453115 - RNA, 19 nt, Artificial Sequence
  Description of Artificial Sequence: Synthetic oligonucleotide
  Antisense strand to SEQ ID NO: 1453114
uguucucuacgucagacuc

SEQ ID NO: 1453116 - RNA, 19 nt, Artificial Sequence
  Description of Artificial Sequence: Synthetic oligonucleotide
  Sense strand starting at position 1640 of SEQ ID NO: 1243943
cuuugacuucugggauaac

SEQ ID NO: 1453117 - RNA, 19 nt, Artificial Sequence
  Description of Artificial Sequence: Synthetic oligonucleotide
  Antisense strand to SEQ ID NO: 1453116
guuaucccagaagucaaag

SEQ ID NO: 1453118 - RNA, 19 nt, Artificial Sequence
  Description of Artificial Sequence: Synthetic oligonucleotide
  Sense strand starting at position 1662 of SEQ ID NO: 1243943
gggcaaccaggucaauuau

SEQ ID NO: 1453119 - RNA, 19 nt, Artificial Sequence
  Description of Artificial Sequence: Synthetic oligonucleotide
  Antisense strand to SEQ ID NO: 1453118
auaauugaccugguugccc

SEQ ID NO: 1453120 - RNA, 19 nt, Artificial Sequence
  Description of Artificial Sequence: Synthetic oligonucleotide
  Sense strand starting at position 1878 of SEQ ID NO: 1243943
gcaccagaccucugaaauu

SEQ ID NO: 1453121 - RNA, 19 nt, Artificial Sequence
  Description of Artificial Sequence: Synthetic oligonucleotide
  Antisense strand to SEQ ID NO: 1453120
aauuucagaggucuggugc

SEQ ID NO: 1453122 - RNA, 19 nt, Artificial Sequence
  Description of Artificial Sequence: Synthetic oligonucleotide
  Sense strand starting at position 1890 of SEQ ID NO: 1243943
ugaaauugcccucggagac

SEQ ID NO: 1453123 - RNA, 19 nt, Artificial Sequence
  Description of Artificial Sequence: Synthetic oligonucleotide
  Antisense strand to SEQ ID NO: 1453122
gucuccgagggcaauuuca

SEQ ID NO: 1453124 - RNA, 19 nt, Artificial Sequence
  Description of Artificial Sequence: Synthetic oligonucleotide
  Sense strand starting at position 1891 of SEQ ID NO: 1243943
gaaauugcccucggagacu

SEQ ID NO: 1453125 - RNA, 19 nt, Artificial Sequence
  Description of Artificial Sequence: Synthetic oligonucleotide
  Antisense strand to SEQ ID NO: 1453124
agucuccgagggcaauuuc

SEQ ID NO: 1453126 - RNA, 19 nt, Artificial Sequence
  Description of Artificial Sequence: Synthetic oligonucleotide
  Sense strand starting at position 2573 of SEQ ID NO: 1243943
cuuccaauccuagagaguc

SEQ ID NO: 1453127 - RNA, 19 nt, Artificial Sequence
  Description of Artificial Sequence: Synthetic oligonucleotide
  Antisense strand to SEQ ID NO: 1453126
gacucucuaggauuggaag

SEQ ID NO: 1453128 - RNA, 19 nt, Artificial Sequence
  Description of Artificial Sequence: Synthetic oligonucleotide
  Sense strand starting at position 2581 of SEQ ID NO: 1243943
ccuagagagucuuccugaa

SEQ ID NO: 1453129 - RNA, 19 nt, Artificial Sequence
  Description of Artificial Sequence: Synthetic oligonucleotide
  Antisense strand to SEQ ID NO: 1453128
uucaggaagacucucuagg

SEQ ID NO: 1453130 - RNA, 19 nt, Artificial Sequence
  Description of Artificial Sequence: Synthetic oligonucleotide
  Sense strand starting at position 2583 of SEQ ID NO: 1243943
uagagagucuuccugaaag

SEQ ID NO: 1453131 - RNA, 19 nt, Artificial Sequence
  Description of Artificial Sequence: Synthetic oligonucleotide
  Antisense strand to SEQ ID NO: 1453130
cuuucaggaagacucucua

SEQ ID NO: 1453132 - RNA, 19 nt, Artificial Sequence
  Description of Artificial Sequence: Synthetic oligonucleotide
  Sense strand starting at position 2585 of SEQ ID NO: 1243943
gagagucuuccugaaaggc

SEQ ID NO: 1453133 - RNA, 19 nt, Artificial Sequence
  Description of Artificial Sequence: Synthetic oligonucleotide
  Antisense strand to SEQ ID NO: 1453132
gccuuucaggaagacucuc

SEQ ID NO: 1453134 - RNA, 19 nt, Artificial Sequence
  Description of Artificial Sequence: Synthetic oligonucleotide
  Sense strand starting at position 2721 of SEQ ID NO: 1243943
gagacacuuugagcucagu

SEQ ID NO: 1453135 - RNA, 19 nt, Artificial Sequence
  Description of Artificial Sequence: Synthetic oligonucleotide
  Antisense strand to SEQ ID NO: 1453134
acugagcucaaagugucuc

SEQ ID NO: 1453136 - RNA, 19 nt, Artificial Sequence
  Description of Artificial Sequence: Synthetic oligonucleotide
  Sense strand starting at position 2910 of SEQ ID NO: 1243943
gugccaucucagcauuaag

SEQ ID NO: 1453137 - RNA, 19 nt, Artificial Sequence
  Description of Artificial Sequence: Synthetic oligonucleotide
  Antisense strand to SEQ ID NO: 1453136
cuuaaugcugagauggcac

SEQ ID NO: 1453138 - RNA, 19 nt, Artificial Sequence
  Description of Artificial Sequence: Synthetic oligonucleotide
  Sense strand starting at position 3071 of SEQ ID NO: 1243943
gcggucuggauugagaauu

SEQ ID NO: 1453139 - RNA, 19 nt, Artificial Sequence
  Description of Artificial Sequence: Synthetic oligonucleotide
  Antisense strand to SEQ ID NO: 1453138
aauucucaauccagaccgc

SEQ ID NO: 1453140 - RNA, 19 nt, Artificial Sequence
  Description of Artificial Sequence: Synthetic oligonucleotide
  Sense strand starting at position 3182 of SEQ ID NO: 1243943
ggguuaaauuggaggagua

SEQ ID NO: 1453141 - RNA, 19 nt, Artificial Sequence
  Description of Artificial Sequence: Synthetic oligonucleotide
  Antisense strand to SEQ ID NO: 1453140
uacuccuccaauuuaaccc

SEQ ID NO: 1453142 - RNA, 19 nt, Artificial Sequence
  Description of Artificial Sequence: Synthetic oligonucleotide
  Sense strand starting at position 3183 of SEQ ID NO: 1243943
gguuaaauuggaggaguau

SEQ ID NO: 1453143 - RNA, 19 nt, Artificial Sequence
  Description of Artificial Sequence: Synthetic oligonucleotide
  Antisense strand to SEQ ID NO: 1453142
auacuccuccaauuuaacc

SEQ ID NO: 1453144 - RNA, 19 nt, Artificial Sequence
  Description of Artificial Sequence: Synthetic oligonucleotide
  Sense strand starting at position 3196 of SEQ ID NO: 1243943
gaguaugaggaguagcuuu

SEQ ID NO: 1453145 - RNA, 19 nt, Artificial Sequence
  Description of Artificial Sequence: Synthetic oligonucleotide
  Antisense strand to SEQ ID NO: 1453144
aaagcuacuccucauacuc

SEQ ID NO: 1453146 - RNA, 19 nt, Artificial Sequence
  Description of Artificial Sequence: Synthetic oligonucleotide
  Sense strand starting at position 3207 of SEQ ID NO: 1243943
guagcuuuacaauguaaag

SEQ ID NO: 1453147 - RNA, 19 nt, Artificial Sequence
  Description of Artificial Sequence: Synthetic oligonucleotide
  Antisense strand to SEQ ID NO: 1453146
cuuuacauuguaaagcuac

SEQ ID NO: 1453148 - RNA, 19 nt, Artificial Sequence
  Description of Artificial Sequence: Synthetic oligonucleotide
  Sense strand starting at position 3595 of SEQ ID NO: 1243943
cuuccaucuguugaugacu

SEQ ID NO: 1453149 - RNA, 19 nt, Artificial Sequence
  Description of Artificial Sequence: Synthetic oligonucleotide
  Antisense strand to SEQ ID NO: 1453148
agucaucaacagauggaag

SEQ ID NO: 1453150 - RNA, 19 nt, Artificial Sequence
  Description of Artificial Sequence: Synthetic oligonucleotide
  Sense strand starting at position 3600 of SEQ ID NO: 1243943
aucuguugaugacucucaa

SEQ ID NO: 1453151 - RNA, 19 nt, Artificial Sequence
  Description of Artificial Sequence: Synthetic oligonucleotide
  Antisense strand to SEQ ID NO: 1453150
uugagagucaucaacagau

SEQ ID NO: 1453152 - RNA, 19 nt, Artificial Sequence
  Description of Artificial Sequence: Synthetic oligonucleotide
  Sense strand starting at position 3774 of SEQ ID NO: 1243943
acaaauguuggauguaauu

SEQ ID NO: 1453153 - RNA, 19 nt, Artificial Sequence
  Description of Artificial Sequence: Synthetic oligonucleotide
  Antisense strand to SEQ ID NO: 1453152
aauuacauccaacauuugu

SEQ ID NO: 1453154 - RNA, 19 nt, Artificial Sequence
  Description of Artificial Sequence: Synthetic oligonucleotide
  Sense strand starting at position 3801 of SEQ ID NO: 1243943
uccuaaauuccguaucuug

SEQ ID NO: 1453155 - RNA, 19 nt, Artificial Sequence
  Description of Artificial Sequence: Synthetic oligonucleotide
  Antisense strand to SEQ ID NO: 1453154
caagauacggaauuuagga

SEQ ID NO: 1453156 - RNA, 19 nt, Artificial Sequence
  Description of Artificial Sequence: Synthetic oligonucleotide
  Sense strand starting at position 3852 of SEQ ID NO: 1243943
uccaauuuguugccaaguu

SEQ ID NO: 1453157 - RNA, 19 nt, Artificial Sequence
  Description of Artificial Sequence: Synthetic oligonucleotide
  Antisense strand to SEQ ID NO: 1453156
aacuuggcaacaaauugga

SEQ ID NO: 1453158 - RNA, 19 nt, Artificial Sequence
  Description of Artificial Sequence: Synthetic oligonucleotide
  Sense strand starting at position 310 of SEQ ID NO: 1243944
auguauaaggguugaugau

SEQ ID NO: 1453159 - RNA, 19 nt, Artificial Sequence
  Description of Artificial Sequence: Synthetic oligonucleotide
  Antisense strand to SEQ ID NO: 1453158
aucaucaacccuuauacau

SEQ ID NO: 1453160 - RNA, 19 nt, Artificial Sequence
  Description of Artificial Sequence: Synthetic oligonucleotide
  Sense strand starting at position 333 of SEQ ID NO: 1243944
agcuuuaaauaucuaggaa

SEQ ID NO: 1453161 - RNA, 19 nt, Artificial Sequence
  Description of Artificial Sequence: Synthetic oligonucleotide
  Antisense strand to SEQ ID NO: 1453160
uuccuagauauuuaaagcu

SEQ ID NO: 1453162 - RNA, 19 nt, Artificial Sequence
  Description of Artificial Sequence: Synthetic oligonucleotide
  Sense strand starting at position 337 of SEQ ID NO: 1243944
uuaaauaucuaggaagaag

SEQ ID NO: 1453163 - RNA, 19 nt, Artificial Sequence
  Description of Artificial Sequence: Synthetic oligonucleotide
  Antisense strand to SEQ ID NO: 1453162
cuucuuccuagauauuuaa

SEQ ID NO: 1453164 - RNA, 19 nt, Artificial Sequence
  Description of Artificial Sequence: Synthetic oligonucleotide
  Sense strand starting at position 517 of SEQ ID NO: 1243944
cuauucauugcguccgagu

SEQ ID NO: 1453165 - RNA, 19 nt, Artificial Sequence
  Description of Artificial Sequence: Synthetic oligonucleotide
  Antisense strand to SEQ ID NO: 1453164
acucggacgcaaugaauag

SEQ ID NO: 1453166 - RNA, 19 nt, Artificial Sequence
  Description of Artificial Sequence: Synthetic oligonucleotide
  Sense strand starting at position 645 of SEQ ID NO: 1243944
acgggcuugguaugaagau

SEQ ID NO: 1453167 - RNA, 19 nt, Artificial Sequence
  Description of Artificial Sequence: Synthetic oligonucleotide
  Antisense strand to SEQ ID NO: 1453166
aucuucauaccaagcccgu

SEQ ID NO: 1453168 - RNA, 19 nt, Artificial Sequence
  Description of Artificial Sequence: Synthetic oligonucleotide
  Sense strand starting at position 660 of SEQ ID NO: 1243944
agauauaaaguauguugca

SEQ ID NO: 1453169 - RNA, 19 nt, Artificial Sequence
  Description of Artificial Sequence: Synthetic oligonucleotide
  Antisense strand to SEQ ID NO: 1453168
ugcaacauacuuuauaucu

SEQ ID NO: 1453170 - RNA, 19 nt, Artificial Sequence
  Description of Artificial Sequence: Synthetic oligonucleotide
  Sense strand starting at position 661 of SEQ ID NO: 1243944
gauauaaaguauguugcaa

SEQ ID NO: 1453171 - RNA, 19 nt, Artificial Sequence
  Description of Artificial Sequence: Synthetic oligonucleotide
  Antisense strand to SEQ ID NO: 1453170
uugcaacauacuuuauauc

SEQ ID NO: 1453172 - RNA, 19 nt, Artificial Sequence
  Description of Artificial Sequence: Synthetic oligonucleotide
  Sense strand starting at position 683 of SEQ ID NO: 1243944
gacugagggcacuguagau

SEQ ID NO: 1453173 - RNA, 19 nt, Artificial Sequence
  Description of Artificial Sequence: Synthetic oligonucleotide
  Antisense strand to SEQ ID NO: 1453172
aucuacagugcccucaguc

SEQ ID NO: 1453174 - RNA, 19 nt, Artificial Sequence
  Description of Artificial Sequence: Synthetic oligonucleotide
  Sense strand starting at position 773 of SEQ ID NO: 1243944
ucaauucugcuuuaggauu

SEQ ID NO: 1453175 - RNA, 19 nt, Artificial Sequence
  Description of Artificial Sequence: Synthetic oligonucleotide
  Antisense strand to SEQ ID NO: 1453174
aauccuaaagcagaauuga

SEQ ID NO: 1453176 - RNA, 19 nt, Artificial Sequence
  Description of Artificial Sequence: Synthetic oligonucleotide
  Sense strand starting at position 977 of SEQ ID NO: 1243944
uuccuuggugcuuaacuua

SEQ ID NO: 1453177 - RNA, 19 nt, Artificial Sequence
  Description of Artificial Sequence: Synthetic oligonucleotide
  Antisense strand to SEQ ID NO: 1453176
uaaguuaagcaccaaggaa

SEQ ID NO: 1453178 - RNA, 19 nt, Artificial Sequence
  Description of Artificial Sequence: Synthetic oligonucleotide
  Sense strand starting at position 980 of SEQ ID NO: 1243944
cuuggugcuuaacuuaaga

SEQ ID NO: 1453179 - RNA, 19 nt, Artificial Sequence
  Description of Artificial Sequence: Synthetic oligonucleotide
  Antisense strand to SEQ ID NO: 1453178
ucuuaaguuaagcaccaag

SEQ ID NO: 1453180 - RNA, 19 nt, Artificial Sequence
  Description of Artificial Sequence: Synthetic oligonucleotide
  Sense strand starting at position 1004 of SEQ ID NO: 1243944
cagugcugggaaggauaaa

SEQ ID NO: 1453181 - RNA, 19 nt, Artificial Sequence
  Description of Artificial Sequence: Synthetic oligonucleotide
  Antisense strand to SEQ ID NO: 1453180
uuuauccuucccagcacug

SEQ ID NO: 1453182 - RNA, 19 nt, Artificial Sequence
  Description of Artificial Sequence: Synthetic oligonucleotide
  Sense strand starting at position 1043 of SEQ ID NO: 1243944
ggaagaggagucugacgua

SEQ ID NO: 1453183 - RNA, 19 nt, Artificial Sequence
  Description of Artificial Sequence: Synthetic oligonucleotide
  Antisense strand to SEQ ID NO: 1453182
uacgucagacuccucuucc

SEQ ID NO: 1453184 - RNA, 19 nt, Artificial Sequence
  Description of Artificial Sequence: Synthetic oligonucleotide
  Sense strand starting at position 1050 of SEQ ID NO: 1243944
gagucugacguagagaaca

SEQ ID NO: 1453185 - RNA, 19 nt, Artificial Sequence
  Description of Artificial Sequence: Synthetic oligonucleotide
  Antisense strand to SEQ ID NO: 1453184
uguucucuacgucagacuc

SEQ ID NO: 1453186 - RNA, 19 nt, Artificial Sequence
  Description of Artificial Sequence: Synthetic oligonucleotide
  Sense strand starting at position 1108 of SEQ ID NO: 1243944
cuuugacuucugggauaac

SEQ ID NO: 1453187 - RNA, 19 nt, Artificial Sequence
  Description of Artificial Sequence: Synthetic oligonucleotide
  Antisense strand to SEQ ID NO: 1453186
guuaucccagaagucaaag

SEQ ID NO: 1453188 - RNA, 19 nt, Artificial Sequence
  Description of Artificial Sequence: Synthetic oligonucleotide
  Sense strand starting at position 1130 of SEQ ID NO: 1243944
gggcaaccaggucaauuau

SEQ ID NO: 1453189 - RNA, 19 nt, Artificial Sequence
  Description of Artificial Sequence: Synthetic oligonucleotide
  Antisense strand to SEQ ID NO: 1453188
auaauugaccugguugccc

SEQ ID NO: 1453190 - RNA, 19 nt, Artificial Sequence
  Description of Artificial Sequence: Synthetic oligonucleotide
  Sense strand starting at position 1346 of SEQ ID NO: 1243944
gcaccagaccucugaaauu

SEQ ID NO: 1453191 - RNA, 19 nt, Artificial Sequence
  Description of Artificial Sequence: Synthetic oligonucleotide
  Antisense strand to SEQ ID NO: 1453190
aauuucagaggucuggugc

SEQ ID NO: 1453192 - RNA, 19 nt, Artificial Sequence
  Description of Artificial Sequence: Synthetic oligonucleotide
  Sense strand starting at position 1358 of SEQ ID NO: 1243944
ugaaauugcccucggagac

SEQ ID NO: 1453193 - RNA, 19 nt, Artificial Sequence
  Description of Artificial Sequence: Synthetic oligonucleotide
  Antisense strand to SEQ ID NO: 1453192
gucuccgagggcaauuuca

SEQ ID NO: 1453194 - RNA, 19 nt, Artificial Sequence
  Description of Artificial Sequence: Synthetic oligonucleotide
  Sense strand starting at position 1359 of SEQ ID NO: 1243944
gaaauugcccucggagacu

SEQ ID NO: 1453195 - RNA, 19 nt, Artificial Sequence
  Description of Artificial Sequence: Synthetic oligonucleotide
  Antisense strand to SEQ ID NO: 1453194
agucuccgagggcaauuuc

SEQ ID NO: 1453196 - RNA, 19 nt, Artificial Sequence
  Description of Artificial Sequence: Synthetic oligonucleotide
  Sense strand starting at position 2041 of SEQ ID NO: 1243944
cuuccaauccuagagaguc

SEQ ID NO: 1453197 - RNA, 19 nt, Artificial Sequence
  Description of Artificial Sequence: Synthetic oligonucleotide
  Antisense strand to SEQ ID NO: 1453196
gacucucuaggauuggaag

SEQ ID NO: 1453198 - RNA, 19 nt, Artificial Sequence
  Description of Artificial Sequence: Synthetic oligonucleotide
  Sense strand starting at position 2049 of SEQ ID NO: 1243944
ccuagagagucuuccugaa

SEQ ID NO: 1453199 - RNA, 19 nt, Artificial Sequence
  Description of Artificial Sequence: Synthetic oligonucleotide
  Antisense strand to SEQ ID NO: 1453198
uucaggaagacucucuagg

SEQ ID NO: 1453200 - RNA, 19 nt, Artificial Sequence
  Description of Artificial Sequence: Synthetic oligonucleotide
  Sense strand starting at position 2051 of SEQ ID NO: 1243944
uagagagucuuccugaaag

SEQ ID NO: 1453201 - RNA, 19 nt, Artificial Sequence
  Description of Artificial Sequence: Synthetic oligonucleotide
  Antisense strand to SEQ ID NO: 1453200
cuuucaggaagacucucua

SEQ ID NO: 1453202 - RNA, 19 nt, Artificial Sequence
  Description of Artificial Sequence: Synthetic oligonucleotide
  Sense strand starting at position 2053 of SEQ ID NO: 1243944
gagagucuuccugaaaggc

SEQ ID NO: 1453203 - RNA, 19 nt, Artificial Sequence
  Description of Artificial Sequence: Synthetic oligonucleotide
  Antisense strand to SEQ ID NO: 1453202
gccuuucaggaagacucuc

SEQ ID NO: 1453204 - RNA, 19 nt, Artificial Sequence
  Description of Artificial Sequence: Synthetic oligonucleotide
  Sense strand starting at position 2166 of SEQ ID NO: 1243944
cagcuucuucccgggaaag

SEQ ID NO: 1453205 - RNA, 19 nt, Artificial Sequence
  Description of Artificial Sequence: Synthetic oligonucleotide
  Antisense strand to SEQ ID NO: 1453204
cuuucccgggaagaagcug

SEQ ID NO: 1453206 - RNA, 19 nt, Artificial Sequence
  Description of Artificial Sequence: Synthetic oligonucleotide
  Sense strand starting at position 2189 of SEQ ID NO: 1243944
gagacacuuugagcucagu

SEQ ID NO: 1453207 - RNA, 19 nt, Artificial Sequence
  Description of Artificial Sequence: Synthetic oligonucleotide
  Antisense strand to SEQ ID NO: 1453206
acugagcucaaagugucuc

SEQ ID NO: 1453208 - RNA, 19 nt, Artificial Sequence
  Description of Artificial Sequence: Synthetic oligonucleotide
  Sense strand starting at position 2378 of SEQ ID NO: 1243944
gugccaucucagcauuaag

SEQ ID NO: 1453209 - RNA, 19 nt, Artificial Sequence
  Description of Artificial Sequence: Synthetic oligonucleotide
  Antisense strand to SEQ ID NO: 1453208
cuuaaugcugagauggcac

SEQ ID NO: 1453210 - RNA, 19 nt, Artificial Sequence
  Description of Artificial Sequence: Synthetic oligonucleotide
  Sense strand starting at position 2539 of SEQ ID NO: 1243944
gcggucuggauugagaauu

SEQ ID NO: 1453211 - RNA, 19 nt, Artificial Sequence
  Description of Artificial Sequence: Synthetic oligonucleotide
  Antisense strand to SEQ ID NO: 1453210
aauucucaauccagaccgc

SEQ ID NO: 1453212 - RNA, 19 nt, Artificial Sequence
  Description of Artificial Sequence: Synthetic oligonucleotide
  Sense strand starting at position 2650 of SEQ ID NO: 1243944
ggguuaaauuggaggagua

SEQ ID NO: 1453213 - RNA, 19 nt, Artificial Sequence
  Description of Artificial Sequence: Synthetic oligonucleotide
  Antisense strand to SEQ ID NO: 1453212
uacuccuccaauuuaaccc

SEQ ID NO: 1453214 - RNA, 19 nt, Artificial Sequence
  Description of Artificial Sequence: Synthetic oligonucleotide
  Sense strand starting at position 2651 of SEQ ID NO: 1243944
gguuaaauuggaggaguau

SEQ ID NO: 1453215 - RNA, 19 nt, Artificial Sequence
  Description of Artificial Sequence: Synthetic oligonucleotide
  Antisense strand to SEQ ID NO: 1453214
auacuccuccaauuuaacc

SEQ ID NO: 1453216 - RNA, 19 nt, Artificial Sequence
  Description of Artificial Sequence: Synthetic oligonucleotide
  Sense strand starting at position 2664 of SEQ ID NO: 1243944
gaguaugaggaguagcuuu

SEQ ID NO: 1453217 - RNA, 19 nt, Artificial Sequence
  Description of Artificial Sequence: Synthetic oligonucleotide
  Antisense strand to SEQ ID NO: 1453216
aaagcuacuccucauacuc

SEQ ID NO: 1453218 - RNA, 19 nt, Artificial Sequence
  Description of Artificial Sequence: Synthetic oligonucleotide
  Sense strand starting at position 2675 of SEQ ID NO: 1243944
guagcuuuacaauguaaag

SEQ ID NO: 1453219 - RNA, 19 nt, Artificial Sequence
  Description of Artificial Sequence: Synthetic oligonucleotide
  Antisense strand to SEQ ID NO: 1453218
cuuuacauuguaaagcuac

SEQ ID NO: 1453220 - RNA, 19 nt, Artificial Sequence
  Description of Artificial Sequence: Synthetic oligonucleotide
  Sense strand starting at position 3063 of SEQ ID NO: 1243944
cuuccaucuguugaugacu

SEQ ID NO: 1453221 - RNA, 19 nt, Artificial Sequence
  Description of Artificial Sequence: Synthetic oligonucleotide
  Antisense strand to SEQ ID NO: 1453220
agucaucaacagauggaag

SEQ ID NO: 1453222 - RNA, 19 nt, Artificial Sequence
  Description of Artificial Sequence: Synthetic oligonucleotide
  Sense strand starting at position 3068 of SEQ ID NO: 1243944
aucuguugaugacucucaa

SEQ ID NO: 1453223 - RNA, 19 nt, Artificial Sequence
  Description of Artificial Sequence: Synthetic oligonucleotide
  Antisense strand to SEQ ID NO: 1453222
uugagagucaucaacagau

SEQ ID NO: 1453224 - RNA, 19 nt, Artificial Sequence
  Description of Artificial Sequence: Synthetic oligonucleotide
  Sense strand starting at position 3242 of SEQ ID NO: 1243944
acaaauguuggauguaauu

SEQ ID NO: 1453225 - RNA, 19 nt, Artificial Sequence
  Description of Artificial Sequence: Synthetic oligonucleotide
  Antisense strand to SEQ ID NO: 1453224
aauuacauccaacauuugu

SEQ ID NO: 1453226 - RNA, 19 nt, Artificial Sequence
  Description of Artificial Sequence: Synthetic oligonucleotide
  Sense strand starting at position 3269 of SEQ ID NO: 1243944
uccuaaauuccguaucuug

SEQ ID NO: 1453227 - RNA, 19 nt, Artificial Sequence
  Description of Artificial Sequence: Synthetic oligonucleotide
  Antisense strand to SEQ ID NO: 1453226
caagauacggaauuuagga

SEQ ID NO: 1453228 - RNA, 19 nt, Artificial Sequence
  Description of Artificial Sequence: Synthetic oligonucleotide
  Sense strand starting at position 3320 of SEQ ID NO: 1243944
uccaauuuguugccaaguu

SEQ ID NO: 1453229 - RNA, 19 nt, Artificial Sequence
  Description of Artificial Sequence: Synthetic oligonucleotide
  Antisense strand to SEQ ID NO: 1453228
aacuuggcaacaaauugga

SEQ ID NO: 1453230 - RNA, 19 nt, Artificial Sequence
  Description of Artificial Sequence: Synthetic oligonucleotide
  Sense strand starting at position 3538 of SEQ ID NO: 1243944
uguacuccagcauggagaa

SEQ ID NO: 1453231 - RNA, 19 nt, Artificial Sequence
  Description of Artificial Sequence: Synthetic oligonucleotide
  Antisense strand to SEQ ID NO: 1453230
uucuccaugcuggaguaca

SEQ ID NO: 1453232 - RNA, 19 nt, Artificial Sequence
  Description of Artificial Sequence: Synthetic oligonucleotide
  Sense strand starting at position 3539 of SEQ ID NO: 1243944
guacuccagcauggagaaa

SEQ ID NO: 1453233 - RNA, 19 nt, Artificial Sequence
  Description of Artificial Sequence: Synthetic oligonucleotide
  Antisense strand to SEQ ID NO: 1453232
uuucuccaugcuggaguac

SEQ ID NO: 1453234 - RNA, 19 nt, Artificial Sequence
  Description of Artificial Sequence: Synthetic oligonucleotide
  Sense strand starting at position 3689 of SEQ ID NO: 1243944
gagugaccuuccucaggga

SEQ ID NO: 1453235 - RNA, 19 nt, Artificial Sequence
  Description of Artificial Sequence: Synthetic oligonucleotide
  Antisense strand to SEQ ID NO: 1453234
ucccugaggaaggucacuc

SEQ ID NO: 1453236 - RNA, 19 nt, Artificial Sequence
  Description of Artificial Sequence: Synthetic oligonucleotide
  Sense strand starting at position 3745 of SEQ ID NO: 1243944
ccgucaauuugaucucuuu

SEQ ID NO: 1453237 - RNA, 19 nt, Artificial Sequence
  Description of Artificial Sequence: Synthetic oligonucleotide
  Antisense strand to SEQ ID NO: 1453236
aaagagaucaaauugacgg

SEQ ID NO: 1453238 - RNA, 19 nt, Artificial Sequence
  Description of Artificial Sequence: Synthetic oligonucleotide
  Sense strand starting at position 196 of SEQ ID NO: 1243945
gguccaggccucuagaaag

SEQ ID NO: 1453239 - RNA, 19 nt, Artificial Sequence
  Description of Artificial Sequence: Synthetic oligonucleotide
  Antisense strand to SEQ ID NO: 1453238
cuuucuagaggccuggacc

SEQ ID NO: 1453240 - RNA, 19 nt, Artificial Sequence
  Description of Artificial Sequence: Synthetic oligonucleotide
  Sense strand starting at position 348 of SEQ ID NO: 1243945
auuugaugcuugggaaacu

SEQ ID NO: 1453241 - RNA, 19 nt, Artificial Sequence
  Description of Artificial Sequence: Synthetic oligonucleotide
  Antisense strand to SEQ ID NO: 1453240
aguuucccaagcaucaaau

SEQ ID NO: 1453242 - RNA, 19 nt, Artificial Sequence
  Description of Artificial Sequence: Synthetic oligonucleotide
  Sense strand starting at position 505 of SEQ ID NO: 1243945
ccaggucucagugacaagu

SEQ ID NO: 1453243 - RNA, 19 nt, Artificial Sequence
  Description of Artificial Sequence: Synthetic oligonucleotide
  Antisense strand to SEQ ID NO: 1453242
acuugucacugagaccugg

SEQ ID NO: 1453244 - RNA, 19 nt, Artificial Sequence
  Description of Artificial Sequence: Synthetic oligonucleotide
  Sense strand starting at position 1464 of SEQ ID NO: 1243945
gugggaaacuuacugcagu

SEQ ID NO: 1453245 - RNA, 19 nt, Artificial Sequence
  Description of Artificial Sequence: Synthetic oligonucleotide
  Antisense strand to SEQ ID NO: 1453244
acugcaguaaguuucccac

SEQ ID NO: 1453246 - RNA, 19 nt, Artificial Sequence
  Description of Artificial Sequence: Synthetic oligonucleotide
  Sense strand starting at position 1737 of SEQ ID NO: 1243945
gggaaguagucggagaucu

SEQ ID NO: 1453247 - RNA, 19 nt, Artificial Sequence
  Description of Artificial Sequence: Synthetic oligonucleotide
  Antisense strand to SEQ ID NO: 1453246
agaucuccgacuacuuccc

SEQ ID NO: 1453248 - RNA, 19 nt, Artificial Sequence
  Description of Artificial Sequence: Synthetic oligonucleotide
  Sense strand starting at position 2746 of SEQ ID NO: 1243945
ucagucugugcacacauau

SEQ ID NO: 1453249 - RNA, 19 nt, Artificial Sequence
  Description of Artificial Sequence: Synthetic oligonucleotide
  Antisense strand to SEQ ID NO: 1453248
auaugugugcacagacuga

SEQ ID NO: 1453250 - RNA, 19 nt, Artificial Sequence
  Description of Artificial Sequence: Synthetic oligonucleotide
  Sense strand starting at position 2809 of SEQ ID NO: 1243945
cucacuuggucagugagua

SEQ ID NO: 1453251 - RNA, 19 nt, Artificial Sequence
  Description of Artificial Sequence: Synthetic oligonucleotide
  Antisense strand to SEQ ID NO: 1453250
uacucacugaccaagugag

SEQ ID NO: 1453252 - RNA, 19 nt, Artificial Sequence
  Description of Artificial Sequence: Synthetic oligonucleotide
  Sense strand starting at position 2810 of SEQ ID NO: 1243945
ucacuuggucagugaguac

SEQ ID NO: 1453253 - RNA, 19 nt, Artificial Sequence
  Description of Artificial Sequence: Synthetic oligonucleotide
  Antisense strand to SEQ ID NO: 1453252
guacucacugaccaaguga

SEQ ID NO: 1453254 - RNA, 19 nt, Artificial Sequence
  Description of Artificial Sequence: Synthetic oligonucleotide
  Sense strand starting at position 2821 of SEQ ID NO: 1243945
gugaguacagucugaagga

SEQ ID NO: 1453255 - RNA, 19 nt, Artificial Sequence
  Description of Artificial Sequence: Synthetic oligonucleotide
  Antisense strand to SEQ ID NO: 1453254
uccuucagacuguacucac

SEQ ID NO: 1453256 - RNA, 19 nt, Artificial Sequence
  Description of Artificial Sequence: Synthetic oligonucleotide
  Sense strand starting at position 2907 of SEQ ID NO: 1243945
ggcggugagugaugcaaua

SEQ ID NO: 1453257 - RNA, 19 nt, Artificial Sequence
  Description of Artificial Sequence: Synthetic oligonucleotide
  Antisense strand to SEQ ID NO: 1453256
uauugcaucacucaccgcc

SEQ ID NO: 1453258 - RNA, 19 nt, Artificial Sequence
  Description of Artificial Sequence: Synthetic oligonucleotide
  Sense strand starting at position 2909 of SEQ ID NO: 1243945
cggugagugaugcaauaag

SEQ ID NO: 1453259 - RNA, 19 nt, Artificial Sequence
  Description of Artificial Sequence: Synthetic oligonucleotide
  Antisense strand to SEQ ID NO: 1453258
cuuauugcaucacucaccg

SEQ ID NO: 1453260 - RNA, 19 nt, Artificial Sequence
  Description of Artificial Sequence: Synthetic oligonucleotide
  Sense strand starting at position 2977 of SEQ ID NO: 1243945
acggucagaucacuaaaca

SEQ ID NO: 1453261 - RNA, 19 nt, Artificial Sequence
  Description of Artificial Sequence: Synthetic oligonucleotide
  Antisense strand to SEQ ID NO: 1453260
uguuuagugaucugaccgu

SEQ ID NO: 1453262 - RNA, 19 nt, Artificial Sequence
  Description of Artificial Sequence: Synthetic oligonucleotide
  Sense strand starting at position 3023 of SEQ ID NO: 1243945
ccggcuuuccgggaccaga

SEQ ID NO: 1453263 - RNA, 19 nt, Artificial Sequence
  Description of Artificial Sequence: Synthetic oligonucleotide
  Antisense strand to SEQ ID NO: 1453262
ucuggucccggaaagccgg

SEQ ID NO: 1453264 - RNA, 19 nt, Artificial Sequence
  Description of Artificial Sequence: Synthetic oligonucleotide
  Sense strand starting at position 3069 of SEQ ID NO: 1243945
acagguguguucccggaaa

SEQ ID NO: 1453265 - RNA, 19 nt, Artificial Sequence
  Description of Artificial Sequence: Synthetic oligonucleotide
  Antisense strand to SEQ ID NO: 1453264
uuuccgggaacacaccugu

SEQ ID NO: 1453266 - RNA, 19 nt, Artificial Sequence
  Description of Artificial Sequence: Synthetic oligonucleotide
  Sense strand starting at position 3071 of SEQ ID NO: 1243945
agguguguucccggaaagc

SEQ ID NO: 1453267 - RNA, 19 nt, Artificial Sequence
  Description of Artificial Sequence: Synthetic oligonucleotide
  Antisense strand to SEQ ID NO: 1453266
gcuuuccgggaacacaccu

SEQ ID NO: 1453268 - RNA, 19 nt, Artificial Sequence
  Description of Artificial Sequence: Synthetic oligonucleotide
  Sense strand starting at position 3119 of SEQ ID NO: 1243945
ucugguuuccacugaugug

SEQ ID NO: 1453269 - RNA, 19 nt, Artificial Sequence
  Description of Artificial Sequence: Synthetic oligonucleotide
  Antisense strand to SEQ ID NO: 1453268
cacaucaguggaaaccaga

SEQ ID NO: 1453270 - RNA, 19 nt, Artificial Sequence
  Description of Artificial Sequence: Synthetic oligonucleotide
  Sense strand starting at position 3120 of SEQ ID NO: 1243945
cugguuuccacugaugugu

SEQ ID NO: 1453271 - RNA, 19 nt, Artificial Sequence
  Description of Artificial Sequence: Synthetic oligonucleotide
  Antisense strand to SEQ ID NO: 1453270
acacaucaguggaaaccag

SEQ ID NO: 1453272 - RNA, 19 nt, Artificial Sequence
  Description of Artificial Sequence: Synthetic oligonucleotide
  Sense strand starting at position 3122 of SEQ ID NO: 1243945
gguuuccacugauguguaa

SEQ ID NO: 1453273 - RNA, 19 nt, Artificial Sequence
  Description of Artificial Sequence: Synthetic oligonucleotide
  Antisense strand to SEQ ID NO: 1453272
uuacacaucaguggaaacc

SEQ ID NO: 1453274 - RNA, 19 nt, Artificial Sequence
  Description of Artificial Sequence: Synthetic oligonucleotide
  Sense strand starting at position 3126 of SEQ ID NO: 1243945
uccacugauguguaagaca

SEQ ID NO: 1453275 - RNA, 19 nt, Artificial Sequence
  Description of Artificial Sequence: Synthetic oligonucleotide
  Antisense strand to SEQ ID NO: 1453274
ugucuuacacaucagugga

SEQ ID NO: 1453276 - RNA, 19 nt, Artificial Sequence
  Description of Artificial Sequence: Synthetic oligonucleotide
  Sense strand starting at position 3129 of SEQ ID NO: 1243945
acugauguguaagacacuu

SEQ ID NO: 1453277 - RNA, 19 nt, Artificial Sequence
  Description of Artificial Sequence: Synthetic oligonucleotide
  Antisense strand to SEQ ID NO: 1453276
aagugucuuacacaucagu

SEQ ID NO: 1453278 - RNA, 19 nt, Artificial Sequence
  Description of Artificial Sequence: Synthetic oligonucleotide
  Sense strand starting at position 3137 of SEQ ID NO: 1243945
guaagacacuuagcuucuu

SEQ ID NO: 1453279 - RNA, 19 nt, Artificial Sequence
  Description of Artificial Sequence: Synthetic oligonucleotide
  Antisense strand to SEQ ID NO: 1453278
aagaagcuaagugucuuac

SEQ ID NO: 1453280 - RNA, 19 nt, Artificial Sequence
  Description of Artificial Sequence: Synthetic oligonucleotide
  Sense strand starting at position 3283 of SEQ ID NO: 1243945
acaguucuggcaggcuauu

SEQ ID NO: 1453281 - RNA, 19 nt, Artificial Sequence
  Description of Artificial Sequence: Synthetic oligonucleotide
  Antisense strand to SEQ ID NO: 1453280
aauagccugccagaacugu

SEQ ID NO: 1453282 - RNA, 19 nt, Artificial Sequence
  Description of Artificial Sequence: Synthetic oligonucleotide
  Sense strand starting at position 3322 of SEQ ID NO: 1243945
uuccucaucuaugaaguga

SEQ ID NO: 1453283 - RNA, 19 nt, Artificial Sequence
  Description of Artificial Sequence: Synthetic oligonucleotide
  Antisense strand to SEQ ID NO: 1453282
ucacuucauagaugaggaa

SEQ ID NO: 1453284 - RNA, 19 nt, Artificial Sequence
  Description of Artificial Sequence: Synthetic oligonucleotide
  Sense strand starting at position 3421 of SEQ ID NO: 1243945
cucccuuccuuuggaaaga

SEQ ID NO: 1453285 - RNA, 19 nt, Artificial Sequence
  Description of Artificial Sequence: Synthetic oligonucleotide
  Antisense strand to SEQ ID NO: 1453284
ucuuuccaaaggaagggag

SEQ ID NO: 1453286 - RNA, 19 nt, Artificial Sequence
  Description of Artificial Sequence: Synthetic oligonucleotide
  Sense strand starting at position 3437 of SEQ ID NO: 1243945
agacaagacucauggugag

SEQ ID NO: 1453287 - RNA, 19 nt, Artificial Sequence
  Description of Artificial Sequence: Synthetic oligonucleotide
  Antisense strand to SEQ ID NO: 1453286
cucaccaugagucuugucu

SEQ ID NO: 1453288 - RNA, 19 nt, Artificial Sequence
  Description of Artificial Sequence: Synthetic oligonucleotide
  Sense strand starting at position 3440 of SEQ ID NO: 1243945
caagacucauggugagaag

SEQ ID NO: 1453289 - RNA, 19 nt, Artificial Sequence
  Description of Artificial Sequence: Synthetic oligonucleotide
  Antisense strand to SEQ ID NO: 1453288
cuucucaccaugagucuug

SEQ ID NO: 1453290 - RNA, 19 nt, Artificial Sequence
  Description of Artificial Sequence: Synthetic oligonucleotide
  Sense strand starting at position 3443 of SEQ ID NO: 1243945
gacucauggugagaaguga

SEQ ID NO: 1453291 - RNA, 19 nt, Artificial Sequence
  Description of Artificial Sequence: Synthetic oligonucleotide
  Antisense strand to SEQ ID NO: 1453290
ucacuucucaccaugaguc

SEQ ID NO: 1453292 - RNA, 19 nt, Artificial Sequence
  Description of Artificial Sequence: Synthetic oligonucleotide
  Sense strand starting at position 3478 of SEQ ID NO: 1243945
uguggugaguucugaacug

SEQ ID NO: 1453293 - RNA, 19 nt, Artificial Sequence
  Description of Artificial Sequence: Synthetic oligonucleotide
  Antisense strand to SEQ ID NO: 1453292
caguucagaacucaccaca

SEQ ID NO: 1453294 - RNA, 19 nt, Artificial Sequence
  Description of Artificial Sequence: Synthetic oligonucleotide
  Sense strand starting at position 3577 of SEQ ID NO: 1243945
gcugucaucucauugauuc

SEQ ID NO: 1453295 - RNA, 19 nt, Artificial Sequence
  Description of Artificial Sequence: Synthetic oligonucleotide
  Antisense strand to SEQ ID NO: 1453294
gaaucaaugagaugacagc

SEQ ID NO: 1453296 - RNA, 19 nt, Artificial Sequence
  Description of Artificial Sequence: Synthetic oligonucleotide
  Sense strand starting at position 3671 of SEQ ID NO: 1243945
ggauguguccagggugacu

SEQ ID NO: 1453297 - RNA, 19 nt, Artificial Sequence
  Description of Artificial Sequence: Synthetic oligonucleotide
  Antisense strand to SEQ ID NO: 1453296
agucacccuggacacaucc

SEQ ID NO: 1453298 - RNA, 19 nt, Artificial Sequence
  Description of Artificial Sequence: Synthetic oligonucleotide
  Sense strand starting at position 3726 of SEQ ID NO: 1243945
uccugacuguucgaugcuu

SEQ ID NO: 1453299 - RNA, 19 nt, Artificial Sequence
  Description of Artificial Sequence: Synthetic oligonucleotide
  Antisense strand to SEQ ID NO: 1453298
aagcaucgaacagucagga

SEQ ID NO: 1453300 - RNA, 19 nt, Artificial Sequence
  Description of Artificial Sequence: Synthetic oligonucleotide
  Sense strand starting at position 3844 of SEQ ID NO: 1243945
uccugaggcuucuuggaca

SEQ ID NO: 1453301 - RNA, 19 nt, Artificial Sequence
  Description of Artificial Sequence: Synthetic oligonucleotide
  Antisense strand to SEQ ID NO: 1453300
uguccaagaagccucagga

SEQ ID NO: 1453302 - RNA, 19 nt, Artificial Sequence
  Description of Artificial Sequence: Synthetic oligonucleotide
  Sense strand starting at position 3946 of SEQ ID NO: 1243945
ggguuacagugggaaugaa

SEQ ID NO: 1453303 - RNA, 19 nt, Artificial Sequence
  Description of Artificial Sequence: Synthetic oligonucleotide
  Antisense strand to SEQ ID NO: 1453302
uucauucccacuguaaccc

SEQ ID NO: 1453304 - RNA, 19 nt, Artificial Sequence
  Description of Artificial Sequence: Synthetic oligonucleotide
  Sense strand starting at position 213 of SEQ ID NO: 1243946
gaccuugucccuuagagac

SEQ ID NO: 1453305 - RNA, 19 nt, Artificial Sequence
  Description of Artificial Sequence: Synthetic oligonucleotide
  Antisense strand to SEQ ID NO: 1453304
gucucuaagggacaagguc

SEQ ID NO: 1453306 - RNA, 19 nt, Artificial Sequence
  Description of Artificial Sequence: Synthetic oligonucleotide
  Sense strand starting at position 269 of SEQ ID NO: 1243946
auuacaacuccuggaguaa

SEQ ID NO: 1453307 - RNA, 19 nt, Artificial Sequence
  Description of Artificial Sequence: Synthetic oligonucleotide
  Antisense strand to SEQ ID NO: 1453306
uuacuccaggaguuguaau

SEQ ID NO: 1453308 - RNA, 19 nt, Artificial Sequence
  Description of Artificial Sequence: Synthetic oligonucleotide
  Sense strand starting at position 294 of SEQ ID NO: 1243946
aaccguagcccuuagcaaa

SEQ ID NO: 1453309 - RNA, 19 nt, Artificial Sequence
  Description of Artificial Sequence: Synthetic oligonucleotide
  Antisense strand to SEQ ID NO: 1453308
uuugcuaagggcuacgguu

SEQ ID NO: 1453310 - RNA, 19 nt, Artificial Sequence
  Description of Artificial Sequence: Synthetic oligonucleotide
  Sense strand starting at position 910 of SEQ ID NO: 1243946
cccagacugguguggaauu

SEQ ID NO: 1453311 - RNA, 19 nt, Artificial Sequence
  Description of Artificial Sequence: Synthetic oligonucleotide
  Antisense strand to SEQ ID NO: 1453310
aauuccacaccagucuggg

SEQ ID NO: 1453312 - RNA, 19 nt, Artificial Sequence
  Description of Artificial Sequence: Synthetic oligonucleotide
  Sense strand starting at position 921 of SEQ ID NO: 1243946
guggaauuccugggcucac

SEQ ID NO: 1453313 - RNA, 19 nt, Artificial Sequence
  Description of Artificial Sequence: Synthetic oligonucleotide
  Antisense strand to SEQ ID NO: 1453312
gugagcccaggaauuccac

SEQ ID NO: 1453314 - RNA, 19 nt, Artificial Sequence
  Description of Artificial Sequence: Synthetic oligonucleotide
  Sense strand starting at position 922 of SEQ ID NO: 1243946
uggaauuccugggcucaca

SEQ ID NO: 1453315 - RNA, 19 nt, Artificial Sequence
  Description of Artificial Sequence: Synthetic oligonucleotide
  Antisense strand to SEQ ID NO: 1453314
ugugagcccaggaauucca

SEQ ID NO: 1453316 - RNA, 19 nt, Artificial Sequence
  Description of Artificial Sequence: Synthetic oligonucleotide
  Sense strand starting at position 1093 of SEQ ID NO: 1243946
auguauugagacugugcua

SEQ ID NO: 1453317 - RNA, 19 nt, Artificial Sequence
  Description of Artificial Sequence: Synthetic oligonucleotide
  Antisense strand to SEQ ID NO: 1453316
uagcacagucucaauacau

SEQ ID NO: 1453318 - RNA, 19 nt, Artificial Sequence
  Description of Artificial Sequence: Synthetic oligonucleotide
  Sense strand starting at position 1227 of SEQ ID NO: 1243946
gagaucagauuugaacguu

SEQ ID NO: 1453319 - RNA, 19 nt, Artificial Sequence
  Description of Artificial Sequence: Synthetic oligonucleotide
  Antisense strand to SEQ ID NO: 1453318
aacguucaaaucugaucuc

SEQ ID NO: 1453320 - RNA, 19 nt, Artificial Sequence
  Description of Artificial Sequence: Synthetic oligonucleotide
  Sense strand starting at position 1239 of SEQ ID NO: 1243946
gaacguuaccacugcuaug

SEQ ID NO: 1453321 - RNA, 19 nt, Artificial Sequence
  Description of Artificial Sequence: Synthetic oligonucleotide
  Antisense strand to SEQ ID NO: 1453320
cauagcagugguaacguuc

SEQ ID NO: 1453322 - RNA, 19 nt, Artificial Sequence
  Description of Artificial Sequence: Synthetic oligonucleotide
  Sense strand starting at position 1286 of SEQ ID NO: 1243946
ggacaaucagccuaggcuu

SEQ ID NO: 1453323 - RNA, 19 nt, Artificial Sequence
  Description of Artificial Sequence: Synthetic oligonucleotide
  Antisense strand to SEQ ID NO: 1453322
aagccuaggcugauugucc

SEQ ID NO: 1453324 - RNA, 19 nt, Artificial Sequence
  Description of Artificial Sequence: Synthetic oligonucleotide
  Sense strand starting at position 1418 of SEQ ID NO: 1243946
uuaucacguggcuaugaua

SEQ ID NO: 1453325 - RNA, 19 nt, Artificial Sequence
  Description of Artificial Sequence: Synthetic oligonucleotide
  Antisense strand to SEQ ID NO: 1453324
uaucauagccacgugauaa

SEQ ID NO: 1453326 - RNA, 19 nt, Artificial Sequence
  Description of Artificial Sequence: Synthetic oligonucleotide
  Sense strand starting at position 1425 of SEQ ID NO: 1243946
guggcuaugauauguuuac

SEQ ID NO: 1453327 - RNA, 19 nt, Artificial Sequence
  Description of Artificial Sequence: Synthetic oligonucleotide
  Antisense strand to SEQ ID NO: 1453326
guaaacauaucauagccac

SEQ ID NO: 1453328 - RNA, 19 nt, Artificial Sequence
  Description of Artificial Sequence: Synthetic oligonucleotide
  Sense strand starting at position 1426 of SEQ ID NO: 1243946
uggcuaugauauguuuaca

SEQ ID NO: 1453329 - RNA, 19 nt, Artificial Sequence
  Description of Artificial Sequence: Synthetic oligonucleotide
  Antisense strand to SEQ ID NO: 1453328
uguaaacauaucauagcca

SEQ ID NO: 1453330 - RNA, 19 nt, Artificial Sequence
  Description of Artificial Sequence: Synthetic oligonucleotide
  Sense strand starting at position 1462 of SEQ ID NO: 1243946
gacugagaucucugauucu

SEQ ID NO: 1453331 - RNA, 19 nt, Artificial Sequence
  Description of Artificial Sequence: Synthetic oligonucleotide
  Antisense strand to SEQ ID NO: 1453330
agaaucagagaucucaguc

SEQ ID NO: 1453332 - RNA, 19 nt, Artificial Sequence
  Description of Artificial Sequence: Synthetic oligonucleotide
  Sense strand starting at position 1465 of SEQ ID NO: 1243946
ugagaucucugauucuagu

SEQ ID NO: 1453333 - RNA, 19 nt, Artificial Sequence
  Description of Artificial Sequence: Synthetic oligonucleotide
  Antisense strand to SEQ ID NO: 1453332
acuagaaucagagaucuca

SEQ ID NO: 1453334 - RNA, 19 nt, Artificial Sequence
  Description of Artificial Sequence: Synthetic oligonucleotide
  Sense strand starting at position 1550 of SEQ ID NO: 1243946
ugccucuucccugaaagca

SEQ ID NO: 1453335 - RNA, 19 nt, Artificial Sequence
  Description of Artificial Sequence: Synthetic oligonucleotide
  Antisense strand to SEQ ID NO: 1453334
ugcuuucagggaagaggca

SEQ ID NO: 1453336 - RNA, 19 nt, Artificial Sequence
  Description of Artificial Sequence: Synthetic oligonucleotide
  Sense strand starting at position 1668 of SEQ ID NO: 1243946
guaguuuccgauuggagga

SEQ ID NO: 1453337 - RNA, 19 nt, Artificial Sequence
  Description of Artificial Sequence: Synthetic oligonucleotide
  Antisense strand to SEQ ID NO: 1453336
uccuccaaucggaaacuac

SEQ ID NO: 1453338 - RNA, 19 nt, Artificial Sequence
  Description of Artificial Sequence: Synthetic oligonucleotide
  Sense strand starting at position 1669 of SEQ ID NO: 1243946
uaguuuccgauuggaggau

SEQ ID NO: 1453339 - RNA, 19 nt, Artificial Sequence
  Description of Artificial Sequence: Synthetic oligonucleotide
  Antisense strand to SEQ ID NO: 1453338
auccuccaaucggaaacua

SEQ ID NO: 1453340 - RNA, 19 nt, Artificial Sequence
  Description of Artificial Sequence: Synthetic oligonucleotide
  Sense strand starting at position 1784 of SEQ ID NO: 1243946
cgacuaacagcgggaucua

SEQ ID NO: 1453341 - RNA, 19 nt, Artificial Sequence
  Description of Artificial Sequence: Synthetic oligonucleotide
  Antisense strand to SEQ ID NO: 1453340
uagaucccgcuguuagucg

SEQ ID NO: 1453342 - RNA, 19 nt, Artificial Sequence
  Description of Artificial Sequence: Synthetic oligonucleotide
  Sense strand starting at position 1793 of SEQ ID NO: 1243946
gcgggaucuagcggagaaa

SEQ ID NO: 1453343 - RNA, 19 nt, Artificial Sequence
  Description of Artificial Sequence: Synthetic oligonucleotide
  Antisense strand to SEQ ID NO: 1453342
uuucuccgcuagaucccgc

SEQ ID NO: 1453344 - RNA, 19 nt, Artificial Sequence
  Description of Artificial Sequence: Synthetic oligonucleotide
  Sense strand starting at position 2835 of SEQ ID NO: 1243946
cugcguagacccuguagaa

SEQ ID NO: 1453345 - RNA, 19 nt, Artificial Sequence
  Description of Artificial Sequence: Synthetic oligonucleotide
  Antisense strand to SEQ ID NO: 1453344
uucuacagggucuacgcag

SEQ ID NO: 1453346 - RNA, 19 nt, Artificial Sequence
  Description of Artificial Sequence: Synthetic oligonucleotide
  Sense strand starting at position 2883 of SEQ ID NO: 1243946
gagggugcuuuccugggaa

SEQ ID NO: 1453347 - RNA, 19 nt, Artificial Sequence
  Description of Artificial Sequence: Synthetic oligonucleotide
  Antisense strand to SEQ ID NO: 1453346
uucccaggaaagcacccuc

SEQ ID NO: 1453348 - RNA, 19 nt, Artificial Sequence
  Description of Artificial Sequence: Synthetic oligonucleotide
  Sense strand starting at position 2916 of SEQ ID NO: 1243946
gacugugaugucuaacccu

SEQ ID NO: 1453349 - RNA, 19 nt, Artificial Sequence
  Description of Artificial Sequence: Synthetic oligonucleotide
  Antisense strand to SEQ ID NO: 1453348
aggguuagacaucacaguc

SEQ ID NO: 1453350 - RNA, 19 nt, Artificial Sequence
  Description of Artificial Sequence: Synthetic oligonucleotide
  Sense strand starting at position 2974 of SEQ ID NO: 1243946
ggucuuucuccugaucacu

SEQ ID NO: 1453351 - RNA, 19 nt, Artificial Sequence
  Description of Artificial Sequence: Synthetic oligonucleotide
  Antisense strand to SEQ ID NO: 1453350
agugaucaggagaaagacc

SEQ ID NO: 1453352 - RNA, 19 nt, Artificial Sequence
  Description of Artificial Sequence: Synthetic oligonucleotide
  Sense strand starting at position 3035 of SEQ ID NO: 1243946
acggcuuugaccuguggaa

SEQ ID NO: 1453353 - RNA, 19 nt, Artificial Sequence
  Description of Artificial Sequence: Synthetic oligonucleotide
  Antisense strand to SEQ ID NO: 1453352
uuccacaggucaaagccgu

SEQ ID NO: 1453354 - RNA, 19 nt, Artificial Sequence
  Description of Artificial Sequence: Synthetic oligonucleotide
  Sense strand starting at position 3084 of SEQ ID NO: 1243946
cagucugucccguggaaca

SEQ ID NO: 1453355 - RNA, 19 nt, Artificial Sequence
  Description of Artificial Sequence: Synthetic oligonucleotide
  Antisense strand to SEQ ID NO: 1453354
uguuccacgggacagacug

SEQ ID NO: 1453356 - RNA, 19 nt, Artificial Sequence
  Description of Artificial Sequence: Synthetic oligonucleotide
  Sense strand starting at position 3086 of SEQ ID NO: 1243946
gucugucccguggaacaau

SEQ ID NO: 1453357 - RNA, 19 nt, Artificial Sequence
  Description of Artificial Sequence: Synthetic oligonucleotide
  Antisense strand to SEQ ID NO: 1453356
auuguuccacgggacagac

SEQ ID NO: 1453358 - RNA, 19 nt, Artificial Sequence
  Description of Artificial Sequence: Synthetic oligonucleotide
  Sense strand starting at position 3098 of SEQ ID NO: 1243946
gaacaauggucuuccaggu

SEQ ID NO: 1453359 - RNA, 19 nt, Artificial Sequence
  Description of Artificial Sequence: Synthetic oligonucleotide
  Antisense strand to SEQ ID NO: 1453358
accuggaagaccauuguuc

SEQ ID NO: 1453360 - RNA, 19 nt, Artificial Sequence
  Description of Artificial Sequence: Synthetic oligonucleotide
  Sense strand starting at position 3102 of SEQ ID NO: 1243946
aauggucuuccaggucuga

SEQ ID NO: 1453361 - RNA, 19 nt, Artificial Sequence
  Description of Artificial Sequence: Synthetic oligonucleotide
  Antisense strand to SEQ ID NO: 1453360
ucagaccuggaagaccauu

SEQ ID NO: 1453362 - RNA, 19 nt, Artificial Sequence
  Description of Artificial Sequence: Synthetic oligonucleotide
  Sense strand starting at position 3222 of SEQ ID NO: 1243946
ggcccucccugcuuggaaa

SEQ ID NO: 1453363 - RNA, 19 nt, Artificial Sequence
  Description of Artificial Sequence: Synthetic oligonucleotide
  Antisense strand to SEQ ID NO: 1453362
uuuccaagcagggagggcc

SEQ ID NO: 1453364 - RNA, 19 nt, Artificial Sequence
  Description of Artificial Sequence: Synthetic oligonucleotide
  Sense strand starting at position 3520 of SEQ ID NO: 1243946
gggugcaagaucugaauuc

SEQ ID NO: 1453365 - RNA, 19 nt, Artificial Sequence
  Description of Artificial Sequence: Synthetic oligonucleotide
  Antisense strand to SEQ ID NO: 1453364
gaauucagaucuugcaccc

SEQ ID NO: 1453366 - RNA, 19 nt, Artificial Sequence
  Description of Artificial Sequence: Synthetic oligonucleotide
  Sense strand starting at position 3725 of SEQ ID NO: 1243946
gucccaucccucuaguaac

SEQ ID NO: 1453367 - RNA, 19 nt, Artificial Sequence
  Description of Artificial Sequence: Synthetic oligonucleotide
  Antisense strand to SEQ ID NO: 1453366
guuacuagagggaugggac

SEQ ID NO: 1453368 - RNA, 19 nt, Artificial Sequence
  Description of Artificial Sequence: Synthetic oligonucleotide
  Sense strand starting at position 3796 of SEQ ID NO: 1243946
ccggaugaugccuaggaga

SEQ ID NO: 1453369 - RNA, 19 nt, Artificial Sequence
  Description of Artificial Sequence: Synthetic oligonucleotide
  Antisense strand to SEQ ID NO: 1453368
ucuccuaggcaucauccgg

SEQ ID NO: 1453370 - RNA, 19 nt, Artificial Sequence
  Description of Artificial Sequence: Synthetic oligonucleotide
  Sense strand starting at position 3798 of SEQ ID NO: 1243946
ggaugaugccuaggagaac

SEQ ID NO: 1453371 - RNA, 19 nt, Artificial Sequence
  Description of Artificial Sequence: Synthetic oligonucleotide
  Antisense strand to SEQ ID NO: 1453370
guucuccuaggcaucaucc

SEQ ID NO: 1453372 - RNA, 19 nt, Artificial Sequence
  Description of Artificial Sequence: Synthetic oligonucleotide
  Sense strand starting at position 3932 of SEQ ID NO: 1243946
gccugaguuacucagcagu

SEQ ID NO: 1453373 - RNA, 19 nt, Artificial Sequence
  Description of Artificial Sequence: Synthetic oligonucleotide
  Antisense strand to SEQ ID NO: 1453372
acugcugaguaacucaggc

SEQ ID NO: 1453374 - RNA, 19 nt, Artificial Sequence
  Description of Artificial Sequence: Synthetic oligonucleotide
  Sense strand starting at position 3934 of SEQ ID NO: 1243946
cugaguuacucagcagucu

SEQ ID NO: 1453375 - RNA, 19 nt, Artificial Sequence
  Description of Artificial Sequence: Synthetic oligonucleotide
  Antisense strand to SEQ ID NO: 1453374
agacugcugaguaacucag

SEQ ID NO: 1453376 - RNA, 19 nt, Artificial Sequence
  Description of Artificial Sequence: Synthetic oligonucleotide
  Sense strand starting at position 3940 of SEQ ID NO: 1243946
uacucagcagucugaguaa

SEQ ID NO: 1453377 - RNA, 19 nt, Artificial Sequence
  Description of Artificial Sequence: Synthetic oligonucleotide
  Antisense strand to SEQ ID NO: 1453376
uuacucagacugcugagua

SEQ ID NO: 1453378 - RNA, 19 nt, Artificial Sequence
  Description of Artificial Sequence: Synthetic oligonucleotide
  Sense strand starting at position 3943 of SEQ ID NO: 1243946
ucagcagucugaguaauua

SEQ ID NO: 1453379 - RNA, 19 nt, Artificial Sequence
  Description of Artificial Sequence: Synthetic oligonucleotide
  Antisense strand to SEQ ID NO: 1453378
uaauuacucagacugcuga

SEQ ID NO: 1453380 - RNA, 19 nt, Artificial Sequence
  Description of Artificial Sequence: Synthetic oligonucleotide
  Sense strand starting at position 3954 of SEQ ID NO: 1243946
aguaauuacugccugacaa

SEQ ID NO: 1453381 - RNA, 19 nt, Artificial Sequence
  Description of Artificial Sequence: Synthetic oligonucleotide
  Antisense strand to SEQ ID NO: 1453380
uugucaggcaguaauuacu

SEQ ID NO: 1453382 - RNA, 19 nt, Artificial Sequence
  Description of Artificial Sequence: Synthetic oligonucleotide
  Sense strand starting at position 3955 of SEQ ID NO: 1243946
guaauuacugccugacaag

SEQ ID NO: 1453383 - RNA, 19 nt, Artificial Sequence
  Description of Artificial Sequence: Synthetic oligonucleotide
  Antisense strand to SEQ ID NO: 1453382
cuugucaggcaguaauuac

SEQ ID NO: 1453384 - RNA, 19 nt, Artificial Sequence
  Description of Artificial Sequence: Synthetic oligonucleotide
  Sense strand starting at position 32 of SEQ ID NO: 1243947
caguccuguugaccuguaa

SEQ ID NO: 1453385 - RNA, 19 nt, Artificial Sequence
  Description of Artificial Sequence: Synthetic oligonucleotide
  Antisense strand to SEQ ID NO: 1453384
uuacaggucaacaggacug

SEQ ID NO: 1453386 - RNA, 19 nt, Artificial Sequence
  Description of Artificial Sequence: Synthetic oligonucleotide
  Sense strand starting at position 36 of SEQ ID NO: 1243947
ccuguugaccuguaaacag

SEQ ID NO: 1453387 - RNA, 19 nt, Artificial Sequence
  Description of Artificial Sequence: Synthetic oligonucleotide
  Antisense strand to SEQ ID NO: 1453386
cuguuuacaggucaacagg

SEQ ID NO: 1453388 - RNA, 19 nt, Artificial Sequence
  Description of Artificial Sequence: Synthetic oligonucleotide
  Sense strand starting at position 121 of SEQ ID NO: 1243947
agauguuugcgugaccggu

SEQ ID NO: 1453389 - RNA, 19 nt, Artificial Sequence
  Description of Artificial Sequence: Synthetic oligonucleotide
  Antisense strand to SEQ ID NO: 1453388
accggucacgcaaacaucu

SEQ ID NO: 1453390 - RNA, 19 nt, Artificial Sequence
  Description of Artificial Sequence: Synthetic oligonucleotide
  Sense strand starting at position 184 of SEQ ID NO: 1243947
gguggucuucucuaucacu

SEQ ID NO: 1453391 - RNA, 19 nt, Artificial Sequence
  Description of Artificial Sequence: Synthetic oligonucleotide
  Antisense strand to SEQ ID NO: 1453390
agugauagagaagaccacc

SEQ ID NO: 1453392 - RNA, 19 nt, Artificial Sequence
  Description of Artificial Sequence: Synthetic oligonucleotide
  Sense strand starting at position 280 of SEQ ID NO: 1243947
acauauugcuggcugacau

SEQ ID NO: 1453393 - RNA, 19 nt, Artificial Sequence
  Description of Artificial Sequence: Synthetic oligonucleotide
  Antisense strand to SEQ ID NO: 1453392
augucagccagcaauaugu

SEQ ID NO: 1453394 - RNA, 19 nt, Artificial Sequence
  Description of Artificial Sequence: Synthetic oligonucleotide
  Sense strand starting at position 281 of SEQ ID NO: 1243947
cauauugcuggcugacauu

SEQ ID NO: 1453395 - RNA, 19 nt, Artificial Sequence
  Description of Artificial Sequence: Synthetic oligonucleotide
  Antisense strand to SEQ ID NO: 1453394
aaugucagccagcaauaug

SEQ ID NO: 1453396 - RNA, 19 nt, Artificial Sequence
  Description of Artificial Sequence: Synthetic oligonucleotide
  Sense strand starting at position 287 of SEQ ID NO: 1243947
gcuggcugacauuaucuua

SEQ ID NO: 1453397 - RNA, 19 nt, Artificial Sequence
  Description of Artificial Sequence: Synthetic oligonucleotide
  Antisense strand to SEQ ID NO: 1453396
uaagauaaugucagccagc

SEQ ID NO: 1453398 - RNA, 19 nt, Artificial Sequence
  Description of Artificial Sequence: Synthetic oligonucleotide
  Sense strand starting at position 336 of SEQ ID NO: 1243947
acuagaagaucagauccaa

SEQ ID NO: 1453399 - RNA, 19 nt, Artificial Sequence
  Description of Artificial Sequence: Synthetic oligonucleotide
  Antisense strand to SEQ ID NO: 1453398
uuggaucugaucuucuagu

SEQ ID NO: 1453400 - RNA, 19 nt, Artificial Sequence
  Description of Artificial Sequence: Synthetic oligonucleotide
  Sense strand starting at position 348 of SEQ ID NO: 1243947
gauccaagggcugggauau

SEQ ID NO: 1453401 - RNA, 19 nt, Artificial Sequence
  Description of Artificial Sequence: Synthetic oligonucleotide
  Antisense strand to SEQ ID NO: 1453400
auaucccagcccuuggauc

SEQ ID NO: 1453402 - RNA, 19 nt, Artificial Sequence
  Description of Artificial Sequence: Synthetic oligonucleotide
  Sense strand starting at position 408 of SEQ ID NO: 1243947
aguaaaggcucaggaaaga

SEQ ID NO: 1453403 - RNA, 19 nt, Artificial Sequence
  Description of Artificial Sequence: Synthetic oligonucleotide
  Antisense strand to SEQ ID NO: 1453402
ucuuuccugagccuuuacu

SEQ ID NO: 1453404 - RNA, 19 nt, Artificial Sequence
  Description of Artificial Sequence: Synthetic oligonucleotide
  Sense strand starting at position 811 of SEQ ID NO: 1243947
ggaccagcuaucuaguguu

SEQ ID NO: 1453405 - RNA, 19 nt, Artificial Sequence
  Description of Artificial Sequence: Synthetic oligonucleotide
  Antisense strand to SEQ ID NO: 1453404
aacacuagauagcuggucc

SEQ ID NO: 1453406 - RNA, 19 nt, Artificial Sequence
  Description of Artificial Sequence: Synthetic oligonucleotide
  Sense strand starting at position 910 of SEQ ID NO: 1243947
ccuucugaucuagauuguu

SEQ ID NO: 1453407 - RNA, 19 nt, Artificial Sequence
  Description of Artificial Sequence: Synthetic oligonucleotide
  Antisense strand to SEQ ID NO: 1453406
aacaaucuagaucagaagg

SEQ ID NO: 1453408 - RNA, 19 nt, Artificial Sequence
  Description of Artificial Sequence: Synthetic oligonucleotide
  Sense strand starting at position 918 of SEQ ID NO: 1243947
ucuagauuguucucacugu

SEQ ID NO: 1453409 - RNA, 19 nt, Artificial Sequence
  Description of Artificial Sequence: Synthetic oligonucleotide
  Antisense strand to SEQ ID NO: 1453408
acagugagaacaaucuaga

SEQ ID NO: 1453410 - RNA, 19 nt, Artificial Sequence
  Description of Artificial Sequence: Synthetic oligonucleotide
  Sense strand starting at position 1023 of SEQ ID NO: 1243947
ccacuuuguccugguguca

SEQ ID NO: 1453411 - RNA, 19 nt, Artificial Sequence
  Description of Artificial Sequence: Synthetic oligonucleotide
  Antisense strand to SEQ ID NO: 1453410
ugacaccaggacaaagugg

SEQ ID NO: 1453412 - RNA, 19 nt, Artificial Sequence
  Description of Artificial Sequence: Synthetic oligonucleotide
  Sense strand starting at position 1133 of SEQ ID NO: 1243947
ggguguuuacuuuaaauac

SEQ ID NO: 1453413 - RNA, 19 nt, Artificial Sequence
  Description of Artificial Sequence: Synthetic oligonucleotide
  Antisense strand to SEQ ID NO: 1453412
guauuuaaaguaaacaccc

SEQ ID NO: 1453414 - RNA, 19 nt, Artificial Sequence
  Description of Artificial Sequence: Synthetic oligonucleotide
  Sense strand starting at position 1143 of SEQ ID NO: 1243947
uuuaaauacugagugcuca

SEQ ID NO: 1453415 - RNA, 19 nt, Artificial Sequence
  Description of Artificial Sequence: Synthetic oligonucleotide
  Antisense strand to SEQ ID NO: 1453414
ugagcacucaguauuuaaa

SEQ ID NO: 1453416 - RNA, 19 nt, Artificial Sequence
  Description of Artificial Sequence: Synthetic oligonucleotide
  Sense strand starting at position 1166 of SEQ ID NO: 1243947
gugcccagugcuuuguaaa

SEQ ID NO: 1453417 - RNA, 19 nt, Artificial Sequence
  Description of Artificial Sequence: Synthetic oligonucleotide
  Antisense strand to SEQ ID NO: 1453416
uuuacaaagcacugggcac

SEQ ID NO: 1453418 - RNA, 19 nt, Artificial Sequence
  Description of Artificial Sequence: Synthetic oligonucleotide
  Sense strand starting at position 1167 of SEQ ID NO: 1243947
ugcccagugcuuuguaaag

SEQ ID NO: 1453419 - RNA, 19 nt, Artificial Sequence
  Description of Artificial Sequence: Synthetic oligonucleotide
  Antisense strand to SEQ ID NO: 1453418
cuuuacaaagcacugggca

SEQ ID NO: 1453420 - RNA, 19 nt, Artificial Sequence
  Description of Artificial Sequence: Synthetic oligonucleotide
  Sense strand starting at position 1176 of SEQ ID NO: 1243947
cuuuguaaaggccaucuaa

SEQ ID NO: 1453421 - RNA, 19 nt, Artificial Sequence
  Description of Artificial Sequence: Synthetic oligonucleotide
  Antisense strand to SEQ ID NO: 1453420
uuagauggccuuuacaaag

SEQ ID NO: 1453422 - RNA, 19 nt, Artificial Sequence
  Description of Artificial Sequence: Synthetic oligonucleotide
  Sense strand starting at position 1196 of SEQ ID NO: 1243947
uuaacucagcuguguacua

SEQ ID NO: 1453423 - RNA, 19 nt, Artificial Sequence
  Description of Artificial Sequence: Synthetic oligonucleotide
  Antisense strand to SEQ ID NO: 1453422
uaguacacagcugaguuaa

SEQ ID NO: 1453424 - RNA, 19 nt, Artificial Sequence
  Description of Artificial Sequence: Synthetic oligonucleotide
  Sense strand starting at position 1201 of SEQ ID NO: 1243947
ucagcuguguacuaagaug

SEQ ID NO: 1453425 - RNA, 19 nt, Artificial Sequence
  Description of Artificial Sequence: Synthetic oligonucleotide
  Antisense strand to SEQ ID NO: 1453424
caucuuaguacacagcuga

SEQ ID NO: 1453426 - RNA, 19 nt, Artificial Sequence
  Description of Artificial Sequence: Synthetic oligonucleotide
  Sense strand starting at position 1273 of SEQ ID NO: 1243947
ugaagugacuuuccaaugu

SEQ ID NO: 1453427 - RNA, 19 nt, Artificial Sequence
  Description of Artificial Sequence: Synthetic oligonucleotide
  Antisense strand to SEQ ID NO: 1453426
acauuggaaagucacuuca

SEQ ID NO: 1453428 - RNA, 19 nt, Artificial Sequence
  Description of Artificial Sequence: Synthetic oligonucleotide
  Sense strand starting at position 1390 of SEQ ID NO: 1243947
gaggcuguuccugagaggu

SEQ ID NO: 1453429 - RNA, 19 nt, Artificial Sequence
  Description of Artificial Sequence: Synthetic oligonucleotide
  Antisense strand to SEQ ID NO: 1453428
accucucaggaacagccuc

SEQ ID NO: 1453430 - RNA, 19 nt, Artificial Sequence
  Description of Artificial Sequence: Synthetic oligonucleotide
  Sense strand starting at position 1392 of SEQ ID NO: 1243947
ggcuguuccugagaggucu

SEQ ID NO: 1453431 - RNA, 19 nt, Artificial Sequence
  Description of Artificial Sequence: Synthetic oligonucleotide
  Antisense strand to SEQ ID NO: 1453430
agaccucucaggaacagcc

SEQ ID NO: 1453432 - RNA, 19 nt, Artificial Sequence
  Description of Artificial Sequence: Synthetic oligonucleotide
  Sense strand starting at position 1506 of SEQ ID NO: 1243947
ucagaugcuugcucuguga

SEQ ID NO: 1453433 - RNA, 19 nt, Artificial Sequence
  Description of Artificial Sequence: Synthetic oligonucleotide
  Antisense strand to SEQ ID NO: 1453432
ucacagagcaagcaucuga

SEQ ID NO: 1453434 - RNA, 19 nt, Artificial Sequence
  Description of Artificial Sequence: Synthetic oligonucleotide
  Sense strand starting at position 1576 of SEQ ID NO: 1243947
ggguacguuugcagucaga

SEQ ID NO: 1453435 - RNA, 19 nt, Artificial Sequence
  Description of Artificial Sequence: Synthetic oligonucleotide
  Antisense strand to SEQ ID NO: 1453434
ucugacugcaaacguaccc

SEQ ID NO: 1453436 - RNA, 19 nt, Artificial Sequence
  Description of Artificial Sequence: Synthetic oligonucleotide
  Sense strand starting at position 1695 of SEQ ID NO: 1243947
gcauuacugcuggaguugu

SEQ ID NO: 1453437 - RNA, 19 nt, Artificial Sequence
  Description of Artificial Sequence: Synthetic oligonucleotide
  Antisense strand to SEQ ID NO: 1453436
acaacuccagcaguaaugc

SEQ ID NO: 1453438 - RNA, 19 nt, Artificial Sequence
  Description of Artificial Sequence: Synthetic oligonucleotide
  Sense strand starting at position 2126 of SEQ ID NO: 1243947
gagggaaucugcccguguu

SEQ ID NO: 1453439 - RNA, 19 nt, Artificial Sequence
  Description of Artificial Sequence: Synthetic oligonucleotide
  Antisense strand to SEQ ID NO: 1453438
aacacgggcagauucccuc

SEQ ID NO: 1453440 - RNA, 19 nt, Artificial Sequence
  Description of Artificial Sequence: Synthetic oligonucleotide
  Sense strand starting at position 2129 of SEQ ID NO: 1243947
ggaaucugcccguguugaa

SEQ ID NO: 1453441 - RNA, 19 nt, Artificial Sequence
  Description of Artificial Sequence: Synthetic oligonucleotide
  Antisense strand to SEQ ID NO: 1453440
uucaacacgggcagauucc

SEQ ID NO: 1453442 - RNA, 19 nt, Artificial Sequence
  Description of Artificial Sequence: Synthetic oligonucleotide
  Sense strand starting at position 2239 of SEQ ID NO: 1243947
aauggagguguccaaucuu

SEQ ID NO: 1453443 - RNA, 19 nt, Artificial Sequence
  Description of Artificial Sequence: Synthetic oligonucleotide
  Antisense strand to SEQ ID NO: 1453442
aagauuggacaccuccauu

SEQ ID NO: 1453444 - RNA, 19 nt, Artificial Sequence
  Description of Artificial Sequence: Synthetic oligonucleotide
  Sense strand starting at position 2983 of SEQ ID NO: 1243947
cgcugugcccugccuaaau

SEQ ID NO: 1453445 - RNA, 19 nt, Artificial Sequence
  Description of Artificial Sequence: Synthetic oligonucleotide
  Antisense strand to SEQ ID NO: 1453444
auuuaggcagggcacagcg

SEQ ID NO: 1453446 - RNA, 19 nt, Artificial Sequence
  Description of Artificial Sequence: Synthetic oligonucleotide
  Sense strand starting at position 2985 of SEQ ID NO: 1243947
cugugcccugccuaaauuu

SEQ ID NO: 1453447 - RNA, 19 nt, Artificial Sequence
  Description of Artificial Sequence: Synthetic oligonucleotide
  Antisense strand to SEQ ID NO: 1453446
aaauuuaggcagggcacag

SEQ ID NO: 1453448 - RNA, 19 nt, Artificial Sequence
  Description of Artificial Sequence: Synthetic oligonucleotide
  Sense strand starting at position 3318 of SEQ ID NO: 1243947
ccuccucagucugggagaa

SEQ ID NO: 1453449 - RNA, 19 nt, Artificial Sequence
  Description of Artificial Sequence: Synthetic oligonucleotide
  Antisense strand to SEQ ID NO: 1453448
uucucccagacugaggagg

SEQ ID NO: 1453450 - RNA, 19 nt, Artificial Sequence
  Description of Artificial Sequence: Synthetic oligonucleotide
  Sense strand starting at position 3319 of SEQ ID NO: 1243947
cuccucagucugggagaaa

SEQ ID NO: 1453451 - RNA, 19 nt, Artificial Sequence
  Description of Artificial Sequence: Synthetic oligonucleotide
  Antisense strand to SEQ ID NO: 1453450
uuucucccagacugaggag

SEQ ID NO: 1453452 - RNA, 19 nt, Artificial Sequence
  Description of Artificial Sequence: Synthetic oligonucleotide
  Sense strand starting at position 3555 of SEQ ID NO: 1243947
uacgaagcaguguaaagua

SEQ ID NO: 1453453 - RNA, 19 nt, Artificial Sequence
  Description of Artificial Sequence: Synthetic oligonucleotide
  Antisense strand to SEQ ID NO: 1453452
uacuuuacacugcuucgua

SEQ ID NO: 1453454 - RNA, 19 nt, Artificial Sequence
  Description of Artificial Sequence: Synthetic oligonucleotide
  Sense strand starting at position 3611 of SEQ ID NO: 1243947
cccucuauugccuaggcua

SEQ ID NO: 1453455 - RNA, 19 nt, Artificial Sequence
  Description of Artificial Sequence: Synthetic oligonucleotide
  Antisense strand to SEQ ID NO: 1453454
uagccuaggcaauagaggg

SEQ ID NO: 1453456 - RNA, 19 nt, Artificial Sequence
  Description of Artificial Sequence: Synthetic oligonucleotide
  Sense strand starting at position 3704 of SEQ ID NO: 1243947
cugaguaauugugacuaua

SEQ ID NO: 1453457 - RNA, 19 nt, Artificial Sequence
  Description of Artificial Sequence: Synthetic oligonucleotide
  Antisense strand to SEQ ID NO: 1453456
uauagucacaauuacucag

SEQ ID NO: 1453458 - RNA, 19 nt, Artificial Sequence
  Description of Artificial Sequence: Synthetic oligonucleotide
  Sense strand starting at position 3706 of SEQ ID NO: 1243947
gaguaauugugacuauagg

SEQ ID NO: 1453459 - RNA, 19 nt, Artificial Sequence
  Description of Artificial Sequence: Synthetic oligonucleotide
  Antisense strand to SEQ ID NO: 1453458
ccuauagucacaauuacuc

SEQ ID NO: 1453460 - RNA, 19 nt, Artificial Sequence
  Description of Artificial Sequence: Synthetic oligonucleotide
  Sense strand starting at position 3889 of SEQ ID NO: 1243947
agcaucucuuauguagaau

SEQ ID NO: 1453461 - RNA, 19 nt, Artificial Sequence
  Description of Artificial Sequence: Synthetic oligonucleotide
  Antisense strand to SEQ ID NO: 1453460
auucuacauaagagaugcu

SEQ ID NO: 1453462 - RNA, 19 nt, Artificial Sequence
  Description of Artificial Sequence: Synthetic oligonucleotide
  Sense strand starting at position 3929 of SEQ ID NO: 1243947
ugaguuuaggcaugaggaa

SEQ ID NO: 1453463 - RNA, 19 nt, Artificial Sequence
  Description of Artificial Sequence: Synthetic oligonucleotide
  Antisense strand to SEQ ID NO: 1453462
uuccucaugccuaaacuca

SEQ ID NO: 1453464 - RNA, 19 nt, Artificial Sequence
  Description of Artificial Sequence: Synthetic oligonucleotide
  Sense strand starting at position 341 of SEQ ID NO: 1243948
ggucaauggcgucacagua

SEQ ID NO: 1453465 - RNA, 19 nt, Artificial Sequence
  Description of Artificial Sequence: Synthetic oligonucleotide
  Antisense strand to SEQ ID NO: 1453464
uacugugacgccauugacc

SEQ ID NO: 1453466 - RNA, 19 nt, Artificial Sequence
  Description of Artificial Sequence: Synthetic oligonucleotide
  Sense strand starting at position 355 of SEQ ID NO: 1243948
caguaauccugagccagga

SEQ ID NO: 1453467 - RNA, 19 nt, Artificial Sequence
  Description of Artificial Sequence: Synthetic oligonucleotide
  Antisense strand to SEQ ID NO: 1453466
uccuggcucaggauuacug

SEQ ID NO: 1453468 - RNA, 19 nt, Artificial Sequence
  Description of Artificial Sequence: Synthetic oligonucleotide
  Sense strand starting at position 386 of SEQ ID NO: 1243948
caaacaccuccgggucauu

SEQ ID NO: 1453469 - RNA, 19 nt, Artificial Sequence
  Description of Artificial Sequence: Synthetic oligonucleotide
  Antisense strand to SEQ ID NO: 1453468
aaugacccggagguguuug

SEQ ID NO: 1453470 - RNA, 19 nt, Artificial Sequence
  Description of Artificial Sequence: Synthetic oligonucleotide
  Sense strand starting at position 395 of SEQ ID NO: 1243948
ccgggucauuggcacagaa

SEQ ID NO: 1453471 - RNA, 19 nt, Artificial Sequence
  Description of Artificial Sequence: Synthetic oligonucleotide
  Antisense strand to SEQ ID NO: 1453470
uucugugccaaugacccgg

SEQ ID NO: 1453472 - RNA, 19 nt, Artificial Sequence
  Description of Artificial Sequence: Synthetic oligonucleotide
  Sense strand starting at position 397 of SEQ ID NO: 1243948
gggucauuggcacagaacu

SEQ ID NO: 1453473 - RNA, 19 nt, Artificial Sequence
  Description of Artificial Sequence: Synthetic oligonucleotide
  Antisense strand to SEQ ID NO: 1453472
aguucugugccaaugaccc

SEQ ID NO: 1453474 - RNA, 19 nt, Artificial Sequence
  Description of Artificial Sequence: Synthetic oligonucleotide
  Sense strand starting at position 607 of SEQ ID NO: 1243948
ucuucugaacuguggcaga

SEQ ID NO: 1453475 - RNA, 19 nt, Artificial Sequence
  Description of Artificial Sequence: Synthetic oligonucleotide
  Antisense strand to SEQ ID NO: 1453474
ucugccacaguucagaaga

SEQ ID NO: 1453476 - RNA, 19 nt, Artificial Sequence
  Description of Artificial Sequence: Synthetic oligonucleotide
  Sense strand starting at position 751 of SEQ ID NO: 1243948
cugagccacuccuagagaa

SEQ ID NO: 1453477 - RNA, 19 nt, Artificial Sequence
  Description of Artificial Sequence: Synthetic oligonucleotide
  Antisense strand to SEQ ID NO: 1453476
uucucuaggaguggcucag

SEQ ID NO: 1453478 - RNA, 19 nt, Artificial Sequence
  Description of Artificial Sequence: Synthetic oligonucleotide
  Sense strand starting at position 878 of SEQ ID NO: 1243948
cuggaauugagcugucucu

SEQ ID NO: 1453479 - RNA, 19 nt, Artificial Sequence
  Description of Artificial Sequence: Synthetic oligonucleotide
  Antisense strand to SEQ ID NO: 1453478
agagacagcucaauuccag

SEQ ID NO: 1453480 - RNA, 19 nt, Artificial Sequence
  Description of Artificial Sequence: Synthetic oligonucleotide
  Sense strand starting at position 1739 of SEQ ID NO: 1243948
ggcagcguuugcuguguga

SEQ ID NO: 1453481 - RNA, 19 nt, Artificial Sequence
  Description of Artificial Sequence: Synthetic oligonucleotide
  Antisense strand to SEQ ID NO: 1453480
ucacacagcaaacgcugcc

SEQ ID NO: 1453482 - RNA, 19 nt, Artificial Sequence
  Description of Artificial Sequence: Synthetic oligonucleotide
  Sense strand starting at position 1741 of SEQ ID NO: 1243948
cagcguuugcugugugaag

SEQ ID NO: 1453483 - RNA, 19 nt, Artificial Sequence
  Description of Artificial Sequence: Synthetic oligonucleotide
  Antisense strand to SEQ ID NO: 1453482
cuucacacagcaaacgcug

SEQ ID NO: 1453484 - RNA, 19 nt, Artificial Sequence
  Description of Artificial Sequence: Synthetic oligonucleotide
  Sense strand starting at position 1742 of SEQ ID NO: 1243948
agcguuugcugugugaagu

SEQ ID NO: 1453485 - RNA, 19 nt, Artificial Sequence
  Description of Artificial Sequence: Synthetic oligonucleotide
  Antisense strand to SEQ ID NO: 1453484
acuucacacagcaaacgcu

SEQ ID NO: 1453486 - RNA, 19 nt, Artificial Sequence
  Description of Artificial Sequence: Synthetic oligonucleotide
  Sense strand starting at position 1743 of SEQ ID NO: 1243948
gcguuugcugugugaagug

SEQ ID NO: 1453487 - RNA, 19 nt, Artificial Sequence
  Description of Artificial Sequence: Synthetic oligonucleotide
  Antisense strand to SEQ ID NO: 1453486
cacuucacacagcaaacgc

SEQ ID NO: 1453488 - RNA, 19 nt, Artificial Sequence
  Description of Artificial Sequence: Synthetic oligonucleotide
  Sense strand starting at position 2190 of SEQ ID NO: 1243948
aaacgaggcauguggaaau

SEQ ID NO: 1453489 - RNA, 19 nt, Artificial Sequence
  Description of Artificial Sequence: Synthetic oligonucleotide
  Antisense strand to SEQ ID NO: 1453488
auuuccacaugccucguuu

SEQ ID NO: 1453490 - RNA, 19 nt, Artificial Sequence
  Description of Artificial Sequence: Synthetic oligonucleotide
  Sense strand starting at position 2483 of SEQ ID NO: 1243948
ggacccuccuuggguuauu

SEQ ID NO: 1453491 - RNA, 19 nt, Artificial Sequence
  Description of Artificial Sequence: Synthetic oligonucleotide
  Antisense strand to SEQ ID NO: 1453490
aauaacccaaggagggucc

SEQ ID NO: 1453492 - RNA, 19 nt, Artificial Sequence
  Description of Artificial Sequence: Synthetic oligonucleotide
  Sense strand starting at position 2492 of SEQ ID NO: 1243948
uuggguuauuucgagcugu

SEQ ID NO: 1453493 - RNA, 19 nt, Artificial Sequence
  Description of Artificial Sequence: Synthetic oligonucleotide
  Antisense strand to SEQ ID NO: 1453492
acagcucgaaauaacccaa

SEQ ID NO: 1453494 - RNA, 19 nt, Artificial Sequence
  Description of Artificial Sequence: Synthetic oligonucleotide
  Sense strand starting at position 2493 of SEQ ID NO: 1243948
uggguuauuucgagcugug

SEQ ID NO: 1453495 - RNA, 19 nt, Artificial Sequence
  Description of Artificial Sequence: Synthetic oligonucleotide
  Antisense strand to SEQ ID NO: 1453494
cacagcucgaaauaaccca

SEQ ID NO: 1453496 - RNA, 19 nt, Artificial Sequence
  Description of Artificial Sequence: Synthetic oligonucleotide
  Sense strand starting at position 2533 of SEQ ID NO: 1243948
aguggaugugaagguuauu

SEQ ID NO: 1453497 - RNA, 19 nt, Artificial Sequence
  Description of Artificial Sequence: Synthetic oligonucleotide
  Antisense strand to SEQ ID NO: 1453496
aauaaccuucacauccacu

SEQ ID NO: 1453498 - RNA, 19 nt, Artificial Sequence
  Description of Artificial Sequence: Synthetic oligonucleotide
  Sense strand starting at position 2590 of SEQ ID NO: 1243948
gcagcuuugucagagcuuu

SEQ ID NO: 1453499 - RNA, 19 nt, Artificial Sequence
  Description of Artificial Sequence: Synthetic oligonucleotide
  Antisense strand to SEQ ID NO: 1453498
aaagcucugacaaagcugc

SEQ ID NO: 1453500 - RNA, 19 nt, Artificial Sequence
  Description of Artificial Sequence: Synthetic oligonucleotide
  Sense strand starting at position 2598 of SEQ ID NO: 1243948
gucagagcuuuccauaucu

SEQ ID NO: 1453501 - RNA, 19 nt, Artificial Sequence
  Description of Artificial Sequence: Synthetic oligonucleotide
  Antisense strand to SEQ ID NO: 1453500
agauauggaaagcucugac

SEQ ID NO: 1453502 - RNA, 19 nt, Artificial Sequence
  Description of Artificial Sequence: Synthetic oligonucleotide
  Sense strand starting at position 2607 of SEQ ID NO: 1243948
uuccauaucugagagcgaa

SEQ ID NO: 1453503 - RNA, 19 nt, Artificial Sequence
  Description of Artificial Sequence: Synthetic oligonucleotide
  Antisense strand to SEQ ID NO: 1453502
uucgcucucagauauggaa

SEQ ID NO: 1453504 - RNA, 19 nt, Artificial Sequence
  Description of Artificial Sequence: Synthetic oligonucleotide
  Sense strand starting at position 2753 of SEQ ID NO: 1243948
acccucugcucgcugagau

SEQ ID NO: 1453505 - RNA, 19 nt, Artificial Sequence
  Description of Artificial Sequence: Synthetic oligonucleotide
  Antisense strand to SEQ ID NO: 1453504
aucucagcgagcagagggu

SEQ ID NO: 1453506 - RNA, 19 nt, Artificial Sequence
  Description of Artificial Sequence: Synthetic oligonucleotide
  Sense strand starting at position 2763 of SEQ ID NO: 1243948
cgcugagauagauggauau

SEQ ID NO: 1453507 - RNA, 19 nt, Artificial Sequence
  Description of Artificial Sequence: Synthetic oligonucleotide
  Antisense strand to SEQ ID NO: 1453506
auauccaucuaucucagcg

SEQ ID NO: 1453508 - RNA, 19 nt, Artificial Sequence
  Description of Artificial Sequence: Synthetic oligonucleotide
  Sense strand starting at position 2782 of SEQ ID NO: 1243948
cugacugacuccuuugaaa

SEQ ID NO: 1453509 - RNA, 19 nt, Artificial Sequence
  Description of Artificial Sequence: Synthetic oligonucleotide
  Antisense strand to SEQ ID NO: 1453508
uuucaaaggagucagucag

SEQ ID NO: 1453510 - RNA, 19 nt, Artificial Sequence
  Description of Artificial Sequence: Synthetic oligonucleotide
  Sense strand starting at position 3100 of SEQ ID NO: 1243948
ccguuuguguaucaccuau

SEQ ID NO: 1453511 - RNA, 19 nt, Artificial Sequence
  Description of Artificial Sequence: Synthetic oligonucleotide
  Antisense strand to SEQ ID NO: 1453510
auaggugauacacaaacgg

SEQ ID NO: 1453512 - RNA, 19 nt, Artificial Sequence
  Description of Artificial Sequence: Synthetic oligonucleotide
  Sense strand starting at position 3155 of SEQ ID NO: 1243948
uuuaaauugucccgccuuu

SEQ ID NO: 1453513 - RNA, 19 nt, Artificial Sequence
  Description of Artificial Sequence: Synthetic oligonucleotide
  Antisense strand to SEQ ID NO: 1453512
aaaggcgggacaauuuaaa

SEQ ID NO: 1453514 - RNA, 19 nt, Artificial Sequence
  Description of Artificial Sequence: Synthetic oligonucleotide
  Sense strand starting at position 3782 of SEQ ID NO: 1243948
acgugaggcuuuguacaag

SEQ ID NO: 1453515 - RNA, 19 nt, Artificial Sequence
  Description of Artificial Sequence: Synthetic oligonucleotide
  Antisense strand to SEQ ID NO: 1453514
cuuguacaaagccucacgu

SEQ ID NO: 1453516 - RNA, 19 nt, Artificial Sequence
  Description of Artificial Sequence: Synthetic oligonucleotide
  Sense strand starting at position 3785 of SEQ ID NO: 1243948
ugaggcuuuguacaagcaa

SEQ ID NO: 1453517 - RNA, 19 nt, Artificial Sequence
  Description of Artificial Sequence: Synthetic oligonucleotide
  Antisense strand to SEQ ID NO: 1453516
uugcuuguacaaagccuca

SEQ ID NO: 1453518 - RNA, 19 nt, Artificial Sequence
  Description of Artificial Sequence: Synthetic oligonucleotide
  Sense strand starting at position 3925 of SEQ ID NO: 1243948
ucgaaccaguaauuguaaa

SEQ ID NO: 1453519 - RNA, 19 nt, Artificial Sequence
  Description of Artificial Sequence: Synthetic oligonucleotide
  Antisense strand to SEQ ID NO: 1453518
uuuacaauuacugguucga

SEQ ID NO: 1453520 - RNA, 19 nt, Artificial Sequence
  Description of Artificial Sequence: Synthetic oligonucleotide
  Sense strand starting at position 138 of SEQ ID NO: 1243949
ggacuuacauacuuggcua

SEQ ID NO: 1453521 - RNA, 19 nt, Artificial Sequence
  Description of Artificial Sequence: Synthetic oligonucleotide
  Antisense strand to SEQ ID NO: 1453520
uagccaaguauguaagucc

SEQ ID NO: 1453522 - RNA, 19 nt, Artificial Sequence
  Description of Artificial Sequence: Synthetic oligonucleotide
  Sense strand starting at position 221 of SEQ ID NO: 1243949
gcagucaaccgauaugaaa

SEQ ID NO: 1453523 - RNA, 19 nt, Artificial Sequence
  Description of Artificial Sequence: Synthetic oligonucleotide
  Antisense strand to SEQ ID NO: 1453522
uuucauaucgguugacugc

SEQ ID NO: 1453524 - RNA, 19 nt, Artificial Sequence
  Description of Artificial Sequence: Synthetic oligonucleotide
  Sense strand starting at position 300 of SEQ ID NO: 1243949
gaaggaaacugucuccagu

SEQ ID NO: 1453525 - RNA, 19 nt, Artificial Sequence
  Description of Artificial Sequence: Synthetic oligonucleotide
  Antisense strand to SEQ ID NO: 1453524
acuggagacaguuuccuuc

SEQ ID NO: 1453526 - RNA, 19 nt, Artificial Sequence
  Description of Artificial Sequence: Synthetic oligonucleotide
  Sense strand starting at position 302 of SEQ ID NO: 1243949
aggaaacugucuccaguuu

SEQ ID NO: 1453527 - RNA, 19 nt, Artificial Sequence
  Description of Artificial Sequence: Synthetic oligonucleotide
  Antisense strand to SEQ ID NO: 1453526
aaacuggagacaguuuccu

SEQ ID NO: 1453528 - RNA, 19 nt, Artificial Sequence
  Description of Artificial Sequence: Synthetic oligonucleotide
  Sense strand starting at position 508 of SEQ ID NO: 1243949
ugaagugucccugauguga

SEQ ID NO: 1453529 - RNA, 19 nt, Artificial Sequence
  Description of Artificial Sequence: Synthetic oligonucleotide
  Antisense strand to SEQ ID NO: 1453528
ucacaucagggacacuuca

SEQ ID NO: 1453530 - RNA, 19 nt, Artificial Sequence
  Description of Artificial Sequence: Synthetic oligonucleotide
  Sense strand starting at position 580 of SEQ ID NO: 1243949
cccugcauuucucaaggga

SEQ ID NO: 1453531 - RNA, 19 nt, Artificial Sequence
  Description of Artificial Sequence: Synthetic oligonucleotide
  Antisense strand to SEQ ID NO: 1453530
ucccuugagaaaugcaggg

SEQ ID NO: 1453532 - RNA, 19 nt, Artificial Sequence
  Description of Artificial Sequence: Synthetic oligonucleotide
  Sense strand starting at position 610 of SEQ ID NO: 1243949
gggccuuuaugaguccaca

SEQ ID NO: 1453533 - RNA, 19 nt, Artificial Sequence
  Description of Artificial Sequence: Synthetic oligonucleotide
  Antisense strand to SEQ ID NO: 1453532
uguggacucauaaaggccc

SEQ ID NO: 1453534 - RNA, 19 nt, Artificial Sequence
  Description of Artificial Sequence: Synthetic oligonucleotide
  Sense strand starting at position 681 of SEQ ID NO: 1243949
cgcacaacucugcaaagaa

SEQ ID NO: 1453535 - RNA, 19 nt, Artificial Sequence
  Description of Artificial Sequence: Synthetic oligonucleotide
  Antisense strand to SEQ ID NO: 1453534
uucuuugcagaguugugcg

SEQ ID NO: 1453536 - RNA, 19 nt, Artificial Sequence
  Description of Artificial Sequence: Synthetic oligonucleotide
  Sense strand starting at position 839 of SEQ ID NO: 1243949
acucuuaagugaucuguag

SEQ ID NO: 1453537 - RNA, 19 nt, Artificial Sequence
  Description of Artificial Sequence: Synthetic oligonucleotide
  Antisense strand to SEQ ID NO: 1453536
cuacagaucacuuaagagu

SEQ ID NO: 1453538 - RNA, 19 nt, Artificial Sequence
  Description of Artificial Sequence: Synthetic oligonucleotide
  Sense strand starting at position 845 of SEQ ID NO: 1243949
aagugaucuguagaauguc

SEQ ID NO: 1453539 - RNA, 19 nt, Artificial Sequence
  Description of Artificial Sequence: Synthetic oligonucleotide
  Antisense strand to SEQ ID NO: 1453538
gacauucuacagaucacuu

SEQ ID NO: 1453540 - RNA, 19 nt, Artificial Sequence
  Description of Artificial Sequence: Synthetic oligonucleotide
  Sense strand starting at position 935 of SEQ ID NO: 1243949
guuaaaucucuuggucccu

SEQ ID NO: 1453541 - RNA, 19 nt, Artificial Sequence
  Description of Artificial Sequence: Synthetic oligonucleotide
  Antisense strand to SEQ ID NO: 1453540
agggaccaagagauuuaac

SEQ ID NO: 1453542 - RNA, 19 nt, Artificial Sequence
  Description of Artificial Sequence: Synthetic oligonucleotide
  Sense strand starting at position 1098 of SEQ ID NO: 1243949
ggagguccugcuggauaga

SEQ ID NO: 1453543 - RNA, 19 nt, Artificial Sequence
  Description of Artificial Sequence: Synthetic oligonucleotide
  Antisense strand to SEQ ID NO: 1453542
ucuauccagcaggaccucc

SEQ ID NO: 1453544 - RNA, 19 nt, Artificial Sequence
  Description of Artificial Sequence: Synthetic oligonucleotide
  Sense strand starting at position 1099 of SEQ ID NO: 1243949
gagguccugcuggauagaa

SEQ ID NO: 1453545 - RNA, 19 nt, Artificial Sequence
  Description of Artificial Sequence: Synthetic oligonucleotide
  Antisense strand to SEQ ID NO: 1453544
uucuauccagcaggaccuc

SEQ ID NO: 1453546 - RNA, 19 nt, Artificial Sequence
  Description of Artificial Sequence: Synthetic oligonucleotide
  Sense strand starting at position 1336 of SEQ ID NO: 1243949
aaggguacuuaggagaaau

SEQ ID NO: 1453547 - RNA, 19 nt, Artificial Sequence
  Description of Artificial Sequence: Synthetic oligonucleotide
  Antisense strand to SEQ ID NO: 1453546
auuucuccuaaguacccuu

SEQ ID NO: 1453548 - RNA, 19 nt, Artificial Sequence
  Description of Artificial Sequence: Synthetic oligonucleotide
  Sense strand starting at position 2301 of SEQ ID NO: 1243949
gggugcuuucgggauugga

SEQ ID NO: 1453549 - RNA, 19 nt, Artificial Sequence
  Description of Artificial Sequence: Synthetic oligonucleotide
  Antisense strand to SEQ ID NO: 1453548
uccaaucccgaaagcaccc

SEQ ID NO: 1453550 - RNA, 19 nt, Artificial Sequence
  Description of Artificial Sequence: Synthetic oligonucleotide
  Sense strand starting at position 2343 of SEQ ID NO: 1243949
auccgauacaggugugaag

SEQ ID NO: 1453551 - RNA, 19 nt, Artificial Sequence
  Description of Artificial Sequence: Synthetic oligonucleotide
  Antisense strand to SEQ ID NO: 1453550
cuucacaccuguaucggau

SEQ ID NO: 1453552 - RNA, 19 nt, Artificial Sequence
  Description of Artificial Sequence: Synthetic oligonucleotide
  Sense strand starting at position 2660 of SEQ ID NO: 1243949
cgggcauuugagggcucau

SEQ ID NO: 1453553 - RNA, 19 nt, Artificial Sequence
  Description of Artificial Sequence: Synthetic oligonucleotide
  Antisense strand to SEQ ID NO: 1453552
augagcccucaaaugcccg

SEQ ID NO: 1453554 - RNA, 19 nt, Artificial Sequence
  Description of Artificial Sequence: Synthetic oligonucleotide
  Sense strand starting at position 2673 of SEQ ID NO: 1243949
gcucauuugcugugugacu

SEQ ID NO: 1453555 - RNA, 19 nt, Artificial Sequence
  Description of Artificial Sequence: Synthetic oligonucleotide
  Antisense strand to SEQ ID NO: 1453554
agucacacagcaaaugagc

SEQ ID NO: 1453556 - RNA, 19 nt, Artificial Sequence
  Description of Artificial Sequence: Synthetic oligonucleotide
  Sense strand starting at position 2843 of SEQ ID NO: 1243949
agucaaggcaccuaagagu

SEQ ID NO: 1453557 - RNA, 19 nt, Artificial Sequence
  Description of Artificial Sequence: Synthetic oligonucleotide
  Antisense strand to SEQ ID NO: 1453556
acucuuaggugccuugacu

SEQ ID NO: 1453558 - RNA, 19 nt, Artificial Sequence
  Description of Artificial Sequence: Synthetic oligonucleotide
  Sense strand starting at position 2912 of SEQ ID NO: 1243949
gcaaaugguuggccucaga

SEQ ID NO: 1453559 - RNA, 19 nt, Artificial Sequence
  Description of Artificial Sequence: Synthetic oligonucleotide
  Antisense strand to SEQ ID NO: 1453558
ucugaggccaaccauuugc

SEQ ID NO: 1453560 - RNA, 19 nt, Artificial Sequence
  Description of Artificial Sequence: Synthetic oligonucleotide
  Sense strand starting at position 2915 of SEQ ID NO: 1243949
aaugguuggccucagaauu

SEQ ID NO: 1453561 - RNA, 19 nt, Artificial Sequence
  Description of Artificial Sequence: Synthetic oligonucleotide
  Antisense strand to SEQ ID NO: 1453560
aauucugaggccaaccauu

SEQ ID NO: 1453562 - RNA, 19 nt, Artificial Sequence
  Description of Artificial Sequence: Synthetic oligonucleotide
  Sense strand starting at position 2925 of SEQ ID NO: 1243949
cucagaauugcugagcagu

SEQ ID NO: 1453563 - RNA, 19 nt, Artificial Sequence
  Description of Artificial Sequence: Synthetic oligonucleotide
  Antisense strand to SEQ ID NO: 1453562
acugcucagcaauucugag

SEQ ID NO: 1453564 - RNA, 19 nt, Artificial Sequence
  Description of Artificial Sequence: Synthetic oligonucleotide
  Sense strand starting at position 2927 of SEQ ID NO: 1243949
cagaauugcugagcaguca

SEQ ID NO: 1453565 - RNA, 19 nt, Artificial Sequence
  Description of Artificial Sequence: Synthetic oligonucleotide
  Antisense strand to SEQ ID NO: 1453564
ugacugcucagcaauucug

SEQ ID NO: 1453566 - RNA, 19 nt, Artificial Sequence
  Description of Artificial Sequence: Synthetic oligonucleotide
  Sense strand starting at position 2928 of SEQ ID NO: 1243949
agaauugcugagcagucaa

SEQ ID NO: 1453567 - RNA, 19 nt, Artificial Sequence
  Description of Artificial Sequence: Synthetic oligonucleotide
  Antisense strand to SEQ ID NO: 1453566
uugacugcucagcaauucu

SEQ ID NO: 1453568 - RNA, 19 nt, Artificial Sequence
  Description of Artificial Sequence: Synthetic oligonucleotide
  Sense strand starting at position 3016 of SEQ ID NO: 1243949
ucccgauguccucaaccaa

SEQ ID NO: 1453569 - RNA, 19 nt, Artificial Sequence
  Description of Artificial Sequence: Synthetic oligonucleotide
  Antisense strand to SEQ ID NO: 1453568
uugguugaggacaucggga

SEQ ID NO: 1453570 - RNA, 19 nt, Artificial Sequence
  Description of Artificial Sequence: Synthetic oligonucleotide
  Sense strand starting at position 3099 of SEQ ID NO: 1243949
gugcgugcuggacuaucua

SEQ ID NO: 1453571 - RNA, 19 nt, Artificial Sequence
  Description of Artificial Sequence: Synthetic oligonucleotide
  Antisense strand to SEQ ID NO: 1453570
uagauaguccagcacgcac

SEQ ID NO: 1453572 - RNA, 19 nt, Artificial Sequence
  Description of Artificial Sequence: Synthetic oligonucleotide
  Sense strand starting at position 3285 of SEQ ID NO: 1243949
ucaaaucgugccugggaaa

SEQ ID NO: 1453573 - RNA, 19 nt, Artificial Sequence
  Description of Artificial Sequence: Synthetic oligonucleotide
  Antisense strand to SEQ ID NO: 1453572
uuucccaggcacgauuuga

SEQ ID NO: 1453574 - RNA, 19 nt, Artificial Sequence
  Description of Artificial Sequence: Synthetic oligonucleotide
  Sense strand starting at position 3340 of SEQ ID NO: 1243949
cuuagugacuuacuuguuu

SEQ ID NO: 1453575 - RNA, 19 nt, Artificial Sequence
  Description of Artificial Sequence: Synthetic oligonucleotide
  Antisense strand to SEQ ID NO: 1453574
aaacaaguaagucacuaag

SEQ ID NO: 1453576 - RNA, 19 nt, Artificial Sequence
  Description of Artificial Sequence: Synthetic oligonucleotide
  Sense strand starting at position 3344 of SEQ ID NO: 1243949
gugacuuacuuguuuacau

SEQ ID NO: 1453577 - RNA, 19 nt, Artificial Sequence
  Description of Artificial Sequence: Synthetic oligonucleotide
  Antisense strand to SEQ ID NO: 1453576
auguaaacaaguaagucac

SEQ ID NO: 1453578 - RNA, 19 nt, Artificial Sequence
  Description of Artificial Sequence: Synthetic oligonucleotide
  Sense strand starting at position 3345 of SEQ ID NO: 1243949
ugacuuacuuguuuacaug

SEQ ID NO: 1453579 - RNA, 19 nt, Artificial Sequence
  Description of Artificial Sequence: Synthetic oligonucleotide
  Antisense strand to SEQ ID NO: 1453578
cauguaaacaaguaaguca

SEQ ID NO: 1453580 - RNA, 19 nt, Artificial Sequence
  Description of Artificial Sequence: Synthetic oligonucleotide
  Sense strand starting at position 3356 of SEQ ID NO: 1243949
uuuacaugccaauacgaaa

SEQ ID NO: 1453581 - RNA, 19 nt, Artificial Sequence
  Description of Artificial Sequence: Synthetic oligonucleotide
  Antisense strand to SEQ ID NO: 1453580
uuucguauuggcauguaaa

SEQ ID NO: 1453582 - RNA, 19 nt, Artificial Sequence
  Description of Artificial Sequence: Synthetic oligonucleotide
  Sense strand starting at position 3388 of SEQ ID NO: 1243949
aacagaaaggauugugugu

SEQ ID NO: 1453583 - RNA, 19 nt, Artificial Sequence
  Description of Artificial Sequence: Synthetic oligonucleotide
  Antisense strand to SEQ ID NO: 1453582
acacacaauccuuucuguu

SEQ ID NO: 1453584 - RNA, 19 nt, Artificial Sequence
  Description of Artificial Sequence: Synthetic oligonucleotide
  Sense strand starting at position 3636 of SEQ ID NO: 1243949
ugcgaugugcgugucaaga

SEQ ID NO: 1453585 - RNA, 19 nt, Artificial Sequence
  Description of Artificial Sequence: Synthetic oligonucleotide
  Antisense strand to SEQ ID NO: 1453584
ucuugacacgcacaucgca

SEQ ID NO: 1453586 - RNA, 19 nt, Artificial Sequence
  Description of Artificial Sequence: Synthetic oligonucleotide
  Sense strand starting at position 3637 of SEQ ID NO: 1243949
gcgaugugcgugucaagau

SEQ ID NO: 1453587 - RNA, 19 nt, Artificial Sequence
  Description of Artificial Sequence: Synthetic oligonucleotide
  Antisense strand to SEQ ID NO: 1453586
aucuugacacgcacaucgc

SEQ ID NO: 1453588 - RNA, 19 nt, Artificial Sequence
  Description of Artificial Sequence: Synthetic oligonucleotide
  Sense strand starting at position 3678 of SEQ ID NO: 1243949
gaaagaagugcuggaguca

SEQ ID NO: 1453589 - RNA, 19 nt, Artificial Sequence
  Description of Artificial Sequence: Synthetic oligonucleotide
  Antisense strand to SEQ ID NO: 1453588
ugacuccagcacuucuuuc

SEQ ID NO: 1453590 - RNA, 19 nt, Artificial Sequence
  Description of Artificial Sequence: Synthetic oligonucleotide
  Sense strand starting at position 3740 of SEQ ID NO: 1243949
gguuuaugccuuuacagaa

SEQ ID NO: 1453591 - RNA, 19 nt, Artificial Sequence
  Description of Artificial Sequence: Synthetic oligonucleotide
  Antisense strand to SEQ ID NO: 1453590
uucuguaaaggcauaaacc

SEQ ID NO: 1453592 - RNA, 19 nt, Artificial Sequence
  Description of Artificial Sequence: Synthetic oligonucleotide
  Sense strand starting at position 3747 of SEQ ID NO: 1243949
gccuuuacagaauguggaa

SEQ ID NO: 1453593 - RNA, 19 nt, Artificial Sequence
  Description of Artificial Sequence: Synthetic oligonucleotide
  Antisense strand to SEQ ID NO: 1453592
uuccacauucuguaaaggc

SEQ ID NO: 1453594 - RNA, 19 nt, Artificial Sequence
  Description of Artificial Sequence: Synthetic oligonucleotide
  Sense strand starting at position 3833 of SEQ ID NO: 1243949
ccaguagaacuuuguguga

SEQ ID NO: 1453595 - RNA, 19 nt, Artificial Sequence
  Description of Artificial Sequence: Synthetic oligonucleotide
  Antisense strand to SEQ ID NO: 1453594
ucacacaaaguucuacugg

SEQ ID NO: 1453596 - RNA, 19 nt, Artificial Sequence
  Description of Artificial Sequence: Synthetic oligonucleotide
  Sense strand starting at position 3908 of SEQ ID NO: 1243949
gcuacugaacacgaaauau

SEQ ID NO: 1453597 - RNA, 19 nt, Artificial Sequence
  Description of Artificial Sequence: Synthetic oligonucleotide
  Antisense strand to SEQ ID NO: 1453596
auauuucguguucaguagc

SEQ ID NO: 1453598 - RNA, 19 nt, Artificial Sequence
  Description of Artificial Sequence: Synthetic oligonucleotide
  Sense strand starting at position 3918 of SEQ ID NO: 1243949
acgaaauauggcuagugua

SEQ ID NO: 1453599 - RNA, 19 nt, Artificial Sequence
  Description of Artificial Sequence: Synthetic oligonucleotide
  Antisense strand to SEQ ID NO: 1453598
uacacuagccauauuucgu

SEQ ID NO: 1453600 - RNA, 19 nt, Artificial Sequence
  Description of Artificial Sequence: Synthetic oligonucleotide
  Sense strand starting at position 263 of SEQ ID NO: 1243950
gugccaggccucuaauacu

SEQ ID NO: 1453601 - RNA, 19 nt, Artificial Sequence
  Description of Artificial Sequence: Synthetic oligonucleotide
  Antisense strand to SEQ ID NO: 1453600
aguauuagaggccuggcac

SEQ ID NO: 1453602 - RNA, 19 nt, Artificial Sequence
  Description of Artificial Sequence: Synthetic oligonucleotide
  Sense strand starting at position 348 of SEQ ID NO: 1243950
uguacagugccugacauaa

SEQ ID NO: 1453603 - RNA, 19 nt, Artificial Sequence
  Description of Artificial Sequence: Synthetic oligonucleotide
  Antisense strand to SEQ ID NO: 1453602
uuaugucaggcacuguaca

SEQ ID NO: 1453604 - RNA, 19 nt, Artificial Sequence
  Description of Artificial Sequence: Synthetic oligonucleotide
  Sense strand starting at position 371 of SEQ ID NO: 1243950
ggugcucagacuggugaau

SEQ ID NO: 1453605 - RNA, 19 nt, Artificial Sequence
  Description of Artificial Sequence: Synthetic oligonucleotide
  Antisense strand to SEQ ID NO: 1453604
auucaccagucugagcacc

SEQ ID NO: 1453606 - RNA, 19 nt, Artificial Sequence
  Description of Artificial Sequence: Synthetic oligonucleotide
  Sense strand starting at position 443 of SEQ ID NO: 1243950
cuucuaguuccaugaugac

SEQ ID NO: 1453607 - RNA, 19 nt, Artificial Sequence
  Description of Artificial Sequence: Synthetic oligonucleotide
  Antisense strand to SEQ ID NO: 1453606
gucaucauggaacuagaag

SEQ ID NO: 1453608 - RNA, 19 nt, Artificial Sequence
  Description of Artificial Sequence: Synthetic oligonucleotide
  Sense strand starting at position 536 of SEQ ID NO: 1243950
agacauugacccuguccuu

SEQ ID NO: 1453609 - RNA, 19 nt, Artificial Sequence
  Description of Artificial Sequence: Synthetic oligonucleotide
  Antisense strand to SEQ ID NO: 1453608
aaggacagggucaaugucu

SEQ ID NO: 1453610 - RNA, 19 nt, Artificial Sequence
  Description of Artificial Sequence: Synthetic oligonucleotide
  Sense strand starting at position 647 of SEQ ID NO: 1243950
agccaugaagcuuaggauu

SEQ ID NO: 1453611 - RNA, 19 nt, Artificial Sequence
  Description of Artificial Sequence: Synthetic oligonucleotide
  Antisense strand to SEQ ID NO: 1453610
aauccuaagcuucauggcu

SEQ ID NO: 1453612 - RNA, 19 nt, Artificial Sequence
  Description of Artificial Sequence: Synthetic oligonucleotide
  Sense strand starting at position 669 of SEQ ID NO: 1243950
guaacuggguccucagagu

SEQ ID NO: 1453613 - RNA, 19 nt, Artificial Sequence
  Description of Artificial Sequence: Synthetic oligonucleotide
  Antisense strand to SEQ ID NO: 1453612
acucugaggacccaguuac

SEQ ID NO: 1453614 - RNA, 19 nt, Artificial Sequence
  Description of Artificial Sequence: Synthetic oligonucleotide
  Sense strand starting at position 772 of SEQ ID NO: 1243950
gaauguuaacacugguucu

SEQ ID NO: 1453615 - RNA, 19 nt, Artificial Sequence
  Description of Artificial Sequence: Synthetic oligonucleotide
  Antisense strand to SEQ ID NO: 1453614
agaaccaguguuaacauuc

SEQ ID NO: 1453616 - RNA, 19 nt, Artificial Sequence
  Description of Artificial Sequence: Synthetic oligonucleotide
  Sense strand starting at position 787 of SEQ ID NO: 1243950
uucuuuccugcugauuaga

SEQ ID NO: 1453617 - RNA, 19 nt, Artificial Sequence
  Description of Artificial Sequence: Synthetic oligonucleotide
  Antisense strand to SEQ ID NO: 1453616
ucuaaucagcaggaaagaa

SEQ ID NO: 1453618 - RNA, 19 nt, Artificial Sequence
  Description of Artificial Sequence: Synthetic oligonucleotide
  Sense strand starting at position 789 of SEQ ID NO: 1243950
cuuuccugcugauuagaca

SEQ ID NO: 1453619 - RNA, 19 nt, Artificial Sequence
  Description of Artificial Sequence: Synthetic oligonucleotide
  Antisense strand to SEQ ID NO: 1453618
ugucuaaucagcaggaaag

SEQ ID NO: 1453620 - RNA, 19 nt, Artificial Sequence
  Description of Artificial Sequence: Synthetic oligonucleotide
  Sense strand starting at position 790 of SEQ ID NO: 1243950
uuuccugcugauuagacau

SEQ ID NO: 1453621 - RNA, 19 nt, Artificial Sequence
  Description of Artificial Sequence: Synthetic oligonucleotide
  Antisense strand to SEQ ID NO: 1453620
augucuaaucagcaggaaa

SEQ ID NO: 1453622 - RNA, 19 nt, Artificial Sequence
  Description of Artificial Sequence: Synthetic oligonucleotide
  Sense strand starting at position 1195 of SEQ ID NO: 1243950
ggguuaucacuggaccguu

SEQ ID NO: 1453623 - RNA, 19 nt, Artificial Sequence
  Description of Artificial Sequence: Synthetic oligonucleotide
  Antisense strand to SEQ ID NO: 1453622
aacgguccagugauaaccc

SEQ ID NO: 1453624 - RNA, 19 nt, Artificial Sequence
  Description of Artificial Sequence: Synthetic oligonucleotide
  Sense strand starting at position 1211 of SEQ ID NO: 1243950
guucuagaaucuccuguaa

SEQ ID NO: 1453625 - RNA, 19 nt, Artificial Sequence
  Description of Artificial Sequence: Synthetic oligonucleotide
  Antisense strand to SEQ ID NO: 1453624
uuacaggagauucuagaac

SEQ ID NO: 1453626 - RNA, 19 nt, Artificial Sequence
  Description of Artificial Sequence: Synthetic oligonucleotide
  Sense strand starting at position 1397 of SEQ ID NO: 1243950
cggugaccucacugcagaa

SEQ ID NO: 1453627 - RNA, 19 nt, Artificial Sequence
  Description of Artificial Sequence: Synthetic oligonucleotide
  Antisense strand to SEQ ID NO: 1453626
uucugcagugaggucaccg

SEQ ID NO: 1453628 - RNA, 19 nt, Artificial Sequence
  Description of Artificial Sequence: Synthetic oligonucleotide
  Sense strand starting at position 1460 of SEQ ID NO: 1243950
gaccgagggucaccuguua

SEQ ID NO: 1453629 - RNA, 19 nt, Artificial Sequence
  Description of Artificial Sequence: Synthetic oligonucleotide
  Antisense strand to SEQ ID NO: 1453628
uaacaggugacccucgguc

SEQ ID NO: 1453630 - RNA, 19 nt, Artificial Sequence
  Description of Artificial Sequence: Synthetic oligonucleotide
  Sense strand starting at position 1473 of SEQ ID NO: 1243950
cuguuaagugaacauggua

SEQ ID NO: 1453631 - RNA, 19 nt, Artificial Sequence
  Description of Artificial Sequence: Synthetic oligonucleotide
  Antisense strand to SEQ ID NO: 1453630
uaccauguucacuuaacag

SEQ ID NO: 1453632 - RNA, 19 nt, Artificial Sequence
  Description of Artificial Sequence: Synthetic oligonucleotide
  Sense strand starting at position 2240 of SEQ ID NO: 1243950
acauuucguggcggaggua

SEQ ID NO: 1453633 - RNA, 19 nt, Artificial Sequence
  Description of Artificial Sequence: Synthetic oligonucleotide
  Antisense strand to SEQ ID NO: 1453632
uaccuccgccacgaaaugu

SEQ ID NO: 1453634 - RNA, 19 nt, Artificial Sequence
  Description of Artificial Sequence: Synthetic oligonucleotide
  Sense strand starting at position 2381 of SEQ ID NO: 1243950
gcuggaucagaguggacau

SEQ ID NO: 1453635 - RNA, 19 nt, Artificial Sequence
  Description of Artificial Sequence: Synthetic oligonucleotide
  Antisense strand to SEQ ID NO: 1453634
auguccacucugauccagc

SEQ ID NO: 1453636 - RNA, 19 nt, Artificial Sequence
  Description of Artificial Sequence: Synthetic oligonucleotide
  Sense strand starting at position 2382 of SEQ ID NO: 1243950
cuggaucagaguggacauu

SEQ ID NO: 1453637 - RNA, 19 nt, Artificial Sequence
  Description of Artificial Sequence: Synthetic oligonucleotide
  Antisense strand to SEQ ID NO: 1453636
aauguccacucugauccag

SEQ ID NO: 1453638 - RNA, 19 nt, Artificial Sequence
  Description of Artificial Sequence: Synthetic oligonucleotide
  Sense strand starting at position 2479 of SEQ ID NO: 1243950
agagucaucgucgugcuua

SEQ ID NO: 1453639 - RNA, 19 nt, Artificial Sequence
  Description of Artificial Sequence: Synthetic oligonucleotide
  Antisense strand to SEQ ID NO: 1453638
uaagcacgacgaugacucu

SEQ ID NO: 1453640 - RNA, 19 nt, Artificial Sequence
  Description of Artificial Sequence: Synthetic oligonucleotide
  Sense strand starting at position 2481 of SEQ ID NO: 1243950
agucaucgucgugcuuaaa

SEQ ID NO: 1453641 - RNA, 19 nt, Artificial Sequence
  Description of Artificial Sequence: Synthetic oligonucleotide
  Antisense strand to SEQ ID NO: 1453640
uuuaagcacgacgaugacu

SEQ ID NO: 1453642 - RNA, 19 nt, Artificial Sequence
  Description of Artificial Sequence: Synthetic oligonucleotide
  Sense strand starting at position 2500 of SEQ ID NO: 1243950
agcagucagguuuggaauu

SEQ ID NO: 1453643 - RNA, 19 nt, Artificial Sequence
  Description of Artificial Sequence: Synthetic oligonucleotide
  Antisense strand to SEQ ID NO: 1453642
aauuccaaaccugacugcu

SEQ ID NO: 1453644 - RNA, 19 nt, Artificial Sequence
  Description of Artificial Sequence: Synthetic oligonucleotide
  Sense strand starting at position 2595 of SEQ ID NO: 1243950
gguugcuggaaggguuaaa

SEQ ID NO: 1453645 - RNA, 19 nt, Artificial Sequence
  Description of Artificial Sequence: Synthetic oligonucleotide
  Antisense strand to SEQ ID NO: 1453644
uuuaacccuuccagcaacc

SEQ ID NO: 1453646 - RNA, 19 nt, Artificial Sequence
  Description of Artificial Sequence: Synthetic oligonucleotide
  Sense strand starting at position 2816 of SEQ ID NO: 1243950
aaagauagucucuguacug

SEQ ID NO: 1453647 - RNA, 19 nt, Artificial Sequence
  Description of Artificial Sequence: Synthetic oligonucleotide
  Antisense strand to SEQ ID NO: 1453646
caguacagagacuaucuuu

SEQ ID NO: 1453648 - RNA, 19 nt, Artificial Sequence
  Description of Artificial Sequence: Synthetic oligonucleotide
  Sense strand starting at position 2822 of SEQ ID NO: 1243950
agucucuguacuggaggaa

SEQ ID NO: 1453649 - RNA, 19 nt, Artificial Sequence
  Description of Artificial Sequence: Synthetic oligonucleotide
  Antisense strand to SEQ ID NO: 1453648
uuccuccaguacagagacu

SEQ ID NO: 1453650 - RNA, 19 nt, Artificial Sequence
  Description of Artificial Sequence: Synthetic oligonucleotide
  Sense strand starting at position 2823 of SEQ ID NO: 1243950
gucucuguacuggaggaaa

SEQ ID NO: 1453651 - RNA, 19 nt, Artificial Sequence
  Description of Artificial Sequence: Synthetic oligonucleotide
  Antisense strand to SEQ ID NO: 1453650
uuuccuccaguacagagac

SEQ ID NO: 1453652 - RNA, 19 nt, Artificial Sequence
  Description of Artificial Sequence: Synthetic oligonucleotide
  Sense strand starting at position 2946 of SEQ ID NO: 1243950
ccaacuugguucuugagua

SEQ ID NO: 1453653 - RNA, 19 nt, Artificial Sequence
  Description of Artificial Sequence: Synthetic oligonucleotide
  Antisense strand to SEQ ID NO: 1453652
uacucaagaaccaaguugg

SEQ ID NO: 1453654 - RNA, 19 nt, Artificial Sequence
  Description of Artificial Sequence: Synthetic oligonucleotide
  Sense strand starting at position 3006 of SEQ ID NO: 1243950
aggaauuggauccgauuau

SEQ ID NO: 1453655 - RNA, 19 nt, Artificial Sequence
  Description of Artificial Sequence: Synthetic oligonucleotide
  Antisense strand to SEQ ID NO: 1453654
auaaucggauccaauuccu

SEQ ID NO: 1453656 - RNA, 19 nt, Artificial Sequence
  Description of Artificial Sequence: Synthetic oligonucleotide
  Sense strand starting at position 3010 of SEQ ID NO: 1243950
auuggauccgauuaucauu

SEQ ID NO: 1453657 - RNA, 19 nt, Artificial Sequence
  Description of Artificial Sequence: Synthetic oligonucleotide
  Antisense strand to SEQ ID NO: 1453656
aaugauaaucggauccaau

SEQ ID NO: 1453658 - RNA, 19 nt, Artificial Sequence
  Description of Artificial Sequence: Synthetic oligonucleotide
  Sense strand starting at position 3015 of SEQ ID NO: 1243950
auccgauuaucauuagggu

SEQ ID NO: 1453659 - RNA, 19 nt, Artificial Sequence
  Description of Artificial Sequence: Synthetic oligonucleotide
  Antisense strand to SEQ ID NO: 1453658
acccuaaugauaaucggau

SEQ ID NO: 1453660 - RNA, 19 nt, Artificial Sequence
  Description of Artificial Sequence: Synthetic oligonucleotide
  Sense strand starting at position 3078 of SEQ ID NO: 1243950
gagcuauugcaguggagac

SEQ ID NO: 1453661 - RNA, 19 nt, Artificial Sequence
  Description of Artificial Sequence: Synthetic oligonucleotide
  Antisense strand to SEQ ID NO: 1453660
gucuccacugcaauagcuc

SEQ ID NO: 1453662 - RNA, 19 nt, Artificial Sequence
  Description of Artificial Sequence: Synthetic oligonucleotide
  Sense strand starting at position 3091 of SEQ ID NO: 1243950
ggagacuacuuagcugaua

SEQ ID NO: 1453663 - RNA, 19 nt, Artificial Sequence
  Description of Artificial Sequence: Synthetic oligonucleotide
  Antisense strand to SEQ ID NO: 1453662
uaucagcuaaguagucucc

SEQ ID NO: 1453664 - RNA, 19 nt, Artificial Sequence
  Description of Artificial Sequence: Synthetic oligonucleotide
  Sense strand starting at position 3110 of SEQ ID NO: 1243950
gcccaagauguguaaccaa

SEQ ID NO: 1453665 - RNA, 19 nt, Artificial Sequence
  Description of Artificial Sequence: Synthetic oligonucleotide
  Antisense strand to SEQ ID NO: 1453664
uugguuacacaucuugggc

SEQ ID NO: 1453666 - RNA, 19 nt, Artificial Sequence
  Description of Artificial Sequence: Synthetic oligonucleotide
  Sense strand starting at position 3348 of SEQ ID NO: 1243950
ggaccugucccugauguca

SEQ ID NO: 1453667 - RNA, 19 nt, Artificial Sequence
  Description of Artificial Sequence: Synthetic oligonucleotide
  Antisense strand to SEQ ID NO: 1453666
ugacaucagggacaggucc

SEQ ID NO: 1453668 - RNA, 19 nt, Artificial Sequence
  Description of Artificial Sequence: Synthetic oligonucleotide
  Sense strand starting at position 3359 of SEQ ID NO: 1243950
ugaugucauaacuggguaa

SEQ ID NO: 1453669 - RNA, 19 nt, Artificial Sequence
  Description of Artificial Sequence: Synthetic oligonucleotide
  Antisense strand to SEQ ID NO: 1453668
uuacccaguuaugacauca

SEQ ID NO: 1453670 - RNA, 19 nt, Artificial Sequence
  Description of Artificial Sequence: Synthetic oligonucleotide
  Sense strand starting at position 3361 of SEQ ID NO: 1243950
augucauaacuggguaacu

SEQ ID NO: 1453671 - RNA, 19 nt, Artificial Sequence
  Description of Artificial Sequence: Synthetic oligonucleotide
  Antisense strand to SEQ ID NO: 1453670
aguuacccaguuaugacau

SEQ ID NO: 1453672 - RNA, 19 nt, Artificial Sequence
  Description of Artificial Sequence: Synthetic oligonucleotide
  Sense strand starting at position 3362 of SEQ ID NO: 1243950
ugucauaacuggguaacua

SEQ ID NO: 1453673 - RNA, 19 nt, Artificial Sequence
  Description of Artificial Sequence: Synthetic oligonucleotide
  Antisense strand to SEQ ID NO: 1453672
uaguuacccaguuaugaca

SEQ ID NO: 1453674 - RNA, 19 nt, Artificial Sequence
  Description of Artificial Sequence: Synthetic oligonucleotide
  Sense strand starting at position 3363 of SEQ ID NO: 1243950
gucauaacuggguaacuau

SEQ ID NO: 1453675 - RNA, 19 nt, Artificial Sequence
  Description of Artificial Sequence: Synthetic oligonucleotide
  Antisense strand to SEQ ID NO: 1453674
auaguuacccaguuaugac

SEQ ID NO: 1453676 - RNA, 19 nt, Artificial Sequence
  Description of Artificial Sequence: Synthetic oligonucleotide
  Sense strand starting at position 3674 of SEQ ID NO: 1243950
acagcuuugggaugauaug

SEQ ID NO: 1453677 - RNA, 19 nt, Artificial Sequence
  Description of Artificial Sequence: Synthetic oligonucleotide
  Antisense strand to SEQ ID NO: 1453676
cauaucaucccaaagcugu

SEQ ID NO: 1453678 - RNA, 19 nt, Artificial Sequence
  Description of Artificial Sequence: Synthetic oligonucleotide
  Sense strand starting at position 3797 of SEQ ID NO: 1243950
gccgaaguacguuagaaag

SEQ ID NO: 1453679 - RNA, 19 nt, Artificial Sequence
  Description of Artificial Sequence: Synthetic oligonucleotide
  Antisense strand to SEQ ID NO: 1453678
cuuucuaacguacuucggc

SEQ ID NO: 1453680 - RNA, 19 nt, Artificial Sequence
  Description of Artificial Sequence: Synthetic oligonucleotide
  Sense strand starting at position 86 of SEQ ID NO: 1243951
ccaagauuacauugcugac

SEQ ID NO: 1453681 - RNA, 19 nt, Artificial Sequence
  Description of Artificial Sequence: Synthetic oligonucleotide
  Antisense strand to SEQ ID NO: 1453680
gucagcaauguaaucuugg

SEQ ID NO: 1453682 - RNA, 19 nt, Artificial Sequence
  Description of Artificial Sequence: Synthetic oligonucleotide
  Sense strand starting at position 614 of SEQ ID NO: 1243951
agggcuuucucugcauuau

SEQ ID NO: 1453683 - RNA, 19 nt, Artificial Sequence
  Description of Artificial Sequence: Synthetic oligonucleotide
  Antisense strand to SEQ ID NO: 1453682
auaaugcagagaaagcccu

SEQ ID NO: 1453684 - RNA, 19 nt, Artificial Sequence
  Description of Artificial Sequence: Synthetic oligonucleotide
  Sense strand starting at position 615 of SEQ ID NO: 1243951
gggcuuucucugcauuauu

SEQ ID NO: 1453685 - RNA, 19 nt, Artificial Sequence
  Description of Artificial Sequence: Synthetic oligonucleotide
  Antisense strand to SEQ ID NO: 1453684
aauaaugcagagaaagccc

SEQ ID NO: 1453686 - RNA, 19 nt, Artificial Sequence
  Description of Artificial Sequence: Synthetic oligonucleotide
  Sense strand starting at position 637 of SEQ ID NO: 1243951
acgccaaucuaguccaaga

SEQ ID NO: 1453687 - RNA, 19 nt, Artificial Sequence
  Description of Artificial Sequence: Synthetic oligonucleotide
  Antisense strand to SEQ ID NO: 1453686
ucuuggacuagauuggcgu

SEQ ID NO: 1453688 - RNA, 19 nt, Artificial Sequence
  Description of Artificial Sequence: Synthetic oligonucleotide
  Sense strand starting at position 639 of SEQ ID NO: 1243951
gccaaucuaguccaagaua

SEQ ID NO: 1453689 - RNA, 19 nt, Artificial Sequence
  Description of Artificial Sequence: Synthetic oligonucleotide
  Antisense strand to SEQ ID NO: 1453688
uaucuuggacuagauuggc

SEQ ID NO: 1453690 - RNA, 19 nt, Artificial Sequence
  Description of Artificial Sequence: Synthetic oligonucleotide
  Sense strand starting at position 657 of SEQ ID NO: 1243951
agcccugaaugucccaaau

SEQ ID NO: 1453691 - RNA, 19 nt, Artificial Sequence
  Description of Artificial Sequence: Synthetic oligonucleotide
  Antisense strand to SEQ ID NO: 1453690
auuugggacauucagggcu

SEQ ID NO: 1453692 - RNA, 19 nt, Artificial Sequence
  Description of Artificial Sequence: Synthetic oligonucleotide
  Sense strand starting at position 739 of SEQ ID NO: 1243951
accagucuagauuggaaca

SEQ ID NO: 1453693 - RNA, 19 nt, Artificial Sequence
  Description of Artificial Sequence: Synthetic oligonucleotide
  Antisense strand to SEQ ID NO: 1453692
uguuccaaucuagacuggu

SEQ ID NO: 1453694 - RNA, 19 nt, Artificial Sequence
  Description of Artificial Sequence: Synthetic oligonucleotide
  Sense strand starting at position 810 of SEQ ID NO: 1243951
uauaccgagugcuccaaua

SEQ ID NO: 1453695 - RNA, 19 nt, Artificial Sequence
  Description of Artificial Sequence: Synthetic oligonucleotide
  Antisense strand to SEQ ID NO: 1453694
uauuggagcacucgguaua

SEQ ID NO: 1453696 - RNA, 19 nt, Artificial Sequence
  Description of Artificial Sequence: Synthetic oligonucleotide
  Sense strand starting at position 812 of SEQ ID NO: 1243951
uaccgagugcuccaauaaa

SEQ ID NO: 1453697 - RNA, 19 nt, Artificial Sequence
  Description of Artificial Sequence: Synthetic oligonucleotide
  Antisense strand to SEQ ID NO: 1453696
uuuauuggagcacucggua

SEQ ID NO: 1453698 - RNA, 19 nt, Artificial Sequence
  Description of Artificial Sequence: Synthetic oligonucleotide
  Sense strand starting at position 1303 of SEQ ID NO: 1243951
ugucuaaucugguuuagga

SEQ ID NO: 1453699 - RNA, 19 nt, Artificial Sequence
  Description of Artificial Sequence: Synthetic oligonucleotide
  Antisense strand to SEQ ID NO: 1453698
uccuaaaccagauuagaca

SEQ ID NO: 1453700 - RNA, 19 nt, Artificial Sequence
  Description of Artificial Sequence: Synthetic oligonucleotide
  Sense strand starting at position 1310 of SEQ ID NO: 1243951
ucugguuuaggauauccua

SEQ ID NO: 1453701 - RNA, 19 nt, Artificial Sequence
  Description of Artificial Sequence: Synthetic oligonucleotide
  Antisense strand to SEQ ID NO: 1453700
uaggauauccuaaaccaga

SEQ ID NO: 1453702 - RNA, 19 nt, Artificial Sequence
  Description of Artificial Sequence: Synthetic oligonucleotide
  Sense strand starting at position 1365 of SEQ ID NO: 1243951
uuguccauccugggauagu

SEQ ID NO: 1453703 - RNA, 19 nt, Artificial Sequence
  Description of Artificial Sequence: Synthetic oligonucleotide
  Antisense strand to SEQ ID NO: 1453702
acuaucccaggauggacaa

SEQ ID NO: 1453704 - RNA, 19 nt, Artificial Sequence
  Description of Artificial Sequence: Synthetic oligonucleotide
  Sense strand starting at position 1432 of SEQ ID NO: 1243951
cccaguguggcccaaagua

SEQ ID NO: 1453705 - RNA, 19 nt, Artificial Sequence
  Description of Artificial Sequence: Synthetic oligonucleotide
  Antisense strand to SEQ ID NO: 1453704
uacuuugggccacacuggg

SEQ ID NO: 1453706 - RNA, 19 nt, Artificial Sequence
  Description of Artificial Sequence: Synthetic oligonucleotide
  Sense strand starting at position 1525 of SEQ ID NO: 1243951
ccgaaauccugauccauag

SEQ ID NO: 1453707 - RNA, 19 nt, Artificial Sequence
  Description of Artificial Sequence: Synthetic oligonucleotide
  Antisense strand to SEQ ID NO: 1453706
cuauggaucaggauuucgg

SEQ ID NO: 1453708 - RNA, 19 nt, Artificial Sequence
  Description of Artificial Sequence: Synthetic oligonucleotide
  Sense strand starting at position 1589 of SEQ ID NO: 1243951
ugaaaucgccgagggugau

SEQ ID NO: 1453709 - RNA, 19 nt, Artificial Sequence
  Description of Artificial Sequence: Synthetic oligonucleotide
  Antisense strand to SEQ ID NO: 1453708
aucacccucggcgauuuca

SEQ ID NO: 1453710 - RNA, 19 nt, Artificial Sequence
  Description of Artificial Sequence: Synthetic oligonucleotide
  Sense strand starting at position 1639 of SEQ ID NO: 1243951
uagggagucucuuccucau

SEQ ID NO: 1453711 - RNA, 19 nt, Artificial Sequence
  Description of Artificial Sequence: Synthetic oligonucleotide
  Antisense strand to SEQ ID NO: 1453710
augaggaagagacucccua

SEQ ID NO: 1453712 - RNA, 19 nt, Artificial Sequence
  Description of Artificial Sequence: Synthetic oligonucleotide
  Sense strand starting at position 1642 of SEQ ID NO: 1243951
ggagucucuuccucaucca

SEQ ID NO: 1453713 - RNA, 19 nt, Artificial Sequence
  Description of Artificial Sequence: Synthetic oligonucleotide
  Antisense strand to SEQ ID NO: 1453712
uggaugaggaagagacucc

SEQ ID NO: 1453714 - RNA, 19 nt, Artificial Sequence
  Description of Artificial Sequence: Synthetic oligonucleotide
  Sense strand starting at position 1652 of SEQ ID NO: 1243951
ccucauccaggugguaaau

SEQ ID NO: 1453715 - RNA, 19 nt, Artificial Sequence
  Description of Artificial Sequence: Synthetic oligonucleotide
  Antisense strand to SEQ ID NO: 1453714
auuuaccaccuggaugagg

SEQ ID NO: 1453716 - RNA, 19 nt, Artificial Sequence
  Description of Artificial Sequence: Synthetic oligonucleotide
  Sense strand starting at position 2402 of SEQ ID NO: 1243951
gacuuugagacguggguuu

SEQ ID NO: 1453717 - RNA, 19 nt, Artificial Sequence
  Description of Artificial Sequence: Synthetic oligonucleotide
  Antisense strand to SEQ ID NO: 1453716
aaacccacgucucaaaguc

SEQ ID NO: 1453718 - RNA, 19 nt, Artificial Sequence
  Description of Artificial Sequence: Synthetic oligonucleotide
  Sense strand starting at position 2404 of SEQ ID NO: 1243951
cuuugagacguggguuuca

SEQ ID NO: 1453719 - RNA, 19 nt, Artificial Sequence
  Description of Artificial Sequence: Synthetic oligonucleotide
  Antisense strand to SEQ ID NO: 1453718
ugaaacccacgucucaaag

SEQ ID NO: 1453720 - RNA, 19 nt, Artificial Sequence
  Description of Artificial Sequence: Synthetic oligonucleotide
  Sense strand starting at position 2574 of SEQ ID NO: 1243951
gagugagaaucgucaccuu

SEQ ID NO: 1453721 - RNA, 19 nt, Artificial Sequence
  Description of Artificial Sequence: Synthetic oligonucleotide
  Antisense strand to SEQ ID NO: 1453720
aaggugacgauucucacuc

SEQ ID NO: 1453722 - RNA, 19 nt, Artificial Sequence
  Description of Artificial Sequence: Synthetic oligonucleotide
  Sense strand starting at position 2577 of SEQ ID NO: 1243951
ugagaaucgucaccuuucu

SEQ ID NO: 1453723 - RNA, 19 nt, Artificial Sequence
  Description of Artificial Sequence: Synthetic oligonucleotide
  Antisense strand to SEQ ID NO: 1453722
agaaaggugacgauucuca

SEQ ID NO: 1453724 - RNA, 19 nt, Artificial Sequence
  Description of Artificial Sequence: Synthetic oligonucleotide
  Sense strand starting at position 2674 of SEQ ID NO: 1243951
aaauacaaccgguguagaa

SEQ ID NO: 1453725 - RNA, 19 nt, Artificial Sequence
  Description of Artificial Sequence: Synthetic oligonucleotide
  Antisense strand to SEQ ID NO: 1453724
uucuacaccgguuguauuu

SEQ ID NO: 1453726 - RNA, 19 nt, Artificial Sequence
  Description of Artificial Sequence: Synthetic oligonucleotide
  Sense strand starting at position 2833 of SEQ ID NO: 1243951
cagagauuaugugucggga

SEQ ID NO: 1453727 - RNA, 19 nt, Artificial Sequence
  Description of Artificial Sequence: Synthetic oligonucleotide
  Antisense strand to SEQ ID NO: 1453726
ucccgacacauaaucucug

SEQ ID NO: 1453728 - RNA, 19 nt, Artificial Sequence
  Description of Artificial Sequence: Synthetic oligonucleotide
  Sense strand starting at position 2836 of SEQ ID NO: 1243951
agauuaugugucgggacac

SEQ ID NO: 1453729 - RNA, 19 nt, Artificial Sequence
  Description of Artificial Sequence: Synthetic oligonucleotide
  Antisense strand to SEQ ID NO: 1453728
gugucccgacacauaaucu

SEQ ID NO: 1453730 - RNA, 19 nt, Artificial Sequence
  Description of Artificial Sequence: Synthetic oligonucleotide
  Sense strand starting at position 2950 of SEQ ID NO: 1243951
acaagucucccuugagaau

SEQ ID NO: 1453731 - RNA, 19 nt, Artificial Sequence
  Description of Artificial Sequence: Synthetic oligonucleotide
  Antisense strand to SEQ ID NO: 1453730
auucucaagggagacuugu

SEQ ID NO: 1453732 - RNA, 19 nt, Artificial Sequence
  Description of Artificial Sequence: Synthetic oligonucleotide
  Sense strand starting at position 2959 of SEQ ID NO: 1243951
ccuugagaauuccugccuu

SEQ ID NO: 1453733 - RNA, 19 nt, Artificial Sequence
  Description of Artificial Sequence: Synthetic oligonucleotide
  Antisense strand to SEQ ID NO: 1453732
aaggcaggaauucucaagg

SEQ ID NO: 1453734 - RNA, 19 nt, Artificial Sequence
  Description of Artificial Sequence: Synthetic oligonucleotide
  Sense strand starting at position 2963 of SEQ ID NO: 1243951
gagaauuccugccuugaag

SEQ ID NO: 1453735 - RNA, 19 nt, Artificial Sequence
  Description of Artificial Sequence: Synthetic oligonucleotide
  Antisense strand to SEQ ID NO: 1453734
cuucaaggcaggaauucuc

SEQ ID NO: 1453736 - RNA, 19 nt, Artificial Sequence
  Description of Artificial Sequence: Synthetic oligonucleotide
  Sense strand starting at position 2965 of SEQ ID NO: 1243951
gaauuccugccuugaagug

SEQ ID NO: 1453737 - RNA, 19 nt, Artificial Sequence
  Description of Artificial Sequence: Synthetic oligonucleotide
  Antisense strand to SEQ ID NO: 1453736
cacuucaaggcaggaauuc

SEQ ID NO: 1453738 - RNA, 19 nt, Artificial Sequence
  Description of Artificial Sequence: Synthetic oligonucleotide
  Sense strand starting at position 3053 of SEQ ID NO: 1243951
uuggaaguuccaggcuaaa

SEQ ID NO: 1453739 - RNA, 19 nt, Artificial Sequence
  Description of Artificial Sequence: Synthetic oligonucleotide
  Antisense strand to SEQ ID NO: 1453738
uuuagccuggaacuuccaa

SEQ ID NO: 1453740 - RNA, 19 nt, Artificial Sequence
  Description of Artificial Sequence: Synthetic oligonucleotide
  Sense strand starting at position 3056 of SEQ ID NO: 1243951
gaaguuccaggcuaaaguu

SEQ ID NO: 1453741 - RNA, 19 nt, Artificial Sequence
  Description of Artificial Sequence: Synthetic oligonucleotide
  Antisense strand to SEQ ID NO: 1453740
aacuuuagccuggaacuuc

SEQ ID NO: 1453742 - RNA, 19 nt, Artificial Sequence
  Description of Artificial Sequence: Synthetic oligonucleotide
  Sense strand starting at position 3129 of SEQ ID NO: 1243951
gccucaguuccuugcauuu

SEQ ID NO: 1453743 - RNA, 19 nt, Artificial Sequence
  Description of Artificial Sequence: Synthetic oligonucleotide
  Antisense strand to SEQ ID NO: 1453742
aaaugcaaggaacugaggc

SEQ ID NO: 1453744 - RNA, 19 nt, Artificial Sequence
  Description of Artificial Sequence: Synthetic oligonucleotide
  Sense strand starting at position 3168 of SEQ ID NO: 1243951
ggacguuggucuucuuaau

SEQ ID NO: 1453745 - RNA, 19 nt, Artificial Sequence
  Description of Artificial Sequence: Synthetic oligonucleotide
  Antisense strand to SEQ ID NO: 1453744
auuaagaagaccaacgucc

SEQ ID NO: 1453746 - RNA, 19 nt, Artificial Sequence
  Description of Artificial Sequence: Synthetic oligonucleotide
  Sense strand starting at position 3254 of SEQ ID NO: 1243951
ggcuuucgacaguaacaug

SEQ ID NO: 1453747 - RNA, 19 nt, Artificial Sequence
  Description of Artificial Sequence: Synthetic oligonucleotide
  Antisense strand to SEQ ID NO: 1453746
cauguuacugucgaaagcc

SEQ ID NO: 1453748 - RNA, 19 nt, Artificial Sequence
  Description of Artificial Sequence: Synthetic oligonucleotide
  Sense strand starting at position 3259 of SEQ ID NO: 1243951
ucgacaguaacaugugauc

SEQ ID NO: 1453749 - RNA, 19 nt, Artificial Sequence
  Description of Artificial Sequence: Synthetic oligonucleotide
  Antisense strand to SEQ ID NO: 1453748
gaucacauguuacugucga

SEQ ID NO: 1453750 - RNA, 19 nt, Artificial Sequence
  Description of Artificial Sequence: Synthetic oligonucleotide
  Sense strand starting at position 3264 of SEQ ID NO: 1243951
aguaacaugugaucagauc

SEQ ID NO: 1453751 - RNA, 19 nt, Artificial Sequence
  Description of Artificial Sequence: Synthetic oligonucleotide
  Antisense strand to SEQ ID NO: 1453750
gaucugaucacauguuacu

SEQ ID NO: 1453752 - RNA, 19 nt, Artificial Sequence
  Description of Artificial Sequence: Synthetic oligonucleotide
  Sense strand starting at position 3386 of SEQ ID NO: 1243951
cugauucuaccaugauguc

SEQ ID NO: 1453753 - RNA, 19 nt, Artificial Sequence
  Description of Artificial Sequence: Synthetic oligonucleotide
  Antisense strand to SEQ ID NO: 1453752
gacaucaugguagaaucag

SEQ ID NO: 1453754 - RNA, 19 nt, Artificial Sequence
  Description of Artificial Sequence: Synthetic oligonucleotide
  Sense strand starting at position 3728 of SEQ ID NO: 1243951
ugcucuucuugauucgaga

SEQ ID NO: 1453755 - RNA, 19 nt, Artificial Sequence
  Description of Artificial Sequence: Synthetic oligonucleotide
  Antisense strand to SEQ ID NO: 1453754
ucucgaaucaagaagagca

SEQ ID NO: 1453756 - RNA, 19 nt, Artificial Sequence
  Description of Artificial Sequence: Synthetic oligonucleotide
  Sense strand starting at position 3838 of SEQ ID NO: 1243951
uccuucuuucgaggaggau

SEQ ID NO: 1453757 - RNA, 19 nt, Artificial Sequence
  Description of Artificial Sequence: Synthetic oligonucleotide
  Antisense strand to SEQ ID NO: 1453756
auccuccucgaaagaagga

SEQ ID NO: 1453758 - RNA, 19 nt, Artificial Sequence
  Description of Artificial Sequence: Synthetic oligonucleotide
  Sense strand starting at position 3972 of SEQ ID NO: 1243951
gagagaguccuugagcuuc

SEQ ID NO: 1453759 - RNA, 19 nt, Artificial Sequence
  Description of Artificial Sequence: Synthetic oligonucleotide
  Antisense strand to SEQ ID NO: 1453758
gaagcucaaggacucucuc

SEQ ID NO: 1453760 - RNA, 19 nt, Artificial Sequence
  Description of Artificial Sequence: Synthetic oligonucleotide
  Sense strand starting at position 2 of SEQ ID NO: 1243952
aggacauauccuugguauc

SEQ ID NO: 1453761 - RNA, 19 nt, Artificial Sequence
  Description of Artificial Sequence: Synthetic oligonucleotide
  Antisense strand to SEQ ID NO: 1453760
gauaccaaggauauguccu

SEQ ID NO: 1453762 - RNA, 19 nt, Artificial Sequence
  Description of Artificial Sequence: Synthetic oligonucleotide
  Sense strand starting at position 3 of SEQ ID NO: 1243952
ggacauauccuugguauca

SEQ ID NO: 1453763 - RNA, 19 nt, Artificial Sequence
  Description of Artificial Sequence: Synthetic oligonucleotide
  Antisense strand to SEQ ID NO: 1453762
ugauaccaaggauaugucc

SEQ ID NO: 1453764 - RNA, 19 nt, Artificial Sequence
  Description of Artificial Sequence: Synthetic oligonucleotide
  Sense strand starting at position 185 of SEQ ID NO: 1243952
ucuagauagcacugccaaa

SEQ ID NO: 1453765 - RNA, 19 nt, Artificial Sequence
  Description of Artificial Sequence: Synthetic oligonucleotide
  Antisense strand to SEQ ID NO: 1453764
uuuggcagugcuaucuaga

SEQ ID NO: 1453766 - RNA, 19 nt, Artificial Sequence
  Description of Artificial Sequence: Synthetic oligonucleotide
  Sense strand starting at position 216 of SEQ ID NO: 1243952
gguuccacuucggcagaaa

SEQ ID NO: 1453767 - RNA, 19 nt, Artificial Sequence
  Description of Artificial Sequence: Synthetic oligonucleotide
  Antisense strand to SEQ ID NO: 1453766
uuucugccgaaguggaacc

SEQ ID NO: 1453768 - RNA, 19 nt, Artificial Sequence
  Description of Artificial Sequence: Synthetic oligonucleotide
  Sense strand starting at position 324 of SEQ ID NO: 1243952
ccauguggugcugaggaaa

SEQ ID NO: 1453769 - RNA, 19 nt, Artificial Sequence
  Description of Artificial Sequence: Synthetic oligonucleotide
  Antisense strand to SEQ ID NO: 1453768
uuuccucagcaccacaugg

SEQ ID NO: 1453770 - RNA, 19 nt, Artificial Sequence
  Description of Artificial Sequence: Synthetic oligonucleotide
  Sense strand starting at position 327 of SEQ ID NO: 1243952
uguggugcugaggaaagau

SEQ ID NO: 1453771 - RNA, 19 nt, Artificial Sequence
  Description of Artificial Sequence: Synthetic oligonucleotide
  Antisense strand to SEQ ID NO: 1453770
aucuuuccucagcaccaca

SEQ ID NO: 1453772 - RNA, 19 nt, Artificial Sequence
  Description of Artificial Sequence: Synthetic oligonucleotide
  Sense strand starting at position 336 of SEQ ID NO: 1243952
gaggaaagauucggagaac

SEQ ID NO: 1453773 - RNA, 19 nt, Artificial Sequence
  Description of Artificial Sequence: Synthetic oligonucleotide
  Antisense strand to SEQ ID NO: 1453772
guucuccgaaucuuuccuc

SEQ ID NO: 1453774 - RNA, 19 nt, Artificial Sequence
  Description of Artificial Sequence: Synthetic oligonucleotide
  Sense strand starting at position 368 of SEQ ID NO: 1243952
ugacuaguuacgugaccuu

SEQ ID NO: 1453775 - RNA, 19 nt, Artificial Sequence
  Description of Artificial Sequence: Synthetic oligonucleotide
  Antisense strand to SEQ ID NO: 1453774
aaggucacguaacuaguca

SEQ ID NO: 1453776 - RNA, 19 nt, Artificial Sequence
  Description of Artificial Sequence: Synthetic oligonucleotide
  Sense strand starting at position 375 of SEQ ID NO: 1243952
uuacgugaccuugggcaaa

SEQ ID NO: 1453777 - RNA, 19 nt, Artificial Sequence
  Description of Artificial Sequence: Synthetic oligonucleotide
  Antisense strand to SEQ ID NO: 1453776
uuugcccaaggucacguaa

SEQ ID NO: 1453778 - RNA, 19 nt, Artificial Sequence
  Description of Artificial Sequence: Synthetic oligonucleotide
  Sense strand starting at position 446 of SEQ ID NO: 1243952
cucaaaugggucugagcaa

SEQ ID NO: 1453779 - RNA, 19 nt, Artificial Sequence
  Description of Artificial Sequence: Synthetic oligonucleotide
  Antisense strand to SEQ ID NO: 1453778
uugcucagacccauuugag

SEQ ID NO: 1453780 - RNA, 19 nt, Artificial Sequence
  Description of Artificial Sequence: Synthetic oligonucleotide
  Sense strand starting at position 484 of SEQ ID NO: 1243952
ggagaaagguucuuacauu

SEQ ID NO: 1453781 - RNA, 19 nt, Artificial Sequence
  Description of Artificial Sequence: Synthetic oligonucleotide
  Antisense strand to SEQ ID NO: 1453780
aauguaagaaccuuucucc

SEQ ID NO: 1453782 - RNA, 19 nt, Artificial Sequence
  Description of Artificial Sequence: Synthetic oligonucleotide
  Sense strand starting at position 485 of SEQ ID NO: 1243952
gagaaagguucuuacauua

SEQ ID NO: 1453783 - RNA, 19 nt, Artificial Sequence
  Description of Artificial Sequence: Synthetic oligonucleotide
  Antisense strand to SEQ ID NO: 1453782
uaauguaagaaccuuucuc

SEQ ID NO: 1453784 - RNA, 19 nt, Artificial Sequence
  Description of Artificial Sequence: Synthetic oligonucleotide
  Sense strand starting at position 500 of SEQ ID NO: 1243952
auuauaaggcucuguauaa

SEQ ID NO: 1453785 - RNA, 19 nt, Artificial Sequence
  Description of Artificial Sequence: Synthetic oligonucleotide
  Antisense strand to SEQ ID NO: 1453784
uuauacagagccuuauaau

SEQ ID NO: 1453786 - RNA, 19 nt, Artificial Sequence
  Description of Artificial Sequence: Synthetic oligonucleotide
  Sense strand starting at position 501 of SEQ ID NO: 1243952
uuauaaggcucuguauaag

SEQ ID NO: 1453787 - RNA, 19 nt, Artificial Sequence
  Description of Artificial Sequence: Synthetic oligonucleotide
  Antisense strand to SEQ ID NO: 1453786
cuuauacagagccuuauaa

SEQ ID NO: 1453788 - RNA, 19 nt, Artificial Sequence
  Description of Artificial Sequence: Synthetic oligonucleotide
  Sense strand starting at position 504 of SEQ ID NO: 1243952
uaaggcucuguauaaguga

SEQ ID NO: 1453789 - RNA, 19 nt, Artificial Sequence
  Description of Artificial Sequence: Synthetic oligonucleotide
  Antisense strand to SEQ ID NO: 1453788
ucacuuauacagagccuua

SEQ ID NO: 1453790 - RNA, 19 nt, Artificial Sequence
  Description of Artificial Sequence: Synthetic oligonucleotide
  Sense strand starting at position 507 of SEQ ID NO: 1243952
ggcucuguauaagugaaga

SEQ ID NO: 1453791 - RNA, 19 nt, Artificial Sequence
  Description of Artificial Sequence: Synthetic oligonucleotide
  Antisense strand to SEQ ID NO: 1453790
ucuucacuuauacagagcc

SEQ ID NO: 1453792 - RNA, 19 nt, Artificial Sequence
  Description of Artificial Sequence: Synthetic oligonucleotide
  Sense strand starting at position 697 of SEQ ID NO: 1243952
ggagcaacuuuguuacagu

SEQ ID NO: 1453793 - RNA, 19 nt, Artificial Sequence
  Description of Artificial Sequence: Synthetic oligonucleotide
  Antisense strand to SEQ ID NO: 1453792
acuguaacaaaguugcucc

SEQ ID NO: 1453794 - RNA, 19 nt, Artificial Sequence
  Description of Artificial Sequence: Synthetic oligonucleotide
  Sense strand starting at position 728 of SEQ ID NO: 1243952
ccuuacucuccaggaaaga

SEQ ID NO: 1453795 - RNA, 19 nt, Artificial Sequence
  Description of Artificial Sequence: Synthetic oligonucleotide
  Antisense strand to SEQ ID NO: 1453794
ucuuuccuggagaguaagg

SEQ ID NO: 1453796 - RNA, 19 nt, Artificial Sequence
  Description of Artificial Sequence: Synthetic oligonucleotide
  Sense strand starting at position 744 of SEQ ID NO: 1243952
agagccugcgguuacauaa

SEQ ID NO: 1453797 - RNA, 19 nt, Artificial Sequence
  Description of Artificial Sequence: Synthetic oligonucleotide
  Antisense strand to SEQ ID NO: 1453796
uuauguaaccgcaggcucu

SEQ ID NO: 1453798 - RNA, 19 nt, Artificial Sequence
  Description of Artificial Sequence: Synthetic oligonucleotide
  Sense strand starting at position 766 of SEQ ID NO: 1243952
uggucuuacgacuacaaug

SEQ ID NO: 1453799 - RNA, 19 nt, Artificial Sequence
  Description of Artificial Sequence: Synthetic oligonucleotide
  Antisense strand to SEQ ID NO: 1453798
cauuguagucguaagacca

SEQ ID NO: 1453800 - RNA, 19 nt, Artificial Sequence
  Description of Artificial Sequence: Synthetic oligonucleotide
  Sense strand starting at position 1048 of SEQ ID NO: 1243952
aggcuaaaucuccgaauga

SEQ ID NO: 1453801 - RNA, 19 nt, Artificial Sequence
  Description of Artificial Sequence: Synthetic oligonucleotide
  Antisense strand to SEQ ID NO: 1453800
ucauucggagauuuagccu

SEQ ID NO: 1453802 - RNA, 19 nt, Artificial Sequence
  Description of Artificial Sequence: Synthetic oligonucleotide
  Sense strand starting at position 2483 of SEQ ID NO: 1243952
ccucccguaucugugagaa

SEQ ID NO: 1453803 - RNA, 19 nt, Artificial Sequence
  Description of Artificial Sequence: Synthetic oligonucleotide
  Antisense strand to SEQ ID NO: 1453802
uucucacagauacgggagg

SEQ ID NO: 1453804 - RNA, 19 nt, Artificial Sequence
  Description of Artificial Sequence: Synthetic oligonucleotide
  Sense strand starting at position 2596 of SEQ ID NO: 1243952
guucuuugaggcugaagga

SEQ ID NO: 1453805 - RNA, 19 nt, Artificial Sequence
  Description of Artificial Sequence: Synthetic oligonucleotide
  Antisense strand to SEQ ID NO: 1453804
uccuucagccucaaagaac

SEQ ID NO: 1453806 - RNA, 19 nt, Artificial Sequence
  Description of Artificial Sequence: Synthetic oligonucleotide
  Sense strand starting at position 2719 of SEQ ID NO: 1243952
gcuguccuugcacauuuau

SEQ ID NO: 1453807 - RNA, 19 nt, Artificial Sequence
  Description of Artificial Sequence: Synthetic oligonucleotide
  Antisense strand to SEQ ID NO: 1453806
auaaaugugcaaggacagc

SEQ ID NO: 1453808 - RNA, 19 nt, Artificial Sequence
  Description of Artificial Sequence: Synthetic oligonucleotide
  Sense strand starting at position 2840 of SEQ ID NO: 1243952
agagguggugccugucaga

SEQ ID NO: 1453809 - RNA, 19 nt, Artificial Sequence
  Description of Artificial Sequence: Synthetic oligonucleotide
  Antisense strand to SEQ ID NO: 1453808
ucugacaggcaccaccucu

SEQ ID NO: 1453810 - RNA, 19 nt, Artificial Sequence
  Description of Artificial Sequence: Synthetic oligonucleotide
  Sense strand starting at position 3017 of SEQ ID NO: 1243952
agacuacuucugggagagu

SEQ ID NO: 1453811 - RNA, 19 nt, Artificial Sequence
  Description of Artificial Sequence: Synthetic oligonucleotide
  Antisense strand to SEQ ID NO: 1453810
acucucccagaaguagucu

SEQ ID NO: 1453812 - RNA, 19 nt, Artificial Sequence
  Description of Artificial Sequence: Synthetic oligonucleotide
  Sense strand starting at position 3188 of SEQ ID NO: 1243952
ggccauacaguagggauua

SEQ ID NO: 1453813 - RNA, 19 nt, Artificial Sequence
  Description of Artificial Sequence: Synthetic oligonucleotide
  Antisense strand to SEQ ID NO: 1453812
uaaucccuacuguauggcc

SEQ ID NO: 1453814 - RNA, 19 nt, Artificial Sequence
  Description of Artificial Sequence: Synthetic oligonucleotide
  Sense strand starting at position 3318 of SEQ ID NO: 1243952
aaaguuaguguucguuaug

SEQ ID NO: 1453815 - RNA, 19 nt, Artificial Sequence
  Description of Artificial Sequence: Synthetic oligonucleotide
  Antisense strand to SEQ ID NO: 1453814
cauaacgaacacuaacuuu

SEQ ID NO: 1453816 - RNA, 19 nt, Artificial Sequence
  Description of Artificial Sequence: Synthetic oligonucleotide
  Sense strand starting at position 3370 of SEQ ID NO: 1243952
gguuacugcuuuccacagu

SEQ ID NO: 1453817 - RNA, 19 nt, Artificial Sequence
  Description of Artificial Sequence: Synthetic oligonucleotide
  Antisense strand to SEQ ID NO: 1453816
acuguggaaagcaguaacc

SEQ ID NO: 1453818 - RNA, 19 nt, Artificial Sequence
  Description of Artificial Sequence: Synthetic oligonucleotide
  Sense strand starting at position 3384 of SEQ ID NO: 1243952
acaguucuguccucuaaca

SEQ ID NO: 1453819 - RNA, 19 nt, Artificial Sequence
  Description of Artificial Sequence: Synthetic oligonucleotide
  Antisense strand to SEQ ID NO: 1453818
uguuagaggacagaacugu

SEQ ID NO: 1453820 - RNA, 19 nt, Artificial Sequence
  Description of Artificial Sequence: Synthetic oligonucleotide
  Sense strand starting at position 3386 of SEQ ID NO: 1243952
aguucuguccucuaacaac

SEQ ID NO: 1453821 - RNA, 19 nt, Artificial Sequence
  Description of Artificial Sequence: Synthetic oligonucleotide
  Antisense strand to SEQ ID NO: 1453820
guuguuagaggacagaacu

SEQ ID NO: 1453822 - RNA, 19 nt, Artificial Sequence
  Description of Artificial Sequence: Synthetic oligonucleotide
  Sense strand starting at position 3576 of SEQ ID NO: 1243952
ccuggacugccuggagaaa

SEQ ID NO: 1453823 - RNA, 19 nt, Artificial Sequence
  Description of Artificial Sequence: Synthetic oligonucleotide
  Antisense strand to SEQ ID NO: 1453822
uuucuccaggcaguccagg

SEQ ID NO: 1453824 - RNA, 19 nt, Artificial Sequence
  Description of Artificial Sequence: Synthetic oligonucleotide
  Sense strand starting at position 3615 of SEQ ID NO: 1243952
cuccaacaguccuuaguuu

SEQ ID NO: 1453825 - RNA, 19 nt, Artificial Sequence
  Description of Artificial Sequence: Synthetic oligonucleotide
  Antisense strand to SEQ ID NO: 1453824
aaacuaaggacuguuggag

SEQ ID NO: 1453826 - RNA, 19 nt, Artificial Sequence
  Description of Artificial Sequence: Synthetic oligonucleotide
  Sense strand starting at position 3660 of SEQ ID NO: 1243952
agaucugccacguaugguu

SEQ ID NO: 1453827 - RNA, 19 nt, Artificial Sequence
  Description of Artificial Sequence: Synthetic oligonucleotide
  Antisense strand to SEQ ID NO: 1453826
aaccauacguggcagaucu

SEQ ID NO: 1453828 - RNA, 19 nt, Artificial Sequence
  Description of Artificial Sequence: Synthetic oligonucleotide
  Sense strand starting at position 3684 of SEQ ID NO: 1243952
ggucauucacugcgcaaga

SEQ ID NO: 1453829 - RNA, 19 nt, Artificial Sequence
  Description of Artificial Sequence: Synthetic oligonucleotide
  Antisense strand to SEQ ID NO: 1453828
ucuugcgcagugaaugacc

SEQ ID NO: 1453830 - RNA, 19 nt, Artificial Sequence
  Description of Artificial Sequence: Synthetic oligonucleotide
  Sense strand starting at position 3700 of SEQ ID NO: 1243952
agaguauccaaccgaugga

SEQ ID NO: 1453831 - RNA, 19 nt, Artificial Sequence
  Description of Artificial Sequence: Synthetic oligonucleotide
  Antisense strand to SEQ ID NO: 1453830
uccaucgguuggauacucu

SEQ ID NO: 1453832 - RNA, 19 nt, Artificial Sequence
  Description of Artificial Sequence: Synthetic oligonucleotide
  Sense strand starting at position 3824 of SEQ ID NO: 1243952
guuacuaugagcuagcagu

SEQ ID NO: 1453833 - RNA, 19 nt, Artificial Sequence
  Description of Artificial Sequence: Synthetic oligonucleotide
  Antisense strand to SEQ ID NO: 1453832
acugcuagcucauaguaac

SEQ ID NO: 1453834 - RNA, 19 nt, Artificial Sequence
  Description of Artificial Sequence: Synthetic oligonucleotide
  Sense strand starting at position 3900 of SEQ ID NO: 1243952
ccugaaguauaauagggau

SEQ ID NO: 1453835 - RNA, 19 nt, Artificial Sequence
  Description of Artificial Sequence: Synthetic oligonucleotide
  Antisense strand to SEQ ID NO: 1453834
aucccuauuauacuucagg

SEQ ID NO: 1453836 - RNA, 19 nt, Artificial Sequence
  Description of Artificial Sequence: Synthetic oligonucleotide
  Sense strand starting at position 3903 of SEQ ID NO: 1243952
gaaguauaauagggauaag

SEQ ID NO: 1453837 - RNA, 19 nt, Artificial Sequence
  Description of Artificial Sequence: Synthetic oligonucleotide
  Antisense strand to SEQ ID NO: 1453836
cuuaucccuauuauacuuc

SEQ ID NO: 1453838 - RNA, 19 nt, Artificial Sequence
  Description of Artificial Sequence: Synthetic oligonucleotide
  Sense strand starting at position 3914 of SEQ ID NO: 1243952
gggauaagagcuugcucau

SEQ ID NO: 1453839 - RNA, 19 nt, Artificial Sequence
  Description of Artificial Sequence: Synthetic oligonucleotide
  Antisense strand to SEQ ID NO: 1453838
augagcaagcucuuauccc

SEQ ID NO: 1453840 - RNA, 19 nt, Artificial Sequence
  Description of Artificial Sequence: Synthetic oligonucleotide
  Sense strand starting at position 79 of SEQ ID NO: 1243953
uguucuagucagggaguga

SEQ ID NO: 1453841 - RNA, 19 nt, Artificial Sequence
  Description of Artificial Sequence: Synthetic oligonucleotide
  Antisense strand to SEQ ID NO: 1453840
ucacucccugacuagaaca

SEQ ID NO: 1453842 - RNA, 19 nt, Artificial Sequence
  Description of Artificial Sequence: Synthetic oligonucleotide
  Sense strand starting at position 80 of SEQ ID NO: 1243953
guucuagucagggagugaa

SEQ ID NO: 1453843 - RNA, 19 nt, Artificial Sequence
  Description of Artificial Sequence: Synthetic oligonucleotide
  Antisense strand to SEQ ID NO: 1453842
uucacucccugacuagaac

SEQ ID NO: 1453844 - RNA, 19 nt, Artificial Sequence
  Description of Artificial Sequence: Synthetic oligonucleotide
  Sense strand starting at position 83 of SEQ ID NO: 1243953
cuagucagggagugaaaua

SEQ ID NO: 1453845 - RNA, 19 nt, Artificial Sequence
  Description of Artificial Sequence: Synthetic oligonucleotide
  Antisense strand to SEQ ID NO: 1453844
uauuucacucccugacuag

SEQ ID NO: 1453846 - RNA, 19 nt, Artificial Sequence
  Description of Artificial Sequence: Synthetic oligonucleotide
  Sense strand starting at position 127 of SEQ ID NO: 1243953
guauguuaucugcaauaag

SEQ ID NO: 1453847 - RNA, 19 nt, Artificial Sequence
  Description of Artificial Sequence: Synthetic oligonucleotide
  Antisense strand to SEQ ID NO: 1453846
cuuauugcagauaacauac

SEQ ID NO: 1453848 - RNA, 19 nt, Artificial Sequence
  Description of Artificial Sequence: Synthetic oligonucleotide
  Sense strand starting at position 130 of SEQ ID NO: 1243953
uguuaucugcaauaaguac

SEQ ID NO: 1453849 - RNA, 19 nt, Artificial Sequence
  Description of Artificial Sequence: Synthetic oligonucleotide
  Antisense strand to SEQ ID NO: 1453848
guacuuauugcagauaaca

SEQ ID NO: 1453850 - RNA, 19 nt, Artificial Sequence
  Description of Artificial Sequence: Synthetic oligonucleotide
  Sense strand starting at position 277 of SEQ ID NO: 1243953
gaaguagggagcugauuaa

SEQ ID NO: 1453851 - RNA, 19 nt, Artificial Sequence
  Description of Artificial Sequence: Synthetic oligonucleotide
  Antisense strand to SEQ ID NO: 1453850
uuaaucagcucccuacuuc

SEQ ID NO: 1453852 - RNA, 19 nt, Artificial Sequence
  Description of Artificial Sequence: Synthetic oligonucleotide
  Sense strand starting at position 421 of SEQ ID NO: 1243953
gugaaaguggcauaucaug

SEQ ID NO: 1453853 - RNA, 19 nt, Artificial Sequence
  Description of Artificial Sequence: Synthetic oligonucleotide
  Antisense strand to SEQ ID NO: 1453852
caugauaugccacuuucac

SEQ ID NO: 1453854 - RNA, 19 nt, Artificial Sequence
  Description of Artificial Sequence: Synthetic oligonucleotide
  Sense strand starting at position 468 of SEQ ID NO: 1243953
uggcuuguacucugaagga

SEQ ID NO: 1453855 - RNA, 19 nt, Artificial Sequence
  Description of Artificial Sequence: Synthetic oligonucleotide
  Antisense strand to SEQ ID NO: 1453854
uccuucagaguacaagcca

SEQ ID NO: 1453856 - RNA, 19 nt, Artificial Sequence
  Description of Artificial Sequence: Synthetic oligonucleotide
  Sense strand starting at position 486 of SEQ ID NO: 1243953
agugacaagcauugaaaga

SEQ ID NO: 1453857 - RNA, 19 nt, Artificial Sequence
  Description of Artificial Sequence: Synthetic oligonucleotide
  Antisense strand to SEQ ID NO: 1453856
ucuuucaaugcuugucacu

SEQ ID NO: 1453858 - RNA, 19 nt, Artificial Sequence
  Description of Artificial Sequence: Synthetic oligonucleotide
  Sense strand starting at position 512 of SEQ ID NO: 1243953
ggagaaggauuacauaauc

SEQ ID NO: 1453859 - RNA, 19 nt, Artificial Sequence
  Description of Artificial Sequence: Synthetic oligonucleotide
  Antisense strand to SEQ ID NO: 1453858
gauuauguaauccuucucc

SEQ ID NO: 1453860 - RNA, 19 nt, Artificial Sequence
  Description of Artificial Sequence: Synthetic oligonucleotide
  Sense strand starting at position 528 of SEQ ID NO: 1243953
aucugaaguucuuucugaa

SEQ ID NO: 1453861 - RNA, 19 nt, Artificial Sequence
  Description of Artificial Sequence: Synthetic oligonucleotide
  Antisense strand to SEQ ID NO: 1453860
uucagaaagaacuucagau

SEQ ID NO: 1453862 - RNA, 19 nt, Artificial Sequence
  Description of Artificial Sequence: Synthetic oligonucleotide
  Sense strand starting at position 945 of SEQ ID NO: 1243953
ggcgguuaagaucaguacu

SEQ ID NO: 1453863 - RNA, 19 nt, Artificial Sequence
  Description of Artificial Sequence: Synthetic oligonucleotide
  Antisense strand to SEQ ID NO: 1453862
aguacugaucuuaaccgcc

SEQ ID NO: 1453864 - RNA, 19 nt, Artificial Sequence
  Description of Artificial Sequence: Synthetic oligonucleotide
  Sense strand starting at position 947 of SEQ ID NO: 1243953
cgguuaagaucaguacuga

SEQ ID NO: 1453865 - RNA, 19 nt, Artificial Sequence
  Description of Artificial Sequence: Synthetic oligonucleotide
  Antisense strand to SEQ ID NO: 1453864
ucaguacugaucuuaaccg

SEQ ID NO: 1453866 - RNA, 19 nt, Artificial Sequence
  Description of Artificial Sequence: Synthetic oligonucleotide
  Sense strand starting at position 1038 of SEQ ID NO: 1243953
gagacaaugucgucagagu

SEQ ID NO: 1453867 - RNA, 19 nt, Artificial Sequence
  Description of Artificial Sequence: Synthetic oligonucleotide
  Antisense strand to SEQ ID NO: 1453866
acucugacgacauugucuc

SEQ ID NO: 1453868 - RNA, 19 nt, Artificial Sequence
  Description of Artificial Sequence: Synthetic oligonucleotide
  Sense strand starting at position 1039 of SEQ ID NO: 1243953
agacaaugucgucagagug

SEQ ID NO: 1453869 - RNA, 19 nt, Artificial Sequence
  Description of Artificial Sequence: Synthetic oligonucleotide
  Antisense strand to SEQ ID NO: 1453868
cacucugacgacauugucu

SEQ ID NO: 1453870 - RNA, 19 nt, Artificial Sequence
  Description of Artificial Sequence: Synthetic oligonucleotide
  Sense strand starting at position 1117 of SEQ ID NO: 1243953
ggaguuacguuguuaagag

SEQ ID NO: 1453871 - RNA, 19 nt, Artificial Sequence
  Description of Artificial Sequence: Synthetic oligonucleotide
  Antisense strand to SEQ ID NO: 1453870
cucuuaacaacguaacucc

SEQ ID NO: 1453872 - RNA, 19 nt, Artificial Sequence
  Description of Artificial Sequence: Synthetic oligonucleotide
  Sense strand starting at position 1208 of SEQ ID NO: 1243953
gaagcaugacucuguauga

SEQ ID NO: 1453873 - RNA, 19 nt, Artificial Sequence
  Description of Artificial Sequence: Synthetic oligonucleotide
  Antisense strand to SEQ ID NO: 1453872
ucauacagagucaugcuuc

SEQ ID NO: 1453874 - RNA, 19 nt, Artificial Sequence
  Description of Artificial Sequence: Synthetic oligonucleotide
  Sense strand starting at position 1415 of SEQ ID NO: 1243953
guaacaaacgucgagugaa

SEQ ID NO: 1453875 - RNA, 19 nt, Artificial Sequence
  Description of Artificial Sequence: Synthetic oligonucleotide
  Antisense strand to SEQ ID NO: 1453874
uucacucgacguuuguuac

SEQ ID NO: 1453876 - RNA, 19 nt, Artificial Sequence
  Description of Artificial Sequence: Synthetic oligonucleotide
  Sense strand starting at position 1553 of SEQ ID NO: 1243953
gcaagauggaaaugagugu

SEQ ID NO: 1453877 - RNA, 19 nt, Artificial Sequence
  Description of Artificial Sequence: Synthetic oligonucleotide
  Antisense strand to SEQ ID NO: 1453876
acacucauuuccaucuugc

SEQ ID NO: 1453878 - RNA, 19 nt, Artificial Sequence
  Description of Artificial Sequence: Synthetic oligonucleotide
  Sense strand starting at position 1557 of SEQ ID NO: 1243953
gauggaaaugagugugcua

SEQ ID NO: 1453879 - RNA, 19 nt, Artificial Sequence
  Description of Artificial Sequence: Synthetic oligonucleotide
  Antisense strand to SEQ ID NO: 1453878
uagcacacucauuuccauc

SEQ ID NO: 1453880 - RNA, 19 nt, Artificial Sequence
  Description of Artificial Sequence: Synthetic oligonucleotide
  Sense strand starting at position 1559 of SEQ ID NO: 1243953
uggaaaugagugugcuaau

SEQ ID NO: 1453881 - RNA, 19 nt, Artificial Sequence
  Description of Artificial Sequence: Synthetic oligonucleotide
  Antisense strand to SEQ ID NO: 1453880
auuagcacacucauuucca

SEQ ID NO: 1453882 - RNA, 19 nt, Artificial Sequence
  Description of Artificial Sequence: Synthetic oligonucleotide
  Sense strand starting at position 1560 of SEQ ID NO: 1243953
ggaaaugagugugcuaaua

SEQ ID NO: 1453883 - RNA, 19 nt, Artificial Sequence
  Description of Artificial Sequence: Synthetic oligonucleotide
  Antisense strand to SEQ ID NO: 1453882
uauuagcacacucauuucc

SEQ ID NO: 1453884 - RNA, 19 nt, Artificial Sequence
  Description of Artificial Sequence: Synthetic oligonucleotide
  Sense strand starting at position 2490 of SEQ ID NO: 1243953
ucugcuacucaauaaugga

SEQ ID NO: 1453885 - RNA, 19 nt, Artificial Sequence
  Description of Artificial Sequence: Synthetic oligonucleotide
  Antisense strand to SEQ ID NO: 1453884
uccauuauugaguagcaga

SEQ ID NO: 1453886 - RNA, 19 nt, Artificial Sequence
  Description of Artificial Sequence: Synthetic oligonucleotide
  Sense strand starting at position 2542 of SEQ ID NO: 1243953
gcugaaauuugucucgggu

SEQ ID NO: 1453887 - RNA, 19 nt, Artificial Sequence
  Description of Artificial Sequence: Synthetic oligonucleotide
  Antisense strand to SEQ ID NO: 1453886
acccgagacaaauuucagc

SEQ ID NO: 1453888 - RNA, 19 nt, Artificial Sequence
  Description of Artificial Sequence: Synthetic oligonucleotide
  Sense strand starting at position 2593 of SEQ ID NO: 1243953
agagauacuuugguugguu

SEQ ID NO: 1453889 - RNA, 19 nt, Artificial Sequence
  Description of Artificial Sequence: Synthetic oligonucleotide
  Antisense strand to SEQ ID NO: 1453888
aaccaaccaaaguaucucu

SEQ ID NO: 1453890 - RNA, 19 nt, Artificial Sequence
  Description of Artificial Sequence: Synthetic oligonucleotide
  Sense strand starting at position 2594 of SEQ ID NO: 1243953
gagauacuuugguugguuu

SEQ ID NO: 1453891 - RNA, 19 nt, Artificial Sequence
  Description of Artificial Sequence: Synthetic oligonucleotide
  Antisense strand to SEQ ID NO: 1453890
aaaccaaccaaaguaucuc

SEQ ID NO: 1453892 - RNA, 19 nt, Artificial Sequence
  Description of Artificial Sequence: Synthetic oligonucleotide
  Sense strand starting at position 2643 of SEQ ID NO: 1243953
guauuuaucguaugcaguu

SEQ ID NO: 1453893 - RNA, 19 nt, Artificial Sequence
  Description of Artificial Sequence: Synthetic oligonucleotide
  Antisense strand to SEQ ID NO: 1453892
aacugcauacgauaaauac

SEQ ID NO: 1453894 - RNA, 19 nt, Artificial Sequence
  Description of Artificial Sequence: Synthetic oligonucleotide
  Sense strand starting at position 2733 of SEQ ID NO: 1243953
auacguagugcucaauaaa

SEQ ID NO: 1453895 - RNA, 19 nt, Artificial Sequence
  Description of Artificial Sequence: Synthetic oligonucleotide
  Antisense strand to SEQ ID NO: 1453894
uuuauugagcacuacguau

SEQ ID NO: 1453896 - RNA, 19 nt, Artificial Sequence
  Description of Artificial Sequence: Synthetic oligonucleotide
  Sense strand starting at position 2815 of SEQ ID NO: 1243953
guaggcauucuuuaauauu

SEQ ID NO: 1453897 - RNA, 19 nt, Artificial Sequence
  Description of Artificial Sequence: Synthetic oligonucleotide
  Antisense strand to SEQ ID NO: 1453896
aauauuaaagaaugccuac

SEQ ID NO: 1453898 - RNA, 19 nt, Artificial Sequence
  Description of Artificial Sequence: Synthetic oligonucleotide
  Sense strand starting at position 3041 of SEQ ID NO: 1243953
agcuauagucaccacacua

SEQ ID NO: 1453899 - RNA, 19 nt, Artificial Sequence
  Description of Artificial Sequence: Synthetic oligonucleotide
  Antisense strand to SEQ ID NO: 1453898
uaguguggugacuauagcu

SEQ ID NO: 1453900 - RNA, 19 nt, Artificial Sequence
  Description of Artificial Sequence: Synthetic oligonucleotide
  Sense strand starting at position 3402 of SEQ ID NO: 1243953
guauccauugcauauguuu

SEQ ID NO: 1453901 - RNA, 19 nt, Artificial Sequence
  Description of Artificial Sequence: Synthetic oligonucleotide
  Antisense strand to SEQ ID NO: 1453900
aaacauaugcaauggauac

SEQ ID NO: 1453902 - RNA, 19 nt, Artificial Sequence
  Description of Artificial Sequence: Synthetic oligonucleotide
  Sense strand starting at position 3408 of SEQ ID NO: 1243953
auugcauauguuuacuaca

SEQ ID NO: 1453903 - RNA, 19 nt, Artificial Sequence
  Description of Artificial Sequence: Synthetic oligonucleotide
  Antisense strand to SEQ ID NO: 1453902
uguaguaaacauaugcaau

SEQ ID NO: 1453904 - RNA, 19 nt, Artificial Sequence
  Description of Artificial Sequence: Synthetic oligonucleotide
  Sense strand starting at position 3454 of SEQ ID NO: 1243953
gacacagguugauuccauu

SEQ ID NO: 1453905 - RNA, 19 nt, Artificial Sequence
  Description of Artificial Sequence: Synthetic oligonucleotide
  Antisense strand to SEQ ID NO: 1453904
aauggaaucaaccuguguc

SEQ ID NO: 1453906 - RNA, 19 nt, Artificial Sequence
  Description of Artificial Sequence: Synthetic oligonucleotide
  Sense strand starting at position 3460 of SEQ ID NO: 1243953
gguugauuccauuaucuca

SEQ ID NO: 1453907 - RNA, 19 nt, Artificial Sequence
  Description of Artificial Sequence: Synthetic oligonucleotide
  Antisense strand to SEQ ID NO: 1453906
ugagauaauggaaucaacc

SEQ ID NO: 1453908 - RNA, 19 nt, Artificial Sequence
  Description of Artificial Sequence: Synthetic oligonucleotide
  Sense strand starting at position 3485 of SEQ ID NO: 1243953
gugcauaaugcugaaauga

SEQ ID NO: 1453909 - RNA, 19 nt, Artificial Sequence
  Description of Artificial Sequence: Synthetic oligonucleotide
  Antisense strand to SEQ ID NO: 1453908
ucauuucagcauuaugcac

SEQ ID NO: 1453910 - RNA, 19 nt, Artificial Sequence
  Description of Artificial Sequence: Synthetic oligonucleotide
  Sense strand starting at position 3514 of SEQ ID NO: 1243953
gcaaauaagucuuugauau

SEQ ID NO: 1453911 - RNA, 19 nt, Artificial Sequence
  Description of Artificial Sequence: Synthetic oligonucleotide
  Antisense strand to SEQ ID NO: 1453910
auaucaaagacuuauuugc

SEQ ID NO: 1453912 - RNA, 19 nt, Artificial Sequence
  Description of Artificial Sequence: Synthetic oligonucleotide
  Sense strand starting at position 3562 of SEQ ID NO: 1243953
gaaauagcaucgcuggauc

SEQ ID NO: 1453913 - RNA, 19 nt, Artificial Sequence
  Description of Artificial Sequence: Synthetic oligonucleotide
  Antisense strand to SEQ ID NO: 1453912
gauccagcgaugcuauuuc

SEQ ID NO: 1453914 - RNA, 19 nt, Artificial Sequence
  Description of Artificial Sequence: Synthetic oligonucleotide
  Sense strand starting at position 3565 of SEQ ID NO: 1243953
auagcaucgcuggaucaua

SEQ ID NO: 1453915 - RNA, 19 nt, Artificial Sequence
  Description of Artificial Sequence: Synthetic oligonucleotide
  Antisense strand to SEQ ID NO: 1453914
uaugauccagcgaugcuau

SEQ ID NO: 1453916 - RNA, 19 nt, Artificial Sequence
  Description of Artificial Sequence: Synthetic oligonucleotide
  Sense strand starting at position 3629 of SEQ ID NO: 1243953
ccauaauggcuguaauaac

SEQ ID NO: 1453917 - RNA, 19 nt, Artificial Sequence
  Description of Artificial Sequence: Synthetic oligonucleotide
  Antisense strand to SEQ ID NO: 1453916
guuauuacagccauuaugg

SEQ ID NO: 1453918 - RNA, 19 nt, Artificial Sequence
  Description of Artificial Sequence: Synthetic oligonucleotide
  Sense strand starting at position 3947 of SEQ ID NO: 1243953
acgccugacccucaaguaa

SEQ ID NO: 1453919 - RNA, 19 nt, Artificial Sequence
  Description of Artificial Sequence: Synthetic oligonucleotide
  Antisense strand to SEQ ID NO: 1453918
uuacuugagggucaggcgu

SEQ ID NO: 1453920 - RNA, 19 nt, Artificial Sequence
  Description of Artificial Sequence: Synthetic oligonucleotide
  Sense strand starting at position 128 of SEQ ID NO: 1243954
cguagagaaagcgaaguau

SEQ ID NO: 1453921 - RNA, 19 nt, Artificial Sequence
  Description of Artificial Sequence: Synthetic oligonucleotide
  Antisense strand to SEQ ID NO: 1453920
auacuucgcuuucucuacg

SEQ ID NO: 1453922 - RNA, 19 nt, Artificial Sequence
  Description of Artificial Sequence: Synthetic oligonucleotide
  Sense strand starting at position 132 of SEQ ID NO: 1243954
gagaaagcgaaguaugucu

SEQ ID NO: 1453923 - RNA, 19 nt, Artificial Sequence
  Description of Artificial Sequence: Synthetic oligonucleotide
  Antisense strand to SEQ ID NO: 1453922
agacauacuucgcuuucuc

SEQ ID NO: 1453924 - RNA, 19 nt, Artificial Sequence
  Description of Artificial Sequence: Synthetic oligonucleotide
  Sense strand starting at position 180 of SEQ ID NO: 1243954
uaguauagggccugacaua

SEQ ID NO: 1453925 - RNA, 19 nt, Artificial Sequence
  Description of Artificial Sequence: Synthetic oligonucleotide
  Antisense strand to SEQ ID NO: 1453924
uaugucaggcccuauacua

SEQ ID NO: 1453926 - RNA, 19 nt, Artificial Sequence
  Description of Artificial Sequence: Synthetic oligonucleotide
  Sense strand starting at position 181 of SEQ ID NO: 1243954
aguauagggccugacauau

SEQ ID NO: 1453927 - RNA, 19 nt, Artificial Sequence
  Description of Artificial Sequence: Synthetic oligonucleotide
  Antisense strand to SEQ ID NO: 1453926
auaugucaggcccuauacu

SEQ ID NO: 1453928 - RNA, 19 nt, Artificial Sequence
  Description of Artificial Sequence: Synthetic oligonucleotide
  Sense strand starting at position 410 of SEQ ID NO: 1243954
gugaguaagccauguaaau

SEQ ID NO: 1453929 - RNA, 19 nt, Artificial Sequence
  Description of Artificial Sequence: Synthetic oligonucleotide
  Antisense strand to SEQ ID NO: 1453928
auuuacauggcuuacucac

SEQ ID NO: 1453930 - RNA, 19 nt, Artificial Sequence
  Description of Artificial Sequence: Synthetic oligonucleotide
  Sense strand starting at position 493 of SEQ ID NO: 1243954
guguaucucuuccuaauac

SEQ ID NO: 1453931 - RNA, 19 nt, Artificial Sequence
  Description of Artificial Sequence: Synthetic oligonucleotide
  Antisense strand to SEQ ID NO: 1453930
guauuaggaagagauacac

SEQ ID NO: 1453932 - RNA, 19 nt, Artificial Sequence
  Description of Artificial Sequence: Synthetic oligonucleotide
  Sense strand starting at position 590 of SEQ ID NO: 1243954
uagcauauugguuguauuu

SEQ ID NO: 1453933 - RNA, 19 nt, Artificial Sequence
  Description of Artificial Sequence: Synthetic oligonucleotide
  Antisense strand to SEQ ID NO: 1453932
aaauacaaccaauaugcua

SEQ ID NO: 1453934 - RNA, 19 nt, Artificial Sequence
  Description of Artificial Sequence: Synthetic oligonucleotide
  Sense strand starting at position 596 of SEQ ID NO: 1243954
auugguuguauuugugauu

SEQ ID NO: 1453935 - RNA, 19 nt, Artificial Sequence
  Description of Artificial Sequence: Synthetic oligonucleotide
  Antisense strand to SEQ ID NO: 1453934
aaucacaaauacaaccaau

SEQ ID NO: 1453936 - RNA, 19 nt, Artificial Sequence
  Description of Artificial Sequence: Synthetic oligonucleotide
  Sense strand starting at position 599 of SEQ ID NO: 1243954
gguuguauuugugauuuaa

SEQ ID NO: 1453937 - RNA, 19 nt, Artificial Sequence
  Description of Artificial Sequence: Synthetic oligonucleotide
  Antisense strand to SEQ ID NO: 1453936
uuaaaucacaaauacaacc

SEQ ID NO: 1453938 - RNA, 19 nt, Artificial Sequence
  Description of Artificial Sequence: Synthetic oligonucleotide
  Sense strand starting at position 944 of SEQ ID NO: 1243954
gcaagucaggcacaaucuu

SEQ ID NO: 1453939 - RNA, 19 nt, Artificial Sequence
  Description of Artificial Sequence: Synthetic oligonucleotide
  Antisense strand to SEQ ID NO: 1453938
aagauugugccugacuugc

SEQ ID NO: 1453940 - RNA, 19 nt, Artificial Sequence
  Description of Artificial Sequence: Synthetic oligonucleotide
  Sense strand starting at position 1265 of SEQ ID NO: 1243954
acgccuggauaauuaaauu

SEQ ID NO: 1453941 - RNA, 19 nt, Artificial Sequence
  Description of Artificial Sequence: Synthetic oligonucleotide
  Antisense strand to SEQ ID NO: 1453940
aauuuaauuauccaggcgu

SEQ ID NO: 1453942 - RNA, 19 nt, Artificial Sequence
  Description of Artificial Sequence: Synthetic oligonucleotide
  Sense strand starting at position 1322 of SEQ ID NO: 1243954
cagacugaucuugagcuuu

SEQ ID NO: 1453943 - RNA, 19 nt, Artificial Sequence
  Description of Artificial Sequence: Synthetic oligonucleotide
  Antisense strand to SEQ ID NO: 1453942
aaagcucaagaucagucug

SEQ ID NO: 1453944 - RNA, 19 nt, Artificial Sequence
  Description of Artificial Sequence: Synthetic oligonucleotide
  Sense strand starting at position 1499 of SEQ ID NO: 1243954
aaggaucauuucugaggau

SEQ ID NO: 1453945 - RNA, 19 nt, Artificial Sequence
  Description of Artificial Sequence: Synthetic oligonucleotide
  Antisense strand to SEQ ID NO: 1453944
auccucagaaaugauccuu

SEQ ID NO: 1453946 - RNA, 19 nt, Artificial Sequence
  Description of Artificial Sequence: Synthetic oligonucleotide
  Sense strand starting at position 1500 of SEQ ID NO: 1243954
aggaucauuucugaggaug

SEQ ID NO: 1453947 - RNA, 19 nt, Artificial Sequence
  Description of Artificial Sequence: Synthetic oligonucleotide
  Antisense strand to SEQ ID NO: 1453946
cauccucagaaaugauccu

SEQ ID NO: 1453948 - RNA, 19 nt, Artificial Sequence
  Description of Artificial Sequence: Synthetic oligonucleotide
  Sense strand starting at position 1888 of SEQ ID NO: 1243954
acaccucaccguuaaaugu

SEQ ID NO: 1453949 - RNA, 19 nt, Artificial Sequence
  Description of Artificial Sequence: Synthetic oligonucleotide
  Antisense strand to SEQ ID NO: 1453948
acauuuaacggugaggugu

SEQ ID NO: 1453950 - RNA, 19 nt, Artificial Sequence
  Description of Artificial Sequence: Synthetic oligonucleotide
  Sense strand starting at position 2059 of SEQ ID NO: 1243954
agaacacuaucugugcuua

SEQ ID NO: 1453951 - RNA, 19 nt, Artificial Sequence
  Description of Artificial Sequence: Synthetic oligonucleotide
  Antisense strand to SEQ ID NO: 1453950
uaagcacagauaguguucu

SEQ ID NO: 1453952 - RNA, 19 nt, Artificial Sequence
  Description of Artificial Sequence: Synthetic oligonucleotide
  Sense strand starting at position 2096 of SEQ ID NO: 1243954
auaggagaaucagaaacaa

SEQ ID NO: 1453953 - RNA, 19 nt, Artificial Sequence
  Description of Artificial Sequence: Synthetic oligonucleotide
  Antisense strand to SEQ ID NO: 1453952
uuguuucugauucuccuau

SEQ ID NO: 1453954 - RNA, 19 nt, Artificial Sequence
  Description of Artificial Sequence: Synthetic oligonucleotide
  Sense strand starting at position 2429 of SEQ ID NO: 1243954
auaaacauguuuccaaguu

SEQ ID NO: 1453955 - RNA, 19 nt, Artificial Sequence
  Description of Artificial Sequence: Synthetic oligonucleotide
  Antisense strand to SEQ ID NO: 1453954
aacuuggaaacauguuuau

SEQ ID NO: 1453956 - RNA, 19 nt, Artificial Sequence
  Description of Artificial Sequence: Synthetic oligonucleotide
  Sense strand starting at position 2494 of SEQ ID NO: 1243954
acugacauaccaugguuua

SEQ ID NO: 1453957 - RNA, 19 nt, Artificial Sequence
  Description of Artificial Sequence: Synthetic oligonucleotide
  Antisense strand to SEQ ID NO: 1453956
uaaaccaugguaugucagu

SEQ ID NO: 1453958 - RNA, 19 nt, Artificial Sequence
  Description of Artificial Sequence: Synthetic oligonucleotide
  Sense strand starting at position 2495 of SEQ ID NO: 1243954
cugacauaccaugguuuau

SEQ ID NO: 1453959 - RNA, 19 nt, Artificial Sequence
  Description of Artificial Sequence: Synthetic oligonucleotide
  Antisense strand to SEQ ID NO: 1453958
auaaaccaugguaugucag

SEQ ID NO: 1453960 - RNA, 19 nt, Artificial Sequence
  Description of Artificial Sequence: Synthetic oligonucleotide
  Sense strand starting at position 2497 of SEQ ID NO: 1243954
gacauaccaugguuuaugu

SEQ ID NO: 1453961 - RNA, 19 nt, Artificial Sequence
  Description of Artificial Sequence: Synthetic oligonucleotide
  Antisense strand to SEQ ID NO: 1453960
acauaaaccaugguauguc

SEQ ID NO: 1453962 - RNA, 19 nt, Artificial Sequence
  Description of Artificial Sequence: Synthetic oligonucleotide
  Sense strand starting at position 2515 of SEQ ID NO: 1243954
uaguaauuccuguaugguu

SEQ ID NO: 1453963 - RNA, 19 nt, Artificial Sequence
  Description of Artificial Sequence: Synthetic oligonucleotide
  Antisense strand to SEQ ID NO: 1453962
aaccauacaggaauuacua

SEQ ID NO: 1453964 - RNA, 19 nt, Artificial Sequence
  Description of Artificial Sequence: Synthetic oligonucleotide
  Sense strand starting at position 2520 of SEQ ID NO: 1243954
auuccuguaugguuagaua

SEQ ID NO: 1453965 - RNA, 19 nt, Artificial Sequence
  Description of Artificial Sequence: Synthetic oligonucleotide
  Antisense strand to SEQ ID NO: 1453964
uaucuaaccauacaggaau

SEQ ID NO: 1453966 - RNA, 19 nt, Artificial Sequence
  Description of Artificial Sequence: Synthetic oligonucleotide
  Sense strand starting at position 2531 of SEQ ID NO: 1243954
guuagauauuucuaaucug

SEQ ID NO: 1453967 - RNA, 19 nt, Artificial Sequence
  Description of Artificial Sequence: Synthetic oligonucleotide
  Antisense strand to SEQ ID NO: 1453966
cagauuagaaauaucuaac

SEQ ID NO: 1453968 - RNA, 19 nt, Artificial Sequence
  Description of Artificial Sequence: Synthetic oligonucleotide
  Sense strand starting at position 2561 of SEQ ID NO: 1243954
ucacaauuaugagaaugaa

SEQ ID NO: 1453969 - RNA, 19 nt, Artificial Sequence
  Description of Artificial Sequence: Synthetic oligonucleotide
  Antisense strand to SEQ ID NO: 1453968
uucauucucauaauuguga

SEQ ID NO: 1453970 - RNA, 19 nt, Artificial Sequence
  Description of Artificial Sequence: Synthetic oligonucleotide
  Sense strand starting at position 2591 of SEQ ID NO: 1243954
aggauaaauuucuaagacu

SEQ ID NO: 1453971 - RNA, 19 nt, Artificial Sequence
  Description of Artificial Sequence: Synthetic oligonucleotide
  Antisense strand to SEQ ID NO: 1453970
agucuuagaaauuuauccu

SEQ ID NO: 1453972 - RNA, 19 nt, Artificial Sequence
  Description of Artificial Sequence: Synthetic oligonucleotide
  Sense strand starting at position 2645 of SEQ ID NO: 1243954
ggcucuugauaucuauuac

SEQ ID NO: 1453973 - RNA, 19 nt, Artificial Sequence
  Description of Artificial Sequence: Synthetic oligonucleotide
  Antisense strand to SEQ ID NO: 1453972
guaauagauaucaagagcc

SEQ ID NO: 1453974 - RNA, 19 nt, Artificial Sequence
  Description of Artificial Sequence: Synthetic oligonucleotide
  Sense strand starting at position 2701 of SEQ ID NO: 1243954
uaguaugggcacugauaua

SEQ ID NO: 1453975 - RNA, 19 nt, Artificial Sequence
  Description of Artificial Sequence: Synthetic oligonucleotide
  Antisense strand to SEQ ID NO: 1453974
uauaucagugcccauacua

SEQ ID NO: 1453976 - RNA, 19 nt, Artificial Sequence
  Description of Artificial Sequence: Synthetic oligonucleotide
  Sense strand starting at position 2873 of SEQ ID NO: 1243954
aauggaacauacguuauau

SEQ ID NO: 1453977 - RNA, 19 nt, Artificial Sequence
  Description of Artificial Sequence: Synthetic oligonucleotide
  Antisense strand to SEQ ID NO: 1453976
auauaacguauguuccauu

SEQ ID NO: 1453978 - RNA, 19 nt, Artificial Sequence
  Description of Artificial Sequence: Synthetic oligonucleotide
  Sense strand starting at position 2986 of SEQ ID NO: 1243954
gcaacucacccuugaugua

SEQ ID NO: 1453979 - RNA, 19 nt, Artificial Sequence
  Description of Artificial Sequence: Synthetic oligonucleotide
  Antisense strand to SEQ ID NO: 1453978
uacaucaagggugaguugc

SEQ ID NO: 1453980 - RNA, 19 nt, Artificial Sequence
  Description of Artificial Sequence: Synthetic oligonucleotide
  Sense strand starting at position 3108 of SEQ ID NO: 1243954
acauuaaugcugugugaag

SEQ ID NO: 1453981 - RNA, 19 nt, Artificial Sequence
  Description of Artificial Sequence: Synthetic oligonucleotide
  Antisense strand to SEQ ID NO: 1453980
cuucacacagcauuaaugu

SEQ ID NO: 1453982 - RNA, 19 nt, Artificial Sequence
  Description of Artificial Sequence: Synthetic oligonucleotide
  Sense strand starting at position 3494 of SEQ ID NO: 1243954
cuuagaauuguauggacuu

SEQ ID NO: 1453983 - RNA, 19 nt, Artificial Sequence
  Description of Artificial Sequence: Synthetic oligonucleotide
  Antisense strand to SEQ ID NO: 1453982
aaguccauacaauucuaag

SEQ ID NO: 1453984 - RNA, 19 nt, Artificial Sequence
  Description of Artificial Sequence: Synthetic oligonucleotide
  Sense strand starting at position 3518 of SEQ ID NO: 1243954
cagagauaagaguguuauc

SEQ ID NO: 1453985 - RNA, 19 nt, Artificial Sequence
  Description of Artificial Sequence: Synthetic oligonucleotide
  Antisense strand to SEQ ID NO: 1453984
gauaacacucuuaucucug

SEQ ID NO: 1453986 - RNA, 19 nt, Artificial Sequence
  Description of Artificial Sequence: Synthetic oligonucleotide
  Sense strand starting at position 3523 of SEQ ID NO: 1243954
auaagaguguuaucuuaga

SEQ ID NO: 1453987 - RNA, 19 nt, Artificial Sequence
  Description of Artificial Sequence: Synthetic oligonucleotide
  Antisense strand to SEQ ID NO: 1453986
ucuaagauaacacucuuau

SEQ ID NO: 1453988 - RNA, 19 nt, Artificial Sequence
  Description of Artificial Sequence: Synthetic oligonucleotide
  Sense strand starting at position 3604 of SEQ ID NO: 1243954
ccaccagaguggucuaaau

SEQ ID NO: 1453989 - RNA, 19 nt, Artificial Sequence
  Description of Artificial Sequence: Synthetic oligonucleotide
  Antisense strand to SEQ ID NO: 1453988
auuuagaccacucuggugg

SEQ ID NO: 1453990 - RNA, 19 nt, Artificial Sequence
  Description of Artificial Sequence: Synthetic oligonucleotide
  Sense strand starting at position 3622 of SEQ ID NO: 1243954
uuaagaagugauugguuac

SEQ ID NO: 1453991 - RNA, 19 nt, Artificial Sequence
  Description of Artificial Sequence: Synthetic oligonucleotide
  Antisense strand to SEQ ID NO: 1453990
guaaccaaucacuucuuaa

SEQ ID NO: 1453992 - RNA, 19 nt, Artificial Sequence
  Description of Artificial Sequence: Synthetic oligonucleotide
  Sense strand starting at position 3625 of SEQ ID NO: 1243954
agaagugauugguuacagu

SEQ ID NO: 1453993 - RNA, 19 nt, Artificial Sequence
  Description of Artificial Sequence: Synthetic oligonucleotide
  Antisense strand to SEQ ID NO: 1453992
acuguaaccaaucacuucu

SEQ ID NO: 1453994 - RNA, 19 nt, Artificial Sequence
  Description of Artificial Sequence: Synthetic oligonucleotide
  Sense strand starting at position 3790 of SEQ ID NO: 1243954
gcucuuaaggaguguacaa

SEQ ID NO: 1453995 - RNA, 19 nt, Artificial Sequence
  Description of Artificial Sequence: Synthetic oligonucleotide
  Antisense strand to SEQ ID NO: 1453994
uuguacacuccuuaagagc

SEQ ID NO: 1453996 - RNA, 19 nt, Artificial Sequence
  Description of Artificial Sequence: Synthetic oligonucleotide
  Sense strand starting at position 3847 of SEQ ID NO: 1243954
aggauaauuugauguacug

SEQ ID NO: 1453997 - RNA, 19 nt, Artificial Sequence
  Description of Artificial Sequence: Synthetic oligonucleotide
  Antisense strand to SEQ ID NO: 1453996
caguacaucaaauuauccu

SEQ ID NO: 1453998 - RNA, 19 nt, Artificial Sequence
  Description of Artificial Sequence: Synthetic oligonucleotide
  Sense strand starting at position 3973 of SEQ ID NO: 1243954
uggguugaaggcugaauga

SEQ ID NO: 1453999 - RNA, 19 nt, Artificial Sequence
  Description of Artificial Sequence: Synthetic oligonucleotide
  Antisense strand to SEQ ID NO: 1453998
ucauucagccuucaaccca

SEQ ID NO: 1454000 - RNA, 19 nt, Artificial Sequence
  Description of Artificial Sequence: Synthetic oligonucleotide
  Sense strand starting at position 63 of SEQ ID NO: 1243955
uguaauguauaccugaaau

SEQ ID NO: 1454001 - RNA, 19 nt, Artificial Sequence
  Description of Artificial Sequence: Synthetic oligonucleotide
  Antisense strand to SEQ ID NO: 1454000
auuucagguauacauuaca

SEQ ID NO: 1454002 - RNA, 19 nt, Artificial Sequence
  Description of Artificial Sequence: Synthetic oligonucleotide
  Sense strand starting at position 92 of SEQ ID NO: 1243955
auuagauccuaaguguucu

SEQ ID NO: 1454003 - RNA, 19 nt, Artificial Sequence
  Description of Artificial Sequence: Synthetic oligonucleotide
  Antisense strand to SEQ ID NO: 1454002
agaacacuuaggaucuaau

SEQ ID NO: 1454004 - RNA, 19 nt, Artificial Sequence
  Description of Artificial Sequence: Synthetic oligonucleotide
  Sense strand starting at position 174 of SEQ ID NO: 1243955
gauuguggugauuguuuaa

SEQ ID NO: 1454005 - RNA, 19 nt, Artificial Sequence
  Description of Artificial Sequence: Synthetic oligonucleotide
  Antisense strand to SEQ ID NO: 1454004
uuaaacaaucaccacaauc

SEQ ID NO: 1454006 - RNA, 19 nt, Artificial Sequence
  Description of Artificial Sequence: Synthetic oligonucleotide
  Sense strand starting at position 177 of SEQ ID NO: 1243955
uguggugauuguuuaacaa

SEQ ID NO: 1454007 - RNA, 19 nt, Artificial Sequence
  Description of Artificial Sequence: Synthetic oligonucleotide
  Antisense strand to SEQ ID NO: 1454006
uuguuaaacaaucaccaca

SEQ ID NO: 1454008 - RNA, 19 nt, Artificial Sequence
  Description of Artificial Sequence: Synthetic oligonucleotide
  Sense strand starting at position 364 of SEQ ID NO: 1243955
guauuugccuacuuguuua

SEQ ID NO: 1454009 - RNA, 19 nt, Artificial Sequence
  Description of Artificial Sequence: Synthetic oligonucleotide
  Antisense strand to SEQ ID NO: 1454008
uaaacaaguaggcaaauac

SEQ ID NO: 1454010 - RNA, 19 nt, Artificial Sequence
  Description of Artificial Sequence: Synthetic oligonucleotide
  Sense strand starting at position 388 of SEQ ID NO: 1243955
uagauaccugccuaguagu

SEQ ID NO: 1454011 - RNA, 19 nt, Artificial Sequence
  Description of Artificial Sequence: Synthetic oligonucleotide
  Antisense strand to SEQ ID NO: 1454010
acuacuaggcagguaucua

SEQ ID NO: 1454012 - RNA, 19 nt, Artificial Sequence
  Description of Artificial Sequence: Synthetic oligonucleotide
  Sense strand starting at position 567 of SEQ ID NO: 1243955
ucgucugacucuuuggaca

SEQ ID NO: 1454013 - RNA, 19 nt, Artificial Sequence
  Description of Artificial Sequence: Synthetic oligonucleotide
  Antisense strand to SEQ ID NO: 1454012
uguccaaagagucagacga

SEQ ID NO: 1454014 - RNA, 19 nt, Artificial Sequence
  Description of Artificial Sequence: Synthetic oligonucleotide
  Sense strand starting at position 801 of SEQ ID NO: 1243955
uguccaggauccucuugau

SEQ ID NO: 1454015 - RNA, 19 nt, Artificial Sequence
  Description of Artificial Sequence: Synthetic oligonucleotide
  Antisense strand to SEQ ID NO: 1454014
aucaagaggauccuggaca

SEQ ID NO: 1454016 - RNA, 19 nt, Artificial Sequence
  Description of Artificial Sequence: Synthetic oligonucleotide
  Sense strand starting at position 963 of SEQ ID NO: 1243955
gguggucuugguuaacagu

SEQ ID NO: 1454017 - RNA, 19 nt, Artificial Sequence
  Description of Artificial Sequence: Synthetic oligonucleotide
  Antisense strand to SEQ ID NO: 1454016
acuguuaaccaagaccacc

SEQ ID NO: 1454018 - RNA, 19 nt, Artificial Sequence
  Description of Artificial Sequence: Synthetic oligonucleotide
  Sense strand starting at position 1025 of SEQ ID NO: 1243955
ccggaaggaacuugugaau

SEQ ID NO: 1454019 - RNA, 19 nt, Artificial Sequence
  Description of Artificial Sequence: Synthetic oligonucleotide
  Antisense strand to SEQ ID NO: 1454018
auucacaaguuccuuccgg

SEQ ID NO: 1454020 - RNA, 19 nt, Artificial Sequence
  Description of Artificial Sequence: Synthetic oligonucleotide
  Sense strand starting at position 1037 of SEQ ID NO: 1243955
ugugaauuaccgucgccuu

SEQ ID NO: 1454021 - RNA, 19 nt, Artificial Sequence
  Description of Artificial Sequence: Synthetic oligonucleotide
  Antisense strand to SEQ ID NO: 1454020
aaggcgacgguaauucaca

SEQ ID NO: 1454022 - RNA, 19 nt, Artificial Sequence
  Description of Artificial Sequence: Synthetic oligonucleotide
  Sense strand starting at position 1060 of SEQ ID NO: 1243955
cuuggcauaguuugagaaa

SEQ ID NO: 1454023 - RNA, 19 nt, Artificial Sequence
  Description of Artificial Sequence: Synthetic oligonucleotide
  Antisense strand to SEQ ID NO: 1454022
uuucucaaacuaugccaag

SEQ ID NO: 1454024 - RNA, 19 nt, Artificial Sequence
  Description of Artificial Sequence: Synthetic oligonucleotide
  Sense strand starting at position 1069 of SEQ ID NO: 1243955
guuugagaaacagggcuua

SEQ ID NO: 1454025 - RNA, 19 nt, Artificial Sequence
  Description of Artificial Sequence: Synthetic oligonucleotide
  Antisense strand to SEQ ID NO: 1454024
uaagcccuguuucucaaac

SEQ ID NO: 1454026 - RNA, 19 nt, Artificial Sequence
  Description of Artificial Sequence: Synthetic oligonucleotide
  Sense strand starting at position 1592 of SEQ ID NO: 1243955
cuagguugcugacuuagga

SEQ ID NO: 1454027 - RNA, 19 nt, Artificial Sequence
  Description of Artificial Sequence: Synthetic oligonucleotide
  Antisense strand to SEQ ID NO: 1454026
uccuaagucagcaaccuag

SEQ ID NO: 1454028 - RNA, 19 nt, Artificial Sequence
  Description of Artificial Sequence: Synthetic oligonucleotide
  Sense strand starting at position 1655 of SEQ ID NO: 1243955
ucugaauguuugguuagaa

SEQ ID NO: 1454029 - RNA, 19 nt, Artificial Sequence
  Description of Artificial Sequence: Synthetic oligonucleotide
  Antisense strand to SEQ ID NO: 1454028
uucuaaccaaacauucaga

SEQ ID NO: 1454030 - RNA, 19 nt, Artificial Sequence
  Description of Artificial Sequence: Synthetic oligonucleotide
  Sense strand starting at position 1656 of SEQ ID NO: 1243955
cugaauguuugguuagaau

SEQ ID NO: 1454031 - RNA, 19 nt, Artificial Sequence
  Description of Artificial Sequence: Synthetic oligonucleotide
  Antisense strand to SEQ ID NO: 1454030
auucuaaccaaacauucag

SEQ ID NO: 1454032 - RNA, 19 nt, Artificial Sequence
  Description of Artificial Sequence: Synthetic oligonucleotide
  Sense strand starting at position 1665 of SEQ ID NO: 1243955
ugguuagaauuugauccau

SEQ ID NO: 1454033 - RNA, 19 nt, Artificial Sequence
  Description of Artificial Sequence: Synthetic oligonucleotide
  Antisense strand to SEQ ID NO: 1454032
auggaucaaauucuaacca

SEQ ID NO: 1454034 - RNA, 19 nt, Artificial Sequence
  Description of Artificial Sequence: Synthetic oligonucleotide
  Sense strand starting at position 1711 of SEQ ID NO: 1243955
gaaagcaguuguuucuaaa

SEQ ID NO: 1454035 - RNA, 19 nt, Artificial Sequence
  Description of Artificial Sequence: Synthetic oligonucleotide
  Antisense strand to SEQ ID NO: 1454034
uuuagaaacaacugcuuuc

SEQ ID NO: 1454036 - RNA, 19 nt, Artificial Sequence
  Description of Artificial Sequence: Synthetic oligonucleotide
  Sense strand starting at position 1995 of SEQ ID NO: 1243955
caauaaaggguuuguucca

SEQ ID NO: 1454037 - RNA, 19 nt, Artificial Sequence
  Description of Artificial Sequence: Synthetic oligonucleotide
  Antisense strand to SEQ ID NO: 1454036
uggaacaaacccuuuauug

SEQ ID NO: 1454038 - RNA, 19 nt, Artificial Sequence
  Description of Artificial Sequence: Synthetic oligonucleotide
  Sense strand starting at position 1996 of SEQ ID NO: 1243955
aauaaaggguuuguuccau

SEQ ID NO: 1454039 - RNA, 19 nt, Artificial Sequence
  Description of Artificial Sequence: Synthetic oligonucleotide
  Antisense strand to SEQ ID NO: 1454038
auggaacaaacccuuuauu

SEQ ID NO: 1454040 - RNA, 19 nt, Artificial Sequence
  Description of Artificial Sequence: Synthetic oligonucleotide
  Sense strand starting at position 2122 of SEQ ID NO: 1243955
gcacccuugguguauauga

SEQ ID NO: 1454041 - RNA, 19 nt, Artificial Sequence
  Description of Artificial Sequence: Synthetic oligonucleotide
  Antisense strand to SEQ ID NO: 1454040
ucauauacaccaagggugc

SEQ ID NO: 1454042 - RNA, 19 nt, Artificial Sequence
  Description of Artificial Sequence: Synthetic oligonucleotide
  Sense strand starting at position 2130 of SEQ ID NO: 1243955
gguguauaugaggguauga

SEQ ID NO: 1454043 - RNA, 19 nt, Artificial Sequence
  Description of Artificial Sequence: Synthetic oligonucleotide
  Antisense strand to SEQ ID NO: 1454042
ucauacccucauauacacc

SEQ ID NO: 1454044 - RNA, 19 nt, Artificial Sequence
  Description of Artificial Sequence: Synthetic oligonucleotide
  Sense strand starting at position 2132 of SEQ ID NO: 1243955
uguauaugaggguaugauu

SEQ ID NO: 1454045 - RNA, 19 nt, Artificial Sequence
  Description of Artificial Sequence: Synthetic oligonucleotide
  Antisense strand to SEQ ID NO: 1454044
aaucauacccucauauaca

SEQ ID NO: 1454046 - RNA, 19 nt, Artificial Sequence
  Description of Artificial Sequence: Synthetic oligonucleotide
  Sense strand starting at position 2135 of SEQ ID NO: 1243955
auaugaggguaugauuuau

SEQ ID NO: 1454047 - RNA, 19 nt, Artificial Sequence
  Description of Artificial Sequence: Synthetic oligonucleotide
  Antisense strand to SEQ ID NO: 1454046
auaaaucauacccucauau

SEQ ID NO: 1454048 - RNA, 19 nt, Artificial Sequence
  Description of Artificial Sequence: Synthetic oligonucleotide
  Sense strand starting at position 2555 of SEQ ID NO: 1243955
ucaucagucaguugaaagu

SEQ ID NO: 1454049 - RNA, 19 nt, Artificial Sequence
  Description of Artificial Sequence: Synthetic oligonucleotide
  Antisense strand to SEQ ID NO: 1454048
acuuucaacugacugauga

SEQ ID NO: 1454050 - RNA, 19 nt, Artificial Sequence
  Description of Artificial Sequence: Synthetic oligonucleotide
  Sense strand starting at position 2634 of SEQ ID NO: 1243955
uuaauuguuuaagccuaga

SEQ ID NO: 1454051 - RNA, 19 nt, Artificial Sequence
  Description of Artificial Sequence: Synthetic oligonucleotide
  Antisense strand to SEQ ID NO: 1454050
ucuaggcuuaaacaauuaa

SEQ ID NO: 1454052 - RNA, 19 nt, Artificial Sequence
  Description of Artificial Sequence: Synthetic oligonucleotide
  Sense strand starting at position 2637 of SEQ ID NO: 1243955
auuguuuaagccuagaaag

SEQ ID NO: 1454053 - RNA, 19 nt, Artificial Sequence
  Description of Artificial Sequence: Synthetic oligonucleotide
  Antisense strand to SEQ ID NO: 1454052
cuuucuaggcuuaaacaau

SEQ ID NO: 1454054 - RNA, 19 nt, Artificial Sequence
  Description of Artificial Sequence: Synthetic oligonucleotide
  Sense strand starting at position 2674 of SEQ ID NO: 1243955
auaggcugucuuuaguauu

SEQ ID NO: 1454055 - RNA, 19 nt, Artificial Sequence
  Description of Artificial Sequence: Synthetic oligonucleotide
  Antisense strand to SEQ ID NO: 1454054
aauacuaaagacagccuau

SEQ ID NO: 1454056 - RNA, 19 nt, Artificial Sequence
  Description of Artificial Sequence: Synthetic oligonucleotide
  Sense strand starting at position 2682 of SEQ ID NO: 1243955
ucuuuaguauuauugggaa

SEQ ID NO: 1454057 - RNA, 19 nt, Artificial Sequence
  Description of Artificial Sequence: Synthetic oligonucleotide
  Antisense strand to SEQ ID NO: 1454056
uucccaauaauacuaaaga

SEQ ID NO: 1454058 - RNA, 19 nt, Artificial Sequence
  Description of Artificial Sequence: Synthetic oligonucleotide
  Sense strand starting at position 2772 of SEQ ID NO: 1243955
gucucauggcauuauaaau

SEQ ID NO: 1454059 - RNA, 19 nt, Artificial Sequence
  Description of Artificial Sequence: Synthetic oligonucleotide
  Antisense strand to SEQ ID NO: 1454058
auuuauaaugccaugagac

SEQ ID NO: 1454060 - RNA, 19 nt, Artificial Sequence
  Description of Artificial Sequence: Synthetic oligonucleotide
  Sense strand starting at position 2801 of SEQ ID NO: 1243955
aggaguuaggagugucuuu

SEQ ID NO: 1454061 - RNA, 19 nt, Artificial Sequence
  Description of Artificial Sequence: Synthetic oligonucleotide
  Antisense strand to SEQ ID NO: 1454060
aaagacacuccuaacuccu

SEQ ID NO: 1454062 - RNA, 19 nt, Artificial Sequence
  Description of Artificial Sequence: Synthetic oligonucleotide
  Sense strand starting at position 2812 of SEQ ID NO: 1243955
gugucuuuagucuaucaug

SEQ ID NO: 1454063 - RNA, 19 nt, Artificial Sequence
  Description of Artificial Sequence: Synthetic oligonucleotide
  Antisense strand to SEQ ID NO: 1454062
caugauagacuaaagacac

SEQ ID NO: 1454064 - RNA, 19 nt, Artificial Sequence
  Description of Artificial Sequence: Synthetic oligonucleotide
  Sense strand starting at position 2820 of SEQ ID NO: 1243955
agucuaucauggcuaagua

SEQ ID NO: 1454065 - RNA, 19 nt, Artificial Sequence
  Description of Artificial Sequence: Synthetic oligonucleotide
  Antisense strand to SEQ ID NO: 1454064
uacuuagccaugauagacu

SEQ ID NO: 1454066 - RNA, 19 nt, Artificial Sequence
  Description of Artificial Sequence: Synthetic oligonucleotide
  Sense strand starting at position 2859 of SEQ ID NO: 1243955
ggcuuagcuaguuauauag

SEQ ID NO: 1454067 - RNA, 19 nt, Artificial Sequence
  Description of Artificial Sequence: Synthetic oligonucleotide
  Antisense strand to SEQ ID NO: 1454066
cuauauaacuagcuaagcc

SEQ ID NO: 1454068 - RNA, 19 nt, Artificial Sequence
  Description of Artificial Sequence: Synthetic oligonucleotide
  Sense strand starting at position 2960 of SEQ ID NO: 1243955
ugagcauaauuugacuuua

SEQ ID NO: 1454069 - RNA, 19 nt, Artificial Sequence
  Description of Artificial Sequence: Synthetic oligonucleotide
  Antisense strand to SEQ ID NO: 1454068
uaaagucaaauuaugcuca

SEQ ID NO: 1454070 - RNA, 19 nt, Artificial Sequence
  Description of Artificial Sequence: Synthetic oligonucleotide
  Sense strand starting at position 3424 of SEQ ID NO: 1243955
guuacagcauucuuuauau

SEQ ID NO: 1454071 - RNA, 19 nt, Artificial Sequence
  Description of Artificial Sequence: Synthetic oligonucleotide
  Antisense strand to SEQ ID NO: 1454070
auauaaagaaugcuguaac

SEQ ID NO: 1454072 - RNA, 19 nt, Artificial Sequence
  Description of Artificial Sequence: Synthetic oligonucleotide
  Sense strand starting at position 3540 of SEQ ID NO: 1243955
cacagaaguuaguccugga

SEQ ID NO: 1454073 - RNA, 19 nt, Artificial Sequence
  Description of Artificial Sequence: Synthetic oligonucleotide
  Antisense strand to SEQ ID NO: 1454072
uccaggacuaacuucugug

SEQ ID NO: 1454074 - RNA, 19 nt, Artificial Sequence
  Description of Artificial Sequence: Synthetic oligonucleotide
  Sense strand starting at position 3724 of SEQ ID NO: 1243955
uguaaucuacaugagguau

SEQ ID NO: 1454075 - RNA, 19 nt, Artificial Sequence
  Description of Artificial Sequence: Synthetic oligonucleotide
  Antisense strand to SEQ ID NO: 1454074
auaccucauguagauuaca

SEQ ID NO: 1454076 - RNA, 19 nt, Artificial Sequence
  Description of Artificial Sequence: Synthetic oligonucleotide
  Sense strand starting at position 3853 of SEQ ID NO: 1243955
agagacaaguucuuucuuu

SEQ ID NO: 1454077 - RNA, 19 nt, Artificial Sequence
  Description of Artificial Sequence: Synthetic oligonucleotide
  Antisense strand to SEQ ID NO: 1454076
aaagaaagaacuugucucu

SEQ ID NO: 1454078 - RNA, 19 nt, Artificial Sequence
  Description of Artificial Sequence: Synthetic oligonucleotide
  Sense strand starting at position 3857 of SEQ ID NO: 1243955
acaaguucuuucuuuguua

SEQ ID NO: 1454079 - RNA, 19 nt, Artificial Sequence
  Description of Artificial Sequence: Synthetic oligonucleotide
  Antisense strand to SEQ ID NO: 1454078
uaacaaagaaagaacuugu

SEQ ID NO: 1454080 - RNA, 19 nt, Artificial Sequence
  Description of Artificial Sequence: Synthetic oligonucleotide
  Sense strand starting at position 58 of SEQ ID NO: 1243956
cuagaaugauacuuugguu

SEQ ID NO: 1454081 - RNA, 19 nt, Artificial Sequence
  Description of Artificial Sequence: Synthetic oligonucleotide
  Antisense strand to SEQ ID NO: 1454080
aaccaaaguaucauucuag

SEQ ID NO: 1454082 - RNA, 19 nt, Artificial Sequence
  Description of Artificial Sequence: Synthetic oligonucleotide
  Sense strand starting at position 245 of SEQ ID NO: 1243956
acagucagauuguuuaauc

SEQ ID NO: 1454083 - RNA, 19 nt, Artificial Sequence
  Description of Artificial Sequence: Synthetic oligonucleotide
  Antisense strand to SEQ ID NO: 1454082
gauuaaacaaucugacugu

SEQ ID NO: 1454084 - RNA, 19 nt, Artificial Sequence
  Description of Artificial Sequence: Synthetic oligonucleotide
  Sense strand starting at position 250 of SEQ ID NO: 1243956
cagauuguuuaaucuguga

SEQ ID NO: 1454085 - RNA, 19 nt, Artificial Sequence
  Description of Artificial Sequence: Synthetic oligonucleotide
  Antisense strand to SEQ ID NO: 1454084
ucacagauuaaacaaucug

SEQ ID NO: 1454086 - RNA, 19 nt, Artificial Sequence
  Description of Artificial Sequence: Synthetic oligonucleotide
  Sense strand starting at position 254 of SEQ ID NO: 1243956
uuguuuaaucugugaacca

SEQ ID NO: 1454087 - RNA, 19 nt, Artificial Sequence
  Description of Artificial Sequence: Synthetic oligonucleotide
  Antisense strand to SEQ ID NO: 1454086
ugguucacagauuaaacaa

SEQ ID NO: 1454088 - RNA, 19 nt, Artificial Sequence
  Description of Artificial Sequence: Synthetic oligonucleotide
  Sense strand starting at position 406 of SEQ ID NO: 1243956
auggaaccucccugcuaau

SEQ ID NO: 1454089 - RNA, 19 nt, Artificial Sequence
  Description of Artificial Sequence: Synthetic oligonucleotide
  Antisense strand to SEQ ID NO: 1454088
auuagcagggagguuccau

SEQ ID NO: 1454090 - RNA, 19 nt, Artificial Sequence
  Description of Artificial Sequence: Synthetic oligonucleotide
  Sense strand starting at position 546 of SEQ ID NO: 1243956
gagauccaagaguguuuga

SEQ ID NO: 1454091 - RNA, 19 nt, Artificial Sequence
  Description of Artificial Sequence: Synthetic oligonucleotide
  Antisense strand to SEQ ID NO: 1454090
ucaaacacucuuggaucuc

SEQ ID NO: 1454092 - RNA, 19 nt, Artificial Sequence
  Description of Artificial Sequence: Synthetic oligonucleotide
  Sense strand starting at position 553 of SEQ ID NO: 1243956
aagaguguuugagugacaa

SEQ ID NO: 1454093 - RNA, 19 nt, Artificial Sequence
  Description of Artificial Sequence: Synthetic oligonucleotide
  Antisense strand to SEQ ID NO: 1454092
uugucacucaaacacucuu

SEQ ID NO: 1454094 - RNA, 19 nt, Artificial Sequence
  Description of Artificial Sequence: Synthetic oligonucleotide
  Sense strand starting at position 555 of SEQ ID NO: 1243956
gaguguuugagugacaaac

SEQ ID NO: 1454095 - RNA, 19 nt, Artificial Sequence
  Description of Artificial Sequence: Synthetic oligonucleotide
  Antisense strand to SEQ ID NO: 1454094
guuugucacucaaacacuc

SEQ ID NO: 1454096 - RNA, 19 nt, Artificial Sequence
  Description of Artificial Sequence: Synthetic oligonucleotide
  Sense strand starting at position 620 of SEQ ID NO: 1243956
uuucuacagcuuugauaug

SEQ ID NO: 1454097 - RNA, 19 nt, Artificial Sequence
  Description of Artificial Sequence: Synthetic oligonucleotide
  Antisense strand to SEQ ID NO: 1454096
cauaucaaagcuguagaaa

SEQ ID NO: 1454098 - RNA, 19 nt, Artificial Sequence
  Description of Artificial Sequence: Synthetic oligonucleotide
  Sense strand starting at position 673 of SEQ ID NO: 1243956
gagaaauagccuugucaac

SEQ ID NO: 1454099 - RNA, 19 nt, Artificial Sequence
  Description of Artificial Sequence: Synthetic oligonucleotide
  Antisense strand to SEQ ID NO: 1454098
guugacaaggcuauuucuc

SEQ ID NO: 1454100 - RNA, 19 nt, Artificial Sequence
  Description of Artificial Sequence: Synthetic oligonucleotide
  Sense strand starting at position 701 of SEQ ID NO: 1243956
uuguguaaauaaucaguga

SEQ ID NO: 1454101 - RNA, 19 nt, Artificial Sequence
  Description of Artificial Sequence: Synthetic oligonucleotide
  Antisense strand to SEQ ID NO: 1454100
ucacugauuauuuacacaa

SEQ ID NO: 1454102 - RNA, 19 nt, Artificial Sequence
  Description of Artificial Sequence: Synthetic oligonucleotide
  Sense strand starting at position 717 of SEQ ID NO: 1243956
ugauauuugcauugugcaa

SEQ ID NO: 1454103 - RNA, 19 nt, Artificial Sequence
  Description of Artificial Sequence: Synthetic oligonucleotide
  Antisense strand to SEQ ID NO: 1454102
uugcacaaugcaaauauca

SEQ ID NO: 1454104 - RNA, 19 nt, Artificial Sequence
  Description of Artificial Sequence: Synthetic oligonucleotide
  Sense strand starting at position 776 of SEQ ID NO: 1243956
gcuuauguucugcagacaa

SEQ ID NO: 1454105 - RNA, 19 nt, Artificial Sequence
  Description of Artificial Sequence: Synthetic oligonucleotide
  Antisense strand to SEQ ID NO: 1454104
uugucugcagaacauaagc

SEQ ID NO: 1454106 - RNA, 19 nt, Artificial Sequence
  Description of Artificial Sequence: Synthetic oligonucleotide
  Sense strand starting at position 778 of SEQ ID NO: 1243956
uuauguucugcagacaauu

SEQ ID NO: 1454107 - RNA, 19 nt, Artificial Sequence
  Description of Artificial Sequence: Synthetic oligonucleotide
  Antisense strand to SEQ ID NO: 1454106
aauugucugcagaacauaa

SEQ ID NO: 1454108 - RNA, 19 nt, Artificial Sequence
  Description of Artificial Sequence: Synthetic oligonucleotide
  Sense strand starting at position 862 of SEQ ID NO: 1243956
gaaugacauuuagagacga

SEQ ID NO: 1454109 - RNA, 19 nt, Artificial Sequence
  Description of Artificial Sequence: Synthetic oligonucleotide
  Antisense strand to SEQ ID NO: 1454108
ucgucucuaaaugucauuc

SEQ ID NO: 1454110 - RNA, 19 nt, Artificial Sequence
  Description of Artificial Sequence: Synthetic oligonucleotide
  Sense strand starting at position 940 of SEQ ID NO: 1243956
aggcaagugagaggucaau

SEQ ID NO: 1454111 - RNA, 19 nt, Artificial Sequence
  Description of Artificial Sequence: Synthetic oligonucleotide
  Antisense strand to SEQ ID NO: 1454110
auugaccucucacuugccu

SEQ ID NO: 1454112 - RNA, 19 nt, Artificial Sequence
  Description of Artificial Sequence: Synthetic oligonucleotide
  Sense strand starting at position 1248 of SEQ ID NO: 1243956
cgcggagcccuuucccaau

SEQ ID NO: 1454113 - RNA, 19 nt, Artificial Sequence
  Description of Artificial Sequence: Synthetic oligonucleotide
  Antisense strand to SEQ ID NO: 1454112
auugggaaagggcuccgcg

SEQ ID NO: 1454114 - RNA, 19 nt, Artificial Sequence
  Description of Artificial Sequence: Synthetic oligonucleotide
  Sense strand starting at position 1353 of SEQ ID NO: 1243956
guugucucucaggagugaa

SEQ ID NO: 1454115 - RNA, 19 nt, Artificial Sequence
  Description of Artificial Sequence: Synthetic oligonucleotide
  Antisense strand to SEQ ID NO: 1454114
uucacuccugagagacaac

SEQ ID NO: 1454116 - RNA, 19 nt, Artificial Sequence
  Description of Artificial Sequence: Synthetic oligonucleotide
  Sense strand starting at position 2535 of SEQ ID NO: 1243956
uuaugaggucccgaagcau

SEQ ID NO: 1454117 - RNA, 19 nt, Artificial Sequence
  Description of Artificial Sequence: Synthetic oligonucleotide
  Antisense strand to SEQ ID NO: 1454116
augcuucgggaccucauaa

SEQ ID NO: 1454118 - RNA, 19 nt, Artificial Sequence
  Description of Artificial Sequence: Synthetic oligonucleotide
  Sense strand starting at position 2576 of SEQ ID NO: 1243956
gucaaauuauuuccgucuu

SEQ ID NO: 1454119 - RNA, 19 nt, Artificial Sequence
  Description of Artificial Sequence: Synthetic oligonucleotide
  Antisense strand to SEQ ID NO: 1454118
aagacggaaauaauuugac

SEQ ID NO: 1454120 - RNA, 19 nt, Artificial Sequence
  Description of Artificial Sequence: Synthetic oligonucleotide
  Sense strand starting at position 2621 of SEQ ID NO: 1243956
gcucgugaucauucuuguu

SEQ ID NO: 1454121 - RNA, 19 nt, Artificial Sequence
  Description of Artificial Sequence: Synthetic oligonucleotide
  Antisense strand to SEQ ID NO: 1454120
aacaagaaugaucacgagc

SEQ ID NO: 1454122 - RNA, 19 nt, Artificial Sequence
  Description of Artificial Sequence: Synthetic oligonucleotide
  Sense strand starting at position 2626 of SEQ ID NO: 1243956
ugaucauucuuguucuaag

SEQ ID NO: 1454123 - RNA, 19 nt, Artificial Sequence
  Description of Artificial Sequence: Synthetic oligonucleotide
  Antisense strand to SEQ ID NO: 1454122
cuuagaacaagaaugauca

SEQ ID NO: 1454124 - RNA, 19 nt, Artificial Sequence
  Description of Artificial Sequence: Synthetic oligonucleotide
  Sense strand starting at position 2627 of SEQ ID NO: 1243956
gaucauucuuguucuaagg

SEQ ID NO: 1454125 - RNA, 19 nt, Artificial Sequence
  Description of Artificial Sequence: Synthetic oligonucleotide
  Antisense strand to SEQ ID NO: 1454124
ccuuagaacaagaaugauc

SEQ ID NO: 1454126 - RNA, 19 nt, Artificial Sequence
  Description of Artificial Sequence: Synthetic oligonucleotide
  Sense strand starting at position 2674 of SEQ ID NO: 1243956
ugccuaugccaauaaagca

SEQ ID NO: 1454127 - RNA, 19 nt, Artificial Sequence
  Description of Artificial Sequence: Synthetic oligonucleotide
  Antisense strand to SEQ ID NO: 1454126
ugcuuuauuggcauaggca

SEQ ID NO: 1454128 - RNA, 19 nt, Artificial Sequence
  Description of Artificial Sequence: Synthetic oligonucleotide
  Sense strand starting at position 3097 of SEQ ID NO: 1243956
uccugaaauuugcuggcuu

SEQ ID NO: 1454129 - RNA, 19 nt, Artificial Sequence
  Description of Artificial Sequence: Synthetic oligonucleotide
  Antisense strand to SEQ ID NO: 1454128
aagccagcaaauuucagga

SEQ ID NO: 1454130 - RNA, 19 nt, Artificial Sequence
  Description of Artificial Sequence: Synthetic oligonucleotide
  Sense strand starting at position 3099 of SEQ ID NO: 1243956
cugaaauuugcuggcuugu

SEQ ID NO: 1454131 - RNA, 19 nt, Artificial Sequence
  Description of Artificial Sequence: Synthetic oligonucleotide
  Antisense strand to SEQ ID NO: 1454130
acaagccagcaaauuucag

SEQ ID NO: 1454132 - RNA, 19 nt, Artificial Sequence
  Description of Artificial Sequence: Synthetic oligonucleotide
  Sense strand starting at position 3101 of SEQ ID NO: 1243956
gaaauuugcuggcuuguca

SEQ ID NO: 1454133 - RNA, 19 nt, Artificial Sequence
  Description of Artificial Sequence: Synthetic oligonucleotide
  Antisense strand to SEQ ID NO: 1454132
ugacaagccagcaaauuuc

SEQ ID NO: 1454134 - RNA, 19 nt, Artificial Sequence
  Description of Artificial Sequence: Synthetic oligonucleotide
  Sense strand starting at position 3200 of SEQ ID NO: 1243956
gugugaugaaauugacaac

SEQ ID NO: 1454135 - RNA, 19 nt, Artificial Sequence
  Description of Artificial Sequence: Synthetic oligonucleotide
  Antisense strand to SEQ ID NO: 1454134
guugucaauuucaucacac

SEQ ID NO: 1454136 - RNA, 19 nt, Artificial Sequence
  Description of Artificial Sequence: Synthetic oligonucleotide
  Sense strand starting at position 3304 of SEQ ID NO: 1243956
gcagauuuccagugauugu

SEQ ID NO: 1454137 - RNA, 19 nt, Artificial Sequence
  Description of Artificial Sequence: Synthetic oligonucleotide
  Antisense strand to SEQ ID NO: 1454136
acaaucacuggaaaucugc

SEQ ID NO: 1454138 - RNA, 19 nt, Artificial Sequence
  Description of Artificial Sequence: Synthetic oligonucleotide
  Sense strand starting at position 3327 of SEQ ID NO: 1243956
aagaauuuguaacagugga

SEQ ID NO: 1454139 - RNA, 19 nt, Artificial Sequence
  Description of Artificial Sequence: Synthetic oligonucleotide
  Antisense strand to SEQ ID NO: 1454138
uccacuguuacaaauucuu

SEQ ID NO: 1454140 - RNA, 19 nt, Artificial Sequence
  Description of Artificial Sequence: Synthetic oligonucleotide
  Sense strand starting at position 3368 of SEQ ID NO: 1243956
gagugcacauugcuggaaa

SEQ ID NO: 1454141 - RNA, 19 nt, Artificial Sequence
  Description of Artificial Sequence: Synthetic oligonucleotide
  Antisense strand to SEQ ID NO: 1454140
uuuccagcaaugugcacuc

SEQ ID NO: 1454142 - RNA, 19 nt, Artificial Sequence
  Description of Artificial Sequence: Synthetic oligonucleotide
  Sense strand starting at position 3371 of SEQ ID NO: 1243956
ugcacauugcuggaaauau

SEQ ID NO: 1454143 - RNA, 19 nt, Artificial Sequence
  Description of Artificial Sequence: Synthetic oligonucleotide
  Antisense strand to SEQ ID NO: 1454142
auauuuccagcaaugugca

SEQ ID NO: 1454144 - RNA, 19 nt, Artificial Sequence
  Description of Artificial Sequence: Synthetic oligonucleotide
  Sense strand starting at position 3604 of SEQ ID NO: 1243956
uuuggaaagucauuaacau

SEQ ID NO: 1454145 - RNA, 19 nt, Artificial Sequence
  Description of Artificial Sequence: Synthetic oligonucleotide
  Antisense strand to SEQ ID NO: 1454144
auguuaaugacuuuccaaa

SEQ ID NO: 1454146 - RNA, 19 nt, Artificial Sequence
  Description of Artificial Sequence: Synthetic oligonucleotide
  Sense strand starting at position 3697 of SEQ ID NO: 1243956
ucgauugaaaguuaguaga

SEQ ID NO: 1454147 - RNA, 19 nt, Artificial Sequence
  Description of Artificial Sequence: Synthetic oligonucleotide
  Antisense strand to SEQ ID NO: 1454146
ucuacuaacuuucaaucga

SEQ ID NO: 1454148 - RNA, 19 nt, Artificial Sequence
  Description of Artificial Sequence: Synthetic oligonucleotide
  Sense strand starting at position 3699 of SEQ ID NO: 1243956
gauugaaaguuaguagagu

SEQ ID NO: 1454149 - RNA, 19 nt, Artificial Sequence
  Description of Artificial Sequence: Synthetic oligonucleotide
  Antisense strand to SEQ ID NO: 1454148
acucuacuaacuuucaauc

SEQ ID NO: 1454150 - RNA, 19 nt, Artificial Sequence
  Description of Artificial Sequence: Synthetic oligonucleotide
  Sense strand starting at position 3809 of SEQ ID NO: 1243956
ucaaguugucaucauacua

SEQ ID NO: 1454151 - RNA, 19 nt, Artificial Sequence
  Description of Artificial Sequence: Synthetic oligonucleotide
  Antisense strand to SEQ ID NO: 1454150
uaguaugaugacaacuuga

SEQ ID NO: 1454152 - RNA, 19 nt, Artificial Sequence
  Description of Artificial Sequence: Synthetic oligonucleotide
  Sense strand starting at position 3835 of SEQ ID NO: 1243956
ugaagugaaugauuaguau

SEQ ID NO: 1454153 - RNA, 19 nt, Artificial Sequence
  Description of Artificial Sequence: Synthetic oligonucleotide
  Antisense strand to SEQ ID NO: 1454152
auacuaaucauucacuuca

SEQ ID NO: 1454154 - RNA, 19 nt, Artificial Sequence
  Description of Artificial Sequence: Synthetic oligonucleotide
  Sense strand starting at position 3838 of SEQ ID NO: 1243956
agugaaugauuaguauaca

SEQ ID NO: 1454155 - RNA, 19 nt, Artificial Sequence
  Description of Artificial Sequence: Synthetic oligonucleotide
  Antisense strand to SEQ ID NO: 1454154
uguauacuaaucauucacu

SEQ ID NO: 1454156 - RNA, 19 nt, Artificial Sequence
  Description of Artificial Sequence: Synthetic oligonucleotide
  Sense strand starting at position 3863 of SEQ ID NO: 1243956
ccguguacacuugauauga

SEQ ID NO: 1454157 - RNA, 19 nt, Artificial Sequence
  Description of Artificial Sequence: Synthetic oligonucleotide
  Antisense strand to SEQ ID NO: 1454156
ucauaucaaguguacacgg

SEQ ID NO: 1454158 - RNA, 19 nt, Artificial Sequence
  Description of Artificial Sequence: Synthetic oligonucleotide
  Sense strand starting at position 3912 of SEQ ID NO: 1243956
aaucuugagguauguuaau

SEQ ID NO: 1454159 - RNA, 19 nt, Artificial Sequence
  Description of Artificial Sequence: Synthetic oligonucleotide
  Antisense strand to SEQ ID NO: 1454158
auuaacauaccucaagauu

SEQ ID NO: 1454160 - RNA, 19 nt, Artificial Sequence
  Description of Artificial Sequence: Synthetic oligonucleotide
  Sense strand starting at position 121 of SEQ ID NO: 1243957
gaaaguuaauugcuuugua

SEQ ID NO: 1454161 - RNA, 19 nt, Artificial Sequence
  Description of Artificial Sequence: Synthetic oligonucleotide
  Antisense strand to SEQ ID NO: 1454160
uacaaagcaauuaacuuuc

SEQ ID NO: 1454162 - RNA, 19 nt, Artificial Sequence
  Description of Artificial Sequence: Synthetic oligonucleotide
  Sense strand starting at position 124 of SEQ ID NO: 1243957
aguuaauugcuuuguaaga

SEQ ID NO: 1454163 - RNA, 19 nt, Artificial Sequence
  Description of Artificial Sequence: Synthetic oligonucleotide
  Antisense strand to SEQ ID NO: 1454162
ucuuacaaagcaauuaacu

SEQ ID NO: 1454164 - RNA, 19 nt, Artificial Sequence
  Description of Artificial Sequence: Synthetic oligonucleotide
  Sense strand starting at position 125 of SEQ ID NO: 1243957
guuaauugcuuuguaagag

SEQ ID NO: 1454165 - RNA, 19 nt, Artificial Sequence
  Description of Artificial Sequence: Synthetic oligonucleotide
  Antisense strand to SEQ ID NO: 1454164
cucuuacaaagcaauuaac

SEQ ID NO: 1454166 - RNA, 19 nt, Artificial Sequence
  Description of Artificial Sequence: Synthetic oligonucleotide
  Sense strand starting at position 177 of SEQ ID NO: 1243957
ucuaaugcuguauauuaga

SEQ ID NO: 1454167 - RNA, 19 nt, Artificial Sequence
  Description of Artificial Sequence: Synthetic oligonucleotide
  Antisense strand to SEQ ID NO: 1454166
ucuaauauacagcauuaga

SEQ ID NO: 1454168 - RNA, 19 nt, Artificial Sequence
  Description of Artificial Sequence: Synthetic oligonucleotide
  Sense strand starting at position 285 of SEQ ID NO: 1243957
aguaauaugcuaggaauau

SEQ ID NO: 1454169 - RNA, 19 nt, Artificial Sequence
  Description of Artificial Sequence: Synthetic oligonucleotide
  Antisense strand to SEQ ID NO: 1454168
auauuccuagcauauuacu

SEQ ID NO: 1454170 - RNA, 19 nt, Artificial Sequence
  Description of Artificial Sequence: Synthetic oligonucleotide
  Sense strand starting at position 644 of SEQ ID NO: 1243957
ggguuaaagugauuaucuu

SEQ ID NO: 1454171 - RNA, 19 nt, Artificial Sequence
  Description of Artificial Sequence: Synthetic oligonucleotide
  Antisense strand to SEQ ID NO: 1454170
aagauaaucacuuuaaccc

SEQ ID NO: 1454172 - RNA, 19 nt, Artificial Sequence
  Description of Artificial Sequence: Synthetic oligonucleotide
  Sense strand starting at position 645 of SEQ ID NO: 1243957
gguuaaagugauuaucuug

SEQ ID NO: 1454173 - RNA, 19 nt, Artificial Sequence
  Description of Artificial Sequence: Synthetic oligonucleotide
  Antisense strand to SEQ ID NO: 1454172
caagauaaucacuuuaacc

SEQ ID NO: 1454174 - RNA, 19 nt, Artificial Sequence
  Description of Artificial Sequence: Synthetic oligonucleotide
  Sense strand starting at position 825 of SEQ ID NO: 1243957
gugugagccaucgacaauc

SEQ ID NO: 1454175 - RNA, 19 nt, Artificial Sequence
  Description of Artificial Sequence: Synthetic oligonucleotide
  Antisense strand to SEQ ID NO: 1454174
gauugucgauggcucacac

SEQ ID NO: 1454176 - RNA, 19 nt, Artificial Sequence
  Description of Artificial Sequence: Synthetic oligonucleotide
  Sense strand starting at position 827 of SEQ ID NO: 1243957
gugagccaucgacaaucaa

SEQ ID NO: 1454177 - RNA, 19 nt, Artificial Sequence
  Description of Artificial Sequence: Synthetic oligonucleotide
  Antisense strand to SEQ ID NO: 1454176
uugauugucgauggcucac

SEQ ID NO: 1454178 - RNA, 19 nt, Artificial Sequence
  Description of Artificial Sequence: Synthetic oligonucleotide
  Sense strand starting at position 868 of SEQ ID NO: 1243957
uuagucaacucacuuguga

SEQ ID NO: 1454179 - RNA, 19 nt, Artificial Sequence
  Description of Artificial Sequence: Synthetic oligonucleotide
  Antisense strand to SEQ ID NO: 1454178
ucacaagugaguugacuaa

SEQ ID NO: 1454180 - RNA, 19 nt, Artificial Sequence
  Description of Artificial Sequence: Synthetic oligonucleotide
  Sense strand starting at position 923 of SEQ ID NO: 1243957
augaaacguucuucuuuau

SEQ ID NO: 1454181 - RNA, 19 nt, Artificial Sequence
  Description of Artificial Sequence: Synthetic oligonucleotide
  Antisense strand to SEQ ID NO: 1454180
auaaagaagaacguuucau

SEQ ID NO: 1454182 - RNA, 19 nt, Artificial Sequence
  Description of Artificial Sequence: Synthetic oligonucleotide
  Sense strand starting at position 1011 of SEQ ID NO: 1243957
auaguaaagugacccuaaa

SEQ ID NO: 1454183 - RNA, 19 nt, Artificial Sequence
  Description of Artificial Sequence: Synthetic oligonucleotide
  Antisense strand to SEQ ID NO: 1454182
uuuagggucacuuuacuau

SEQ ID NO: 1454184 - RNA, 19 nt, Artificial Sequence
  Description of Artificial Sequence: Synthetic oligonucleotide
  Sense strand starting at position 1111 of SEQ ID NO: 1243957
uuuaccuguccauggaagu

SEQ ID NO: 1454185 - RNA, 19 nt, Artificial Sequence
  Description of Artificial Sequence: Synthetic oligonucleotide
  Antisense strand to SEQ ID NO: 1454184
acuuccauggacagguaaa

SEQ ID NO: 1454186 - RNA, 19 nt, Artificial Sequence
  Description of Artificial Sequence: Synthetic oligonucleotide
  Sense strand starting at position 1112 of SEQ ID NO: 1243957
uuaccuguccauggaaguu

SEQ ID NO: 1454187 - RNA, 19 nt, Artificial Sequence
  Description of Artificial Sequence: Synthetic oligonucleotide
  Antisense strand to SEQ ID NO: 1454186
aacuuccauggacagguaa

SEQ ID NO: 1454188 - RNA, 19 nt, Artificial Sequence
  Description of Artificial Sequence: Synthetic oligonucleotide
  Sense strand starting at position 1124 of SEQ ID NO: 1243957
ggaaguuuccugcaacuua

SEQ ID NO: 1454189 - RNA, 19 nt, Artificial Sequence
  Description of Artificial Sequence: Synthetic oligonucleotide
  Antisense strand to SEQ ID NO: 1454188
uaaguugcaggaaacuucc

SEQ ID NO: 1454190 - RNA, 19 nt, Artificial Sequence
  Description of Artificial Sequence: Synthetic oligonucleotide
  Sense strand starting at position 1165 of SEQ ID NO: 1243957
ucaacaugaguuuguccuu

SEQ ID NO: 1454191 - RNA, 19 nt, Artificial Sequence
  Description of Artificial Sequence: Synthetic oligonucleotide
  Antisense strand to SEQ ID NO: 1454190
aaggacaaacucauguuga

SEQ ID NO: 1454192 - RNA, 19 nt, Artificial Sequence
  Description of Artificial Sequence: Synthetic oligonucleotide
  Sense strand starting at position 1375 of SEQ ID NO: 1243957
caaacaguguuaguaaaug

SEQ ID NO: 1454193 - RNA, 19 nt, Artificial Sequence
  Description of Artificial Sequence: Synthetic oligonucleotide
  Antisense strand to SEQ ID NO: 1454192
cauuuacuaacacuguuug

SEQ ID NO: 1454194 - RNA, 19 nt, Artificial Sequence
  Description of Artificial Sequence: Synthetic oligonucleotide
  Sense strand starting at position 1742 of SEQ ID NO: 1243957
gugauaaaccuauguagga

SEQ ID NO: 1454195 - RNA, 19 nt, Artificial Sequence
  Description of Artificial Sequence: Synthetic oligonucleotide
  Antisense strand to SEQ ID NO: 1454194
uccuacauagguuuaucac

SEQ ID NO: 1454196 - RNA, 19 nt, Artificial Sequence
  Description of Artificial Sequence: Synthetic oligonucleotide
  Sense strand starting at position 1747 of SEQ ID NO: 1243957
aaaccuauguaggacaaga

SEQ ID NO: 1454197 - RNA, 19 nt, Artificial Sequence
  Description of Artificial Sequence: Synthetic oligonucleotide
  Antisense strand to SEQ ID NO: 1454196
ucuuguccuacauagguuu

SEQ ID NO: 1454198 - RNA, 19 nt, Artificial Sequence
  Description of Artificial Sequence: Synthetic oligonucleotide
  Sense strand starting at position 1996 of SEQ ID NO: 1243957
ccaacuguauuacuguuau

SEQ ID NO: 1454199 - RNA, 19 nt, Artificial Sequence
  Description of Artificial Sequence: Synthetic oligonucleotide
  Antisense strand to SEQ ID NO: 1454198
auaacaguaauacaguugg

SEQ ID NO: 1454200 - RNA, 19 nt, Artificial Sequence
  Description of Artificial Sequence: Synthetic oligonucleotide
  Sense strand starting at position 2011 of SEQ ID NO: 1243957
uuaugacuguugcuacuga

SEQ ID NO: 1454201 - RNA, 19 nt, Artificial Sequence
  Description of Artificial Sequence: Synthetic oligonucleotide
  Antisense strand to SEQ ID NO: 1454200
ucaguagcaacagucauaa

SEQ ID NO: 1454202 - RNA, 19 nt, Artificial Sequence
  Description of Artificial Sequence: Synthetic oligonucleotide
  Sense strand starting at position 2036 of SEQ ID NO: 1243957
cuagaucauugcucaggga

SEQ ID NO: 1454203 - RNA, 19 nt, Artificial Sequence
  Description of Artificial Sequence: Synthetic oligonucleotide
  Antisense strand to SEQ ID NO: 1454202
ucccugagcaaugaucuag

SEQ ID NO: 1454204 - RNA, 19 nt, Artificial Sequence
  Description of Artificial Sequence: Synthetic oligonucleotide
  Sense strand starting at position 2040 of SEQ ID NO: 1243957
aucauugcucagggagaca

SEQ ID NO: 1454205 - RNA, 19 nt, Artificial Sequence
  Description of Artificial Sequence: Synthetic oligonucleotide
  Antisense strand to SEQ ID NO: 1454204
ugucucccugagcaaugau

SEQ ID NO: 1454206 - RNA, 19 nt, Artificial Sequence
  Description of Artificial Sequence: Synthetic oligonucleotide
  Sense strand starting at position 2135 of SEQ ID NO: 1243957
acgugauugucauccucau

SEQ ID NO: 1454207 - RNA, 19 nt, Artificial Sequence
  Description of Artificial Sequence: Synthetic oligonucleotide
  Antisense strand to SEQ ID NO: 1454206
augaggaugacaaucacgu

SEQ ID NO: 1454208 - RNA, 19 nt, Artificial Sequence
  Description of Artificial Sequence: Synthetic oligonucleotide
  Sense strand starting at position 2277 of SEQ ID NO: 1243957
uccagaggaaugugacuua

SEQ ID NO: 1454209 - RNA, 19 nt, Artificial Sequence
  Description of Artificial Sequence: Synthetic oligonucleotide
  Antisense strand to SEQ ID NO: 1454208
uaagucacauuccucugga

SEQ ID NO: 1454210 - RNA, 19 nt, Artificial Sequence
  Description of Artificial Sequence: Synthetic oligonucleotide
  Sense strand starting at position 2280 of SEQ ID NO: 1243957
agaggaaugugacuuaucu

SEQ ID NO: 1454211 - RNA, 19 nt, Artificial Sequence
  Description of Artificial Sequence: Synthetic oligonucleotide
  Antisense strand to SEQ ID NO: 1454210
agauaagucacauuccucu

SEQ ID NO: 1454212 - RNA, 19 nt, Artificial Sequence
  Description of Artificial Sequence: Synthetic oligonucleotide
  Sense strand starting at position 2284 of SEQ ID NO: 1243957
gaaugugacuuaucugguu

SEQ ID NO: 1454213 - RNA, 19 nt, Artificial Sequence
  Description of Artificial Sequence: Synthetic oligonucleotide
  Antisense strand to SEQ ID NO: 1454212
aaccagauaagucacauuc

SEQ ID NO: 1454214 - RNA, 19 nt, Artificial Sequence
  Description of Artificial Sequence: Synthetic oligonucleotide
  Sense strand starting at position 2289 of SEQ ID NO: 1243957
ugacuuaucugguuuauuc

SEQ ID NO: 1454215 - RNA, 19 nt, Artificial Sequence
  Description of Artificial Sequence: Synthetic oligonucleotide
  Antisense strand to SEQ ID NO: 1454214
gaauaaaccagauaaguca

SEQ ID NO: 1454216 - RNA, 19 nt, Artificial Sequence
  Description of Artificial Sequence: Synthetic oligonucleotide
  Sense strand starting at position 2354 of SEQ ID NO: 1243957
acugcaaaugacuguagau

SEQ ID NO: 1454217 - RNA, 19 nt, Artificial Sequence
  Description of Artificial Sequence: Synthetic oligonucleotide
  Antisense strand to SEQ ID NO: 1454216
aucuacagucauuugcagu

SEQ ID NO: 1454218 - RNA, 19 nt, Artificial Sequence
  Description of Artificial Sequence: Synthetic oligonucleotide
  Sense strand starting at position 2356 of SEQ ID NO: 1243957
ugcaaaugacuguagauuc

SEQ ID NO: 1454219 - RNA, 19 nt, Artificial Sequence
  Description of Artificial Sequence: Synthetic oligonucleotide
  Antisense strand to SEQ ID NO: 1454218
gaaucuacagucauuugca

SEQ ID NO: 1454220 - RNA, 19 nt, Artificial Sequence
  Description of Artificial Sequence: Synthetic oligonucleotide
  Sense strand starting at position 2433 of SEQ ID NO: 1243957
cuagguguuguguaaagag

SEQ ID NO: 1454221 - RNA, 19 nt, Artificial Sequence
  Description of Artificial Sequence: Synthetic oligonucleotide
  Antisense strand to SEQ ID NO: 1454220
cucuuuacacaacaccuag

SEQ ID NO: 1454222 - RNA, 19 nt, Artificial Sequence
  Description of Artificial Sequence: Synthetic oligonucleotide
  Sense strand starting at position 2519 of SEQ ID NO: 1243957
guaucuaaugcucuagcgu

SEQ ID NO: 1454223 - RNA, 19 nt, Artificial Sequence
  Description of Artificial Sequence: Synthetic oligonucleotide
  Antisense strand to SEQ ID NO: 1454222
acgcuagagcauuagauac

SEQ ID NO: 1454224 - RNA, 19 nt, Artificial Sequence
  Description of Artificial Sequence: Synthetic oligonucleotide
  Sense strand starting at position 2520 of SEQ ID NO: 1243957
uaucuaaugcucuagcgua

SEQ ID NO: 1454225 - RNA, 19 nt, Artificial Sequence
  Description of Artificial Sequence: Synthetic oligonucleotide
  Antisense strand to SEQ ID NO: 1454224
uacgcuagagcauuagaua

SEQ ID NO: 1454226 - RNA, 19 nt, Artificial Sequence
  Description of Artificial Sequence: Synthetic oligonucleotide
  Sense strand starting at position 2906 of SEQ ID NO: 1243957
ugccuuuggagagaagagu

SEQ ID NO: 1454227 - RNA, 19 nt, Artificial Sequence
  Description of Artificial Sequence: Synthetic oligonucleotide
  Antisense strand to SEQ ID NO: 1454226
acucuucucuccaaaggca

SEQ ID NO: 1454228 - RNA, 19 nt, Artificial Sequence
  Description of Artificial Sequence: Synthetic oligonucleotide
  Sense strand starting at position 3051 of SEQ ID NO: 1243957
ugguguccaucuccugaaa

SEQ ID NO: 1454229 - RNA, 19 nt, Artificial Sequence
  Description of Artificial Sequence: Synthetic oligonucleotide
  Antisense strand to SEQ ID NO: 1454228
uuucaggagauggacacca

SEQ ID NO: 1454230 - RNA, 19 nt, Artificial Sequence
  Description of Artificial Sequence: Synthetic oligonucleotide
  Sense strand starting at position 3054 of SEQ ID NO: 1243957
uguccaucuccugaaauug

SEQ ID NO: 1454231 - RNA, 19 nt, Artificial Sequence
  Description of Artificial Sequence: Synthetic oligonucleotide
  Antisense strand to SEQ ID NO: 1454230
caauuucaggagauggaca

SEQ ID NO: 1454232 - RNA, 19 nt, Artificial Sequence
  Description of Artificial Sequence: Synthetic oligonucleotide
  Sense strand starting at position 3073 of SEQ ID NO: 1243957
cugagaagcuuccuuccau

SEQ ID NO: 1454233 - RNA, 19 nt, Artificial Sequence
  Description of Artificial Sequence: Synthetic oligonucleotide
  Antisense strand to SEQ ID NO: 1454232
auggaaggaagcuucucag

SEQ ID NO: 1454234 - RNA, 19 nt, Artificial Sequence
  Description of Artificial Sequence: Synthetic oligonucleotide
  Sense strand starting at position 3074 of SEQ ID NO: 1243957
ugagaagcuuccuuccauu

SEQ ID NO: 1454235 - RNA, 19 nt, Artificial Sequence
  Description of Artificial Sequence: Synthetic oligonucleotide
  Antisense strand to SEQ ID NO: 1454234
aauggaaggaagcuucuca

SEQ ID NO: 1454236 - RNA, 19 nt, Artificial Sequence
  Description of Artificial Sequence: Synthetic oligonucleotide
  Sense strand starting at position 3172 of SEQ ID NO: 1243957
ggcaaagguuaggucuuaa

SEQ ID NO: 1454237 - RNA, 19 nt, Artificial Sequence
  Description of Artificial Sequence: Synthetic oligonucleotide
  Antisense strand to SEQ ID NO: 1454236
uuaagaccuaaccuuugcc

SEQ ID NO: 1454238 - RNA, 19 nt, Artificial Sequence
  Description of Artificial Sequence: Synthetic oligonucleotide
  Sense strand starting at position 3210 of SEQ ID NO: 1243957
cuuaaagaguucccaguuu

SEQ ID NO: 1454239 - RNA, 19 nt, Artificial Sequence
  Description of Artificial Sequence: Synthetic oligonucleotide
  Antisense strand to SEQ ID NO: 1454238
aaacugggaacucuuuaag

SEQ ID NO: 1454240 - RNA, 19 nt, Artificial Sequence
  Description of Artificial Sequence: Synthetic oligonucleotide
  Sense strand starting at position 52 of SEQ ID NO: 1243958
aucaauagcugcugagaca

SEQ ID NO: 1454241 - RNA, 19 nt, Artificial Sequence
  Description of Artificial Sequence: Synthetic oligonucleotide
  Antisense strand to SEQ ID NO: 1454240
ugucucagcagcuauugau

SEQ ID NO: 1454242 - RNA, 19 nt, Artificial Sequence
  Description of Artificial Sequence: Synthetic oligonucleotide
  Sense strand starting at position 93 of SEQ ID NO: 1243958
gggacugcuacuugauauc

SEQ ID NO: 1454243 - RNA, 19 nt, Artificial Sequence
  Description of Artificial Sequence: Synthetic oligonucleotide
  Antisense strand to SEQ ID NO: 1454242
gauaucaaguagcaguccc

SEQ ID NO: 1454244 - RNA, 19 nt, Artificial Sequence
  Description of Artificial Sequence: Synthetic oligonucleotide
  Sense strand starting at position 202 of SEQ ID NO: 1243958
agcuuauguucucaagcua

SEQ ID NO: 1454245 - RNA, 19 nt, Artificial Sequence
  Description of Artificial Sequence: Synthetic oligonucleotide
  Antisense strand to SEQ ID NO: 1454244
uagcuugagaacauaagcu

SEQ ID NO: 1454246 - RNA, 19 nt, Artificial Sequence
  Description of Artificial Sequence: Synthetic oligonucleotide
  Sense strand starting at position 383 of SEQ ID NO: 1243958
cuagcucuccuuuaaugag

SEQ ID NO: 1454247 - RNA, 19 nt, Artificial Sequence
  Description of Artificial Sequence: Synthetic oligonucleotide
  Antisense strand to SEQ ID NO: 1454246
cucauuaaaggagagcuag

SEQ ID NO: 1454248 - RNA, 19 nt, Artificial Sequence
  Description of Artificial Sequence: Synthetic oligonucleotide
  Sense strand starting at position 436 of SEQ ID NO: 1243958
ucauaauagcuguaaggau

SEQ ID NO: 1454249 - RNA, 19 nt, Artificial Sequence
  Description of Artificial Sequence: Synthetic oligonucleotide
  Antisense strand to SEQ ID NO: 1454248
auccuuacagcuauuauga

SEQ ID NO: 1454250 - RNA, 19 nt, Artificial Sequence
  Description of Artificial Sequence: Synthetic oligonucleotide
  Sense strand starting at position 443 of SEQ ID NO: 1243958
agcuguaaggauugaggau

SEQ ID NO: 1454251 - RNA, 19 nt, Artificial Sequence
  Description of Artificial Sequence: Synthetic oligonucleotide
  Antisense strand to SEQ ID NO: 1454250
auccucaauccuuacagcu

SEQ ID NO: 1454252 - RNA, 19 nt, Artificial Sequence
  Description of Artificial Sequence: Synthetic oligonucleotide
  Sense strand starting at position 459 of SEQ ID NO: 1243958
gauacaaacucagaaaggu

SEQ ID NO: 1454253 - RNA, 19 nt, Artificial Sequence
  Description of Artificial Sequence: Synthetic oligonucleotide
  Antisense strand to SEQ ID NO: 1454252
accuuucugaguuuguauc

SEQ ID NO: 1454254 - RNA, 19 nt, Artificial Sequence
  Description of Artificial Sequence: Synthetic oligonucleotide
  Sense strand starting at position 510 of SEQ ID NO: 1243958
gcggcagagcuaggauuaa

SEQ ID NO: 1454255 - RNA, 19 nt, Artificial Sequence
  Description of Artificial Sequence: Synthetic oligonucleotide
  Antisense strand to SEQ ID NO: 1454254
uuaauccuagcucugccgc

SEQ ID NO: 1454256 - RNA, 19 nt, Artificial Sequence
  Description of Artificial Sequence: Synthetic oligonucleotide
  Sense strand starting at position 666 of SEQ ID NO: 1243958
aggugaccucccgaagguu

SEQ ID NO: 1454257 - RNA, 19 nt, Artificial Sequence
  Description of Artificial Sequence: Synthetic oligonucleotide
  Antisense strand to SEQ ID NO: 1454256
aaccuucgggaggucaccu

SEQ ID NO: 1454258 - RNA, 19 nt, Artificial Sequence
  Description of Artificial Sequence: Synthetic oligonucleotide
  Sense strand starting at position 674 of SEQ ID NO: 1243958
ucccgaagguucuguccua

SEQ ID NO: 1454259 - RNA, 19 nt, Artificial Sequence
  Description of Artificial Sequence: Synthetic oligonucleotide
  Antisense strand to SEQ ID NO: 1454258
uaggacagaaccuucggga

SEQ ID NO: 1454260 - RNA, 19 nt, Artificial Sequence
  Description of Artificial Sequence: Synthetic oligonucleotide
  Sense strand starting at position 759 of SEQ ID NO: 1243958
aacagagggucugauggaa

SEQ ID NO: 1454261 - RNA, 19 nt, Artificial Sequence
  Description of Artificial Sequence: Synthetic oligonucleotide
  Antisense strand to SEQ ID NO: 1454260
uuccaucagacccucuguu

SEQ ID NO: 1454262 - RNA, 19 nt, Artificial Sequence
  Description of Artificial Sequence: Synthetic oligonucleotide
  Sense strand starting at position 764 of SEQ ID NO: 1243958
agggucugauggaagaguu

SEQ ID NO: 1454263 - RNA, 19 nt, Artificial Sequence
  Description of Artificial Sequence: Synthetic oligonucleotide
  Antisense strand to SEQ ID NO: 1454262
aacucuuccaucagacccu

SEQ ID NO: 1454264 - RNA, 19 nt, Artificial Sequence
  Description of Artificial Sequence: Synthetic oligonucleotide
  Sense strand starting at position 776 of SEQ ID NO: 1243958
aagaguuugcagcaaagau

SEQ ID NO: 1454265 - RNA, 19 nt, Artificial Sequence
  Description of Artificial Sequence: Synthetic oligonucleotide
  Antisense strand to SEQ ID NO: 1454264
aucuuugcugcaaacucuu

SEQ ID NO: 1454266 - RNA, 19 nt, Artificial Sequence
  Description of Artificial Sequence: Synthetic oligonucleotide
  Sense strand starting at position 810 of SEQ ID NO: 1243958
uggaguccuccagaugcaa

SEQ ID NO: 1454267 - RNA, 19 nt, Artificial Sequence
  Description of Artificial Sequence: Synthetic oligonucleotide
  Antisense strand to SEQ ID NO: 1454266
uugcaucuggaggacucca

SEQ ID NO: 1454268 - RNA, 19 nt, Artificial Sequence
  Description of Artificial Sequence: Synthetic oligonucleotide
  Sense strand starting at position 860 of SEQ ID NO: 1243958
ggcuucuuccagcaagaug

SEQ ID NO: 1454269 - RNA, 19 nt, Artificial Sequence
  Description of Artificial Sequence: Synthetic oligonucleotide
  Antisense strand to SEQ ID NO: 1454268
caucuugcuggaagaagcc

SEQ ID NO: 1454270 - RNA, 19 nt, Artificial Sequence
  Description of Artificial Sequence: Synthetic oligonucleotide
  Sense strand starting at position 895 of SEQ ID NO: 1243958
gcaggaauauguucuggcu

SEQ ID NO: 1454271 - RNA, 19 nt, Artificial Sequence
  Description of Artificial Sequence: Synthetic oligonucleotide
  Antisense strand to SEQ ID NO: 1454270
agccagaacauauuccugc

SEQ ID NO: 1454272 - RNA, 19 nt, Artificial Sequence
  Description of Artificial Sequence: Synthetic oligonucleotide
  Sense strand starting at position 901 of SEQ ID NO: 1243958
auauguucuggcugggaaa

SEQ ID NO: 1454273 - RNA, 19 nt, Artificial Sequence
  Description of Artificial Sequence: Synthetic oligonucleotide
  Antisense strand to SEQ ID NO: 1454272
uuucccagccagaacauau

SEQ ID NO: 1454274 - RNA, 19 nt, Artificial Sequence
  Description of Artificial Sequence: Synthetic oligonucleotide
  Sense strand starting at position 902 of SEQ ID NO: 1243958
uauguucuggcugggaaau

SEQ ID NO: 1454275 - RNA, 19 nt, Artificial Sequence
  Description of Artificial Sequence: Synthetic oligonucleotide
  Antisense strand to SEQ ID NO: 1454274
auuucccagccagaacaua

SEQ ID NO: 1454276 - RNA, 19 nt, Artificial Sequence
  Description of Artificial Sequence: Synthetic oligonucleotide
  Sense strand starting at position 903 of SEQ ID NO: 1243958
auguucuggcugggaaauc

SEQ ID NO: 1454277 - RNA, 19 nt, Artificial Sequence
  Description of Artificial Sequence: Synthetic oligonucleotide
  Antisense strand to SEQ ID NO: 1454276
gauuucccagccagaacau

SEQ ID NO: 1454278 - RNA, 19 nt, Artificial Sequence
  Description of Artificial Sequence: Synthetic oligonucleotide
  Sense strand starting at position 1127 of SEQ ID NO: 1243958
gcucucuccugagagcuga

SEQ ID NO: 1454279 - RNA, 19 nt, Artificial Sequence
  Description of Artificial Sequence: Synthetic oligonucleotide
  Antisense strand to SEQ ID NO: 1454278
ucagcucucaggagagagc

SEQ ID NO: 1454280 - RNA, 19 nt, Artificial Sequence
  Description of Artificial Sequence: Synthetic oligonucleotide
  Sense strand starting at position 2456 of SEQ ID NO: 1243958
acgacuaccugugugaagu

SEQ ID NO: 1454281 - RNA, 19 nt, Artificial Sequence
  Description of Artificial Sequence: Synthetic oligonucleotide
  Antisense strand to SEQ ID NO: 1454280
acuucacacagguagucgu

SEQ ID NO: 1454282 - RNA, 19 nt, Artificial Sequence
  Description of Artificial Sequence: Synthetic oligonucleotide
  Sense strand starting at position 2457 of SEQ ID NO: 1243958
cgacuaccugugugaagug

SEQ ID NO: 1454283 - RNA, 19 nt, Artificial Sequence
  Description of Artificial Sequence: Synthetic oligonucleotide
  Antisense strand to SEQ ID NO: 1454282
cacuucacacagguagucg

SEQ ID NO: 1454284 - RNA, 19 nt, Artificial Sequence
  Description of Artificial Sequence: Synthetic oligonucleotide
  Sense strand starting at position 2557 of SEQ ID NO: 1243958
caggaagucugggauaaag

SEQ ID NO: 1454285 - RNA, 19 nt, Artificial Sequence
  Description of Artificial Sequence: Synthetic oligonucleotide
  Antisense strand to SEQ ID NO: 1454284
cuuuaucccagacuuccug

SEQ ID NO: 1454286 - RNA, 19 nt, Artificial Sequence
  Description of Artificial Sequence: Synthetic oligonucleotide
  Sense strand starting at position 2687 of SEQ ID NO: 1243958
gggauacacuugggucuuu

SEQ ID NO: 1454287 - RNA, 19 nt, Artificial Sequence
  Description of Artificial Sequence: Synthetic oligonucleotide
  Antisense strand to SEQ ID NO: 1454286
aaagacccaaguguauccc

SEQ ID NO: 1454288 - RNA, 19 nt, Artificial Sequence
  Description of Artificial Sequence: Synthetic oligonucleotide
  Sense strand starting at position 2698 of SEQ ID NO: 1243958
gggucuuuccuagauggcu

SEQ ID NO: 1454289 - RNA, 19 nt, Artificial Sequence
  Description of Artificial Sequence: Synthetic oligonucleotide
  Antisense strand to SEQ ID NO: 1454288
agccaucuaggaaagaccc

SEQ ID NO: 1454290 - RNA, 19 nt, Artificial Sequence
  Description of Artificial Sequence: Synthetic oligonucleotide
  Sense strand starting at position 2782 of SEQ ID NO: 1243958
aagggcuguuuccaauuau

SEQ ID NO: 1454291 - RNA, 19 nt, Artificial Sequence
  Description of Artificial Sequence: Synthetic oligonucleotide
  Antisense strand to SEQ ID NO: 1454290
auaauuggaaacagcccuu

SEQ ID NO: 1454292 - RNA, 19 nt, Artificial Sequence
  Description of Artificial Sequence: Synthetic oligonucleotide
  Sense strand starting at position 2831 of SEQ ID NO: 1243958
guguaagagcccuggcuuu

SEQ ID NO: 1454293 - RNA, 19 nt, Artificial Sequence
  Description of Artificial Sequence: Synthetic oligonucleotide
  Antisense strand to SEQ ID NO: 1454292
aaagccagggcucuuacac

SEQ ID NO: 1454294 - RNA, 19 nt, Artificial Sequence
  Description of Artificial Sequence: Synthetic oligonucleotide
  Sense strand starting at position 2866 of SEQ ID NO: 1243958
gggugacauuccucucccu

SEQ ID NO: 1454295 - RNA, 19 nt, Artificial Sequence
  Description of Artificial Sequence: Synthetic oligonucleotide
  Antisense strand to SEQ ID NO: 1454294
agggagaggaaugucaccc

SEQ ID NO: 1454296 - RNA, 19 nt, Artificial Sequence
  Description of Artificial Sequence: Synthetic oligonucleotide
  Sense strand starting at position 2907 of SEQ ID NO: 1243958
gucccuucccuuugauugu

SEQ ID NO: 1454297 - RNA, 19 nt, Artificial Sequence
  Description of Artificial Sequence: Synthetic oligonucleotide
  Antisense strand to SEQ ID NO: 1454296
acaaucaaagggaagggac

SEQ ID NO: 1454298 - RNA, 19 nt, Artificial Sequence
  Description of Artificial Sequence: Synthetic oligonucleotide
  Sense strand starting at position 2916 of SEQ ID NO: 1243958
cuuugauugugagguccaa

SEQ ID NO: 1454299 - RNA, 19 nt, Artificial Sequence
  Description of Artificial Sequence: Synthetic oligonucleotide
  Antisense strand to SEQ ID NO: 1454298
uuggaccucacaaucaaag

SEQ ID NO: 1454300 - RNA, 19 nt, Artificial Sequence
  Description of Artificial Sequence: Synthetic oligonucleotide
  Sense strand starting at position 2975 of SEQ ID NO: 1243958
cauucucaguguuugggaa

SEQ ID NO: 1454301 - RNA, 19 nt, Artificial Sequence
  Description of Artificial Sequence: Synthetic oligonucleotide
  Antisense strand to SEQ ID NO: 1454300
uucccaaacacugagaaug

SEQ ID NO: 1454302 - RNA, 19 nt, Artificial Sequence
  Description of Artificial Sequence: Synthetic oligonucleotide
  Sense strand starting at position 3182 of SEQ ID NO: 1243958
uuauguguguccuugacuc

SEQ ID NO: 1454303 - RNA, 19 nt, Artificial Sequence
  Description of Artificial Sequence: Synthetic oligonucleotide
  Antisense strand to SEQ ID NO: 1454302
gagucaaggacacacauaa

SEQ ID NO: 1454304 - RNA, 19 nt, Artificial Sequence
  Description of Artificial Sequence: Synthetic oligonucleotide
  Sense strand starting at position 3424 of SEQ ID NO: 1243958
ccaccuugggagugagauu

SEQ ID NO: 1454305 - RNA, 19 nt, Artificial Sequence
  Description of Artificial Sequence: Synthetic oligonucleotide
  Antisense strand to SEQ ID NO: 1454304
aaucucacucccaaggugg

SEQ ID NO: 1454306 - RNA, 19 nt, Artificial Sequence
  Description of Artificial Sequence: Synthetic oligonucleotide
  Sense strand starting at position 3686 of SEQ ID NO: 1243958
acacgaagacucuaguauc

SEQ ID NO: 1454307 - RNA, 19 nt, Artificial Sequence
  Description of Artificial Sequence: Synthetic oligonucleotide
  Antisense strand to SEQ ID NO: 1454306
gauacuagagucuucgugu

SEQ ID NO: 1454308 - RNA, 19 nt, Artificial Sequence
  Description of Artificial Sequence: Synthetic oligonucleotide
  Sense strand starting at position 3689 of SEQ ID NO: 1243958
cgaagacucuaguaucaua

SEQ ID NO: 1454309 - RNA, 19 nt, Artificial Sequence
  Description of Artificial Sequence: Synthetic oligonucleotide
  Antisense strand to SEQ ID NO: 1454308
uaugauacuagagucuucg

SEQ ID NO: 1454310 - RNA, 19 nt, Artificial Sequence
  Description of Artificial Sequence: Synthetic oligonucleotide
  Sense strand starting at position 368 of SEQ ID NO: 1243959
ugauauuucuuggauuaga

SEQ ID NO: 1454311 - RNA, 19 nt, Artificial Sequence
  Description of Artificial Sequence: Synthetic oligonucleotide
  Antisense strand to SEQ ID NO: 1454310
ucuaauccaagaaauauca

SEQ ID NO: 1454312 - RNA, 19 nt, Artificial Sequence
  Description of Artificial Sequence: Synthetic oligonucleotide
  Sense strand starting at position 529 of SEQ ID NO: 1243959
cgcauuuaugcuuaucuca

SEQ ID NO: 1454313 - RNA, 19 nt, Artificial Sequence
  Description of Artificial Sequence: Synthetic oligonucleotide
  Antisense strand to SEQ ID NO: 1454312
ugagauaagcauaaaugcg

SEQ ID NO: 1454314 - RNA, 19 nt, Artificial Sequence
  Description of Artificial Sequence: Synthetic oligonucleotide
  Sense strand starting at position 841 of SEQ ID NO: 1243959
cgcgucuuucucccaaagu

SEQ ID NO: 1454315 - RNA, 19 nt, Artificial Sequence
  Description of Artificial Sequence: Synthetic oligonucleotide
  Antisense strand to SEQ ID NO: 1454314
acuuugggagaaagacgcg

SEQ ID NO: 1454316 - RNA, 19 nt, Artificial Sequence
  Description of Artificial Sequence: Synthetic oligonucleotide
  Sense strand starting at position 1355 of SEQ ID NO: 1243959
ugccgcuucccgcuacaau

SEQ ID NO: 1454317 - RNA, 19 nt, Artificial Sequence
  Description of Artificial Sequence: Synthetic oligonucleotide
  Antisense strand to SEQ ID NO: 1454316
auuguagcgggaagcggca

SEQ ID NO: 1454318 - RNA, 19 nt, Artificial Sequence
  Description of Artificial Sequence: Synthetic oligonucleotide
  Sense strand starting at position 1478 of SEQ ID NO: 1243959
ccuaccuagcgauacgauu

SEQ ID NO: 1454319 - RNA, 19 nt, Artificial Sequence
  Description of Artificial Sequence: Synthetic oligonucleotide
  Antisense strand to SEQ ID NO: 1454318
aaucguaucgcuagguagg

SEQ ID NO: 1454320 - RNA, 19 nt, Artificial Sequence
  Description of Artificial Sequence: Synthetic oligonucleotide
  Sense strand starting at position 1607 of SEQ ID NO: 1243959
cgcuccaggccucaauuua

SEQ ID NO: 1454321 - RNA, 19 nt, Artificial Sequence
  Description of Artificial Sequence: Synthetic oligonucleotide
  Antisense strand to SEQ ID NO: 1454320
uaaauugaggccuggagcg

SEQ ID NO: 1454322 - RNA, 19 nt, Artificial Sequence
  Description of Artificial Sequence: Synthetic oligonucleotide
  Sense strand starting at position 2227 of SEQ ID NO: 1243959
acggaaggguuaguucuau

SEQ ID NO: 1454323 - RNA, 19 nt, Artificial Sequence
  Description of Artificial Sequence: Synthetic oligonucleotide
  Antisense strand to SEQ ID NO: 1454322
auagaacuaacccuuccgu

SEQ ID NO: 1454324 - RNA, 19 nt, Artificial Sequence
  Description of Artificial Sequence: Synthetic oligonucleotide
  Sense strand starting at position 2341 of SEQ ID NO: 1243959
guaggguggcuaugggauu

SEQ ID NO: 1454325 - RNA, 19 nt, Artificial Sequence
  Description of Artificial Sequence: Synthetic oligonucleotide
  Antisense strand to SEQ ID NO: 1454324
aaucccauagccacccuac

SEQ ID NO: 1454326 - RNA, 19 nt, Artificial Sequence
  Description of Artificial Sequence: Synthetic oligonucleotide
  Sense strand starting at position 2421 of SEQ ID NO: 1243959
agcucaacucacuaggagu

SEQ ID NO: 1454327 - RNA, 19 nt, Artificial Sequence
  Description of Artificial Sequence: Synthetic oligonucleotide
  Antisense strand to SEQ ID NO: 1454326
acuccuagugaguugagcu

SEQ ID NO: 1454328 - RNA, 19 nt, Artificial Sequence
  Description of Artificial Sequence: Synthetic oligonucleotide
  Sense strand starting at position 2495 of SEQ ID NO: 1243959
uagagaaucucucugcagu

SEQ ID NO: 1454329 - RNA, 19 nt, Artificial Sequence
  Description of Artificial Sequence: Synthetic oligonucleotide
  Antisense strand to SEQ ID NO: 1454328
acugcagagagauucucua

SEQ ID NO: 1454330 - RNA, 19 nt, Artificial Sequence
  Description of Artificial Sequence: Synthetic oligonucleotide
  Sense strand starting at position 2698 of SEQ ID NO: 1243959
aucagucagccucagauau

SEQ ID NO: 1454331 - RNA, 19 nt, Artificial Sequence
  Description of Artificial Sequence: Synthetic oligonucleotide
  Antisense strand to SEQ ID NO: 1454330
auaucugaggcugacugau

SEQ ID NO: 1454332 - RNA, 19 nt, Artificial Sequence
  Description of Artificial Sequence: Synthetic oligonucleotide
  Sense strand starting at position 2849 of SEQ ID NO: 1243959
uugauuuccugcucaguca

SEQ ID NO: 1454333 - RNA, 19 nt, Artificial Sequence
  Description of Artificial Sequence: Synthetic oligonucleotide
  Antisense strand to SEQ ID NO: 1454332
ugacugagcaggaaaucaa

SEQ ID NO: 1454334 - RNA, 19 nt, Artificial Sequence
  Description of Artificial Sequence: Synthetic oligonucleotide
  Sense strand starting at position 2881 of SEQ ID NO: 1243959
gggugaaagucuccuuccu

SEQ ID NO: 1454335 - RNA, 19 nt, Artificial Sequence
  Description of Artificial Sequence: Synthetic oligonucleotide
  Antisense strand to SEQ ID NO: 1454334
aggaaggagacuuucaccc

SEQ ID NO: 1454336 - RNA, 19 nt, Artificial Sequence
  Description of Artificial Sequence: Synthetic oligonucleotide
  Sense strand starting at position 2937 of SEQ ID NO: 1243959
cgagcucaaggguaacuaa

SEQ ID NO: 1454337 - RNA, 19 nt, Artificial Sequence
  Description of Artificial Sequence: Synthetic oligonucleotide
  Antisense strand to SEQ ID NO: 1454336
uuaguuacccuugagcucg

SEQ ID NO: 1454338 - RNA, 19 nt, Artificial Sequence
  Description of Artificial Sequence: Synthetic oligonucleotide
  Sense strand starting at position 2991 of SEQ ID NO: 1243959
aacgacuugcuguagaaca

SEQ ID NO: 1454339 - RNA, 19 nt, Artificial Sequence
  Description of Artificial Sequence: Synthetic oligonucleotide
  Antisense strand to SEQ ID NO: 1454338
uguucuacagcaagucguu

SEQ ID NO: 1454340 - RNA, 19 nt, Artificial Sequence
  Description of Artificial Sequence: Synthetic oligonucleotide
  Sense strand starting at position 2993 of SEQ ID NO: 1243959
cgacuugcuguagaacaau

SEQ ID NO: 1454341 - RNA, 19 nt, Artificial Sequence
  Description of Artificial Sequence: Synthetic oligonucleotide
  Antisense strand to SEQ ID NO: 1454340
auuguucuacagcaagucg

SEQ ID NO: 1454342 - RNA, 19 nt, Artificial Sequence
  Description of Artificial Sequence: Synthetic oligonucleotide
  Sense strand starting at position 3173 of SEQ ID NO: 1243959
guaaguccucacugugaaa

SEQ ID NO: 1454343 - RNA, 19 nt, Artificial Sequence
  Description of Artificial Sequence: Synthetic oligonucleotide
  Antisense strand to SEQ ID NO: 1454342
uuucacagugaggacuuac

SEQ ID NO: 1454344 - RNA, 19 nt, Artificial Sequence
  Description of Artificial Sequence: Synthetic oligonucleotide
  Sense strand starting at position 3236 of SEQ ID NO: 1243959
cucccaaucugagugacau

SEQ ID NO: 1454345 - RNA, 19 nt, Artificial Sequence
  Description of Artificial Sequence: Synthetic oligonucleotide
  Antisense strand to SEQ ID NO: 1454344
augucacucagauugggag

SEQ ID NO: 1454346 - RNA, 19 nt, Artificial Sequence
  Description of Artificial Sequence: Synthetic oligonucleotide
  Sense strand starting at position 3237 of SEQ ID NO: 1243959
ucccaaucugagugacaug

SEQ ID NO: 1454347 - RNA, 19 nt, Artificial Sequence
  Description of Artificial Sequence: Synthetic oligonucleotide
  Antisense strand to SEQ ID NO: 1454346
caugucacucagauuggga

SEQ ID NO: 1454348 - RNA, 19 nt, Artificial Sequence
  Description of Artificial Sequence: Synthetic oligonucleotide
  Sense strand starting at position 3242 of SEQ ID NO: 1243959
aucugagugacaugauguc

SEQ ID NO: 1454349 - RNA, 19 nt, Artificial Sequence
  Description of Artificial Sequence: Synthetic oligonucleotide
  Antisense strand to SEQ ID NO: 1454348
gacaucaugucacucagau

SEQ ID NO: 1454350 - RNA, 19 nt, Artificial Sequence
  Description of Artificial Sequence: Synthetic oligonucleotide
  Sense strand starting at position 3248 of SEQ ID NO: 1243959
gugacaugauguccagagu

SEQ ID NO: 1454351 - RNA, 19 nt, Artificial Sequence
  Description of Artificial Sequence: Synthetic oligonucleotide
  Antisense strand to SEQ ID NO: 1454350
acucuggacaucaugucac

SEQ ID NO: 1454352 - RNA, 19 nt, Artificial Sequence
  Description of Artificial Sequence: Synthetic oligonucleotide
  Sense strand starting at position 3251 of SEQ ID NO: 1243959
acaugauguccagagugcu

SEQ ID NO: 1454353 - RNA, 19 nt, Artificial Sequence
  Description of Artificial Sequence: Synthetic oligonucleotide
  Antisense strand to SEQ ID NO: 1454352
agcacucuggacaucaugu

SEQ ID NO: 1454354 - RNA, 19 nt, Artificial Sequence
  Description of Artificial Sequence: Synthetic oligonucleotide
  Sense strand starting at position 3281 of SEQ ID NO: 1243959
uuguguucuggugaauaau

SEQ ID NO: 1454355 - RNA, 19 nt, Artificial Sequence
  Description of Artificial Sequence: Synthetic oligonucleotide
  Antisense strand to SEQ ID NO: 1454354
auuauucaccagaacacaa

SEQ ID NO: 1454356 - RNA, 19 nt, Artificial Sequence
  Description of Artificial Sequence: Synthetic oligonucleotide
  Sense strand starting at position 3318 of SEQ ID NO: 1243959
cccugauauugacugucca

SEQ ID NO: 1454357 - RNA, 19 nt, Artificial Sequence
  Description of Artificial Sequence: Synthetic oligonucleotide
  Antisense strand to SEQ ID NO: 1454356
uggacagucaauaucaggg

SEQ ID NO: 1454358 - RNA, 19 nt, Artificial Sequence
  Description of Artificial Sequence: Synthetic oligonucleotide
  Sense strand starting at position 3322 of SEQ ID NO: 1243959
gauauugacuguccacuga

SEQ ID NO: 1454359 - RNA, 19 nt, Artificial Sequence
  Description of Artificial Sequence: Synthetic oligonucleotide
  Antisense strand to SEQ ID NO: 1454358
ucaguggacagucaauauc

SEQ ID NO: 1454360 - RNA, 19 nt, Artificial Sequence
  Description of Artificial Sequence: Synthetic oligonucleotide
  Sense strand starting at position 3546 of SEQ ID NO: 1243959
uccuguuaugguggauuau

SEQ ID NO: 1454361 - RNA, 19 nt, Artificial Sequence
  Description of Artificial Sequence: Synthetic oligonucleotide
  Antisense strand to SEQ ID NO: 1454360
auaauccaccauaacagga

SEQ ID NO: 1454362 - RNA, 19 nt, Artificial Sequence
  Description of Artificial Sequence: Synthetic oligonucleotide
  Sense strand starting at position 3547 of SEQ ID NO: 1243959
ccuguuaugguggauuaua

SEQ ID NO: 1454363 - RNA, 19 nt, Artificial Sequence
  Description of Artificial Sequence: Synthetic oligonucleotide
  Antisense strand to SEQ ID NO: 1454362
uauaauccaccauaacagg

SEQ ID NO: 1454364 - RNA, 19 nt, Artificial Sequence
  Description of Artificial Sequence: Synthetic oligonucleotide
  Sense strand starting at position 3558 of SEQ ID NO: 1243959
ggauuauaguaguuaacuc

SEQ ID NO: 1454365 - RNA, 19 nt, Artificial Sequence
  Description of Artificial Sequence: Synthetic oligonucleotide
  Antisense strand to SEQ ID NO: 1454364
gaguuaacuacuauaaucc

SEQ ID NO: 1454366 - RNA, 19 nt, Artificial Sequence
  Description of Artificial Sequence: Synthetic oligonucleotide
  Sense strand starting at position 3565 of SEQ ID NO: 1243959
aguaguuaacucugaaauc

SEQ ID NO: 1454367 - RNA, 19 nt, Artificial Sequence
  Description of Artificial Sequence: Synthetic oligonucleotide
  Antisense strand to SEQ ID NO: 1454366
gauuucagaguuaacuacu

SEQ ID NO: 1454368 - RNA, 19 nt, Artificial Sequence
  Description of Artificial Sequence: Synthetic oligonucleotide
  Sense strand starting at position 3623 of SEQ ID NO: 1243959
guuugaucuuaugcaauuu

SEQ ID NO: 1454369 - RNA, 19 nt, Artificial Sequence
  Description of Artificial Sequence: Synthetic oligonucleotide
  Antisense strand to SEQ ID NO: 1454368
aaauugcauaagaucaaac

SEQ ID NO: 1454370 - RNA, 19 nt, Artificial Sequence
  Description of Artificial Sequence: Synthetic oligonucleotide
  Sense strand starting at position 3674 of SEQ ID NO: 1243959
guagaacaguaacuguuau

SEQ ID NO: 1454371 - RNA, 19 nt, Artificial Sequence
  Description of Artificial Sequence: Synthetic oligonucleotide
  Antisense strand to SEQ ID NO: 1454370
auaacaguuacuguucuac

SEQ ID NO: 1454372 - RNA, 19 nt, Artificial Sequence
  Description of Artificial Sequence: Synthetic oligonucleotide
  Sense strand starting at position 3695 of SEQ ID NO: 1243959
uuaaaugaguucuugcaca

SEQ ID NO: 1454373 - RNA, 19 nt, Artificial Sequence
  Description of Artificial Sequence: Synthetic oligonucleotide
  Antisense strand to SEQ ID NO: 1454372
ugugcaagaacucauuuaa

SEQ ID NO: 1454374 - RNA, 19 nt, Artificial Sequence
  Description of Artificial Sequence: Synthetic oligonucleotide
  Sense strand starting at position 3700 of SEQ ID NO: 1243959
ugaguucuugcacauaaga

SEQ ID NO: 1454375 - RNA, 19 nt, Artificial Sequence
  Description of Artificial Sequence: Synthetic oligonucleotide
  Antisense strand to SEQ ID NO: 1454374
ucuuaugugcaagaacuca

SEQ ID NO: 1454376 - RNA, 19 nt, Artificial Sequence
  Description of Artificial Sequence: Synthetic oligonucleotide
  Sense strand starting at position 3720 of SEQ ID NO: 1243959
ugagcaagugucugacaca

SEQ ID NO: 1454377 - RNA, 19 nt, Artificial Sequence
  Description of Artificial Sequence: Synthetic oligonucleotide
  Antisense strand to SEQ ID NO: 1454376
ugugucagacacuugcuca

SEQ ID NO: 1454378 - RNA, 19 nt, Artificial Sequence
  Description of Artificial Sequence: Synthetic oligonucleotide
  Sense strand starting at position 3759 of SEQ ID NO: 1243959
ucagcuaucgcuguuguua

SEQ ID NO: 1454379 - RNA, 19 nt, Artificial Sequence
  Description of Artificial Sequence: Synthetic oligonucleotide
  Antisense strand to SEQ ID NO: 1454378
uaacaacagcgauagcuga

SEQ ID NO: 1454380 - RNA, 19 nt, Artificial Sequence
  Description of Artificial Sequence: Synthetic oligonucleotide
  Sense strand starting at position 3760 of SEQ ID NO: 1243959
cagcuaucgcuguuguuau

SEQ ID NO: 1454381 - RNA, 19 nt, Artificial Sequence
  Description of Artificial Sequence: Synthetic oligonucleotide
  Antisense strand to SEQ ID NO: 1454380
auaacaacagcgauagcug

SEQ ID NO: 1454382 - RNA, 19 nt, Artificial Sequence
  Description of Artificial Sequence: Synthetic oligonucleotide
  Sense strand starting at position 3762 of SEQ ID NO: 1243959
gcuaucgcuguuguuauua

SEQ ID NO: 1454383 - RNA, 19 nt, Artificial Sequence
  Description of Artificial Sequence: Synthetic oligonucleotide
  Antisense strand to SEQ ID NO: 1454382
uaauaacaacagcgauagc

SEQ ID NO: 1454384 - RNA, 19 nt, Artificial Sequence
  Description of Artificial Sequence: Synthetic oligonucleotide
  Sense strand starting at position 3797 of SEQ ID NO: 1243959
ccguaacagguuuauccua

SEQ ID NO: 1454385 - RNA, 19 nt, Artificial Sequence
  Description of Artificial Sequence: Synthetic oligonucleotide
  Antisense strand to SEQ ID NO: 1454384
uaggauaaaccuguuacgg

SEQ ID NO: 1454386 - RNA, 19 nt, Artificial Sequence
  Description of Artificial Sequence: Synthetic oligonucleotide
  Sense strand starting at position 3799 of SEQ ID NO: 1243959
guaacagguuuauccuaua

SEQ ID NO: 1454387 - RNA, 19 nt, Artificial Sequence
  Description of Artificial Sequence: Synthetic oligonucleotide
  Antisense strand to SEQ ID NO: 1454386
uauaggauaaaccuguuac

SEQ ID NO: 1454388 - RNA, 19 nt, Artificial Sequence
  Description of Artificial Sequence: Synthetic oligonucleotide
  Sense strand starting at position 3804 of SEQ ID NO: 1243959
agguuuauccuauaccaug

SEQ ID NO: 1454389 - RNA, 19 nt, Artificial Sequence
  Description of Artificial Sequence: Synthetic oligonucleotide
  Antisense strand to SEQ ID NO: 1454388
caugguauaggauaaaccu

SEQ ID NO: 1454390 - RNA, 19 nt, Artificial Sequence
  Description of Artificial Sequence: Synthetic oligonucleotide
  Sense strand starting at position 49 of SEQ ID NO: 1243960
ccaaauauuugacaguaug

SEQ ID NO: 1454391 - RNA, 19 nt, Artificial Sequence
  Description of Artificial Sequence: Synthetic oligonucleotide
  Antisense strand to SEQ ID NO: 1454390
cauacugucaaauauuugg

SEQ ID NO: 1454392 - RNA, 19 nt, Artificial Sequence
  Description of Artificial Sequence: Synthetic oligonucleotide
  Sense strand starting at position 61 of SEQ ID NO: 1243960
caguaugcugcugacacaa

SEQ ID NO: 1454393 - RNA, 19 nt, Artificial Sequence
  Description of Artificial Sequence: Synthetic oligonucleotide
  Antisense strand to SEQ ID NO: 1454392
uugugucagcagcauacug

SEQ ID NO: 1454394 - RNA, 19 nt, Artificial Sequence
  Description of Artificial Sequence: Synthetic oligonucleotide
  Sense strand starting at position 616 of SEQ ID NO: 1243960
uuaagaugcugauauuucu

SEQ ID NO: 1454395 - RNA, 19 nt, Artificial Sequence
  Description of Artificial Sequence: Synthetic oligonucleotide
  Antisense strand to SEQ ID NO: 1454394
agaaauaucagcaucuuaa

SEQ ID NO: 1454396 - RNA, 19 nt, Artificial Sequence
  Description of Artificial Sequence: Synthetic oligonucleotide
  Sense strand starting at position 625 of SEQ ID NO: 1243960
ugauauuucuuggauuaga

SEQ ID NO: 1454397 - RNA, 19 nt, Artificial Sequence
  Description of Artificial Sequence: Synthetic oligonucleotide
  Antisense strand to SEQ ID NO: 1454396
ucuaauccaagaaauauca

SEQ ID NO: 1454398 - RNA, 19 nt, Artificial Sequence
  Description of Artificial Sequence: Synthetic oligonucleotide
  Sense strand starting at position 786 of SEQ ID NO: 1243960
cgcauuuaugcuuaucuca

SEQ ID NO: 1454399 - RNA, 19 nt, Artificial Sequence
  Description of Artificial Sequence: Synthetic oligonucleotide
  Antisense strand to SEQ ID NO: 1454398
ugagauaagcauaaaugcg

SEQ ID NO: 1454400 - RNA, 19 nt, Artificial Sequence
  Description of Artificial Sequence: Synthetic oligonucleotide
  Sense strand starting at position 1098 of SEQ ID NO: 1243960
cgcgucuuucucccaaagu

SEQ ID NO: 1454401 - RNA, 19 nt, Artificial Sequence
  Description of Artificial Sequence: Synthetic oligonucleotide
  Antisense strand to SEQ ID NO: 1454400
acuuugggagaaagacgcg

SEQ ID NO: 1454402 - RNA, 19 nt, Artificial Sequence
  Description of Artificial Sequence: Synthetic oligonucleotide
  Sense strand starting at position 1612 of SEQ ID NO: 1243960
ugccgcuucccgcuacaau

SEQ ID NO: 1454403 - RNA, 19 nt, Artificial Sequence
  Description of Artificial Sequence: Synthetic oligonucleotide
  Antisense strand to SEQ ID NO: 1454402
auuguagcgggaagcggca

SEQ ID NO: 1454404 - RNA, 19 nt, Artificial Sequence
  Description of Artificial Sequence: Synthetic oligonucleotide
  Sense strand starting at position 1735 of SEQ ID NO: 1243960
ccuaccuagcgauacgauu

SEQ ID NO: 1454405 - RNA, 19 nt, Artificial Sequence
  Description of Artificial Sequence: Synthetic oligonucleotide
  Antisense strand to SEQ ID NO: 1454404
aaucguaucgcuagguagg

SEQ ID NO: 1454406 - RNA, 19 nt, Artificial Sequence
  Description of Artificial Sequence: Synthetic oligonucleotide
  Sense strand starting at position 1864 of SEQ ID NO: 1243960
cgcuccaggccucaauuua

SEQ ID NO: 1454407 - RNA, 19 nt, Artificial Sequence
  Description of Artificial Sequence: Synthetic oligonucleotide
  Antisense strand to SEQ ID NO: 1454406
uaaauugaggccuggagcg

SEQ ID NO: 1454408 - RNA, 19 nt, Artificial Sequence
  Description of Artificial Sequence: Synthetic oligonucleotide
  Sense strand starting at position 2484 of SEQ ID NO: 1243960
acggaaggguuaguucuau

SEQ ID NO: 1454409 - RNA, 19 nt, Artificial Sequence
  Description of Artificial Sequence: Synthetic oligonucleotide
  Antisense strand to SEQ ID NO: 1454408
auagaacuaacccuuccgu

SEQ ID NO: 1454410 - RNA, 19 nt, Artificial Sequence
  Description of Artificial Sequence: Synthetic oligonucleotide
  Sense strand starting at position 2490 of SEQ ID NO: 1243960
ggguuaguucuauguauua

SEQ ID NO: 1454411 - RNA, 19 nt, Artificial Sequence
  Description of Artificial Sequence: Synthetic oligonucleotide
  Antisense strand to SEQ ID NO: 1454410
uaauacauagaacuaaccc

SEQ ID NO: 1454412 - RNA, 19 nt, Artificial Sequence
  Description of Artificial Sequence: Synthetic oligonucleotide
  Sense strand starting at position 2598 of SEQ ID NO: 1243960
guaggguggcuaugggauu

SEQ ID NO: 1454413 - RNA, 19 nt, Artificial Sequence
  Description of Artificial Sequence: Synthetic oligonucleotide
  Antisense strand to SEQ ID NO: 1454412
aaucccauagccacccuac

SEQ ID NO: 1454414 - RNA, 19 nt, Artificial Sequence
  Description of Artificial Sequence: Synthetic oligonucleotide
  Sense strand starting at position 2678 of SEQ ID NO: 1243960
agcucaacucacuaggagu

SEQ ID NO: 1454415 - RNA, 19 nt, Artificial Sequence
  Description of Artificial Sequence: Synthetic oligonucleotide
  Antisense strand to SEQ ID NO: 1454414
acuccuagugaguugagcu

SEQ ID NO: 1454416 - RNA, 19 nt, Artificial Sequence
  Description of Artificial Sequence: Synthetic oligonucleotide
  Sense strand starting at position 2750 of SEQ ID NO: 1243960
cguagagaaucucucugca

SEQ ID NO: 1454417 - RNA, 19 nt, Artificial Sequence
  Description of Artificial Sequence: Synthetic oligonucleotide
  Antisense strand to SEQ ID NO: 1454416
ugcagagagauucucuacg

SEQ ID NO: 1454418 - RNA, 19 nt, Artificial Sequence
  Description of Artificial Sequence: Synthetic oligonucleotide
  Sense strand starting at position 2752 of SEQ ID NO: 1243960
uagagaaucucucugcagu

SEQ ID NO: 1454419 - RNA, 19 nt, Artificial Sequence
  Description of Artificial Sequence: Synthetic oligonucleotide
  Antisense strand to SEQ ID NO: 1454418
acugcagagagauucucua

SEQ ID NO: 1454420 - RNA, 19 nt, Artificial Sequence
  Description of Artificial Sequence: Synthetic oligonucleotide
  Sense strand starting at position 2955 of SEQ ID NO: 1243960
aucagucagccucagauau

SEQ ID NO: 1454421 - RNA, 19 nt, Artificial Sequence
  Description of Artificial Sequence: Synthetic oligonucleotide
  Antisense strand to SEQ ID NO: 1454420
auaucugaggcugacugau

SEQ ID NO: 1454422 - RNA, 19 nt, Artificial Sequence
  Description of Artificial Sequence: Synthetic oligonucleotide
  Sense strand starting at position 3106 of SEQ ID NO: 1243960
uugauuuccugcucaguca

SEQ ID NO: 1454423 - RNA, 19 nt, Artificial Sequence
  Description of Artificial Sequence: Synthetic oligonucleotide
  Antisense strand to SEQ ID NO: 1454422
ugacugagcaggaaaucaa

SEQ ID NO: 1454424 - RNA, 19 nt, Artificial Sequence
  Description of Artificial Sequence: Synthetic oligonucleotide
  Sense strand starting at position 3138 of SEQ ID NO: 1243960
gggugaaagucuccuuccu

SEQ ID NO: 1454425 - RNA, 19 nt, Artificial Sequence
  Description of Artificial Sequence: Synthetic oligonucleotide
  Antisense strand to SEQ ID NO: 1454424
aggaaggagacuuucaccc

SEQ ID NO: 1454426 - RNA, 19 nt, Artificial Sequence
  Description of Artificial Sequence: Synthetic oligonucleotide
  Sense strand starting at position 3140 of SEQ ID NO: 1243960
gugaaagucuccuuccuca

SEQ ID NO: 1454427 - RNA, 19 nt, Artificial Sequence
  Description of Artificial Sequence: Synthetic oligonucleotide
  Antisense strand to SEQ ID NO: 1454426
ugaggaaggagacuuucac

SEQ ID NO: 1454428 - RNA, 19 nt, Artificial Sequence
  Description of Artificial Sequence: Synthetic oligonucleotide
  Sense strand starting at position 3194 of SEQ ID NO: 1243960
cgagcucaaggguaacuaa

SEQ ID NO: 1454429 - RNA, 19 nt, Artificial Sequence
  Description of Artificial Sequence: Synthetic oligonucleotide
  Antisense strand to SEQ ID NO: 1454428
uuaguuacccuugagcucg

SEQ ID NO: 1454430 - RNA, 19 nt, Artificial Sequence
  Description of Artificial Sequence: Synthetic oligonucleotide
  Sense strand starting at position 3248 of SEQ ID NO: 1243960
aacgacuugcuguagaaca

SEQ ID NO: 1454431 - RNA, 19 nt, Artificial Sequence
  Description of Artificial Sequence: Synthetic oligonucleotide
  Antisense strand to SEQ ID NO: 1454430
uguucuacagcaagucguu

SEQ ID NO: 1454432 - RNA, 19 nt, Artificial Sequence
  Description of Artificial Sequence: Synthetic oligonucleotide
  Sense strand starting at position 3250 of SEQ ID NO: 1243960
cgacuugcuguagaacaau

SEQ ID NO: 1454433 - RNA, 19 nt, Artificial Sequence
  Description of Artificial Sequence: Synthetic oligonucleotide
  Antisense strand to SEQ ID NO: 1454432
auuguucuacagcaagucg

SEQ ID NO: 1454434 - RNA, 19 nt, Artificial Sequence
  Description of Artificial Sequence: Synthetic oligonucleotide
  Sense strand starting at position 3430 of SEQ ID NO: 1243960
guaaguccucacugugaaa

SEQ ID NO: 1454435 - RNA, 19 nt, Artificial Sequence
  Description of Artificial Sequence: Synthetic oligonucleotide
  Antisense strand to SEQ ID NO: 1454434
uuucacagugaggacuuac

SEQ ID NO: 1454436 - RNA, 19 nt, Artificial Sequence
  Description of Artificial Sequence: Synthetic oligonucleotide
  Sense strand starting at position 3493 of SEQ ID NO: 1243960
cucccaaucugagugacau

SEQ ID NO: 1454437 - RNA, 19 nt, Artificial Sequence
  Description of Artificial Sequence: Synthetic oligonucleotide
  Antisense strand to SEQ ID NO: 1454436
augucacucagauugggag

SEQ ID NO: 1454438 - RNA, 19 nt, Artificial Sequence
  Description of Artificial Sequence: Synthetic oligonucleotide
  Sense strand starting at position 3494 of SEQ ID NO: 1243960
ucccaaucugagugacaug

SEQ ID NO: 1454439 - RNA, 19 nt, Artificial Sequence
  Description of Artificial Sequence: Synthetic oligonucleotide
  Antisense strand to SEQ ID NO: 1454438
caugucacucagauuggga

SEQ ID NO: 1454440 - RNA, 19 nt, Artificial Sequence
  Description of Artificial Sequence: Synthetic oligonucleotide
  Sense strand starting at position 3499 of SEQ ID NO: 1243960
aucugagugacaugauguc

SEQ ID NO: 1454441 - RNA, 19 nt, Artificial Sequence
  Description of Artificial Sequence: Synthetic oligonucleotide
  Antisense strand to SEQ ID NO: 1454440
gacaucaugucacucagau

SEQ ID NO: 1454442 - RNA, 19 nt, Artificial Sequence
  Description of Artificial Sequence: Synthetic oligonucleotide
  Sense strand starting at position 3505 of SEQ ID NO: 1243960
gugacaugauguccagagu

SEQ ID NO: 1454443 - RNA, 19 nt, Artificial Sequence
  Description of Artificial Sequence: Synthetic oligonucleotide
  Antisense strand to SEQ ID NO: 1454442
acucuggacaucaugucac

SEQ ID NO: 1454444 - RNA, 19 nt, Artificial Sequence
  Description of Artificial Sequence: Synthetic oligonucleotide
  Sense strand starting at position 3508 of SEQ ID NO: 1243960
acaugauguccagagugcu

SEQ ID NO: 1454445 - RNA, 19 nt, Artificial Sequence
  Description of Artificial Sequence: Synthetic oligonucleotide
  Antisense strand to SEQ ID NO: 1454444
agcacucuggacaucaugu

SEQ ID NO: 1454446 - RNA, 19 nt, Artificial Sequence
  Description of Artificial Sequence: Synthetic oligonucleotide
  Sense strand starting at position 3538 of SEQ ID NO: 1243960
uuguguucuggugaauaau

SEQ ID NO: 1454447 - RNA, 19 nt, Artificial Sequence
  Description of Artificial Sequence: Synthetic oligonucleotide
  Antisense strand to SEQ ID NO: 1454446
auuauucaccagaacacaa

SEQ ID NO: 1454448 - RNA, 19 nt, Artificial Sequence
  Description of Artificial Sequence: Synthetic oligonucleotide
  Sense strand starting at position 3575 of SEQ ID NO: 1243960
cccugauauugacugucca

SEQ ID NO: 1454449 - RNA, 19 nt, Artificial Sequence
  Description of Artificial Sequence: Synthetic oligonucleotide
  Antisense strand to SEQ ID NO: 1454448
uggacagucaauaucaggg

SEQ ID NO: 1454450 - RNA, 19 nt, Artificial Sequence
  Description of Artificial Sequence: Synthetic oligonucleotide
  Sense strand starting at position 3579 of SEQ ID NO: 1243960
gauauugacuguccacuga

SEQ ID NO: 1454451 - RNA, 19 nt, Artificial Sequence
  Description of Artificial Sequence: Synthetic oligonucleotide
  Antisense strand to SEQ ID NO: 1454450
ucaguggacagucaauauc

SEQ ID NO: 1454452 - RNA, 19 nt, Artificial Sequence
  Description of Artificial Sequence: Synthetic oligonucleotide
  Sense strand starting at position 3803 of SEQ ID NO: 1243960
uccuguuaugguggauuau

SEQ ID NO: 1454453 - RNA, 19 nt, Artificial Sequence
  Description of Artificial Sequence: Synthetic oligonucleotide
  Antisense strand to SEQ ID NO: 1454452
auaauccaccauaacagga

SEQ ID NO: 1454454 - RNA, 19 nt, Artificial Sequence
  Description of Artificial Sequence: Synthetic oligonucleotide
  Sense strand starting at position 3804 of SEQ ID NO: 1243960
ccuguuaugguggauuaua

SEQ ID NO: 1454455 - RNA, 19 nt, Artificial Sequence
  Description of Artificial Sequence: Synthetic oligonucleotide
  Antisense strand to SEQ ID NO: 1454454
uauaauccaccauaacagg

SEQ ID NO: 1454456 - RNA, 19 nt, Artificial Sequence
  Description of Artificial Sequence: Synthetic oligonucleotide
  Sense strand starting at position 3815 of SEQ ID NO: 1243960
ggauuauaguaguuaacuc

SEQ ID NO: 1454457 - RNA, 19 nt, Artificial Sequence
  Description of Artificial Sequence: Synthetic oligonucleotide
  Antisense strand to SEQ ID NO: 1454456
gaguuaacuacuauaaucc

SEQ ID NO: 1454458 - RNA, 19 nt, Artificial Sequence
  Description of Artificial Sequence: Synthetic oligonucleotide
  Sense strand starting at position 3822 of SEQ ID NO: 1243960
aguaguuaacucugaaauc

SEQ ID NO: 1454459 - RNA, 19 nt, Artificial Sequence
  Description of Artificial Sequence: Synthetic oligonucleotide
  Antisense strand to SEQ ID NO: 1454458
gauuucagaguuaacuacu

SEQ ID NO: 1454460 - RNA, 19 nt, Artificial Sequence
  Description of Artificial Sequence: Synthetic oligonucleotide
  Sense strand starting at position 3880 of SEQ ID NO: 1243960
guuugaucuuaugcaauuu

SEQ ID NO: 1454461 - RNA, 19 nt, Artificial Sequence
  Description of Artificial Sequence: Synthetic oligonucleotide
  Antisense strand to SEQ ID NO: 1454460
aaauugcauaagaucaaac

SEQ ID NO: 1454462 - RNA, 19 nt, Artificial Sequence
  Description of Artificial Sequence: Synthetic oligonucleotide
  Sense strand starting at position 3931 of SEQ ID NO: 1243960
guagaacaguaacuguuau

SEQ ID NO: 1454463 - RNA, 19 nt, Artificial Sequence
  Description of Artificial Sequence: Synthetic oligonucleotide
  Antisense strand to SEQ ID NO: 1454462
auaacaguuacuguucuac

SEQ ID NO: 1454464 - RNA, 19 nt, Artificial Sequence
  Description of Artificial Sequence: Synthetic oligonucleotide
  Sense strand starting at position 3952 of SEQ ID NO: 1243960
uuaaaugaguucuugcaca

SEQ ID NO: 1454465 - RNA, 19 nt, Artificial Sequence
  Description of Artificial Sequence: Synthetic oligonucleotide
  Antisense strand to SEQ ID NO: 1454464
ugugcaagaacucauuuaa

SEQ ID NO: 1454466 - RNA, 19 nt, Artificial Sequence
  Description of Artificial Sequence: Synthetic oligonucleotide
  Sense strand starting at position 3957 of SEQ ID NO: 1243960
ugaguucuugcacauaaga

SEQ ID NO: 1454467 - RNA, 19 nt, Artificial Sequence
  Description of Artificial Sequence: Synthetic oligonucleotide
  Antisense strand to SEQ ID NO: 1454466
ucuuaugugcaagaacuca

SEQ ID NO: 1454468 - RNA, 19 nt, Artificial Sequence
  Description of Artificial Sequence: Synthetic oligonucleotide
  Sense strand starting at position 3977 of SEQ ID NO: 1243960
ugagcaagugucugacaca

SEQ ID NO: 1454469 - RNA, 19 nt, Artificial Sequence
  Description of Artificial Sequence: Synthetic oligonucleotide
  Antisense strand to SEQ ID NO: 1454468
ugugucagacacuugcuca

SEQ ID NO: 1454470 - RNA, 19 nt, Artificial Sequence
  Description of Artificial Sequence: Synthetic oligonucleotide
  Sense strand starting at position 222 of SEQ ID NO: 1243961
aacagaggguccucaguua

SEQ ID NO: 1454471 - RNA, 19 nt, Artificial Sequence
  Description of Artificial Sequence: Synthetic oligonucleotide
  Antisense strand to SEQ ID NO: 1454470
uaacugaggacccucuguu

SEQ ID NO: 1454472 - RNA, 19 nt, Artificial Sequence
  Description of Artificial Sequence: Synthetic oligonucleotide
  Sense strand starting at position 279 of SEQ ID NO: 1243961
ucugaauuagugugagaau

SEQ ID NO: 1454473 - RNA, 19 nt, Artificial Sequence
  Description of Artificial Sequence: Synthetic oligonucleotide
  Antisense strand to SEQ ID NO: 1454472
auucucacacuaauucaga

SEQ ID NO: 1454474 - RNA, 19 nt, Artificial Sequence
  Description of Artificial Sequence: Synthetic oligonucleotide
  Sense strand starting at position 280 of SEQ ID NO: 1243961
cugaauuagugugagaaug

SEQ ID NO: 1454475 - RNA, 19 nt, Artificial Sequence
  Description of Artificial Sequence: Synthetic oligonucleotide
  Antisense strand to SEQ ID NO: 1454474
cauucucacacuaauucag

SEQ ID NO: 1454476 - RNA, 19 nt, Artificial Sequence
  Description of Artificial Sequence: Synthetic oligonucleotide
  Sense strand starting at position 282 of SEQ ID NO: 1243961
gaauuagugugagaaugag

SEQ ID NO: 1454477 - RNA, 19 nt, Artificial Sequence
  Description of Artificial Sequence: Synthetic oligonucleotide
  Antisense strand to SEQ ID NO: 1454476
cucauucucacacuaauuc

SEQ ID NO: 1454478 - RNA, 19 nt, Artificial Sequence
  Description of Artificial Sequence: Synthetic oligonucleotide
  Sense strand starting at position 288 of SEQ ID NO: 1243961
gugugagaaugagacucau

SEQ ID NO: 1454479 - RNA, 19 nt, Artificial Sequence
  Description of Artificial Sequence: Synthetic oligonucleotide
  Antisense strand to SEQ ID NO: 1454478
augagucucauucucacac

SEQ ID NO: 1454480 - RNA, 19 nt, Artificial Sequence
  Description of Artificial Sequence: Synthetic oligonucleotide
  Sense strand starting at position 302 of SEQ ID NO: 1243961
cucaucagguaucugaaau

SEQ ID NO: 1454481 - RNA, 19 nt, Artificial Sequence
  Description of Artificial Sequence: Synthetic oligonucleotide
  Antisense strand to SEQ ID NO: 1454480
auuucagauaccugaugag

SEQ ID NO: 1454482 - RNA, 19 nt, Artificial Sequence
  Description of Artificial Sequence: Synthetic oligonucleotide
  Sense strand starting at position 334 of SEQ ID NO: 1243961
ucaagagcugaucauguaa

SEQ ID NO: 1454483 - RNA, 19 nt, Artificial Sequence
  Description of Artificial Sequence: Synthetic oligonucleotide
  Antisense strand to SEQ ID NO: 1454482
uuacaugaucagcucuuga

SEQ ID NO: 1454484 - RNA, 19 nt, Artificial Sequence
  Description of Artificial Sequence: Synthetic oligonucleotide
  Sense strand starting at position 341 of SEQ ID NO: 1243961
cugaucauguaacaguauu

SEQ ID NO: 1454485 - RNA, 19 nt, Artificial Sequence
  Description of Artificial Sequence: Synthetic oligonucleotide
  Antisense strand to SEQ ID NO: 1454484
aauacuguuacaugaucag

SEQ ID NO: 1454486 - RNA, 19 nt, Artificial Sequence
  Description of Artificial Sequence: Synthetic oligonucleotide
  Sense strand starting at position 628 of SEQ ID NO: 1243961
cagacaggaucugagauuu

SEQ ID NO: 1454487 - RNA, 19 nt, Artificial Sequence
  Description of Artificial Sequence: Synthetic oligonucleotide
  Antisense strand to SEQ ID NO: 1454486
aaaucucagauccugucug

SEQ ID NO: 1454488 - RNA, 19 nt, Artificial Sequence
  Description of Artificial Sequence: Synthetic oligonucleotide
  Sense strand starting at position 807 of SEQ ID NO: 1243961
acgaauuaggccuagcaag

SEQ ID NO: 1454489 - RNA, 19 nt, Artificial Sequence
  Description of Artificial Sequence: Synthetic oligonucleotide
  Antisense strand to SEQ ID NO: 1454488
cuugcuaggccuaauucgu

SEQ ID NO: 1454490 - RNA, 19 nt, Artificial Sequence
  Description of Artificial Sequence: Synthetic oligonucleotide
  Sense strand starting at position 1109 of SEQ ID NO: 1243961
agguuaagcucguucagag

SEQ ID NO: 1454491 - RNA, 19 nt, Artificial Sequence
  Description of Artificial Sequence: Synthetic oligonucleotide
  Antisense strand to SEQ ID NO: 1454490
cucugaacgagcuuaaccu

SEQ ID NO: 1454492 - RNA, 19 nt, Artificial Sequence
  Description of Artificial Sequence: Synthetic oligonucleotide
  Sense strand starting at position 1116 of SEQ ID NO: 1243961
gcucguucagagcugucaa

SEQ ID NO: 1454493 - RNA, 19 nt, Artificial Sequence
  Description of Artificial Sequence: Synthetic oligonucleotide
  Antisense strand to SEQ ID NO: 1454492
uugacagcucugaacgagc

SEQ ID NO: 1454494 - RNA, 19 nt, Artificial Sequence
  Description of Artificial Sequence: Synthetic oligonucleotide
  Sense strand starting at position 1194 of SEQ ID NO: 1243961
cacugaaaucgucagggcu

SEQ ID NO: 1454495 - RNA, 19 nt, Artificial Sequence
  Description of Artificial Sequence: Synthetic oligonucleotide
  Antisense strand to SEQ ID NO: 1454494
agcccugacgauuucagug

SEQ ID NO: 1454496 - RNA, 19 nt, Artificial Sequence
  Description of Artificial Sequence: Synthetic oligonucleotide
  Sense strand starting at position 1221 of SEQ ID NO: 1243961
gccgaauguguccuuugcu

SEQ ID NO: 1454497 - RNA, 19 nt, Artificial Sequence
  Description of Artificial Sequence: Synthetic oligonucleotide
  Antisense strand to SEQ ID NO: 1454496
agcaaaggacacauucggc

SEQ ID NO: 1454498 - RNA, 19 nt, Artificial Sequence
  Description of Artificial Sequence: Synthetic oligonucleotide
  Sense strand starting at position 1782 of SEQ ID NO: 1243961
gcccgcgaccuuucccaua

SEQ ID NO: 1454499 - RNA, 19 nt, Artificial Sequence
  Description of Artificial Sequence: Synthetic oligonucleotide
  Antisense strand to SEQ ID NO: 1454498
uaugggaaaggucgcgggc

SEQ ID NO: 1454500 - RNA, 19 nt, Artificial Sequence
  Description of Artificial Sequence: Synthetic oligonucleotide
  Sense strand starting at position 1787 of SEQ ID NO: 1243961
cgaccuuucccauagcuua

SEQ ID NO: 1454501 - RNA, 19 nt, Artificial Sequence
  Description of Artificial Sequence: Synthetic oligonucleotide
  Antisense strand to SEQ ID NO: 1454500
uaagcuaugggaaaggucg

SEQ ID NO: 1454502 - RNA, 19 nt, Artificial Sequence
  Description of Artificial Sequence: Synthetic oligonucleotide
  Sense strand starting at position 2000 of SEQ ID NO: 1243961
ggugccuguguuuaguuau

SEQ ID NO: 1454503 - RNA, 19 nt, Artificial Sequence
  Description of Artificial Sequence: Synthetic oligonucleotide
  Antisense strand to SEQ ID NO: 1454502
auaacuaaacacaggcacc

SEQ ID NO: 1454504 - RNA, 19 nt, Artificial Sequence
  Description of Artificial Sequence: Synthetic oligonucleotide
  Sense strand starting at position 2003 of SEQ ID NO: 1243961
gccuguguuuaguuauaua

SEQ ID NO: 1454505 - RNA, 19 nt, Artificial Sequence
  Description of Artificial Sequence: Synthetic oligonucleotide
  Antisense strand to SEQ ID NO: 1454504
uauauaacuaaacacaggc

SEQ ID NO: 1454506 - RNA, 19 nt, Artificial Sequence
  Description of Artificial Sequence: Synthetic oligonucleotide
  Sense strand starting at position 2201 of SEQ ID NO: 1243961
gagggaaagcuugaucugu

SEQ ID NO: 1454507 - RNA, 19 nt, Artificial Sequence
  Description of Artificial Sequence: Synthetic oligonucleotide
  Antisense strand to SEQ ID NO: 1454506
acagaucaagcuuucccuc

SEQ ID NO: 1454508 - RNA, 19 nt, Artificial Sequence
  Description of Artificial Sequence: Synthetic oligonucleotide
  Sense strand starting at position 2203 of SEQ ID NO: 1243961
gggaaagcuugaucugucu

SEQ ID NO: 1454509 - RNA, 19 nt, Artificial Sequence
  Description of Artificial Sequence: Synthetic oligonucleotide
  Antisense strand to SEQ ID NO: 1454508
agacagaucaagcuuuccc

SEQ ID NO: 1454510 - RNA, 19 nt, Artificial Sequence
  Description of Artificial Sequence: Synthetic oligonucleotide
  Sense strand starting at position 2335 of SEQ ID NO: 1243961
gcaucccugucuucucgaa

SEQ ID NO: 1454511 - RNA, 19 nt, Artificial Sequence
  Description of Artificial Sequence: Synthetic oligonucleotide
  Antisense strand to SEQ ID NO: 1454510
uucgagaagacagggaugc

SEQ ID NO: 1454512 - RNA, 19 nt, Artificial Sequence
  Description of Artificial Sequence: Synthetic oligonucleotide
  Sense strand starting at position 2377 of SEQ ID NO: 1243961
gaacacuccuuagagagga

SEQ ID NO: 1454513 - RNA, 19 nt, Artificial Sequence
  Description of Artificial Sequence: Synthetic oligonucleotide
  Antisense strand to SEQ ID NO: 1454512
uccucucuaaggaguguuc

SEQ ID NO: 1454514 - RNA, 19 nt, Artificial Sequence
  Description of Artificial Sequence: Synthetic oligonucleotide
  Sense strand starting at position 2393 of SEQ ID NO: 1243961
ggauuuagaugaugagccu

SEQ ID NO: 1454515 - RNA, 19 nt, Artificial Sequence
  Description of Artificial Sequence: Synthetic oligonucleotide
  Antisense strand to SEQ ID NO: 1454514
aggcucaucaucuaaaucc

SEQ ID NO: 1454516 - RNA, 19 nt, Artificial Sequence
  Description of Artificial Sequence: Synthetic oligonucleotide
  Sense strand starting at position 2493 of SEQ ID NO: 1243961
gcggcacuuugauuaauca

SEQ ID NO: 1454517 - RNA, 19 nt, Artificial Sequence
  Description of Artificial Sequence: Synthetic oligonucleotide
  Antisense strand to SEQ ID NO: 1454516
ugauuaaucaaagugccgc

SEQ ID NO: 1454518 - RNA, 19 nt, Artificial Sequence
  Description of Artificial Sequence: Synthetic oligonucleotide
  Sense strand starting at position 2494 of SEQ ID NO: 1243961
cggcacuuugauuaaucaa

SEQ ID NO: 1454519 - RNA, 19 nt, Artificial Sequence
  Description of Artificial Sequence: Synthetic oligonucleotide
  Antisense strand to SEQ ID NO: 1454518
uugauuaaucaaagugccg

SEQ ID NO: 1454520 - RNA, 19 nt, Artificial Sequence
  Description of Artificial Sequence: Synthetic oligonucleotide
  Sense strand starting at position 2568 of SEQ ID NO: 1243961
uauucuaaaguggguuaau

SEQ ID NO: 1454521 - RNA, 19 nt, Artificial Sequence
  Description of Artificial Sequence: Synthetic oligonucleotide
  Antisense strand to SEQ ID NO: 1454520
auuaacccacuuuagaaua

SEQ ID NO: 1454522 - RNA, 19 nt, Artificial Sequence
  Description of Artificial Sequence: Synthetic oligonucleotide
  Sense strand starting at position 2643 of SEQ ID NO: 1243961
agcucauuggcaugaguuc

SEQ ID NO: 1454523 - RNA, 19 nt, Artificial Sequence
  Description of Artificial Sequence: Synthetic oligonucleotide
  Antisense strand to SEQ ID NO: 1454522
gaacucaugccaaugagcu

SEQ ID NO: 1454524 - RNA, 19 nt, Artificial Sequence
  Description of Artificial Sequence: Synthetic oligonucleotide
  Sense strand starting at position 2649 of SEQ ID NO: 1243961
uuggcaugaguucaaggua

SEQ ID NO: 1454525 - RNA, 19 nt, Artificial Sequence
  Description of Artificial Sequence: Synthetic oligonucleotide
  Antisense strand to SEQ ID NO: 1454524
uaccuugaacucaugccaa

SEQ ID NO: 1454526 - RNA, 19 nt, Artificial Sequence
  Description of Artificial Sequence: Synthetic oligonucleotide
  Sense strand starting at position 2652 of SEQ ID NO: 1243961
gcaugaguucaagguauag

SEQ ID NO: 1454527 - RNA, 19 nt, Artificial Sequence
  Description of Artificial Sequence: Synthetic oligonucleotide
  Antisense strand to SEQ ID NO: 1454526
cuauaccuugaacucaugc

SEQ ID NO: 1454528 - RNA, 19 nt, Artificial Sequence
  Description of Artificial Sequence: Synthetic oligonucleotide
  Sense strand starting at position 2744 of SEQ ID NO: 1243961
aguagagccuuccuagagu

SEQ ID NO: 1454529 - RNA, 19 nt, Artificial Sequence
  Description of Artificial Sequence: Synthetic oligonucleotide
  Antisense strand to SEQ ID NO: 1454528
acucuaggaaggcucuacu

SEQ ID NO: 1454530 - RNA, 19 nt, Artificial Sequence
  Description of Artificial Sequence: Synthetic oligonucleotide
  Sense strand starting at position 2747 of SEQ ID NO: 1243961
agagccuuccuagaguuua

SEQ ID NO: 1454531 - RNA, 19 nt, Artificial Sequence
  Description of Artificial Sequence: Synthetic oligonucleotide
  Antisense strand to SEQ ID NO: 1454530
uaaacucuaggaaggcucu

SEQ ID NO: 1454532 - RNA, 19 nt, Artificial Sequence
  Description of Artificial Sequence: Synthetic oligonucleotide
  Sense strand starting at position 2837 of SEQ ID NO: 1243961
ggguaaguagaguggugaa

SEQ ID NO: 1454533 - RNA, 19 nt, Artificial Sequence
  Description of Artificial Sequence: Synthetic oligonucleotide
  Antisense strand to SEQ ID NO: 1454532
uucaccacucuacuuaccc

SEQ ID NO: 1454534 - RNA, 19 nt, Artificial Sequence
  Description of Artificial Sequence: Synthetic oligonucleotide
  Sense strand starting at position 3001 of SEQ ID NO: 1243961
cccauugugcuagaucuuu

SEQ ID NO: 1454535 - RNA, 19 nt, Artificial Sequence
  Description of Artificial Sequence: Synthetic oligonucleotide
  Antisense strand to SEQ ID NO: 1454534
aaagaucuagcacaauggg

SEQ ID NO: 1454536 - RNA, 19 nt, Artificial Sequence
  Description of Artificial Sequence: Synthetic oligonucleotide
  Sense strand starting at position 3021 of SEQ ID NO: 1243961
ucaagagugccaggaaauc

SEQ ID NO: 1454537 - RNA, 19 nt, Artificial Sequence
  Description of Artificial Sequence: Synthetic oligonucleotide
  Antisense strand to SEQ ID NO: 1454536
gauuuccuggcacucuuga

SEQ ID NO: 1454538 - RNA, 19 nt, Artificial Sequence
  Description of Artificial Sequence: Synthetic oligonucleotide
  Sense strand starting at position 3032 of SEQ ID NO: 1243961
aggaaauccagguguuuac

SEQ ID NO: 1454539 - RNA, 19 nt, Artificial Sequence
  Description of Artificial Sequence: Synthetic oligonucleotide
  Antisense strand to SEQ ID NO: 1454538
guaaacaccuggauuuccu

SEQ ID NO: 1454540 - RNA, 19 nt, Artificial Sequence
  Description of Artificial Sequence: Synthetic oligonucleotide
  Sense strand starting at position 3429 of SEQ ID NO: 1243961
ugguuuaugucccugacag

SEQ ID NO: 1454541 - RNA, 19 nt, Artificial Sequence
  Description of Artificial Sequence: Synthetic oligonucleotide
  Antisense strand to SEQ ID NO: 1454540
cugucagggacauaaacca

SEQ ID NO: 1454542 - RNA, 19 nt, Artificial Sequence
  Description of Artificial Sequence: Synthetic oligonucleotide
  Sense strand starting at position 3430 of SEQ ID NO: 1243961
gguuuaugucccugacagu

SEQ ID NO: 1454543 - RNA, 19 nt, Artificial Sequence
  Description of Artificial Sequence: Synthetic oligonucleotide
  Antisense strand to SEQ ID NO: 1454542
acugucagggacauaaacc

SEQ ID NO: 1454544 - RNA, 19 nt, Artificial Sequence
  Description of Artificial Sequence: Synthetic oligonucleotide
  Sense strand starting at position 3431 of SEQ ID NO: 1243961
guuuaugucccugacaguc

SEQ ID NO: 1454545 - RNA, 19 nt, Artificial Sequence
  Description of Artificial Sequence: Synthetic oligonucleotide
  Antisense strand to SEQ ID NO: 1454544
gacugucagggacauaaac

SEQ ID NO: 1454546 - RNA, 19 nt, Artificial Sequence
  Description of Artificial Sequence: Synthetic oligonucleotide
  Sense strand starting at position 3829 of SEQ ID NO: 1243961
gauugugagaggugccaaa

SEQ ID NO: 1454547 - RNA, 19 nt, Artificial Sequence
  Description of Artificial Sequence: Synthetic oligonucleotide
  Antisense strand to SEQ ID NO: 1454546
uuuggcaccucucacaauc

SEQ ID NO: 1454548 - RNA, 19 nt, Artificial Sequence
  Description of Artificial Sequence: Synthetic oligonucleotide
  Sense strand starting at position 3922 of SEQ ID NO: 1243961
cagcauucuggcugacaga

SEQ ID NO: 1454549 - RNA, 19 nt, Artificial Sequence
  Description of Artificial Sequence: Synthetic oligonucleotide
  Antisense strand to SEQ ID NO: 1454548
ucugucagccagaaugcug

SEQ ID NO: 1454550 - RNA, 19 nt, Artificial Sequence
  Description of Artificial Sequence: Synthetic oligonucleotide
  Sense strand starting at position 20 of SEQ ID NO: 1243962
aggucucacccuugauaca

SEQ ID NO: 1454551 - RNA, 19 nt, Artificial Sequence
  Description of Artificial Sequence: Synthetic oligonucleotide
  Antisense strand to SEQ ID NO: 1454550
uguaucaagggugagaccu

SEQ ID NO: 1454552 - RNA, 19 nt, Artificial Sequence
  Description of Artificial Sequence: Synthetic oligonucleotide
  Sense strand starting at position 21 of SEQ ID NO: 1243962
ggucucacccuugauacaa

SEQ ID NO: 1454553 - RNA, 19 nt, Artificial Sequence
  Description of Artificial Sequence: Synthetic oligonucleotide
  Antisense strand to SEQ ID NO: 1454552
uuguaucaagggugagacc

SEQ ID NO: 1454554 - RNA, 19 nt, Artificial Sequence
  Description of Artificial Sequence: Synthetic oligonucleotide
  Sense strand starting at position 176 of SEQ ID NO: 1243962
gaaauuaaagcuugaguca

SEQ ID NO: 1454555 - RNA, 19 nt, Artificial Sequence
  Description of Artificial Sequence: Synthetic oligonucleotide
  Antisense strand to SEQ ID NO: 1454554
ugacucaagcuuuaauuuc

SEQ ID NO: 1454556 - RNA, 19 nt, Artificial Sequence
  Description of Artificial Sequence: Synthetic oligonucleotide
  Sense strand starting at position 212 of SEQ ID NO: 1243962
agcuguagucuccgagcaa

SEQ ID NO: 1454557 - RNA, 19 nt, Artificial Sequence
  Description of Artificial Sequence: Synthetic oligonucleotide
  Antisense strand to SEQ ID NO: 1454556
uugcucggagacuacagcu

SEQ ID NO: 1454558 - RNA, 19 nt, Artificial Sequence
  Description of Artificial Sequence: Synthetic oligonucleotide
  Sense strand starting at position 233 of SEQ ID NO: 1243962
agaaucuggugccuacuaa

SEQ ID NO: 1454559 - RNA, 19 nt, Artificial Sequence
  Description of Artificial Sequence: Synthetic oligonucleotide
  Antisense strand to SEQ ID NO: 1454558
uuaguaggcaccagauucu

SEQ ID NO: 1454560 - RNA, 19 nt, Artificial Sequence
  Description of Artificial Sequence: Synthetic oligonucleotide
  Sense strand starting at position 237 of SEQ ID NO: 1243962
ucuggugccuacuaacaaa

SEQ ID NO: 1454561 - RNA, 19 nt, Artificial Sequence
  Description of Artificial Sequence: Synthetic oligonucleotide
  Antisense strand to SEQ ID NO: 1454560
uuuguuaguaggcaccaga

SEQ ID NO: 1454562 - RNA, 19 nt, Artificial Sequence
  Description of Artificial Sequence: Synthetic oligonucleotide
  Sense strand starting at position 292 of SEQ ID NO: 1243962
accagcugcuucuagauga

SEQ ID NO: 1454563 - RNA, 19 nt, Artificial Sequence
  Description of Artificial Sequence: Synthetic oligonucleotide
  Antisense strand to SEQ ID NO: 1454562
ucaucuagaagcagcuggu

SEQ ID NO: 1454564 - RNA, 19 nt, Artificial Sequence
  Description of Artificial Sequence: Synthetic oligonucleotide
  Sense strand starting at position 299 of SEQ ID NO: 1243962
gcuucuagaugaucuggga

SEQ ID NO: 1454565 - RNA, 19 nt, Artificial Sequence
  Description of Artificial Sequence: Synthetic oligonucleotide
  Antisense strand to SEQ ID NO: 1454564
ucccagaucaucuagaagc

SEQ ID NO: 1454566 - RNA, 19 nt, Artificial Sequence
  Description of Artificial Sequence: Synthetic oligonucleotide
  Sense strand starting at position 340 of SEQ ID NO: 1243962
acucuauacggcugaaagu

SEQ ID NO: 1454567 - RNA, 19 nt, Artificial Sequence
  Description of Artificial Sequence: Synthetic oligonucleotide
  Antisense strand to SEQ ID NO: 1454566
acuuucagccguauagagu

SEQ ID NO: 1454568 - RNA, 19 nt, Artificial Sequence
  Description of Artificial Sequence: Synthetic oligonucleotide
  Sense strand starting at position 341 of SEQ ID NO: 1243962
cucuauacggcugaaaguu

SEQ ID NO: 1454569 - RNA, 19 nt, Artificial Sequence
  Description of Artificial Sequence: Synthetic oligonucleotide
  Antisense strand to SEQ ID NO: 1454568
aacuuucagccguauagag

SEQ ID NO: 1454570 - RNA, 19 nt, Artificial Sequence
  Description of Artificial Sequence: Synthetic oligonucleotide
  Sense strand starting at position 441 of SEQ ID NO: 1243962
ucuggaucuguugguuuaa

SEQ ID NO: 1454571 - RNA, 19 nt, Artificial Sequence
  Description of Artificial Sequence: Synthetic oligonucleotide
  Antisense strand to SEQ ID NO: 1454570
uuaaaccaacagauccaga

SEQ ID NO: 1454572 - RNA, 19 nt, Artificial Sequence
  Description of Artificial Sequence: Synthetic oligonucleotide
  Sense strand starting at position 442 of SEQ ID NO: 1243962
cuggaucuguugguuuaaa

SEQ ID NO: 1454573 - RNA, 19 nt, Artificial Sequence
  Description of Artificial Sequence: Synthetic oligonucleotide
  Antisense strand to SEQ ID NO: 1454572
uuuaaaccaacagauccag

SEQ ID NO: 1454574 - RNA, 19 nt, Artificial Sequence
  Description of Artificial Sequence: Synthetic oligonucleotide
  Sense strand starting at position 443 of SEQ ID NO: 1243962
uggaucuguugguuuaaag

SEQ ID NO: 1454575 - RNA, 19 nt, Artificial Sequence
  Description of Artificial Sequence: Synthetic oligonucleotide
  Antisense strand to SEQ ID NO: 1454574
cuuuaaaccaacagaucca

SEQ ID NO: 1454576 - RNA, 19 nt, Artificial Sequence
  Description of Artificial Sequence: Synthetic oligonucleotide
  Sense strand starting at position 450 of SEQ ID NO: 1243962
guugguuuaaagcauaagu

SEQ ID NO: 1454577 - RNA, 19 nt, Artificial Sequence
  Description of Artificial Sequence: Synthetic oligonucleotide
  Antisense strand to SEQ ID NO: 1454576
acuuaugcuuuaaaccaac

SEQ ID NO: 1454578 - RNA, 19 nt, Artificial Sequence
  Description of Artificial Sequence: Synthetic oligonucleotide
  Sense strand starting at position 452 of SEQ ID NO: 1243962
ugguuuaaagcauaaguuu

SEQ ID NO: 1454579 - RNA, 19 nt, Artificial Sequence
  Description of Artificial Sequence: Synthetic oligonucleotide
  Antisense strand to SEQ ID NO: 1454578
aaacuuaugcuuuaaacca

SEQ ID NO: 1454580 - RNA, 19 nt, Artificial Sequence
  Description of Artificial Sequence: Synthetic oligonucleotide
  Sense strand starting at position 530 of SEQ ID NO: 1243962
ccugcaugaugccaucaau

SEQ ID NO: 1454581 - RNA, 19 nt, Artificial Sequence
  Description of Artificial Sequence: Synthetic oligonucleotide
  Antisense strand to SEQ ID NO: 1454580
auugauggcaucaugcagg

SEQ ID NO: 1454582 - RNA, 19 nt, Artificial Sequence
  Description of Artificial Sequence: Synthetic oligonucleotide
  Sense strand starting at position 533 of SEQ ID NO: 1243962
gcaugaugccaucaaucug

SEQ ID NO: 1454583 - RNA, 19 nt, Artificial Sequence
  Description of Artificial Sequence: Synthetic oligonucleotide
  Antisense strand to SEQ ID NO: 1454582
cagauugauggcaucaugc

SEQ ID NO: 1454584 - RNA, 19 nt, Artificial Sequence
  Description of Artificial Sequence: Synthetic oligonucleotide
  Sense strand starting at position 548 of SEQ ID NO: 1243962
ucugcugucccagauccaa

SEQ ID NO: 1454585 - RNA, 19 nt, Artificial Sequence
  Description of Artificial Sequence: Synthetic oligonucleotide
  Antisense strand to SEQ ID NO: 1454584
uuggaucugggacagcaga

SEQ ID NO: 1454586 - RNA, 19 nt, Artificial Sequence
  Description of Artificial Sequence: Synthetic oligonucleotide
  Sense strand starting at position 671 of SEQ ID NO: 1243962
gggugacccuuucugaaga

SEQ ID NO: 1454587 - RNA, 19 nt, Artificial Sequence
  Description of Artificial Sequence: Synthetic oligonucleotide
  Antisense strand to SEQ ID NO: 1454586
ucuucagaaagggucaccc

SEQ ID NO: 1454588 - RNA, 19 nt, Artificial Sequence
  Description of Artificial Sequence: Synthetic oligonucleotide
  Sense strand starting at position 673 of SEQ ID NO: 1243962
gugacccuuucugaagaca

SEQ ID NO: 1454589 - RNA, 19 nt, Artificial Sequence
  Description of Artificial Sequence: Synthetic oligonucleotide
  Antisense strand to SEQ ID NO: 1454588
ugucuucagaaagggucac

SEQ ID NO: 1454590 - RNA, 19 nt, Artificial Sequence
  Description of Artificial Sequence: Synthetic oligonucleotide
  Sense strand starting at position 1304 of SEQ ID NO: 1243962
aguccuggccgucaagaaa

SEQ ID NO: 1454591 - RNA, 19 nt, Artificial Sequence
  Description of Artificial Sequence: Synthetic oligonucleotide
  Antisense strand to SEQ ID NO: 1454590
uuucuugacggccaggacu

SEQ ID NO: 1454592 - RNA, 19 nt, Artificial Sequence
  Description of Artificial Sequence: Synthetic oligonucleotide
  Sense strand starting at position 1374 of SEQ ID NO: 1243962
gacgaagugacuggaucua

SEQ ID NO: 1454593 - RNA, 19 nt, Artificial Sequence
  Description of Artificial Sequence: Synthetic oligonucleotide
  Antisense strand to SEQ ID NO: 1454592
uagauccagucacuucguc

SEQ ID NO: 1454594 - RNA, 19 nt, Artificial Sequence
  Description of Artificial Sequence: Synthetic oligonucleotide
  Sense strand starting at position 1407 of SEQ ID NO: 1243962
ccgccucucgcgaguggua

SEQ ID NO: 1454595 - RNA, 19 nt, Artificial Sequence
  Description of Artificial Sequence: Synthetic oligonucleotide
  Antisense strand to SEQ ID NO: 1454594
uaccacucgcgagaggcgg

SEQ ID NO: 1454596 - RNA, 19 nt, Artificial Sequence
  Description of Artificial Sequence: Synthetic oligonucleotide
  Sense strand starting at position 1420 of SEQ ID NO: 1243962
gugguaccgucagaaugcu

SEQ ID NO: 1454597 - RNA, 19 nt, Artificial Sequence
  Description of Artificial Sequence: Synthetic oligonucleotide
  Antisense strand to SEQ ID NO: 1454596
agcauucugacgguaccac

SEQ ID NO: 1454598 - RNA, 19 nt, Artificial Sequence
  Description of Artificial Sequence: Synthetic oligonucleotide
  Sense strand starting at position 1426 of SEQ ID NO: 1243962
ccgucagaaugcuccggaa

SEQ ID NO: 1454599 - RNA, 19 nt, Artificial Sequence
  Description of Artificial Sequence: Synthetic oligonucleotide
  Antisense strand to SEQ ID NO: 1454598
uuccggagcauucugacgg

SEQ ID NO: 1454600 - RNA, 19 nt, Artificial Sequence
  Description of Artificial Sequence: Synthetic oligonucleotide
  Sense strand starting at position 1600 of SEQ ID NO: 1243962
gggucgaggccucguaaca

SEQ ID NO: 1454601 - RNA, 19 nt, Artificial Sequence
  Description of Artificial Sequence: Synthetic oligonucleotide
  Antisense strand to SEQ ID NO: 1454600
uguuacgaggccucgaccc

SEQ ID NO: 1454602 - RNA, 19 nt, Artificial Sequence
  Description of Artificial Sequence: Synthetic oligonucleotide
  Sense strand starting at position 1830 of SEQ ID NO: 1243962
augccuuucuuaccgggaa

SEQ ID NO: 1454603 - RNA, 19 nt, Artificial Sequence
  Description of Artificial Sequence: Synthetic oligonucleotide
  Antisense strand to SEQ ID NO: 1454602
uucccgguaagaaaggcau

SEQ ID NO: 1454604 - RNA, 19 nt, Artificial Sequence
  Description of Artificial Sequence: Synthetic oligonucleotide
  Sense strand starting at position 1831 of SEQ ID NO: 1243962
ugccuuucuuaccgggaau

SEQ ID NO: 1454605 - RNA, 19 nt, Artificial Sequence
  Description of Artificial Sequence: Synthetic oligonucleotide
  Antisense strand to SEQ ID NO: 1454604
auucccgguaagaaaggca

SEQ ID NO: 1454606 - RNA, 19 nt, Artificial Sequence
  Description of Artificial Sequence: Synthetic oligonucleotide
  Sense strand starting at position 1832 of SEQ ID NO: 1243962
gccuuucuuaccgggaauc

SEQ ID NO: 1454607 - RNA, 19 nt, Artificial Sequence
  Description of Artificial Sequence: Synthetic oligonucleotide
  Antisense strand to SEQ ID NO: 1454606
gauucccgguaagaaaggc

SEQ ID NO: 1454608 - RNA, 19 nt, Artificial Sequence
  Description of Artificial Sequence: Synthetic oligonucleotide
  Sense strand starting at position 1834 of SEQ ID NO: 1243962
cuuucuuaccgggaauccu

SEQ ID NO: 1454609 - RNA, 19 nt, Artificial Sequence
  Description of Artificial Sequence: Synthetic oligonucleotide
  Antisense strand to SEQ ID NO: 1454608
aggauucccgguaagaaag

SEQ ID NO: 1454610 - RNA, 19 nt, Artificial Sequence
  Description of Artificial Sequence: Synthetic oligonucleotide
  Sense strand starting at position 2540 of SEQ ID NO: 1243962
ccuuauucuugaggcuuau

SEQ ID NO: 1454611 - RNA, 19 nt, Artificial Sequence
  Description of Artificial Sequence: Synthetic oligonucleotide
  Antisense strand to SEQ ID NO: 1454610
auaagccucaagaauaagg

SEQ ID NO: 1454612 - RNA, 19 nt, Artificial Sequence
  Description of Artificial Sequence: Synthetic oligonucleotide
  Sense strand starting at position 2546 of SEQ ID NO: 1243962
ucuugaggcuuaucuacuu

SEQ ID NO: 1454613 - RNA, 19 nt, Artificial Sequence
  Description of Artificial Sequence: Synthetic oligonucleotide
  Antisense strand to SEQ ID NO: 1454612
aaguagauaagccucaaga

SEQ ID NO: 1454614 - RNA, 19 nt, Artificial Sequence
  Description of Artificial Sequence: Synthetic oligonucleotide
  Sense strand starting at position 2596 of SEQ ID NO: 1243962
gggauuuguuugggugaag

SEQ ID NO: 1454615 - RNA, 19 nt, Artificial Sequence
  Description of Artificial Sequence: Synthetic oligonucleotide
  Antisense strand to SEQ ID NO: 1454614
cuucacccaaacaaauccc

SEQ ID NO: 1454616 - RNA, 19 nt, Artificial Sequence
  Description of Artificial Sequence: Synthetic oligonucleotide
  Sense strand starting at position 2656 of SEQ ID NO: 1243962
acccuuuagucucaagaga

SEQ ID NO: 1454617 - RNA, 19 nt, Artificial Sequence
  Description of Artificial Sequence: Synthetic oligonucleotide
  Antisense strand to SEQ ID NO: 1454616
ucucuugagacuaaagggu

SEQ ID NO: 1454618 - RNA, 19 nt, Artificial Sequence
  Description of Artificial Sequence: Synthetic oligonucleotide
  Sense strand starting at position 2678 of SEQ ID NO: 1243962
gcuggaaggucugagcuaa

SEQ ID NO: 1454619 - RNA, 19 nt, Artificial Sequence
  Description of Artificial Sequence: Synthetic oligonucleotide
  Antisense strand to SEQ ID NO: 1454618
uuagcucagaccuuccagc

SEQ ID NO: 1454620 - RNA, 19 nt, Artificial Sequence
  Description of Artificial Sequence: Synthetic oligonucleotide
  Sense strand starting at position 3331 of SEQ ID NO: 1243962
aguacuggguguuaacaaa

SEQ ID NO: 1454621 - RNA, 19 nt, Artificial Sequence
  Description of Artificial Sequence: Synthetic oligonucleotide
  Antisense strand to SEQ ID NO: 1454620
uuuguuaacacccaguacu

SEQ ID NO: 1454622 - RNA, 19 nt, Artificial Sequence
  Description of Artificial Sequence: Synthetic oligonucleotide
  Sense strand starting at position 3400 of SEQ ID NO: 1243962
ugagaugugucuccauccu

SEQ ID NO: 1454623 - RNA, 19 nt, Artificial Sequence
  Description of Artificial Sequence: Synthetic oligonucleotide
  Antisense strand to SEQ ID NO: 1454622
aggauggagacacaucuca

SEQ ID NO: 1454624 - RNA, 19 nt, Artificial Sequence
  Description of Artificial Sequence: Synthetic oligonucleotide
  Sense strand starting at position 3488 of SEQ ID NO: 1243962
uaguguucuuacuugauag

SEQ ID NO: 1454625 - RNA, 19 nt, Artificial Sequence
  Description of Artificial Sequence: Synthetic oligonucleotide
  Antisense strand to SEQ ID NO: 1454624
cuaucaaguaagaacacua

SEQ ID NO: 1454626 - RNA, 19 nt, Artificial Sequence
  Description of Artificial Sequence: Synthetic oligonucleotide
  Sense strand starting at position 3490 of SEQ ID NO: 1243962
guguucuuacuugauagaa

SEQ ID NO: 1454627 - RNA, 19 nt, Artificial Sequence
  Description of Artificial Sequence: Synthetic oligonucleotide
  Antisense strand to SEQ ID NO: 1454626
uucuaucaaguaagaacac

SEQ ID NO: 1454628 - RNA, 19 nt, Artificial Sequence
  Description of Artificial Sequence: Synthetic oligonucleotide
  Sense strand starting at position 3492 of SEQ ID NO: 1243962
guucuuacuugauagaaug

SEQ ID NO: 1454629 - RNA, 19 nt, Artificial Sequence
  Description of Artificial Sequence: Synthetic oligonucleotide
  Antisense strand to SEQ ID NO: 1454628
cauucuaucaaguaagaac

SEQ ID NO: 1454630 - RNA, 19 nt, Artificial Sequence
  Description of Artificial Sequence: Synthetic oligonucleotide
  Sense strand starting at position 5 of SEQ ID NO: 1243963
cugugaggcugccugagau

SEQ ID NO: 1454631 - RNA, 19 nt, Artificial Sequence
  Description of Artificial Sequence: Synthetic oligonucleotide
  Antisense strand to SEQ ID NO: 1454630
aucucaggcagccucacag

SEQ ID NO: 1454632 - RNA, 19 nt, Artificial Sequence
  Description of Artificial Sequence: Synthetic oligonucleotide
  Sense strand starting at position 307 of SEQ ID NO: 1243963
agaaguggaaguugcaaua

SEQ ID NO: 1454633 - RNA, 19 nt, Artificial Sequence
  Description of Artificial Sequence: Synthetic oligonucleotide
  Antisense strand to SEQ ID NO: 1454632
uauugcaacuuccacuucu

SEQ ID NO: 1454634 - RNA, 19 nt, Artificial Sequence
  Description of Artificial Sequence: Synthetic oligonucleotide
  Sense strand starting at position 367 of SEQ ID NO: 1243963
gcaggacugucagaaggaa

SEQ ID NO: 1454635 - RNA, 19 nt, Artificial Sequence
  Description of Artificial Sequence: Synthetic oligonucleotide
  Antisense strand to SEQ ID NO: 1454634
uuccuucugacaguccugc

SEQ ID NO: 1454636 - RNA, 19 nt, Artificial Sequence
  Description of Artificial Sequence: Synthetic oligonucleotide
  Sense strand starting at position 468 of SEQ ID NO: 1243963
gcuggucauucccaucuau

SEQ ID NO: 1454637 - RNA, 19 nt, Artificial Sequence
  Description of Artificial Sequence: Synthetic oligonucleotide
  Antisense strand to SEQ ID NO: 1454636
auagaugggaaugaccagc

SEQ ID NO: 1454638 - RNA, 19 nt, Artificial Sequence
  Description of Artificial Sequence: Synthetic oligonucleotide
  Sense strand starting at position 550 of SEQ ID NO: 1243963
agagacagcuccugauucu

SEQ ID NO: 1454639 - RNA, 19 nt, Artificial Sequence
  Description of Artificial Sequence: Synthetic oligonucleotide
  Antisense strand to SEQ ID NO: 1454638
agaaucaggagcugucucu

SEQ ID NO: 1454640 - RNA, 19 nt, Artificial Sequence
  Description of Artificial Sequence: Synthetic oligonucleotide
  Sense strand starting at position 827 of SEQ ID NO: 1243963
cuguaaaugugaucguguc

SEQ ID NO: 1454641 - RNA, 19 nt, Artificial Sequence
  Description of Artificial Sequence: Synthetic oligonucleotide
  Antisense strand to SEQ ID NO: 1454640
gacacgaucacauuuacag

SEQ ID NO: 1454642 - RNA, 19 nt, Artificial Sequence
  Description of Artificial Sequence: Synthetic oligonucleotide
  Sense strand starting at position 828 of SEQ ID NO: 1243963
uguaaaugugaucguguca

SEQ ID NO: 1454643 - RNA, 19 nt, Artificial Sequence
  Description of Artificial Sequence: Synthetic oligonucleotide
  Antisense strand to SEQ ID NO: 1454642
ugacacgaucacauuuaca

SEQ ID NO: 1454644 - RNA, 19 nt, Artificial Sequence
  Description of Artificial Sequence: Synthetic oligonucleotide
  Sense strand starting at position 833 of SEQ ID NO: 1243963
augugaucgugucacauag

SEQ ID NO: 1454645 - RNA, 19 nt, Artificial Sequence
  Description of Artificial Sequence: Synthetic oligonucleotide
  Antisense strand to SEQ ID NO: 1454644
cuaugugacacgaucacau

SEQ ID NO: 1454646 - RNA, 19 nt, Artificial Sequence
  Description of Artificial Sequence: Synthetic oligonucleotide
  Sense strand starting at position 915 of SEQ ID NO: 1243963
ccuacacgucuuugcuaga

SEQ ID NO: 1454647 - RNA, 19 nt, Artificial Sequence
  Description of Artificial Sequence: Synthetic oligonucleotide
  Antisense strand to SEQ ID NO: 1454646
ucuagcaaagacguguagg

SEQ ID NO: 1454648 - RNA, 19 nt, Artificial Sequence
  Description of Artificial Sequence: Synthetic oligonucleotide
  Sense strand starting at position 916 of SEQ ID NO: 1243963
cuacacgucuuugcuagau

SEQ ID NO: 1454649 - RNA, 19 nt, Artificial Sequence
  Description of Artificial Sequence: Synthetic oligonucleotide
  Antisense strand to SEQ ID NO: 1454648
aucuagcaaagacguguag

SEQ ID NO: 1454650 - RNA, 19 nt, Artificial Sequence
  Description of Artificial Sequence: Synthetic oligonucleotide
  Sense strand starting at position 918 of SEQ ID NO: 1243963
acacgucuuugcuagaucu

SEQ ID NO: 1454651 - RNA, 19 nt, Artificial Sequence
  Description of Artificial Sequence: Synthetic oligonucleotide
  Antisense strand to SEQ ID NO: 1454650
agaucuagcaaagacgugu

SEQ ID NO: 1454652 - RNA, 19 nt, Artificial Sequence
  Description of Artificial Sequence: Synthetic oligonucleotide
  Sense strand starting at position 1314 of SEQ ID NO: 1243963
gaaaucaguuaucugcuga

SEQ ID NO: 1454653 - RNA, 19 nt, Artificial Sequence
  Description of Artificial Sequence: Synthetic oligonucleotide
  Antisense strand to SEQ ID NO: 1454652
ucagcagauaacugauuuc

SEQ ID NO: 1454654 - RNA, 19 nt, Artificial Sequence
  Description of Artificial Sequence: Synthetic oligonucleotide
  Sense strand starting at position 1318 of SEQ ID NO: 1243963
ucaguuaucugcugaauga

SEQ ID NO: 1454655 - RNA, 19 nt, Artificial Sequence
  Description of Artificial Sequence: Synthetic oligonucleotide
  Antisense strand to SEQ ID NO: 1454654
ucauucagcagauaacuga

SEQ ID NO: 1454656 - RNA, 19 nt, Artificial Sequence
  Description of Artificial Sequence: Synthetic oligonucleotide
  Sense strand starting at position 1319 of SEQ ID NO: 1243963
caguuaucugcugaaugaa

SEQ ID NO: 1454657 - RNA, 19 nt, Artificial Sequence
  Description of Artificial Sequence: Synthetic oligonucleotide
  Antisense strand to SEQ ID NO: 1454656
uucauucagcagauaacug

SEQ ID NO: 1454658 - RNA, 19 nt, Artificial Sequence
  Description of Artificial Sequence: Synthetic oligonucleotide
  Sense strand starting at position 1322 of SEQ ID NO: 1243963
uuaucugcugaaugaagga

SEQ ID NO: 1454659 - RNA, 19 nt, Artificial Sequence
  Description of Artificial Sequence: Synthetic oligonucleotide
  Antisense strand to SEQ ID NO: 1454658
uccuucauucagcagauaa

SEQ ID NO: 1454660 - RNA, 19 nt, Artificial Sequence
  Description of Artificial Sequence: Synthetic oligonucleotide
  Sense strand starting at position 1694 of SEQ ID NO: 1243963
cgaauuccacuuuagucau

SEQ ID NO: 1454661 - RNA, 19 nt, Artificial Sequence
  Description of Artificial Sequence: Synthetic oligonucleotide
  Antisense strand to SEQ ID NO: 1454660
augacuaaaguggaauucg

SEQ ID NO: 1454662 - RNA, 19 nt, Artificial Sequence
  Description of Artificial Sequence: Synthetic oligonucleotide
  Sense strand starting at position 1705 of SEQ ID NO: 1243963
uuagucaugucuuccucuu

SEQ ID NO: 1454663 - RNA, 19 nt, Artificial Sequence
  Description of Artificial Sequence: Synthetic oligonucleotide
  Antisense strand to SEQ ID NO: 1454662
aagaggaagacaugacuaa

SEQ ID NO: 1454664 - RNA, 19 nt, Artificial Sequence
  Description of Artificial Sequence: Synthetic oligonucleotide
  Sense strand starting at position 1711 of SEQ ID NO: 1243963
augucuuccucuuugagca

SEQ ID NO: 1454665 - RNA, 19 nt, Artificial Sequence
  Description of Artificial Sequence: Synthetic oligonucleotide
  Antisense strand to SEQ ID NO: 1454664
ugcucaaagaggaagacau

SEQ ID NO: 1454666 - RNA, 19 nt, Artificial Sequence
  Description of Artificial Sequence: Synthetic oligonucleotide
  Sense strand starting at position 1764 of SEQ ID NO: 1243963
ggccguggucgccaugauu

SEQ ID NO: 1454667 - RNA, 19 nt, Artificial Sequence
  Description of Artificial Sequence: Synthetic oligonucleotide
  Antisense strand to SEQ ID NO: 1454666
aaucauggcgaccacggcc

SEQ ID NO: 1454668 - RNA, 19 nt, Artificial Sequence
  Description of Artificial Sequence: Synthetic oligonucleotide
  Sense strand starting at position 1963 of SEQ ID NO: 1243963
acgccuuaaguaugcgaaa

SEQ ID NO: 1454669 - RNA, 19 nt, Artificial Sequence
  Description of Artificial Sequence: Synthetic oligonucleotide
  Antisense strand to SEQ ID NO: 1454668
uuucgcauacuuaaggcgu

SEQ ID NO: 1454670 - RNA, 19 nt, Artificial Sequence
  Description of Artificial Sequence: Synthetic oligonucleotide
  Sense strand starting at position 2077 of SEQ ID NO: 1243963
gggcguuugccgcagggaa

SEQ ID NO: 1454671 - RNA, 19 nt, Artificial Sequence
  Description of Artificial Sequence: Synthetic oligonucleotide
  Antisense strand to SEQ ID NO: 1454670
uucccugcggcaaacgccc

SEQ ID NO: 1454672 - RNA, 19 nt, Artificial Sequence
  Description of Artificial Sequence: Synthetic oligonucleotide
  Sense strand starting at position 2078 of SEQ ID NO: 1243963
ggcguuugccgcagggaaa

SEQ ID NO: 1454673 - RNA, 19 nt, Artificial Sequence
  Description of Artificial Sequence: Synthetic oligonucleotide
  Antisense strand to SEQ ID NO: 1454672
uuucccugcggcaaacgcc

SEQ ID NO: 1454674 - RNA, 19 nt, Artificial Sequence
  Description of Artificial Sequence: Synthetic oligonucleotide
  Sense strand starting at position 2157 of SEQ ID NO: 1243963
gcacccaguuccuuacgaa

SEQ ID NO: 1454675 - RNA, 19 nt, Artificial Sequence
  Description of Artificial Sequence: Synthetic oligonucleotide
  Antisense strand to SEQ ID NO: 1454674
uucguaaggaacugggugc

SEQ ID NO: 1454676 - RNA, 19 nt, Artificial Sequence
  Description of Artificial Sequence: Synthetic oligonucleotide
  Sense strand starting at position 2275 of SEQ ID NO: 1243963
ccugaauucccuggaaaca

SEQ ID NO: 1454677 - RNA, 19 nt, Artificial Sequence
  Description of Artificial Sequence: Synthetic oligonucleotide
  Antisense strand to SEQ ID NO: 1454676
uguuuccagggaauucagg

SEQ ID NO: 1454678 - RNA, 19 nt, Artificial Sequence
  Description of Artificial Sequence: Synthetic oligonucleotide
  Sense strand starting at position 2438 of SEQ ID NO: 1243963
gggagauucgaguggaaac

SEQ ID NO: 1454679 - RNA, 19 nt, Artificial Sequence
  Description of Artificial Sequence: Synthetic oligonucleotide
  Antisense strand to SEQ ID NO: 1454678
guuuccacucgaaucuccc

SEQ ID NO: 1454680 - RNA, 19 nt, Artificial Sequence
  Description of Artificial Sequence: Synthetic oligonucleotide
  Sense strand starting at position 2576 of SEQ ID NO: 1243963
caccguuugccuggugagu

SEQ ID NO: 1454681 - RNA, 19 nt, Artificial Sequence
  Description of Artificial Sequence: Synthetic oligonucleotide
  Antisense strand to SEQ ID NO: 1454680
acucaccaggcaaacggug

SEQ ID NO: 1454682 - RNA, 19 nt, Artificial Sequence
  Description of Artificial Sequence: Synthetic oligonucleotide
  Sense strand starting at position 2577 of SEQ ID NO: 1243963
accguuugccuggugaguu

SEQ ID NO: 1454683 - RNA, 19 nt, Artificial Sequence
  Description of Artificial Sequence: Synthetic oligonucleotide
  Antisense strand to SEQ ID NO: 1454682
aacucaccaggcaaacggu

SEQ ID NO: 1454684 - RNA, 19 nt, Artificial Sequence
  Description of Artificial Sequence: Synthetic oligonucleotide
  Sense strand starting at position 2640 of SEQ ID NO: 1243963
aggaucaggguucauugua

SEQ ID NO: 1454685 - RNA, 19 nt, Artificial Sequence
  Description of Artificial Sequence: Synthetic oligonucleotide
  Antisense strand to SEQ ID NO: 1454684
uacaaugaacccugauccu

SEQ ID NO: 1454686 - RNA, 19 nt, Artificial Sequence
  Description of Artificial Sequence: Synthetic oligonucleotide
  Sense strand starting at position 2862 of SEQ ID NO: 1243963
ccggcaagcagcuguuaua

SEQ ID NO: 1454687 - RNA, 19 nt, Artificial Sequence
  Description of Artificial Sequence: Synthetic oligonucleotide
  Antisense strand to SEQ ID NO: 1454686
uauaacagcugcuugccgg

SEQ ID NO: 1454688 - RNA, 19 nt, Artificial Sequence
  Description of Artificial Sequence: Synthetic oligonucleotide
  Sense strand starting at position 2865 of SEQ ID NO: 1243963
gcaagcagcuguuauaaau

SEQ ID NO: 1454689 - RNA, 19 nt, Artificial Sequence
  Description of Artificial Sequence: Synthetic oligonucleotide
  Antisense strand to SEQ ID NO: 1454688
auuuauaacagcugcuugc

SEQ ID NO: 1454690 - RNA, 19 nt, Artificial Sequence
  Description of Artificial Sequence: Synthetic oligonucleotide
  Sense strand starting at position 2898 of SEQ ID NO: 1243963
gccugcaauuugcucuuaa

SEQ ID NO: 1454691 - RNA, 19 nt, Artificial Sequence
  Description of Artificial Sequence: Synthetic oligonucleotide
  Antisense strand to SEQ ID NO: 1454690
uuaagagcaaauugcaggc

SEQ ID NO: 1454692 - RNA, 19 nt, Artificial Sequence
  Description of Artificial Sequence: Synthetic oligonucleotide
  Sense strand starting at position 2902 of SEQ ID NO: 1243963
gcaauuugcucuuaaugaa

SEQ ID NO: 1454693 - RNA, 19 nt, Artificial Sequence
  Description of Artificial Sequence: Synthetic oligonucleotide
  Antisense strand to SEQ ID NO: 1454692
uucauuaagagcaaauugc

SEQ ID NO: 1454694 - RNA, 19 nt, Artificial Sequence
  Description of Artificial Sequence: Synthetic oligonucleotide
  Sense strand starting at position 2949 of SEQ ID NO: 1243963
augcguguccugcagcaaa

SEQ ID NO: 1454695 - RNA, 19 nt, Artificial Sequence
  Description of Artificial Sequence: Synthetic oligonucleotide
  Antisense strand to SEQ ID NO: 1454694
uuugcugcaggacacgcau

SEQ ID NO: 1454696 - RNA, 19 nt, Artificial Sequence
  Description of Artificial Sequence: Synthetic oligonucleotide
  Sense strand starting at position 2951 of SEQ ID NO: 1243963
gcguguccugcagcaaaga

SEQ ID NO: 1454697 - RNA, 19 nt, Artificial Sequence
  Description of Artificial Sequence: Synthetic oligonucleotide
  Antisense strand to SEQ ID NO: 1454696
ucuuugcugcaggacacgc

SEQ ID NO: 1454698 - RNA, 19 nt, Artificial Sequence
  Description of Artificial Sequence: Synthetic oligonucleotide
  Sense strand starting at position 2952 of SEQ ID NO: 1243963
cguguccugcagcaaagau

SEQ ID NO: 1454699 - RNA, 19 nt, Artificial Sequence
  Description of Artificial Sequence: Synthetic oligonucleotide
  Antisense strand to SEQ ID NO: 1454698
aucuuugcugcaggacacg

SEQ ID NO: 1454700 - RNA, 19 nt, Artificial Sequence
  Description of Artificial Sequence: Synthetic oligonucleotide
  Sense strand starting at position 2991 of SEQ ID NO: 1243963
uuaauugcccagcagaacu

SEQ ID NO: 1454701 - RNA, 19 nt, Artificial Sequence
  Description of Artificial Sequence: Synthetic oligonucleotide
  Antisense strand to SEQ ID NO: 1454700
aguucugcugggcaauuaa

SEQ ID NO: 1454702 - RNA, 19 nt, Artificial Sequence
  Description of Artificial Sequence: Synthetic oligonucleotide
  Sense strand starting at position 3205 of SEQ ID NO: 1243963
accgcuuucuuaucugaca

SEQ ID NO: 1454703 - RNA, 19 nt, Artificial Sequence
  Description of Artificial Sequence: Synthetic oligonucleotide
  Antisense strand to SEQ ID NO: 1454702
ugucagauaagaaagcggu

SEQ ID NO: 1454704 - RNA, 19 nt, Artificial Sequence
  Description of Artificial Sequence: Synthetic oligonucleotide
  Sense strand starting at position 3295 of SEQ ID NO: 1243963
ucaugcuguugagaaucau

SEQ ID NO: 1454705 - RNA, 19 nt, Artificial Sequence
  Description of Artificial Sequence: Synthetic oligonucleotide
  Antisense strand to SEQ ID NO: 1454704
augauucucaacagcauga

SEQ ID NO: 1454706 - RNA, 19 nt, Artificial Sequence
  Description of Artificial Sequence: Synthetic oligonucleotide
  Sense strand starting at position 3299 of SEQ ID NO: 1243963
gcuguugagaaucauguuu

SEQ ID NO: 1454707 - RNA, 19 nt, Artificial Sequence
  Description of Artificial Sequence: Synthetic oligonucleotide
  Antisense strand to SEQ ID NO: 1454706
aaacaugauucucaacagc

SEQ ID NO: 1454708 - RNA, 19 nt, Artificial Sequence
  Description of Artificial Sequence: Synthetic oligonucleotide
  Sense strand starting at position 3982 of SEQ ID NO: 1243963
guccuuucuuauggucaca

SEQ ID NO: 1454709 - RNA, 19 nt, Artificial Sequence
  Description of Artificial Sequence: Synthetic oligonucleotide
  Antisense strand to SEQ ID NO: 1454708
ugugaccauaagaaaggac

SEQ ID NO: 1454710 - RNA, 19 nt, Artificial Sequence
  Description of Artificial Sequence: Synthetic oligonucleotide
  Sense strand starting at position 7 of SEQ ID NO: 1243964
ccucgaucuugguucccaa

SEQ ID NO: 1454711 - RNA, 19 nt, Artificial Sequence
  Description of Artificial Sequence: Synthetic oligonucleotide
  Antisense strand to SEQ ID NO: 1454710
uugggaaccaagaucgagg

SEQ ID NO: 1454712 - RNA, 19 nt, Artificial Sequence
  Description of Artificial Sequence: Synthetic oligonucleotide
  Sense strand starting at position 10 of SEQ ID NO: 1243964
cgaucuugguucccaaaga

SEQ ID NO: 1454713 - RNA, 19 nt, Artificial Sequence
  Description of Artificial Sequence: Synthetic oligonucleotide
  Antisense strand to SEQ ID NO: 1454712
ucuuugggaaccaagaucg

SEQ ID NO: 1454714 - RNA, 19 nt, Artificial Sequence
  Description of Artificial Sequence: Synthetic oligonucleotide
  Sense strand starting at position 11 of SEQ ID NO: 1243964
gaucuugguucccaaagag

SEQ ID NO: 1454715 - RNA, 19 nt, Artificial Sequence
  Description of Artificial Sequence: Synthetic oligonucleotide
  Antisense strand to SEQ ID NO: 1454714
cucuuugggaaccaagauc

SEQ ID NO: 1454716 - RNA, 19 nt, Artificial Sequence
  Description of Artificial Sequence: Synthetic oligonucleotide
  Sense strand starting at position 110 of SEQ ID NO: 1243964
ccaguacagucaguagaaa

SEQ ID NO: 1454717 - RNA, 19 nt, Artificial Sequence
  Description of Artificial Sequence: Synthetic oligonucleotide
  Antisense strand to SEQ ID NO: 1454716
uuucuacugacuguacugg

SEQ ID NO: 1454718 - RNA, 19 nt, Artificial Sequence
  Description of Artificial Sequence: Synthetic oligonucleotide
  Sense strand starting at position 144 of SEQ ID NO: 1243964
gguggugaaugacaauaaa

SEQ ID NO: 1454719 - RNA, 19 nt, Artificial Sequence
  Description of Artificial Sequence: Synthetic oligonucleotide
  Antisense strand to SEQ ID NO: 1454718
uuuauugucauucaccacc

SEQ ID NO: 1454720 - RNA, 19 nt, Artificial Sequence
  Description of Artificial Sequence: Synthetic oligonucleotide
  Sense strand starting at position 177 of SEQ ID NO: 1243964
uugguaguagugaguagua

SEQ ID NO: 1454721 - RNA, 19 nt, Artificial Sequence
  Description of Artificial Sequence: Synthetic oligonucleotide
  Antisense strand to SEQ ID NO: 1454720
uacuacucacuacuaccaa

SEQ ID NO: 1454722 - RNA, 19 nt, Artificial Sequence
  Description of Artificial Sequence: Synthetic oligonucleotide
  Sense strand starting at position 179 of SEQ ID NO: 1243964
gguaguagugaguaguaga

SEQ ID NO: 1454723 - RNA, 19 nt, Artificial Sequence
  Description of Artificial Sequence: Synthetic oligonucleotide
  Antisense strand to SEQ ID NO: 1454722
ucuacuacucacuacuacc

SEQ ID NO: 1454724 - RNA, 19 nt, Artificial Sequence
  Description of Artificial Sequence: Synthetic oligonucleotide
  Sense strand starting at position 203 of SEQ ID NO: 1243964
auacuaggcuaguagaguu

SEQ ID NO: 1454725 - RNA, 19 nt, Artificial Sequence
  Description of Artificial Sequence: Synthetic oligonucleotide
  Antisense strand to SEQ ID NO: 1454724
aacucuacuagccuaguau

SEQ ID NO: 1454726 - RNA, 19 nt, Artificial Sequence
  Description of Artificial Sequence: Synthetic oligonucleotide
  Sense strand starting at position 287 of SEQ ID NO: 1243964
cgccuaucacggugggaaa

SEQ ID NO: 1454727 - RNA, 19 nt, Artificial Sequence
  Description of Artificial Sequence: Synthetic oligonucleotide
  Antisense strand to SEQ ID NO: 1454726
uuucccaccgugauaggcg

SEQ ID NO: 1454728 - RNA, 19 nt, Artificial Sequence
  Description of Artificial Sequence: Synthetic oligonucleotide
  Sense strand starting at position 298 of SEQ ID NO: 1243964
gugggaaacucaucugccu

SEQ ID NO: 1454729 - RNA, 19 nt, Artificial Sequence
  Description of Artificial Sequence: Synthetic oligonucleotide
  Antisense strand to SEQ ID NO: 1454728
aggcagaugaguuucccac

SEQ ID NO: 1454730 - RNA, 19 nt, Artificial Sequence
  Description of Artificial Sequence: Synthetic oligonucleotide
  Sense strand starting at position 300 of SEQ ID NO: 1243964
gggaaacucaucugccuga

SEQ ID NO: 1454731 - RNA, 19 nt, Artificial Sequence
  Description of Artificial Sequence: Synthetic oligonucleotide
  Antisense strand to SEQ ID NO: 1454730
ucaggcagaugaguuuccc

SEQ ID NO: 1454732 - RNA, 19 nt, Artificial Sequence
  Description of Artificial Sequence: Synthetic oligonucleotide
  Sense strand starting at position 1723 of SEQ ID NO: 1243964
aacgcaugcguguucggaa

SEQ ID NO: 1454733 - RNA, 19 nt, Artificial Sequence
  Description of Artificial Sequence: Synthetic oligonucleotide
  Antisense strand to SEQ ID NO: 1454732
uuccgaacacgcaugcguu

SEQ ID NO: 1454734 - RNA, 19 nt, Artificial Sequence
  Description of Artificial Sequence: Synthetic oligonucleotide
  Sense strand starting at position 1724 of SEQ ID NO: 1243964
acgcaugcguguucggaau

SEQ ID NO: 1454735 - RNA, 19 nt, Artificial Sequence
  Description of Artificial Sequence: Synthetic oligonucleotide
  Antisense strand to SEQ ID NO: 1454734
auuccgaacacgcaugcgu

SEQ ID NO: 1454736 - RNA, 19 nt, Artificial Sequence
  Description of Artificial Sequence: Synthetic oligonucleotide
  Sense strand starting at position 1810 of SEQ ID NO: 1243964
ucacuugucucgucuagaa

SEQ ID NO: 1454737 - RNA, 19 nt, Artificial Sequence
  Description of Artificial Sequence: Synthetic oligonucleotide
  Antisense strand to SEQ ID NO: 1454736
uucuagacgagacaaguga

SEQ ID NO: 1454738 - RNA, 19 nt, Artificial Sequence
  Description of Artificial Sequence: Synthetic oligonucleotide
  Sense strand starting at position 1856 of SEQ ID NO: 1243964
ucggcuuuaacuggacuua

SEQ ID NO: 1454739 - RNA, 19 nt, Artificial Sequence
  Description of Artificial Sequence: Synthetic oligonucleotide
  Antisense strand to SEQ ID NO: 1454738
uaaguccaguuaaagccga

SEQ ID NO: 1454740 - RNA, 19 nt, Artificial Sequence
  Description of Artificial Sequence: Synthetic oligonucleotide
  Sense strand starting at position 1857 of SEQ ID NO: 1243964
cggcuuuaacuggacuuaa

SEQ ID NO: 1454741 - RNA, 19 nt, Artificial Sequence
  Description of Artificial Sequence: Synthetic oligonucleotide
  Antisense strand to SEQ ID NO: 1454740
uuaaguccaguuaaagccg

SEQ ID NO: 1454742 - RNA, 19 nt, Artificial Sequence
  Description of Artificial Sequence: Synthetic oligonucleotide
  Sense strand starting at position 2030 of SEQ ID NO: 1243964
cucuaaaucgaaugccuau

SEQ ID NO: 1454743 - RNA, 19 nt, Artificial Sequence
  Description of Artificial Sequence: Synthetic oligonucleotide
  Antisense strand to SEQ ID NO: 1454742
auaggcauucgauuuagag

SEQ ID NO: 1454744 - RNA, 19 nt, Artificial Sequence
  Description of Artificial Sequence: Synthetic oligonucleotide
  Sense strand starting at position 2041 of SEQ ID NO: 1243964
augccuaugcucugccaua

SEQ ID NO: 1454745 - RNA, 19 nt, Artificial Sequence
  Description of Artificial Sequence: Synthetic oligonucleotide
  Antisense strand to SEQ ID NO: 1454744
uauggcagagcauaggcau

SEQ ID NO: 1454746 - RNA, 19 nt, Artificial Sequence
  Description of Artificial Sequence: Synthetic oligonucleotide
  Sense strand starting at position 2046 of SEQ ID NO: 1243964
uaugcucugccauagaguu

SEQ ID NO: 1454747 - RNA, 19 nt, Artificial Sequence
  Description of Artificial Sequence: Synthetic oligonucleotide
  Antisense strand to SEQ ID NO: 1454746
aacucuauggcagagcaua

SEQ ID NO: 1454748 - RNA, 19 nt, Artificial Sequence
  Description of Artificial Sequence: Synthetic oligonucleotide
  Sense strand starting at position 2093 of SEQ ID NO: 1243964
cggacaccaucuucuuuaa

SEQ ID NO: 1454749 - RNA, 19 nt, Artificial Sequence
  Description of Artificial Sequence: Synthetic oligonucleotide
  Antisense strand to SEQ ID NO: 1454748
uuaaagaagaugguguccg

SEQ ID NO: 1454750 - RNA, 19 nt, Artificial Sequence
  Description of Artificial Sequence: Synthetic oligonucleotide
  Sense strand starting at position 2122 of SEQ ID NO: 1243964
cguauuggucucuauggca

SEQ ID NO: 1454751 - RNA, 19 nt, Artificial Sequence
  Description of Artificial Sequence: Synthetic oligonucleotide
  Antisense strand to SEQ ID NO: 1454750
ugccauagagaccaauacg

SEQ ID NO: 1454752 - RNA, 19 nt, Artificial Sequence
  Description of Artificial Sequence: Synthetic oligonucleotide
  Sense strand starting at position 2159 of SEQ ID NO: 1243964
cucugagguccucaguaaa

SEQ ID NO: 1454753 - RNA, 19 nt, Artificial Sequence
  Description of Artificial Sequence: Synthetic oligonucleotide
  Antisense strand to SEQ ID NO: 1454752
uuuacugaggaccucagag

SEQ ID NO: 1454754 - RNA, 19 nt, Artificial Sequence
  Description of Artificial Sequence: Synthetic oligonucleotide
  Sense strand starting at position 2174 of SEQ ID NO: 1243964
uaaagaaacuuagauggua

SEQ ID NO: 1454755 - RNA, 19 nt, Artificial Sequence
  Description of Artificial Sequence: Synthetic oligonucleotide
  Antisense strand to SEQ ID NO: 1454754
uaccaucuaaguuucuuua

SEQ ID NO: 1454756 - RNA, 19 nt, Artificial Sequence
  Description of Artificial Sequence: Synthetic oligonucleotide
  Sense strand starting at position 2227 of SEQ ID NO: 1243964
cccaaaguauugucuacga

SEQ ID NO: 1454757 - RNA, 19 nt, Artificial Sequence
  Description of Artificial Sequence: Synthetic oligonucleotide
  Antisense strand to SEQ ID NO: 1454756
ucguagacaauacuuuggg

SEQ ID NO: 1454758 - RNA, 19 nt, Artificial Sequence
  Description of Artificial Sequence: Synthetic oligonucleotide
  Sense strand starting at position 2231 of SEQ ID NO: 1243964
aaguauugucuacgagguc

SEQ ID NO: 1454759 - RNA, 19 nt, Artificial Sequence
  Description of Artificial Sequence: Synthetic oligonucleotide
  Antisense strand to SEQ ID NO: 1454758
gaccucguagacaauacuu

SEQ ID NO: 1454760 - RNA, 19 nt, Artificial Sequence
  Description of Artificial Sequence: Synthetic oligonucleotide
  Sense strand starting at position 2910 of SEQ ID NO: 1243964
agugguauguuagauuaca

SEQ ID NO: 1454761 - RNA, 19 nt, Artificial Sequence
  Description of Artificial Sequence: Synthetic oligonucleotide
  Antisense strand to SEQ ID NO: 1454760
uguaaucuaacauaccacu

SEQ ID NO: 1454762 - RNA, 19 nt, Artificial Sequence
  Description of Artificial Sequence: Synthetic oligonucleotide
  Sense strand starting at position 2924 of SEQ ID NO: 1243964
uuacauugacauugucuua

SEQ ID NO: 1454763 - RNA, 19 nt, Artificial Sequence
  Description of Artificial Sequence: Synthetic oligonucleotide
  Antisense strand to SEQ ID NO: 1454762
uaagacaaugucaauguaa

SEQ ID NO: 1454764 - RNA, 19 nt, Artificial Sequence
  Description of Artificial Sequence: Synthetic oligonucleotide
  Sense strand starting at position 2935 of SEQ ID NO: 1243964
uugucuuaaucauaggaga

SEQ ID NO: 1454765 - RNA, 19 nt, Artificial Sequence
  Description of Artificial Sequence: Synthetic oligonucleotide
  Antisense strand to SEQ ID NO: 1454764
ucuccuaugauuaagacaa

SEQ ID NO: 1454766 - RNA, 19 nt, Artificial Sequence
  Description of Artificial Sequence: Synthetic oligonucleotide
  Sense strand starting at position 2969 of SEQ ID NO: 1243964
cgagcuaucuucccaacuu

SEQ ID NO: 1454767 - RNA, 19 nt, Artificial Sequence
  Description of Artificial Sequence: Synthetic oligonucleotide
  Antisense strand to SEQ ID NO: 1454766
aaguugggaagauagcucg

SEQ ID NO: 1454768 - RNA, 19 nt, Artificial Sequence
  Description of Artificial Sequence: Synthetic oligonucleotide
  Sense strand starting at position 3030 of SEQ ID NO: 1243964
uccugaaacuucguagucu

SEQ ID NO: 1454769 - RNA, 19 nt, Artificial Sequence
  Description of Artificial Sequence: Synthetic oligonucleotide
  Antisense strand to SEQ ID NO: 1454768
agacuacgaaguuucagga

SEQ ID NO: 1454770 - RNA, 19 nt, Artificial Sequence
  Description of Artificial Sequence: Synthetic oligonucleotide
  Sense strand starting at position 3034 of SEQ ID NO: 1243964
gaaacuucguagucuucuu

SEQ ID NO: 1454771 - RNA, 19 nt, Artificial Sequence
  Description of Artificial Sequence: Synthetic oligonucleotide
  Antisense strand to SEQ ID NO: 1454770
aagaagacuacgaaguuuc

SEQ ID NO: 1454772 - RNA, 19 nt, Artificial Sequence
  Description of Artificial Sequence: Synthetic oligonucleotide
  Sense strand starting at position 3039 of SEQ ID NO: 1243964
uucguagucuucuuccaau

SEQ ID NO: 1454773 - RNA, 19 nt, Artificial Sequence
  Description of Artificial Sequence: Synthetic oligonucleotide
  Antisense strand to SEQ ID NO: 1454772
auuggaagaagacuacgaa

SEQ ID NO: 1454774 - RNA, 19 nt, Artificial Sequence
  Description of Artificial Sequence: Synthetic oligonucleotide
  Sense strand starting at position 3082 of SEQ ID NO: 1243964
auggcugccuuguuggaua

SEQ ID NO: 1454775 - RNA, 19 nt, Artificial Sequence
  Description of Artificial Sequence: Synthetic oligonucleotide
  Antisense strand to SEQ ID NO: 1454774
uauccaacaaggcagccau

SEQ ID NO: 1454776 - RNA, 19 nt, Artificial Sequence
  Description of Artificial Sequence: Synthetic oligonucleotide
  Sense strand starting at position 3436 of SEQ ID NO: 1243964
gaccaaagaucuugggauc

SEQ ID NO: 1454777 - RNA, 19 nt, Artificial Sequence
  Description of Artificial Sequence: Synthetic oligonucleotide
  Antisense strand to SEQ ID NO: 1454776
gaucccaagaucuuugguc

SEQ ID NO: 1454778 - RNA, 19 nt, Artificial Sequence
  Description of Artificial Sequence: Synthetic oligonucleotide
  Sense strand starting at position 3487 of SEQ ID NO: 1243964
ucagauagcucugccuuaa

SEQ ID NO: 1454779 - RNA, 19 nt, Artificial Sequence
  Description of Artificial Sequence: Synthetic oligonucleotide
  Antisense strand to SEQ ID NO: 1454778
uuaaggcagagcuaucuga

SEQ ID NO: 1454780 - RNA, 19 nt, Artificial Sequence
  Description of Artificial Sequence: Synthetic oligonucleotide
  Sense strand starting at position 3797 of SEQ ID NO: 1243964
gagggauagcuugagucua

SEQ ID NO: 1454781 - RNA, 19 nt, Artificial Sequence
  Description of Artificial Sequence: Synthetic oligonucleotide
  Antisense strand to SEQ ID NO: 1454780
uagacucaagcuaucccuc

SEQ ID NO: 1454782 - RNA, 19 nt, Artificial Sequence
  Description of Artificial Sequence: Synthetic oligonucleotide
  Sense strand starting at position 3904 of SEQ ID NO: 1243964
aaagucuugugacacgaua

SEQ ID NO: 1454783 - RNA, 19 nt, Artificial Sequence
  Description of Artificial Sequence: Synthetic oligonucleotide
  Antisense strand to SEQ ID NO: 1454782
uaucgugucacaagacuuu

SEQ ID NO: 1454784 - RNA, 19 nt, Artificial Sequence
  Description of Artificial Sequence: Synthetic oligonucleotide
  Sense strand starting at position 3906 of SEQ ID NO: 1243964
agucuugugacacgauaca

SEQ ID NO: 1454785 - RNA, 19 nt, Artificial Sequence
  Description of Artificial Sequence: Synthetic oligonucleotide
  Antisense strand to SEQ ID NO: 1454784
uguaucgugucacaagacu

SEQ ID NO: 1454786 - RNA, 19 nt, Artificial Sequence
  Description of Artificial Sequence: Synthetic oligonucleotide
  Sense strand starting at position 3915 of SEQ ID NO: 1243964
acacgauacaugugaacug

SEQ ID NO: 1454787 - RNA, 19 nt, Artificial Sequence
  Description of Artificial Sequence: Synthetic oligonucleotide
  Antisense strand to SEQ ID NO: 1454786
caguucacauguaucgugu

SEQ ID NO: 1454788 - RNA, 19 nt, Artificial Sequence
  Description of Artificial Sequence: Synthetic oligonucleotide
  Sense strand starting at position 3957 of SEQ ID NO: 1243964
auuuguguagccuguuaug

SEQ ID NO: 1454789 - RNA, 19 nt, Artificial Sequence
  Description of Artificial Sequence: Synthetic oligonucleotide
  Antisense strand to SEQ ID NO: 1454788
cauaacaggcuacacaaau

SEQ ID NO: 1454790 - RNA, 19 nt, Artificial Sequence
  Description of Artificial Sequence: Synthetic oligonucleotide
  Sense strand starting at position 6 of SEQ ID NO: 1243965
agguguaguugucugaaug

SEQ ID NO: 1454791 - RNA, 19 nt, Artificial Sequence
  Description of Artificial Sequence: Synthetic oligonucleotide
  Antisense strand to SEQ ID NO: 1454790
cauucagacaacuacaccu

SEQ ID NO: 1454792 - RNA, 19 nt, Artificial Sequence
  Description of Artificial Sequence: Synthetic oligonucleotide
  Sense strand starting at position 7 of SEQ ID NO: 1243965
gguguaguugucugaaugg

SEQ ID NO: 1454793 - RNA, 19 nt, Artificial Sequence
  Description of Artificial Sequence: Synthetic oligonucleotide
  Antisense strand to SEQ ID NO: 1454792
ccauucagacaacuacacc

SEQ ID NO: 1454794 - RNA, 19 nt, Artificial Sequence
  Description of Artificial Sequence: Synthetic oligonucleotide
  Sense strand starting at position 14 of SEQ ID NO: 1243965
uugucugaauggguaugaa

SEQ ID NO: 1454795 - RNA, 19 nt, Artificial Sequence
  Description of Artificial Sequence: Synthetic oligonucleotide
  Antisense strand to SEQ ID NO: 1454794
uucauacccauucagacaa

SEQ ID NO: 1454796 - RNA, 19 nt, Artificial Sequence
  Description of Artificial Sequence: Synthetic oligonucleotide
  Sense strand starting at position 31 of SEQ ID NO: 1243965
aaggcugagcgcuaaacaa

SEQ ID NO: 1454797 - RNA, 19 nt, Artificial Sequence
  Description of Artificial Sequence: Synthetic oligonucleotide
  Antisense strand to SEQ ID NO: 1454796
uuguuuagcgcucagccuu

SEQ ID NO: 1454798 - RNA, 19 nt, Artificial Sequence
  Description of Artificial Sequence: Synthetic oligonucleotide
  Sense strand starting at position 68 of SEQ ID NO: 1243965
agcagaguuaaaggaaagu

SEQ ID NO: 1454799 - RNA, 19 nt, Artificial Sequence
  Description of Artificial Sequence: Synthetic oligonucleotide
  Antisense strand to SEQ ID NO: 1454798
acuuuccuuuaacucugcu

SEQ ID NO: 1454800 - RNA, 19 nt, Artificial Sequence
  Description of Artificial Sequence: Synthetic oligonucleotide
  Sense strand starting at position 144 of SEQ ID NO: 1243965
gcaagaugcggaggugaaa

SEQ ID NO: 1454801 - RNA, 19 nt, Artificial Sequence
  Description of Artificial Sequence: Synthetic oligonucleotide
  Antisense strand to SEQ ID NO: 1454800
uuucaccuccgcaucuugc

SEQ ID NO: 1454802 - RNA, 19 nt, Artificial Sequence
  Description of Artificial Sequence: Synthetic oligonucleotide
  Sense strand starting at position 378 of SEQ ID NO: 1243965
agugaauaagcauggaggu

SEQ ID NO: 1454803 - RNA, 19 nt, Artificial Sequence
  Description of Artificial Sequence: Synthetic oligonucleotide
  Antisense strand to SEQ ID NO: 1454802
accuccaugcuuauucacu

SEQ ID NO: 1454804 - RNA, 19 nt, Artificial Sequence
  Description of Artificial Sequence: Synthetic oligonucleotide
  Sense strand starting at position 476 of SEQ ID NO: 1243965
gucaaaguuccugaacuua

SEQ ID NO: 1454805 - RNA, 19 nt, Artificial Sequence
  Description of Artificial Sequence: Synthetic oligonucleotide
  Antisense strand to SEQ ID NO: 1454804
uaaguucaggaacuuugac

SEQ ID NO: 1454806 - RNA, 19 nt, Artificial Sequence
  Description of Artificial Sequence: Synthetic oligonucleotide
  Sense strand starting at position 545 of SEQ ID NO: 1243965
gguggaauagcugguuucu

SEQ ID NO: 1454807 - RNA, 19 nt, Artificial Sequence
  Description of Artificial Sequence: Synthetic oligonucleotide
  Antisense strand to SEQ ID NO: 1454806
agaaaccagcuauuccacc

SEQ ID NO: 1454808 - RNA, 19 nt, Artificial Sequence
  Description of Artificial Sequence: Synthetic oligonucleotide
  Sense strand starting at position 667 of SEQ ID NO: 1243965
ggaggacucagguguuacu

SEQ ID NO: 1454809 - RNA, 19 nt, Artificial Sequence
  Description of Artificial Sequence: Synthetic oligonucleotide
  Antisense strand to SEQ ID NO: 1454808
aguaacaccugaguccucc

SEQ ID NO: 1454810 - RNA, 19 nt, Artificial Sequence
  Description of Artificial Sequence: Synthetic oligonucleotide
  Sense strand starting at position 676 of SEQ ID NO: 1243965
agguguuacuugccacuga

SEQ ID NO: 1454811 - RNA, 19 nt, Artificial Sequence
  Description of Artificial Sequence: Synthetic oligonucleotide
  Antisense strand to SEQ ID NO: 1454810
ucaguggcaaguaacaccu

SEQ ID NO: 1454812 - RNA, 19 nt, Artificial Sequence
  Description of Artificial Sequence: Synthetic oligonucleotide
  Sense strand starting at position 715 of SEQ ID NO: 1243965
cacauauagccagggcuau

SEQ ID NO: 1454813 - RNA, 19 nt, Artificial Sequence
  Description of Artificial Sequence: Synthetic oligonucleotide
  Antisense strand to SEQ ID NO: 1454812
auagcccuggcuauaugug

SEQ ID NO: 1454814 - RNA, 19 nt, Artificial Sequence
  Description of Artificial Sequence: Synthetic oligonucleotide
  Sense strand starting at position 716 of SEQ ID NO: 1243965
acauauagccagggcuaua

SEQ ID NO: 1454815 - RNA, 19 nt, Artificial Sequence
  Description of Artificial Sequence: Synthetic oligonucleotide
  Antisense strand to SEQ ID NO: 1454814
uauagcccuggcuauaugu

SEQ ID NO: 1454816 - RNA, 19 nt, Artificial Sequence
  Description of Artificial Sequence: Synthetic oligonucleotide
  Sense strand starting at position 728 of SEQ ID NO: 1243965
ggcuauaauuaggugagca

SEQ ID NO: 1454817 - RNA, 19 nt, Artificial Sequence
  Description of Artificial Sequence: Synthetic oligonucleotide
  Antisense strand to SEQ ID NO: 1454816
ugcucaccuaauuauagcc

SEQ ID NO: 1454818 - RNA, 19 nt, Artificial Sequence
  Description of Artificial Sequence: Synthetic oligonucleotide
  Sense strand starting at position 729 of SEQ ID NO: 1243965
gcuauaauuaggugagcag

SEQ ID NO: 1454819 - RNA, 19 nt, Artificial Sequence
  Description of Artificial Sequence: Synthetic oligonucleotide
  Antisense strand to SEQ ID NO: 1454818
cugcucaccuaauuauagc

SEQ ID NO: 1454820 - RNA, 19 nt, Artificial Sequence
  Description of Artificial Sequence: Synthetic oligonucleotide
  Sense strand starting at position 855 of SEQ ID NO: 1243965
cagucacugcuacaggaaa

SEQ ID NO: 1454821 - RNA, 19 nt, Artificial Sequence
  Description of Artificial Sequence: Synthetic oligonucleotide
  Antisense strand to SEQ ID NO: 1454820
uuuccuguagcagugacug

SEQ ID NO: 1454822 - RNA, 19 nt, Artificial Sequence
  Description of Artificial Sequence: Synthetic oligonucleotide
  Sense strand starting at position 939 of SEQ ID NO: 1243965
aagcaaaguuguuuccgaa

SEQ ID NO: 1454823 - RNA, 19 nt, Artificial Sequence
  Description of Artificial Sequence: Synthetic oligonucleotide
  Antisense strand to SEQ ID NO: 1454822
uucggaaacaacuuugcuu

SEQ ID NO: 1454824 - RNA, 19 nt, Artificial Sequence
  Description of Artificial Sequence: Synthetic oligonucleotide
  Sense strand starting at position 977 of SEQ ID NO: 1243965
ccucgaucuugguucccaa

SEQ ID NO: 1454825 - RNA, 19 nt, Artificial Sequence
  Description of Artificial Sequence: Synthetic oligonucleotide
  Antisense strand to SEQ ID NO: 1454824
uugggaaccaagaucgagg

SEQ ID NO: 1454826 - RNA, 19 nt, Artificial Sequence
  Description of Artificial Sequence: Synthetic oligonucleotide
  Sense strand starting at position 980 of SEQ ID NO: 1243965
cgaucuugguucccaaaga

SEQ ID NO: 1454827 - RNA, 19 nt, Artificial Sequence
  Description of Artificial Sequence: Synthetic oligonucleotide
  Antisense strand to SEQ ID NO: 1454826
ucuuugggaaccaagaucg

SEQ ID NO: 1454828 - RNA, 19 nt, Artificial Sequence
  Description of Artificial Sequence: Synthetic oligonucleotide
  Sense strand starting at position 1080 of SEQ ID NO: 1243965
ccaguacagucaguagaaa

SEQ ID NO: 1454829 - RNA, 19 nt, Artificial Sequence
  Description of Artificial Sequence: Synthetic oligonucleotide
  Antisense strand to SEQ ID NO: 1454828
uuucuacugacuguacugg

SEQ ID NO: 1454830 - RNA, 19 nt, Artificial Sequence
  Description of Artificial Sequence: Synthetic oligonucleotide
  Sense strand starting at position 1114 of SEQ ID NO: 1243965
gguggugaaugacaauaaa

SEQ ID NO: 1454831 - RNA, 19 nt, Artificial Sequence
  Description of Artificial Sequence: Synthetic oligonucleotide
  Antisense strand to SEQ ID NO: 1454830
uuuauugucauucaccacc

SEQ ID NO: 1454832 - RNA, 19 nt, Artificial Sequence
  Description of Artificial Sequence: Synthetic oligonucleotide
  Sense strand starting at position 1147 of SEQ ID NO: 1243965
uugguaguagugaguagua

SEQ ID NO: 1454833 - RNA, 19 nt, Artificial Sequence
  Description of Artificial Sequence: Synthetic oligonucleotide
  Antisense strand to SEQ ID NO: 1454832
uacuacucacuacuaccaa

SEQ ID NO: 1454834 - RNA, 19 nt, Artificial Sequence
  Description of Artificial Sequence: Synthetic oligonucleotide
  Sense strand starting at position 1149 of SEQ ID NO: 1243965
gguaguagugaguaguaga

SEQ ID NO: 1454835 - RNA, 19 nt, Artificial Sequence
  Description of Artificial Sequence: Synthetic oligonucleotide
  Antisense strand to SEQ ID NO: 1454834
ucuacuacucacuacuacc

SEQ ID NO: 1454836 - RNA, 19 nt, Artificial Sequence
  Description of Artificial Sequence: Synthetic oligonucleotide
  Sense strand starting at position 1257 of SEQ ID NO: 1243965
cgccuaucacggugggaaa

SEQ ID NO: 1454837 - RNA, 19 nt, Artificial Sequence
  Description of Artificial Sequence: Synthetic oligonucleotide
  Antisense strand to SEQ ID NO: 1454836
uuucccaccgugauaggcg

SEQ ID NO: 1454838 - RNA, 19 nt, Artificial Sequence
  Description of Artificial Sequence: Synthetic oligonucleotide
  Sense strand starting at position 1268 of SEQ ID NO: 1243965
gugggaaacucaucugccu

SEQ ID NO: 1454839 - RNA, 19 nt, Artificial Sequence
  Description of Artificial Sequence: Synthetic oligonucleotide
  Antisense strand to SEQ ID NO: 1454838
aggcagaugaguuucccac

SEQ ID NO: 1454840 - RNA, 19 nt, Artificial Sequence
  Description of Artificial Sequence: Synthetic oligonucleotide
  Sense strand starting at position 1270 of SEQ ID NO: 1243965
gggaaacucaucugccuga

SEQ ID NO: 1454841 - RNA, 19 nt, Artificial Sequence
  Description of Artificial Sequence: Synthetic oligonucleotide
  Antisense strand to SEQ ID NO: 1454840
ucaggcagaugaguuuccc

SEQ ID NO: 1454842 - RNA, 19 nt, Artificial Sequence
  Description of Artificial Sequence: Synthetic oligonucleotide
  Sense strand starting at position 2693 of SEQ ID NO: 1243965
aacgcaugcguguucggaa

SEQ ID NO: 1454843 - RNA, 19 nt, Artificial Sequence
  Description of Artificial Sequence: Synthetic oligonucleotide
  Antisense strand to SEQ ID NO: 1454842
uuccgaacacgcaugcguu

SEQ ID NO: 1454844 - RNA, 19 nt, Artificial Sequence
  Description of Artificial Sequence: Synthetic oligonucleotide
  Sense strand starting at position 2780 of SEQ ID NO: 1243965
ucacuugucucgucuagaa

SEQ ID NO: 1454845 - RNA, 19 nt, Artificial Sequence
  Description of Artificial Sequence: Synthetic oligonucleotide
  Antisense strand to SEQ ID NO: 1454844
uucuagacgagacaaguga

SEQ ID NO: 1454846 - RNA, 19 nt, Artificial Sequence
  Description of Artificial Sequence: Synthetic oligonucleotide
  Sense strand starting at position 2826 of SEQ ID NO: 1243965
ucggcuuuaacuggacuua

SEQ ID NO: 1454847 - RNA, 19 nt, Artificial Sequence
  Description of Artificial Sequence: Synthetic oligonucleotide
  Antisense strand to SEQ ID NO: 1454846
uaaguccaguuaaagccga

SEQ ID NO: 1454848 - RNA, 19 nt, Artificial Sequence
  Description of Artificial Sequence: Synthetic oligonucleotide
  Sense strand starting at position 2827 of SEQ ID NO: 1243965
cggcuuuaacuggacuuaa

SEQ ID NO: 1454849 - RNA, 19 nt, Artificial Sequence
  Description of Artificial Sequence: Synthetic oligonucleotide
  Antisense strand to SEQ ID NO: 1454848
uuaaguccaguuaaagccg

SEQ ID NO: 1454850 - RNA, 19 nt, Artificial Sequence
  Description of Artificial Sequence: Synthetic oligonucleotide
  Sense strand starting at position 3000 of SEQ ID NO: 1243965
cucuaaaucgaaugccuau

SEQ ID NO: 1454851 - RNA, 19 nt, Artificial Sequence
  Description of Artificial Sequence: Synthetic oligonucleotide
  Antisense strand to SEQ ID NO: 1454850
auaggcauucgauuuagag

SEQ ID NO: 1454852 - RNA, 19 nt, Artificial Sequence
  Description of Artificial Sequence: Synthetic oligonucleotide
  Sense strand starting at position 3016 of SEQ ID NO: 1243965
uaugcucugccauagaguu

SEQ ID NO: 1454853 - RNA, 19 nt, Artificial Sequence
  Description of Artificial Sequence: Synthetic oligonucleotide
  Antisense strand to SEQ ID NO: 1454852
aacucuauggcagagcaua

SEQ ID NO: 1454854 - RNA, 19 nt, Artificial Sequence
  Description of Artificial Sequence: Synthetic oligonucleotide
  Sense strand starting at position 3063 of SEQ ID NO: 1243965
cggacaccaucuucuuuaa

SEQ ID NO: 1454855 - RNA, 19 nt, Artificial Sequence
  Description of Artificial Sequence: Synthetic oligonucleotide
  Antisense strand to SEQ ID NO: 1454854
uuaaagaagaugguguccg

SEQ ID NO: 1454856 - RNA, 19 nt, Artificial Sequence
  Description of Artificial Sequence: Synthetic oligonucleotide
  Sense strand starting at position 3092 of SEQ ID NO: 1243965
cguauuggucucuauggca

SEQ ID NO: 1454857 - RNA, 19 nt, Artificial Sequence
  Description of Artificial Sequence: Synthetic oligonucleotide
  Antisense strand to SEQ ID NO: 1454856
ugccauagagaccaauacg

SEQ ID NO: 1454858 - RNA, 19 nt, Artificial Sequence
  Description of Artificial Sequence: Synthetic oligonucleotide
  Sense strand starting at position 3129 of SEQ ID NO: 1243965
cucugagguccucaguaaa

SEQ ID NO: 1454859 - RNA, 19 nt, Artificial Sequence
  Description of Artificial Sequence: Synthetic oligonucleotide
  Antisense strand to SEQ ID NO: 1454858
uuuacugaggaccucagag

SEQ ID NO: 1454860 - RNA, 19 nt, Artificial Sequence
  Description of Artificial Sequence: Synthetic oligonucleotide
  Sense strand starting at position 3144 of SEQ ID NO: 1243965
uaaagaaacuuagauggua

SEQ ID NO: 1454861 - RNA, 19 nt, Artificial Sequence
  Description of Artificial Sequence: Synthetic oligonucleotide
  Antisense strand to SEQ ID NO: 1454860
uaccaucuaaguuucuuua

SEQ ID NO: 1454862 - RNA, 19 nt, Artificial Sequence
  Description of Artificial Sequence: Synthetic oligonucleotide
  Sense strand starting at position 3197 of SEQ ID NO: 1243965
cccaaaguauugucuacga

SEQ ID NO: 1454863 - RNA, 19 nt, Artificial Sequence
  Description of Artificial Sequence: Synthetic oligonucleotide
  Antisense strand to SEQ ID NO: 1454862
ucguagacaauacuuuggg

SEQ ID NO: 1454864 - RNA, 19 nt, Artificial Sequence
  Description of Artificial Sequence: Synthetic oligonucleotide
  Sense strand starting at position 3201 of SEQ ID NO: 1243965
aaguauugucuacgagguc

SEQ ID NO: 1454865 - RNA, 19 nt, Artificial Sequence
  Description of Artificial Sequence: Synthetic oligonucleotide
  Antisense strand to SEQ ID NO: 1454864
gaccucguagacaauacuu

SEQ ID NO: 1454866 - RNA, 19 nt, Artificial Sequence
  Description of Artificial Sequence: Synthetic oligonucleotide
  Sense strand starting at position 3894 of SEQ ID NO: 1243965
uuacauugacauugucuua

SEQ ID NO: 1454867 - RNA, 19 nt, Artificial Sequence
  Description of Artificial Sequence: Synthetic oligonucleotide
  Antisense strand to SEQ ID NO: 1454866
uaagacaaugucaauguaa

SEQ ID NO: 1454868 - RNA, 19 nt, Artificial Sequence
  Description of Artificial Sequence: Synthetic oligonucleotide
  Sense strand starting at position 3939 of SEQ ID NO: 1243965
cgagcuaucuucccaacuu

SEQ ID NO: 1454869 - RNA, 19 nt, Artificial Sequence
  Description of Artificial Sequence: Synthetic oligonucleotide
  Antisense strand to SEQ ID NO: 1454868
aaguugggaagauagcucg

SEQ ID NO: 1454870 - RNA, 19 nt, Artificial Sequence
  Description of Artificial Sequence: Synthetic oligonucleotide
  Sense strand starting at position 148 of SEQ ID NO: 1243966
ucagaauugacgcaggagu

SEQ ID NO: 1454871 - RNA, 19 nt, Artificial Sequence
  Description of Artificial Sequence: Synthetic oligonucleotide
  Antisense strand to SEQ ID NO: 1454870
acuccugcgucaauucuga

SEQ ID NO: 1454872 - RNA, 19 nt, Artificial Sequence
  Description of Artificial Sequence: Synthetic oligonucleotide
  Sense strand starting at position 179 of SEQ ID NO: 1243966
aggcguagaauuggagaaa

SEQ ID NO: 1454873 - RNA, 19 nt, Artificial Sequence
  Description of Artificial Sequence: Synthetic oligonucleotide
  Antisense strand to SEQ ID NO: 1454872
uuucuccaauucuacgccu

SEQ ID NO: 1454874 - RNA, 19 nt, Artificial Sequence
  Description of Artificial Sequence: Synthetic oligonucleotide
  Sense strand starting at position 283 of SEQ ID NO: 1243966
acugaauagcuagagcaua

SEQ ID NO: 1454875 - RNA, 19 nt, Artificial Sequence
  Description of Artificial Sequence: Synthetic oligonucleotide
  Antisense strand to SEQ ID NO: 1454874
uaugcucuagcuauucagu

SEQ ID NO: 1454876 - RNA, 19 nt, Artificial Sequence
  Description of Artificial Sequence: Synthetic oligonucleotide
  Sense strand starting at position 296 of SEQ ID NO: 1243966
agcauaaaggccuaugaau

SEQ ID NO: 1454877 - RNA, 19 nt, Artificial Sequence
  Description of Artificial Sequence: Synthetic oligonucleotide
  Antisense strand to SEQ ID NO: 1454876
auucauaggccuuuaugcu

SEQ ID NO: 1454878 - RNA, 19 nt, Artificial Sequence
  Description of Artificial Sequence: Synthetic oligonucleotide
  Sense strand starting at position 315 of SEQ ID NO: 1243966
ugaagagauuggcacaaag

SEQ ID NO: 1454879 - RNA, 19 nt, Artificial Sequence
  Description of Artificial Sequence: Synthetic oligonucleotide
  Antisense strand to SEQ ID NO: 1454878
cuuugugccaaucucuuca

SEQ ID NO: 1454880 - RNA, 19 nt, Artificial Sequence
  Description of Artificial Sequence: Synthetic oligonucleotide
  Sense strand starting at position 412 of SEQ ID NO: 1243966
agguguaguugucugaaug

SEQ ID NO: 1454881 - RNA, 19 nt, Artificial Sequence
  Description of Artificial Sequence: Synthetic oligonucleotide
  Antisense strand to SEQ ID NO: 1454880
cauucagacaacuacaccu

SEQ ID NO: 1454882 - RNA, 19 nt, Artificial Sequence
  Description of Artificial Sequence: Synthetic oligonucleotide
  Sense strand starting at position 413 of SEQ ID NO: 1243966
gguguaguugucugaaugg

SEQ ID NO: 1454883 - RNA, 19 nt, Artificial Sequence
  Description of Artificial Sequence: Synthetic oligonucleotide
  Antisense strand to SEQ ID NO: 1454882
ccauucagacaacuacacc

SEQ ID NO: 1454884 - RNA, 19 nt, Artificial Sequence
  Description of Artificial Sequence: Synthetic oligonucleotide
  Sense strand starting at position 420 of SEQ ID NO: 1243966
uugucugaauggguaugaa

SEQ ID NO: 1454885 - RNA, 19 nt, Artificial Sequence
  Description of Artificial Sequence: Synthetic oligonucleotide
  Antisense strand to SEQ ID NO: 1454884
uucauacccauucagacaa

SEQ ID NO: 1454886 - RNA, 19 nt, Artificial Sequence
  Description of Artificial Sequence: Synthetic oligonucleotide
  Sense strand starting at position 437 of SEQ ID NO: 1243966
aaggcugagcgcuaaacaa

SEQ ID NO: 1454887 - RNA, 19 nt, Artificial Sequence
  Description of Artificial Sequence: Synthetic oligonucleotide
  Antisense strand to SEQ ID NO: 1454886
uuguuuagcgcucagccuu

SEQ ID NO: 1454888 - RNA, 19 nt, Artificial Sequence
  Description of Artificial Sequence: Synthetic oligonucleotide
  Sense strand starting at position 474 of SEQ ID NO: 1243966
agcagaguuaaaggaaagu

SEQ ID NO: 1454889 - RNA, 19 nt, Artificial Sequence
  Description of Artificial Sequence: Synthetic oligonucleotide
  Antisense strand to SEQ ID NO: 1454888
acuuuccuuuaacucugcu

SEQ ID NO: 1454890 - RNA, 19 nt, Artificial Sequence
  Description of Artificial Sequence: Synthetic oligonucleotide
  Sense strand starting at position 550 of SEQ ID NO: 1243966
gcaagaugcggaggugaaa

SEQ ID NO: 1454891 - RNA, 19 nt, Artificial Sequence
  Description of Artificial Sequence: Synthetic oligonucleotide
  Antisense strand to SEQ ID NO: 1454890
uuucaccuccgcaucuugc

SEQ ID NO: 1454892 - RNA, 19 nt, Artificial Sequence
  Description of Artificial Sequence: Synthetic oligonucleotide
  Sense strand starting at position 784 of SEQ ID NO: 1243966
agugaauaagcauggaggu

SEQ ID NO: 1454893 - RNA, 19 nt, Artificial Sequence
  Description of Artificial Sequence: Synthetic oligonucleotide
  Antisense strand to SEQ ID NO: 1454892
accuccaugcuuauucacu

SEQ ID NO: 1454894 - RNA, 19 nt, Artificial Sequence
  Description of Artificial Sequence: Synthetic oligonucleotide
  Sense strand starting at position 882 of SEQ ID NO: 1243966
gucaaaguuccugaacuua

SEQ ID NO: 1454895 - RNA, 19 nt, Artificial Sequence
  Description of Artificial Sequence: Synthetic oligonucleotide
  Antisense strand to SEQ ID NO: 1454894
uaaguucaggaacuuugac

SEQ ID NO: 1454896 - RNA, 19 nt, Artificial Sequence
  Description of Artificial Sequence: Synthetic oligonucleotide
  Sense strand starting at position 951 of SEQ ID NO: 1243966
gguggaauagcugguuucu

SEQ ID NO: 1454897 - RNA, 19 nt, Artificial Sequence
  Description of Artificial Sequence: Synthetic oligonucleotide
  Antisense strand to SEQ ID NO: 1454896
agaaaccagcuauuccacc

SEQ ID NO: 1454898 - RNA, 19 nt, Artificial Sequence
  Description of Artificial Sequence: Synthetic oligonucleotide
  Sense strand starting at position 1073 of SEQ ID NO: 1243966
ggaggacucagguguuacu

SEQ ID NO: 1454899 - RNA, 19 nt, Artificial Sequence
  Description of Artificial Sequence: Synthetic oligonucleotide
  Antisense strand to SEQ ID NO: 1454898
aguaacaccugaguccucc

SEQ ID NO: 1454900 - RNA, 19 nt, Artificial Sequence
  Description of Artificial Sequence: Synthetic oligonucleotide
  Sense strand starting at position 1082 of SEQ ID NO: 1243966
agguguuacuugccacuga

SEQ ID NO: 1454901 - RNA, 19 nt, Artificial Sequence
  Description of Artificial Sequence: Synthetic oligonucleotide
  Antisense strand to SEQ ID NO: 1454900
ucaguggcaaguaacaccu

SEQ ID NO: 1454902 - RNA, 19 nt, Artificial Sequence
  Description of Artificial Sequence: Synthetic oligonucleotide
  Sense strand starting at position 1121 of SEQ ID NO: 1243966
cacauauagccagggcuau

SEQ ID NO: 1454903 - RNA, 19 nt, Artificial Sequence
  Description of Artificial Sequence: Synthetic oligonucleotide
  Antisense strand to SEQ ID NO: 1454902
auagcccuggcuauaugug

SEQ ID NO: 1454904 - RNA, 19 nt, Artificial Sequence
  Description of Artificial Sequence: Synthetic oligonucleotide
  Sense strand starting at position 1122 of SEQ ID NO: 1243966
acauauagccagggcuaua

SEQ ID NO: 1454905 - RNA, 19 nt, Artificial Sequence
  Description of Artificial Sequence: Synthetic oligonucleotide
  Antisense strand to SEQ ID NO: 1454904
uauagcccuggcuauaugu

SEQ ID NO: 1454906 - RNA, 19 nt, Artificial Sequence
  Description of Artificial Sequence: Synthetic oligonucleotide
  Sense strand starting at position 1134 of SEQ ID NO: 1243966
ggcuauaauuaggugagca

SEQ ID NO: 1454907 - RNA, 19 nt, Artificial Sequence
  Description of Artificial Sequence: Synthetic oligonucleotide
  Antisense strand to SEQ ID NO: 1454906
ugcucaccuaauuauagcc

SEQ ID NO: 1454908 - RNA, 19 nt, Artificial Sequence
  Description of Artificial Sequence: Synthetic oligonucleotide
  Sense strand starting at position 1135 of SEQ ID NO: 1243966
gcuauaauuaggugagcag

SEQ ID NO: 1454909 - RNA, 19 nt, Artificial Sequence
  Description of Artificial Sequence: Synthetic oligonucleotide
  Antisense strand to SEQ ID NO: 1454908
cugcucaccuaauuauagc

SEQ ID NO: 1454910 - RNA, 19 nt, Artificial Sequence
  Description of Artificial Sequence: Synthetic oligonucleotide
  Sense strand starting at position 1261 of SEQ ID NO: 1243966
cagucacugcuacaggaaa

SEQ ID NO: 1454911 - RNA, 19 nt, Artificial Sequence
  Description of Artificial Sequence: Synthetic oligonucleotide
  Antisense strand to SEQ ID NO: 1454910
uuuccuguagcagugacug

SEQ ID NO: 1454912 - RNA, 19 nt, Artificial Sequence
  Description of Artificial Sequence: Synthetic oligonucleotide
  Sense strand starting at position 1345 of SEQ ID NO: 1243966
aagcaaaguuguuuccgaa

SEQ ID NO: 1454913 - RNA, 19 nt, Artificial Sequence
  Description of Artificial Sequence: Synthetic oligonucleotide
  Antisense strand to SEQ ID NO: 1454912
uucggaaacaacuuugcuu

SEQ ID NO: 1454914 - RNA, 19 nt, Artificial Sequence
  Description of Artificial Sequence: Synthetic oligonucleotide
  Sense strand starting at position 1383 of SEQ ID NO: 1243966
ccucgaucuugguucccaa

SEQ ID NO: 1454915 - RNA, 19 nt, Artificial Sequence
  Description of Artificial Sequence: Synthetic oligonucleotide
  Antisense strand to SEQ ID NO: 1454914
uugggaaccaagaucgagg

SEQ ID NO: 1454916 - RNA, 19 nt, Artificial Sequence
  Description of Artificial Sequence: Synthetic oligonucleotide
  Sense strand starting at position 1386 of SEQ ID NO: 1243966
cgaucuugguucccaaaga

SEQ ID NO: 1454917 - RNA, 19 nt, Artificial Sequence
  Description of Artificial Sequence: Synthetic oligonucleotide
  Antisense strand to SEQ ID NO: 1454916
ucuuugggaaccaagaucg

SEQ ID NO: 1454918 - RNA, 19 nt, Artificial Sequence
  Description of Artificial Sequence: Synthetic oligonucleotide
  Sense strand starting at position 1486 of SEQ ID NO: 1243966
ccaguacagucaguagaaa

SEQ ID NO: 1454919 - RNA, 19 nt, Artificial Sequence
  Description of Artificial Sequence: Synthetic oligonucleotide
  Antisense strand to SEQ ID NO: 1454918
uuucuacugacuguacugg

SEQ ID NO: 1454920 - RNA, 19 nt, Artificial Sequence
  Description of Artificial Sequence: Synthetic oligonucleotide
  Sense strand starting at position 1553 of SEQ ID NO: 1243966
uugguaguagugaguagua

SEQ ID NO: 1454921 - RNA, 19 nt, Artificial Sequence
  Description of Artificial Sequence: Synthetic oligonucleotide
  Antisense strand to SEQ ID NO: 1454920
uacuacucacuacuaccaa

SEQ ID NO: 1454922 - RNA, 19 nt, Artificial Sequence
  Description of Artificial Sequence: Synthetic oligonucleotide
  Sense strand starting at position 1555 of SEQ ID NO: 1243966
gguaguagugaguaguaga

SEQ ID NO: 1454923 - RNA, 19 nt, Artificial Sequence
  Description of Artificial Sequence: Synthetic oligonucleotide
  Antisense strand to SEQ ID NO: 1454922
ucuacuacucacuacuacc

SEQ ID NO: 1454924 - RNA, 19 nt, Artificial Sequence
  Description of Artificial Sequence: Synthetic oligonucleotide
  Sense strand starting at position 1674 of SEQ ID NO: 1243966
gugggaaacucaucugccu

SEQ ID NO: 1454925 - RNA, 19 nt, Artificial Sequence
  Description of Artificial Sequence: Synthetic oligonucleotide
  Antisense strand to SEQ ID NO: 1454924
aggcagaugaguuucccac

SEQ ID NO: 1454926 - RNA, 19 nt, Artificial Sequence
  Description of Artificial Sequence: Synthetic oligonucleotide
  Sense strand starting at position 1676 of SEQ ID NO: 1243966
gggaaacucaucugccuga

SEQ ID NO: 1454927 - RNA, 19 nt, Artificial Sequence
  Description of Artificial Sequence: Synthetic oligonucleotide
  Antisense strand to SEQ ID NO: 1454926
ucaggcagaugaguuuccc

SEQ ID NO: 1454928 - RNA, 19 nt, Artificial Sequence
  Description of Artificial Sequence: Synthetic oligonucleotide
  Sense strand starting at position 3099 of SEQ ID NO: 1243966
aacgcaugcguguucggaa

SEQ ID NO: 1454929 - RNA, 19 nt, Artificial Sequence
  Description of Artificial Sequence: Synthetic oligonucleotide
  Antisense strand to SEQ ID NO: 1454928
uuccgaacacgcaugcguu

SEQ ID NO: 1454930 - RNA, 19 nt, Artificial Sequence
  Description of Artificial Sequence: Synthetic oligonucleotide
  Sense strand starting at position 3232 of SEQ ID NO: 1243966
ucggcuuuaacuggacuua

SEQ ID NO: 1454931 - RNA, 19 nt, Artificial Sequence
  Description of Artificial Sequence: Synthetic oligonucleotide
  Antisense strand to SEQ ID NO: 1454930
uaaguccaguuaaagccga

SEQ ID NO: 1454932 - RNA, 19 nt, Artificial Sequence
  Description of Artificial Sequence: Synthetic oligonucleotide
  Sense strand starting at position 3233 of SEQ ID NO: 1243966
cggcuuuaacuggacuuaa

SEQ ID NO: 1454933 - RNA, 19 nt, Artificial Sequence
  Description of Artificial Sequence: Synthetic oligonucleotide
  Antisense strand to SEQ ID NO: 1454932
uuaaguccaguuaaagccg

SEQ ID NO: 1454934 - RNA, 19 nt, Artificial Sequence
  Description of Artificial Sequence: Synthetic oligonucleotide
  Sense strand starting at position 3406 of SEQ ID NO: 1243966
cucuaaaucgaaugccuau

SEQ ID NO: 1454935 - RNA, 19 nt, Artificial Sequence
  Description of Artificial Sequence: Synthetic oligonucleotide
  Antisense strand to SEQ ID NO: 1454934
auaggcauucgauuuagag

SEQ ID NO: 1454936 - RNA, 19 nt, Artificial Sequence
  Description of Artificial Sequence: Synthetic oligonucleotide
  Sense strand starting at position 3422 of SEQ ID NO: 1243966
uaugcucugccauagaguu

SEQ ID NO: 1454937 - RNA, 19 nt, Artificial Sequence
  Description of Artificial Sequence: Synthetic oligonucleotide
  Antisense strand to SEQ ID NO: 1454936
aacucuauggcagagcaua

SEQ ID NO: 1454938 - RNA, 19 nt, Artificial Sequence
  Description of Artificial Sequence: Synthetic oligonucleotide
  Sense strand starting at position 3469 of SEQ ID NO: 1243966
cggacaccaucuucuuuaa

SEQ ID NO: 1454939 - RNA, 19 nt, Artificial Sequence
  Description of Artificial Sequence: Synthetic oligonucleotide
  Antisense strand to SEQ ID NO: 1454938
uuaaagaagaugguguccg

SEQ ID NO: 1454940 - RNA, 19 nt, Artificial Sequence
  Description of Artificial Sequence: Synthetic oligonucleotide
  Sense strand starting at position 3498 of SEQ ID NO: 1243966
cguauuggucucuauggca

SEQ ID NO: 1454941 - RNA, 19 nt, Artificial Sequence
  Description of Artificial Sequence: Synthetic oligonucleotide
  Antisense strand to SEQ ID NO: 1454940
ugccauagagaccaauacg

SEQ ID NO: 1454942 - RNA, 19 nt, Artificial Sequence
  Description of Artificial Sequence: Synthetic oligonucleotide
  Sense strand starting at position 3535 of SEQ ID NO: 1243966
cucugagguccucaguaaa

SEQ ID NO: 1454943 - RNA, 19 nt, Artificial Sequence
  Description of Artificial Sequence: Synthetic oligonucleotide
  Antisense strand to SEQ ID NO: 1454942
uuuacugaggaccucagag

SEQ ID NO: 1454944 - RNA, 19 nt, Artificial Sequence
  Description of Artificial Sequence: Synthetic oligonucleotide
  Sense strand starting at position 3550 of SEQ ID NO: 1243966
uaaagaaacuuagauggua

SEQ ID NO: 1454945 - RNA, 19 nt, Artificial Sequence
  Description of Artificial Sequence: Synthetic oligonucleotide
  Antisense strand to SEQ ID NO: 1454944
uaccaucuaaguuucuuua

SEQ ID NO: 1454946 - RNA, 19 nt, Artificial Sequence
  Description of Artificial Sequence: Synthetic oligonucleotide
  Sense strand starting at position 3603 of SEQ ID NO: 1243966
cccaaaguauugucuacga

SEQ ID NO: 1454947 - RNA, 19 nt, Artificial Sequence
  Description of Artificial Sequence: Synthetic oligonucleotide
  Antisense strand to SEQ ID NO: 1454946
ucguagacaauacuuuggg

SEQ ID NO: 1454948 - RNA, 19 nt, Artificial Sequence
  Description of Artificial Sequence: Synthetic oligonucleotide
  Sense strand starting at position 3607 of SEQ ID NO: 1243966
aaguauugucuacgagguc

SEQ ID NO: 1454949 - RNA, 19 nt, Artificial Sequence
  Description of Artificial Sequence: Synthetic oligonucleotide
  Antisense strand to SEQ ID NO: 1454948
gaccucguagacaauacuu

SEQ ID NO: 1454950 - RNA, 19 nt, Artificial Sequence
  Description of Artificial Sequence: Synthetic oligonucleotide
  Sense strand starting at position 44 of SEQ ID NO: 1243967
gucaaaguuccugaacuua

SEQ ID NO: 1454951 - RNA, 19 nt, Artificial Sequence
  Description of Artificial Sequence: Synthetic oligonucleotide
  Antisense strand to SEQ ID NO: 1454950
uaaguucaggaacuuugac

SEQ ID NO: 1454952 - RNA, 19 nt, Artificial Sequence
  Description of Artificial Sequence: Synthetic oligonucleotide
  Sense strand starting at position 113 of SEQ ID NO: 1243967
gguggaauagcugguuucu

SEQ ID NO: 1454953 - RNA, 19 nt, Artificial Sequence
  Description of Artificial Sequence: Synthetic oligonucleotide
  Antisense strand to SEQ ID NO: 1454952
agaaaccagcuauuccacc

SEQ ID NO: 1454954 - RNA, 19 nt, Artificial Sequence
  Description of Artificial Sequence: Synthetic oligonucleotide
  Sense strand starting at position 191 of SEQ ID NO: 1243967
ugucaaaucucagagauga

SEQ ID NO: 1454955 - RNA, 19 nt, Artificial Sequence
  Description of Artificial Sequence: Synthetic oligonucleotide
  Antisense strand to SEQ ID NO: 1454954
ucaucucugagauuugaca

SEQ ID NO: 1454956 - RNA, 19 nt, Artificial Sequence
  Description of Artificial Sequence: Synthetic oligonucleotide
  Sense strand starting at position 235 of SEQ ID NO: 1243967
ggaggacucagguguuacu

SEQ ID NO: 1454957 - RNA, 19 nt, Artificial Sequence
  Description of Artificial Sequence: Synthetic oligonucleotide
  Antisense strand to SEQ ID NO: 1454956
aguaacaccugaguccucc

SEQ ID NO: 1454958 - RNA, 19 nt, Artificial Sequence
  Description of Artificial Sequence: Synthetic oligonucleotide
  Sense strand starting at position 244 of SEQ ID NO: 1243967
agguguuacuugccacuga

SEQ ID NO: 1454959 - RNA, 19 nt, Artificial Sequence
  Description of Artificial Sequence: Synthetic oligonucleotide
  Antisense strand to SEQ ID NO: 1454958
ucaguggcaaguaacaccu

SEQ ID NO: 1454960 - RNA, 19 nt, Artificial Sequence
  Description of Artificial Sequence: Synthetic oligonucleotide
  Sense strand starting at position 283 of SEQ ID NO: 1243967
cacauauagccagggcuau

SEQ ID NO: 1454961 - RNA, 19 nt, Artificial Sequence
  Description of Artificial Sequence: Synthetic oligonucleotide
  Antisense strand to SEQ ID NO: 1454960
auagcccuggcuauaugug

SEQ ID NO: 1454962 - RNA, 19 nt, Artificial Sequence
  Description of Artificial Sequence: Synthetic oligonucleotide
  Sense strand starting at position 284 of SEQ ID NO: 1243967
acauauagccagggcuaua

SEQ ID NO: 1454963 - RNA, 19 nt, Artificial Sequence
  Description of Artificial Sequence: Synthetic oligonucleotide
  Antisense strand to SEQ ID NO: 1454962
uauagcccuggcuauaugu

SEQ ID NO: 1454964 - RNA, 19 nt, Artificial Sequence
  Description of Artificial Sequence: Synthetic oligonucleotide
  Sense strand starting at position 296 of SEQ ID NO: 1243967
ggcuauaauuaggugagca

SEQ ID NO: 1454965 - RNA, 19 nt, Artificial Sequence
  Description of Artificial Sequence: Synthetic oligonucleotide
  Antisense strand to SEQ ID NO: 1454964
ugcucaccuaauuauagcc

SEQ ID NO: 1454966 - RNA, 19 nt, Artificial Sequence
  Description of Artificial Sequence: Synthetic oligonucleotide
  Sense strand starting at position 297 of SEQ ID NO: 1243967
gcuauaauuaggugagcag

SEQ ID NO: 1454967 - RNA, 19 nt, Artificial Sequence
  Description of Artificial Sequence: Synthetic oligonucleotide
  Antisense strand to SEQ ID NO: 1454966
cugcucaccuaauuauagc

SEQ ID NO: 1454968 - RNA, 19 nt, Artificial Sequence
  Description of Artificial Sequence: Synthetic oligonucleotide
  Sense strand starting at position 423 of SEQ ID NO: 1243967
cagucacugcuacaggaaa

SEQ ID NO: 1454969 - RNA, 19 nt, Artificial Sequence
  Description of Artificial Sequence: Synthetic oligonucleotide
  Antisense strand to SEQ ID NO: 1454968
uuuccuguagcagugacug

SEQ ID NO: 1454970 - RNA, 19 nt, Artificial Sequence
  Description of Artificial Sequence: Synthetic oligonucleotide
  Sense strand starting at position 507 of SEQ ID NO: 1243967
aagcaaaguuguuuccgaa

SEQ ID NO: 1454971 - RNA, 19 nt, Artificial Sequence
  Description of Artificial Sequence: Synthetic oligonucleotide
  Antisense strand to SEQ ID NO: 1454970
uucggaaacaacuuugcuu

SEQ ID NO: 1454972 - RNA, 19 nt, Artificial Sequence
  Description of Artificial Sequence: Synthetic oligonucleotide
  Sense strand starting at position 545 of SEQ ID NO: 1243967
ccucgaucuugguucccaa

SEQ ID NO: 1454973 - RNA, 19 nt, Artificial Sequence
  Description of Artificial Sequence: Synthetic oligonucleotide
  Antisense strand to SEQ ID NO: 1454972
uugggaaccaagaucgagg

SEQ ID NO: 1454974 - RNA, 19 nt, Artificial Sequence
  Description of Artificial Sequence: Synthetic oligonucleotide
  Sense strand starting at position 548 of SEQ ID NO: 1243967
cgaucuugguucccaaaga

SEQ ID NO: 1454975 - RNA, 19 nt, Artificial Sequence
  Description of Artificial Sequence: Synthetic oligonucleotide
  Antisense strand to SEQ ID NO: 1454974
ucuuugggaaccaagaucg

SEQ ID NO: 1454976 - RNA, 19 nt, Artificial Sequence
  Description of Artificial Sequence: Synthetic oligonucleotide
  Sense strand starting at position 648 of SEQ ID NO: 1243967
ccaguacagucaguagaaa

SEQ ID NO: 1454977 - RNA, 19 nt, Artificial Sequence
  Description of Artificial Sequence: Synthetic oligonucleotide
  Antisense strand to SEQ ID NO: 1454976
uuucuacugacuguacugg

SEQ ID NO: 1454978 - RNA, 19 nt, Artificial Sequence
  Description of Artificial Sequence: Synthetic oligonucleotide
  Sense strand starting at position 682 of SEQ ID NO: 1243967
gguggugaaugacaauaaa

SEQ ID NO: 1454979 - RNA, 19 nt, Artificial Sequence
  Description of Artificial Sequence: Synthetic oligonucleotide
  Antisense strand to SEQ ID NO: 1454978
uuuauugucauucaccacc

SEQ ID NO: 1454980 - RNA, 19 nt, Artificial Sequence
  Description of Artificial Sequence: Synthetic oligonucleotide
  Sense strand starting at position 715 of SEQ ID NO: 1243967
uugguaguagugaguagua

SEQ ID NO: 1454981 - RNA, 19 nt, Artificial Sequence
  Description of Artificial Sequence: Synthetic oligonucleotide
  Antisense strand to SEQ ID NO: 1454980
uacuacucacuacuaccaa

SEQ ID NO: 1454982 - RNA, 19 nt, Artificial Sequence
  Description of Artificial Sequence: Synthetic oligonucleotide
  Sense strand starting at position 717 of SEQ ID NO: 1243967
gguaguagugaguaguaga

SEQ ID NO: 1454983 - RNA, 19 nt, Artificial Sequence
  Description of Artificial Sequence: Synthetic oligonucleotide
  Antisense strand to SEQ ID NO: 1454982
ucuacuacucacuacuacc

SEQ ID NO: 1454984 - RNA, 19 nt, Artificial Sequence
  Description of Artificial Sequence: Synthetic oligonucleotide
  Sense strand starting at position 825 of SEQ ID NO: 1243967
cgccuaucacggugggaaa

SEQ ID NO: 1454985 - RNA, 19 nt, Artificial Sequence
  Description of Artificial Sequence: Synthetic oligonucleotide
  Antisense strand to SEQ ID NO: 1454984
uuucccaccgugauaggcg

SEQ ID NO: 1454986 - RNA, 19 nt, Artificial Sequence
  Description of Artificial Sequence: Synthetic oligonucleotide
  Sense strand starting at position 836 of SEQ ID NO: 1243967
gugggaaacucaucugccu

SEQ ID NO: 1454987 - RNA, 19 nt, Artificial Sequence
  Description of Artificial Sequence: Synthetic oligonucleotide
  Antisense strand to SEQ ID NO: 1454986
aggcagaugaguuucccac

SEQ ID NO: 1454988 - RNA, 19 nt, Artificial Sequence
  Description of Artificial Sequence: Synthetic oligonucleotide
  Sense strand starting at position 838 of SEQ ID NO: 1243967
gggaaacucaucugccuga

SEQ ID NO: 1454989 - RNA, 19 nt, Artificial Sequence
  Description of Artificial Sequence: Synthetic oligonucleotide
  Antisense strand to SEQ ID NO: 1454988
ucaggcagaugaguuuccc

SEQ ID NO: 1454990 - RNA, 19 nt, Artificial Sequence
  Description of Artificial Sequence: Synthetic oligonucleotide
  Sense strand starting at position 2261 of SEQ ID NO: 1243967
aacgcaugcguguucggaa

SEQ ID NO: 1454991 - RNA, 19 nt, Artificial Sequence
  Description of Artificial Sequence: Synthetic oligonucleotide
  Antisense strand to SEQ ID NO: 1454990
uuccgaacacgcaugcguu

SEQ ID NO: 1454992 - RNA, 19 nt, Artificial Sequence
  Description of Artificial Sequence: Synthetic oligonucleotide
  Sense strand starting at position 2348 of SEQ ID NO: 1243967
ucacuugucucgucuagaa

SEQ ID NO: 1454993 - RNA, 19 nt, Artificial Sequence
  Description of Artificial Sequence: Synthetic oligonucleotide
  Antisense strand to SEQ ID NO: 1454992
uucuagacgagacaaguga

SEQ ID NO: 1454994 - RNA, 19 nt, Artificial Sequence
  Description of Artificial Sequence: Synthetic oligonucleotide
  Sense strand starting at position 2394 of SEQ ID NO: 1243967
ucggcuuuaacuggacuua

SEQ ID NO: 1454995 - RNA, 19 nt, Artificial Sequence
  Description of Artificial Sequence: Synthetic oligonucleotide
  Antisense strand to SEQ ID NO: 1454994
uaaguccaguuaaagccga

SEQ ID NO: 1454996 - RNA, 19 nt, Artificial Sequence
  Description of Artificial Sequence: Synthetic oligonucleotide
  Sense strand starting at position 2395 of SEQ ID NO: 1243967
cggcuuuaacuggacuuaa

SEQ ID NO: 1454997 - RNA, 19 nt, Artificial Sequence
  Description of Artificial Sequence: Synthetic oligonucleotide
  Antisense strand to SEQ ID NO: 1454996
uuaaguccaguuaaagccg

SEQ ID NO: 1454998 - RNA, 19 nt, Artificial Sequence
  Description of Artificial Sequence: Synthetic oligonucleotide
  Sense strand starting at position 2568 of SEQ ID NO: 1243967
cucuaaaucgaaugccuau

SEQ ID NO: 1454999 - RNA, 19 nt, Artificial Sequence
  Description of Artificial Sequence: Synthetic oligonucleotide
  Antisense strand to SEQ ID NO: 1454998
auaggcauucgauuuagag

SEQ ID NO: 1455000 - RNA, 19 nt, Artificial Sequence
  Description of Artificial Sequence: Synthetic oligonucleotide
  Sense strand starting at position 2584 of SEQ ID NO: 1243967
uaugcucugccauagaguu

SEQ ID NO: 1455001 - RNA, 19 nt, Artificial Sequence
  Description of Artificial Sequence: Synthetic oligonucleotide
  Antisense strand to SEQ ID NO: 1455000
aacucuauggcagagcaua

SEQ ID NO: 1455002 - RNA, 19 nt, Artificial Sequence
  Description of Artificial Sequence: Synthetic oligonucleotide
  Sense strand starting at position 2631 of SEQ ID NO: 1243967
cggacaccaucuucuuuaa

SEQ ID NO: 1455003 - RNA, 19 nt, Artificial Sequence
  Description of Artificial Sequence: Synthetic oligonucleotide
  Antisense strand to SEQ ID NO: 1455002
uuaaagaagaugguguccg

SEQ ID NO: 1455004 - RNA, 19 nt, Artificial Sequence
  Description of Artificial Sequence: Synthetic oligonucleotide
  Sense strand starting at position 2660 of SEQ ID NO: 1243967
cguauuggucucuauggca

SEQ ID NO: 1455005 - RNA, 19 nt, Artificial Sequence
  Description of Artificial Sequence: Synthetic oligonucleotide
  Antisense strand to SEQ ID NO: 1455004
ugccauagagaccaauacg

SEQ ID NO: 1455006 - RNA, 19 nt, Artificial Sequence
  Description of Artificial Sequence: Synthetic oligonucleotide
  Sense strand starting at position 2697 of SEQ ID NO: 1243967
cucugagguccucaguaaa

SEQ ID NO: 1455007 - RNA, 19 nt, Artificial Sequence
  Description of Artificial Sequence: Synthetic oligonucleotide
  Antisense strand to SEQ ID NO: 1455006
uuuacugaggaccucagag

SEQ ID NO: 1455008 - RNA, 19 nt, Artificial Sequence
  Description of Artificial Sequence: Synthetic oligonucleotide
  Sense strand starting at position 2712 of SEQ ID NO: 1243967
uaaagaaacuuagauggua

SEQ ID NO: 1455009 - RNA, 19 nt, Artificial Sequence
  Description of Artificial Sequence: Synthetic oligonucleotide
  Antisense strand to SEQ ID NO: 1455008
uaccaucuaaguuucuuua

SEQ ID NO: 1455010 - RNA, 19 nt, Artificial Sequence
  Description of Artificial Sequence: Synthetic oligonucleotide
  Sense strand starting at position 2765 of SEQ ID NO: 1243967
cccaaaguauugucuacga

SEQ ID NO: 1455011 - RNA, 19 nt, Artificial Sequence
  Description of Artificial Sequence: Synthetic oligonucleotide
  Antisense strand to SEQ ID NO: 1455010
ucguagacaauacuuuggg

SEQ ID NO: 1455012 - RNA, 19 nt, Artificial Sequence
  Description of Artificial Sequence: Synthetic oligonucleotide
  Sense strand starting at position 2769 of SEQ ID NO: 1243967
aaguauugucuacgagguc

SEQ ID NO: 1455013 - RNA, 19 nt, Artificial Sequence
  Description of Artificial Sequence: Synthetic oligonucleotide
  Antisense strand to SEQ ID NO: 1455012
gaccucguagacaauacuu

SEQ ID NO: 1455014 - RNA, 19 nt, Artificial Sequence
  Description of Artificial Sequence: Synthetic oligonucleotide
  Sense strand starting at position 3462 of SEQ ID NO: 1243967
uuacauugacauugucuua

SEQ ID NO: 1455015 - RNA, 19 nt, Artificial Sequence
  Description of Artificial Sequence: Synthetic oligonucleotide
  Antisense strand to SEQ ID NO: 1455014
uaagacaaugucaauguaa

SEQ ID NO: 1455016 - RNA, 19 nt, Artificial Sequence
  Description of Artificial Sequence: Synthetic oligonucleotide
  Sense strand starting at position 3473 of SEQ ID NO: 1243967
uugucuuaaucauaggaga

SEQ ID NO: 1455017 - RNA, 19 nt, Artificial Sequence
  Description of Artificial Sequence: Synthetic oligonucleotide
  Antisense strand to SEQ ID NO: 1455016
ucuccuaugauuaagacaa

SEQ ID NO: 1455018 - RNA, 19 nt, Artificial Sequence
  Description of Artificial Sequence: Synthetic oligonucleotide
  Sense strand starting at position 3507 of SEQ ID NO: 1243967
cgagcuaucuucccaacuu

SEQ ID NO: 1455019 - RNA, 19 nt, Artificial Sequence
  Description of Artificial Sequence: Synthetic oligonucleotide
  Antisense strand to SEQ ID NO: 1455018
aaguugggaagauagcucg

SEQ ID NO: 1455020 - RNA, 19 nt, Artificial Sequence
  Description of Artificial Sequence: Synthetic oligonucleotide
  Sense strand starting at position 3568 of SEQ ID NO: 1243967
uccugaaacuucguagucu

SEQ ID NO: 1455021 - RNA, 19 nt, Artificial Sequence
  Description of Artificial Sequence: Synthetic oligonucleotide
  Antisense strand to SEQ ID NO: 1455020
agacuacgaaguuucagga

SEQ ID NO: 1455022 - RNA, 19 nt, Artificial Sequence
  Description of Artificial Sequence: Synthetic oligonucleotide
  Sense strand starting at position 3572 of SEQ ID NO: 1243967
gaaacuucguagucuucuu

SEQ ID NO: 1455023 - RNA, 19 nt, Artificial Sequence
  Description of Artificial Sequence: Synthetic oligonucleotide
  Antisense strand to SEQ ID NO: 1455022
aagaagacuacgaaguuuc

SEQ ID NO: 1455024 - RNA, 19 nt, Artificial Sequence
  Description of Artificial Sequence: Synthetic oligonucleotide
  Sense strand starting at position 3577 of SEQ ID NO: 1243967
uucguagucuucuuccaau

SEQ ID NO: 1455025 - RNA, 19 nt, Artificial Sequence
  Description of Artificial Sequence: Synthetic oligonucleotide
  Antisense strand to SEQ ID NO: 1455024
auuggaagaagacuacgaa

SEQ ID NO: 1455026 - RNA, 19 nt, Artificial Sequence
  Description of Artificial Sequence: Synthetic oligonucleotide
  Sense strand starting at position 3620 of SEQ ID NO: 1243967
auggcugccuuguuggaua

SEQ ID NO: 1455027 - RNA, 19 nt, Artificial Sequence
  Description of Artificial Sequence: Synthetic oligonucleotide
  Antisense strand to SEQ ID NO: 1455026
uauccaacaaggcagccau

SEQ ID NO: 1455028 - RNA, 19 nt, Artificial Sequence
  Description of Artificial Sequence: Synthetic oligonucleotide
  Sense strand starting at position 3974 of SEQ ID NO: 1243967
gaccaaagaucuugggauc

SEQ ID NO: 1455029 - RNA, 19 nt, Artificial Sequence
  Description of Artificial Sequence: Synthetic oligonucleotide
  Antisense strand to SEQ ID NO: 1455028
gaucccaagaucuuugguc

SEQ ID NO: 1455030 - RNA, 19 nt, Artificial Sequence
  Description of Artificial Sequence: Synthetic oligonucleotide
  Sense strand starting at position 68 of SEQ ID NO: 1243968
uagucucagcccugagaag

SEQ ID NO: 1455031 - RNA, 19 nt, Artificial Sequence
  Description of Artificial Sequence: Synthetic oligonucleotide
  Antisense strand to SEQ ID NO: 1455030
cuucucagggcugagacua

SEQ ID NO: 1455032 - RNA, 19 nt, Artificial Sequence
  Description of Artificial Sequence: Synthetic oligonucleotide
  Sense strand starting at position 160 of SEQ ID NO: 1243968
ugaccuuccgguugauaga

SEQ ID NO: 1455033 - RNA, 19 nt, Artificial Sequence
  Description of Artificial Sequence: Synthetic oligonucleotide
  Antisense strand to SEQ ID NO: 1455032
ucuaucaaccggaagguca

SEQ ID NO: 1455034 - RNA, 19 nt, Artificial Sequence
  Description of Artificial Sequence: Synthetic oligonucleotide
  Sense strand starting at position 236 of SEQ ID NO: 1243968
ggcgucugcgguaaacaua

SEQ ID NO: 1455035 - RNA, 19 nt, Artificial Sequence
  Description of Artificial Sequence: Synthetic oligonucleotide
  Antisense strand to SEQ ID NO: 1455034
uauguuuaccgcagacgcc

SEQ ID NO: 1455036 - RNA, 19 nt, Artificial Sequence
  Description of Artificial Sequence: Synthetic oligonucleotide
  Sense strand starting at position 239 of SEQ ID NO: 1243968
gucugcgguaaacauauua

SEQ ID NO: 1455037 - RNA, 19 nt, Artificial Sequence
  Description of Artificial Sequence: Synthetic oligonucleotide
  Antisense strand to SEQ ID NO: 1455036
uaauauguuuaccgcagac

SEQ ID NO: 1455038 - RNA, 19 nt, Artificial Sequence
  Description of Artificial Sequence: Synthetic oligonucleotide
  Sense strand starting at position 260 of SEQ ID NO: 1243968
uguaaucaccacugcuaga

SEQ ID NO: 1455039 - RNA, 19 nt, Artificial Sequence
  Description of Artificial Sequence: Synthetic oligonucleotide
  Antisense strand to SEQ ID NO: 1455038
ucuagcaguggugauuaca

SEQ ID NO: 1455040 - RNA, 19 nt, Artificial Sequence
  Description of Artificial Sequence: Synthetic oligonucleotide
  Sense strand starting at position 271 of SEQ ID NO: 1243968
cugcuagacucuccaguuu

SEQ ID NO: 1455041 - RNA, 19 nt, Artificial Sequence
  Description of Artificial Sequence: Synthetic oligonucleotide
  Antisense strand to SEQ ID NO: 1455040
aaacuggagagucuagcag

SEQ ID NO: 1455042 - RNA, 19 nt, Artificial Sequence
  Description of Artificial Sequence: Synthetic oligonucleotide
  Sense strand starting at position 409 of SEQ ID NO: 1243968
gcugacugggcugguauaa

SEQ ID NO: 1455043 - RNA, 19 nt, Artificial Sequence
  Description of Artificial Sequence: Synthetic oligonucleotide
  Antisense strand to SEQ ID NO: 1455042
uuauaccagcccagucagc

SEQ ID NO: 1455044 - RNA, 19 nt, Artificial Sequence
  Description of Artificial Sequence: Synthetic oligonucleotide
  Sense strand starting at position 730 of SEQ ID NO: 1243968
aaugguaaagccgguuaaa

SEQ ID NO: 1455045 - RNA, 19 nt, Artificial Sequence
  Description of Artificial Sequence: Synthetic oligonucleotide
  Antisense strand to SEQ ID NO: 1455044
uuuaaccggcuuuaccauu

SEQ ID NO: 1455046 - RNA, 19 nt, Artificial Sequence
  Description of Artificial Sequence: Synthetic oligonucleotide
  Sense strand starting at position 838 of SEQ ID NO: 1243968
gaauauguuguccaggcga

SEQ ID NO: 1455047 - RNA, 19 nt, Artificial Sequence
  Description of Artificial Sequence: Synthetic oligonucleotide
  Antisense strand to SEQ ID NO: 1455046
ucgccuggacaacauauuc

SEQ ID NO: 1455048 - RNA, 19 nt, Artificial Sequence
  Description of Artificial Sequence: Synthetic oligonucleotide
  Sense strand starting at position 853 of SEQ ID NO: 1243968
gcgagcaaccuuuaaccua

SEQ ID NO: 1455049 - RNA, 19 nt, Artificial Sequence
  Description of Artificial Sequence: Synthetic oligonucleotide
  Antisense strand to SEQ ID NO: 1455048
uagguuaaagguugcucgc

SEQ ID NO: 1455050 - RNA, 19 nt, Artificial Sequence
  Description of Artificial Sequence: Synthetic oligonucleotide
  Sense strand starting at position 990 of SEQ ID NO: 1243968
gcaagagacugacucacuu

SEQ ID NO: 1455051 - RNA, 19 nt, Artificial Sequence
  Description of Artificial Sequence: Synthetic oligonucleotide
  Antisense strand to SEQ ID NO: 1455050
aagugagucagucucuugc

SEQ ID NO: 1455052 - RNA, 19 nt, Artificial Sequence
  Description of Artificial Sequence: Synthetic oligonucleotide
  Sense strand starting at position 1031 of SEQ ID NO: 1243968
acgccuucuccacaguuga

SEQ ID NO: 1455053 - RNA, 19 nt, Artificial Sequence
  Description of Artificial Sequence: Synthetic oligonucleotide
  Antisense strand to SEQ ID NO: 1455052
ucaacuguggagaaggcgu

SEQ ID NO: 1455054 - RNA, 19 nt, Artificial Sequence
  Description of Artificial Sequence: Synthetic oligonucleotide
  Sense strand starting at position 1475 of SEQ ID NO: 1243968
ugcaaagaaucucggauuu

SEQ ID NO: 1455055 - RNA, 19 nt, Artificial Sequence
  Description of Artificial Sequence: Synthetic oligonucleotide
  Antisense strand to SEQ ID NO: 1455054
aaauccgagauucuuugca

SEQ ID NO: 1455056 - RNA, 19 nt, Artificial Sequence
  Description of Artificial Sequence: Synthetic oligonucleotide
  Sense strand starting at position 1628 of SEQ ID NO: 1243968
cguugacugaccgguugaa

SEQ ID NO: 1455057 - RNA, 19 nt, Artificial Sequence
  Description of Artificial Sequence: Synthetic oligonucleotide
  Antisense strand to SEQ ID NO: 1455056
uucaaccggucagucaacg

SEQ ID NO: 1455058 - RNA, 19 nt, Artificial Sequence
  Description of Artificial Sequence: Synthetic oligonucleotide
  Sense strand starting at position 1637 of SEQ ID NO: 1243968
accgguugaacucggagaa

SEQ ID NO: 1455059 - RNA, 19 nt, Artificial Sequence
  Description of Artificial Sequence: Synthetic oligonucleotide
  Antisense strand to SEQ ID NO: 1455058
uucuccgaguucaaccggu

SEQ ID NO: 1455060 - RNA, 19 nt, Artificial Sequence
  Description of Artificial Sequence: Synthetic oligonucleotide
  Sense strand starting at position 2012 of SEQ ID NO: 1243968
cgaggcugcucauccaaua

SEQ ID NO: 1455061 - RNA, 19 nt, Artificial Sequence
  Description of Artificial Sequence: Synthetic oligonucleotide
  Antisense strand to SEQ ID NO: 1455060
uauuggaugagcagccucg

SEQ ID NO: 1455062 - RNA, 19 nt, Artificial Sequence
  Description of Artificial Sequence: Synthetic oligonucleotide
  Sense strand starting at position 2051 of SEQ ID NO: 1243968
ggacuugucaauugacagu

SEQ ID NO: 1455063 - RNA, 19 nt, Artificial Sequence
  Description of Artificial Sequence: Synthetic oligonucleotide
  Antisense strand to SEQ ID NO: 1455062
acugucaauugacaagucc

SEQ ID NO: 1455064 - RNA, 19 nt, Artificial Sequence
  Description of Artificial Sequence: Synthetic oligonucleotide
  Sense strand starting at position 2225 of SEQ ID NO: 1243968
gaccuaggaguuuggaguu

SEQ ID NO: 1455065 - RNA, 19 nt, Artificial Sequence
  Description of Artificial Sequence: Synthetic oligonucleotide
  Antisense strand to SEQ ID NO: 1455064
aacuccaaacuccuagguc

SEQ ID NO: 1455066 - RNA, 19 nt, Artificial Sequence
  Description of Artificial Sequence: Synthetic oligonucleotide
  Sense strand starting at position 2300 of SEQ ID NO: 1243968
ucccucagagcuugaguua

SEQ ID NO: 1455067 - RNA, 19 nt, Artificial Sequence
  Description of Artificial Sequence: Synthetic oligonucleotide
  Antisense strand to SEQ ID NO: 1455066
uaacucaagcucugaggga

SEQ ID NO: 1455068 - RNA, 19 nt, Artificial Sequence
  Description of Artificial Sequence: Synthetic oligonucleotide
  Sense strand starting at position 2309 of SEQ ID NO: 1243968
gcuugaguuagaggugguu

SEQ ID NO: 1455069 - RNA, 19 nt, Artificial Sequence
  Description of Artificial Sequence: Synthetic oligonucleotide
  Antisense strand to SEQ ID NO: 1455068
aaccaccucuaacucaagc

SEQ ID NO: 1455070 - RNA, 19 nt, Artificial Sequence
  Description of Artificial Sequence: Synthetic oligonucleotide
  Sense strand starting at position 2311 of SEQ ID NO: 1243968
uugaguuagaggugguugu

SEQ ID NO: 1455071 - RNA, 19 nt, Artificial Sequence
  Description of Artificial Sequence: Synthetic oligonucleotide
  Antisense strand to SEQ ID NO: 1455070
acaaccaccucuaacucaa

SEQ ID NO: 1455072 - RNA, 19 nt, Artificial Sequence
  Description of Artificial Sequence: Synthetic oligonucleotide
  Sense strand starting at position 2312 of SEQ ID NO: 1243968
ugaguuagaggugguugua

SEQ ID NO: 1455073 - RNA, 19 nt, Artificial Sequence
  Description of Artificial Sequence: Synthetic oligonucleotide
  Antisense strand to SEQ ID NO: 1455072
uacaaccaccucuaacuca

SEQ ID NO: 1455074 - RNA, 19 nt, Artificial Sequence
  Description of Artificial Sequence: Synthetic oligonucleotide
  Sense strand starting at position 2340 of SEQ ID NO: 1243968
aggauuaaaugugaggaaa

SEQ ID NO: 1455075 - RNA, 19 nt, Artificial Sequence
  Description of Artificial Sequence: Synthetic oligonucleotide
  Antisense strand to SEQ ID NO: 1455074
uuuccucacauuuaauccu

SEQ ID NO: 1455076 - RNA, 19 nt, Artificial Sequence
  Description of Artificial Sequence: Synthetic oligonucleotide
  Sense strand starting at position 2354 of SEQ ID NO: 1243968
ggaaaucaauuguauugag

SEQ ID NO: 1455077 - RNA, 19 nt, Artificial Sequence
  Description of Artificial Sequence: Synthetic oligonucleotide
  Antisense strand to SEQ ID NO: 1455076
cucaauacaauugauuucc

SEQ ID NO: 1455078 - RNA, 19 nt, Artificial Sequence
  Description of Artificial Sequence: Synthetic oligonucleotide
  Sense strand starting at position 2364 of SEQ ID NO: 1243968
uguauugagcauuagcaua

SEQ ID NO: 1455079 - RNA, 19 nt, Artificial Sequence
  Description of Artificial Sequence: Synthetic oligonucleotide
  Antisense strand to SEQ ID NO: 1455078
uaugcuaaugcucaauaca

SEQ ID NO: 1455080 - RNA, 19 nt, Artificial Sequence
  Description of Artificial Sequence: Synthetic oligonucleotide
  Sense strand starting at position 2376 of SEQ ID NO: 1243968
uagcauaagcgcuuugcua

SEQ ID NO: 1455081 - RNA, 19 nt, Artificial Sequence
  Description of Artificial Sequence: Synthetic oligonucleotide
  Antisense strand to SEQ ID NO: 1455080
uagcaaagcgcuuaugcua

SEQ ID NO: 1455082 - RNA, 19 nt, Artificial Sequence
  Description of Artificial Sequence: Synthetic oligonucleotide
  Sense strand starting at position 2377 of SEQ ID NO: 1243968
agcauaagcgcuuugcuaa

SEQ ID NO: 1455083 - RNA, 19 nt, Artificial Sequence
  Description of Artificial Sequence: Synthetic oligonucleotide
  Antisense strand to SEQ ID NO: 1455082
uuagcaaagcgcuuaugcu

SEQ ID NO: 1455084 - RNA, 19 nt, Artificial Sequence
  Description of Artificial Sequence: Synthetic oligonucleotide
  Sense strand starting at position 2401 of SEQ ID NO: 1243968
uuuccauuguaauucguau

SEQ ID NO: 1455085 - RNA, 19 nt, Artificial Sequence
  Description of Artificial Sequence: Synthetic oligonucleotide
  Antisense strand to SEQ ID NO: 1455084
auacgaauuacaauggaaa

SEQ ID NO: 1455086 - RNA, 19 nt, Artificial Sequence
  Description of Artificial Sequence: Synthetic oligonucleotide
  Sense strand starting at position 2407 of SEQ ID NO: 1243968
uuguaauucguaugcauac

SEQ ID NO: 1455087 - RNA, 19 nt, Artificial Sequence
  Description of Artificial Sequence: Synthetic oligonucleotide
  Antisense strand to SEQ ID NO: 1455086
guaugcauacgaauuacaa

SEQ ID NO: 1455088 - RNA, 19 nt, Artificial Sequence
  Description of Artificial Sequence: Synthetic oligonucleotide
  Sense strand starting at position 2408 of SEQ ID NO: 1243968
uguaauucguaugcauaca

SEQ ID NO: 1455089 - RNA, 19 nt, Artificial Sequence
  Description of Artificial Sequence: Synthetic oligonucleotide
  Antisense strand to SEQ ID NO: 1455088
uguaugcauacgaauuaca

SEQ ID NO: 1455090 - RNA, 19 nt, Artificial Sequence
  Description of Artificial Sequence: Synthetic oligonucleotide
  Sense strand starting at position 2654 of SEQ ID NO: 1243968
gcucuaaagcaagagucuu

SEQ ID NO: 1455091 - RNA, 19 nt, Artificial Sequence
  Description of Artificial Sequence: Synthetic oligonucleotide
  Antisense strand to SEQ ID NO: 1455090
aagacucuugcuuuagagc

SEQ ID NO: 1455092 - RNA, 19 nt, Artificial Sequence
  Description of Artificial Sequence: Synthetic oligonucleotide
  Sense strand starting at position 2662 of SEQ ID NO: 1243968
gcaagagucuuggcucauu

SEQ ID NO: 1455093 - RNA, 19 nt, Artificial Sequence
  Description of Artificial Sequence: Synthetic oligonucleotide
  Antisense strand to SEQ ID NO: 1455092
aaugagccaagacucuugc

SEQ ID NO: 1455094 - RNA, 19 nt, Artificial Sequence
  Description of Artificial Sequence: Synthetic oligonucleotide
  Sense strand starting at position 2667 of SEQ ID NO: 1243968
agucuuggcucauuuguua

SEQ ID NO: 1455095 - RNA, 19 nt, Artificial Sequence
  Description of Artificial Sequence: Synthetic oligonucleotide
  Antisense strand to SEQ ID NO: 1455094
uaacaaaugagccaagacu

SEQ ID NO: 1455096 - RNA, 19 nt, Artificial Sequence
  Description of Artificial Sequence: Synthetic oligonucleotide
  Sense strand starting at position 2676 of SEQ ID NO: 1243968
ucauuuguuagcugcguga

SEQ ID NO: 1455097 - RNA, 19 nt, Artificial Sequence
  Description of Artificial Sequence: Synthetic oligonucleotide
  Antisense strand to SEQ ID NO: 1455096
ucacgcagcuaacaaauga

SEQ ID NO: 1455098 - RNA, 19 nt, Artificial Sequence
  Description of Artificial Sequence: Synthetic oligonucleotide
  Sense strand starting at position 2678 of SEQ ID NO: 1243968
auuuguuagcugcgugauc

SEQ ID NO: 1455099 - RNA, 19 nt, Artificial Sequence
  Description of Artificial Sequence: Synthetic oligonucleotide
  Antisense strand to SEQ ID NO: 1455098
gaucacgcagcuaacaaau

SEQ ID NO: 1455100 - RNA, 19 nt, Artificial Sequence
  Description of Artificial Sequence: Synthetic oligonucleotide
  Sense strand starting at position 2689 of SEQ ID NO: 1243968
gcgugaucuugaccucuca

SEQ ID NO: 1455101 - RNA, 19 nt, Artificial Sequence
  Description of Artificial Sequence: Synthetic oligonucleotide
  Antisense strand to SEQ ID NO: 1455100
ugagaggucaagaucacgc

SEQ ID NO: 1455102 - RNA, 19 nt, Artificial Sequence
  Description of Artificial Sequence: Synthetic oligonucleotide
  Sense strand starting at position 2907 of SEQ ID NO: 1243968
agagguagaugucccaaua

SEQ ID NO: 1455103 - RNA, 19 nt, Artificial Sequence
  Description of Artificial Sequence: Synthetic oligonucleotide
  Antisense strand to SEQ ID NO: 1455102
uauugggacaucuaccucu

SEQ ID NO: 1455104 - RNA, 19 nt, Artificial Sequence
  Description of Artificial Sequence: Synthetic oligonucleotide
  Sense strand starting at position 2954 of SEQ ID NO: 1243968
ccucuuauguagcuaauga

SEQ ID NO: 1455105 - RNA, 19 nt, Artificial Sequence
  Description of Artificial Sequence: Synthetic oligonucleotide
  Antisense strand to SEQ ID NO: 1455104
ucauuagcuacauaagagg

SEQ ID NO: 1455106 - RNA, 19 nt, Artificial Sequence
  Description of Artificial Sequence: Synthetic oligonucleotide
  Sense strand starting at position 2997 of SEQ ID NO: 1243968
aguuaaagccgcuagaaau

SEQ ID NO: 1455107 - RNA, 19 nt, Artificial Sequence
  Description of Artificial Sequence: Synthetic oligonucleotide
  Antisense strand to SEQ ID NO: 1455106
auuucuagcggcuuuaacu

SEQ ID NO: 1455108 - RNA, 19 nt, Artificial Sequence
  Description of Artificial Sequence: Synthetic oligonucleotide
  Sense strand starting at position 3550 of SEQ ID NO: 1243968
cguggcacauaucuguaau

SEQ ID NO: 1455109 - RNA, 19 nt, Artificial Sequence
  Description of Artificial Sequence: Synthetic oligonucleotide
  Antisense strand to SEQ ID NO: 1455108
auuacagauaugugccacg

SEQ ID NO: 1455110 - RNA, 19 nt, Artificial Sequence
  Description of Artificial Sequence: Synthetic oligonucleotide
  Sense strand starting at position 35 of SEQ ID NO: 1243969
uuugguccugccuguagaa

SEQ ID NO: 1455111 - RNA, 19 nt, Artificial Sequence
  Description of Artificial Sequence: Synthetic oligonucleotide
  Antisense strand to SEQ ID NO: 1455110
uucuacaggcaggaccaaa

SEQ ID NO: 1455112 - RNA, 19 nt, Artificial Sequence
  Description of Artificial Sequence: Synthetic oligonucleotide
  Sense strand starting at position 37 of SEQ ID NO: 1243969
ugguccugccuguagaaca

SEQ ID NO: 1455113 - RNA, 19 nt, Artificial Sequence
  Description of Artificial Sequence: Synthetic oligonucleotide
  Antisense strand to SEQ ID NO: 1455112
uguucuacaggcaggacca

SEQ ID NO: 1455114 - RNA, 19 nt, Artificial Sequence
  Description of Artificial Sequence: Synthetic oligonucleotide
  Sense strand starting at position 588 of SEQ ID NO: 1243969
cacugaguugccgggacua

SEQ ID NO: 1455115 - RNA, 19 nt, Artificial Sequence
  Description of Artificial Sequence: Synthetic oligonucleotide
  Antisense strand to SEQ ID NO: 1455114
uagucccggcaacucagug

SEQ ID NO: 1455116 - RNA, 19 nt, Artificial Sequence
  Description of Artificial Sequence: Synthetic oligonucleotide
  Sense strand starting at position 631 of SEQ ID NO: 1243969
gguucuuaaugucuccuga

SEQ ID NO: 1455117 - RNA, 19 nt, Artificial Sequence
  Description of Artificial Sequence: Synthetic oligonucleotide
  Antisense strand to SEQ ID NO: 1455116
ucaggagacauuaagaacc

SEQ ID NO: 1455118 - RNA, 19 nt, Artificial Sequence
  Description of Artificial Sequence: Synthetic oligonucleotide
  Sense strand starting at position 737 of SEQ ID NO: 1243969
acuaaaguccuuuacaugu

SEQ ID NO: 1455119 - RNA, 19 nt, Artificial Sequence
  Description of Artificial Sequence: Synthetic oligonucleotide
  Antisense strand to SEQ ID NO: 1455118
acauguaaaggacuuuagu

SEQ ID NO: 1455120 - RNA, 19 nt, Artificial Sequence
  Description of Artificial Sequence: Synthetic oligonucleotide
  Sense strand starting at position 744 of SEQ ID NO: 1243969
uccuuuacauguguucuaa

SEQ ID NO: 1455121 - RNA, 19 nt, Artificial Sequence
  Description of Artificial Sequence: Synthetic oligonucleotide
  Antisense strand to SEQ ID NO: 1455120
uuagaacacauguaaagga

SEQ ID NO: 1455122 - RNA, 19 nt, Artificial Sequence
  Description of Artificial Sequence: Synthetic oligonucleotide
  Sense strand starting at position 746 of SEQ ID NO: 1243969
cuuuacauguguucuaaac

SEQ ID NO: 1455123 - RNA, 19 nt, Artificial Sequence
  Description of Artificial Sequence: Synthetic oligonucleotide
  Antisense strand to SEQ ID NO: 1455122
guuuagaacacauguaaag

SEQ ID NO: 1455124 - RNA, 19 nt, Artificial Sequence
  Description of Artificial Sequence: Synthetic oligonucleotide
  Sense strand starting at position 908 of SEQ ID NO: 1243969
guacauauguaccuuaaag

SEQ ID NO: 1455125 - RNA, 19 nt, Artificial Sequence
  Description of Artificial Sequence: Synthetic oligonucleotide
  Antisense strand to SEQ ID NO: 1455124
cuuuaagguacauauguac

SEQ ID NO: 1455126 - RNA, 19 nt, Artificial Sequence
  Description of Artificial Sequence: Synthetic oligonucleotide
  Sense strand starting at position 924 of SEQ ID NO: 1243969
aagagugaagccggauuaa

SEQ ID NO: 1455127 - RNA, 19 nt, Artificial Sequence
  Description of Artificial Sequence: Synthetic oligonucleotide
  Antisense strand to SEQ ID NO: 1455126
uuaauccggcuucacucuu

SEQ ID NO: 1455128 - RNA, 19 nt, Artificial Sequence
  Description of Artificial Sequence: Synthetic oligonucleotide
  Sense strand starting at position 933 of SEQ ID NO: 1243969
gccggauuaacggauuacu

SEQ ID NO: 1455129 - RNA, 19 nt, Artificial Sequence
  Description of Artificial Sequence: Synthetic oligonucleotide
  Antisense strand to SEQ ID NO: 1455128
aguaauccguuaauccggc

SEQ ID NO: 1455130 - RNA, 19 nt, Artificial Sequence
  Description of Artificial Sequence: Synthetic oligonucleotide
  Sense strand starting at position 936 of SEQ ID NO: 1243969
ggauuaacggauuacugca

SEQ ID NO: 1455131 - RNA, 19 nt, Artificial Sequence
  Description of Artificial Sequence: Synthetic oligonucleotide
  Antisense strand to SEQ ID NO: 1455130
ugcaguaauccguuaaucc

SEQ ID NO: 1455132 - RNA, 19 nt, Artificial Sequence
  Description of Artificial Sequence: Synthetic oligonucleotide
  Sense strand starting at position 997 of SEQ ID NO: 1243969
ucucgacuucuaugaucuu

SEQ ID NO: 1455133 - RNA, 19 nt, Artificial Sequence
  Description of Artificial Sequence: Synthetic oligonucleotide
  Antisense strand to SEQ ID NO: 1455132
aagaucauagaagucgaga

SEQ ID NO: 1455134 - RNA, 19 nt, Artificial Sequence
  Description of Artificial Sequence: Synthetic oligonucleotide
  Sense strand starting at position 1006 of SEQ ID NO: 1243969
cuaugaucuuugcuuugga

SEQ ID NO: 1455135 - RNA, 19 nt, Artificial Sequence
  Description of Artificial Sequence: Synthetic oligonucleotide
  Antisense strand to SEQ ID NO: 1455134
uccaaagcaaagaucauag

SEQ ID NO: 1455136 - RNA, 19 nt, Artificial Sequence
  Description of Artificial Sequence: Synthetic oligonucleotide
  Sense strand starting at position 1124 of SEQ ID NO: 1243969
gguucugcgcuuguuguaa

SEQ ID NO: 1455137 - RNA, 19 nt, Artificial Sequence
  Description of Artificial Sequence: Synthetic oligonucleotide
  Antisense strand to SEQ ID NO: 1455136
uuacaacaagcgcagaacc

SEQ ID NO: 1455138 - RNA, 19 nt, Artificial Sequence
  Description of Artificial Sequence: Synthetic oligonucleotide
  Sense strand starting at position 1153 of SEQ ID NO: 1243969
uuagcauuauaggucucaa

SEQ ID NO: 1455139 - RNA, 19 nt, Artificial Sequence
  Description of Artificial Sequence: Synthetic oligonucleotide
  Antisense strand to SEQ ID NO: 1455138
uugagaccuauaaugcuaa

SEQ ID NO: 1455140 - RNA, 19 nt, Artificial Sequence
  Description of Artificial Sequence: Synthetic oligonucleotide
  Sense strand starting at position 1193 of SEQ ID NO: 1243969
cugguacuuaccgauuguu

SEQ ID NO: 1455141 - RNA, 19 nt, Artificial Sequence
  Description of Artificial Sequence: Synthetic oligonucleotide
  Antisense strand to SEQ ID NO: 1455140
aacaaucgguaaguaccag

SEQ ID NO: 1455142 - RNA, 19 nt, Artificial Sequence
  Description of Artificial Sequence: Synthetic oligonucleotide
  Sense strand starting at position 1196 of SEQ ID NO: 1243969
guacuuaccgauuguugau

SEQ ID NO: 1455143 - RNA, 19 nt, Artificial Sequence
  Description of Artificial Sequence: Synthetic oligonucleotide
  Antisense strand to SEQ ID NO: 1455142
aucaacaaucgguaaguac

SEQ ID NO: 1455144 - RNA, 19 nt, Artificial Sequence
  Description of Artificial Sequence: Synthetic oligonucleotide
  Sense strand starting at position 1359 of SEQ ID NO: 1243969
gugggauacucaccacagu

SEQ ID NO: 1455145 - RNA, 19 nt, Artificial Sequence
  Description of Artificial Sequence: Synthetic oligonucleotide
  Antisense strand to SEQ ID NO: 1455144
acuguggugaguaucccac

SEQ ID NO: 1455146 - RNA, 19 nt, Artificial Sequence
  Description of Artificial Sequence: Synthetic oligonucleotide
  Sense strand starting at position 1458 of SEQ ID NO: 1243969
guaugagagcgcugggauu

SEQ ID NO: 1455147 - RNA, 19 nt, Artificial Sequence
  Description of Artificial Sequence: Synthetic oligonucleotide
  Antisense strand to SEQ ID NO: 1455146
aaucccagcgcucucauac

SEQ ID NO: 1455148 - RNA, 19 nt, Artificial Sequence
  Description of Artificial Sequence: Synthetic oligonucleotide
  Sense strand starting at position 1471 of SEQ ID NO: 1243969
gggauuaccgccuucgcga

SEQ ID NO: 1455149 - RNA, 19 nt, Artificial Sequence
  Description of Artificial Sequence: Synthetic oligonucleotide
  Antisense strand to SEQ ID NO: 1455148
ucgcgaaggcgguaauccc

SEQ ID NO: 1455150 - RNA, 19 nt, Artificial Sequence
  Description of Artificial Sequence: Synthetic oligonucleotide
  Sense strand starting at position 1472 of SEQ ID NO: 1243969
ggauuaccgccuucgcgaa

SEQ ID NO: 1455151 - RNA, 19 nt, Artificial Sequence
  Description of Artificial Sequence: Synthetic oligonucleotide
  Antisense strand to SEQ ID NO: 1455150
uucgcgaaggcgguaaucc

SEQ ID NO: 1455152 - RNA, 19 nt, Artificial Sequence
  Description of Artificial Sequence: Synthetic oligonucleotide
  Sense strand starting at position 2141 of SEQ ID NO: 1243969
gaacuuagucccggugaag

SEQ ID NO: 1455153 - RNA, 19 nt, Artificial Sequence
  Description of Artificial Sequence: Synthetic oligonucleotide
  Antisense strand to SEQ ID NO: 1455152
cuucaccgggacuaaguuc

SEQ ID NO: 1455154 - RNA, 19 nt, Artificial Sequence
  Description of Artificial Sequence: Synthetic oligonucleotide
  Sense strand starting at position 2224 of SEQ ID NO: 1243969
gaguccuuuggacgguaaa

SEQ ID NO: 1455155 - RNA, 19 nt, Artificial Sequence
  Description of Artificial Sequence: Synthetic oligonucleotide
  Antisense strand to SEQ ID NO: 1455154
uuuaccguccaaaggacuc

SEQ ID NO: 1455156 - RNA, 19 nt, Artificial Sequence
  Description of Artificial Sequence: Synthetic oligonucleotide
  Sense strand starting at position 3176 of SEQ ID NO: 1243969
gugggagacccuuguaaua

SEQ ID NO: 1455157 - RNA, 19 nt, Artificial Sequence
  Description of Artificial Sequence: Synthetic oligonucleotide
  Antisense strand to SEQ ID NO: 1455156
uauuacaagggucucccac

SEQ ID NO: 1455158 - RNA, 19 nt, Artificial Sequence
  Description of Artificial Sequence: Synthetic oligonucleotide
  Sense strand starting at position 3178 of SEQ ID NO: 1243969
gggagacccuuguaauaga

SEQ ID NO: 1455159 - RNA, 19 nt, Artificial Sequence
  Description of Artificial Sequence: Synthetic oligonucleotide
  Antisense strand to SEQ ID NO: 1455158
ucuauuacaagggucuccc

SEQ ID NO: 1455160 - RNA, 19 nt, Artificial Sequence
  Description of Artificial Sequence: Synthetic oligonucleotide
  Sense strand starting at position 3189 of SEQ ID NO: 1243969
guaauagaaccuugcccuu

SEQ ID NO: 1455161 - RNA, 19 nt, Artificial Sequence
  Description of Artificial Sequence: Synthetic oligonucleotide
  Antisense strand to SEQ ID NO: 1455160
aagggcaagguucuauuac

SEQ ID NO: 1455162 - RNA, 19 nt, Artificial Sequence
  Description of Artificial Sequence: Synthetic oligonucleotide
  Sense strand starting at position 3281 of SEQ ID NO: 1243969
uuaagaaagcuggaguugu

SEQ ID NO: 1455163 - RNA, 19 nt, Artificial Sequence
  Description of Artificial Sequence: Synthetic oligonucleotide
  Antisense strand to SEQ ID NO: 1455162
acaacuccagcuuucuuaa

SEQ ID NO: 1455164 - RNA, 19 nt, Artificial Sequence
  Description of Artificial Sequence: Synthetic oligonucleotide
  Sense strand starting at position 3321 of SEQ ID NO: 1243969
gggaacaccuguuugauga

SEQ ID NO: 1455165 - RNA, 19 nt, Artificial Sequence
  Description of Artificial Sequence: Synthetic oligonucleotide
  Antisense strand to SEQ ID NO: 1455164
ucaucaaacagguguuccc

SEQ ID NO: 1455166 - RNA, 19 nt, Artificial Sequence
  Description of Artificial Sequence: Synthetic oligonucleotide
  Sense strand starting at position 3415 of SEQ ID NO: 1243969
aagagacagacuugugugu

SEQ ID NO: 1455167 - RNA, 19 nt, Artificial Sequence
  Description of Artificial Sequence: Synthetic oligonucleotide
  Antisense strand to SEQ ID NO: 1455166
acacacaagucugucucuu

SEQ ID NO: 1455168 - RNA, 19 nt, Artificial Sequence
  Description of Artificial Sequence: Synthetic oligonucleotide
  Sense strand starting at position 3419 of SEQ ID NO: 1243969
gacagacuugugugucaag

SEQ ID NO: 1455169 - RNA, 19 nt, Artificial Sequence
  Description of Artificial Sequence: Synthetic oligonucleotide
  Antisense strand to SEQ ID NO: 1455168
cuugacacacaagucuguc

SEQ ID NO: 1455170 - RNA, 19 nt, Artificial Sequence
  Description of Artificial Sequence: Synthetic oligonucleotide
  Sense strand starting at position 3517 of SEQ ID NO: 1243969
ugcgguucccauuaagaga

SEQ ID NO: 1455171 - RNA, 19 nt, Artificial Sequence
  Description of Artificial Sequence: Synthetic oligonucleotide
  Antisense strand to SEQ ID NO: 1455170
ucucuuaaugggaaccgca

SEQ ID NO: 1455172 - RNA, 19 nt, Artificial Sequence
  Description of Artificial Sequence: Synthetic oligonucleotide
  Sense strand starting at position 3575 of SEQ ID NO: 1243969
gaguguagguaucuggauu

SEQ ID NO: 1455173 - RNA, 19 nt, Artificial Sequence
  Description of Artificial Sequence: Synthetic oligonucleotide
  Antisense strand to SEQ ID NO: 1455172
aauccagauaccuacacuc

SEQ ID NO: 1455174 - RNA, 19 nt, Artificial Sequence
  Description of Artificial Sequence: Synthetic oligonucleotide
  Sense strand starting at position 3626 of SEQ ID NO: 1243969
ggccucuuuaauuguggga

SEQ ID NO: 1455175 - RNA, 19 nt, Artificial Sequence
  Description of Artificial Sequence: Synthetic oligonucleotide
  Antisense strand to SEQ ID NO: 1455174
ucccacaauuaaagaggcc

SEQ ID NO: 1455176 - RNA, 19 nt, Artificial Sequence
  Description of Artificial Sequence: Synthetic oligonucleotide
  Sense strand starting at position 3630 of SEQ ID NO: 1243969
ucuuuaauugugggaggga

SEQ ID NO: 1455177 - RNA, 19 nt, Artificial Sequence
  Description of Artificial Sequence: Synthetic oligonucleotide
  Antisense strand to SEQ ID NO: 1455176
ucccucccacaauuaaaga

SEQ ID NO: 1455178 - RNA, 19 nt, Artificial Sequence
  Description of Artificial Sequence: Synthetic oligonucleotide
  Sense strand starting at position 3633 of SEQ ID NO: 1243969
uuaauugugggagggaguu

SEQ ID NO: 1455179 - RNA, 19 nt, Artificial Sequence
  Description of Artificial Sequence: Synthetic oligonucleotide
  Antisense strand to SEQ ID NO: 1455178
aacucccucccacaauuaa

SEQ ID NO: 1455180 - RNA, 19 nt, Artificial Sequence
  Description of Artificial Sequence: Synthetic oligonucleotide
  Sense strand starting at position 3736 of SEQ ID NO: 1243969
gacguuugcuucuccagga

SEQ ID NO: 1455181 - RNA, 19 nt, Artificial Sequence
  Description of Artificial Sequence: Synthetic oligonucleotide
  Antisense strand to SEQ ID NO: 1455180
uccuggagaagcaaacguc

SEQ ID NO: 1455182 - RNA, 19 nt, Artificial Sequence
  Description of Artificial Sequence: Synthetic oligonucleotide
  Sense strand starting at position 3760 of SEQ ID NO: 1243969
uagcauucugagggaaacu

SEQ ID NO: 1455183 - RNA, 19 nt, Artificial Sequence
  Description of Artificial Sequence: Synthetic oligonucleotide
  Antisense strand to SEQ ID NO: 1455182
aguuucccucagaaugcua

SEQ ID NO: 1455184 - RNA, 19 nt, Artificial Sequence
  Description of Artificial Sequence: Synthetic oligonucleotide
  Sense strand starting at position 3862 of SEQ ID NO: 1243969
aaaugaaugugcucuugug

SEQ ID NO: 1455185 - RNA, 19 nt, Artificial Sequence
  Description of Artificial Sequence: Synthetic oligonucleotide
  Antisense strand to SEQ ID NO: 1455184
cacaagagcacauucauuu

SEQ ID NO: 1455186 - RNA, 19 nt, Artificial Sequence
  Description of Artificial Sequence: Synthetic oligonucleotide
  Sense strand starting at position 3897 of SEQ ID NO: 1243969
ggagaauccucggaaggag

SEQ ID NO: 1455187 - RNA, 19 nt, Artificial Sequence
  Description of Artificial Sequence: Synthetic oligonucleotide
  Antisense strand to SEQ ID NO: 1455186
cuccuuccgaggauucucc

SEQ ID NO: 1455188 - RNA, 19 nt, Artificial Sequence
  Description of Artificial Sequence: Synthetic oligonucleotide
  Sense strand starting at position 3954 of SEQ ID NO: 1243969
gucuguacuguggucugua

SEQ ID NO: 1455189 - RNA, 19 nt, Artificial Sequence
  Description of Artificial Sequence: Synthetic oligonucleotide
  Antisense strand to SEQ ID NO: 1455188
uacagaccacaguacagac

SEQ ID NO: 1455190 - RNA, 19 nt, Artificial Sequence
  Description of Artificial Sequence: Synthetic oligonucleotide
  Sense strand starting at position 440 of SEQ ID NO: 1243970
cacugaguugccgggacua

SEQ ID NO: 1455191 - RNA, 19 nt, Artificial Sequence
  Description of Artificial Sequence: Synthetic oligonucleotide
  Antisense strand to SEQ ID NO: 1455190
uagucccggcaacucagug

SEQ ID NO: 1455192 - RNA, 19 nt, Artificial Sequence
  Description of Artificial Sequence: Synthetic oligonucleotide
  Sense strand starting at position 483 of SEQ ID NO: 1243970
gguucuuaaugucuccuga

SEQ ID NO: 1455193 - RNA, 19 nt, Artificial Sequence
  Description of Artificial Sequence: Synthetic oligonucleotide
  Antisense strand to SEQ ID NO: 1455192
ucaggagacauuaagaacc

SEQ ID NO: 1455194 - RNA, 19 nt, Artificial Sequence
  Description of Artificial Sequence: Synthetic oligonucleotide
  Sense strand starting at position 589 of SEQ ID NO: 1243970
acuaaaguccuuuacaugu

SEQ ID NO: 1455195 - RNA, 19 nt, Artificial Sequence
  Description of Artificial Sequence: Synthetic oligonucleotide
  Antisense strand to SEQ ID NO: 1455194
acauguaaaggacuuuagu

SEQ ID NO: 1455196 - RNA, 19 nt, Artificial Sequence
  Description of Artificial Sequence: Synthetic oligonucleotide
  Sense strand starting at position 596 of SEQ ID NO: 1243970
uccuuuacauguguucuaa

SEQ ID NO: 1455197 - RNA, 19 nt, Artificial Sequence
  Description of Artificial Sequence: Synthetic oligonucleotide
  Antisense strand to SEQ ID NO: 1455196
uuagaacacauguaaagga

SEQ ID NO: 1455198 - RNA, 19 nt, Artificial Sequence
  Description of Artificial Sequence: Synthetic oligonucleotide
  Sense strand starting at position 598 of SEQ ID NO: 1243970
cuuuacauguguucuaaac

SEQ ID NO: 1455199 - RNA, 19 nt, Artificial Sequence
  Description of Artificial Sequence: Synthetic oligonucleotide
  Antisense strand to SEQ ID NO: 1455198
guuuagaacacauguaaag

SEQ ID NO: 1455200 - RNA, 19 nt, Artificial Sequence
  Description of Artificial Sequence: Synthetic oligonucleotide
  Sense strand starting at position 760 of SEQ ID NO: 1243970
guacauauguaccuuaaag

SEQ ID NO: 1455201 - RNA, 19 nt, Artificial Sequence
  Description of Artificial Sequence: Synthetic oligonucleotide
  Antisense strand to SEQ ID NO: 1455200
cuuuaagguacauauguac

SEQ ID NO: 1455202 - RNA, 19 nt, Artificial Sequence
  Description of Artificial Sequence: Synthetic oligonucleotide
  Sense strand starting at position 776 of SEQ ID NO: 1243970
aagagugaagccggauuaa

SEQ ID NO: 1455203 - RNA, 19 nt, Artificial Sequence
  Description of Artificial Sequence: Synthetic oligonucleotide
  Antisense strand to SEQ ID NO: 1455202
uuaauccggcuucacucuu

SEQ ID NO: 1455204 - RNA, 19 nt, Artificial Sequence
  Description of Artificial Sequence: Synthetic oligonucleotide
  Sense strand starting at position 785 of SEQ ID NO: 1243970
gccggauuaacggauuacu

SEQ ID NO: 1455205 - RNA, 19 nt, Artificial Sequence
  Description of Artificial Sequence: Synthetic oligonucleotide
  Antisense strand to SEQ ID NO: 1455204
aguaauccguuaauccggc

SEQ ID NO: 1455206 - RNA, 19 nt, Artificial Sequence
  Description of Artificial Sequence: Synthetic oligonucleotide
  Sense strand starting at position 788 of SEQ ID NO: 1243970
ggauuaacggauuacugca

SEQ ID NO: 1455207 - RNA, 19 nt, Artificial Sequence
  Description of Artificial Sequence: Synthetic oligonucleotide
  Antisense strand to SEQ ID NO: 1455206
ugcaguaauccguuaaucc

SEQ ID NO: 1455208 - RNA, 19 nt, Artificial Sequence
  Description of Artificial Sequence: Synthetic oligonucleotide
  Sense strand starting at position 849 of SEQ ID NO: 1243970
ucucgacuucuaugaucuu

SEQ ID NO: 1455209 - RNA, 19 nt, Artificial Sequence
  Description of Artificial Sequence: Synthetic oligonucleotide
  Antisense strand to SEQ ID NO: 1455208
aagaucauagaagucgaga

SEQ ID NO: 1455210 - RNA, 19 nt, Artificial Sequence
  Description of Artificial Sequence: Synthetic oligonucleotide
  Sense strand starting at position 858 of SEQ ID NO: 1243970
cuaugaucuuugcuuugga

SEQ ID NO: 1455211 - RNA, 19 nt, Artificial Sequence
  Description of Artificial Sequence: Synthetic oligonucleotide
  Antisense strand to SEQ ID NO: 1455210
uccaaagcaaagaucauag

SEQ ID NO: 1455212 - RNA, 19 nt, Artificial Sequence
  Description of Artificial Sequence: Synthetic oligonucleotide
  Sense strand starting at position 976 of SEQ ID NO: 1243970
gguucugcgcuuguuguaa

SEQ ID NO: 1455213 - RNA, 19 nt, Artificial Sequence
  Description of Artificial Sequence: Synthetic oligonucleotide
  Antisense strand to SEQ ID NO: 1455212
uuacaacaagcgcagaacc

SEQ ID NO: 1455214 - RNA, 19 nt, Artificial Sequence
  Description of Artificial Sequence: Synthetic oligonucleotide
  Sense strand starting at position 1005 of SEQ ID NO: 1243970
uuagcauuauaggucucaa

SEQ ID NO: 1455215 - RNA, 19 nt, Artificial Sequence
  Description of Artificial Sequence: Synthetic oligonucleotide
  Antisense strand to SEQ ID NO: 1455214
uugagaccuauaaugcuaa

SEQ ID NO: 1455216 - RNA, 19 nt, Artificial Sequence
  Description of Artificial Sequence: Synthetic oligonucleotide
  Sense strand starting at position 1045 of SEQ ID NO: 1243970
cugguacuuaccgauuguu

SEQ ID NO: 1455217 - RNA, 19 nt, Artificial Sequence
  Description of Artificial Sequence: Synthetic oligonucleotide
  Antisense strand to SEQ ID NO: 1455216
aacaaucgguaaguaccag

SEQ ID NO: 1455218 - RNA, 19 nt, Artificial Sequence
  Description of Artificial Sequence: Synthetic oligonucleotide
  Sense strand starting at position 1048 of SEQ ID NO: 1243970
guacuuaccgauuguugau

SEQ ID NO: 1455219 - RNA, 19 nt, Artificial Sequence
  Description of Artificial Sequence: Synthetic oligonucleotide
  Antisense strand to SEQ ID NO: 1455218
aucaacaaucgguaaguac

SEQ ID NO: 1455220 - RNA, 19 nt, Artificial Sequence
  Description of Artificial Sequence: Synthetic oligonucleotide
  Sense strand starting at position 1211 of SEQ ID NO: 1243970
gugggauacucaccacagu

SEQ ID NO: 1455221 - RNA, 19 nt, Artificial Sequence
  Description of Artificial Sequence: Synthetic oligonucleotide
  Antisense strand to SEQ ID NO: 1455220
acuguggugaguaucccac

SEQ ID NO: 1455222 - RNA, 19 nt, Artificial Sequence
  Description of Artificial Sequence: Synthetic oligonucleotide
  Sense strand starting at position 1310 of SEQ ID NO: 1243970
guaugagagcgcugggauu

SEQ ID NO: 1455223 - RNA, 19 nt, Artificial Sequence
  Description of Artificial Sequence: Synthetic oligonucleotide
  Antisense strand to SEQ ID NO: 1455222
aaucccagcgcucucauac

SEQ ID NO: 1455224 - RNA, 19 nt, Artificial Sequence
  Description of Artificial Sequence: Synthetic oligonucleotide
  Sense strand starting at position 1323 of SEQ ID NO: 1243970
gggauuaccgccuucgcga

SEQ ID NO: 1455225 - RNA, 19 nt, Artificial Sequence
  Description of Artificial Sequence: Synthetic oligonucleotide
  Antisense strand to SEQ ID NO: 1455224
ucgcgaaggcgguaauccc

SEQ ID NO: 1455226 - RNA, 19 nt, Artificial Sequence
  Description of Artificial Sequence: Synthetic oligonucleotide
  Sense strand starting at position 1324 of SEQ ID NO: 1243970
ggauuaccgccuucgcgaa

SEQ ID NO: 1455227 - RNA, 19 nt, Artificial Sequence
  Description of Artificial Sequence: Synthetic oligonucleotide
  Antisense strand to SEQ ID NO: 1455226
uucgcgaaggcgguaaucc

SEQ ID NO: 1455228 - RNA, 19 nt, Artificial Sequence
  Description of Artificial Sequence: Synthetic oligonucleotide
  Sense strand starting at position 1993 of SEQ ID NO: 1243970
gaacuuagucccggugaag

SEQ ID NO: 1455229 - RNA, 19 nt, Artificial Sequence
  Description of Artificial Sequence: Synthetic oligonucleotide
  Antisense strand to SEQ ID NO: 1455228
cuucaccgggacuaaguuc

SEQ ID NO: 1455230 - RNA, 19 nt, Artificial Sequence
  Description of Artificial Sequence: Synthetic oligonucleotide
  Sense strand starting at position 2076 of SEQ ID NO: 1243970
gaguccuuuggacgguaaa

SEQ ID NO: 1455231 - RNA, 19 nt, Artificial Sequence
  Description of Artificial Sequence: Synthetic oligonucleotide
  Antisense strand to SEQ ID NO: 1455230
uuuaccguccaaaggacuc

SEQ ID NO: 1455232 - RNA, 19 nt, Artificial Sequence
  Description of Artificial Sequence: Synthetic oligonucleotide
  Sense strand starting at position 3028 of SEQ ID NO: 1243970
gugggagacccuuguaaua

SEQ ID NO: 1455233 - RNA, 19 nt, Artificial Sequence
  Description of Artificial Sequence: Synthetic oligonucleotide
  Antisense strand to SEQ ID NO: 1455232
uauuacaagggucucccac

SEQ ID NO: 1455234 - RNA, 19 nt, Artificial Sequence
  Description of Artificial Sequence: Synthetic oligonucleotide
  Sense strand starting at position 3041 of SEQ ID NO: 1243970
guaauagaaccuugcccuu

SEQ ID NO: 1455235 - RNA, 19 nt, Artificial Sequence
  Description of Artificial Sequence: Synthetic oligonucleotide
  Antisense strand to SEQ ID NO: 1455234
aagggcaagguucuauuac

SEQ ID NO: 1455236 - RNA, 19 nt, Artificial Sequence
  Description of Artificial Sequence: Synthetic oligonucleotide
  Sense strand starting at position 3133 of SEQ ID NO: 1243970
uuaagaaagcuggaguugu

SEQ ID NO: 1455237 - RNA, 19 nt, Artificial Sequence
  Description of Artificial Sequence: Synthetic oligonucleotide
  Antisense strand to SEQ ID NO: 1455236
acaacuccagcuuucuuaa

SEQ ID NO: 1455238 - RNA, 19 nt, Artificial Sequence
  Description of Artificial Sequence: Synthetic oligonucleotide
  Sense strand starting at position 3173 of SEQ ID NO: 1243970
gggaacaccuguuugauga

SEQ ID NO: 1455239 - RNA, 19 nt, Artificial Sequence
  Description of Artificial Sequence: Synthetic oligonucleotide
  Antisense strand to SEQ ID NO: 1455238
ucaucaaacagguguuccc

SEQ ID NO: 1455240 - RNA, 19 nt, Artificial Sequence
  Description of Artificial Sequence: Synthetic oligonucleotide
  Sense strand starting at position 3267 of SEQ ID NO: 1243970
aagagacagacuugugugu

SEQ ID NO: 1455241 - RNA, 19 nt, Artificial Sequence
  Description of Artificial Sequence: Synthetic oligonucleotide
  Antisense strand to SEQ ID NO: 1455240
acacacaagucugucucuu

SEQ ID NO: 1455242 - RNA, 19 nt, Artificial Sequence
  Description of Artificial Sequence: Synthetic oligonucleotide
  Sense strand starting at position 3271 of SEQ ID NO: 1243970
gacagacuugugugucaag

SEQ ID NO: 1455243 - RNA, 19 nt, Artificial Sequence
  Description of Artificial Sequence: Synthetic oligonucleotide
  Antisense strand to SEQ ID NO: 1455242
cuugacacacaagucuguc

SEQ ID NO: 1455244 - RNA, 19 nt, Artificial Sequence
  Description of Artificial Sequence: Synthetic oligonucleotide
  Sense strand starting at position 3369 of SEQ ID NO: 1243970
ugcgguucccauuaagaga

SEQ ID NO: 1455245 - RNA, 19 nt, Artificial Sequence
  Description of Artificial Sequence: Synthetic oligonucleotide
  Antisense strand to SEQ ID NO: 1455244
ucucuuaaugggaaccgca

SEQ ID NO: 1455246 - RNA, 19 nt, Artificial Sequence
  Description of Artificial Sequence: Synthetic oligonucleotide
  Sense strand starting at position 3427 of SEQ ID NO: 1243970
gaguguagguaucuggauu

SEQ ID NO: 1455247 - RNA, 19 nt, Artificial Sequence
  Description of Artificial Sequence: Synthetic oligonucleotide
  Antisense strand to SEQ ID NO: 1455246
aauccagauaccuacacuc

SEQ ID NO: 1455248 - RNA, 19 nt, Artificial Sequence
  Description of Artificial Sequence: Synthetic oligonucleotide
  Sense strand starting at position 3478 of SEQ ID NO: 1243970
ggccucuuuaauuguggga

SEQ ID NO: 1455249 - RNA, 19 nt, Artificial Sequence
  Description of Artificial Sequence: Synthetic oligonucleotide
  Antisense strand to SEQ ID NO: 1455248
ucccacaauuaaagaggcc

SEQ ID NO: 1455250 - RNA, 19 nt, Artificial Sequence
  Description of Artificial Sequence: Synthetic oligonucleotide
  Sense strand starting at position 3482 of SEQ ID NO: 1243970
ucuuuaauugugggaggga

SEQ ID NO: 1455251 - RNA, 19 nt, Artificial Sequence
  Description of Artificial Sequence: Synthetic oligonucleotide
  Antisense strand to SEQ ID NO: 1455250
ucccucccacaauuaaaga

SEQ ID NO: 1455252 - RNA, 19 nt, Artificial Sequence
  Description of Artificial Sequence: Synthetic oligonucleotide
  Sense strand starting at position 3485 of SEQ ID NO: 1243970
uuaauugugggagggaguu

SEQ ID NO: 1455253 - RNA, 19 nt, Artificial Sequence
  Description of Artificial Sequence: Synthetic oligonucleotide
  Antisense strand to SEQ ID NO: 1455252
aacucccucccacaauuaa

SEQ ID NO: 1455254 - RNA, 19 nt, Artificial Sequence
  Description of Artificial Sequence: Synthetic oligonucleotide
  Sense strand starting at position 3612 of SEQ ID NO: 1243970
uagcauucugagggaaacu

SEQ ID NO: 1455255 - RNA, 19 nt, Artificial Sequence
  Description of Artificial Sequence: Synthetic oligonucleotide
  Antisense strand to SEQ ID NO: 1455254
aguuucccucagaaugcua

SEQ ID NO: 1455256 - RNA, 19 nt, Artificial Sequence
  Description of Artificial Sequence: Synthetic oligonucleotide
  Sense strand starting at position 3714 of SEQ ID NO: 1243970
aaaugaaugugcucuugug

SEQ ID NO: 1455257 - RNA, 19 nt, Artificial Sequence
  Description of Artificial Sequence: Synthetic oligonucleotide
  Antisense strand to SEQ ID NO: 1455256
cacaagagcacauucauuu

SEQ ID NO: 1455258 - RNA, 19 nt, Artificial Sequence
  Description of Artificial Sequence: Synthetic oligonucleotide
  Sense strand starting at position 3749 of SEQ ID NO: 1243970
ggagaauccucggaaggag

SEQ ID NO: 1455259 - RNA, 19 nt, Artificial Sequence
  Description of Artificial Sequence: Synthetic oligonucleotide
  Antisense strand to SEQ ID NO: 1455258
cuccuuccgaggauucucc

SEQ ID NO: 1455260 - RNA, 19 nt, Artificial Sequence
  Description of Artificial Sequence: Synthetic oligonucleotide
  Sense strand starting at position 3806 of SEQ ID NO: 1243970
gucuguacuguggucugua

SEQ ID NO: 1455261 - RNA, 19 nt, Artificial Sequence
  Description of Artificial Sequence: Synthetic oligonucleotide
  Antisense strand to SEQ ID NO: 1455260
uacagaccacaguacagac

SEQ ID NO: 1455262 - RNA, 19 nt, Artificial Sequence
  Description of Artificial Sequence: Synthetic oligonucleotide
  Sense strand starting at position 3912 of SEQ ID NO: 1243970
gguaguggugguugauuua

SEQ ID NO: 1455263 - RNA, 19 nt, Artificial Sequence
  Description of Artificial Sequence: Synthetic oligonucleotide
  Antisense strand to SEQ ID NO: 1455262
uaaaucaaccaccacuacc

SEQ ID NO: 1455264 - RNA, 19 nt, Artificial Sequence
  Description of Artificial Sequence: Synthetic oligonucleotide
  Sense strand starting at position 3927 of SEQ ID NO: 1243970
uuuaacugauuugggagaa

SEQ ID NO: 1455265 - RNA, 19 nt, Artificial Sequence
  Description of Artificial Sequence: Synthetic oligonucleotide
  Antisense strand to SEQ ID NO: 1455264
uucucccaaaucaguuaaa

SEQ ID NO: 1455266 - RNA, 19 nt, Artificial Sequence
  Description of Artificial Sequence: Synthetic oligonucleotide
  Sense strand starting at position 3928 of SEQ ID NO: 1243970
uuaacugauuugggagaau

SEQ ID NO: 1455267 - RNA, 19 nt, Artificial Sequence
  Description of Artificial Sequence: Synthetic oligonucleotide
  Antisense strand to SEQ ID NO: 1455266
auucucccaaaucaguuaa

SEQ ID NO: 1455268 - RNA, 19 nt, Artificial Sequence
  Description of Artificial Sequence: Synthetic oligonucleotide
  Sense strand starting at position 3940 of SEQ ID NO: 1243970
ggagaaugggucuggccuu

SEQ ID NO: 1455269 - RNA, 19 nt, Artificial Sequence
  Description of Artificial Sequence: Synthetic oligonucleotide
  Antisense strand to SEQ ID NO: 1455268
aaggccagacccauucucc

SEQ ID NO: 1455270 - RNA, 19 nt, Artificial Sequence
  Description of Artificial Sequence: Synthetic oligonucleotide
  Sense strand starting at position 263 of SEQ ID NO: 1243971
ccugaaaguagugguuagu

SEQ ID NO: 1455271 - RNA, 19 nt, Artificial Sequence
  Description of Artificial Sequence: Synthetic oligonucleotide
  Antisense strand to SEQ ID NO: 1455270
acuaaccacuacuuucagg

SEQ ID NO: 1455272 - RNA, 19 nt, Artificial Sequence
  Description of Artificial Sequence: Synthetic oligonucleotide
  Sense strand starting at position 376 of SEQ ID NO: 1243971
agcuguaucuccucuggga

SEQ ID NO: 1455273 - RNA, 19 nt, Artificial Sequence
  Description of Artificial Sequence: Synthetic oligonucleotide
  Antisense strand to SEQ ID NO: 1455272
ucccagaggagauacagcu

SEQ ID NO: 1455274 - RNA, 19 nt, Artificial Sequence
  Description of Artificial Sequence: Synthetic oligonucleotide
  Sense strand starting at position 378 of SEQ ID NO: 1243971
cuguaucuccucugggaga

SEQ ID NO: 1455275 - RNA, 19 nt, Artificial Sequence
  Description of Artificial Sequence: Synthetic oligonucleotide
  Antisense strand to SEQ ID NO: 1455274
ucucccagaggagauacag

SEQ ID NO: 1455276 - RNA, 19 nt, Artificial Sequence
  Description of Artificial Sequence: Synthetic oligonucleotide
  Sense strand starting at position 379 of SEQ ID NO: 1243971
uguaucuccucugggagaa

SEQ ID NO: 1455277 - RNA, 19 nt, Artificial Sequence
  Description of Artificial Sequence: Synthetic oligonucleotide
  Antisense strand to SEQ ID NO: 1455276
uucucccagaggagauaca

SEQ ID NO: 1455278 - RNA, 19 nt, Artificial Sequence
  Description of Artificial Sequence: Synthetic oligonucleotide
  Sense strand starting at position 380 of SEQ ID NO: 1243971
guaucuccucugggagaag

SEQ ID NO: 1455279 - RNA, 19 nt, Artificial Sequence
  Description of Artificial Sequence: Synthetic oligonucleotide
  Antisense strand to SEQ ID NO: 1455278
cuucucccagaggagauac

SEQ ID NO: 1455280 - RNA, 19 nt, Artificial Sequence
  Description of Artificial Sequence: Synthetic oligonucleotide
  Sense strand starting at position 447 of SEQ ID NO: 1243971
acaucuacccuguaagguu

SEQ ID NO: 1455281 - RNA, 19 nt, Artificial Sequence
  Description of Artificial Sequence: Synthetic oligonucleotide
  Antisense strand to SEQ ID NO: 1455280
aaccuuacaggguagaugu

SEQ ID NO: 1455282 - RNA, 19 nt, Artificial Sequence
  Description of Artificial Sequence: Synthetic oligonucleotide
  Sense strand starting at position 455 of SEQ ID NO: 1243971
ccuguaagguuauugcuaa

SEQ ID NO: 1455283 - RNA, 19 nt, Artificial Sequence
  Description of Artificial Sequence: Synthetic oligonucleotide
  Antisense strand to SEQ ID NO: 1455282
uuagcaauaaccuuacagg

SEQ ID NO: 1455284 - RNA, 19 nt, Artificial Sequence
  Description of Artificial Sequence: Synthetic oligonucleotide
  Sense strand starting at position 456 of SEQ ID NO: 1243971
cuguaagguuauugcuaaa

SEQ ID NO: 1455285 - RNA, 19 nt, Artificial Sequence
  Description of Artificial Sequence: Synthetic oligonucleotide
  Antisense strand to SEQ ID NO: 1455284
uuuagcaauaaccuuacag

SEQ ID NO: 1455286 - RNA, 19 nt, Artificial Sequence
  Description of Artificial Sequence: Synthetic oligonucleotide
  Sense strand starting at position 478 of SEQ ID NO: 1243971
aaaugagaggaucggugua

SEQ ID NO: 1455287 - RNA, 19 nt, Artificial Sequence
  Description of Artificial Sequence: Synthetic oligonucleotide
  Antisense strand to SEQ ID NO: 1455286
uacaccgauccucucauuu

SEQ ID NO: 1455288 - RNA, 19 nt, Artificial Sequence
  Description of Artificial Sequence: Synthetic oligonucleotide
  Sense strand starting at position 480 of SEQ ID NO: 1243971
augagaggaucgguguaga

SEQ ID NO: 1455289 - RNA, 19 nt, Artificial Sequence
  Description of Artificial Sequence: Synthetic oligonucleotide
  Antisense strand to SEQ ID NO: 1455288
ucuacaccgauccucucau

SEQ ID NO: 1455290 - RNA, 19 nt, Artificial Sequence
  Description of Artificial Sequence: Synthetic oligonucleotide
  Sense strand starting at position 483 of SEQ ID NO: 1243971
agaggaucgguguagagua

SEQ ID NO: 1455291 - RNA, 19 nt, Artificial Sequence
  Description of Artificial Sequence: Synthetic oligonucleotide
  Antisense strand to SEQ ID NO: 1455290
uacucuacaccgauccucu

SEQ ID NO: 1455292 - RNA, 19 nt, Artificial Sequence
  Description of Artificial Sequence: Synthetic oligonucleotide
  Sense strand starting at position 842 of SEQ ID NO: 1243971
gggagcucuuaauacauau

SEQ ID NO: 1455293 - RNA, 19 nt, Artificial Sequence
  Description of Artificial Sequence: Synthetic oligonucleotide
  Antisense strand to SEQ ID NO: 1455292
auauguauuaagagcuccc

SEQ ID NO: 1455294 - RNA, 19 nt, Artificial Sequence
  Description of Artificial Sequence: Synthetic oligonucleotide
  Sense strand starting at position 865 of SEQ ID NO: 1243971
uguuacugcuucuuaggau

SEQ ID NO: 1455295 - RNA, 19 nt, Artificial Sequence
  Description of Artificial Sequence: Synthetic oligonucleotide
  Antisense strand to SEQ ID NO: 1455294
auccuaagaagcaguaaca

SEQ ID NO: 1455296 - RNA, 19 nt, Artificial Sequence
  Description of Artificial Sequence: Synthetic oligonucleotide
  Sense strand starting at position 869 of SEQ ID NO: 1243971
acugcuucuuaggauguua

SEQ ID NO: 1455297 - RNA, 19 nt, Artificial Sequence
  Description of Artificial Sequence: Synthetic oligonucleotide
  Antisense strand to SEQ ID NO: 1455296
uaacauccuaagaagcagu

SEQ ID NO: 1455298 - RNA, 19 nt, Artificial Sequence
  Description of Artificial Sequence: Synthetic oligonucleotide
  Sense strand starting at position 871 of SEQ ID NO: 1243971
ugcuucuuaggauguuaau

SEQ ID NO: 1455299 - RNA, 19 nt, Artificial Sequence
  Description of Artificial Sequence: Synthetic oligonucleotide
  Antisense strand to SEQ ID NO: 1455298
auuaacauccuaagaagca

SEQ ID NO: 1455300 - RNA, 19 nt, Artificial Sequence
  Description of Artificial Sequence: Synthetic oligonucleotide
  Sense strand starting at position 874 of SEQ ID NO: 1243971
uucuuaggauguuaauaag

SEQ ID NO: 1455301 - RNA, 19 nt, Artificial Sequence
  Description of Artificial Sequence: Synthetic oligonucleotide
  Antisense strand to SEQ ID NO: 1455300
cuuauuaacauccuaagaa

SEQ ID NO: 1455302 - RNA, 19 nt, Artificial Sequence
  Description of Artificial Sequence: Synthetic oligonucleotide
  Sense strand starting at position 880 of SEQ ID NO: 1243971
ggauguuaauaaguucuuu

SEQ ID NO: 1455303 - RNA, 19 nt, Artificial Sequence
  Description of Artificial Sequence: Synthetic oligonucleotide
  Antisense strand to SEQ ID NO: 1455302
aaagaacuuauuaacaucc

SEQ ID NO: 1455304 - RNA, 19 nt, Artificial Sequence
  Description of Artificial Sequence: Synthetic oligonucleotide
  Sense strand starting at position 884 of SEQ ID NO: 1243971
guuaauaaguucuuuccuu

SEQ ID NO: 1455305 - RNA, 19 nt, Artificial Sequence
  Description of Artificial Sequence: Synthetic oligonucleotide
  Antisense strand to SEQ ID NO: 1455304
aaggaaagaacuuauuaac

SEQ ID NO: 1455306 - RNA, 19 nt, Artificial Sequence
  Description of Artificial Sequence: Synthetic oligonucleotide
  Sense strand starting at position 888 of SEQ ID NO: 1243971
auaaguucuuuccuuaugu

SEQ ID NO: 1455307 - RNA, 19 nt, Artificial Sequence
  Description of Artificial Sequence: Synthetic oligonucleotide
  Antisense strand to SEQ ID NO: 1455306
acauaaggaaagaacuuau

SEQ ID NO: 1455308 - RNA, 19 nt, Artificial Sequence
  Description of Artificial Sequence: Synthetic oligonucleotide
  Sense strand starting at position 924 of SEQ ID NO: 1243971
uucugaauggccuaugugu

SEQ ID NO: 1455309 - RNA, 19 nt, Artificial Sequence
  Description of Artificial Sequence: Synthetic oligonucleotide
  Antisense strand to SEQ ID NO: 1455308
acacauaggccauucagaa

SEQ ID NO: 1455310 - RNA, 19 nt, Artificial Sequence
  Description of Artificial Sequence: Synthetic oligonucleotide
  Sense strand starting at position 926 of SEQ ID NO: 1243971
cugaauggccuauguguaa

SEQ ID NO: 1455311 - RNA, 19 nt, Artificial Sequence
  Description of Artificial Sequence: Synthetic oligonucleotide
  Antisense strand to SEQ ID NO: 1455310
uuacacauaggccauucag

SEQ ID NO: 1455312 - RNA, 19 nt, Artificial Sequence
  Description of Artificial Sequence: Synthetic oligonucleotide
  Sense strand starting at position 929 of SEQ ID NO: 1243971
aauggccuauguguaaaua

SEQ ID NO: 1455313 - RNA, 19 nt, Artificial Sequence
  Description of Artificial Sequence: Synthetic oligonucleotide
  Antisense strand to SEQ ID NO: 1455312
uauuuacacauaggccauu

SEQ ID NO: 1455314 - RNA, 19 nt, Artificial Sequence
  Description of Artificial Sequence: Synthetic oligonucleotide
  Sense strand starting at position 939 of SEQ ID NO: 1243971
guguaaauacaaggacuua

SEQ ID NO: 1455315 - RNA, 19 nt, Artificial Sequence
  Description of Artificial Sequence: Synthetic oligonucleotide
  Antisense strand to SEQ ID NO: 1455314
uaaguccuuguauuuacac

SEQ ID NO: 1455316 - RNA, 19 nt, Artificial Sequence
  Description of Artificial Sequence: Synthetic oligonucleotide
  Sense strand starting at position 978 of SEQ ID NO: 1243971
ccuugcucuccaggaguca

SEQ ID NO: 1455317 - RNA, 19 nt, Artificial Sequence
  Description of Artificial Sequence: Synthetic oligonucleotide
  Antisense strand to SEQ ID NO: 1455316
ugacuccuggagagcaagg

SEQ ID NO: 1455318 - RNA, 19 nt, Artificial Sequence
  Description of Artificial Sequence: Synthetic oligonucleotide
  Sense strand starting at position 979 of SEQ ID NO: 1243971
cuugcucuccaggagucaa

SEQ ID NO: 1455319 - RNA, 19 nt, Artificial Sequence
  Description of Artificial Sequence: Synthetic oligonucleotide
  Antisense strand to SEQ ID NO: 1455318
uugacuccuggagagcaag

SEQ ID NO: 1455320 - RNA, 19 nt, Artificial Sequence
  Description of Artificial Sequence: Synthetic oligonucleotide
  Sense strand starting at position 991 of SEQ ID NO: 1243971
gagucaaaucucggcgauu

SEQ ID NO: 1455321 - RNA, 19 nt, Artificial Sequence
  Description of Artificial Sequence: Synthetic oligonucleotide
  Antisense strand to SEQ ID NO: 1455320
aaucgccgagauuugacuc

SEQ ID NO: 1455322 - RNA, 19 nt, Artificial Sequence
  Description of Artificial Sequence: Synthetic oligonucleotide
  Sense strand starting at position 992 of SEQ ID NO: 1243971
agucaaaucucggcgauuu

SEQ ID NO: 1455323 - RNA, 19 nt, Artificial Sequence
  Description of Artificial Sequence: Synthetic oligonucleotide
  Antisense strand to SEQ ID NO: 1455322
aaaucgccgagauuugacu

SEQ ID NO: 1455324 - RNA, 19 nt, Artificial Sequence
  Description of Artificial Sequence: Synthetic oligonucleotide
  Sense strand starting at position 2045 of SEQ ID NO: 1243971
ggcgcuccggccagugauu

SEQ ID NO: 1455325 - RNA, 19 nt, Artificial Sequence
  Description of Artificial Sequence: Synthetic oligonucleotide
  Antisense strand to SEQ ID NO: 1455324
aaucacuggccggagcgcc

SEQ ID NO: 1455326 - RNA, 19 nt, Artificial Sequence
  Description of Artificial Sequence: Synthetic oligonucleotide
  Sense strand starting at position 2056 of SEQ ID NO: 1243971
cagugauuggcuggagguu

SEQ ID NO: 1455327 - RNA, 19 nt, Artificial Sequence
  Description of Artificial Sequence: Synthetic oligonucleotide
  Antisense strand to SEQ ID NO: 1455326
aaccuccagccaaucacug

SEQ ID NO: 1455328 - RNA, 19 nt, Artificial Sequence
  Description of Artificial Sequence: Synthetic oligonucleotide
  Sense strand starting at position 2057 of SEQ ID NO: 1243971
agugauuggcuggagguuu

SEQ ID NO: 1455329 - RNA, 19 nt, Artificial Sequence
  Description of Artificial Sequence: Synthetic oligonucleotide
  Antisense strand to SEQ ID NO: 1455328
aaaccuccagccaaucacu

SEQ ID NO: 1455330 - RNA, 19 nt, Artificial Sequence
  Description of Artificial Sequence: Synthetic oligonucleotide
  Sense strand starting at position 2065 of SEQ ID NO: 1243971
gcuggagguuuguuaacua

SEQ ID NO: 1455331 - RNA, 19 nt, Artificial Sequence
  Description of Artificial Sequence: Synthetic oligonucleotide
  Antisense strand to SEQ ID NO: 1455330
uaguuaacaaaccuccagc

SEQ ID NO: 1455332 - RNA, 19 nt, Artificial Sequence
  Description of Artificial Sequence: Synthetic oligonucleotide
  Sense strand starting at position 2761 of SEQ ID NO: 1243971
gcucguauagcugcgauga

SEQ ID NO: 1455333 - RNA, 19 nt, Artificial Sequence
  Description of Artificial Sequence: Synthetic oligonucleotide
  Antisense strand to SEQ ID NO: 1455332
ucaucgcagcuauacgagc

SEQ ID NO: 1455334 - RNA, 19 nt, Artificial Sequence
  Description of Artificial Sequence: Synthetic oligonucleotide
  Sense strand starting at position 2776 of SEQ ID NO: 1243971
augagcguuuccucuucga

SEQ ID NO: 1455335 - RNA, 19 nt, Artificial Sequence
  Description of Artificial Sequence: Synthetic oligonucleotide
  Antisense strand to SEQ ID NO: 1455334
ucgaagaggaaacgcucau

SEQ ID NO: 1455336 - RNA, 19 nt, Artificial Sequence
  Description of Artificial Sequence: Synthetic oligonucleotide
  Sense strand starting at position 2779 of SEQ ID NO: 1243971
agcguuuccucuucgaacu

SEQ ID NO: 1455337 - RNA, 19 nt, Artificial Sequence
  Description of Artificial Sequence: Synthetic oligonucleotide
  Antisense strand to SEQ ID NO: 1455336
aguucgaagaggaaacgcu

SEQ ID NO: 1455338 - RNA, 19 nt, Artificial Sequence
  Description of Artificial Sequence: Synthetic oligonucleotide
  Sense strand starting at position 2780 of SEQ ID NO: 1243971
gcguuuccucuucgaacuu

SEQ ID NO: 1455339 - RNA, 19 nt, Artificial Sequence
  Description of Artificial Sequence: Synthetic oligonucleotide
  Antisense strand to SEQ ID NO: 1455338
aaguucgaagaggaaacgc

SEQ ID NO: 1455340 - RNA, 19 nt, Artificial Sequence
  Description of Artificial Sequence: Synthetic oligonucleotide
  Sense strand starting at position 3129 of SEQ ID NO: 1243971
ggcaguaggucaagcgaaa

SEQ ID NO: 1455341 - RNA, 19 nt, Artificial Sequence
  Description of Artificial Sequence: Synthetic oligonucleotide
  Antisense strand to SEQ ID NO: 1455340
uuucgcuugaccuacugcc

SEQ ID NO: 1455342 - RNA, 19 nt, Artificial Sequence
  Description of Artificial Sequence: Synthetic oligonucleotide
  Sense strand starting at position 3172 of SEQ ID NO: 1243971
cuggguguguuaucucagu

SEQ ID NO: 1455343 - RNA, 19 nt, Artificial Sequence
  Description of Artificial Sequence: Synthetic oligonucleotide
  Antisense strand to SEQ ID NO: 1455342
acugagauaacacacccag

SEQ ID NO: 1455344 - RNA, 19 nt, Artificial Sequence
  Description of Artificial Sequence: Synthetic oligonucleotide
  Sense strand starting at position 3177 of SEQ ID NO: 1243971
uguguuaucucaguugggu

SEQ ID NO: 1455345 - RNA, 19 nt, Artificial Sequence
  Description of Artificial Sequence: Synthetic oligonucleotide
  Antisense strand to SEQ ID NO: 1455344
acccaacugagauaacaca

SEQ ID NO: 1455346 - RNA, 19 nt, Artificial Sequence
  Description of Artificial Sequence: Synthetic oligonucleotide
  Sense strand starting at position 3255 of SEQ ID NO: 1243971
acaagugaggcugagcuua

SEQ ID NO: 1455347 - RNA, 19 nt, Artificial Sequence
  Description of Artificial Sequence: Synthetic oligonucleotide
  Antisense strand to SEQ ID NO: 1455346
uaagcucagccucacuugu

SEQ ID NO: 1455348 - RNA, 19 nt, Artificial Sequence
  Description of Artificial Sequence: Synthetic oligonucleotide
  Sense strand starting at position 3704 of SEQ ID NO: 1243971
gcaccagguuugcucuuua

SEQ ID NO: 1455349 - RNA, 19 nt, Artificial Sequence
  Description of Artificial Sequence: Synthetic oligonucleotide
  Antisense strand to SEQ ID NO: 1455348
uaaagagcaaaccuggugc

SEQ ID NO: 1455350 - RNA, 19 nt, Artificial Sequence
  Description of Artificial Sequence: Synthetic oligonucleotide
  Sense strand starting at position 333 of SEQ ID NO: 1243972
ucacguuugaaauggagau

SEQ ID NO: 1455351 - RNA, 19 nt, Artificial Sequence
  Description of Artificial Sequence: Synthetic oligonucleotide
  Antisense strand to SEQ ID NO: 1455350
aucuccauuucaaacguga

SEQ ID NO: 1455352 - RNA, 19 nt, Artificial Sequence
  Description of Artificial Sequence: Synthetic oligonucleotide
  Sense strand starting at position 996 of SEQ ID NO: 1243972
agauauaauuugcacagca

SEQ ID NO: 1455353 - RNA, 19 nt, Artificial Sequence
  Description of Artificial Sequence: Synthetic oligonucleotide
  Antisense strand to SEQ ID NO: 1455352
ugcugugcaaauuauaucu

SEQ ID NO: 1455354 - RNA, 19 nt, Artificial Sequence
  Description of Artificial Sequence: Synthetic oligonucleotide
  Sense strand starting at position 1114 of SEQ ID NO: 1243972
gccauuaagccgucacugu

SEQ ID NO: 1455355 - RNA, 19 nt, Artificial Sequence
  Description of Artificial Sequence: Synthetic oligonucleotide
  Antisense strand to SEQ ID NO: 1455354
acagugacggcuuaauggc

SEQ ID NO: 1455356 - RNA, 19 nt, Artificial Sequence
  Description of Artificial Sequence: Synthetic oligonucleotide
  Sense strand starting at position 1464 of SEQ ID NO: 1243972
aucccuuucguguauauac

SEQ ID NO: 1455357 - RNA, 19 nt, Artificial Sequence
  Description of Artificial Sequence: Synthetic oligonucleotide
  Antisense strand to SEQ ID NO: 1455356
guauauacacgaaagggau

SEQ ID NO: 1455358 - RNA, 19 nt, Artificial Sequence
  Description of Artificial Sequence: Synthetic oligonucleotide
  Sense strand starting at position 1534 of SEQ ID NO: 1243972
uuacuaacacuguagguau

SEQ ID NO: 1455359 - RNA, 19 nt, Artificial Sequence
  Description of Artificial Sequence: Synthetic oligonucleotide
  Antisense strand to SEQ ID NO: 1455358
auaccuacaguguuaguaa

SEQ ID NO: 1455360 - RNA, 19 nt, Artificial Sequence
  Description of Artificial Sequence: Synthetic oligonucleotide
  Sense strand starting at position 1702 of SEQ ID NO: 1243972
uaaguagaguaaguugaau

SEQ ID NO: 1455361 - RNA, 19 nt, Artificial Sequence
  Description of Artificial Sequence: Synthetic oligonucleotide
  Antisense strand to SEQ ID NO: 1455360
auucaacuuacucuacuua

SEQ ID NO: 1455362 - RNA, 19 nt, Artificial Sequence
  Description of Artificial Sequence: Synthetic oligonucleotide
  Sense strand starting at position 1704 of SEQ ID NO: 1243972
aguagaguaaguugaauga

SEQ ID NO: 1455363 - RNA, 19 nt, Artificial Sequence
  Description of Artificial Sequence: Synthetic oligonucleotide
  Antisense strand to SEQ ID NO: 1455362
ucauucaacuuacucuacu

SEQ ID NO: 1455364 - RNA, 19 nt, Artificial Sequence
  Description of Artificial Sequence: Synthetic oligonucleotide
  Sense strand starting at position 1708 of SEQ ID NO: 1243972
gaguaaguugaaugacuag

SEQ ID NO: 1455365 - RNA, 19 nt, Artificial Sequence
  Description of Artificial Sequence: Synthetic oligonucleotide
  Antisense strand to SEQ ID NO: 1455364
cuagucauucaacuuacuc

SEQ ID NO: 1455366 - RNA, 19 nt, Artificial Sequence
  Description of Artificial Sequence: Synthetic oligonucleotide
  Sense strand starting at position 1763 of SEQ ID NO: 1243972
cguugacaucugcaaauca

SEQ ID NO: 1455367 - RNA, 19 nt, Artificial Sequence
  Description of Artificial Sequence: Synthetic oligonucleotide
  Antisense strand to SEQ ID NO: 1455366
ugauuugcagaugucaacg

SEQ ID NO: 1455368 - RNA, 19 nt, Artificial Sequence
  Description of Artificial Sequence: Synthetic oligonucleotide
  Sense strand starting at position 1885 of SEQ ID NO: 1243972
agcgguguucaggagggaa

SEQ ID NO: 1455369 - RNA, 19 nt, Artificial Sequence
  Description of Artificial Sequence: Synthetic oligonucleotide
  Antisense strand to SEQ ID NO: 1455368
uucccuccugaacaccgcu

SEQ ID NO: 1455370 - RNA, 19 nt, Artificial Sequence
  Description of Artificial Sequence: Synthetic oligonucleotide
  Sense strand starting at position 1987 of SEQ ID NO: 1243972
ggaaguagaucuccugaua

SEQ ID NO: 1455371 - RNA, 19 nt, Artificial Sequence
  Description of Artificial Sequence: Synthetic oligonucleotide
  Antisense strand to SEQ ID NO: 1455370
uaucaggagaucuacuucc

SEQ ID NO: 1455372 - RNA, 19 nt, Artificial Sequence
  Description of Artificial Sequence: Synthetic oligonucleotide
  Sense strand starting at position 2028 of SEQ ID NO: 1243972
accggaagugagugaucga

SEQ ID NO: 1455373 - RNA, 19 nt, Artificial Sequence
  Description of Artificial Sequence: Synthetic oligonucleotide
  Antisense strand to SEQ ID NO: 1455372
ucgaucacucacuuccggu

SEQ ID NO: 1455374 - RNA, 19 nt, Artificial Sequence
  Description of Artificial Sequence: Synthetic oligonucleotide
  Sense strand starting at position 2029 of SEQ ID NO: 1243972
ccggaagugagugaucgaa

SEQ ID NO: 1455375 - RNA, 19 nt, Artificial Sequence
  Description of Artificial Sequence: Synthetic oligonucleotide
  Antisense strand to SEQ ID NO: 1455374
uucgaucacucacuuccgg

SEQ ID NO: 1455376 - RNA, 19 nt, Artificial Sequence
  Description of Artificial Sequence: Synthetic oligonucleotide
  Sense strand starting at position 2031 of SEQ ID NO: 1243972
ggaagugagugaucgaaag

SEQ ID NO: 1455377 - RNA, 19 nt, Artificial Sequence
  Description of Artificial Sequence: Synthetic oligonucleotide
  Antisense strand to SEQ ID NO: 1455376
cuuucgaucacucacuucc

SEQ ID NO: 1455378 - RNA, 19 nt, Artificial Sequence
  Description of Artificial Sequence: Synthetic oligonucleotide
  Sense strand starting at position 2033 of SEQ ID NO: 1243972
aagugagugaucgaaagca

SEQ ID NO: 1455379 - RNA, 19 nt, Artificial Sequence
  Description of Artificial Sequence: Synthetic oligonucleotide
  Antisense strand to SEQ ID NO: 1455378
ugcuuucgaucacucacuu

SEQ ID NO: 1455380 - RNA, 19 nt, Artificial Sequence
  Description of Artificial Sequence: Synthetic oligonucleotide
  Sense strand starting at position 2353 of SEQ ID NO: 1243972
ggguccuuucucuguagaa

SEQ ID NO: 1455381 - RNA, 19 nt, Artificial Sequence
  Description of Artificial Sequence: Synthetic oligonucleotide
  Antisense strand to SEQ ID NO: 1455380
uucuacagagaaaggaccc

SEQ ID NO: 1455382 - RNA, 19 nt, Artificial Sequence
  Description of Artificial Sequence: Synthetic oligonucleotide
  Sense strand starting at position 2354 of SEQ ID NO: 1243972
gguccuuucucuguagaag

SEQ ID NO: 1455383 - RNA, 19 nt, Artificial Sequence
  Description of Artificial Sequence: Synthetic oligonucleotide
  Antisense strand to SEQ ID NO: 1455382
cuucuacagagaaaggacc

SEQ ID NO: 1455384 - RNA, 19 nt, Artificial Sequence
  Description of Artificial Sequence: Synthetic oligonucleotide
  Sense strand starting at position 2355 of SEQ ID NO: 1243972
guccuuucucuguagaagu

SEQ ID NO: 1455385 - RNA, 19 nt, Artificial Sequence
  Description of Artificial Sequence: Synthetic oligonucleotide
  Antisense strand to SEQ ID NO: 1455384
acuucuacagagaaaggac

SEQ ID NO: 1455386 - RNA, 19 nt, Artificial Sequence
  Description of Artificial Sequence: Synthetic oligonucleotide
  Sense strand starting at position 2357 of SEQ ID NO: 1243972
ccuuucucuguagaaguau

SEQ ID NO: 1455387 - RNA, 19 nt, Artificial Sequence
  Description of Artificial Sequence: Synthetic oligonucleotide
  Antisense strand to SEQ ID NO: 1455386
auacuucuacagagaaagg

SEQ ID NO: 1455388 - RNA, 19 nt, Artificial Sequence
  Description of Artificial Sequence: Synthetic oligonucleotide
  Sense strand starting at position 2366 of SEQ ID NO: 1243972
guagaaguauuaguaacau

SEQ ID NO: 1455389 - RNA, 19 nt, Artificial Sequence
  Description of Artificial Sequence: Synthetic oligonucleotide
  Antisense strand to SEQ ID NO: 1455388
auguuacuaauacuucuac

SEQ ID NO: 1455390 - RNA, 19 nt, Artificial Sequence
  Description of Artificial Sequence: Synthetic oligonucleotide
  Sense strand starting at position 2375 of SEQ ID NO: 1243972
uuaguaacauuggcauauu

SEQ ID NO: 1455391 - RNA, 19 nt, Artificial Sequence
  Description of Artificial Sequence: Synthetic oligonucleotide
  Antisense strand to SEQ ID NO: 1455390
aauaugccaauguuacuaa

SEQ ID NO: 1455392 - RNA, 19 nt, Artificial Sequence
  Description of Artificial Sequence: Synthetic oligonucleotide
  Sense strand starting at position 2573 of SEQ ID NO: 1243972
ugcugugaagaaggauaau

SEQ ID NO: 1455393 - RNA, 19 nt, Artificial Sequence
  Description of Artificial Sequence: Synthetic oligonucleotide
  Antisense strand to SEQ ID NO: 1455392
auuauccuucuucacagca

SEQ ID NO: 1455394 - RNA, 19 nt, Artificial Sequence
  Description of Artificial Sequence: Synthetic oligonucleotide
  Sense strand starting at position 2987 of SEQ ID NO: 1243972
gaccuagaccuguguagag

SEQ ID NO: 1455395 - RNA, 19 nt, Artificial Sequence
  Description of Artificial Sequence: Synthetic oligonucleotide
  Antisense strand to SEQ ID NO: 1455394
cucuacacaggucuagguc

SEQ ID NO: 1455396 - RNA, 19 nt, Artificial Sequence
  Description of Artificial Sequence: Synthetic oligonucleotide
  Sense strand starting at position 3116 of SEQ ID NO: 1243972
ucguaauagcccugaggag

SEQ ID NO: 1455397 - RNA, 19 nt, Artificial Sequence
  Description of Artificial Sequence: Synthetic oligonucleotide
  Antisense strand to SEQ ID NO: 1455396
cuccucagggcuauuacga

SEQ ID NO: 1455398 - RNA, 19 nt, Artificial Sequence
  Description of Artificial Sequence: Synthetic oligonucleotide
  Sense strand starting at position 3117 of SEQ ID NO: 1243972
cguaauagcccugaggaga

SEQ ID NO: 1455399 - RNA, 19 nt, Artificial Sequence
  Description of Artificial Sequence: Synthetic oligonucleotide
  Antisense strand to SEQ ID NO: 1455398
ucuccucagggcuauuacg

SEQ ID NO: 1455400 - RNA, 19 nt, Artificial Sequence
  Description of Artificial Sequence: Synthetic oligonucleotide
  Sense strand starting at position 3162 of SEQ ID NO: 1243972
ggcagugaacuuggaggaa

SEQ ID NO: 1455401 - RNA, 19 nt, Artificial Sequence
  Description of Artificial Sequence: Synthetic oligonucleotide
  Antisense strand to SEQ ID NO: 1455400
uuccuccaaguucacugcc

SEQ ID NO: 1455402 - RNA, 19 nt, Artificial Sequence
  Description of Artificial Sequence: Synthetic oligonucleotide
  Sense strand starting at position 3184 of SEQ ID NO: 1243972
ggaugaauuugagaucugu

SEQ ID NO: 1455403 - RNA, 19 nt, Artificial Sequence
  Description of Artificial Sequence: Synthetic oligonucleotide
  Antisense strand to SEQ ID NO: 1455402
acagaucucaaauucaucc

SEQ ID NO: 1455404 - RNA, 19 nt, Artificial Sequence
  Description of Artificial Sequence: Synthetic oligonucleotide
  Sense strand starting at position 3222 of SEQ ID NO: 1243972
gagcuugcuggugaacaau

SEQ ID NO: 1455405 - RNA, 19 nt, Artificial Sequence
  Description of Artificial Sequence: Synthetic oligonucleotide
  Antisense strand to SEQ ID NO: 1455404
auuguucaccagcaagcuc

SEQ ID NO: 1455406 - RNA, 19 nt, Artificial Sequence
  Description of Artificial Sequence: Synthetic oligonucleotide
  Sense strand starting at position 3228 of SEQ ID NO: 1243972
gcuggugaacaauauguga

SEQ ID NO: 1455407 - RNA, 19 nt, Artificial Sequence
  Description of Artificial Sequence: Synthetic oligonucleotide
  Antisense strand to SEQ ID NO: 1455406
ucacauauuguucaccagc

SEQ ID NO: 1455408 - RNA, 19 nt, Artificial Sequence
  Description of Artificial Sequence: Synthetic oligonucleotide
  Sense strand starting at position 3360 of SEQ ID NO: 1243972
auuugugagugagauaaug

SEQ ID NO: 1455409 - RNA, 19 nt, Artificial Sequence
  Description of Artificial Sequence: Synthetic oligonucleotide
  Antisense strand to SEQ ID NO: 1455408
cauuaucucacucacaaau

SEQ ID NO: 1455410 - RNA, 19 nt, Artificial Sequence
  Description of Artificial Sequence: Synthetic oligonucleotide
  Sense strand starting at position 3362 of SEQ ID NO: 1243972
uugugagugagauaaugua

SEQ ID NO: 1455411 - RNA, 19 nt, Artificial Sequence
  Description of Artificial Sequence: Synthetic oligonucleotide
  Antisense strand to SEQ ID NO: 1455410
uacauuaucucacucacaa

SEQ ID NO: 1455412 - RNA, 19 nt, Artificial Sequence
  Description of Artificial Sequence: Synthetic oligonucleotide
  Sense strand starting at position 3407 of SEQ ID NO: 1243972
cuuaguaaguauguaaaug

SEQ ID NO: 1455413 - RNA, 19 nt, Artificial Sequence
  Description of Artificial Sequence: Synthetic oligonucleotide
  Antisense strand to SEQ ID NO: 1455412
cauuuacauacuuacuaag

SEQ ID NO: 1455414 - RNA, 19 nt, Artificial Sequence
  Description of Artificial Sequence: Synthetic oligonucleotide
  Sense strand starting at position 3436 of SEQ ID NO: 1243972
uguuuaaagguagguagau

SEQ ID NO: 1455415 - RNA, 19 nt, Artificial Sequence
  Description of Artificial Sequence: Synthetic oligonucleotide
  Antisense strand to SEQ ID NO: 1455414
aucuaccuaccuuuaaaca

SEQ ID NO: 1455416 - RNA, 19 nt, Artificial Sequence
  Description of Artificial Sequence: Synthetic oligonucleotide
  Sense strand starting at position 3526 of SEQ ID NO: 1243972
ucuggugucauggaaaugu

SEQ ID NO: 1455417 - RNA, 19 nt, Artificial Sequence
  Description of Artificial Sequence: Synthetic oligonucleotide
  Antisense strand to SEQ ID NO: 1455416
acauuuccaugacaccaga

SEQ ID NO: 1455418 - RNA, 19 nt, Artificial Sequence
  Description of Artificial Sequence: Synthetic oligonucleotide
  Sense strand starting at position 3530 of SEQ ID NO: 1243972
gugucauggaaaugucaga

SEQ ID NO: 1455419 - RNA, 19 nt, Artificial Sequence
  Description of Artificial Sequence: Synthetic oligonucleotide
  Antisense strand to SEQ ID NO: 1455418
ucugacauuuccaugacac

SEQ ID NO: 1455420 - RNA, 19 nt, Artificial Sequence
  Description of Artificial Sequence: Synthetic oligonucleotide
  Sense strand starting at position 3591 of SEQ ID NO: 1243972
ccacaaggcuucucuaaag

SEQ ID NO: 1455421 - RNA, 19 nt, Artificial Sequence
  Description of Artificial Sequence: Synthetic oligonucleotide
  Antisense strand to SEQ ID NO: 1455420
cuuuagagaagccuugugg

SEQ ID NO: 1455422 - RNA, 19 nt, Artificial Sequence
  Description of Artificial Sequence: Synthetic oligonucleotide
  Sense strand starting at position 3746 of SEQ ID NO: 1243972
uauugagcacuuuggaaug

SEQ ID NO: 1455423 - RNA, 19 nt, Artificial Sequence
  Description of Artificial Sequence: Synthetic oligonucleotide
  Antisense strand to SEQ ID NO: 1455422
cauuccaaagugcucaaua

SEQ ID NO: 1455424 - RNA, 19 nt, Artificial Sequence
  Description of Artificial Sequence: Synthetic oligonucleotide
  Sense strand starting at position 3751 of SEQ ID NO: 1243972
agcacuuuggaaugaguau

SEQ ID NO: 1455425 - RNA, 19 nt, Artificial Sequence
  Description of Artificial Sequence: Synthetic oligonucleotide
  Antisense strand to SEQ ID NO: 1455424
auacucauuccaaagugcu

SEQ ID NO: 1455426 - RNA, 19 nt, Artificial Sequence
  Description of Artificial Sequence: Synthetic oligonucleotide
  Sense strand starting at position 3752 of SEQ ID NO: 1243972
gcacuuuggaaugaguaug

SEQ ID NO: 1455427 - RNA, 19 nt, Artificial Sequence
  Description of Artificial Sequence: Synthetic oligonucleotide
  Antisense strand to SEQ ID NO: 1455426
cauacucauuccaaagugc

SEQ ID NO: 1455428 - RNA, 19 nt, Artificial Sequence
  Description of Artificial Sequence: Synthetic oligonucleotide
  Sense strand starting at position 3763 of SEQ ID NO: 1243972
ugaguauggagaggucaga

SEQ ID NO: 1455429 - RNA, 19 nt, Artificial Sequence
  Description of Artificial Sequence: Synthetic oligonucleotide
  Antisense strand to SEQ ID NO: 1455428
ucugaccucuccauacuca

SEQ ID NO: 1455430 - RNA, 19 nt, Artificial Sequence
  Description of Artificial Sequence: Synthetic oligonucleotide
  Sense strand starting at position 316 of SEQ ID NO: 1243973
ccaggagguugagaucaga

SEQ ID NO: 1455431 - RNA, 19 nt, Artificial Sequence
  Description of Artificial Sequence: Synthetic oligonucleotide
  Antisense strand to SEQ ID NO: 1455430
ucugaucucaaccuccugg

SEQ ID NO: 1455432 - RNA, 19 nt, Artificial Sequence
  Description of Artificial Sequence: Synthetic oligonucleotide
  Sense strand starting at position 332 of SEQ ID NO: 1243973
agaucuugacagugagcca

SEQ ID NO: 1455433 - RNA, 19 nt, Artificial Sequence
  Description of Artificial Sequence: Synthetic oligonucleotide
  Antisense strand to SEQ ID NO: 1455432
uggcucacugucaagaucu

SEQ ID NO: 1455434 - RNA, 19 nt, Artificial Sequence
  Description of Artificial Sequence: Synthetic oligonucleotide
  Sense strand starting at position 337 of SEQ ID NO: 1243973
uugacagugagccaagauu

SEQ ID NO: 1455435 - RNA, 19 nt, Artificial Sequence
  Description of Artificial Sequence: Synthetic oligonucleotide
  Antisense strand to SEQ ID NO: 1455434
aaucuuggcucacugucaa

SEQ ID NO: 1455436 - RNA, 19 nt, Artificial Sequence
  Description of Artificial Sequence: Synthetic oligonucleotide
  Sense strand starting at position 658 of SEQ ID NO: 1243973
gacagauuccagcgacauu

SEQ ID NO: 1455437 - RNA, 19 nt, Artificial Sequence
  Description of Artificial Sequence: Synthetic oligonucleotide
  Antisense strand to SEQ ID NO: 1455436
aaugucgcuggaaucuguc

SEQ ID NO: 1455438 - RNA, 19 nt, Artificial Sequence
  Description of Artificial Sequence: Synthetic oligonucleotide
  Sense strand starting at position 777 of SEQ ID NO: 1243973
guggacaggucacugagau

SEQ ID NO: 1455439 - RNA, 19 nt, Artificial Sequence
  Description of Artificial Sequence: Synthetic oligonucleotide
  Antisense strand to SEQ ID NO: 1455438
aucucagugaccuguccac

SEQ ID NO: 1455440 - RNA, 19 nt, Artificial Sequence
  Description of Artificial Sequence: Synthetic oligonucleotide
  Sense strand starting at position 778 of SEQ ID NO: 1243973
uggacaggucacugagaug

SEQ ID NO: 1455441 - RNA, 19 nt, Artificial Sequence
  Description of Artificial Sequence: Synthetic oligonucleotide
  Antisense strand to SEQ ID NO: 1455440
caucucagugaccugucca

SEQ ID NO: 1455442 - RNA, 19 nt, Artificial Sequence
  Description of Artificial Sequence: Synthetic oligonucleotide
  Sense strand starting at position 806 of SEQ ID NO: 1243973
agauaacaaucagacuuga

SEQ ID NO: 1455443 - RNA, 19 nt, Artificial Sequence
  Description of Artificial Sequence: Synthetic oligonucleotide
  Antisense strand to SEQ ID NO: 1455442
ucaagucugauuguuaucu

SEQ ID NO: 1455444 - RNA, 19 nt, Artificial Sequence
  Description of Artificial Sequence: Synthetic oligonucleotide
  Sense strand starting at position 836 of SEQ ID NO: 1243973
augagcugauucuuaauag

SEQ ID NO: 1455445 - RNA, 19 nt, Artificial Sequence
  Description of Artificial Sequence: Synthetic oligonucleotide
  Antisense strand to SEQ ID NO: 1455444
cuauuaagaaucagcucau

SEQ ID NO: 1455446 - RNA, 19 nt, Artificial Sequence
  Description of Artificial Sequence: Synthetic oligonucleotide
  Sense strand starting at position 1338 of SEQ ID NO: 1243973
ccagguuaccucgagcuca

SEQ ID NO: 1455447 - RNA, 19 nt, Artificial Sequence
  Description of Artificial Sequence: Synthetic oligonucleotide
  Antisense strand to SEQ ID NO: 1455446
ugagcucgagguaaccugg

SEQ ID NO: 1455448 - RNA, 19 nt, Artificial Sequence
  Description of Artificial Sequence: Synthetic oligonucleotide
  Sense strand starting at position 1911 of SEQ ID NO: 1243973
gcauuaccguuuccacagu

SEQ ID NO: 1455449 - RNA, 19 nt, Artificial Sequence
  Description of Artificial Sequence: Synthetic oligonucleotide
  Antisense strand to SEQ ID NO: 1455448
acuguggaaacgguaaugc

SEQ ID NO: 1455450 - RNA, 19 nt, Artificial Sequence
  Description of Artificial Sequence: Synthetic oligonucleotide
  Sense strand starting at position 2176 of SEQ ID NO: 1243973
gcgcgauaucggcucggau

SEQ ID NO: 1455451 - RNA, 19 nt, Artificial Sequence
  Description of Artificial Sequence: Synthetic oligonucleotide
  Antisense strand to SEQ ID NO: 1455450
auccgagccgauaucgcgc

SEQ ID NO: 1455452 - RNA, 19 nt, Artificial Sequence
  Description of Artificial Sequence: Synthetic oligonucleotide
  Sense strand starting at position 2177 of SEQ ID NO: 1243973
cgcgauaucggcucggauc

SEQ ID NO: 1455453 - RNA, 19 nt, Artificial Sequence
  Description of Artificial Sequence: Synthetic oligonucleotide
  Antisense strand to SEQ ID NO: 1455452
gauccgagccgauaucgcg

SEQ ID NO: 1455454 - RNA, 19 nt, Artificial Sequence
  Description of Artificial Sequence: Synthetic oligonucleotide
  Sense strand starting at position 2562 of SEQ ID NO: 1243973
agggcaggugucguguauu

SEQ ID NO: 1455455 - RNA, 19 nt, Artificial Sequence
  Description of Artificial Sequence: Synthetic oligonucleotide
  Antisense strand to SEQ ID NO: 1455454
aauacacgacaccugcccu

SEQ ID NO: 1455456 - RNA, 19 nt, Artificial Sequence
  Description of Artificial Sequence: Synthetic oligonucleotide
  Sense strand starting at position 2565 of SEQ ID NO: 1243973
gcaggugucguguauuuaa

SEQ ID NO: 1455457 - RNA, 19 nt, Artificial Sequence
  Description of Artificial Sequence: Synthetic oligonucleotide
  Antisense strand to SEQ ID NO: 1455456
uuaaauacacgacaccugc

SEQ ID NO: 1455458 - RNA, 19 nt, Artificial Sequence
  Description of Artificial Sequence: Synthetic oligonucleotide
  Sense strand starting at position 2568 of SEQ ID NO: 1243973
ggugucguguauuuaaauu

SEQ ID NO: 1455459 - RNA, 19 nt, Artificial Sequence
  Description of Artificial Sequence: Synthetic oligonucleotide
  Antisense strand to SEQ ID NO: 1455458
aauuuaaauacacgacacc

SEQ ID NO: 1455460 - RNA, 19 nt, Artificial Sequence
  Description of Artificial Sequence: Synthetic oligonucleotide
  Sense strand starting at position 2636 of SEQ ID NO: 1243973
ggguuucaucugggucgga

SEQ ID NO: 1455461 - RNA, 19 nt, Artificial Sequence
  Description of Artificial Sequence: Synthetic oligonucleotide
  Antisense strand to SEQ ID NO: 1455460
uccgacccagaugaaaccc

SEQ ID NO: 1455462 - RNA, 19 nt, Artificial Sequence
  Description of Artificial Sequence: Synthetic oligonucleotide
  Sense strand starting at position 2652 of SEQ ID NO: 1243973
ggaccuugcugggcagaaa

SEQ ID NO: 1455463 - RNA, 19 nt, Artificial Sequence
  Description of Artificial Sequence: Synthetic oligonucleotide
  Antisense strand to SEQ ID NO: 1455462
uuucugcccagcaaggucc

SEQ ID NO: 1455464 - RNA, 19 nt, Artificial Sequence
  Description of Artificial Sequence: Synthetic oligonucleotide
  Sense strand starting at position 2721 of SEQ ID NO: 1243973
ccucguguuccucauugaa

SEQ ID NO: 1455465 - RNA, 19 nt, Artificial Sequence
  Description of Artificial Sequence: Synthetic oligonucleotide
  Antisense strand to SEQ ID NO: 1455464
uucaaugaggaacacgagg

SEQ ID NO: 1455466 - RNA, 19 nt, Artificial Sequence
  Description of Artificial Sequence: Synthetic oligonucleotide
  Sense strand starting at position 2723 of SEQ ID NO: 1243973
ucguguuccucauugaaug

SEQ ID NO: 1455467 - RNA, 19 nt, Artificial Sequence
  Description of Artificial Sequence: Synthetic oligonucleotide
  Antisense strand to SEQ ID NO: 1455466
cauucaaugaggaacacga

SEQ ID NO: 1455468 - RNA, 19 nt, Artificial Sequence
  Description of Artificial Sequence: Synthetic oligonucleotide
  Sense strand starting at position 2724 of SEQ ID NO: 1243973
cguguuccucauugaauga

SEQ ID NO: 1455469 - RNA, 19 nt, Artificial Sequence
  Description of Artificial Sequence: Synthetic oligonucleotide
  Antisense strand to SEQ ID NO: 1455468
ucauucaaugaggaacacg

SEQ ID NO: 1455470 - RNA, 19 nt, Artificial Sequence
  Description of Artificial Sequence: Synthetic oligonucleotide
  Sense strand starting at position 2737 of SEQ ID NO: 1243973
gaaugaguguugguucagu

SEQ ID NO: 1455471 - RNA, 19 nt, Artificial Sequence
  Description of Artificial Sequence: Synthetic oligonucleotide
  Antisense strand to SEQ ID NO: 1455470
acugaaccaacacucauuc

SEQ ID NO: 1455472 - RNA, 19 nt, Artificial Sequence
  Description of Artificial Sequence: Synthetic oligonucleotide
  Sense strand starting at position 2771 of SEQ ID NO: 1243973
gguguugugcgaaguacug

SEQ ID NO: 1455473 - RNA, 19 nt, Artificial Sequence
  Description of Artificial Sequence: Synthetic oligonucleotide
  Antisense strand to SEQ ID NO: 1455472
caguacuucgcacaacacc

SEQ ID NO: 1455474 - RNA, 19 nt, Artificial Sequence
  Description of Artificial Sequence: Synthetic oligonucleotide
  Sense strand starting at position 2781 of SEQ ID NO: 1243973
gaaguacugugagggagaa

SEQ ID NO: 1455475 - RNA, 19 nt, Artificial Sequence
  Description of Artificial Sequence: Synthetic oligonucleotide
  Antisense strand to SEQ ID NO: 1455474
uucucccucacaguacuuc

SEQ ID NO: 1455476 - RNA, 19 nt, Artificial Sequence
  Description of Artificial Sequence: Synthetic oligonucleotide
  Sense strand starting at position 2782 of SEQ ID NO: 1243973
aaguacugugagggagaau

SEQ ID NO: 1455477 - RNA, 19 nt, Artificial Sequence
  Description of Artificial Sequence: Synthetic oligonucleotide
  Antisense strand to SEQ ID NO: 1455476
auucucccucacaguacuu

SEQ ID NO: 1455478 - RNA, 19 nt, Artificial Sequence
  Description of Artificial Sequence: Synthetic oligonucleotide
  Sense strand starting at position 2846 of SEQ ID NO: 1243973
aggccugagaggcgauauu

SEQ ID NO: 1455479 - RNA, 19 nt, Artificial Sequence
  Description of Artificial Sequence: Synthetic oligonucleotide
  Antisense strand to SEQ ID NO: 1455478
aauaucgccucucaggccu

SEQ ID NO: 1455480 - RNA, 19 nt, Artificial Sequence
  Description of Artificial Sequence: Synthetic oligonucleotide
  Sense strand starting at position 2936 of SEQ ID NO: 1243973
ugggaaagagguuggugua

SEQ ID NO: 1455481 - RNA, 19 nt, Artificial Sequence
  Description of Artificial Sequence: Synthetic oligonucleotide
  Antisense strand to SEQ ID NO: 1455480
uacaccaaccucuuuccca

SEQ ID NO: 1455482 - RNA, 19 nt, Artificial Sequence
  Description of Artificial Sequence: Synthetic oligonucleotide
  Sense strand starting at position 2937 of SEQ ID NO: 1243973
gggaaagagguugguguau

SEQ ID NO: 1455483 - RNA, 19 nt, Artificial Sequence
  Description of Artificial Sequence: Synthetic oligonucleotide
  Antisense strand to SEQ ID NO: 1455482
auacaccaaccucuuuccc

SEQ ID NO: 1455484 - RNA, 19 nt, Artificial Sequence
  Description of Artificial Sequence: Synthetic oligonucleotide
  Sense strand starting at position 2939 of SEQ ID NO: 1243973
gaaagagguugguguauuu

SEQ ID NO: 1455485 - RNA, 19 nt, Artificial Sequence
  Description of Artificial Sequence: Synthetic oligonucleotide
  Antisense strand to SEQ ID NO: 1455484
aaauacaccaaccucuuuc

SEQ ID NO: 1455486 - RNA, 19 nt, Artificial Sequence
  Description of Artificial Sequence: Synthetic oligonucleotide
  Sense strand starting at position 3012 of SEQ ID NO: 1243973
uuauauucuccugggagga

SEQ ID NO: 1455487 - RNA, 19 nt, Artificial Sequence
  Description of Artificial Sequence: Synthetic oligonucleotide
  Antisense strand to SEQ ID NO: 1455486
uccucccaggagaauauaa

SEQ ID NO: 1455488 - RNA, 19 nt, Artificial Sequence
  Description of Artificial Sequence: Synthetic oligonucleotide
  Sense strand starting at position 3013 of SEQ ID NO: 1243973
uauauucuccugggaggau

SEQ ID NO: 1455489 - RNA, 19 nt, Artificial Sequence
  Description of Artificial Sequence: Synthetic oligonucleotide
  Antisense strand to SEQ ID NO: 1455488
auccucccaggagaauaua

SEQ ID NO: 1455490 - RNA, 19 nt, Artificial Sequence
  Description of Artificial Sequence: Synthetic oligonucleotide
  Sense strand starting at position 3014 of SEQ ID NO: 1243973
auauucuccugggaggauu

SEQ ID NO: 1455491 - RNA, 19 nt, Artificial Sequence
  Description of Artificial Sequence: Synthetic oligonucleotide
  Antisense strand to SEQ ID NO: 1455490
aauccucccaggagaauau

SEQ ID NO: 1455492 - RNA, 19 nt, Artificial Sequence
  Description of Artificial Sequence: Synthetic oligonucleotide
  Sense strand starting at position 3026 of SEQ ID NO: 1243973
gaggauucagaagggugua

SEQ ID NO: 1455493 - RNA, 19 nt, Artificial Sequence
  Description of Artificial Sequence: Synthetic oligonucleotide
  Antisense strand to SEQ ID NO: 1455492
uacacccuucugaauccuc

SEQ ID NO: 1455494 - RNA, 19 nt, Artificial Sequence
  Description of Artificial Sequence: Synthetic oligonucleotide
  Sense strand starting at position 3029 of SEQ ID NO: 1243973
gauucagaaggguguaugu

SEQ ID NO: 1455495 - RNA, 19 nt, Artificial Sequence
  Description of Artificial Sequence: Synthetic oligonucleotide
  Antisense strand to SEQ ID NO: 1455494
acauacacccuucugaauc

SEQ ID NO: 1455496 - RNA, 19 nt, Artificial Sequence
  Description of Artificial Sequence: Synthetic oligonucleotide
  Sense strand starting at position 3276 of SEQ ID NO: 1243973
gcuugcuguccgggaagau

SEQ ID NO: 1455497 - RNA, 19 nt, Artificial Sequence
  Description of Artificial Sequence: Synthetic oligonucleotide
  Antisense strand to SEQ ID NO: 1455496
aucuucccggacagcaagc

SEQ ID NO: 1455498 - RNA, 19 nt, Artificial Sequence
  Description of Artificial Sequence: Synthetic oligonucleotide
  Sense strand starting at position 3279 of SEQ ID NO: 1243973
ugcuguccgggaagauguu

SEQ ID NO: 1455499 - RNA, 19 nt, Artificial Sequence
  Description of Artificial Sequence: Synthetic oligonucleotide
  Antisense strand to SEQ ID NO: 1455498
aacaucuucccggacagca

SEQ ID NO: 1455500 - RNA, 19 nt, Artificial Sequence
  Description of Artificial Sequence: Synthetic oligonucleotide
  Sense strand starting at position 3295 of SEQ ID NO: 1243973
guuaacguguucccaggau

SEQ ID NO: 1455501 - RNA, 19 nt, Artificial Sequence
  Description of Artificial Sequence: Synthetic oligonucleotide
  Antisense strand to SEQ ID NO: 1455500
auccugggaacacguuaac

SEQ ID NO: 1455502 - RNA, 19 nt, Artificial Sequence
  Description of Artificial Sequence: Synthetic oligonucleotide
  Sense strand starting at position 3316 of SEQ ID NO: 1243973
ggugguuccggcagaaugu

SEQ ID NO: 1455503 - RNA, 19 nt, Artificial Sequence
  Description of Artificial Sequence: Synthetic oligonucleotide
  Antisense strand to SEQ ID NO: 1455502
acauucugccggaaccacc

SEQ ID NO: 1455504 - RNA, 19 nt, Artificial Sequence
  Description of Artificial Sequence: Synthetic oligonucleotide
  Sense strand starting at position 3352 of SEQ ID NO: 1243973
gucccagcagaauauguua

SEQ ID NO: 1455505 - RNA, 19 nt, Artificial Sequence
  Description of Artificial Sequence: Synthetic oligonucleotide
  Antisense strand to SEQ ID NO: 1455504
uaacauauucugcugggac

SEQ ID NO: 1455506 - RNA, 19 nt, Artificial Sequence
  Description of Artificial Sequence: Synthetic oligonucleotide
  Sense strand starting at position 3355 of SEQ ID NO: 1243973
ccagcagaauauguuaaga

SEQ ID NO: 1455507 - RNA, 19 nt, Artificial Sequence
  Description of Artificial Sequence: Synthetic oligonucleotide
  Antisense strand to SEQ ID NO: 1455506
ucuuaacauauucugcugg

SEQ ID NO: 1455508 - RNA, 19 nt, Artificial Sequence
  Description of Artificial Sequence: Synthetic oligonucleotide
  Sense strand starting at position 3460 of SEQ ID NO: 1243973
cgcaguuuggacuaacaaa

SEQ ID NO: 1455509 - RNA, 19 nt, Artificial Sequence
  Description of Artificial Sequence: Synthetic oligonucleotide
  Antisense strand to SEQ ID NO: 1455508
uuuguuaguccaaacugcg

SEQ ID NO: 1455510 - RNA, 19 nt, Artificial Sequence
  Description of Artificial Sequence: Synthetic oligonucleotide
  Sense strand starting at position 211 of SEQ ID NO: 1243974
agaccaggcuuccucuaua

SEQ ID NO: 1455511 - RNA, 19 nt, Artificial Sequence
  Description of Artificial Sequence: Synthetic oligonucleotide
  Antisense strand to SEQ ID NO: 1455510
uauagaggaagccuggucu

SEQ ID NO: 1455512 - RNA, 19 nt, Artificial Sequence
  Description of Artificial Sequence: Synthetic oligonucleotide
  Sense strand starting at position 268 of SEQ ID NO: 1243974
auguauguuacagggagaa

SEQ ID NO: 1455513 - RNA, 19 nt, Artificial Sequence
  Description of Artificial Sequence: Synthetic oligonucleotide
  Antisense strand to SEQ ID NO: 1455512
uucucccuguaacauacau

SEQ ID NO: 1455514 - RNA, 19 nt, Artificial Sequence
  Description of Artificial Sequence: Synthetic oligonucleotide
  Sense strand starting at position 282 of SEQ ID NO: 1243974
gagaaagaguuccuucguu

SEQ ID NO: 1455515 - RNA, 19 nt, Artificial Sequence
  Description of Artificial Sequence: Synthetic oligonucleotide
  Antisense strand to SEQ ID NO: 1455514
aacgaaggaacucuuucuc

SEQ ID NO: 1455516 - RNA, 19 nt, Artificial Sequence
  Description of Artificial Sequence: Synthetic oligonucleotide
  Sense strand starting at position 365 of SEQ ID NO: 1243974
uugauuaauugagacagag

SEQ ID NO: 1455517 - RNA, 19 nt, Artificial Sequence
  Description of Artificial Sequence: Synthetic oligonucleotide
  Antisense strand to SEQ ID NO: 1455516
cucugucucaauuaaucaa

SEQ ID NO: 1455518 - RNA, 19 nt, Artificial Sequence
  Description of Artificial Sequence: Synthetic oligonucleotide
  Sense strand starting at position 724 of SEQ ID NO: 1243974
cguugagauucccuaaauc

SEQ ID NO: 1455519 - RNA, 19 nt, Artificial Sequence
  Description of Artificial Sequence: Synthetic oligonucleotide
  Antisense strand to SEQ ID NO: 1455518
gauuuagggaaucucaacg

SEQ ID NO: 1455520 - RNA, 19 nt, Artificial Sequence
  Description of Artificial Sequence: Synthetic oligonucleotide
  Sense strand starting at position 818 of SEQ ID NO: 1243974
ugcaaagaguccucuguag

SEQ ID NO: 1455521 - RNA, 19 nt, Artificial Sequence
  Description of Artificial Sequence: Synthetic oligonucleotide
  Antisense strand to SEQ ID NO: 1455520
cuacagaggacucuuugca

SEQ ID NO: 1455522 - RNA, 19 nt, Artificial Sequence
  Description of Artificial Sequence: Synthetic oligonucleotide
  Sense strand starting at position 820 of SEQ ID NO: 1243974
caaagaguccucuguagca

SEQ ID NO: 1455523 - RNA, 19 nt, Artificial Sequence
  Description of Artificial Sequence: Synthetic oligonucleotide
  Antisense strand to SEQ ID NO: 1455522
ugcuacagaggacucuuug

SEQ ID NO: 1455524 - RNA, 19 nt, Artificial Sequence
  Description of Artificial Sequence: Synthetic oligonucleotide
  Sense strand starting at position 822 of SEQ ID NO: 1243974
aagaguccucuguagcauc

SEQ ID NO: 1455525 - RNA, 19 nt, Artificial Sequence
  Description of Artificial Sequence: Synthetic oligonucleotide
  Antisense strand to SEQ ID NO: 1455524
gaugcuacagaggacucuu

SEQ ID NO: 1455526 - RNA, 19 nt, Artificial Sequence
  Description of Artificial Sequence: Synthetic oligonucleotide
  Sense strand starting at position 864 of SEQ ID NO: 1243974
gggccuccagaaugacauu

SEQ ID NO: 1455527 - RNA, 19 nt, Artificial Sequence
  Description of Artificial Sequence: Synthetic oligonucleotide
  Antisense strand to SEQ ID NO: 1455526
aaugucauucuggaggccc

SEQ ID NO: 1455528 - RNA, 19 nt, Artificial Sequence
  Description of Artificial Sequence: Synthetic oligonucleotide
  Sense strand starting at position 977 of SEQ ID NO: 1243974
cguugauguccuuauuaua

SEQ ID NO: 1455529 - RNA, 19 nt, Artificial Sequence
  Description of Artificial Sequence: Synthetic oligonucleotide
  Antisense strand to SEQ ID NO: 1455528
uauaauaaggacaucaacg

SEQ ID NO: 1455530 - RNA, 19 nt, Artificial Sequence
  Description of Artificial Sequence: Synthetic oligonucleotide
  Sense strand starting at position 1153 of SEQ ID NO: 1243974
gucugaaaugcucagcagu

SEQ ID NO: 1455531 - RNA, 19 nt, Artificial Sequence
  Description of Artificial Sequence: Synthetic oligonucleotide
  Antisense strand to SEQ ID NO: 1455530
acugcugagcauuucagac

SEQ ID NO: 1455532 - RNA, 19 nt, Artificial Sequence
  Description of Artificial Sequence: Synthetic oligonucleotide
  Sense strand starting at position 1176 of SEQ ID NO: 1243974
cugcuuuggguuuagaaac

SEQ ID NO: 1455533 - RNA, 19 nt, Artificial Sequence
  Description of Artificial Sequence: Synthetic oligonucleotide
  Antisense strand to SEQ ID NO: 1455532
guuucuaaacccaaagcag

SEQ ID NO: 1455534 - RNA, 19 nt, Artificial Sequence
  Description of Artificial Sequence: Synthetic oligonucleotide
  Sense strand starting at position 1266 of SEQ ID NO: 1243974
gaguuuaccgggugggcaa

SEQ ID NO: 1455535 - RNA, 19 nt, Artificial Sequence
  Description of Artificial Sequence: Synthetic oligonucleotide
  Antisense strand to SEQ ID NO: 1455534
uugcccacccgguaaacuc

SEQ ID NO: 1455536 - RNA, 19 nt, Artificial Sequence
  Description of Artificial Sequence: Synthetic oligonucleotide
  Sense strand starting at position 1507 of SEQ ID NO: 1243974
ccgggaucuuccgcauaga

SEQ ID NO: 1455537 - RNA, 19 nt, Artificial Sequence
  Description of Artificial Sequence: Synthetic oligonucleotide
  Antisense strand to SEQ ID NO: 1455536
ucuaugcggaagaucccgg

SEQ ID NO: 1455538 - RNA, 19 nt, Artificial Sequence
  Description of Artificial Sequence: Synthetic oligonucleotide
  Sense strand starting at position 1508 of SEQ ID NO: 1243974
cgggaucuuccgcauagac

SEQ ID NO: 1455539 - RNA, 19 nt, Artificial Sequence
  Description of Artificial Sequence: Synthetic oligonucleotide
  Antisense strand to SEQ ID NO: 1455538
gucuaugcggaagaucccg

SEQ ID NO: 1455540 - RNA, 19 nt, Artificial Sequence
  Description of Artificial Sequence: Synthetic oligonucleotide
  Sense strand starting at position 1510 of SEQ ID NO: 1243974
ggaucuuccgcauagacca

SEQ ID NO: 1455541 - RNA, 19 nt, Artificial Sequence
  Description of Artificial Sequence: Synthetic oligonucleotide
  Antisense strand to SEQ ID NO: 1455540
uggucuaugcggaagaucc

SEQ ID NO: 1455542 - RNA, 19 nt, Artificial Sequence
  Description of Artificial Sequence: Synthetic oligonucleotide
  Sense strand starting at position 1598 of SEQ ID NO: 1243974
gcacccguauuucugagau

SEQ ID NO: 1455543 - RNA, 19 nt, Artificial Sequence
  Description of Artificial Sequence: Synthetic oligonucleotide
  Antisense strand to SEQ ID NO: 1455542
aucucagaaauacgggugc

SEQ ID NO: 1455544 - RNA, 19 nt, Artificial Sequence
  Description of Artificial Sequence: Synthetic oligonucleotide
  Sense strand starting at position 1600 of SEQ ID NO: 1243974
acccguauuucugagauag

SEQ ID NO: 1455545 - RNA, 19 nt, Artificial Sequence
  Description of Artificial Sequence: Synthetic oligonucleotide
  Antisense strand to SEQ ID NO: 1455544
cuaucucagaaauacgggu

SEQ ID NO: 1455546 - RNA, 19 nt, Artificial Sequence
  Description of Artificial Sequence: Synthetic oligonucleotide
  Sense strand starting at position 2246 of SEQ ID NO: 1243974
cccaucauuggcuaugagu

SEQ ID NO: 1455547 - RNA, 19 nt, Artificial Sequence
  Description of Artificial Sequence: Synthetic oligonucleotide
  Antisense strand to SEQ ID NO: 1455546
acucauagccaaugauggg

SEQ ID NO: 1455548 - RNA, 19 nt, Artificial Sequence
  Description of Artificial Sequence: Synthetic oligonucleotide
  Sense strand starting at position 2257 of SEQ ID NO: 1243974
cuaugaguccagggugcua

SEQ ID NO: 1455549 - RNA, 19 nt, Artificial Sequence
  Description of Artificial Sequence: Synthetic oligonucleotide
  Antisense strand to SEQ ID NO: 1455548
uagcacccuggacucauag

SEQ ID NO: 1455550 - RNA, 19 nt, Artificial Sequence
  Description of Artificial Sequence: Synthetic oligonucleotide
  Sense strand starting at position 2306 of SEQ ID NO: 1243974
aucuuagaguucucucuuu

SEQ ID NO: 1455551 - RNA, 19 nt, Artificial Sequence
  Description of Artificial Sequence: Synthetic oligonucleotide
  Antisense strand to SEQ ID NO: 1455550
aaagagagaacucuaagau

SEQ ID NO: 1455552 - RNA, 19 nt, Artificial Sequence
  Description of Artificial Sequence: Synthetic oligonucleotide
  Sense strand starting at position 2346 of SEQ ID NO: 1243974
caagcaaaccgagguuuau

SEQ ID NO: 1455553 - RNA, 19 nt, Artificial Sequence
  Description of Artificial Sequence: Synthetic oligonucleotide
  Antisense strand to SEQ ID NO: 1455552
auaaaccucgguuugcuug

SEQ ID NO: 1455554 - RNA, 19 nt, Artificial Sequence
  Description of Artificial Sequence: Synthetic oligonucleotide
  Sense strand starting at position 2352 of SEQ ID NO: 1243974
aaccgagguuuaucccaga

SEQ ID NO: 1455555 - RNA, 19 nt, Artificial Sequence
  Description of Artificial Sequence: Synthetic oligonucleotide
  Antisense strand to SEQ ID NO: 1455554
ucugggauaaaccucgguu

SEQ ID NO: 1455556 - RNA, 19 nt, Artificial Sequence
  Description of Artificial Sequence: Synthetic oligonucleotide
  Sense strand starting at position 2765 of SEQ ID NO: 1243974
gaugaaagguuaguagguu

SEQ ID NO: 1455557 - RNA, 19 nt, Artificial Sequence
  Description of Artificial Sequence: Synthetic oligonucleotide
  Antisense strand to SEQ ID NO: 1455556
aaccuacuaaccuuucauc

SEQ ID NO: 1455558 - RNA, 19 nt, Artificial Sequence
  Description of Artificial Sequence: Synthetic oligonucleotide
  Sense strand starting at position 2812 of SEQ ID NO: 1243974
cuauguaggaugcauaguu

SEQ ID NO: 1455559 - RNA, 19 nt, Artificial Sequence
  Description of Artificial Sequence: Synthetic oligonucleotide
  Antisense strand to SEQ ID NO: 1455558
aacuaugcauccuacauag

SEQ ID NO: 1455560 - RNA, 19 nt, Artificial Sequence
  Description of Artificial Sequence: Synthetic oligonucleotide
  Sense strand starting at position 2919 of SEQ ID NO: 1243974
guggcaccucugcaagagu

SEQ ID NO: 1455561 - RNA, 19 nt, Artificial Sequence
  Description of Artificial Sequence: Synthetic oligonucleotide
  Antisense strand to SEQ ID NO: 1455560
acucuugcagaggugccac

SEQ ID NO: 1455562 - RNA, 19 nt, Artificial Sequence
  Description of Artificial Sequence: Synthetic oligonucleotide
  Sense strand starting at position 3132 of SEQ ID NO: 1243974
ccuuuauuauuguugcaga

SEQ ID NO: 1455563 - RNA, 19 nt, Artificial Sequence
  Description of Artificial Sequence: Synthetic oligonucleotide
  Antisense strand to SEQ ID NO: 1455562
ucugcaacaauaauaaagg

SEQ ID NO: 1455564 - RNA, 19 nt, Artificial Sequence
  Description of Artificial Sequence: Synthetic oligonucleotide
  Sense strand starting at position 3142 of SEQ ID NO: 1243974
uguugcagacuuugaacuu

SEQ ID NO: 1455565 - RNA, 19 nt, Artificial Sequence
  Description of Artificial Sequence: Synthetic oligonucleotide
  Antisense strand to SEQ ID NO: 1455564
aaguucaaagucugcaaca

SEQ ID NO: 1455566 - RNA, 19 nt, Artificial Sequence
  Description of Artificial Sequence: Synthetic oligonucleotide
  Sense strand starting at position 3201 of SEQ ID NO: 1243974
uaugacuaagguuguugaa

SEQ ID NO: 1455567 - RNA, 19 nt, Artificial Sequence
  Description of Artificial Sequence: Synthetic oligonucleotide
  Antisense strand to SEQ ID NO: 1455566
uucaacaaccuuagucaua

SEQ ID NO: 1455568 - RNA, 19 nt, Artificial Sequence
  Description of Artificial Sequence: Synthetic oligonucleotide
  Sense strand starting at position 3203 of SEQ ID NO: 1243974
ugacuaagguuguugaaua

SEQ ID NO: 1455569 - RNA, 19 nt, Artificial Sequence
  Description of Artificial Sequence: Synthetic oligonucleotide
  Antisense strand to SEQ ID NO: 1455568
uauucaacaaccuuaguca

SEQ ID NO: 1455570 - RNA, 19 nt, Artificial Sequence
  Description of Artificial Sequence: Synthetic oligonucleotide
  Sense strand starting at position 3494 of SEQ ID NO: 1243974
ucauccuacccagguuaga

SEQ ID NO: 1455571 - RNA, 19 nt, Artificial Sequence
  Description of Artificial Sequence: Synthetic oligonucleotide
  Antisense strand to SEQ ID NO: 1455570
ucuaaccuggguaggauga

SEQ ID NO: 1455572 - RNA, 19 nt, Artificial Sequence
  Description of Artificial Sequence: Synthetic oligonucleotide
  Sense strand starting at position 3546 of SEQ ID NO: 1243974
ggguaaugcucagucucug

SEQ ID NO: 1455573 - RNA, 19 nt, Artificial Sequence
  Description of Artificial Sequence: Synthetic oligonucleotide
  Antisense strand to SEQ ID NO: 1455572
cagagacugagcauuaccc

SEQ ID NO: 1455574 - RNA, 19 nt, Artificial Sequence
  Description of Artificial Sequence: Synthetic oligonucleotide
  Sense strand starting at position 3551 of SEQ ID NO: 1243974
augcucagucucugggaga

SEQ ID NO: 1455575 - RNA, 19 nt, Artificial Sequence
  Description of Artificial Sequence: Synthetic oligonucleotide
  Antisense strand to SEQ ID NO: 1455574
ucucccagagacugagcau

SEQ ID NO: 1455576 - RNA, 19 nt, Artificial Sequence
  Description of Artificial Sequence: Synthetic oligonucleotide
  Sense strand starting at position 3609 of SEQ ID NO: 1243974
agaguaggcaccuggucua

SEQ ID NO: 1455577 - RNA, 19 nt, Artificial Sequence
  Description of Artificial Sequence: Synthetic oligonucleotide
  Antisense strand to SEQ ID NO: 1455576
uagaccaggugccuacucu

SEQ ID NO: 1455578 - RNA, 19 nt, Artificial Sequence
  Description of Artificial Sequence: Synthetic oligonucleotide
  Sense strand starting at position 3612 of SEQ ID NO: 1243974
guaggcaccuggucuagaa

SEQ ID NO: 1455579 - RNA, 19 nt, Artificial Sequence
  Description of Artificial Sequence: Synthetic oligonucleotide
  Antisense strand to SEQ ID NO: 1455578
uucuagaccaggugccuac

SEQ ID NO: 1455580 - RNA, 19 nt, Artificial Sequence
  Description of Artificial Sequence: Synthetic oligonucleotide
  Sense strand starting at position 3888 of SEQ ID NO: 1243974
auaaaugaugccugggaca

SEQ ID NO: 1455581 - RNA, 19 nt, Artificial Sequence
  Description of Artificial Sequence: Synthetic oligonucleotide
  Antisense strand to SEQ ID NO: 1455580
ugucccaggcaucauuuau

SEQ ID NO: 1455582 - RNA, 19 nt, Artificial Sequence
  Description of Artificial Sequence: Synthetic oligonucleotide
  Sense strand starting at position 3890 of SEQ ID NO: 1243974
aaaugaugccugggacaua

SEQ ID NO: 1455583 - RNA, 19 nt, Artificial Sequence
  Description of Artificial Sequence: Synthetic oligonucleotide
  Antisense strand to SEQ ID NO: 1455582
uaugucccaggcaucauuu

SEQ ID NO: 1455584 - RNA, 19 nt, Artificial Sequence
  Description of Artificial Sequence: Synthetic oligonucleotide
  Sense strand starting at position 3963 of SEQ ID NO: 1243974
uaggaugcugucuaugcau

SEQ ID NO: 1455585 - RNA, 19 nt, Artificial Sequence
  Description of Artificial Sequence: Synthetic oligonucleotide
  Antisense strand to SEQ ID NO: 1455584
augcauagacagcauccua

SEQ ID NO: 1455586 - RNA, 19 nt, Artificial Sequence
  Description of Artificial Sequence: Synthetic oligonucleotide
  Sense strand starting at position 3965 of SEQ ID NO: 1243974
ggaugcugucuaugcauuu

SEQ ID NO: 1455587 - RNA, 19 nt, Artificial Sequence
  Description of Artificial Sequence: Synthetic oligonucleotide
  Antisense strand to SEQ ID NO: 1455586
aaaugcauagacagcaucc

SEQ ID NO: 1455588 - RNA, 19 nt, Artificial Sequence
  Description of Artificial Sequence: Synthetic oligonucleotide
  Sense strand starting at position 3972 of SEQ ID NO: 1243974
gucuaugcauuugcuaaau

SEQ ID NO: 1455589 - RNA, 19 nt, Artificial Sequence
  Description of Artificial Sequence: Synthetic oligonucleotide
  Antisense strand to SEQ ID NO: 1455588
auuuagcaaaugcauagac

SEQ ID NO: 1455590 - RNA, 19 nt, Artificial Sequence
  Description of Artificial Sequence: Synthetic oligonucleotide
  Sense strand starting at position 122 of SEQ ID NO: 1243975
guuccaguccucuacccau

SEQ ID NO: 1455591 - RNA, 19 nt, Artificial Sequence
  Description of Artificial Sequence: Synthetic oligonucleotide
  Antisense strand to SEQ ID NO: 1455590
auggguagaggacuggaac

SEQ ID NO: 1455592 - RNA, 19 nt, Artificial Sequence
  Description of Artificial Sequence: Synthetic oligonucleotide
  Sense strand starting at position 310 of SEQ ID NO: 1243975
auuggaagaucacagggau

SEQ ID NO: 1455593 - RNA, 19 nt, Artificial Sequence
  Description of Artificial Sequence: Synthetic oligonucleotide
  Antisense strand to SEQ ID NO: 1455592
aucccugugaucuuccaau

SEQ ID NO: 1455594 - RNA, 19 nt, Artificial Sequence
  Description of Artificial Sequence: Synthetic oligonucleotide
  Sense strand starting at position 1028 of SEQ ID NO: 1243975
cugguuccacguuggaaga

SEQ ID NO: 1455595 - RNA, 19 nt, Artificial Sequence
  Description of Artificial Sequence: Synthetic oligonucleotide
  Antisense strand to SEQ ID NO: 1455594
ucuuccaacguggaaccag

SEQ ID NO: 1455596 - RNA, 19 nt, Artificial Sequence
  Description of Artificial Sequence: Synthetic oligonucleotide
  Sense strand starting at position 1156 of SEQ ID NO: 1243975
uccaaugggccuuguguua

SEQ ID NO: 1455597 - RNA, 19 nt, Artificial Sequence
  Description of Artificial Sequence: Synthetic oligonucleotide
  Antisense strand to SEQ ID NO: 1455596
uaacacaaggcccauugga

SEQ ID NO: 1455598 - RNA, 19 nt, Artificial Sequence
  Description of Artificial Sequence: Synthetic oligonucleotide
  Sense strand starting at position 1273 of SEQ ID NO: 1243975
ggaggugugagugagugua

SEQ ID NO: 1455599 - RNA, 19 nt, Artificial Sequence
  Description of Artificial Sequence: Synthetic oligonucleotide
  Antisense strand to SEQ ID NO: 1455598
uacacucacucacaccucc

SEQ ID NO: 1455600 - RNA, 19 nt, Artificial Sequence
  Description of Artificial Sequence: Synthetic oligonucleotide
  Sense strand starting at position 1289 of SEQ ID NO: 1243975
guagacaguugaucucuua

SEQ ID NO: 1455601 - RNA, 19 nt, Artificial Sequence
  Description of Artificial Sequence: Synthetic oligonucleotide
  Antisense strand to SEQ ID NO: 1455600
uaagagaucaacugucuac

SEQ ID NO: 1455602 - RNA, 19 nt, Artificial Sequence
  Description of Artificial Sequence: Synthetic oligonucleotide
  Sense strand starting at position 1481 of SEQ ID NO: 1243975
aucuauagcuccugggaug

SEQ ID NO: 1455603 - RNA, 19 nt, Artificial Sequence
  Description of Artificial Sequence: Synthetic oligonucleotide
  Antisense strand to SEQ ID NO: 1455602
caucccaggagcuauagau

SEQ ID NO: 1455604 - RNA, 19 nt, Artificial Sequence
  Description of Artificial Sequence: Synthetic oligonucleotide
  Sense strand starting at position 1734 of SEQ ID NO: 1243975
cgguguucccagaguuugu

SEQ ID NO: 1455605 - RNA, 19 nt, Artificial Sequence
  Description of Artificial Sequence: Synthetic oligonucleotide
  Antisense strand to SEQ ID NO: 1455604
acaaacucugggaacaccg

SEQ ID NO: 1455606 - RNA, 19 nt, Artificial Sequence
  Description of Artificial Sequence: Synthetic oligonucleotide
  Sense strand starting at position 1741 of SEQ ID NO: 1243975
cccagaguuugucccaucu

SEQ ID NO: 1455607 - RNA, 19 nt, Artificial Sequence
  Description of Artificial Sequence: Synthetic oligonucleotide
  Antisense strand to SEQ ID NO: 1455606
agaugggacaaacucuggg

SEQ ID NO: 1455608 - RNA, 19 nt, Artificial Sequence
  Description of Artificial Sequence: Synthetic oligonucleotide
  Sense strand starting at position 1993 of SEQ ID NO: 1243975
cgcauuuaucccugagcca

SEQ ID NO: 1455609 - RNA, 19 nt, Artificial Sequence
  Description of Artificial Sequence: Synthetic oligonucleotide
  Antisense strand to SEQ ID NO: 1455608
uggcucagggauaaaugcg

SEQ ID NO: 1455610 - RNA, 19 nt, Artificial Sequence
  Description of Artificial Sequence: Synthetic oligonucleotide
  Sense strand starting at position 2162 of SEQ ID NO: 1243975
ucugucucccaauaacagu

SEQ ID NO: 1455611 - RNA, 19 nt, Artificial Sequence
  Description of Artificial Sequence: Synthetic oligonucleotide
  Antisense strand to SEQ ID NO: 1455610
acuguuauugggagacaga

SEQ ID NO: 1455612 - RNA, 19 nt, Artificial Sequence
  Description of Artificial Sequence: Synthetic oligonucleotide
  Sense strand starting at position 2268 of SEQ ID NO: 1243975
ugcaaacgucaagaggaau

SEQ ID NO: 1455613 - RNA, 19 nt, Artificial Sequence
  Description of Artificial Sequence: Synthetic oligonucleotide
  Antisense strand to SEQ ID NO: 1455612
auuccucuugacguuugca

SEQ ID NO: 1455614 - RNA, 19 nt, Artificial Sequence
  Description of Artificial Sequence: Synthetic oligonucleotide
  Sense strand starting at position 2361 of SEQ ID NO: 1243975
aagauugacguccacacau

SEQ ID NO: 1455615 - RNA, 19 nt, Artificial Sequence
  Description of Artificial Sequence: Synthetic oligonucleotide
  Antisense strand to SEQ ID NO: 1455614
auguguggacgucaaucuu

SEQ ID NO: 1455616 - RNA, 19 nt, Artificial Sequence
  Description of Artificial Sequence: Synthetic oligonucleotide
  Sense strand starting at position 2460 of SEQ ID NO: 1243975
cucuuaggguccucauaac

SEQ ID NO: 1455617 - RNA, 19 nt, Artificial Sequence
  Description of Artificial Sequence: Synthetic oligonucleotide
  Antisense strand to SEQ ID NO: 1455616
guuaugaggacccuaagag

SEQ ID NO: 1455618 - RNA, 19 nt, Artificial Sequence
  Description of Artificial Sequence: Synthetic oligonucleotide
  Sense strand starting at position 2589 of SEQ ID NO: 1243975
gacugauaacgcugggaca

SEQ ID NO: 1455619 - RNA, 19 nt, Artificial Sequence
  Description of Artificial Sequence: Synthetic oligonucleotide
  Antisense strand to SEQ ID NO: 1455618
ugucccagcguuaucaguc

SEQ ID NO: 1455620 - RNA, 19 nt, Artificial Sequence
  Description of Artificial Sequence: Synthetic oligonucleotide
  Sense strand starting at position 2817 of SEQ ID NO: 1243975
cucugcccucgguagagau

SEQ ID NO: 1455621 - RNA, 19 nt, Artificial Sequence
  Description of Artificial Sequence: Synthetic oligonucleotide
  Antisense strand to SEQ ID NO: 1455620
aucucuaccgagggcagag

SEQ ID NO: 1455622 - RNA, 19 nt, Artificial Sequence
  Description of Artificial Sequence: Synthetic oligonucleotide
  Sense strand starting at position 3499 of SEQ ID NO: 1243975
cacaucugacugcgaagaa

SEQ ID NO: 1455623 - RNA, 19 nt, Artificial Sequence
  Description of Artificial Sequence: Synthetic oligonucleotide
  Antisense strand to SEQ ID NO: 1455622
uucuucgcagucagaugug

SEQ ID NO: 1455624 - RNA, 19 nt, Artificial Sequence
  Description of Artificial Sequence: Synthetic oligonucleotide
  Sense strand starting at position 3500 of SEQ ID NO: 1243975
acaucugacugcgaagaaa

SEQ ID NO: 1455625 - RNA, 19 nt, Artificial Sequence
  Description of Artificial Sequence: Synthetic oligonucleotide
  Antisense strand to SEQ ID NO: 1455624
uuucuucgcagucagaugu

SEQ ID NO: 1455626 - RNA, 19 nt, Artificial Sequence
  Description of Artificial Sequence: Synthetic oligonucleotide
  Sense strand starting at position 3569 of SEQ ID NO: 1243975
uugcaacuugaguauucuu

SEQ ID NO: 1455627 - RNA, 19 nt, Artificial Sequence
  Description of Artificial Sequence: Synthetic oligonucleotide
  Antisense strand to SEQ ID NO: 1455626
aagaauacucaaguugcaa

SEQ ID NO: 1455628 - RNA, 19 nt, Artificial Sequence
  Description of Artificial Sequence: Synthetic oligonucleotide
  Sense strand starting at position 3578 of SEQ ID NO: 1243975
gaguauucuuccgccucga

SEQ ID NO: 1455629 - RNA, 19 nt, Artificial Sequence
  Description of Artificial Sequence: Synthetic oligonucleotide
  Antisense strand to SEQ ID NO: 1455628
ucgaggcggaagaauacuc

SEQ ID NO: 1455630 - RNA, 19 nt, Artificial Sequence
  Description of Artificial Sequence: Synthetic oligonucleotide
  Sense strand starting at position 3671 of SEQ ID NO: 1243975
gccggugauccagacauug

SEQ ID NO: 1455631 - RNA, 19 nt, Artificial Sequence
  Description of Artificial Sequence: Synthetic oligonucleotide
  Antisense strand to SEQ ID NO: 1455630
caaugucuggaucaccggc

SEQ ID NO: 1455632 - RNA, 19 nt, Artificial Sequence
  Description of Artificial Sequence: Synthetic oligonucleotide
  Sense strand starting at position 3772 of SEQ ID NO: 1243975
gagaaugggcccuggugaa

SEQ ID NO: 1455633 - RNA, 19 nt, Artificial Sequence
  Description of Artificial Sequence: Synthetic oligonucleotide
  Antisense strand to SEQ ID NO: 1455632
uucaccagggcccauucuc

SEQ ID NO: 1455634 - RNA, 19 nt, Artificial Sequence
  Description of Artificial Sequence: Synthetic oligonucleotide
  Sense strand starting at position 3863 of SEQ ID NO: 1243975
acuagaggauuuggccaaa

SEQ ID NO: 1455635 - RNA, 19 nt, Artificial Sequence
  Description of Artificial Sequence: Synthetic oligonucleotide
  Antisense strand to SEQ ID NO: 1455634
uuuggccaaauccucuagu

SEQ ID NO: 1455636 - RNA, 19 nt, Artificial Sequence
  Description of Artificial Sequence: Synthetic oligonucleotide
  Sense strand starting at position 31 of SEQ ID NO: 1243976
cguggagcuccaggagauu

SEQ ID NO: 1455637 - RNA, 19 nt, Artificial Sequence
  Description of Artificial Sequence: Synthetic oligonucleotide
  Antisense strand to SEQ ID NO: 1455636
aaucuccuggagcuccacg

SEQ ID NO: 1455638 - RNA, 19 nt, Artificial Sequence
  Description of Artificial Sequence: Synthetic oligonucleotide
  Sense strand starting at position 113 of SEQ ID NO: 1243976
gagagaugauguggagaag

SEQ ID NO: 1455639 - RNA, 19 nt, Artificial Sequence
  Description of Artificial Sequence: Synthetic oligonucleotide
  Antisense strand to SEQ ID NO: 1455638
cuucuccacaucaucucuc

SEQ ID NO: 1455640 - RNA, 19 nt, Artificial Sequence
  Description of Artificial Sequence: Synthetic oligonucleotide
  Sense strand starting at position 138 of SEQ ID NO: 1243976
cccguccucaucugcgaua

SEQ ID NO: 1455641 - RNA, 19 nt, Artificial Sequence
  Description of Artificial Sequence: Synthetic oligonucleotide
  Antisense strand to SEQ ID NO: 1455640
uaucgcagaugaggacggg

SEQ ID NO: 1455642 - RNA, 19 nt, Artificial Sequence
  Description of Artificial Sequence: Synthetic oligonucleotide
  Sense strand starting at position 140 of SEQ ID NO: 1243976
cguccucaucugcgauaca

SEQ ID NO: 1455643 - RNA, 19 nt, Artificial Sequence
  Description of Artificial Sequence: Synthetic oligonucleotide
  Antisense strand to SEQ ID NO: 1455642
uguaucgcagaugaggacg

SEQ ID NO: 1455644 - RNA, 19 nt, Artificial Sequence
  Description of Artificial Sequence: Synthetic oligonucleotide
  Sense strand starting at position 149 of SEQ ID NO: 1243976
cugcgauacagagagcaaa

SEQ ID NO: 1455645 - RNA, 19 nt, Artificial Sequence
  Description of Artificial Sequence: Synthetic oligonucleotide
  Antisense strand to SEQ ID NO: 1455644
uuugcucucuguaucgcag

SEQ ID NO: 1455646 - RNA, 19 nt, Artificial Sequence
  Description of Artificial Sequence: Synthetic oligonucleotide
  Sense strand starting at position 298 of SEQ ID NO: 1243976
cuuagaacguggccuuauu

SEQ ID NO: 1455647 - RNA, 19 nt, Artificial Sequence
  Description of Artificial Sequence: Synthetic oligonucleotide
  Antisense strand to SEQ ID NO: 1455646
aauaaggccacguucuaag

SEQ ID NO: 1455648 - RNA, 19 nt, Artificial Sequence
  Description of Artificial Sequence: Synthetic oligonucleotide
  Sense strand starting at position 338 of SEQ ID NO: 1243976
ugugauuagcuaggguaag

SEQ ID NO: 1455649 - RNA, 19 nt, Artificial Sequence
  Description of Artificial Sequence: Synthetic oligonucleotide
  Antisense strand to SEQ ID NO: 1455648
cuuacccuagcuaaucaca

SEQ ID NO: 1455650 - RNA, 19 nt, Artificial Sequence
  Description of Artificial Sequence: Synthetic oligonucleotide
  Sense strand starting at position 360 of SEQ ID NO: 1243976
auguauaccagagaagugu

SEQ ID NO: 1455651 - RNA, 19 nt, Artificial Sequence
  Description of Artificial Sequence: Synthetic oligonucleotide
  Antisense strand to SEQ ID NO: 1455650
acacuucucugguauacau

SEQ ID NO: 1455652 - RNA, 19 nt, Artificial Sequence
  Description of Artificial Sequence: Synthetic oligonucleotide
  Sense strand starting at position 398 of SEQ ID NO: 1243976
ugguguacuagugagaaga

SEQ ID NO: 1455653 - RNA, 19 nt, Artificial Sequence
  Description of Artificial Sequence: Synthetic oligonucleotide
  Antisense strand to SEQ ID NO: 1455652
ucuucucacuaguacacca

SEQ ID NO: 1455654 - RNA, 19 nt, Artificial Sequence
  Description of Artificial Sequence: Synthetic oligonucleotide
  Sense strand starting at position 633 of SEQ ID NO: 1243976
auccguuucuguggguuua

SEQ ID NO: 1455655 - RNA, 19 nt, Artificial Sequence
  Description of Artificial Sequence: Synthetic oligonucleotide
  Antisense strand to SEQ ID NO: 1455654
uaaacccacagaaacggau

SEQ ID NO: 1455656 - RNA, 19 nt, Artificial Sequence
  Description of Artificial Sequence: Synthetic oligonucleotide
  Sense strand starting at position 634 of SEQ ID NO: 1243976
uccguuucuguggguuuaa

SEQ ID NO: 1455657 - RNA, 19 nt, Artificial Sequence
  Description of Artificial Sequence: Synthetic oligonucleotide
  Antisense strand to SEQ ID NO: 1455656
uuaaacccacagaaacgga

SEQ ID NO: 1455658 - RNA, 19 nt, Artificial Sequence
  Description of Artificial Sequence: Synthetic oligonucleotide
  Sense strand starting at position 920 of SEQ ID NO: 1243976
cugccuuggccucauauau

SEQ ID NO: 1455659 - RNA, 19 nt, Artificial Sequence
  Description of Artificial Sequence: Synthetic oligonucleotide
  Antisense strand to SEQ ID NO: 1455658
auauaugaggccaaggcag

SEQ ID NO: 1455660 - RNA, 19 nt, Artificial Sequence
  Description of Artificial Sequence: Synthetic oligonucleotide
  Sense strand starting at position 1349 of SEQ ID NO: 1243976
gggagguguuggguggaaa

SEQ ID NO: 1455661 - RNA, 19 nt, Artificial Sequence
  Description of Artificial Sequence: Synthetic oligonucleotide
  Antisense strand to SEQ ID NO: 1455660
uuuccacccaacaccuccc

SEQ ID NO: 1455662 - RNA, 19 nt, Artificial Sequence
  Description of Artificial Sequence: Synthetic oligonucleotide
  Sense strand starting at position 1549 of SEQ ID NO: 1243976
ccggaucuguugcuaccaa

SEQ ID NO: 1455663 - RNA, 19 nt, Artificial Sequence
  Description of Artificial Sequence: Synthetic oligonucleotide
  Antisense strand to SEQ ID NO: 1455662
uugguagcaacagauccgg

SEQ ID NO: 1455664 - RNA, 19 nt, Artificial Sequence
  Description of Artificial Sequence: Synthetic oligonucleotide
  Sense strand starting at position 1627 of SEQ ID NO: 1243976
cccuuuauccugcacgaca

SEQ ID NO: 1455665 - RNA, 19 nt, Artificial Sequence
  Description of Artificial Sequence: Synthetic oligonucleotide
  Antisense strand to SEQ ID NO: 1455664
ugucgugcaggauaaaggg

SEQ ID NO: 1455666 - RNA, 19 nt, Artificial Sequence
  Description of Artificial Sequence: Synthetic oligonucleotide
  Sense strand starting at position 2165 of SEQ ID NO: 1243976
guggcaucaacuugagcau

SEQ ID NO: 1455667 - RNA, 19 nt, Artificial Sequence
  Description of Artificial Sequence: Synthetic oligonucleotide
  Antisense strand to SEQ ID NO: 1455666
augcucaaguugaugccac

SEQ ID NO: 1455668 - RNA, 19 nt, Artificial Sequence
  Description of Artificial Sequence: Synthetic oligonucleotide
  Sense strand starting at position 2278 of SEQ ID NO: 1243976
agcccauuccacugggaaa

SEQ ID NO: 1455669 - RNA, 19 nt, Artificial Sequence
  Description of Artificial Sequence: Synthetic oligonucleotide
  Antisense strand to SEQ ID NO: 1455668
uuucccaguggaaugggcu

SEQ ID NO: 1455670 - RNA, 19 nt, Artificial Sequence
  Description of Artificial Sequence: Synthetic oligonucleotide
  Sense strand starting at position 2279 of SEQ ID NO: 1243976
gcccauuccacugggaaag

SEQ ID NO: 1455671 - RNA, 19 nt, Artificial Sequence
  Description of Artificial Sequence: Synthetic oligonucleotide
  Antisense strand to SEQ ID NO: 1455670
cuuucccaguggaaugggc

SEQ ID NO: 1455672 - RNA, 19 nt, Artificial Sequence
  Description of Artificial Sequence: Synthetic oligonucleotide
  Sense strand starting at position 2614 of SEQ ID NO: 1243976
gggccuuccuucuugggau

SEQ ID NO: 1455673 - RNA, 19 nt, Artificial Sequence
  Description of Artificial Sequence: Synthetic oligonucleotide
  Antisense strand to SEQ ID NO: 1455672
aucccaagaaggaaggccc

SEQ ID NO: 1455674 - RNA, 19 nt, Artificial Sequence
  Description of Artificial Sequence: Synthetic oligonucleotide
  Sense strand starting at position 2630 of SEQ ID NO: 1243976
gaugcuuccuucuugggau

SEQ ID NO: 1455675 - RNA, 19 nt, Artificial Sequence
  Description of Artificial Sequence: Synthetic oligonucleotide
  Antisense strand to SEQ ID NO: 1455674
aucccaagaaggaagcauc

SEQ ID NO: 1455676 - RNA, 19 nt, Artificial Sequence
  Description of Artificial Sequence: Synthetic oligonucleotide
  Sense strand starting at position 2646 of SEQ ID NO: 1243976
gaugcuuccuucuugggaa

SEQ ID NO: 1455677 - RNA, 19 nt, Artificial Sequence
  Description of Artificial Sequence: Synthetic oligonucleotide
  Antisense strand to SEQ ID NO: 1455676
uucccaagaaggaagcauc

SEQ ID NO: 1455678 - RNA, 19 nt, Artificial Sequence
  Description of Artificial Sequence: Synthetic oligonucleotide
  Sense strand starting at position 2647 of SEQ ID NO: 1243976
augcuuccuucuugggaau

SEQ ID NO: 1455679 - RNA, 19 nt, Artificial Sequence
  Description of Artificial Sequence: Synthetic oligonucleotide
  Antisense strand to SEQ ID NO: 1455678
auucccaagaaggaagcau

SEQ ID NO: 1455680 - RNA, 19 nt, Artificial Sequence
  Description of Artificial Sequence: Synthetic oligonucleotide
  Sense strand starting at position 2687 of SEQ ID NO: 1243976
ggacguucuugcuugauga

SEQ ID NO: 1455681 - RNA, 19 nt, Artificial Sequence
  Description of Artificial Sequence: Synthetic oligonucleotide
  Antisense strand to SEQ ID NO: 1455680
ucaucaagcaagaacgucc

SEQ ID NO: 1455682 - RNA, 19 nt, Artificial Sequence
  Description of Artificial Sequence: Synthetic oligonucleotide
  Sense strand starting at position 2688 of SEQ ID NO: 1243976
gacguucuugcuugaugac

SEQ ID NO: 1455683 - RNA, 19 nt, Artificial Sequence
  Description of Artificial Sequence: Synthetic oligonucleotide
  Antisense strand to SEQ ID NO: 1455682
gucaucaagcaagaacguc

SEQ ID NO: 1455684 - RNA, 19 nt, Artificial Sequence
  Description of Artificial Sequence: Synthetic oligonucleotide
  Sense strand starting at position 2689 of SEQ ID NO: 1243976
acguucuugcuugaugaca

SEQ ID NO: 1455685 - RNA, 19 nt, Artificial Sequence
  Description of Artificial Sequence: Synthetic oligonucleotide
  Antisense strand to SEQ ID NO: 1455684
ugucaucaagcaagaacgu

SEQ ID NO: 1455686 - RNA, 19 nt, Artificial Sequence
  Description of Artificial Sequence: Synthetic oligonucleotide
  Sense strand starting at position 2691 of SEQ ID NO: 1243976
guucuugcuugaugacaac

SEQ ID NO: 1455687 - RNA, 19 nt, Artificial Sequence
  Description of Artificial Sequence: Synthetic oligonucleotide
  Antisense strand to SEQ ID NO: 1455686
guugucaucaagcaagaac

SEQ ID NO: 1455688 - RNA, 19 nt, Artificial Sequence
  Description of Artificial Sequence: Synthetic oligonucleotide
  Sense strand starting at position 2727 of SEQ ID NO: 1243976
ggacucccuuguuaccaua

SEQ ID NO: 1455689 - RNA, 19 nt, Artificial Sequence
  Description of Artificial Sequence: Synthetic oligonucleotide
  Antisense strand to SEQ ID NO: 1455688
uaugguaacaagggagucc

SEQ ID NO: 1455690 - RNA, 19 nt, Artificial Sequence
  Description of Artificial Sequence: Synthetic oligonucleotide
  Sense strand starting at position 2870 of SEQ ID NO: 1243976
ccuguaugucucugucuca

SEQ ID NO: 1455691 - RNA, 19 nt, Artificial Sequence
  Description of Artificial Sequence: Synthetic oligonucleotide
  Antisense strand to SEQ ID NO: 1455690
ugagacagagacauacagg

SEQ ID NO: 1455692 - RNA, 19 nt, Artificial Sequence
  Description of Artificial Sequence: Synthetic oligonucleotide
  Sense strand starting at position 2873 of SEQ ID NO: 1243976
guaugucucugucucaguu

SEQ ID NO: 1455693 - RNA, 19 nt, Artificial Sequence
  Description of Artificial Sequence: Synthetic oligonucleotide
  Antisense strand to SEQ ID NO: 1455692
aacugagacagagacauac

SEQ ID NO: 1455694 - RNA, 19 nt, Artificial Sequence
  Description of Artificial Sequence: Synthetic oligonucleotide
  Sense strand starting at position 2881 of SEQ ID NO: 1243976
cugucucaguuccuauuaa

SEQ ID NO: 1455695 - RNA, 19 nt, Artificial Sequence
  Description of Artificial Sequence: Synthetic oligonucleotide
  Antisense strand to SEQ ID NO: 1455694
uuaauaggaacugagacag

SEQ ID NO: 1455696 - RNA, 19 nt, Artificial Sequence
  Description of Artificial Sequence: Synthetic oligonucleotide
  Sense strand starting at position 2882 of SEQ ID NO: 1243976
ugucucaguuccuauuaag

SEQ ID NO: 1455697 - RNA, 19 nt, Artificial Sequence
  Description of Artificial Sequence: Synthetic oligonucleotide
  Antisense strand to SEQ ID NO: 1455696
cuuaauaggaacugagaca

SEQ ID NO: 1455698 - RNA, 19 nt, Artificial Sequence
  Description of Artificial Sequence: Synthetic oligonucleotide
  Sense strand starting at position 3111 of SEQ ID NO: 1243976
ggguuucgcugagaggaug

SEQ ID NO: 1455699 - RNA, 19 nt, Artificial Sequence
  Description of Artificial Sequence: Synthetic oligonucleotide
  Antisense strand to SEQ ID NO: 1455698
cauccucucagcgaaaccc

SEQ ID NO: 1455700 - RNA, 19 nt, Artificial Sequence
  Description of Artificial Sequence: Synthetic oligonucleotide
  Sense strand starting at position 3221 of SEQ ID NO: 1243976
ggcggugauucucaugcca

SEQ ID NO: 1455701 - RNA, 19 nt, Artificial Sequence
  Description of Artificial Sequence: Synthetic oligonucleotide
  Antisense strand to SEQ ID NO: 1455700
uggcaugagaaucaccgcc

SEQ ID NO: 1455702 - RNA, 19 nt, Artificial Sequence
  Description of Artificial Sequence: Synthetic oligonucleotide
  Sense strand starting at position 3385 of SEQ ID NO: 1243976
gugucugagcaagagcuau

SEQ ID NO: 1455703 - RNA, 19 nt, Artificial Sequence
  Description of Artificial Sequence: Synthetic oligonucleotide
  Antisense strand to SEQ ID NO: 1455702
auagcucuugcucagacac

SEQ ID NO: 1455704 - RNA, 19 nt, Artificial Sequence
  Description of Artificial Sequence: Synthetic oligonucleotide
  Sense strand starting at position 3539 of SEQ ID NO: 1243976
gggcaugguuggagguauu

SEQ ID NO: 1455705 - RNA, 19 nt, Artificial Sequence
  Description of Artificial Sequence: Synthetic oligonucleotide
  Antisense strand to SEQ ID NO: 1455704
aauaccuccaaccaugccc

SEQ ID NO: 1455706 - RNA, 19 nt, Artificial Sequence
  Description of Artificial Sequence: Synthetic oligonucleotide
  Sense strand starting at position 3550 of SEQ ID NO: 1243976
gagguauugucacaauuuc

SEQ ID NO: 1455707 - RNA, 19 nt, Artificial Sequence
  Description of Artificial Sequence: Synthetic oligonucleotide
  Antisense strand to SEQ ID NO: 1455706
gaaauugugacaauaccuc

SEQ ID NO: 1455708 - RNA, 19 nt, Artificial Sequence
  Description of Artificial Sequence: Synthetic oligonucleotide
  Sense strand starting at position 3828 of SEQ ID NO: 1243976
ucaugcuucugugcaccaa

SEQ ID NO: 1455709 - RNA, 19 nt, Artificial Sequence
  Description of Artificial Sequence: Synthetic oligonucleotide
  Antisense strand to SEQ ID NO: 1455708
uuggugcacagaagcauga

SEQ ID NO: 1455710 - RNA, 19 nt, Artificial Sequence
  Description of Artificial Sequence: Synthetic oligonucleotide
  Sense strand starting at position 3978 of SEQ ID NO: 1243976
uaaggaucccugugaguca

SEQ ID NO: 1455711 - RNA, 19 nt, Artificial Sequence
  Description of Artificial Sequence: Synthetic oligonucleotide
  Antisense strand to SEQ ID NO: 1455710
ugacucacagggauccuua

SEQ ID NO: 1455712 - RNA, 19 nt, Artificial Sequence
  Description of Artificial Sequence: Synthetic oligonucleotide
  Sense strand starting at position 130 of SEQ ID NO: 1243977
cugugucaucaguauugca

SEQ ID NO: 1455713 - RNA, 19 nt, Artificial Sequence
  Description of Artificial Sequence: Synthetic oligonucleotide
  Antisense strand to SEQ ID NO: 1455712
ugcaauacugaugacacag

SEQ ID NO: 1455714 - RNA, 19 nt, Artificial Sequence
  Description of Artificial Sequence: Synthetic oligonucleotide
  Sense strand starting at position 162 of SEQ ID NO: 1243977
acccaugccugguuacaau

SEQ ID NO: 1455715 - RNA, 19 nt, Artificial Sequence
  Description of Artificial Sequence: Synthetic oligonucleotide
  Antisense strand to SEQ ID NO: 1455714
auuguaaccaggcaugggu

SEQ ID NO: 1455716 - RNA, 19 nt, Artificial Sequence
  Description of Artificial Sequence: Synthetic oligonucleotide
  Sense strand starting at position 284 of SEQ ID NO: 1243977
aaggaaggauacuagcaau

SEQ ID NO: 1455717 - RNA, 19 nt, Artificial Sequence
  Description of Artificial Sequence: Synthetic oligonucleotide
  Antisense strand to SEQ ID NO: 1455716
auugcuaguauccuuccuu

SEQ ID NO: 1455718 - RNA, 19 nt, Artificial Sequence
  Description of Artificial Sequence: Synthetic oligonucleotide
  Sense strand starting at position 496 of SEQ ID NO: 1243977
agggaugagaacugugcua

SEQ ID NO: 1455719 - RNA, 19 nt, Artificial Sequence
  Description of Artificial Sequence: Synthetic oligonucleotide
  Antisense strand to SEQ ID NO: 1455718
uagcacaguucucaucccu

SEQ ID NO: 1455720 - RNA, 19 nt, Artificial Sequence
  Description of Artificial Sequence: Synthetic oligonucleotide
  Sense strand starting at position 498 of SEQ ID NO: 1243977
ggaugagaacugugcuacu

SEQ ID NO: 1455721 - RNA, 19 nt, Artificial Sequence
  Description of Artificial Sequence: Synthetic oligonucleotide
  Antisense strand to SEQ ID NO: 1455720
aguagcacaguucucaucc

SEQ ID NO: 1455722 - RNA, 19 nt, Artificial Sequence
  Description of Artificial Sequence: Synthetic oligonucleotide
  Sense strand starting at position 580 of SEQ ID NO: 1243977
aggcaaaucaauggugguu

SEQ ID NO: 1455723 - RNA, 19 nt, Artificial Sequence
  Description of Artificial Sequence: Synthetic oligonucleotide
  Antisense strand to SEQ ID NO: 1455722
aaccaccauugauuugccu

SEQ ID NO: 1455724 - RNA, 19 nt, Artificial Sequence
  Description of Artificial Sequence: Synthetic oligonucleotide
  Sense strand starting at position 592 of SEQ ID NO: 1243977
ggugguucuccacggagga

SEQ ID NO: 1455725 - RNA, 19 nt, Artificial Sequence
  Description of Artificial Sequence: Synthetic oligonucleotide
  Antisense strand to SEQ ID NO: 1455724
uccuccguggagaaccacc

SEQ ID NO: 1455726 - RNA, 19 nt, Artificial Sequence
  Description of Artificial Sequence: Synthetic oligonucleotide
  Sense strand starting at position 655 of SEQ ID NO: 1243977
ugcacuuaccagcauguaa

SEQ ID NO: 1455727 - RNA, 19 nt, Artificial Sequence
  Description of Artificial Sequence: Synthetic oligonucleotide
  Antisense strand to SEQ ID NO: 1455726
uuacaugcugguaagugca

SEQ ID NO: 1455728 - RNA, 19 nt, Artificial Sequence
  Description of Artificial Sequence: Synthetic oligonucleotide
  Sense strand starting at position 757 of SEQ ID NO: 1243977
gggacuaugaaucguucca

SEQ ID NO: 1455729 - RNA, 19 nt, Artificial Sequence
  Description of Artificial Sequence: Synthetic oligonucleotide
  Antisense strand to SEQ ID NO: 1455728
uggaacgauucauaguccc

SEQ ID NO: 1455730 - RNA, 19 nt, Artificial Sequence
  Description of Artificial Sequence: Synthetic oligonucleotide
  Sense strand starting at position 914 of SEQ ID NO: 1243977
cacaaagauguacgguuua

SEQ ID NO: 1455731 - RNA, 19 nt, Artificial Sequence
  Description of Artificial Sequence: Synthetic oligonucleotide
  Antisense strand to SEQ ID NO: 1455730
uaaaccguacaucuuugug

SEQ ID NO: 1455732 - RNA, 19 nt, Artificial Sequence
  Description of Artificial Sequence: Synthetic oligonucleotide
  Sense strand starting at position 1064 of SEQ ID NO: 1243977
gagaucuagugacaacaua

SEQ ID NO: 1455733 - RNA, 19 nt, Artificial Sequence
  Description of Artificial Sequence: Synthetic oligonucleotide
  Antisense strand to SEQ ID NO: 1455732
uauguugucacuagaucuc

SEQ ID NO: 1455734 - RNA, 19 nt, Artificial Sequence
  Description of Artificial Sequence: Synthetic oligonucleotide
  Sense strand starting at position 1324 of SEQ ID NO: 1243977
aaagcucagggcugacaaa

SEQ ID NO: 1455735 - RNA, 19 nt, Artificial Sequence
  Description of Artificial Sequence: Synthetic oligonucleotide
  Antisense strand to SEQ ID NO: 1455734
uuugucagcccugagcuuu

SEQ ID NO: 1455736 - RNA, 19 nt, Artificial Sequence
  Description of Artificial Sequence: Synthetic oligonucleotide
  Sense strand starting at position 1347 of SEQ ID NO: 1243977
ggcaguuugcucaggacga

SEQ ID NO: 1455737 - RNA, 19 nt, Artificial Sequence
  Description of Artificial Sequence: Synthetic oligonucleotide
  Antisense strand to SEQ ID NO: 1455736
ucguccugagcaaacugcc

SEQ ID NO: 1455738 - RNA, 19 nt, Artificial Sequence
  Description of Artificial Sequence: Synthetic oligonucleotide
  Sense strand starting at position 1349 of SEQ ID NO: 1243977
caguuugcucaggacgaca

SEQ ID NO: 1455739 - RNA, 19 nt, Artificial Sequence
  Description of Artificial Sequence: Synthetic oligonucleotide
  Antisense strand to SEQ ID NO: 1455738
ugucguccugagcaaacug

SEQ ID NO: 1455740 - RNA, 19 nt, Artificial Sequence
  Description of Artificial Sequence: Synthetic oligonucleotide
  Sense strand starting at position 1456 of SEQ ID NO: 1243977
cuguguucucugcaaccca

SEQ ID NO: 1455741 - RNA, 19 nt, Artificial Sequence
  Description of Artificial Sequence: Synthetic oligonucleotide
  Antisense strand to SEQ ID NO: 1455740
uggguugcagagaacacag

SEQ ID NO: 1455742 - RNA, 19 nt, Artificial Sequence
  Description of Artificial Sequence: Synthetic oligonucleotide
  Sense strand starting at position 1887 of SEQ ID NO: 1243977
ucacucacccgguguagaa

SEQ ID NO: 1455743 - RNA, 19 nt, Artificial Sequence
  Description of Artificial Sequence: Synthetic oligonucleotide
  Antisense strand to SEQ ID NO: 1455742
uucuacaccgggugaguga

SEQ ID NO: 1455744 - RNA, 19 nt, Artificial Sequence
  Description of Artificial Sequence: Synthetic oligonucleotide
  Sense strand starting at position 2048 of SEQ ID NO: 1243977
ugagguuggcuucguaaac

SEQ ID NO: 1455745 - RNA, 19 nt, Artificial Sequence
  Description of Artificial Sequence: Synthetic oligonucleotide
  Antisense strand to SEQ ID NO: 1455744
guuuacgaagccaaccuca

SEQ ID NO: 1455746 - RNA, 19 nt, Artificial Sequence
  Description of Artificial Sequence: Synthetic oligonucleotide
  Sense strand starting at position 2049 of SEQ ID NO: 1243977
gagguuggcuucguaaaca

SEQ ID NO: 1455747 - RNA, 19 nt, Artificial Sequence
  Description of Artificial Sequence: Synthetic oligonucleotide
  Antisense strand to SEQ ID NO: 1455746
uguuuacgaagccaaccuc

SEQ ID NO: 1455748 - RNA, 19 nt, Artificial Sequence
  Description of Artificial Sequence: Synthetic oligonucleotide
  Sense strand starting at position 2145 of SEQ ID NO: 1243977
ggcaaagccuggccaauua

SEQ ID NO: 1455749 - RNA, 19 nt, Artificial Sequence
  Description of Artificial Sequence: Synthetic oligonucleotide
  Antisense strand to SEQ ID NO: 1455748
uaauuggccaggcuuugcc

SEQ ID NO: 1455750 - RNA, 19 nt, Artificial Sequence
  Description of Artificial Sequence: Synthetic oligonucleotide
  Sense strand starting at position 2207 of SEQ ID NO: 1243977
gcuguuugacaccggaaga

SEQ ID NO: 1455751 - RNA, 19 nt, Artificial Sequence
  Description of Artificial Sequence: Synthetic oligonucleotide
  Antisense strand to SEQ ID NO: 1455750
ucuuccggugucaaacagc

SEQ ID NO: 1455752 - RNA, 19 nt, Artificial Sequence
  Description of Artificial Sequence: Synthetic oligonucleotide
  Sense strand starting at position 2764 of SEQ ID NO: 1243977
gggcuugucccugcauguu

SEQ ID NO: 1455753 - RNA, 19 nt, Artificial Sequence
  Description of Artificial Sequence: Synthetic oligonucleotide
  Antisense strand to SEQ ID NO: 1455752
aacaugcagggacaagccc

SEQ ID NO: 1455754 - RNA, 19 nt, Artificial Sequence
  Description of Artificial Sequence: Synthetic oligonucleotide
  Sense strand starting at position 2770 of SEQ ID NO: 1243977
gucccugcauguuuguaaa

SEQ ID NO: 1455755 - RNA, 19 nt, Artificial Sequence
  Description of Artificial Sequence: Synthetic oligonucleotide
  Antisense strand to SEQ ID NO: 1455754
uuuacaaacaugcagggac

SEQ ID NO: 1455756 - RNA, 19 nt, Artificial Sequence
  Description of Artificial Sequence: Synthetic oligonucleotide
  Sense strand starting at position 2849 of SEQ ID NO: 1243977
acgcguaagcuuucguguu

SEQ ID NO: 1455757 - RNA, 19 nt, Artificial Sequence
  Description of Artificial Sequence: Synthetic oligonucleotide
  Antisense strand to SEQ ID NO: 1455756
aacacgaaagcuuacgcgu

SEQ ID NO: 1455758 - RNA, 19 nt, Artificial Sequence
  Description of Artificial Sequence: Synthetic oligonucleotide
  Sense strand starting at position 2853 of SEQ ID NO: 1243977
guaagcuuucguguuagca

SEQ ID NO: 1455759 - RNA, 19 nt, Artificial Sequence
  Description of Artificial Sequence: Synthetic oligonucleotide
  Antisense strand to SEQ ID NO: 1455758
ugcuaacacgaaagcuuac

SEQ ID NO: 1455760 - RNA, 19 nt, Artificial Sequence
  Description of Artificial Sequence: Synthetic oligonucleotide
  Sense strand starting at position 2854 of SEQ ID NO: 1243977
uaagcuuucguguuagcac

SEQ ID NO: 1455761 - RNA, 19 nt, Artificial Sequence
  Description of Artificial Sequence: Synthetic oligonucleotide
  Antisense strand to SEQ ID NO: 1455760
gugcuaacacgaaagcuua

SEQ ID NO: 1455762 - RNA, 19 nt, Artificial Sequence
  Description of Artificial Sequence: Synthetic oligonucleotide
  Sense strand starting at position 2884 of SEQ ID NO: 1243977
ggugucaugccaggauuga

SEQ ID NO: 1455763 - RNA, 19 nt, Artificial Sequence
  Description of Artificial Sequence: Synthetic oligonucleotide
  Antisense strand to SEQ ID NO: 1455762
ucaauccuggcaugacacc

SEQ ID NO: 1455764 - RNA, 19 nt, Artificial Sequence
  Description of Artificial Sequence: Synthetic oligonucleotide
  Sense strand starting at position 2885 of SEQ ID NO: 1243977
gugucaugccaggauugac

SEQ ID NO: 1455765 - RNA, 19 nt, Artificial Sequence
  Description of Artificial Sequence: Synthetic oligonucleotide
  Antisense strand to SEQ ID NO: 1455764
gucaauccuggcaugacac

SEQ ID NO: 1455766 - RNA, 19 nt, Artificial Sequence
  Description of Artificial Sequence: Synthetic oligonucleotide
  Sense strand starting at position 3066 of SEQ ID NO: 1243977
ggcuuuaagucauucugag

SEQ ID NO: 1455767 - RNA, 19 nt, Artificial Sequence
  Description of Artificial Sequence: Synthetic oligonucleotide
  Antisense strand to SEQ ID NO: 1455766
cucagaaugacuuaaagcc

SEQ ID NO: 1455768 - RNA, 19 nt, Artificial Sequence
  Description of Artificial Sequence: Synthetic oligonucleotide
  Sense strand starting at position 3163 of SEQ ID NO: 1243977
uuuacugggagcuguuaau

SEQ ID NO: 1455769 - RNA, 19 nt, Artificial Sequence
  Description of Artificial Sequence: Synthetic oligonucleotide
  Antisense strand to SEQ ID NO: 1455768
auuaacagcucccaguaaa

SEQ ID NO: 1455770 - RNA, 19 nt, Artificial Sequence
  Description of Artificial Sequence: Synthetic oligonucleotide
  Sense strand starting at position 3181 of SEQ ID NO: 1243977
uccggagauuuggaccaga

SEQ ID NO: 1455771 - RNA, 19 nt, Artificial Sequence
  Description of Artificial Sequence: Synthetic oligonucleotide
  Antisense strand to SEQ ID NO: 1455770
ucugguccaaaucuccgga

SEQ ID NO: 1455772 - RNA, 19 nt, Artificial Sequence
  Description of Artificial Sequence: Synthetic oligonucleotide
  Sense strand starting at position 3214 of SEQ ID NO: 1243977
acaagaguuccacggccuu

SEQ ID NO: 1455773 - RNA, 19 nt, Artificial Sequence
  Description of Artificial Sequence: Synthetic oligonucleotide
  Antisense strand to SEQ ID NO: 1455772
aaggccguggaacucuugu

SEQ ID NO: 1455774 - RNA, 19 nt, Artificial Sequence
  Description of Artificial Sequence: Synthetic oligonucleotide
  Sense strand starting at position 3354 of SEQ ID NO: 1243977
uggauugcuuaggccuaga

SEQ ID NO: 1455775 - RNA, 19 nt, Artificial Sequence
  Description of Artificial Sequence: Synthetic oligonucleotide
  Antisense strand to SEQ ID NO: 1455774
ucuaggccuaagcaaucca

SEQ ID NO: 1455776 - RNA, 19 nt, Artificial Sequence
  Description of Artificial Sequence: Synthetic oligonucleotide
  Sense strand starting at position 3357 of SEQ ID NO: 1243977
auugcuuaggccuagaagu

SEQ ID NO: 1455777 - RNA, 19 nt, Artificial Sequence
  Description of Artificial Sequence: Synthetic oligonucleotide
  Antisense strand to SEQ ID NO: 1455776
acuucuaggccuaagcaau

SEQ ID NO: 1455778 - RNA, 19 nt, Artificial Sequence
  Description of Artificial Sequence: Synthetic oligonucleotide
  Sense strand starting at position 3603 of SEQ ID NO: 1243977
cugcuuucccucuaugaga

SEQ ID NO: 1455779 - RNA, 19 nt, Artificial Sequence
  Description of Artificial Sequence: Synthetic oligonucleotide
  Antisense strand to SEQ ID NO: 1455778
ucucauagagggaaagcag

SEQ ID NO: 1455780 - RNA, 19 nt, Artificial Sequence
  Description of Artificial Sequence: Synthetic oligonucleotide
  Sense strand starting at position 3616 of SEQ ID NO: 1243977
augagagcuugagaccaaa

SEQ ID NO: 1455781 - RNA, 19 nt, Artificial Sequence
  Description of Artificial Sequence: Synthetic oligonucleotide
  Antisense strand to SEQ ID NO: 1455780
uuuggucucaagcucucau

SEQ ID NO: 1455782 - RNA, 19 nt, Artificial Sequence
  Description of Artificial Sequence: Synthetic oligonucleotide
  Sense strand starting at position 3670 of SEQ ID NO: 1243977
cagugaguucugugauagu

SEQ ID NO: 1455783 - RNA, 19 nt, Artificial Sequence
  Description of Artificial Sequence: Synthetic oligonucleotide
  Antisense strand to SEQ ID NO: 1455782
acuaucacagaacucacug

SEQ ID NO: 1455784 - RNA, 19 nt, Artificial Sequence
  Description of Artificial Sequence: Synthetic oligonucleotide
  Sense strand starting at position 3697 of SEQ ID NO: 1243977
gcccuugucccguggacaa

SEQ ID NO: 1455785 - RNA, 19 nt, Artificial Sequence
  Description of Artificial Sequence: Synthetic oligonucleotide
  Antisense strand to SEQ ID NO: 1455784
uuguccacgggacaagggc

SEQ ID NO: 1455786 - RNA, 19 nt, Artificial Sequence
  Description of Artificial Sequence: Synthetic oligonucleotide
  Sense strand starting at position 3780 of SEQ ID NO: 1243977
gcacccaaguucucuguaa

SEQ ID NO: 1455787 - RNA, 19 nt, Artificial Sequence
  Description of Artificial Sequence: Synthetic oligonucleotide
  Antisense strand to SEQ ID NO: 1455786
uuacagagaacuugggugc

SEQ ID NO: 1455788 - RNA, 19 nt, Artificial Sequence
  Description of Artificial Sequence: Synthetic oligonucleotide
  Sense strand starting at position 3784 of SEQ ID NO: 1243977
ccaaguucucuguaaggua

SEQ ID NO: 1455789 - RNA, 19 nt, Artificial Sequence
  Description of Artificial Sequence: Synthetic oligonucleotide
  Antisense strand to SEQ ID NO: 1455788
uaccuuacagagaacuugg

SEQ ID NO: 1455790 - RNA, 19 nt, Artificial Sequence
  Description of Artificial Sequence: Synthetic oligonucleotide
  Sense strand starting at position 3843 of SEQ ID NO: 1243977
aggcguaucuaacuuggaa

SEQ ID NO: 1455791 - RNA, 19 nt, Artificial Sequence
  Description of Artificial Sequence: Synthetic oligonucleotide
  Antisense strand to SEQ ID NO: 1455790
uuccaaguuagauacgccu

SEQ ID NO: 1455792 - RNA, 19 nt, Artificial Sequence
  Description of Artificial Sequence: Synthetic oligonucleotide
  Sense strand starting at position 305 of SEQ ID NO: 1243978
agcaaauuguagucccuuu

SEQ ID NO: 1455793 - RNA, 19 nt, Artificial Sequence
  Description of Artificial Sequence: Synthetic oligonucleotide
  Antisense strand to SEQ ID NO: 1455792
aaagggacuacaauuugcu

SEQ ID NO: 1455794 - RNA, 19 nt, Artificial Sequence
  Description of Artificial Sequence: Synthetic oligonucleotide
  Sense strand starting at position 451 of SEQ ID NO: 1243978
ucugccaaaucuucguuau

SEQ ID NO: 1455795 - RNA, 19 nt, Artificial Sequence
  Description of Artificial Sequence: Synthetic oligonucleotide
  Antisense strand to SEQ ID NO: 1455794
auaacgaagauuuggcaga

SEQ ID NO: 1455796 - RNA, 19 nt, Artificial Sequence
  Description of Artificial Sequence: Synthetic oligonucleotide
  Sense strand starting at position 452 of SEQ ID NO: 1243978
cugccaaaucuucguuaua

SEQ ID NO: 1455797 - RNA, 19 nt, Artificial Sequence
  Description of Artificial Sequence: Synthetic oligonucleotide
  Antisense strand to SEQ ID NO: 1455796
uauaacgaagauuuggcag

SEQ ID NO: 1455798 - RNA, 19 nt, Artificial Sequence
  Description of Artificial Sequence: Synthetic oligonucleotide
  Sense strand starting at position 453 of SEQ ID NO: 1243978
ugccaaaucuucguuauau

SEQ ID NO: 1455799 - RNA, 19 nt, Artificial Sequence
  Description of Artificial Sequence: Synthetic oligonucleotide
  Antisense strand to SEQ ID NO: 1455798
auauaacgaagauuuggca

SEQ ID NO: 1455800 - RNA, 19 nt, Artificial Sequence
  Description of Artificial Sequence: Synthetic oligonucleotide
  Sense strand starting at position 454 of SEQ ID NO: 1243978
gccaaaucuucguuauauu

SEQ ID NO: 1455801 - RNA, 19 nt, Artificial Sequence
  Description of Artificial Sequence: Synthetic oligonucleotide
  Antisense strand to SEQ ID NO: 1455800
aauauaacgaagauuuggc

SEQ ID NO: 1455802 - RNA, 19 nt, Artificial Sequence
  Description of Artificial Sequence: Synthetic oligonucleotide
  Sense strand starting at position 481 of SEQ ID NO: 1243978
agaggaagcuuggauucuu

SEQ ID NO: 1455803 - RNA, 19 nt, Artificial Sequence
  Description of Artificial Sequence: Synthetic oligonucleotide
  Antisense strand to SEQ ID NO: 1455802
aagaauccaagcuuccucu

SEQ ID NO: 1455804 - RNA, 19 nt, Artificial Sequence
  Description of Artificial Sequence: Synthetic oligonucleotide
  Sense strand starting at position 642 of SEQ ID NO: 1243978
aagguaggguccugaacau

SEQ ID NO: 1455805 - RNA, 19 nt, Artificial Sequence
  Description of Artificial Sequence: Synthetic oligonucleotide
  Antisense strand to SEQ ID NO: 1455804
auguucaggacccuaccuu

SEQ ID NO: 1455806 - RNA, 19 nt, Artificial Sequence
  Description of Artificial Sequence: Synthetic oligonucleotide
  Sense strand starting at position 680 of SEQ ID NO: 1243978
guuauuaaaugugguaaac

SEQ ID NO: 1455807 - RNA, 19 nt, Artificial Sequence
  Description of Artificial Sequence: Synthetic oligonucleotide
  Antisense strand to SEQ ID NO: 1455806
guuuaccacauuuaauaac

SEQ ID NO: 1455808 - RNA, 19 nt, Artificial Sequence
  Description of Artificial Sequence: Synthetic oligonucleotide
  Sense strand starting at position 682 of SEQ ID NO: 1243978
uauuaaaugugguaaacag

SEQ ID NO: 1455809 - RNA, 19 nt, Artificial Sequence
  Description of Artificial Sequence: Synthetic oligonucleotide
  Antisense strand to SEQ ID NO: 1455808
cuguuuaccacauuuaaua

SEQ ID NO: 1455810 - RNA, 19 nt, Artificial Sequence
  Description of Artificial Sequence: Synthetic oligonucleotide
  Sense strand starting at position 715 of SEQ ID NO: 1243978
gcuucuaguucugcacuga

SEQ ID NO: 1455811 - RNA, 19 nt, Artificial Sequence
  Description of Artificial Sequence: Synthetic oligonucleotide
  Antisense strand to SEQ ID NO: 1455810
ucagugcagaacuagaagc

SEQ ID NO: 1455812 - RNA, 19 nt, Artificial Sequence
  Description of Artificial Sequence: Synthetic oligonucleotide
  Sense strand starting at position 719 of SEQ ID NO: 1243978
cuaguucugcacugacaca

SEQ ID NO: 1455813 - RNA, 19 nt, Artificial Sequence
  Description of Artificial Sequence: Synthetic oligonucleotide
  Antisense strand to SEQ ID NO: 1455812
ugugucagugcagaacuag

SEQ ID NO: 1455814 - RNA, 19 nt, Artificial Sequence
  Description of Artificial Sequence: Synthetic oligonucleotide
  Sense strand starting at position 737 of SEQ ID NO: 1243978
aguaucacugcgugaccuu

SEQ ID NO: 1455815 - RNA, 19 nt, Artificial Sequence
  Description of Artificial Sequence: Synthetic oligonucleotide
  Antisense strand to SEQ ID NO: 1455814
aaggucacgcagugauacu

SEQ ID NO: 1455816 - RNA, 19 nt, Artificial Sequence
  Description of Artificial Sequence: Synthetic oligonucleotide
  Sense strand starting at position 757 of SEQ ID NO: 1243978
ggcaaauuacugcaguucu

SEQ ID NO: 1455817 - RNA, 19 nt, Artificial Sequence
  Description of Artificial Sequence: Synthetic oligonucleotide
  Antisense strand to SEQ ID NO: 1455816
agaacugcaguaauuugcc

SEQ ID NO: 1455818 - RNA, 19 nt, Artificial Sequence
  Description of Artificial Sequence: Synthetic oligonucleotide
  Sense strand starting at position 780 of SEQ ID NO: 1243978
cucaguuucccucaucuga

SEQ ID NO: 1455819 - RNA, 19 nt, Artificial Sequence
  Description of Artificial Sequence: Synthetic oligonucleotide
  Antisense strand to SEQ ID NO: 1455818
ucagaugagggaaacugag

SEQ ID NO: 1455820 - RNA, 19 nt, Artificial Sequence
  Description of Artificial Sequence: Synthetic oligonucleotide
  Sense strand starting at position 891 of SEQ ID NO: 1243978
gacuccuugggcggagaaa

SEQ ID NO: 1455821 - RNA, 19 nt, Artificial Sequence
  Description of Artificial Sequence: Synthetic oligonucleotide
  Antisense strand to SEQ ID NO: 1455820
uuucuccgcccaaggaguc

SEQ ID NO: 1455822 - RNA, 19 nt, Artificial Sequence
  Description of Artificial Sequence: Synthetic oligonucleotide
  Sense strand starting at position 1088 of SEQ ID NO: 1243978
gaggaagucucuccuggaa

SEQ ID NO: 1455823 - RNA, 19 nt, Artificial Sequence
  Description of Artificial Sequence: Synthetic oligonucleotide
  Antisense strand to SEQ ID NO: 1455822
uuccaggagagacuuccuc

SEQ ID NO: 1455824 - RNA, 19 nt, Artificial Sequence
  Description of Artificial Sequence: Synthetic oligonucleotide
  Sense strand starting at position 1090 of SEQ ID NO: 1243978
ggaagucucuccuggaaga

SEQ ID NO: 1455825 - RNA, 19 nt, Artificial Sequence
  Description of Artificial Sequence: Synthetic oligonucleotide
  Antisense strand to SEQ ID NO: 1455824
ucuuccaggagagacuucc

SEQ ID NO: 1455826 - RNA, 19 nt, Artificial Sequence
  Description of Artificial Sequence: Synthetic oligonucleotide
  Sense strand starting at position 1091 of SEQ ID NO: 1243978
gaagucucuccuggaagag

SEQ ID NO: 1455827 - RNA, 19 nt, Artificial Sequence
  Description of Artificial Sequence: Synthetic oligonucleotide
  Antisense strand to SEQ ID NO: 1455826
cucuuccaggagagacuuc

SEQ ID NO: 1455828 - RNA, 19 nt, Artificial Sequence
  Description of Artificial Sequence: Synthetic oligonucleotide
  Sense strand starting at position 1555 of SEQ ID NO: 1243978
aaaggagaugcucggugau

SEQ ID NO: 1455829 - RNA, 19 nt, Artificial Sequence
  Description of Artificial Sequence: Synthetic oligonucleotide
  Antisense strand to SEQ ID NO: 1455828
aucaccgagcaucuccuuu

SEQ ID NO: 1455830 - RNA, 19 nt, Artificial Sequence
  Description of Artificial Sequence: Synthetic oligonucleotide
  Sense strand starting at position 1557 of SEQ ID NO: 1243978
aggagaugcucggugauag

SEQ ID NO: 1455831 - RNA, 19 nt, Artificial Sequence
  Description of Artificial Sequence: Synthetic oligonucleotide
  Antisense strand to SEQ ID NO: 1455830
cuaucaccgagcaucuccu

SEQ ID NO: 1455832 - RNA, 19 nt, Artificial Sequence
  Description of Artificial Sequence: Synthetic oligonucleotide
  Sense strand starting at position 70 of SEQ ID NO: 1243979
gugggccuucugugggaau

SEQ ID NO: 1455833 - RNA, 19 nt, Artificial Sequence
  Description of Artificial Sequence: Synthetic oligonucleotide
  Antisense strand to SEQ ID NO: 1455832
auucccacagaaggcccac

SEQ ID NO: 1455834 - RNA, 19 nt, Artificial Sequence
  Description of Artificial Sequence: Synthetic oligonucleotide
  Sense strand starting at position 94 of SEQ ID NO: 1243979
ggccacaacuuguuuaacu

SEQ ID NO: 1455835 - RNA, 19 nt, Artificial Sequence
  Description of Artificial Sequence: Synthetic oligonucleotide
  Antisense strand to SEQ ID NO: 1455834
aguuaaacaaguuguggcc

SEQ ID NO: 1455836 - RNA, 19 nt, Artificial Sequence
  Description of Artificial Sequence: Synthetic oligonucleotide
  Sense strand starting at position 180 of SEQ ID NO: 1243979
gagucaagaugggaaauaa

SEQ ID NO: 1455837 - RNA, 19 nt, Artificial Sequence
  Description of Artificial Sequence: Synthetic oligonucleotide
  Antisense strand to SEQ ID NO: 1455836
uuauuucccaucuugacuc

SEQ ID NO: 1455838 - RNA, 19 nt, Artificial Sequence
  Description of Artificial Sequence: Synthetic oligonucleotide
  Sense strand starting at position 190 of SEQ ID NO: 1243979
gggaaauaaugugcaccaa

SEQ ID NO: 1455839 - RNA, 19 nt, Artificial Sequence
  Description of Artificial Sequence: Synthetic oligonucleotide
  Antisense strand to SEQ ID NO: 1455838
uuggugcacauuauuuccc

SEQ ID NO: 1455840 - RNA, 19 nt, Artificial Sequence
  Description of Artificial Sequence: Synthetic oligonucleotide
  Sense strand starting at position 382 of SEQ ID NO: 1243979
ccuggaccuuucucacaga

SEQ ID NO: 1455841 - RNA, 19 nt, Artificial Sequence
  Description of Artificial Sequence: Synthetic oligonucleotide
  Antisense strand to SEQ ID NO: 1455840
ucugugagaaagguccagg

SEQ ID NO: 1455842 - RNA, 19 nt, Artificial Sequence
  Description of Artificial Sequence: Synthetic oligonucleotide
  Sense strand starting at position 383 of SEQ ID NO: 1243979
cuggaccuuucucacagaa

SEQ ID NO: 1455843 - RNA, 19 nt, Artificial Sequence
  Description of Artificial Sequence: Synthetic oligonucleotide
  Antisense strand to SEQ ID NO: 1455842
uucugugagaaagguccag

SEQ ID NO: 1455844 - RNA, 19 nt, Artificial Sequence
  Description of Artificial Sequence: Synthetic oligonucleotide
  Sense strand starting at position 695 of SEQ ID NO: 1243979
acacgauaugcccagaaau

SEQ ID NO: 1455845 - RNA, 19 nt, Artificial Sequence
  Description of Artificial Sequence: Synthetic oligonucleotide
  Antisense strand to SEQ ID NO: 1455844
auuucugggcauaucgugu

SEQ ID NO: 1455846 - RNA, 19 nt, Artificial Sequence
  Description of Artificial Sequence: Synthetic oligonucleotide
  Sense strand starting at position 791 of SEQ ID NO: 1243979
gaauuacugcagugaccuu

SEQ ID NO: 1455847 - RNA, 19 nt, Artificial Sequence
  Description of Artificial Sequence: Synthetic oligonucleotide
  Antisense strand to SEQ ID NO: 1455846
aaggucacugcaguaauuc

SEQ ID NO: 1455848 - RNA, 19 nt, Artificial Sequence
  Description of Artificial Sequence: Synthetic oligonucleotide
  Sense strand starting at position 847 of SEQ ID NO: 1243979
agggcagggccugagaauu

SEQ ID NO: 1455849 - RNA, 19 nt, Artificial Sequence
  Description of Artificial Sequence: Synthetic oligonucleotide
  Antisense strand to SEQ ID NO: 1455848
aauucucaggcccugcccu

SEQ ID NO: 1455850 - RNA, 19 nt, Artificial Sequence
  Description of Artificial Sequence: Synthetic oligonucleotide
  Sense strand starting at position 1135 of SEQ ID NO: 1243979
gucacacgugcaugaguuu

SEQ ID NO: 1455851 - RNA, 19 nt, Artificial Sequence
  Description of Artificial Sequence: Synthetic oligonucleotide
  Antisense strand to SEQ ID NO: 1455850
aaacucaugcacgugugac

SEQ ID NO: 1455852 - RNA, 19 nt, Artificial Sequence
  Description of Artificial Sequence: Synthetic oligonucleotide
  Sense strand starting at position 1140 of SEQ ID NO: 1243979
acgugcaugaguuugcgua

SEQ ID NO: 1455853 - RNA, 19 nt, Artificial Sequence
  Description of Artificial Sequence: Synthetic oligonucleotide
  Antisense strand to SEQ ID NO: 1455852
uacgcaaacucaugcacgu

SEQ ID NO: 1455854 - RNA, 19 nt, Artificial Sequence
  Description of Artificial Sequence: Synthetic oligonucleotide
  Sense strand starting at position 1141 of SEQ ID NO: 1243979
cgugcaugaguuugcguaa

SEQ ID NO: 1455855 - RNA, 19 nt, Artificial Sequence
  Description of Artificial Sequence: Synthetic oligonucleotide
  Antisense strand to SEQ ID NO: 1455854
uuacgcaaacucaugcacg

SEQ ID NO: 1455856 - RNA, 19 nt, Artificial Sequence
  Description of Artificial Sequence: Synthetic oligonucleotide
  Sense strand starting at position 1142 of SEQ ID NO: 1243979
gugcaugaguuugcguaaa

SEQ ID NO: 1455857 - RNA, 19 nt, Artificial Sequence
  Description of Artificial Sequence: Synthetic oligonucleotide
  Antisense strand to SEQ ID NO: 1455856
uuuacgcaaacucaugcac

SEQ ID NO: 1455858 - RNA, 19 nt, Artificial Sequence
  Description of Artificial Sequence: Synthetic oligonucleotide
  Sense strand starting at position 1144 of SEQ ID NO: 1243979
gcaugaguuugcguaaagu

SEQ ID NO: 1455859 - RNA, 19 nt, Artificial Sequence
  Description of Artificial Sequence: Synthetic oligonucleotide
  Antisense strand to SEQ ID NO: 1455858
acuuuacgcaaacucaugc

SEQ ID NO: 1455860 - RNA, 19 nt, Artificial Sequence
  Description of Artificial Sequence: Synthetic oligonucleotide
  Sense strand starting at position 1316 of SEQ ID NO: 1243979
gcuucuggccacuguaaua

SEQ ID NO: 1455861 - RNA, 19 nt, Artificial Sequence
  Description of Artificial Sequence: Synthetic oligonucleotide
  Antisense strand to SEQ ID NO: 1455860
uauuacaguggccagaagc

SEQ ID NO: 1455862 - RNA, 19 nt, Artificial Sequence
  Description of Artificial Sequence: Synthetic oligonucleotide
  Sense strand starting at position 2511 of SEQ ID NO: 1243979
cccaaaugguuaugacuga

SEQ ID NO: 1455863 - RNA, 19 nt, Artificial Sequence
  Description of Artificial Sequence: Synthetic oligonucleotide
  Antisense strand to SEQ ID NO: 1455862
ucagucauaaccauuuggg

SEQ ID NO: 1455864 - RNA, 19 nt, Artificial Sequence
  Description of Artificial Sequence: Synthetic oligonucleotide
  Sense strand starting at position 2518 of SEQ ID NO: 1243979
gguuaugacugacagaaga

SEQ ID NO: 1455865 - RNA, 19 nt, Artificial Sequence
  Description of Artificial Sequence: Synthetic oligonucleotide
  Antisense strand to SEQ ID NO: 1455864
ucuucugucagucauaacc

SEQ ID NO: 1455866 - RNA, 19 nt, Artificial Sequence
  Description of Artificial Sequence: Synthetic oligonucleotide
  Sense strand starting at position 2546 of SEQ ID NO: 1243979
gccugaguuugagcugaca

SEQ ID NO: 1455867 - RNA, 19 nt, Artificial Sequence
  Description of Artificial Sequence: Synthetic oligonucleotide
  Antisense strand to SEQ ID NO: 1455866
ugucagcucaaacucaggc

SEQ ID NO: 1455868 - RNA, 19 nt, Artificial Sequence
  Description of Artificial Sequence: Synthetic oligonucleotide
  Sense strand starting at position 2548 of SEQ ID NO: 1243979
cugaguuugagcugacaau

SEQ ID NO: 1455869 - RNA, 19 nt, Artificial Sequence
  Description of Artificial Sequence: Synthetic oligonucleotide
  Antisense strand to SEQ ID NO: 1455868
auugucagcucaaacucag

SEQ ID NO: 1455870 - RNA, 19 nt, Artificial Sequence
  Description of Artificial Sequence: Synthetic oligonucleotide
  Sense strand starting at position 2549 of SEQ ID NO: 1243979
ugaguuugagcugacaaua

SEQ ID NO: 1455871 - RNA, 19 nt, Artificial Sequence
  Description of Artificial Sequence: Synthetic oligonucleotide
  Antisense strand to SEQ ID NO: 1455870
uauugucagcucaaacuca

SEQ ID NO: 1455872 - RNA, 19 nt, Artificial Sequence
  Description of Artificial Sequence: Synthetic oligonucleotide
  Sense strand starting at position 2663 of SEQ ID NO: 1243979
ggcucaaggccagauaguu

SEQ ID NO: 1455873 - RNA, 19 nt, Artificial Sequence
  Description of Artificial Sequence: Synthetic oligonucleotide
  Antisense strand to SEQ ID NO: 1455872
aacuaucuggccuugagcc

SEQ ID NO: 1455874 - RNA, 19 nt, Artificial Sequence
  Description of Artificial Sequence: Synthetic oligonucleotide
  Sense strand starting at position 2671 of SEQ ID NO: 1243979
gccagauaguuugagauga

SEQ ID NO: 1455875 - RNA, 19 nt, Artificial Sequence
  Description of Artificial Sequence: Synthetic oligonucleotide
  Antisense strand to SEQ ID NO: 1455874
ucaucucaaacuaucuggc

SEQ ID NO: 1455876 - RNA, 19 nt, Artificial Sequence
  Description of Artificial Sequence: Synthetic oligonucleotide
  Sense strand starting at position 2867 of SEQ ID NO: 1243979
uugucauacuuggugauga

SEQ ID NO: 1455877 - RNA, 19 nt, Artificial Sequence
  Description of Artificial Sequence: Synthetic oligonucleotide
  Antisense strand to SEQ ID NO: 1455876
ucaucaccaaguaugacaa

SEQ ID NO: 1455878 - RNA, 19 nt, Artificial Sequence
  Description of Artificial Sequence: Synthetic oligonucleotide
  Sense strand starting at position 2869 of SEQ ID NO: 1243979
gucauacuuggugaugaca

SEQ ID NO: 1455879 - RNA, 19 nt, Artificial Sequence
  Description of Artificial Sequence: Synthetic oligonucleotide
  Antisense strand to SEQ ID NO: 1455878
ugucaucaccaaguaugac

SEQ ID NO: 1455880 - RNA, 19 nt, Artificial Sequence
  Description of Artificial Sequence: Synthetic oligonucleotide
  Sense strand starting at position 2871 of SEQ ID NO: 1243979
cauacuuggugaugacacu

SEQ ID NO: 1455881 - RNA, 19 nt, Artificial Sequence
  Description of Artificial Sequence: Synthetic oligonucleotide
  Antisense strand to SEQ ID NO: 1455880
agugucaucaccaaguaug

SEQ ID NO: 1455882 - RNA, 19 nt, Artificial Sequence
  Description of Artificial Sequence: Synthetic oligonucleotide
  Sense strand starting at position 2880 of SEQ ID NO: 1243979
ugaugacacuucgggaaga

SEQ ID NO: 1455883 - RNA, 19 nt, Artificial Sequence
  Description of Artificial Sequence: Synthetic oligonucleotide
  Antisense strand to SEQ ID NO: 1455882
ucuucccgaagugucauca

SEQ ID NO: 1455884 - RNA, 19 nt, Artificial Sequence
  Description of Artificial Sequence: Synthetic oligonucleotide
  Sense strand starting at position 3388 of SEQ ID NO: 1243979
cagaguuuacucuguggga

SEQ ID NO: 1455885 - RNA, 19 nt, Artificial Sequence
  Description of Artificial Sequence: Synthetic oligonucleotide
  Antisense strand to SEQ ID NO: 1455884
ucccacagaguaaacucug

SEQ ID NO: 1455886 - RNA, 19 nt, Artificial Sequence
  Description of Artificial Sequence: Synthetic oligonucleotide
  Sense strand starting at position 3389 of SEQ ID NO: 1243979
agaguuuacucugugggaa

SEQ ID NO: 1455887 - RNA, 19 nt, Artificial Sequence
  Description of Artificial Sequence: Synthetic oligonucleotide
  Antisense strand to SEQ ID NO: 1455886
uucccacagaguaaacucu

SEQ ID NO: 1455888 - RNA, 19 nt, Artificial Sequence
  Description of Artificial Sequence: Synthetic oligonucleotide
  Sense strand starting at position 3390 of SEQ ID NO: 1243979
gaguuuacucugugggaag

SEQ ID NO: 1455889 - RNA, 19 nt, Artificial Sequence
  Description of Artificial Sequence: Synthetic oligonucleotide
  Antisense strand to SEQ ID NO: 1455888
cuucccacagaguaaacuc

SEQ ID NO: 1455890 - RNA, 19 nt, Artificial Sequence
  Description of Artificial Sequence: Synthetic oligonucleotide
  Sense strand starting at position 3392 of SEQ ID NO: 1243979
guuuacucugugggaagca

SEQ ID NO: 1455891 - RNA, 19 nt, Artificial Sequence
  Description of Artificial Sequence: Synthetic oligonucleotide
  Antisense strand to SEQ ID NO: 1455890
ugcuucccacagaguaaac

SEQ ID NO: 1455892 - RNA, 19 nt, Artificial Sequence
  Description of Artificial Sequence: Synthetic oligonucleotide
  Sense strand starting at position 3401 of SEQ ID NO: 1243979
gugggaagcaccuauauau

SEQ ID NO: 1455893 - RNA, 19 nt, Artificial Sequence
  Description of Artificial Sequence: Synthetic oligonucleotide
  Antisense strand to SEQ ID NO: 1455892
auauauaggugcuucccac

SEQ ID NO: 1455894 - RNA, 19 nt, Artificial Sequence
  Description of Artificial Sequence: Synthetic oligonucleotide
  Sense strand starting at position 3417 of SEQ ID NO: 1243979
uaugaacuaugcugugaga

SEQ ID NO: 1455895 - RNA, 19 nt, Artificial Sequence
  Description of Artificial Sequence: Synthetic oligonucleotide
  Antisense strand to SEQ ID NO: 1455894
ucucacagcauaguucaua

SEQ ID NO: 1455896 - RNA, 19 nt, Artificial Sequence
  Description of Artificial Sequence: Synthetic oligonucleotide
  Sense strand starting at position 3419 of SEQ ID NO: 1243979
ugaacuaugcugugagaga

SEQ ID NO: 1455897 - RNA, 19 nt, Artificial Sequence
  Description of Artificial Sequence: Synthetic oligonucleotide
  Antisense strand to SEQ ID NO: 1455896
ucucucacagcauaguuca

SEQ ID NO: 1455898 - RNA, 19 nt, Artificial Sequence
  Description of Artificial Sequence: Synthetic oligonucleotide
  Sense strand starting at position 3420 of SEQ ID NO: 1243979
gaacuaugcugugagagaa

SEQ ID NO: 1455899 - RNA, 19 nt, Artificial Sequence
  Description of Artificial Sequence: Synthetic oligonucleotide
  Antisense strand to SEQ ID NO: 1455898
uucucucacagcauaguuc

SEQ ID NO: 1455900 - RNA, 19 nt, Artificial Sequence
  Description of Artificial Sequence: Synthetic oligonucleotide
  Sense strand starting at position 3456 of SEQ ID NO: 1243979
gaaaccaguuguuugugaa

SEQ ID NO: 1455901 - RNA, 19 nt, Artificial Sequence
  Description of Artificial Sequence: Synthetic oligonucleotide
  Antisense strand to SEQ ID NO: 1455900
uucacaaacaacugguuuc

SEQ ID NO: 1455902 - RNA, 19 nt, Artificial Sequence
  Description of Artificial Sequence: Synthetic oligonucleotide
  Sense strand starting at position 3457 of SEQ ID NO: 1243979
aaaccaguuguuugugaaa

SEQ ID NO: 1455903 - RNA, 19 nt, Artificial Sequence
  Description of Artificial Sequence: Synthetic oligonucleotide
  Antisense strand to SEQ ID NO: 1455902
uuucacaaacaacugguuu

SEQ ID NO: 1455904 - RNA, 19 nt, Artificial Sequence
  Description of Artificial Sequence: Synthetic oligonucleotide
  Sense strand starting at position 3459 of SEQ ID NO: 1243979
accaguuguuugugaaaga

SEQ ID NO: 1455905 - RNA, 19 nt, Artificial Sequence
  Description of Artificial Sequence: Synthetic oligonucleotide
  Antisense strand to SEQ ID NO: 1455904
ucuuucacaaacaacuggu

SEQ ID NO: 1455906 - RNA, 19 nt, Artificial Sequence
  Description of Artificial Sequence: Synthetic oligonucleotide
  Sense strand starting at position 3460 of SEQ ID NO: 1243979
ccaguuguuugugaaagaa

SEQ ID NO: 1455907 - RNA, 19 nt, Artificial Sequence
  Description of Artificial Sequence: Synthetic oligonucleotide
  Antisense strand to SEQ ID NO: 1455906
uucuuucacaaacaacugg

SEQ ID NO: 1455908 - RNA, 19 nt, Artificial Sequence
  Description of Artificial Sequence: Synthetic oligonucleotide
  Sense strand starting at position 3814 of SEQ ID NO: 1243979
gcugguaccuuugacauau

SEQ ID NO: 1455909 - RNA, 19 nt, Artificial Sequence
  Description of Artificial Sequence: Synthetic oligonucleotide
  Antisense strand to SEQ ID NO: 1455908
auaugucaaagguaccagc

SEQ ID NO: 1455910 - RNA, 19 nt, Artificial Sequence
  Description of Artificial Sequence: Synthetic oligonucleotide
  Sense strand starting at position 3978 of SEQ ID NO: 1243979
cugaaaggucucugggacu

SEQ ID NO: 1455911 - RNA, 19 nt, Artificial Sequence
  Description of Artificial Sequence: Synthetic oligonucleotide
  Antisense strand to SEQ ID NO: 1455910
agucccagagaccuuucag

SEQ ID NO: 1455912 - RNA, 19 nt, Artificial Sequence
  Description of Artificial Sequence: Synthetic oligonucleotide
  Sense strand starting at position 123 of SEQ ID NO: 1243980
uugccaggugauggauaau

SEQ ID NO: 1455913 - RNA, 19 nt, Artificial Sequence
  Description of Artificial Sequence: Synthetic oligonucleotide
  Antisense strand to SEQ ID NO: 1455912
auuauccaucaccuggcaa

SEQ ID NO: 1455914 - RNA, 19 nt, Artificial Sequence
  Description of Artificial Sequence: Synthetic oligonucleotide
  Sense strand starting at position 203 of SEQ ID NO: 1243980
uguugauagauggguagau

SEQ ID NO: 1455915 - RNA, 19 nt, Artificial Sequence
  Description of Artificial Sequence: Synthetic oligonucleotide
  Antisense strand to SEQ ID NO: 1455914
aucuacccaucuaucaaca

SEQ ID NO: 1455916 - RNA, 19 nt, Artificial Sequence
  Description of Artificial Sequence: Synthetic oligonucleotide
  Sense strand starting at position 222 of SEQ ID NO: 1243980
gauagacugcucuaucgau

SEQ ID NO: 1455917 - RNA, 19 nt, Artificial Sequence
  Description of Artificial Sequence: Synthetic oligonucleotide
  Antisense strand to SEQ ID NO: 1455916
aucgauagagcagucuauc

SEQ ID NO: 1455918 - RNA, 19 nt, Artificial Sequence
  Description of Artificial Sequence: Synthetic oligonucleotide
  Sense strand starting at position 228 of SEQ ID NO: 1243980
cugcucuaucgauauauca

SEQ ID NO: 1455919 - RNA, 19 nt, Artificial Sequence
  Description of Artificial Sequence: Synthetic oligonucleotide
  Antisense strand to SEQ ID NO: 1455918
ugauauaucgauagagcag

SEQ ID NO: 1455920 - RNA, 19 nt, Artificial Sequence
  Description of Artificial Sequence: Synthetic oligonucleotide
  Sense strand starting at position 311 of SEQ ID NO: 1243980
agcuguuuauauuuagcaa

SEQ ID NO: 1455921 - RNA, 19 nt, Artificial Sequence
  Description of Artificial Sequence: Synthetic oligonucleotide
  Antisense strand to SEQ ID NO: 1455920
uugcuaaauauaaacagcu

SEQ ID NO: 1455922 - RNA, 19 nt, Artificial Sequence
  Description of Artificial Sequence: Synthetic oligonucleotide
  Sense strand starting at position 323 of SEQ ID NO: 1243980
uuagcaagacuuugacacu

SEQ ID NO: 1455923 - RNA, 19 nt, Artificial Sequence
  Description of Artificial Sequence: Synthetic oligonucleotide
  Antisense strand to SEQ ID NO: 1455922
agugucaaagucuugcuaa

SEQ ID NO: 1455924 - RNA, 19 nt, Artificial Sequence
  Description of Artificial Sequence: Synthetic oligonucleotide
  Sense strand starting at position 392 of SEQ ID NO: 1243980
ucauguccucuauagcuau

SEQ ID NO: 1455925 - RNA, 19 nt, Artificial Sequence
  Description of Artificial Sequence: Synthetic oligonucleotide
  Antisense strand to SEQ ID NO: 1455924
auagcuauagaggacauga

SEQ ID NO: 1455926 - RNA, 19 nt, Artificial Sequence
  Description of Artificial Sequence: Synthetic oligonucleotide
  Sense strand starting at position 395 of SEQ ID NO: 1243980
uguccucuauagcuauuua

SEQ ID NO: 1455927 - RNA, 19 nt, Artificial Sequence
  Description of Artificial Sequence: Synthetic oligonucleotide
  Antisense strand to SEQ ID NO: 1455926
uaaauagcuauagaggaca

SEQ ID NO: 1455928 - RNA, 19 nt, Artificial Sequence
  Description of Artificial Sequence: Synthetic oligonucleotide
  Sense strand starting at position 490 of SEQ ID NO: 1243980
ucagaaagcuguguuauuu

SEQ ID NO: 1455929 - RNA, 19 nt, Artificial Sequence
  Description of Artificial Sequence: Synthetic oligonucleotide
  Antisense strand to SEQ ID NO: 1455928
aaauaacacagcuuucuga

SEQ ID NO: 1455930 - RNA, 19 nt, Artificial Sequence
  Description of Artificial Sequence: Synthetic oligonucleotide
  Sense strand starting at position 498 of SEQ ID NO: 1243980
cuguguuauuugccucaag

SEQ ID NO: 1455931 - RNA, 19 nt, Artificial Sequence
  Description of Artificial Sequence: Synthetic oligonucleotide
  Antisense strand to SEQ ID NO: 1455930
cuugaggcaaauaacacag

SEQ ID NO: 1455932 - RNA, 19 nt, Artificial Sequence
  Description of Artificial Sequence: Synthetic oligonucleotide
  Sense strand starting at position 499 of SEQ ID NO: 1243980
uguguuauuugccucaagu

SEQ ID NO: 1455933 - RNA, 19 nt, Artificial Sequence
  Description of Artificial Sequence: Synthetic oligonucleotide
  Antisense strand to SEQ ID NO: 1455932
acuugaggcaaauaacaca

SEQ ID NO: 1455934 - RNA, 19 nt, Artificial Sequence
  Description of Artificial Sequence: Synthetic oligonucleotide
  Sense strand starting at position 1006 of SEQ ID NO: 1243980
guuagcacaucugugggaa

SEQ ID NO: 1455935 - RNA, 19 nt, Artificial Sequence
  Description of Artificial Sequence: Synthetic oligonucleotide
  Antisense strand to SEQ ID NO: 1455934
uucccacagaugugcuaac

SEQ ID NO: 1455936 - RNA, 19 nt, Artificial Sequence
  Description of Artificial Sequence: Synthetic oligonucleotide
  Sense strand starting at position 1510 of SEQ ID NO: 1243980
gguggcugaugagugagau

SEQ ID NO: 1455937 - RNA, 19 nt, Artificial Sequence
  Description of Artificial Sequence: Synthetic oligonucleotide
  Antisense strand to SEQ ID NO: 1455936
aucucacucaucagccacc

SEQ ID NO: 1455938 - RNA, 19 nt, Artificial Sequence
  Description of Artificial Sequence: Synthetic oligonucleotide
  Sense strand starting at position 1511 of SEQ ID NO: 1243980
guggcugaugagugagaug

SEQ ID NO: 1455939 - RNA, 19 nt, Artificial Sequence
  Description of Artificial Sequence: Synthetic oligonucleotide
  Antisense strand to SEQ ID NO: 1455938
caucucacucaucagccac

SEQ ID NO: 1455940 - RNA, 19 nt, Artificial Sequence
  Description of Artificial Sequence: Synthetic oligonucleotide
  Sense strand starting at position 1796 of SEQ ID NO: 1243980
gggacuauuaccuggguca

SEQ ID NO: 1455941 - RNA, 19 nt, Artificial Sequence
  Description of Artificial Sequence: Synthetic oligonucleotide
  Antisense strand to SEQ ID NO: 1455940
ugacccagguaauaguccc

SEQ ID NO: 1455942 - RNA, 19 nt, Artificial Sequence
  Description of Artificial Sequence: Synthetic oligonucleotide
  Sense strand starting at position 1797 of SEQ ID NO: 1243980
ggacuauuaccugggucag

SEQ ID NO: 1455943 - RNA, 19 nt, Artificial Sequence
  Description of Artificial Sequence: Synthetic oligonucleotide
  Antisense strand to SEQ ID NO: 1455942
cugacccagguaauagucc

SEQ ID NO: 1455944 - RNA, 19 nt, Artificial Sequence
  Description of Artificial Sequence: Synthetic oligonucleotide
  Sense strand starting at position 1798 of SEQ ID NO: 1243980
gacuauuaccugggucagu

SEQ ID NO: 1455945 - RNA, 19 nt, Artificial Sequence
  Description of Artificial Sequence: Synthetic oligonucleotide
  Antisense strand to SEQ ID NO: 1455944
acugacccagguaauaguc

SEQ ID NO: 1455946 - RNA, 19 nt, Artificial Sequence
  Description of Artificial Sequence: Synthetic oligonucleotide
  Sense strand starting at position 2096 of SEQ ID NO: 1243980
ucugaaacuucucucuggu

SEQ ID NO: 1455947 - RNA, 19 nt, Artificial Sequence
  Description of Artificial Sequence: Synthetic oligonucleotide
  Antisense strand to SEQ ID NO: 1455946
accagagagaaguuucaga

SEQ ID NO: 1455948 - RNA, 19 nt, Artificial Sequence
  Description of Artificial Sequence: Synthetic oligonucleotide
  Sense strand starting at position 2167 of SEQ ID NO: 1243980
gggacauucuuccugccua

SEQ ID NO: 1455949 - RNA, 19 nt, Artificial Sequence
  Description of Artificial Sequence: Synthetic oligonucleotide
  Antisense strand to SEQ ID NO: 1455948
uaggcaggaagaauguccc

SEQ ID NO: 1455950 - RNA, 19 nt, Artificial Sequence
  Description of Artificial Sequence: Synthetic oligonucleotide
  Sense strand starting at position 2263 of SEQ ID NO: 1243980
acaggugucgcucaaugga

SEQ ID NO: 1455951 - RNA, 19 nt, Artificial Sequence
  Description of Artificial Sequence: Synthetic oligonucleotide
  Antisense strand to SEQ ID NO: 1455950
uccauugagcgacaccugu

SEQ ID NO: 1455952 - RNA, 19 nt, Artificial Sequence
  Description of Artificial Sequence: Synthetic oligonucleotide
  Sense strand starting at position 2391 of SEQ ID NO: 1243980
agaguugggccagaugauu

SEQ ID NO: 1455953 - RNA, 19 nt, Artificial Sequence
  Description of Artificial Sequence: Synthetic oligonucleotide
  Antisense strand to SEQ ID NO: 1455952
aaucaucuggcccaacucu

SEQ ID NO: 1455954 - RNA, 19 nt, Artificial Sequence
  Description of Artificial Sequence: Synthetic oligonucleotide
  Sense strand starting at position 2445 of SEQ ID NO: 1243980
cugaaucugccuuacuguu

SEQ ID NO: 1455955 - RNA, 19 nt, Artificial Sequence
  Description of Artificial Sequence: Synthetic oligonucleotide
  Antisense strand to SEQ ID NO: 1455954
aacaguaaggcagauucag

SEQ ID NO: 1455956 - RNA, 19 nt, Artificial Sequence
  Description of Artificial Sequence: Synthetic oligonucleotide
  Sense strand starting at position 2495 of SEQ ID NO: 1243980
agcauuuaguaugugcuua

SEQ ID NO: 1455957 - RNA, 19 nt, Artificial Sequence
  Description of Artificial Sequence: Synthetic oligonucleotide
  Antisense strand to SEQ ID NO: 1455956
uaagcacauacuaaaugcu

SEQ ID NO: 1455958 - RNA, 19 nt, Artificial Sequence
  Description of Artificial Sequence: Synthetic oligonucleotide
  Sense strand starting at position 2529 of SEQ ID NO: 1243980
gugaaugaaugaucuguga

SEQ ID NO: 1455959 - RNA, 19 nt, Artificial Sequence
  Description of Artificial Sequence: Synthetic oligonucleotide
  Antisense strand to SEQ ID NO: 1455958
ucacagaucauucauucac

SEQ ID NO: 1455960 - RNA, 19 nt, Artificial Sequence
  Description of Artificial Sequence: Synthetic oligonucleotide
  Sense strand starting at position 2670 of SEQ ID NO: 1243980
gggacauggcgagauguca

SEQ ID NO: 1455961 - RNA, 19 nt, Artificial Sequence
  Description of Artificial Sequence: Synthetic oligonucleotide
  Antisense strand to SEQ ID NO: 1455960
ugacaucucgccauguccc

SEQ ID NO: 1455962 - RNA, 19 nt, Artificial Sequence
  Description of Artificial Sequence: Synthetic oligonucleotide
  Sense strand starting at position 2746 of SEQ ID NO: 1243980
ugggcuuuauucucuugga

SEQ ID NO: 1455963 - RNA, 19 nt, Artificial Sequence
  Description of Artificial Sequence: Synthetic oligonucleotide
  Antisense strand to SEQ ID NO: 1455962
uccaagagaauaaagccca

SEQ ID NO: 1455964 - RNA, 19 nt, Artificial Sequence
  Description of Artificial Sequence: Synthetic oligonucleotide
  Sense strand starting at position 2787 of SEQ ID NO: 1243980
guagguuuacucugagaag

SEQ ID NO: 1455965 - RNA, 19 nt, Artificial Sequence
  Description of Artificial Sequence: Synthetic oligonucleotide
  Antisense strand to SEQ ID NO: 1455964
cuucucagaguaaaccuac

SEQ ID NO: 1455966 - RNA, 19 nt, Artificial Sequence
  Description of Artificial Sequence: Synthetic oligonucleotide
  Sense strand starting at position 2825 of SEQ ID NO: 1243980
ccuauugggcuuggugaga

SEQ ID NO: 1455967 - RNA, 19 nt, Artificial Sequence
  Description of Artificial Sequence: Synthetic oligonucleotide
  Antisense strand to SEQ ID NO: 1455966
ucucaccaagcccaauagg

SEQ ID NO: 1455968 - RNA, 19 nt, Artificial Sequence
  Description of Artificial Sequence: Synthetic oligonucleotide
  Sense strand starting at position 2841 of SEQ ID NO: 1243980
agaaguagcuucuuuagag

SEQ ID NO: 1455969 - RNA, 19 nt, Artificial Sequence
  Description of Artificial Sequence: Synthetic oligonucleotide
  Antisense strand to SEQ ID NO: 1455968
cucuaaagaagcuacuucu

SEQ ID NO: 1455970 - RNA, 19 nt, Artificial Sequence
  Description of Artificial Sequence: Synthetic oligonucleotide
  Sense strand starting at position 2876 of SEQ ID NO: 1243980
gggucugauuggccuggau

SEQ ID NO: 1455971 - RNA, 19 nt, Artificial Sequence
  Description of Artificial Sequence: Synthetic oligonucleotide
  Antisense strand to SEQ ID NO: 1455970
auccaggccaaucagaccc

SEQ ID NO: 1455972 - RNA, 19 nt, Artificial Sequence
  Description of Artificial Sequence: Synthetic oligonucleotide
  Sense strand starting at position 2879 of SEQ ID NO: 1243980
ucugauuggccuggauuga

SEQ ID NO: 1455973 - RNA, 19 nt, Artificial Sequence
  Description of Artificial Sequence: Synthetic oligonucleotide
  Antisense strand to SEQ ID NO: 1455972
ucaauccaggccaaucaga

SEQ ID NO: 1455974 - RNA, 19 nt, Artificial Sequence
  Description of Artificial Sequence: Synthetic oligonucleotide
  Sense strand starting at position 2880 of SEQ ID NO: 1243980
cugauuggccuggauugaa

SEQ ID NO: 1455975 - RNA, 19 nt, Artificial Sequence
  Description of Artificial Sequence: Synthetic oligonucleotide
  Antisense strand to SEQ ID NO: 1455974
uucaauccaggccaaucag

SEQ ID NO: 1455976 - RNA, 19 nt, Artificial Sequence
  Description of Artificial Sequence: Synthetic oligonucleotide
  Sense strand starting at position 3055 of SEQ ID NO: 1243980
cuggaugagccagguucau

SEQ ID NO: 1455977 - RNA, 19 nt, Artificial Sequence
  Description of Artificial Sequence: Synthetic oligonucleotide
  Antisense strand to SEQ ID NO: 1455976
augaaccuggcucauccag

SEQ ID NO: 1455978 - RNA, 19 nt, Artificial Sequence
  Description of Artificial Sequence: Synthetic oligonucleotide
  Sense strand starting at position 3351 of SEQ ID NO: 1243980
accguugcucuugaaacaa

SEQ ID NO: 1455979 - RNA, 19 nt, Artificial Sequence
  Description of Artificial Sequence: Synthetic oligonucleotide
  Antisense strand to SEQ ID NO: 1455978
uuguuucaagagcaacggu

SEQ ID NO: 1455980 - RNA, 19 nt, Artificial Sequence
  Description of Artificial Sequence: Synthetic oligonucleotide
  Sense strand starting at position 3533 of SEQ ID NO: 1243980
cacugagugacuggguaaa

SEQ ID NO: 1455981 - RNA, 19 nt, Artificial Sequence
  Description of Artificial Sequence: Synthetic oligonucleotide
  Antisense strand to SEQ ID NO: 1455980
uuuacccagucacucagug

SEQ ID NO: 1455982 - RNA, 19 nt, Artificial Sequence
  Description of Artificial Sequence: Synthetic oligonucleotide
  Sense strand starting at position 3535 of SEQ ID NO: 1243980
cugagugacuggguaaauc

SEQ ID NO: 1455983 - RNA, 19 nt, Artificial Sequence
  Description of Artificial Sequence: Synthetic oligonucleotide
  Antisense strand to SEQ ID NO: 1455982
gauuuacccagucacucag

SEQ ID NO: 1455984 - RNA, 19 nt, Artificial Sequence
  Description of Artificial Sequence: Synthetic oligonucleotide
  Sense strand starting at position 3573 of SEQ ID NO: 1243980
uuuccaaaccugugagaug

SEQ ID NO: 1455985 - RNA, 19 nt, Artificial Sequence
  Description of Artificial Sequence: Synthetic oligonucleotide
  Antisense strand to SEQ ID NO: 1455984
caucucacagguuuggaaa

SEQ ID NO: 1455986 - RNA, 19 nt, Artificial Sequence
  Description of Artificial Sequence: Synthetic oligonucleotide
  Sense strand starting at position 3772 of SEQ ID NO: 1243980
guauauaacccagguugga

SEQ ID NO: 1455987 - RNA, 19 nt, Artificial Sequence
  Description of Artificial Sequence: Synthetic oligonucleotide
  Antisense strand to SEQ ID NO: 1455986
uccaaccuggguuauauac

SEQ ID NO: 1455988 - RNA, 19 nt, Artificial Sequence
  Description of Artificial Sequence: Synthetic oligonucleotide
  Sense strand starting at position 3781 of SEQ ID NO: 1243980
ccagguuggaguuggagua

SEQ ID NO: 1455989 - RNA, 19 nt, Artificial Sequence
  Description of Artificial Sequence: Synthetic oligonucleotide
  Antisense strand to SEQ ID NO: 1455988
uacuccaacuccaaccugg

SEQ ID NO: 1455990 - RNA, 19 nt, Artificial Sequence
  Description of Artificial Sequence: Synthetic oligonucleotide
  Sense strand starting at position 3857 of SEQ ID NO: 1243980
cagaguaggguguauguaa

SEQ ID NO: 1455991 - RNA, 19 nt, Artificial Sequence
  Description of Artificial Sequence: Synthetic oligonucleotide
  Antisense strand to SEQ ID NO: 1455990
uuacauacacccuacucug

SEQ ID NO: 1455992 - RNA, 19 nt, Artificial Sequence
  Description of Artificial Sequence: Synthetic oligonucleotide
  Sense strand starting at position 533 of SEQ ID NO: 1243981
aaaggagucucagugaggu

SEQ ID NO: 1455993 - RNA, 19 nt, Artificial Sequence
  Description of Artificial Sequence: Synthetic oligonucleotide
  Antisense strand to SEQ ID NO: 1455992
accucacugagacuccuuu

SEQ ID NO: 1455994 - RNA, 19 nt, Artificial Sequence
  Description of Artificial Sequence: Synthetic oligonucleotide
  Sense strand starting at position 754 of SEQ ID NO: 1243981
ccugcucaucuaugugcaa

SEQ ID NO: 1455995 - RNA, 19 nt, Artificial Sequence
  Description of Artificial Sequence: Synthetic oligonucleotide
  Antisense strand to SEQ ID NO: 1455994
uugcacauagaugagcagg

SEQ ID NO: 1455996 - RNA, 19 nt, Artificial Sequence
  Description of Artificial Sequence: Synthetic oligonucleotide
  Sense strand starting at position 873 of SEQ ID NO: 1243981
guugaagucaccuagagcu

SEQ ID NO: 1455997 - RNA, 19 nt, Artificial Sequence
  Description of Artificial Sequence: Synthetic oligonucleotide
  Antisense strand to SEQ ID NO: 1455996
agcucuaggugacuucaac

SEQ ID NO: 1455998 - RNA, 19 nt, Artificial Sequence
  Description of Artificial Sequence: Synthetic oligonucleotide
  Sense strand starting at position 885 of SEQ ID NO: 1243981
uagagcugacuuugagacu

SEQ ID NO: 1455999 - RNA, 19 nt, Artificial Sequence
  Description of Artificial Sequence: Synthetic oligonucleotide
  Antisense strand to SEQ ID NO: 1455998
agucucaaagucagcucua

SEQ ID NO: 1456000 - RNA, 19 nt, Artificial Sequence
  Description of Artificial Sequence: Synthetic oligonucleotide
  Sense strand starting at position 896 of SEQ ID NO: 1243981
uugagacuuuggcccuuaa

SEQ ID NO: 1456001 - RNA, 19 nt, Artificial Sequence
  Description of Artificial Sequence: Synthetic oligonucleotide
  Antisense strand to SEQ ID NO: 1456000
uuaagggccaaagucucaa

SEQ ID NO: 1456002 - RNA, 19 nt, Artificial Sequence
  Description of Artificial Sequence: Synthetic oligonucleotide
  Sense strand starting at position 1086 of SEQ ID NO: 1243981
aauguauagcugugccuga

SEQ ID NO: 1456003 - RNA, 19 nt, Artificial Sequence
  Description of Artificial Sequence: Synthetic oligonucleotide
  Antisense strand to SEQ ID NO: 1456002
ucaggcacagcuauacauu

SEQ ID NO: 1456004 - RNA, 19 nt, Artificial Sequence
  Description of Artificial Sequence: Synthetic oligonucleotide
  Sense strand starting at position 1090 of SEQ ID NO: 1243981
uauagcugugccugagaag

SEQ ID NO: 1456005 - RNA, 19 nt, Artificial Sequence
  Description of Artificial Sequence: Synthetic oligonucleotide
  Antisense strand to SEQ ID NO: 1456004
cuucucaggcacagcuaua

SEQ ID NO: 1456006 - RNA, 19 nt, Artificial Sequence
  Description of Artificial Sequence: Synthetic oligonucleotide
  Sense strand starting at position 1091 of SEQ ID NO: 1243981
auagcugugccugagaagu

SEQ ID NO: 1456007 - RNA, 19 nt, Artificial Sequence
  Description of Artificial Sequence: Synthetic oligonucleotide
  Antisense strand to SEQ ID NO: 1456006
acuucucaggcacagcuau

SEQ ID NO: 1456008 - RNA, 19 nt, Artificial Sequence
  Description of Artificial Sequence: Synthetic oligonucleotide
  Sense strand starting at position 1097 of SEQ ID NO: 1243981
gugccugagaagugaaugu

SEQ ID NO: 1456009 - RNA, 19 nt, Artificial Sequence
  Description of Artificial Sequence: Synthetic oligonucleotide
  Antisense strand to SEQ ID NO: 1456008
acauucacuucucaggcac

SEQ ID NO: 1456010 - RNA, 19 nt, Artificial Sequence
  Description of Artificial Sequence: Synthetic oligonucleotide
  Sense strand starting at position 1101 of SEQ ID NO: 1243981
cugagaagugaauguacau

SEQ ID NO: 1456011 - RNA, 19 nt, Artificial Sequence
  Description of Artificial Sequence: Synthetic oligonucleotide
  Antisense strand to SEQ ID NO: 1456010
auguacauucacuucucag

SEQ ID NO: 1456012 - RNA, 19 nt, Artificial Sequence
  Description of Artificial Sequence: Synthetic oligonucleotide
  Sense strand starting at position 1108 of SEQ ID NO: 1243981
gugaauguacaugaaagca

SEQ ID NO: 1456013 - RNA, 19 nt, Artificial Sequence
  Description of Artificial Sequence: Synthetic oligonucleotide
  Antisense strand to SEQ ID NO: 1456012
ugcuuucauguacauucac

SEQ ID NO: 1456014 - RNA, 19 nt, Artificial Sequence
  Description of Artificial Sequence: Synthetic oligonucleotide
  Sense strand starting at position 1143 of SEQ ID NO: 1243981
gccagauauuuccucagcu

SEQ ID NO: 1456015 - RNA, 19 nt, Artificial Sequence
  Description of Artificial Sequence: Synthetic oligonucleotide
  Antisense strand to SEQ ID NO: 1456014
agcugaggaaauaucuggc

SEQ ID NO: 1456016 - RNA, 19 nt, Artificial Sequence
  Description of Artificial Sequence: Synthetic oligonucleotide
  Sense strand starting at position 1348 of SEQ ID NO: 1243981
accggacacuguuugaaga

SEQ ID NO: 1456017 - RNA, 19 nt, Artificial Sequence
  Description of Artificial Sequence: Synthetic oligonucleotide
  Antisense strand to SEQ ID NO: 1456016
ucuucaaacaguguccggu

SEQ ID NO: 1456018 - RNA, 19 nt, Artificial Sequence
  Description of Artificial Sequence: Synthetic oligonucleotide
  Sense strand starting at position 1349 of SEQ ID NO: 1243981
ccggacacuguuugaagaa

SEQ ID NO: 1456019 - RNA, 19 nt, Artificial Sequence
  Description of Artificial Sequence: Synthetic oligonucleotide
  Antisense strand to SEQ ID NO: 1456018
uucuucaaacaguguccgg

SEQ ID NO: 1456020 - RNA, 19 nt, Artificial Sequence
  Description of Artificial Sequence: Synthetic oligonucleotide
  Sense strand starting at position 1364 of SEQ ID NO: 1243981
agaauaaagugugcuguuu

SEQ ID NO: 1456021 - RNA, 19 nt, Artificial Sequence
  Description of Artificial Sequence: Synthetic oligonucleotide
  Antisense strand to SEQ ID NO: 1456020
aaacagcacacuuuauucu

SEQ ID NO: 1456022 - RNA, 19 nt, Artificial Sequence
  Description of Artificial Sequence: Synthetic oligonucleotide
  Sense strand starting at position 1386 of SEQ ID NO: 1243981
agguguaacugugucuuaa

SEQ ID NO: 1456023 - RNA, 19 nt, Artificial Sequence
  Description of Artificial Sequence: Synthetic oligonucleotide
  Antisense strand to SEQ ID NO: 1456022
uuaagacacaguuacaccu

SEQ ID NO: 1456024 - RNA, 19 nt, Artificial Sequence
  Description of Artificial Sequence: Synthetic oligonucleotide
  Sense strand starting at position 1388 of SEQ ID NO: 1243981
guguaacugugucuuaaca

SEQ ID NO: 1456025 - RNA, 19 nt, Artificial Sequence
  Description of Artificial Sequence: Synthetic oligonucleotide
  Antisense strand to SEQ ID NO: 1456024
uguuaagacacaguuacac

SEQ ID NO: 1456026 - RNA, 19 nt, Artificial Sequence
  Description of Artificial Sequence: Synthetic oligonucleotide
  Sense strand starting at position 1422 of SEQ ID NO: 1243981
acaugcauuuacuggauca

SEQ ID NO: 1456027 - RNA, 19 nt, Artificial Sequence
  Description of Artificial Sequence: Synthetic oligonucleotide
  Antisense strand to SEQ ID NO: 1456026
ugauccaguaaaugcaugu

SEQ ID NO: 1456028 - RNA, 19 nt, Artificial Sequence
  Description of Artificial Sequence: Synthetic oligonucleotide
  Sense strand starting at position 1495 of SEQ ID NO: 1243981
aucucaugcucuuuaguga

SEQ ID NO: 1456029 - RNA, 19 nt, Artificial Sequence
  Description of Artificial Sequence: Synthetic oligonucleotide
  Antisense strand to SEQ ID NO: 1456028
ucacuaaagagcaugagau

SEQ ID NO: 1456030 - RNA, 19 nt, Artificial Sequence
  Description of Artificial Sequence: Synthetic oligonucleotide
  Sense strand starting at position 1526 of SEQ ID NO: 1243981
gugaccagaucguuuccuu

SEQ ID NO: 1456031 - RNA, 19 nt, Artificial Sequence
  Description of Artificial Sequence: Synthetic oligonucleotide
  Antisense strand to SEQ ID NO: 1456030
aaggaaacgaucuggucac

SEQ ID NO: 1456032 - RNA, 19 nt, Artificial Sequence
  Description of Artificial Sequence: Synthetic oligonucleotide
  Sense strand starting at position 1560 of SEQ ID NO: 1243981
uuauuucucuccugagaga

SEQ ID NO: 1456033 - RNA, 19 nt, Artificial Sequence
  Description of Artificial Sequence: Synthetic oligonucleotide
  Antisense strand to SEQ ID NO: 1456032
ucucucaggagagaaauaa

SEQ ID NO: 1456034 - RNA, 19 nt, Artificial Sequence
  Description of Artificial Sequence: Synthetic oligonucleotide
  Sense strand starting at position 1563 of SEQ ID NO: 1243981
uuucucuccugagagauuu

SEQ ID NO: 1456035 - RNA, 19 nt, Artificial Sequence
  Description of Artificial Sequence: Synthetic oligonucleotide
  Antisense strand to SEQ ID NO: 1456034
aaaucucucaggagagaaa

SEQ ID NO: 1456036 - RNA, 19 nt, Artificial Sequence
  Description of Artificial Sequence: Synthetic oligonucleotide
  Sense strand starting at position 1675 of SEQ ID NO: 1243981
gacaguuccgagcaaaccu

SEQ ID NO: 1456037 - RNA, 19 nt, Artificial Sequence
  Description of Artificial Sequence: Synthetic oligonucleotide
  Antisense strand to SEQ ID NO: 1456036
agguuugcucggaacuguc

SEQ ID NO: 1456038 - RNA, 19 nt, Artificial Sequence
  Description of Artificial Sequence: Synthetic oligonucleotide
  Sense strand starting at position 2028 of SEQ ID NO: 1243981
gcuccuacgauugaacaga

SEQ ID NO: 1456039 - RNA, 19 nt, Artificial Sequence
  Description of Artificial Sequence: Synthetic oligonucleotide
  Antisense strand to SEQ ID NO: 1456038
ucuguucaaucguaggagc

SEQ ID NO: 1456040 - RNA, 19 nt, Artificial Sequence
  Description of Artificial Sequence: Synthetic oligonucleotide
  Sense strand starting at position 2073 of SEQ ID NO: 1243981
agagguaggucugcccaaa

SEQ ID NO: 1456041 - RNA, 19 nt, Artificial Sequence
  Description of Artificial Sequence: Synthetic oligonucleotide
  Antisense strand to SEQ ID NO: 1456040
uuugggcagaccuaccucu

SEQ ID NO: 1456042 - RNA, 19 nt, Artificial Sequence
  Description of Artificial Sequence: Synthetic oligonucleotide
  Sense strand starting at position 2174 of SEQ ID NO: 1243981
guauuuagagucugugcaa

SEQ ID NO: 1456043 - RNA, 19 nt, Artificial Sequence
  Description of Artificial Sequence: Synthetic oligonucleotide
  Antisense strand to SEQ ID NO: 1456042
uugcacagacucuaaauac

SEQ ID NO: 1456044 - RNA, 19 nt, Artificial Sequence
  Description of Artificial Sequence: Synthetic oligonucleotide
  Sense strand starting at position 2332 of SEQ ID NO: 1243981
gggaggaaugguuguggga

SEQ ID NO: 1456045 - RNA, 19 nt, Artificial Sequence
  Description of Artificial Sequence: Synthetic oligonucleotide
  Antisense strand to SEQ ID NO: 1456044
ucccacaaccauuccuccc

SEQ ID NO: 1456046 - RNA, 19 nt, Artificial Sequence
  Description of Artificial Sequence: Synthetic oligonucleotide
  Sense strand starting at position 2448 of SEQ ID NO: 1243981
cuuaauuuggcuugcccua

SEQ ID NO: 1456047 - RNA, 19 nt, Artificial Sequence
  Description of Artificial Sequence: Synthetic oligonucleotide
  Antisense strand to SEQ ID NO: 1456046
uagggcaagccaaauuaag

SEQ ID NO: 1456048 - RNA, 19 nt, Artificial Sequence
  Description of Artificial Sequence: Synthetic oligonucleotide
  Sense strand starting at position 2494 of SEQ ID NO: 1243981
gcaccuuugcuuuaggcua

SEQ ID NO: 1456049 - RNA, 19 nt, Artificial Sequence
  Description of Artificial Sequence: Synthetic oligonucleotide
  Antisense strand to SEQ ID NO: 1456048
uagccuaaagcaaaggugc

SEQ ID NO: 1456050 - RNA, 19 nt, Artificial Sequence
  Description of Artificial Sequence: Synthetic oligonucleotide
  Sense strand starting at position 2540 of SEQ ID NO: 1243981
cgguguuugggaugaagag

SEQ ID NO: 1456051 - RNA, 19 nt, Artificial Sequence
  Description of Artificial Sequence: Synthetic oligonucleotide
  Antisense strand to SEQ ID NO: 1456050
cucuucaucccaaacaccg

SEQ ID NO: 1456052 - RNA, 19 nt, Artificial Sequence
  Description of Artificial Sequence: Synthetic oligonucleotide
  Sense strand starting at position 2576 of SEQ ID NO: 1243981
ccuguaagccuuggcuacu

SEQ ID NO: 1456053 - RNA, 19 nt, Artificial Sequence
  Description of Artificial Sequence: Synthetic oligonucleotide
  Antisense strand to SEQ ID NO: 1456052
aguagccaaggcuuacagg

SEQ ID NO: 1456054 - RNA, 19 nt, Artificial Sequence
  Description of Artificial Sequence: Synthetic oligonucleotide
  Sense strand starting at position 3091 of SEQ ID NO: 1243981
gagauaaacuuugguagag

SEQ ID NO: 1456055 - RNA, 19 nt, Artificial Sequence
  Description of Artificial Sequence: Synthetic oligonucleotide
  Antisense strand to SEQ ID NO: 1456054
cucuaccaaaguuuaucuc

SEQ ID NO: 1456056 - RNA, 19 nt, Artificial Sequence
  Description of Artificial Sequence: Synthetic oligonucleotide
  Sense strand starting at position 3122 of SEQ ID NO: 1243981
aaggaagguucuuagaguc

SEQ ID NO: 1456057 - RNA, 19 nt, Artificial Sequence
  Description of Artificial Sequence: Synthetic oligonucleotide
  Antisense strand to SEQ ID NO: 1456056
gacucuaagaaccuuccuu

SEQ ID NO: 1456058 - RNA, 19 nt, Artificial Sequence
  Description of Artificial Sequence: Synthetic oligonucleotide
  Sense strand starting at position 3266 of SEQ ID NO: 1243981
ugcuaacaugccugacuau

SEQ ID NO: 1456059 - RNA, 19 nt, Artificial Sequence
  Description of Artificial Sequence: Synthetic oligonucleotide
  Antisense strand to SEQ ID NO: 1456058
auagucaggcauguuagca

SEQ ID NO: 1456060 - RNA, 19 nt, Artificial Sequence
  Description of Artificial Sequence: Synthetic oligonucleotide
  Sense strand starting at position 3319 of SEQ ID NO: 1243981
cuguccugugcugggaaua

SEQ ID NO: 1456061 - RNA, 19 nt, Artificial Sequence
  Description of Artificial Sequence: Synthetic oligonucleotide
  Antisense strand to SEQ ID NO: 1456060
uauucccagcacaggacag

SEQ ID NO: 1456062 - RNA, 19 nt, Artificial Sequence
  Description of Artificial Sequence: Synthetic oligonucleotide
  Sense strand starting at position 3358 of SEQ ID NO: 1243981
agaaaucucuaucacggga

SEQ ID NO: 1456063 - RNA, 19 nt, Artificial Sequence
  Description of Artificial Sequence: Synthetic oligonucleotide
  Antisense strand to SEQ ID NO: 1456062
ucccgugauagagauuucu

SEQ ID NO: 1456064 - RNA, 19 nt, Artificial Sequence
  Description of Artificial Sequence: Synthetic oligonucleotide
  Sense strand starting at position 3563 of SEQ ID NO: 1243981
uggaaauuaugguaucuaa

SEQ ID NO: 1456065 - RNA, 19 nt, Artificial Sequence
  Description of Artificial Sequence: Synthetic oligonucleotide
  Antisense strand to SEQ ID NO: 1456064
uuagauaccauaauuucca

SEQ ID NO: 1456066 - RNA, 19 nt, Artificial Sequence
  Description of Artificial Sequence: Synthetic oligonucleotide
  Sense strand starting at position 3574 of SEQ ID NO: 1243981
guaucuaaauucccuggga

SEQ ID NO: 1456067 - RNA, 19 nt, Artificial Sequence
  Description of Artificial Sequence: Synthetic oligonucleotide
  Antisense strand to SEQ ID NO: 1456066
ucccagggaauuuagauac

SEQ ID NO: 1456068 - RNA, 19 nt, Artificial Sequence
  Description of Artificial Sequence: Synthetic oligonucleotide
  Sense strand starting at position 3590 of SEQ ID NO: 1243981
ggaagacaccacuguauau

SEQ ID NO: 1456069 - RNA, 19 nt, Artificial Sequence
  Description of Artificial Sequence: Synthetic oligonucleotide
  Antisense strand to SEQ ID NO: 1456068
auauacaguggugucuucc

SEQ ID NO: 1456070 - RNA, 19 nt, Artificial Sequence
  Description of Artificial Sequence: Synthetic oligonucleotide
  Sense strand starting at position 3602 of SEQ ID NO: 1243981
uguauauucuggcuauccu

SEQ ID NO: 1456071 - RNA, 19 nt, Artificial Sequence
  Description of Artificial Sequence: Synthetic oligonucleotide
  Antisense strand to SEQ ID NO: 1456070
aggauagccagaauauaca

SEQ ID NO: 1456072 - RNA, 19 nt, Artificial Sequence
  Description of Artificial Sequence: Synthetic oligonucleotide
  Sense strand starting at position 726 of SEQ ID NO: 1243982
guaucaguuggguggucaa

SEQ ID NO: 1456073 - RNA, 19 nt, Artificial Sequence
  Description of Artificial Sequence: Synthetic oligonucleotide
  Antisense strand to SEQ ID NO: 1456072
uugaccacccaacugauac

SEQ ID NO: 1456074 - RNA, 19 nt, Artificial Sequence
  Description of Artificial Sequence: Synthetic oligonucleotide
  Sense strand starting at position 909 of SEQ ID NO: 1243982
cagaaauguuuguuaagug

SEQ ID NO: 1456075 - RNA, 19 nt, Artificial Sequence
  Description of Artificial Sequence: Synthetic oligonucleotide
  Antisense strand to SEQ ID NO: 1456074
cacuuaacaaacauuucug

SEQ ID NO: 1456076 - RNA, 19 nt, Artificial Sequence
  Description of Artificial Sequence: Synthetic oligonucleotide
  Sense strand starting at position 914 of SEQ ID NO: 1243982
auguuuguuaagugaguga

SEQ ID NO: 1456077 - RNA, 19 nt, Artificial Sequence
  Description of Artificial Sequence: Synthetic oligonucleotide
  Antisense strand to SEQ ID NO: 1456076
ucacucacuuaacaaacau

SEQ ID NO: 1456078 - RNA, 19 nt, Artificial Sequence
  Description of Artificial Sequence: Synthetic oligonucleotide
  Sense strand starting at position 1020 of SEQ ID NO: 1243982
aagggugauccuuagcuac

SEQ ID NO: 1456079 - RNA, 19 nt, Artificial Sequence
  Description of Artificial Sequence: Synthetic oligonucleotide
  Antisense strand to SEQ ID NO: 1456078
guagcuaaggaucacccuu

SEQ ID NO: 1456080 - RNA, 19 nt, Artificial Sequence
  Description of Artificial Sequence: Synthetic oligonucleotide
  Sense strand starting at position 1022 of SEQ ID NO: 1243982
gggugauccuuagcuacaa

SEQ ID NO: 1456081 - RNA, 19 nt, Artificial Sequence
  Description of Artificial Sequence: Synthetic oligonucleotide
  Antisense strand to SEQ ID NO: 1456080
uuguagcuaaggaucaccc

SEQ ID NO: 1456082 - RNA, 19 nt, Artificial Sequence
  Description of Artificial Sequence: Synthetic oligonucleotide
  Sense strand starting at position 1164 of SEQ ID NO: 1243982
cuccgaucucagugcagaa

SEQ ID NO: 1456083 - RNA, 19 nt, Artificial Sequence
  Description of Artificial Sequence: Synthetic oligonucleotide
  Antisense strand to SEQ ID NO: 1456082
uucugcacugagaucggag

SEQ ID NO: 1456084 - RNA, 19 nt, Artificial Sequence
  Description of Artificial Sequence: Synthetic oligonucleotide
  Sense strand starting at position 1174 of SEQ ID NO: 1243982
agugcagaaccauacugau

SEQ ID NO: 1456085 - RNA, 19 nt, Artificial Sequence
  Description of Artificial Sequence: Synthetic oligonucleotide
  Antisense strand to SEQ ID NO: 1456084
aucaguaugguucugcacu

SEQ ID NO: 1456086 - RNA, 19 nt, Artificial Sequence
  Description of Artificial Sequence: Synthetic oligonucleotide
  Sense strand starting at position 1217 of SEQ ID NO: 1243982
aguucuuauguugauguau

SEQ ID NO: 1456087 - RNA, 19 nt, Artificial Sequence
  Description of Artificial Sequence: Synthetic oligonucleotide
  Antisense strand to SEQ ID NO: 1456086
auacaucaacauaagaacu

SEQ ID NO: 1456088 - RNA, 19 nt, Artificial Sequence
  Description of Artificial Sequence: Synthetic oligonucleotide
  Sense strand starting at position 1520 of SEQ ID NO: 1243982
aggguuuguggagacugua

SEQ ID NO: 1456089 - RNA, 19 nt, Artificial Sequence
  Description of Artificial Sequence: Synthetic oligonucleotide
  Antisense strand to SEQ ID NO: 1456088
uacagucuccacaaacccu

SEQ ID NO: 1456090 - RNA, 19 nt, Artificial Sequence
  Description of Artificial Sequence: Synthetic oligonucleotide
  Sense strand starting at position 1523 of SEQ ID NO: 1243982
guuuguggagacuguauuu

SEQ ID NO: 1456091 - RNA, 19 nt, Artificial Sequence
  Description of Artificial Sequence: Synthetic oligonucleotide
  Antisense strand to SEQ ID NO: 1456090
aaauacagucuccacaaac

SEQ ID NO: 1456092 - RNA, 19 nt, Artificial Sequence
  Description of Artificial Sequence: Synthetic oligonucleotide
  Sense strand starting at position 1550 of SEQ ID NO: 1243982
guaauugggagccaguaaa

SEQ ID NO: 1456093 - RNA, 19 nt, Artificial Sequence
  Description of Artificial Sequence: Synthetic oligonucleotide
  Antisense strand to SEQ ID NO: 1456092
uuuacuggcucccaauuac

SEQ ID NO: 1456094 - RNA, 19 nt, Artificial Sequence
  Description of Artificial Sequence: Synthetic oligonucleotide
  Sense strand starting at position 1680 of SEQ ID NO: 1243982
cugucuuggcgacacauga

SEQ ID NO: 1456095 - RNA, 19 nt, Artificial Sequence
  Description of Artificial Sequence: Synthetic oligonucleotide
  Antisense strand to SEQ ID NO: 1456094
ucaugugucgccaagacag

SEQ ID NO: 1456096 - RNA, 19 nt, Artificial Sequence
  Description of Artificial Sequence: Synthetic oligonucleotide
  Sense strand starting at position 1693 of SEQ ID NO: 1243982
acaugauggugucuuuaac

SEQ ID NO: 1456097 - RNA, 19 nt, Artificial Sequence
  Description of Artificial Sequence: Synthetic oligonucleotide
  Antisense strand to SEQ ID NO: 1456096
guuaaagacaccaucaugu

SEQ ID NO: 1456098 - RNA, 19 nt, Artificial Sequence
  Description of Artificial Sequence: Synthetic oligonucleotide
  Sense strand starting at position 1744 of SEQ ID NO: 1243982
gauaguuacagguacguuu

SEQ ID NO: 1456099 - RNA, 19 nt, Artificial Sequence
  Description of Artificial Sequence: Synthetic oligonucleotide
  Antisense strand to SEQ ID NO: 1456098
aaacguaccuguaacuauc

SEQ ID NO: 1456100 - RNA, 19 nt, Artificial Sequence
  Description of Artificial Sequence: Synthetic oligonucleotide
  Sense strand starting at position 2229 of SEQ ID NO: 1243982
gccaaucuacaugagucua

SEQ ID NO: 1456101 - RNA, 19 nt, Artificial Sequence
  Description of Artificial Sequence: Synthetic oligonucleotide
  Antisense strand to SEQ ID NO: 1456100
uagacucauguagauuggc

SEQ ID NO: 1456102 - RNA, 19 nt, Artificial Sequence
  Description of Artificial Sequence: Synthetic oligonucleotide
  Sense strand starting at position 2354 of SEQ ID NO: 1243982
gucucuuaugaaugugagu

SEQ ID NO: 1456103 - RNA, 19 nt, Artificial Sequence
  Description of Artificial Sequence: Synthetic oligonucleotide
  Antisense strand to SEQ ID NO: 1456102
acucacauucauaagagac

SEQ ID NO: 1456104 - RNA, 19 nt, Artificial Sequence
  Description of Artificial Sequence: Synthetic oligonucleotide
  Sense strand starting at position 2356 of SEQ ID NO: 1243982
cucuuaugaaugugaguga

SEQ ID NO: 1456105 - RNA, 19 nt, Artificial Sequence
  Description of Artificial Sequence: Synthetic oligonucleotide
  Antisense strand to SEQ ID NO: 1456104
ucacucacauucauaagag

SEQ ID NO: 1456106 - RNA, 19 nt, Artificial Sequence
  Description of Artificial Sequence: Synthetic oligonucleotide
  Sense strand starting at position 2476 of SEQ ID NO: 1243982
ggccacaaugucuaggaau

SEQ ID NO: 1456107 - RNA, 19 nt, Artificial Sequence
  Description of Artificial Sequence: Synthetic oligonucleotide
  Antisense strand to SEQ ID NO: 1456106
auuccuagacauuguggcc

SEQ ID NO: 1456108 - RNA, 19 nt, Artificial Sequence
  Description of Artificial Sequence: Synthetic oligonucleotide
  Sense strand starting at position 2594 of SEQ ID NO: 1243982
gaaagacucuuugauuagg

SEQ ID NO: 1456109 - RNA, 19 nt, Artificial Sequence
  Description of Artificial Sequence: Synthetic oligonucleotide
  Antisense strand to SEQ ID NO: 1456108
ccuaaucaaagagucuuuc

SEQ ID NO: 1456110 - RNA, 19 nt, Artificial Sequence
  Description of Artificial Sequence: Synthetic oligonucleotide
  Sense strand starting at position 2611 of SEQ ID NO: 1243982
ggaagcauuugggauagga

SEQ ID NO: 1456111 - RNA, 19 nt, Artificial Sequence
  Description of Artificial Sequence: Synthetic oligonucleotide
  Antisense strand to SEQ ID NO: 1456110
uccuaucccaaaugcuucc

SEQ ID NO: 1456112 - RNA, 19 nt, Artificial Sequence
  Description of Artificial Sequence: Synthetic oligonucleotide
  Sense strand starting at position 2621 of SEQ ID NO: 1243982
gggauaggaaggugucagu

SEQ ID NO: 1456113 - RNA, 19 nt, Artificial Sequence
  Description of Artificial Sequence: Synthetic oligonucleotide
  Antisense strand to SEQ ID NO: 1456112
acugacaccuuccuauccc

SEQ ID NO: 1456114 - RNA, 19 nt, Artificial Sequence
  Description of Artificial Sequence: Synthetic oligonucleotide
  Sense strand starting at position 2632 of SEQ ID NO: 1243982
gugucaguuccggcuuuga

SEQ ID NO: 1456115 - RNA, 19 nt, Artificial Sequence
  Description of Artificial Sequence: Synthetic oligonucleotide
  Antisense strand to SEQ ID NO: 1456114
ucaaagccggaacugacac

SEQ ID NO: 1456116 - RNA, 19 nt, Artificial Sequence
  Description of Artificial Sequence: Synthetic oligonucleotide
  Sense strand starting at position 2695 of SEQ ID NO: 1243982
gggacuuuggacugguaca

SEQ ID NO: 1456117 - RNA, 19 nt, Artificial Sequence
  Description of Artificial Sequence: Synthetic oligonucleotide
  Antisense strand to SEQ ID NO: 1456116
uguaccaguccaaaguccc

SEQ ID NO: 1456118 - RNA, 19 nt, Artificial Sequence
  Description of Artificial Sequence: Synthetic oligonucleotide
  Sense strand starting at position 2696 of SEQ ID NO: 1243982
ggacuuuggacugguacau

SEQ ID NO: 1456119 - RNA, 19 nt, Artificial Sequence
  Description of Artificial Sequence: Synthetic oligonucleotide
  Antisense strand to SEQ ID NO: 1456118
auguaccaguccaaagucc

SEQ ID NO: 1456120 - RNA, 19 nt, Artificial Sequence
  Description of Artificial Sequence: Synthetic oligonucleotide
  Sense strand starting at position 2711 of SEQ ID NO: 1243982
acauucgauuuggaccaua

SEQ ID NO: 1456121 - RNA, 19 nt, Artificial Sequence
  Description of Artificial Sequence: Synthetic oligonucleotide
  Antisense strand to SEQ ID NO: 1456120
uaugguccaaaucgaaugu

SEQ ID NO: 1456122 - RNA, 19 nt, Artificial Sequence
  Description of Artificial Sequence: Synthetic oligonucleotide
  Sense strand starting at position 2808 of SEQ ID NO: 1243982
uugagauaguuucucuaau

SEQ ID NO: 1456123 - RNA, 19 nt, Artificial Sequence
  Description of Artificial Sequence: Synthetic oligonucleotide
  Antisense strand to SEQ ID NO: 1456122
auuagagaaacuaucucaa

SEQ ID NO: 1456124 - RNA, 19 nt, Artificial Sequence
  Description of Artificial Sequence: Synthetic oligonucleotide
  Sense strand starting at position 2809 of SEQ ID NO: 1243982
ugagauaguuucucuaauc

SEQ ID NO: 1456125 - RNA, 19 nt, Artificial Sequence
  Description of Artificial Sequence: Synthetic oligonucleotide
  Antisense strand to SEQ ID NO: 1456124
gauuagagaaacuaucuca

SEQ ID NO: 1456126 - RNA, 19 nt, Artificial Sequence
  Description of Artificial Sequence: Synthetic oligonucleotide
  Sense strand starting at position 2879 of SEQ ID NO: 1243982
acagccaguauguaguaaa

SEQ ID NO: 1456127 - RNA, 19 nt, Artificial Sequence
  Description of Artificial Sequence: Synthetic oligonucleotide
  Antisense strand to SEQ ID NO: 1456126
uuuacuacauacuggcugu

SEQ ID NO: 1456128 - RNA, 19 nt, Artificial Sequence
  Description of Artificial Sequence: Synthetic oligonucleotide
  Sense strand starting at position 2887 of SEQ ID NO: 1243982
uauguaguaaaguggaguu

SEQ ID NO: 1456129 - RNA, 19 nt, Artificial Sequence
  Description of Artificial Sequence: Synthetic oligonucleotide
  Antisense strand to SEQ ID NO: 1456128
aacuccacuuuacuacaua

SEQ ID NO: 1456130 - RNA, 19 nt, Artificial Sequence
  Description of Artificial Sequence: Synthetic oligonucleotide
  Sense strand starting at position 2917 of SEQ ID NO: 1243982
ccuguuugaccacaagcuu

SEQ ID NO: 1456131 - RNA, 19 nt, Artificial Sequence
  Description of Artificial Sequence: Synthetic oligonucleotide
  Antisense strand to SEQ ID NO: 1456130
aagcuuguggucaaacagg

SEQ ID NO: 1456132 - RNA, 19 nt, Artificial Sequence
  Description of Artificial Sequence: Synthetic oligonucleotide
  Sense strand starting at position 2932 of SEQ ID NO: 1243982
gcuuguccucuuuacuauu

SEQ ID NO: 1456133 - RNA, 19 nt, Artificial Sequence
  Description of Artificial Sequence: Synthetic oligonucleotide
  Antisense strand to SEQ ID NO: 1456132
aauaguaaagaggacaagc

SEQ ID NO: 1456134 - RNA, 19 nt, Artificial Sequence
  Description of Artificial Sequence: Synthetic oligonucleotide
  Sense strand starting at position 3059 of SEQ ID NO: 1243982
aguagugaccaauacgguu

SEQ ID NO: 1456135 - RNA, 19 nt, Artificial Sequence
  Description of Artificial Sequence: Synthetic oligonucleotide
  Antisense strand to SEQ ID NO: 1456134
aaccguauuggucacuacu

SEQ ID NO: 1456136 - RNA, 19 nt, Artificial Sequence
  Description of Artificial Sequence: Synthetic oligonucleotide
  Sense strand starting at position 3065 of SEQ ID NO: 1243982
gaccaauacgguuggaaag

SEQ ID NO: 1456137 - RNA, 19 nt, Artificial Sequence
  Description of Artificial Sequence: Synthetic oligonucleotide
  Antisense strand to SEQ ID NO: 1456136
cuuuccaaccguauugguc

SEQ ID NO: 1456138 - RNA, 19 nt, Artificial Sequence
  Description of Artificial Sequence: Synthetic oligonucleotide
  Sense strand starting at position 3156 of SEQ ID NO: 1243982
gaacuccuuccaggagagu

SEQ ID NO: 1456139 - RNA, 19 nt, Artificial Sequence
  Description of Artificial Sequence: Synthetic oligonucleotide
  Antisense strand to SEQ ID NO: 1456138
acucuccuggaaggaguuc

SEQ ID NO: 1456140 - RNA, 19 nt, Artificial Sequence
  Description of Artificial Sequence: Synthetic oligonucleotide
  Sense strand starting at position 3249 of SEQ ID NO: 1243982
ucuugauggacuugagcaa

SEQ ID NO: 1456141 - RNA, 19 nt, Artificial Sequence
  Description of Artificial Sequence: Synthetic oligonucleotide
  Antisense strand to SEQ ID NO: 1456140
uugcucaaguccaucaaga

SEQ ID NO: 1456142 - RNA, 19 nt, Artificial Sequence
  Description of Artificial Sequence: Synthetic oligonucleotide
  Sense strand starting at position 3272 of SEQ ID NO: 1243982
agaggaaaugucugccaag

SEQ ID NO: 1456143 - RNA, 19 nt, Artificial Sequence
  Description of Artificial Sequence: Synthetic oligonucleotide
  Antisense strand to SEQ ID NO: 1456142
cuuggcagacauuuccucu

SEQ ID NO: 1456144 - RNA, 19 nt, Artificial Sequence
  Description of Artificial Sequence: Synthetic oligonucleotide
  Sense strand starting at position 3278 of SEQ ID NO: 1243982
aaugucugccaagguagaa

SEQ ID NO: 1456145 - RNA, 19 nt, Artificial Sequence
  Description of Artificial Sequence: Synthetic oligonucleotide
  Antisense strand to SEQ ID NO: 1456144
uucuaccuuggcagacauu

SEQ ID NO: 1456146 - RNA, 19 nt, Artificial Sequence
  Description of Artificial Sequence: Synthetic oligonucleotide
  Sense strand starting at position 3291 of SEQ ID NO: 1243982
guagaaagaucaucugagc

SEQ ID NO: 1456147 - RNA, 19 nt, Artificial Sequence
  Description of Artificial Sequence: Synthetic oligonucleotide
  Antisense strand to SEQ ID NO: 1456146
gcucagaugaucuuucuac

SEQ ID NO: 1456148 - RNA, 19 nt, Artificial Sequence
  Description of Artificial Sequence: Synthetic oligonucleotide
  Sense strand starting at position 3382 of SEQ ID NO: 1243982
cauuguggucucgcuacuu

SEQ ID NO: 1456149 - RNA, 19 nt, Artificial Sequence
  Description of Artificial Sequence: Synthetic oligonucleotide
  Antisense strand to SEQ ID NO: 1456148
aaguagcgagaccacaaug

SEQ ID NO: 1456150 - RNA, 19 nt, Artificial Sequence
  Description of Artificial Sequence: Synthetic oligonucleotide
  Sense strand starting at position 3829 of SEQ ID NO: 1243982
agacgaauaucucuaauug

SEQ ID NO: 1456151 - RNA, 19 nt, Artificial Sequence
  Description of Artificial Sequence: Synthetic oligonucleotide
  Antisense strand to SEQ ID NO: 1456150
caauuagagauauucgucu

SEQ ID NO: 1456152 - RNA, 19 nt, Artificial Sequence
  Description of Artificial Sequence: Synthetic oligonucleotide
  Sense strand starting at position 89 of SEQ ID NO: 1243983
ugaagaugcuugucuggga

SEQ ID NO: 1456153 - RNA, 19 nt, Artificial Sequence
  Description of Artificial Sequence: Synthetic oligonucleotide
  Antisense strand to SEQ ID NO: 1456152
ucccagacaagcaucuuca

SEQ ID NO: 1456154 - RNA, 19 nt, Artificial Sequence
  Description of Artificial Sequence: Synthetic oligonucleotide
  Sense strand starting at position 90 of SEQ ID NO: 1243983
gaagaugcuugucugggaa

SEQ ID NO: 1456155 - RNA, 19 nt, Artificial Sequence
  Description of Artificial Sequence: Synthetic oligonucleotide
  Antisense strand to SEQ ID NO: 1456154
uucccagacaagcaucuuc

SEQ ID NO: 1456156 - RNA, 19 nt, Artificial Sequence
  Description of Artificial Sequence: Synthetic oligonucleotide
  Sense strand starting at position 93 of SEQ ID NO: 1243983
gaugcuugucugggaaaca

SEQ ID NO: 1456157 - RNA, 19 nt, Artificial Sequence
  Description of Artificial Sequence: Synthetic oligonucleotide
  Antisense strand to SEQ ID NO: 1456156
uguuucccagacaagcauc

SEQ ID NO: 1456158 - RNA, 19 nt, Artificial Sequence
  Description of Artificial Sequence: Synthetic oligonucleotide
  Sense strand starting at position 122 of SEQ ID NO: 1243983
ggauguacucccuggaaga

SEQ ID NO: 1456159 - RNA, 19 nt, Artificial Sequence
  Description of Artificial Sequence: Synthetic oligonucleotide
  Antisense strand to SEQ ID NO: 1456158
ucuuccagggaguacaucc

SEQ ID NO: 1456160 - RNA, 19 nt, Artificial Sequence
  Description of Artificial Sequence: Synthetic oligonucleotide
  Sense strand starting at position 123 of SEQ ID NO: 1243983
gauguacucccuggaagag

SEQ ID NO: 1456161 - RNA, 19 nt, Artificial Sequence
  Description of Artificial Sequence: Synthetic oligonucleotide
  Antisense strand to SEQ ID NO: 1456160
cucuuccagggaguacauc

SEQ ID NO: 1456162 - RNA, 19 nt, Artificial Sequence
  Description of Artificial Sequence: Synthetic oligonucleotide
  Sense strand starting at position 140 of SEQ ID NO: 1243983
agaggaaccuucuuccuca

SEQ ID NO: 1456163 - RNA, 19 nt, Artificial Sequence
  Description of Artificial Sequence: Synthetic oligonucleotide
  Antisense strand to SEQ ID NO: 1456162
ugaggaagaagguuccucu

SEQ ID NO: 1456164 - RNA, 19 nt, Artificial Sequence
  Description of Artificial Sequence: Synthetic oligonucleotide
  Sense strand starting at position 182 of SEQ ID NO: 1243983
gcuaccucccucuguuuau

SEQ ID NO: 1456165 - RNA, 19 nt, Artificial Sequence
  Description of Artificial Sequence: Synthetic oligonucleotide
  Antisense strand to SEQ ID NO: 1456164
auaaacagagggagguagc

SEQ ID NO: 1456166 - RNA, 19 nt, Artificial Sequence
  Description of Artificial Sequence: Synthetic oligonucleotide
  Sense strand starting at position 226 of SEQ ID NO: 1243983
ggaguuccugcagaggaca

SEQ ID NO: 1456167 - RNA, 19 nt, Artificial Sequence
  Description of Artificial Sequence: Synthetic oligonucleotide
  Antisense strand to SEQ ID NO: 1456166
uguccucugcaggaacucc

SEQ ID NO: 1456168 - RNA, 19 nt, Artificial Sequence
  Description of Artificial Sequence: Synthetic oligonucleotide
  Sense strand starting at position 274 of SEQ ID NO: 1243983
agagacugcuguuuggcaa

SEQ ID NO: 1456169 - RNA, 19 nt, Artificial Sequence
  Description of Artificial Sequence: Synthetic oligonucleotide
  Antisense strand to SEQ ID NO: 1456168
uugccaaacagcagucucu

SEQ ID NO: 1456170 - RNA, 19 nt, Artificial Sequence
  Description of Artificial Sequence: Synthetic oligonucleotide
  Sense strand starting at position 344 of SEQ ID NO: 1243983
ggcguagaccugcagagau

SEQ ID NO: 1456171 - RNA, 19 nt, Artificial Sequence
  Description of Artificial Sequence: Synthetic oligonucleotide
  Antisense strand to SEQ ID NO: 1456170
aucucugcaggucuacgcc

SEQ ID NO: 1456172 - RNA, 19 nt, Artificial Sequence
  Description of Artificial Sequence: Synthetic oligonucleotide
  Sense strand starting at position 346 of SEQ ID NO: 1243983
cguagaccugcagagauaa

SEQ ID NO: 1456173 - RNA, 19 nt, Artificial Sequence
  Description of Artificial Sequence: Synthetic oligonucleotide
  Antisense strand to SEQ ID NO: 1456172
uuaucucugcaggucuacg

SEQ ID NO: 1456174 - RNA, 19 nt, Artificial Sequence
  Description of Artificial Sequence: Synthetic oligonucleotide
  Sense strand starting at position 640 of SEQ ID NO: 1243983
gacugcuacucaguccaga

SEQ ID NO: 1456175 - RNA, 19 nt, Artificial Sequence
  Description of Artificial Sequence: Synthetic oligonucleotide
  Antisense strand to SEQ ID NO: 1456174
ucuggacugaguagcaguc

SEQ ID NO: 1456176 - RNA, 19 nt, Artificial Sequence
  Description of Artificial Sequence: Synthetic oligonucleotide
  Sense strand starting at position 654 of SEQ ID NO: 1243983
ccagaaugcuggcagaacu

SEQ ID NO: 1456177 - RNA, 19 nt, Artificial Sequence
  Description of Artificial Sequence: Synthetic oligonucleotide
  Antisense strand to SEQ ID NO: 1456176
aguucugccagcauucugg

SEQ ID NO: 1456178 - RNA, 19 nt, Artificial Sequence
  Description of Artificial Sequence: Synthetic oligonucleotide
  Sense strand starting at position 722 of SEQ ID NO: 1243983
acaaacaguuccuggcaga

SEQ ID NO: 1456179 - RNA, 19 nt, Artificial Sequence
  Description of Artificial Sequence: Synthetic oligonucleotide
  Antisense strand to SEQ ID NO: 1456178
ucugccaggaacuguuugu

SEQ ID NO: 1456180 - RNA, 19 nt, Artificial Sequence
  Description of Artificial Sequence: Synthetic oligonucleotide
  Sense strand starting at position 725 of SEQ ID NO: 1243983
aacaguuccuggcagagua

SEQ ID NO: 1456181 - RNA, 19 nt, Artificial Sequence
  Description of Artificial Sequence: Synthetic oligonucleotide
  Antisense strand to SEQ ID NO: 1456180
uacucugccaggaacuguu

SEQ ID NO: 1456182 - RNA, 19 nt, Artificial Sequence
  Description of Artificial Sequence: Synthetic oligonucleotide
  Sense strand starting at position 727 of SEQ ID NO: 1243983
caguuccuggcagaguaua

SEQ ID NO: 1456183 - RNA, 19 nt, Artificial Sequence
  Description of Artificial Sequence: Synthetic oligonucleotide
  Antisense strand to SEQ ID NO: 1456182
uauacucugccaggaacug

SEQ ID NO: 1456184 - RNA, 19 nt, Artificial Sequence
  Description of Artificial Sequence: Synthetic oligonucleotide
  Sense strand starting at position 794 of SEQ ID NO: 1243983
acagaugggucaggauaca

SEQ ID NO: 1456185 - RNA, 19 nt, Artificial Sequence
  Description of Artificial Sequence: Synthetic oligonucleotide
  Antisense strand to SEQ ID NO: 1456184
uguauccugacccaucugu

SEQ ID NO: 1456186 - RNA, 19 nt, Artificial Sequence
  Description of Artificial Sequence: Synthetic oligonucleotide
  Sense strand starting at position 894 of SEQ ID NO: 1243983
uggccuuauuucuuagcuu

SEQ ID NO: 1456187 - RNA, 19 nt, Artificial Sequence
  Description of Artificial Sequence: Synthetic oligonucleotide
  Antisense strand to SEQ ID NO: 1456186
aagcuaagaaauaaggcca

SEQ ID NO: 1456188 - RNA, 19 nt, Artificial Sequence
  Description of Artificial Sequence: Synthetic oligonucleotide
  Sense strand starting at position 920 of SEQ ID NO: 1243983
ugggaacucucccacuuua

SEQ ID NO: 1456189 - RNA, 19 nt, Artificial Sequence
  Description of Artificial Sequence: Synthetic oligonucleotide
  Antisense strand to SEQ ID NO: 1456188
uaaagugggagaguuccca

SEQ ID NO: 1456190 - RNA, 19 nt, Artificial Sequence
  Description of Artificial Sequence: Synthetic oligonucleotide
  Sense strand starting at position 1295 of SEQ ID NO: 1243983
uggaaaggcuuugagaaag

SEQ ID NO: 1456191 - RNA, 19 nt, Artificial Sequence
  Description of Artificial Sequence: Synthetic oligonucleotide
  Antisense strand to SEQ ID NO: 1456190
cuuucucaaagccuuucca

SEQ ID NO: 1456192 - RNA, 19 nt, Artificial Sequence
  Description of Artificial Sequence: Synthetic oligonucleotide
  Sense strand starting at position 1348 of SEQ ID NO: 1243983
gcgcgcucuacgcaauaca

SEQ ID NO: 1456193 - RNA, 19 nt, Artificial Sequence
  Description of Artificial Sequence: Synthetic oligonucleotide
  Antisense strand to SEQ ID NO: 1456192
uguauugcguagagcgcgc

SEQ ID NO: 1456194 - RNA, 19 nt, Artificial Sequence
  Description of Artificial Sequence: Synthetic oligonucleotide
  Sense strand starting at position 1399 of SEQ ID NO: 1243983
gagaacuucuuugacaagu

SEQ ID NO: 1456195 - RNA, 19 nt, Artificial Sequence
  Description of Artificial Sequence: Synthetic oligonucleotide
  Antisense strand to SEQ ID NO: 1456194
acuugucaaagaaguucuc

SEQ ID NO: 1456196 - RNA, 19 nt, Artificial Sequence
  Description of Artificial Sequence: Synthetic oligonucleotide
  Sense strand starting at position 1541 of SEQ ID NO: 1243983
uguccacaacuucgggaua

SEQ ID NO: 1456197 - RNA, 19 nt, Artificial Sequence
  Description of Artificial Sequence: Synthetic oligonucleotide
  Antisense strand to SEQ ID NO: 1456196
uaucccgaaguuguggaca

SEQ ID NO: 1456198 - RNA, 19 nt, Artificial Sequence
  Description of Artificial Sequence: Synthetic oligonucleotide
  Sense strand starting at position 2153 of SEQ ID NO: 1243983
cucggagaaucccuaaaug

SEQ ID NO: 1456199 - RNA, 19 nt, Artificial Sequence
  Description of Artificial Sequence: Synthetic oligonucleotide
  Antisense strand to SEQ ID NO: 1456198
cauuuagggauucuccgag

SEQ ID NO: 1456200 - RNA, 19 nt, Artificial Sequence
  Description of Artificial Sequence: Synthetic oligonucleotide
  Sense strand starting at position 2198 of SEQ ID NO: 1243983
cccggaguccgggauaaau

SEQ ID NO: 1456201 - RNA, 19 nt, Artificial Sequence
  Description of Artificial Sequence: Synthetic oligonucleotide
  Antisense strand to SEQ ID NO: 1456200
auuuaucccggacuccggg

SEQ ID NO: 1456202 - RNA, 19 nt, Artificial Sequence
  Description of Artificial Sequence: Synthetic oligonucleotide
  Sense strand starting at position 2208 of SEQ ID NO: 1243983
gggauaaauucccuaggcu

SEQ ID NO: 1456203 - RNA, 19 nt, Artificial Sequence
  Description of Artificial Sequence: Synthetic oligonucleotide
  Antisense strand to SEQ ID NO: 1456202
agccuagggaauuuauccc

SEQ ID NO: 1456204 - RNA, 19 nt, Artificial Sequence
  Description of Artificial Sequence: Synthetic oligonucleotide
  Sense strand starting at position 2489 of SEQ ID NO: 1243983
gucacaucgaaaggacuuu

SEQ ID NO: 1456205 - RNA, 19 nt, Artificial Sequence
  Description of Artificial Sequence: Synthetic oligonucleotide
  Antisense strand to SEQ ID NO: 1456204
aaaguccuuucgaugugac

SEQ ID NO: 1456206 - RNA, 19 nt, Artificial Sequence
  Description of Artificial Sequence: Synthetic oligonucleotide
  Sense strand starting at position 3029 of SEQ ID NO: 1243983
caagauauugcaugggaca

SEQ ID NO: 1456207 - RNA, 19 nt, Artificial Sequence
  Description of Artificial Sequence: Synthetic oligonucleotide
  Antisense strand to SEQ ID NO: 1456206
ugucccaugcaauaucuug

SEQ ID NO: 1456208 - RNA, 19 nt, Artificial Sequence
  Description of Artificial Sequence: Synthetic oligonucleotide
  Sense strand starting at position 3030 of SEQ ID NO: 1243983
aagauauugcaugggacau

SEQ ID NO: 1456209 - RNA, 19 nt, Artificial Sequence
  Description of Artificial Sequence: Synthetic oligonucleotide
  Antisense strand to SEQ ID NO: 1456208
augucccaugcaauaucuu

SEQ ID NO: 1456210 - RNA, 19 nt, Artificial Sequence
  Description of Artificial Sequence: Synthetic oligonucleotide
  Sense strand starting at position 3127 of SEQ ID NO: 1243983
ggcaguucuaguuggaaug

SEQ ID NO: 1456211 - RNA, 19 nt, Artificial Sequence
  Description of Artificial Sequence: Synthetic oligonucleotide
  Antisense strand to SEQ ID NO: 1456210
cauuccaacuagaacugcc

SEQ ID NO: 1456212 - RNA, 19 nt, Artificial Sequence
  Description of Artificial Sequence: Synthetic oligonucleotide
  Sense strand starting at position 3161 of SEQ ID NO: 1243983
cagcuauacuggucaagaa

SEQ ID NO: 1456213 - RNA, 19 nt, Artificial Sequence
  Description of Artificial Sequence: Synthetic oligonucleotide
  Antisense strand to SEQ ID NO: 1456212
uucuugaccaguauagcug

SEQ ID NO: 1456214 - RNA, 19 nt, Artificial Sequence
  Description of Artificial Sequence: Synthetic oligonucleotide
  Sense strand starting at position 3765 of SEQ ID NO: 1243983
gagcaucucuggucucagu

SEQ ID NO: 1456215 - RNA, 19 nt, Artificial Sequence
  Description of Artificial Sequence: Synthetic oligonucleotide
  Antisense strand to SEQ ID NO: 1456214
acugagaccagagaugcuc

SEQ ID NO: 1456216 - RNA, 19 nt, Artificial Sequence
  Description of Artificial Sequence: Synthetic oligonucleotide
  Sense strand starting at position 3831 of SEQ ID NO: 1243983
gagauaaugcucuggaagc

SEQ ID NO: 1456217 - RNA, 19 nt, Artificial Sequence
  Description of Artificial Sequence: Synthetic oligonucleotide
  Antisense strand to SEQ ID NO: 1456216
gcuuccagagcauuaucuc

SEQ ID NO: 1456218 - RNA, 19 nt, Artificial Sequence
  Description of Artificial Sequence: Synthetic oligonucleotide
  Sense strand starting at position 3832 of SEQ ID NO: 1243983
agauaaugcucuggaagca

SEQ ID NO: 1456219 - RNA, 19 nt, Artificial Sequence
  Description of Artificial Sequence: Synthetic oligonucleotide
  Antisense strand to SEQ ID NO: 1456218
ugcuuccagagcauuaucu

SEQ ID NO: 1456220 - RNA, 19 nt, Artificial Sequence
  Description of Artificial Sequence: Synthetic oligonucleotide
  Sense strand starting at position 3844 of SEQ ID NO: 1243983
ggaagcacucagcgcaaua

SEQ ID NO: 1456221 - RNA, 19 nt, Artificial Sequence
  Description of Artificial Sequence: Synthetic oligonucleotide
  Antisense strand to SEQ ID NO: 1456220
uauugcgcugagugcuucc

SEQ ID NO: 1456222 - RNA, 19 nt, Artificial Sequence
  Description of Artificial Sequence: Synthetic oligonucleotide
  Sense strand starting at position 3855 of SEQ ID NO: 1243983
gcgcaauacuuggcacaua

SEQ ID NO: 1456223 - RNA, 19 nt, Artificial Sequence
  Description of Artificial Sequence: Synthetic oligonucleotide
  Antisense strand to SEQ ID NO: 1456222
uaugugccaaguauugcgc

SEQ ID NO: 1456224 - RNA, 19 nt, Artificial Sequence
  Description of Artificial Sequence: Synthetic oligonucleotide
  Sense strand starting at position 3881 of SEQ ID NO: 1243983
cucaauaaauggucccaga

SEQ ID NO: 1456225 - RNA, 19 nt, Artificial Sequence
  Description of Artificial Sequence: Synthetic oligonucleotide
  Antisense strand to SEQ ID NO: 1456224
ucugggaccauuuauugag

SEQ ID NO: 1456226 - RNA, 19 nt, Artificial Sequence
  Description of Artificial Sequence: Synthetic oligonucleotide
  Sense strand starting at position 3943 of SEQ ID NO: 1243983
cuuauauaauuugggaaac

SEQ ID NO: 1456227 - RNA, 19 nt, Artificial Sequence
  Description of Artificial Sequence: Synthetic oligonucleotide
  Antisense strand to SEQ ID NO: 1456226
guuucccaaauuauauaag

SEQ ID NO: 1456228 - RNA, 19 nt, Artificial Sequence
  Description of Artificial Sequence: Synthetic oligonucleotide
  Sense strand starting at position 3953 of SEQ ID NO: 1243983
uugggaaacucucuuuaag

SEQ ID NO: 1456229 - RNA, 19 nt, Artificial Sequence
  Description of Artificial Sequence: Synthetic oligonucleotide
  Antisense strand to SEQ ID NO: 1456228
cuuaaagagaguuucccaa

SEQ ID NO: 1456230 - RNA, 19 nt, Artificial Sequence
  Description of Artificial Sequence: Synthetic oligonucleotide
  Sense strand starting at position 3979 of SEQ ID NO: 1243983
uacaaaguuggccgaguau

SEQ ID NO: 1456231 - RNA, 19 nt, Artificial Sequence
  Description of Artificial Sequence: Synthetic oligonucleotide
  Antisense strand to SEQ ID NO: 1456230
auacucggccaacuuugua

SEQ ID NO: 1456232 - RNA, 19 nt, Artificial Sequence
  Description of Artificial Sequence: Synthetic oligonucleotide
  Sense strand starting at position 243 of SEQ ID NO: 1243984
cugagaaguuuggauuucu

SEQ ID NO: 1456233 - RNA, 19 nt, Artificial Sequence
  Description of Artificial Sequence: Synthetic oligonucleotide
  Antisense strand to SEQ ID NO: 1456232
agaaauccaaacuucucag

SEQ ID NO: 1456234 - RNA, 19 nt, Artificial Sequence
  Description of Artificial Sequence: Synthetic oligonucleotide
  Sense strand starting at position 272 of SEQ ID NO: 1243984
uggaaauauuuacacgaac

SEQ ID NO: 1456235 - RNA, 19 nt, Artificial Sequence
  Description of Artificial Sequence: Synthetic oligonucleotide
  Antisense strand to SEQ ID NO: 1456234
guucguguaaauauuucca

SEQ ID NO: 1456236 - RNA, 19 nt, Artificial Sequence
  Description of Artificial Sequence: Synthetic oligonucleotide
  Sense strand starting at position 330 of SEQ ID NO: 1243984
ggcucuuuagccuaaguua

SEQ ID NO: 1456237 - RNA, 19 nt, Artificial Sequence
  Description of Artificial Sequence: Synthetic oligonucleotide
  Antisense strand to SEQ ID NO: 1456236
uaacuuaggcuaaagagcc

SEQ ID NO: 1456238 - RNA, 19 nt, Artificial Sequence
  Description of Artificial Sequence: Synthetic oligonucleotide
  Sense strand starting at position 419 of SEQ ID NO: 1243984
acaccuaucccuugacguu

SEQ ID NO: 1456239 - RNA, 19 nt, Artificial Sequence
  Description of Artificial Sequence: Synthetic oligonucleotide
  Antisense strand to SEQ ID NO: 1456238
aacgucaagggauaggugu

SEQ ID NO: 1456240 - RNA, 19 nt, Artificial Sequence
  Description of Artificial Sequence: Synthetic oligonucleotide
  Sense strand starting at position 425 of SEQ ID NO: 1243984
aucccuugacguuaugaaa

SEQ ID NO: 1456241 - RNA, 19 nt, Artificial Sequence
  Description of Artificial Sequence: Synthetic oligonucleotide
  Antisense strand to SEQ ID NO: 1456240
uuucauaacgucaagggau

SEQ ID NO: 1456242 - RNA, 19 nt, Artificial Sequence
  Description of Artificial Sequence: Synthetic oligonucleotide
  Sense strand starting at position 432 of SEQ ID NO: 1243984
gacguuaugaaaugaucga

SEQ ID NO: 1456243 - RNA, 19 nt, Artificial Sequence
  Description of Artificial Sequence: Synthetic oligonucleotide
  Antisense strand to SEQ ID NO: 1456242
ucgaucauuucauaacguc

SEQ ID NO: 1456244 - RNA, 19 nt, Artificial Sequence
  Description of Artificial Sequence: Synthetic oligonucleotide
  Sense strand starting at position 433 of SEQ ID NO: 1243984
acguuaugaaaugaucgaa

SEQ ID NO: 1456245 - RNA, 19 nt, Artificial Sequence
  Description of Artificial Sequence: Synthetic oligonucleotide
  Antisense strand to SEQ ID NO: 1456244
uucgaucauuucauaacgu

SEQ ID NO: 1456246 - RNA, 19 nt, Artificial Sequence
  Description of Artificial Sequence: Synthetic oligonucleotide
  Sense strand starting at position 436 of SEQ ID NO: 1243984
uuaugaaaugaucgaauuc

SEQ ID NO: 1456247 - RNA, 19 nt, Artificial Sequence
  Description of Artificial Sequence: Synthetic oligonucleotide
  Antisense strand to SEQ ID NO: 1456246
gaauucgaucauuucauaa

SEQ ID NO: 1456248 - RNA, 19 nt, Artificial Sequence
  Description of Artificial Sequence: Synthetic oligonucleotide
  Sense strand starting at position 468 of SEQ ID NO: 1243984
ggucauucugcuuauaccu

SEQ ID NO: 1456249 - RNA, 19 nt, Artificial Sequence
  Description of Artificial Sequence: Synthetic oligonucleotide
  Antisense strand to SEQ ID NO: 1456248
agguauaagcagaaugacc

SEQ ID NO: 1456250 - RNA, 19 nt, Artificial Sequence
  Description of Artificial Sequence: Synthetic oligonucleotide
  Sense strand starting at position 481 of SEQ ID NO: 1243984
auaccuucguuugugaaca

SEQ ID NO: 1456251 - RNA, 19 nt, Artificial Sequence
  Description of Artificial Sequence: Synthetic oligonucleotide
  Antisense strand to SEQ ID NO: 1456250
uguucacaaacgaagguau

SEQ ID NO: 1456252 - RNA, 19 nt, Artificial Sequence
  Description of Artificial Sequence: Synthetic oligonucleotide
  Sense strand starting at position 548 of SEQ ID NO: 1243984
accugaccuuaguuguaaa

SEQ ID NO: 1456253 - RNA, 19 nt, Artificial Sequence
  Description of Artificial Sequence: Synthetic oligonucleotide
  Antisense strand to SEQ ID NO: 1456252
uuuacaacuaaggucaggu

SEQ ID NO: 1456254 - RNA, 19 nt, Artificial Sequence
  Description of Artificial Sequence: Synthetic oligonucleotide
  Sense strand starting at position 709 of SEQ ID NO: 1243984
uuguuacuccaagaguaca

SEQ ID NO: 1456255 - RNA, 19 nt, Artificial Sequence
  Description of Artificial Sequence: Synthetic oligonucleotide
  Antisense strand to SEQ ID NO: 1456254
uguacucuuggaguaacaa

SEQ ID NO: 1456256 - RNA, 19 nt, Artificial Sequence
  Description of Artificial Sequence: Synthetic oligonucleotide
  Sense strand starting at position 821 of SEQ ID NO: 1243984
gguacaugauaucccuauu

SEQ ID NO: 1456257 - RNA, 19 nt, Artificial Sequence
  Description of Artificial Sequence: Synthetic oligonucleotide
  Antisense strand to SEQ ID NO: 1456256
aauagggauaucauguacc

SEQ ID NO: 1456258 - RNA, 19 nt, Artificial Sequence
  Description of Artificial Sequence: Synthetic oligonucleotide
  Sense strand starting at position 897 of SEQ ID NO: 1243984
cgcucacauccugaacaau

SEQ ID NO: 1456259 - RNA, 19 nt, Artificial Sequence
  Description of Artificial Sequence: Synthetic oligonucleotide
  Antisense strand to SEQ ID NO: 1456258
auuguucaggaugugagcg

SEQ ID NO: 1456260 - RNA, 19 nt, Artificial Sequence
  Description of Artificial Sequence: Synthetic oligonucleotide
  Sense strand starting at position 1026 of SEQ ID NO: 1243984
gaguuaaaugaauguaaac

SEQ ID NO: 1456261 - RNA, 19 nt, Artificial Sequence
  Description of Artificial Sequence: Synthetic oligonucleotide
  Antisense strand to SEQ ID NO: 1456260
guuuacauucauuuaacuc

SEQ ID NO: 1456262 - RNA, 19 nt, Artificial Sequence
  Description of Artificial Sequence: Synthetic oligonucleotide
  Sense strand starting at position 1054 of SEQ ID NO: 1243984
ucauucgucuccuccagaa

SEQ ID NO: 1456263 - RNA, 19 nt, Artificial Sequence
  Description of Artificial Sequence: Synthetic oligonucleotide
  Antisense strand to SEQ ID NO: 1456262
uucuggaggagacgaauga

SEQ ID NO: 1456264 - RNA, 19 nt, Artificial Sequence
  Description of Artificial Sequence: Synthetic oligonucleotide
  Sense strand starting at position 1168 of SEQ ID NO: 1243984
gcgggaucuuccaagagug

SEQ ID NO: 1456265 - RNA, 19 nt, Artificial Sequence
  Description of Artificial Sequence: Synthetic oligonucleotide
  Antisense strand to SEQ ID NO: 1456264
cacucuuggaagaucccgc

SEQ ID NO: 1456266 - RNA, 19 nt, Artificial Sequence
  Description of Artificial Sequence: Synthetic oligonucleotide
  Sense strand starting at position 1170 of SEQ ID NO: 1243984
gggaucuuccaagagugca

SEQ ID NO: 1456267 - RNA, 19 nt, Artificial Sequence
  Description of Artificial Sequence: Synthetic oligonucleotide
  Antisense strand to SEQ ID NO: 1456266
ugcacucuuggaagauccc

SEQ ID NO: 1456268 - RNA, 19 nt, Artificial Sequence
  Description of Artificial Sequence: Synthetic oligonucleotide
  Sense strand starting at position 1198 of SEQ ID NO: 1243984
gcuccacuugcucaaggaa

SEQ ID NO: 1456269 - RNA, 19 nt, Artificial Sequence
  Description of Artificial Sequence: Synthetic oligonucleotide
  Antisense strand to SEQ ID NO: 1456268
uuccuugagcaaguggagc

SEQ ID NO: 1456270 - RNA, 19 nt, Artificial Sequence
  Description of Artificial Sequence: Synthetic oligonucleotide
  Sense strand starting at position 1211 of SEQ ID NO: 1243984
aaggaagucucggugcaca

SEQ ID NO: 1456271 - RNA, 19 nt, Artificial Sequence
  Description of Artificial Sequence: Synthetic oligonucleotide
  Antisense strand to SEQ ID NO: 1456270
ugugcaccgagacuuccuu

SEQ ID NO: 1456272 - RNA, 19 nt, Artificial Sequence
  Description of Artificial Sequence: Synthetic oligonucleotide
  Sense strand starting at position 2292 of SEQ ID NO: 1243984
cuugucuguggcugggaaa

SEQ ID NO: 1456273 - RNA, 19 nt, Artificial Sequence
  Description of Artificial Sequence: Synthetic oligonucleotide
  Antisense strand to SEQ ID NO: 1456272
uuucccagccacagacaag

SEQ ID NO: 1456274 - RNA, 19 nt, Artificial Sequence
  Description of Artificial Sequence: Synthetic oligonucleotide
  Sense strand starting at position 2639 of SEQ ID NO: 1243984
agucauauccaccagccau

SEQ ID NO: 1456275 - RNA, 19 nt, Artificial Sequence
  Description of Artificial Sequence: Synthetic oligonucleotide
  Antisense strand to SEQ ID NO: 1456274
auggcugguggauaugacu

SEQ ID NO: 1456276 - RNA, 19 nt, Artificial Sequence
  Description of Artificial Sequence: Synthetic oligonucleotide
  Sense strand starting at position 2657 of SEQ ID NO: 1243984
ucacuuccgcuuggaauga

SEQ ID NO: 1456277 - RNA, 19 nt, Artificial Sequence
  Description of Artificial Sequence: Synthetic oligonucleotide
  Antisense strand to SEQ ID NO: 1456276
ucauuccaagcggaaguga

SEQ ID NO: 1456278 - RNA, 19 nt, Artificial Sequence
  Description of Artificial Sequence: Synthetic oligonucleotide
  Sense strand starting at position 2744 of SEQ ID NO: 1243984
ugaugugacacguguggau

SEQ ID NO: 1456279 - RNA, 19 nt, Artificial Sequence
  Description of Artificial Sequence: Synthetic oligonucleotide
  Antisense strand to SEQ ID NO: 1456278
auccacacgugucacauca

SEQ ID NO: 1456280 - RNA, 19 nt, Artificial Sequence
  Description of Artificial Sequence: Synthetic oligonucleotide
  Sense strand starting at position 2759 of SEQ ID NO: 1243984
ggaugugaaguuugagaug

SEQ ID NO: 1456281 - RNA, 19 nt, Artificial Sequence
  Description of Artificial Sequence: Synthetic oligonucleotide
  Antisense strand to SEQ ID NO: 1456280
caucucaaacuucacaucc

SEQ ID NO: 1456282 - RNA, 19 nt, Artificial Sequence
  Description of Artificial Sequence: Synthetic oligonucleotide
  Sense strand starting at position 2774 of SEQ ID NO: 1243984
gauggucugcgucacaacu

SEQ ID NO: 1456283 - RNA, 19 nt, Artificial Sequence
  Description of Artificial Sequence: Synthetic oligonucleotide
  Antisense strand to SEQ ID NO: 1456282
aguugugacgcagaccauc

SEQ ID NO: 1456284 - RNA, 19 nt, Artificial Sequence
  Description of Artificial Sequence: Synthetic oligonucleotide
  Sense strand starting at position 2821 of SEQ ID NO: 1243984
uccugcaaggucuauguga

SEQ ID NO: 1456285 - RNA, 19 nt, Artificial Sequence
  Description of Artificial Sequence: Synthetic oligonucleotide
  Antisense strand to SEQ ID NO: 1456284
ucacauagaccuugcagga

SEQ ID NO: 1456286 - RNA, 19 nt, Artificial Sequence
  Description of Artificial Sequence: Synthetic oligonucleotide
  Sense strand starting at position 2838 of SEQ ID NO: 1243984
gaggguguggaguacuaau

SEQ ID NO: 1456287 - RNA, 19 nt, Artificial Sequence
  Description of Artificial Sequence: Synthetic oligonucleotide
  Antisense strand to SEQ ID NO: 1456286
auuaguacuccacacccuc

SEQ ID NO: 1456288 - RNA, 19 nt, Artificial Sequence
  Description of Artificial Sequence: Synthetic oligonucleotide
  Sense strand starting at position 3036 of SEQ ID NO: 1243984
uccugacuugcuuauauga

SEQ ID NO: 1456289 - RNA, 19 nt, Artificial Sequence
  Description of Artificial Sequence: Synthetic oligonucleotide
  Antisense strand to SEQ ID NO: 1456288
ucauauaagcaagucagga

SEQ ID NO: 1456290 - RNA, 19 nt, Artificial Sequence
  Description of Artificial Sequence: Synthetic oligonucleotide
  Sense strand starting at position 3200 of SEQ ID NO: 1243984
gcccaaauccugcaaauag

SEQ ID NO: 1456291 - RNA, 19 nt, Artificial Sequence
  Description of Artificial Sequence: Synthetic oligonucleotide
  Antisense strand to SEQ ID NO: 1456290
cuauuugcaggauuugggc

SEQ ID NO: 1456292 - RNA, 19 nt, Artificial Sequence
  Description of Artificial Sequence: Synthetic oligonucleotide
  Sense strand starting at position 3299 of SEQ ID NO: 1243984
cucuguaagagugggaaga

SEQ ID NO: 1456293 - RNA, 19 nt, Artificial Sequence
  Description of Artificial Sequence: Synthetic oligonucleotide
  Antisense strand to SEQ ID NO: 1456292
ucuucccacucuuacagag

SEQ ID NO: 1456294 - RNA, 19 nt, Artificial Sequence
  Description of Artificial Sequence: Synthetic oligonucleotide
  Sense strand starting at position 3300 of SEQ ID NO: 1243984
ucuguaagagugggaagaa

SEQ ID NO: 1456295 - RNA, 19 nt, Artificial Sequence
  Description of Artificial Sequence: Synthetic oligonucleotide
  Antisense strand to SEQ ID NO: 1456294
uucuucccacucuuacaga

SEQ ID NO: 1456296 - RNA, 19 nt, Artificial Sequence
  Description of Artificial Sequence: Synthetic oligonucleotide
  Sense strand starting at position 3312 of SEQ ID NO: 1243984
ggaagaaucuuggcaacug

SEQ ID NO: 1456297 - RNA, 19 nt, Artificial Sequence
  Description of Artificial Sequence: Synthetic oligonucleotide
  Antisense strand to SEQ ID NO: 1456296
caguugccaagauucuucc

SEQ ID NO: 1456298 - RNA, 19 nt, Artificial Sequence
  Description of Artificial Sequence: Synthetic oligonucleotide
  Sense strand starting at position 3357 of SEQ ID NO: 1243984
guguuaccugaaugucuaa

SEQ ID NO: 1456299 - RNA, 19 nt, Artificial Sequence
  Description of Artificial Sequence: Synthetic oligonucleotide
  Antisense strand to SEQ ID NO: 1456298
uuagacauucagguaacac

SEQ ID NO: 1456300 - RNA, 19 nt, Artificial Sequence
  Description of Artificial Sequence: Synthetic oligonucleotide
  Sense strand starting at position 3385 of SEQ ID NO: 1243984
gagguuugggauuggcaga

SEQ ID NO: 1456301 - RNA, 19 nt, Artificial Sequence
  Description of Artificial Sequence: Synthetic oligonucleotide
  Antisense strand to SEQ ID NO: 1456300
ucugccaaucccaaaccuc

SEQ ID NO: 1456302 - RNA, 19 nt, Artificial Sequence
  Description of Artificial Sequence: Synthetic oligonucleotide
  Sense strand starting at position 3423 of SEQ ID NO: 1243984
agcacuccugagcaguaua

SEQ ID NO: 1456303 - RNA, 19 nt, Artificial Sequence
  Description of Artificial Sequence: Synthetic oligonucleotide
  Antisense strand to SEQ ID NO: 1456302
uauacugcucaggagugcu

SEQ ID NO: 1456304 - RNA, 19 nt, Artificial Sequence
  Description of Artificial Sequence: Synthetic oligonucleotide
  Sense strand starting at position 3627 of SEQ ID NO: 1243984
aggaccucuuuagugauua

SEQ ID NO: 1456305 - RNA, 19 nt, Artificial Sequence
  Description of Artificial Sequence: Synthetic oligonucleotide
  Antisense strand to SEQ ID NO: 1456304
uaaucacuaaagagguccu

SEQ ID NO: 1456306 - RNA, 19 nt, Artificial Sequence
  Description of Artificial Sequence: Synthetic oligonucleotide
  Sense strand starting at position 3675 of SEQ ID NO: 1243984
ucuguuagacccuguauac

SEQ ID NO: 1456307 - RNA, 19 nt, Artificial Sequence
  Description of Artificial Sequence: Synthetic oligonucleotide
  Antisense strand to SEQ ID NO: 1456306
guauacagggucuaacaga

SEQ ID NO: 1456308 - RNA, 19 nt, Artificial Sequence
  Description of Artificial Sequence: Synthetic oligonucleotide
  Sense strand starting at position 3938 of SEQ ID NO: 1243984
ccaagaagccuggacaguu

SEQ ID NO: 1456309 - RNA, 19 nt, Artificial Sequence
  Description of Artificial Sequence: Synthetic oligonucleotide
  Antisense strand to SEQ ID NO: 1456308
aacuguccaggcuucuugg

SEQ ID NO: 1456310 - RNA, 19 nt, Artificial Sequence
  Description of Artificial Sequence: Synthetic oligonucleotide
  Sense strand starting at position 3948 of SEQ ID NO: 1243984
uggacaguuagguauuauu

SEQ ID NO: 1456311 - RNA, 19 nt, Artificial Sequence
  Description of Artificial Sequence: Synthetic oligonucleotide
  Antisense strand to SEQ ID NO: 1456310
aauaauaccuaacugucca

SEQ ID NO: 1456312 - RNA, 19 nt, Artificial Sequence
  Description of Artificial Sequence: Synthetic oligonucleotide
  Sense strand starting at position 103 of SEQ ID NO: 1243985
agaaucaaugcuugggcaa

SEQ ID NO: 1456313 - RNA, 19 nt, Artificial Sequence
  Description of Artificial Sequence: Synthetic oligonucleotide
  Antisense strand to SEQ ID NO: 1456312
uugcccaagcauugauucu

SEQ ID NO: 1456314 - RNA, 19 nt, Artificial Sequence
  Description of Artificial Sequence: Synthetic oligonucleotide
  Sense strand starting at position 127 of SEQ ID NO: 1243985
gaggaugagugacaaauua

SEQ ID NO: 1456315 - RNA, 19 nt, Artificial Sequence
  Description of Artificial Sequence: Synthetic oligonucleotide
  Antisense strand to SEQ ID NO: 1456314
uaauuugucacucauccuc

SEQ ID NO: 1456316 - RNA, 19 nt, Artificial Sequence
  Description of Artificial Sequence: Synthetic oligonucleotide
  Sense strand starting at position 284 of SEQ ID NO: 1243985
cccacacaauggucugauu

SEQ ID NO: 1456317 - RNA, 19 nt, Artificial Sequence
  Description of Artificial Sequence: Synthetic oligonucleotide
  Antisense strand to SEQ ID NO: 1456316
aaucagaccauuguguggg

SEQ ID NO: 1456318 - RNA, 19 nt, Artificial Sequence
  Description of Artificial Sequence: Synthetic oligonucleotide
  Sense strand starting at position 420 of SEQ ID NO: 1243985
uggagaacuccuugaggca

SEQ ID NO: 1456319 - RNA, 19 nt, Artificial Sequence
  Description of Artificial Sequence: Synthetic oligonucleotide
  Antisense strand to SEQ ID NO: 1456318
ugccucaaggaguucucca

SEQ ID NO: 1456320 - RNA, 19 nt, Artificial Sequence
  Description of Artificial Sequence: Synthetic oligonucleotide
  Sense strand starting at position 449 of SEQ ID NO: 1243985
aggagaaguguagggcuua

SEQ ID NO: 1456321 - RNA, 19 nt, Artificial Sequence
  Description of Artificial Sequence: Synthetic oligonucleotide
  Antisense strand to SEQ ID NO: 1456320
uaagcccuacacuucuccu

SEQ ID NO: 1456322 - RNA, 19 nt, Artificial Sequence
  Description of Artificial Sequence: Synthetic oligonucleotide
  Sense strand starting at position 459 of SEQ ID NO: 1243985
uagggcuuaggguggaaua

SEQ ID NO: 1456323 - RNA, 19 nt, Artificial Sequence
  Description of Artificial Sequence: Synthetic oligonucleotide
  Antisense strand to SEQ ID NO: 1456322
uauuccacccuaagcccua

SEQ ID NO: 1456324 - RNA, 19 nt, Artificial Sequence
  Description of Artificial Sequence: Synthetic oligonucleotide
  Sense strand starting at position 553 of SEQ ID NO: 1243985
ccacgucuccuggaaguga

SEQ ID NO: 1456325 - RNA, 19 nt, Artificial Sequence
  Description of Artificial Sequence: Synthetic oligonucleotide
  Antisense strand to SEQ ID NO: 1456324
ucacuuccaggagacgugg

SEQ ID NO: 1456326 - RNA, 19 nt, Artificial Sequence
  Description of Artificial Sequence: Synthetic oligonucleotide
  Sense strand starting at position 557 of SEQ ID NO: 1243985
gucuccuggaagugacuua

SEQ ID NO: 1456327 - RNA, 19 nt, Artificial Sequence
  Description of Artificial Sequence: Synthetic oligonucleotide
  Antisense strand to SEQ ID NO: 1456326
uaagucacuuccaggagac

SEQ ID NO: 1456328 - RNA, 19 nt, Artificial Sequence
  Description of Artificial Sequence: Synthetic oligonucleotide
  Sense strand starting at position 916 of SEQ ID NO: 1243985
cucccauuuccgggcgauu

SEQ ID NO: 1456329 - RNA, 19 nt, Artificial Sequence
  Description of Artificial Sequence: Synthetic oligonucleotide
  Antisense strand to SEQ ID NO: 1456328
aaucgcccggaaaugggag

SEQ ID NO: 1456330 - RNA, 19 nt, Artificial Sequence
  Description of Artificial Sequence: Synthetic oligonucleotide
  Sense strand starting at position 926 of SEQ ID NO: 1243985
cgggcgauuucugcgagaa

SEQ ID NO: 1456331 - RNA, 19 nt, Artificial Sequence
  Description of Artificial Sequence: Synthetic oligonucleotide
  Antisense strand to SEQ ID NO: 1456330
uucucgcagaaaucgcccg

SEQ ID NO: 1456332 - RNA, 19 nt, Artificial Sequence
  Description of Artificial Sequence: Synthetic oligonucleotide
  Sense strand starting at position 927 of SEQ ID NO: 1243985
gggcgauuucugcgagaag

SEQ ID NO: 1456333 - RNA, 19 nt, Artificial Sequence
  Description of Artificial Sequence: Synthetic oligonucleotide
  Antisense strand to SEQ ID NO: 1456332
cuucucgcagaaaucgccc

SEQ ID NO: 1456334 - RNA, 19 nt, Artificial Sequence
  Description of Artificial Sequence: Synthetic oligonucleotide
  Sense strand starting at position 2323 of SEQ ID NO: 1243985
ggaguaugaacaugucugu

SEQ ID NO: 1456335 - RNA, 19 nt, Artificial Sequence
  Description of Artificial Sequence: Synthetic oligonucleotide
  Antisense strand to SEQ ID NO: 1456334
acagacauguucauacucc

SEQ ID NO: 1456336 - RNA, 19 nt, Artificial Sequence
  Description of Artificial Sequence: Synthetic oligonucleotide
  Sense strand starting at position 2424 of SEQ ID NO: 1243985
gugcucauuucguucccau

SEQ ID NO: 1456337 - RNA, 19 nt, Artificial Sequence
  Description of Artificial Sequence: Synthetic oligonucleotide
  Antisense strand to SEQ ID NO: 1456336
augggaacgaaaugagcac

SEQ ID NO: 1456338 - RNA, 19 nt, Artificial Sequence
  Description of Artificial Sequence: Synthetic oligonucleotide
  Sense strand starting at position 2453 of SEQ ID NO: 1243985
aauggaucguuuguaucuu

SEQ ID NO: 1456339 - RNA, 19 nt, Artificial Sequence
  Description of Artificial Sequence: Synthetic oligonucleotide
  Antisense strand to SEQ ID NO: 1456338
aagauacaaacgauccauu

SEQ ID NO: 1456340 - RNA, 19 nt, Artificial Sequence
  Description of Artificial Sequence: Synthetic oligonucleotide
  Sense strand starting at position 2504 of SEQ ID NO: 1243985
gguaacucuccugagguca

SEQ ID NO: 1456341 - RNA, 19 nt, Artificial Sequence
  Description of Artificial Sequence: Synthetic oligonucleotide
  Antisense strand to SEQ ID NO: 1456340
ugaccucaggagaguuacc

SEQ ID NO: 1456342 - RNA, 19 nt, Artificial Sequence
  Description of Artificial Sequence: Synthetic oligonucleotide
  Sense strand starting at position 2604 of SEQ ID NO: 1243985
ugaguuaagcuaugugaca

SEQ ID NO: 1456343 - RNA, 19 nt, Artificial Sequence
  Description of Artificial Sequence: Synthetic oligonucleotide
  Antisense strand to SEQ ID NO: 1456342
ugucacauagcuuaacuca

SEQ ID NO: 1456344 - RNA, 19 nt, Artificial Sequence
  Description of Artificial Sequence: Synthetic oligonucleotide
  Sense strand starting at position 2605 of SEQ ID NO: 1243985
gaguuaagcuaugugacaa

SEQ ID NO: 1456345 - RNA, 19 nt, Artificial Sequence
  Description of Artificial Sequence: Synthetic oligonucleotide
  Antisense strand to SEQ ID NO: 1456344
uugucacauagcuuaacuc

SEQ ID NO: 1456346 - RNA, 19 nt, Artificial Sequence
  Description of Artificial Sequence: Synthetic oligonucleotide
  Sense strand starting at position 2878 of SEQ ID NO: 1243985
cuaagaagcuggucauagu

SEQ ID NO: 1456347 - RNA, 19 nt, Artificial Sequence
  Description of Artificial Sequence: Synthetic oligonucleotide
  Antisense strand to SEQ ID NO: 1456346
acuaugaccagcuucuuag

SEQ ID NO: 1456348 - RNA, 19 nt, Artificial Sequence
  Description of Artificial Sequence: Synthetic oligonucleotide
  Sense strand starting at position 2972 of SEQ ID NO: 1243985
agcagcuauguccaagaca

SEQ ID NO: 1456349 - RNA, 19 nt, Artificial Sequence
  Description of Artificial Sequence: Synthetic oligonucleotide
  Antisense strand to SEQ ID NO: 1456348
ugucuuggacauagcugcu

SEQ ID NO: 1456350 - RNA, 19 nt, Artificial Sequence
  Description of Artificial Sequence: Synthetic oligonucleotide
  Sense strand starting at position 3068 of SEQ ID NO: 1243985
cugagacaauucucuaugu

SEQ ID NO: 1456351 - RNA, 19 nt, Artificial Sequence
  Description of Artificial Sequence: Synthetic oligonucleotide
  Antisense strand to SEQ ID NO: 1456350
acauagagaauugucucag

SEQ ID NO: 1456352 - RNA, 19 nt, Artificial Sequence
  Description of Artificial Sequence: Synthetic oligonucleotide
  Sense strand starting at position 3078 of SEQ ID NO: 1243985
ucucuaugucuccagccua

SEQ ID NO: 1456353 - RNA, 19 nt, Artificial Sequence
  Description of Artificial Sequence: Synthetic oligonucleotide
  Antisense strand to SEQ ID NO: 1456352
uaggcuggagacauagaga

SEQ ID NO: 1456354 - RNA, 19 nt, Artificial Sequence
  Description of Artificial Sequence: Synthetic oligonucleotide
  Sense strand starting at position 3277 of SEQ ID NO: 1243985
ccugucuggccagaacuaa

SEQ ID NO: 1456355 - RNA, 19 nt, Artificial Sequence
  Description of Artificial Sequence: Synthetic oligonucleotide
  Antisense strand to SEQ ID NO: 1456354
uuaguucuggccagacagg

SEQ ID NO: 1456356 - RNA, 19 nt, Artificial Sequence
  Description of Artificial Sequence: Synthetic oligonucleotide
  Sense strand starting at position 3331 of SEQ ID NO: 1243985
gggcucauuccaugagauc

SEQ ID NO: 1456357 - RNA, 19 nt, Artificial Sequence
  Description of Artificial Sequence: Synthetic oligonucleotide
  Antisense strand to SEQ ID NO: 1456356
gaucucauggaaugagccc

SEQ ID NO: 1456358 - RNA, 19 nt, Artificial Sequence
  Description of Artificial Sequence: Synthetic oligonucleotide
  Sense strand starting at position 3332 of SEQ ID NO: 1243985
ggcucauuccaugagaucu

SEQ ID NO: 1456359 - RNA, 19 nt, Artificial Sequence
  Description of Artificial Sequence: Synthetic oligonucleotide
  Antisense strand to SEQ ID NO: 1456358
agaucucauggaaugagcc

SEQ ID NO: 1456360 - RNA, 19 nt, Artificial Sequence
  Description of Artificial Sequence: Synthetic oligonucleotide
  Sense strand starting at position 3391 of SEQ ID NO: 1243985
uguaauauucuauaaggcu

SEQ ID NO: 1456361 - RNA, 19 nt, Artificial Sequence
  Description of Artificial Sequence: Synthetic oligonucleotide
  Antisense strand to SEQ ID NO: 1456360
agccuuauagaauauuaca

SEQ ID NO: 1456362 - RNA, 19 nt, Artificial Sequence
  Description of Artificial Sequence: Synthetic oligonucleotide
  Sense strand starting at position 3440 of SEQ ID NO: 1243985
cuuccaugauagccugaau

SEQ ID NO: 1456363 - RNA, 19 nt, Artificial Sequence
  Description of Artificial Sequence: Synthetic oligonucleotide
  Antisense strand to SEQ ID NO: 1456362
auucaggcuaucauggaag

SEQ ID NO: 1456364 - RNA, 19 nt, Artificial Sequence
  Description of Artificial Sequence: Synthetic oligonucleotide
  Sense strand starting at position 3520 of SEQ ID NO: 1243985
ugccucaugguauagacau

SEQ ID NO: 1456365 - RNA, 19 nt, Artificial Sequence
  Description of Artificial Sequence: Synthetic oligonucleotide
  Antisense strand to SEQ ID NO: 1456364
augucuauaccaugaggca

SEQ ID NO: 1456366 - RNA, 19 nt, Artificial Sequence
  Description of Artificial Sequence: Synthetic oligonucleotide
  Sense strand starting at position 3536 of SEQ ID NO: 1243985
cauccuuaucuauggagag

SEQ ID NO: 1456367 - RNA, 19 nt, Artificial Sequence
  Description of Artificial Sequence: Synthetic oligonucleotide
  Antisense strand to SEQ ID NO: 1456366
cucuccauagauaaggaug

SEQ ID NO: 1456368 - RNA, 19 nt, Artificial Sequence
  Description of Artificial Sequence: Synthetic oligonucleotide
  Sense strand starting at position 3550 of SEQ ID NO: 1243985
gagagcucuccagagcuca

SEQ ID NO: 1456369 - RNA, 19 nt, Artificial Sequence
  Description of Artificial Sequence: Synthetic oligonucleotide
  Antisense strand to SEQ ID NO: 1456368
ugagcucuggagagcucuc

SEQ ID NO: 1456370 - RNA, 19 nt, Artificial Sequence
  Description of Artificial Sequence: Synthetic oligonucleotide
  Sense strand starting at position 3565 of SEQ ID NO: 1243985
cucauuugccucugaaagu

SEQ ID NO: 1456371 - RNA, 19 nt, Artificial Sequence
  Description of Artificial Sequence: Synthetic oligonucleotide
  Antisense strand to SEQ ID NO: 1456370
acuuucagaggcaaaugag

SEQ ID NO: 1456372 - RNA, 19 nt, Artificial Sequence
  Description of Artificial Sequence: Synthetic oligonucleotide
  Sense strand starting at position 3592 of SEQ ID NO: 1243985
gccuguuagcaugcuuaug

SEQ ID NO: 1456373 - RNA, 19 nt, Artificial Sequence
  Description of Artificial Sequence: Synthetic oligonucleotide
  Antisense strand to SEQ ID NO: 1456372
cauaagcaugcuaacaggc

SEQ ID NO: 1456374 - RNA, 19 nt, Artificial Sequence
  Description of Artificial Sequence: Synthetic oligonucleotide
  Sense strand starting at position 3631 of SEQ ID NO: 1243985
uguagugaauagguacaau

SEQ ID NO: 1456375 - RNA, 19 nt, Artificial Sequence
  Description of Artificial Sequence: Synthetic oligonucleotide
  Antisense strand to SEQ ID NO: 1456374
auuguaccuauucacuaca

SEQ ID NO: 1456376 - RNA, 19 nt, Artificial Sequence
  Description of Artificial Sequence: Synthetic oligonucleotide
  Sense strand starting at position 3727 of SEQ ID NO: 1243985
gcuggauggaaccaguuua

SEQ ID NO: 1456377 - RNA, 19 nt, Artificial Sequence
  Description of Artificial Sequence: Synthetic oligonucleotide
  Antisense strand to SEQ ID NO: 1456376
uaaacugguuccauccagc

SEQ ID NO: 1456378 - RNA, 19 nt, Artificial Sequence
  Description of Artificial Sequence: Synthetic oligonucleotide
  Sense strand starting at position 3738 of SEQ ID NO: 1243985
ccaguuuagagacaagugu

SEQ ID NO: 1456379 - RNA, 19 nt, Artificial Sequence
  Description of Artificial Sequence: Synthetic oligonucleotide
  Antisense strand to SEQ ID NO: 1456378
acacuugucucuaaacugg

SEQ ID NO: 1456380 - RNA, 19 nt, Artificial Sequence
  Description of Artificial Sequence: Synthetic oligonucleotide
  Sense strand starting at position 3742 of SEQ ID NO: 1243985
uuuagagacaagugugagu

SEQ ID NO: 1456381 - RNA, 19 nt, Artificial Sequence
  Description of Artificial Sequence: Synthetic oligonucleotide
  Antisense strand to SEQ ID NO: 1456380
acucacacuugucucuaaa

SEQ ID NO: 1456382 - RNA, 19 nt, Artificial Sequence
  Description of Artificial Sequence: Synthetic oligonucleotide
  Sense strand starting at position 3755 of SEQ ID NO: 1243985
gugaguucuggccaagaga

SEQ ID NO: 1456383 - RNA, 19 nt, Artificial Sequence
  Description of Artificial Sequence: Synthetic oligonucleotide
  Antisense strand to SEQ ID NO: 1456382
ucucuuggccagaacucac

SEQ ID NO: 1456384 - RNA, 19 nt, Artificial Sequence
  Description of Artificial Sequence: Synthetic oligonucleotide
  Sense strand starting at position 3815 of SEQ ID NO: 1243985
ugauguggucuccaugaca

SEQ ID NO: 1456385 - RNA, 19 nt, Artificial Sequence
  Description of Artificial Sequence: Synthetic oligonucleotide
  Antisense strand to SEQ ID NO: 1456384
ugucauggagaccacauca

SEQ ID NO: 1456386 - RNA, 19 nt, Artificial Sequence
  Description of Artificial Sequence: Synthetic oligonucleotide
  Sense strand starting at position 3838 of SEQ ID NO: 1243985
agaagaguccaguaggucu

SEQ ID NO: 1456387 - RNA, 19 nt, Artificial Sequence
  Description of Artificial Sequence: Synthetic oligonucleotide
  Antisense strand to SEQ ID NO: 1456386
agaccuacuggacucuucu

SEQ ID NO: 1456388 - RNA, 19 nt, Artificial Sequence
  Description of Artificial Sequence: Synthetic oligonucleotide
  Sense strand starting at position 3845 of SEQ ID NO: 1243985
uccaguaggucuuuaaguu

SEQ ID NO: 1456389 - RNA, 19 nt, Artificial Sequence
  Description of Artificial Sequence: Synthetic oligonucleotide
  Antisense strand to SEQ ID NO: 1456388
aacuuaaagaccuacugga

SEQ ID NO: 1456390 - RNA, 19 nt, Artificial Sequence
  Description of Artificial Sequence: Synthetic oligonucleotide
  Sense strand starting at position 3846 of SEQ ID NO: 1243985
ccaguaggucuuuaaguug

SEQ ID NO: 1456391 - RNA, 19 nt, Artificial Sequence
  Description of Artificial Sequence: Synthetic oligonucleotide
  Antisense strand to SEQ ID NO: 1456390
caacuuaaagaccuacugg

SEQ ID NO: 1456392 - RNA, 19 nt, Artificial Sequence
  Description of Artificial Sequence: Synthetic oligonucleotide
  Sense strand starting at position 13 of SEQ ID NO: 1243986
gguaguuggauuugagcuu

SEQ ID NO: 1456393 - RNA, 19 nt, Artificial Sequence
  Description of Artificial Sequence: Synthetic oligonucleotide
  Antisense strand to SEQ ID NO: 1456392
aagcucaaauccaacuacc

SEQ ID NO: 1456394 - RNA, 19 nt, Artificial Sequence
  Description of Artificial Sequence: Synthetic oligonucleotide
  Sense strand starting at position 180 of SEQ ID NO: 1243986
ccucucagagacugucuaa

SEQ ID NO: 1456395 - RNA, 19 nt, Artificial Sequence
  Description of Artificial Sequence: Synthetic oligonucleotide
  Antisense strand to SEQ ID NO: 1456394
uuagacagucucugagagg

SEQ ID NO: 1456396 - RNA, 19 nt, Artificial Sequence
  Description of Artificial Sequence: Synthetic oligonucleotide
  Sense strand starting at position 404 of SEQ ID NO: 1243986
gguauucaagcgggaugga

SEQ ID NO: 1456397 - RNA, 19 nt, Artificial Sequence
  Description of Artificial Sequence: Synthetic oligonucleotide
  Antisense strand to SEQ ID NO: 1456396
uccaucccgcuugaauacc

SEQ ID NO: 1456398 - RNA, 19 nt, Artificial Sequence
  Description of Artificial Sequence: Synthetic oligonucleotide
  Sense strand starting at position 405 of SEQ ID NO: 1243986
guauucaagcgggauggaa

SEQ ID NO: 1456399 - RNA, 19 nt, Artificial Sequence
  Description of Artificial Sequence: Synthetic oligonucleotide
  Antisense strand to SEQ ID NO: 1456398
uuccaucccgcuugaauac

SEQ ID NO: 1456400 - RNA, 19 nt, Artificial Sequence
  Description of Artificial Sequence: Synthetic oligonucleotide
  Sense strand starting at position 598 of SEQ ID NO: 1243986
agaaucaaugcuugggcaa

SEQ ID NO: 1456401 - RNA, 19 nt, Artificial Sequence
  Description of Artificial Sequence: Synthetic oligonucleotide
  Antisense strand to SEQ ID NO: 1456400
uugcccaagcauugauucu

SEQ ID NO: 1456402 - RNA, 19 nt, Artificial Sequence
  Description of Artificial Sequence: Synthetic oligonucleotide
  Sense strand starting at position 622 of SEQ ID NO: 1243986
gaggaugagugacaaauua

SEQ ID NO: 1456403 - RNA, 19 nt, Artificial Sequence
  Description of Artificial Sequence: Synthetic oligonucleotide
  Antisense strand to SEQ ID NO: 1456402
uaauuugucacucauccuc

SEQ ID NO: 1456404 - RNA, 19 nt, Artificial Sequence
  Description of Artificial Sequence: Synthetic oligonucleotide
  Sense strand starting at position 779 of SEQ ID NO: 1243986
cccacacaauggucugauu

SEQ ID NO: 1456405 - RNA, 19 nt, Artificial Sequence
  Description of Artificial Sequence: Synthetic oligonucleotide
  Antisense strand to SEQ ID NO: 1456404
aaucagaccauuguguggg

SEQ ID NO: 1456406 - RNA, 19 nt, Artificial Sequence
  Description of Artificial Sequence: Synthetic oligonucleotide
  Sense strand starting at position 915 of SEQ ID NO: 1243986
uggagaacuccuugaggca

SEQ ID NO: 1456407 - RNA, 19 nt, Artificial Sequence
  Description of Artificial Sequence: Synthetic oligonucleotide
  Antisense strand to SEQ ID NO: 1456406
ugccucaaggaguucucca

SEQ ID NO: 1456408 - RNA, 19 nt, Artificial Sequence
  Description of Artificial Sequence: Synthetic oligonucleotide
  Sense strand starting at position 944 of SEQ ID NO: 1243986
aggagaaguguagggcuua

SEQ ID NO: 1456409 - RNA, 19 nt, Artificial Sequence
  Description of Artificial Sequence: Synthetic oligonucleotide
  Antisense strand to SEQ ID NO: 1456408
uaagcccuacacuucuccu

SEQ ID NO: 1456410 - RNA, 19 nt, Artificial Sequence
  Description of Artificial Sequence: Synthetic oligonucleotide
  Sense strand starting at position 954 of SEQ ID NO: 1243986
uagggcuuaggguggaaua

SEQ ID NO: 1456411 - RNA, 19 nt, Artificial Sequence
  Description of Artificial Sequence: Synthetic oligonucleotide
  Antisense strand to SEQ ID NO: 1456410
uauuccacccuaagcccua

SEQ ID NO: 1456412 - RNA, 19 nt, Artificial Sequence
  Description of Artificial Sequence: Synthetic oligonucleotide
  Sense strand starting at position 1048 of SEQ ID NO: 1243986
ccacgucuccuggaaguga

SEQ ID NO: 1456413 - RNA, 19 nt, Artificial Sequence
  Description of Artificial Sequence: Synthetic oligonucleotide
  Antisense strand to SEQ ID NO: 1456412
ucacuuccaggagacgugg

SEQ ID NO: 1456414 - RNA, 19 nt, Artificial Sequence
  Description of Artificial Sequence: Synthetic oligonucleotide
  Sense strand starting at position 1052 of SEQ ID NO: 1243986
gucuccuggaagugacuua

SEQ ID NO: 1456415 - RNA, 19 nt, Artificial Sequence
  Description of Artificial Sequence: Synthetic oligonucleotide
  Antisense strand to SEQ ID NO: 1456414
uaagucacuuccaggagac

SEQ ID NO: 1456416 - RNA, 19 nt, Artificial Sequence
  Description of Artificial Sequence: Synthetic oligonucleotide
  Sense strand starting at position 1411 of SEQ ID NO: 1243986
cucccauuuccgggcgauu

SEQ ID NO: 1456417 - RNA, 19 nt, Artificial Sequence
  Description of Artificial Sequence: Synthetic oligonucleotide
  Antisense strand to SEQ ID NO: 1456416
aaucgcccggaaaugggag

SEQ ID NO: 1456418 - RNA, 19 nt, Artificial Sequence
  Description of Artificial Sequence: Synthetic oligonucleotide
  Sense strand starting at position 1421 of SEQ ID NO: 1243986
cgggcgauuucugcgagaa

SEQ ID NO: 1456419 - RNA, 19 nt, Artificial Sequence
  Description of Artificial Sequence: Synthetic oligonucleotide
  Antisense strand to SEQ ID NO: 1456418
uucucgcagaaaucgcccg

SEQ ID NO: 1456420 - RNA, 19 nt, Artificial Sequence
  Description of Artificial Sequence: Synthetic oligonucleotide
  Sense strand starting at position 1422 of SEQ ID NO: 1243986
gggcgauuucugcgagaag

SEQ ID NO: 1456421 - RNA, 19 nt, Artificial Sequence
  Description of Artificial Sequence: Synthetic oligonucleotide
  Antisense strand to SEQ ID NO: 1456420
cuucucgcagaaaucgccc

SEQ ID NO: 1456422 - RNA, 19 nt, Artificial Sequence
  Description of Artificial Sequence: Synthetic oligonucleotide
  Sense strand starting at position 1823 of SEQ ID NO: 1243986
gcgaaacuucuccgacuca

SEQ ID NO: 1456423 - RNA, 19 nt, Artificial Sequence
  Description of Artificial Sequence: Synthetic oligonucleotide
  Antisense strand to SEQ ID NO: 1456422
ugagucggagaaguuucgc

SEQ ID NO: 1456424 - RNA, 19 nt, Artificial Sequence
  Description of Artificial Sequence: Synthetic oligonucleotide
  Sense strand starting at position 2818 of SEQ ID NO: 1243986
ggaguaugaacaugucugu

SEQ ID NO: 1456425 - RNA, 19 nt, Artificial Sequence
  Description of Artificial Sequence: Synthetic oligonucleotide
  Antisense strand to SEQ ID NO: 1456424
acagacauguucauacucc

SEQ ID NO: 1456426 - RNA, 19 nt, Artificial Sequence
  Description of Artificial Sequence: Synthetic oligonucleotide
  Sense strand starting at position 2919 of SEQ ID NO: 1243986
gugcucauuucguucccau

SEQ ID NO: 1456427 - RNA, 19 nt, Artificial Sequence
  Description of Artificial Sequence: Synthetic oligonucleotide
  Antisense strand to SEQ ID NO: 1456426
augggaacgaaaugagcac

SEQ ID NO: 1456428 - RNA, 19 nt, Artificial Sequence
  Description of Artificial Sequence: Synthetic oligonucleotide
  Sense strand starting at position 2945 of SEQ ID NO: 1243986
cgaaauggaucguuuguau

SEQ ID NO: 1456429 - RNA, 19 nt, Artificial Sequence
  Description of Artificial Sequence: Synthetic oligonucleotide
  Antisense strand to SEQ ID NO: 1456428
auacaaacgauccauuucg

SEQ ID NO: 1456430 - RNA, 19 nt, Artificial Sequence
  Description of Artificial Sequence: Synthetic oligonucleotide
  Sense strand starting at position 2948 of SEQ ID NO: 1243986
aauggaucguuuguaucuu

SEQ ID NO: 1456431 - RNA, 19 nt, Artificial Sequence
  Description of Artificial Sequence: Synthetic oligonucleotide
  Antisense strand to SEQ ID NO: 1456430
aagauacaaacgauccauu

SEQ ID NO: 1456432 - RNA, 19 nt, Artificial Sequence
  Description of Artificial Sequence: Synthetic oligonucleotide
  Sense strand starting at position 2999 of SEQ ID NO: 1243986
gguaacucuccugagguca

SEQ ID NO: 1456433 - RNA, 19 nt, Artificial Sequence
  Description of Artificial Sequence: Synthetic oligonucleotide
  Antisense strand to SEQ ID NO: 1456432
ugaccucaggagaguuacc

SEQ ID NO: 1456434 - RNA, 19 nt, Artificial Sequence
  Description of Artificial Sequence: Synthetic oligonucleotide
  Sense strand starting at position 3099 of SEQ ID NO: 1243986
ugaguuaagcuaugugaca

SEQ ID NO: 1456435 - RNA, 19 nt, Artificial Sequence
  Description of Artificial Sequence: Synthetic oligonucleotide
  Antisense strand to SEQ ID NO: 1456434
ugucacauagcuuaacuca

SEQ ID NO: 1456436 - RNA, 19 nt, Artificial Sequence
  Description of Artificial Sequence: Synthetic oligonucleotide
  Sense strand starting at position 3100 of SEQ ID NO: 1243986
gaguuaagcuaugugacaa

SEQ ID NO: 1456437 - RNA, 19 nt, Artificial Sequence
  Description of Artificial Sequence: Synthetic oligonucleotide
  Antisense strand to SEQ ID NO: 1456436
uugucacauagcuuaacuc

SEQ ID NO: 1456438 - RNA, 19 nt, Artificial Sequence
  Description of Artificial Sequence: Synthetic oligonucleotide
  Sense strand starting at position 3178 of SEQ ID NO: 1243986
agggucuguucucugcaga

SEQ ID NO: 1456439 - RNA, 19 nt, Artificial Sequence
  Description of Artificial Sequence: Synthetic oligonucleotide
  Antisense strand to SEQ ID NO: 1456438
ucugcagagaacagacccu

SEQ ID NO: 1456440 - RNA, 19 nt, Artificial Sequence
  Description of Artificial Sequence: Synthetic oligonucleotide
  Sense strand starting at position 3179 of SEQ ID NO: 1243986
gggucuguucucugcagag

SEQ ID NO: 1456441 - RNA, 19 nt, Artificial Sequence
  Description of Artificial Sequence: Synthetic oligonucleotide
  Antisense strand to SEQ ID NO: 1456440
cucugcagagaacagaccc

SEQ ID NO: 1456442 - RNA, 19 nt, Artificial Sequence
  Description of Artificial Sequence: Synthetic oligonucleotide
  Sense strand starting at position 3373 of SEQ ID NO: 1243986
cuaagaagcuggucauagu

SEQ ID NO: 1456443 - RNA, 19 nt, Artificial Sequence
  Description of Artificial Sequence: Synthetic oligonucleotide
  Antisense strand to SEQ ID NO: 1456442
acuaugaccagcuucuuag

SEQ ID NO: 1456444 - RNA, 19 nt, Artificial Sequence
  Description of Artificial Sequence: Synthetic oligonucleotide
  Sense strand starting at position 3382 of SEQ ID NO: 1243986
uggucauagucucugucau

SEQ ID NO: 1456445 - RNA, 19 nt, Artificial Sequence
  Description of Artificial Sequence: Synthetic oligonucleotide
  Antisense strand to SEQ ID NO: 1456444
augacagagacuaugacca

SEQ ID NO: 1456446 - RNA, 19 nt, Artificial Sequence
  Description of Artificial Sequence: Synthetic oligonucleotide
  Sense strand starting at position 3383 of SEQ ID NO: 1243986
ggucauagucucugucauc

SEQ ID NO: 1456447 - RNA, 19 nt, Artificial Sequence
  Description of Artificial Sequence: Synthetic oligonucleotide
  Antisense strand to SEQ ID NO: 1456446
gaugacagagacuaugacc

SEQ ID NO: 1456448 - RNA, 19 nt, Artificial Sequence
  Description of Artificial Sequence: Synthetic oligonucleotide
  Sense strand starting at position 3384 of SEQ ID NO: 1243986
gucauagucucugucaucu

SEQ ID NO: 1456449 - RNA, 19 nt, Artificial Sequence
  Description of Artificial Sequence: Synthetic oligonucleotide
  Antisense strand to SEQ ID NO: 1456448
agaugacagagacuaugac

SEQ ID NO: 1456450 - RNA, 19 nt, Artificial Sequence
  Description of Artificial Sequence: Synthetic oligonucleotide
  Sense strand starting at position 3467 of SEQ ID NO: 1243986
agcagcuauguccaagaca

SEQ ID NO: 1456451 - RNA, 19 nt, Artificial Sequence
  Description of Artificial Sequence: Synthetic oligonucleotide
  Antisense strand to SEQ ID NO: 1456450
ugucuuggacauagcugcu

SEQ ID NO: 1456452 - RNA, 19 nt, Artificial Sequence
  Description of Artificial Sequence: Synthetic oligonucleotide
  Sense strand starting at position 3563 of SEQ ID NO: 1243986
cugagacaauucucuaugu

SEQ ID NO: 1456453 - RNA, 19 nt, Artificial Sequence
  Description of Artificial Sequence: Synthetic oligonucleotide
  Antisense strand to SEQ ID NO: 1456452
acauagagaauugucucag

SEQ ID NO: 1456454 - RNA, 19 nt, Artificial Sequence
  Description of Artificial Sequence: Synthetic oligonucleotide
  Sense strand starting at position 3573 of SEQ ID NO: 1243986
ucucuaugucuccagccua

SEQ ID NO: 1456455 - RNA, 19 nt, Artificial Sequence
  Description of Artificial Sequence: Synthetic oligonucleotide
  Antisense strand to SEQ ID NO: 1456454
uaggcuggagacauagaga

SEQ ID NO: 1456456 - RNA, 19 nt, Artificial Sequence
  Description of Artificial Sequence: Synthetic oligonucleotide
  Sense strand starting at position 3623 of SEQ ID NO: 1243986
uccugccuguuugugauaa

SEQ ID NO: 1456457 - RNA, 19 nt, Artificial Sequence
  Description of Artificial Sequence: Synthetic oligonucleotide
  Antisense strand to SEQ ID NO: 1456456
uuaucacaaacaggcagga

SEQ ID NO: 1456458 - RNA, 19 nt, Artificial Sequence
  Description of Artificial Sequence: Synthetic oligonucleotide
  Sense strand starting at position 3772 of SEQ ID NO: 1243986
ccugucuggccagaacuaa

SEQ ID NO: 1456459 - RNA, 19 nt, Artificial Sequence
  Description of Artificial Sequence: Synthetic oligonucleotide
  Antisense strand to SEQ ID NO: 1456458
uuaguucuggccagacagg

SEQ ID NO: 1456460 - RNA, 19 nt, Artificial Sequence
  Description of Artificial Sequence: Synthetic oligonucleotide
  Sense strand starting at position 3826 of SEQ ID NO: 1243986
gggcucauuccaugagauc

SEQ ID NO: 1456461 - RNA, 19 nt, Artificial Sequence
  Description of Artificial Sequence: Synthetic oligonucleotide
  Antisense strand to SEQ ID NO: 1456460
gaucucauggaaugagccc

SEQ ID NO: 1456462 - RNA, 19 nt, Artificial Sequence
  Description of Artificial Sequence: Synthetic oligonucleotide
  Sense strand starting at position 3827 of SEQ ID NO: 1243986
ggcucauuccaugagaucu

SEQ ID NO: 1456463 - RNA, 19 nt, Artificial Sequence
  Description of Artificial Sequence: Synthetic oligonucleotide
  Antisense strand to SEQ ID NO: 1456462
agaucucauggaaugagcc

SEQ ID NO: 1456464 - RNA, 19 nt, Artificial Sequence
  Description of Artificial Sequence: Synthetic oligonucleotide
  Sense strand starting at position 3837 of SEQ ID NO: 1243986
augagaucugcuugugcaa

SEQ ID NO: 1456465 - RNA, 19 nt, Artificial Sequence
  Description of Artificial Sequence: Synthetic oligonucleotide
  Antisense strand to SEQ ID NO: 1456464
uugcacaagcagaucucau

SEQ ID NO: 1456466 - RNA, 19 nt, Artificial Sequence
  Description of Artificial Sequence: Synthetic oligonucleotide
  Sense strand starting at position 3886 of SEQ ID NO: 1243986
uguaauauucuauaaggcu

SEQ ID NO: 1456467 - RNA, 19 nt, Artificial Sequence
  Description of Artificial Sequence: Synthetic oligonucleotide
  Antisense strand to SEQ ID NO: 1456466
agccuuauagaauauuaca

SEQ ID NO: 1456468 - RNA, 19 nt, Artificial Sequence
  Description of Artificial Sequence: Synthetic oligonucleotide
  Sense strand starting at position 3935 of SEQ ID NO: 1243986
cuuccaugauagccugaau

SEQ ID NO: 1456469 - RNA, 19 nt, Artificial Sequence
  Description of Artificial Sequence: Synthetic oligonucleotide
  Antisense strand to SEQ ID NO: 1456468
auucaggcuaucauggaag

SEQ ID NO: 1456470 - RNA, 19 nt, Artificial Sequence
  Description of Artificial Sequence: Synthetic oligonucleotide
  Sense strand starting at position 3953 of SEQ ID NO: 1243986
ucaguuccuuuagccauau

SEQ ID NO: 1456471 - RNA, 19 nt, Artificial Sequence
  Description of Artificial Sequence: Synthetic oligonucleotide
  Antisense strand to SEQ ID NO: 1456470
auauggcuaaaggaacuga

SEQ ID NO: 1456472 - RNA, 19 nt, Artificial Sequence
  Description of Artificial Sequence: Synthetic oligonucleotide
  Sense strand starting at position 432 of SEQ ID NO: 1243987
ccaugcugguuccugagaa

SEQ ID NO: 1456473 - RNA, 19 nt, Artificial Sequence
  Description of Artificial Sequence: Synthetic oligonucleotide
  Antisense strand to SEQ ID NO: 1456472
uucucaggaaccagcaugg

SEQ ID NO: 1456474 - RNA, 19 nt, Artificial Sequence
  Description of Artificial Sequence: Synthetic oligonucleotide
  Sense strand starting at position 602 of SEQ ID NO: 1243987
uacaaaguugcugagaacu

SEQ ID NO: 1456475 - RNA, 19 nt, Artificial Sequence
  Description of Artificial Sequence: Synthetic oligonucleotide
  Antisense strand to SEQ ID NO: 1456474
aguucucagcaacuuugua

SEQ ID NO: 1456476 - RNA, 19 nt, Artificial Sequence
  Description of Artificial Sequence: Synthetic oligonucleotide
  Sense strand starting at position 720 of SEQ ID NO: 1243987
cauaauaguaucggagcga

SEQ ID NO: 1456477 - RNA, 19 nt, Artificial Sequence
  Description of Artificial Sequence: Synthetic oligonucleotide
  Antisense strand to SEQ ID NO: 1456476
ucgcuccgauacuauuaug

SEQ ID NO: 1456478 - RNA, 19 nt, Artificial Sequence
  Description of Artificial Sequence: Synthetic oligonucleotide
  Sense strand starting at position 832 of SEQ ID NO: 1243987
gcuaccuuggcagaggaaa

SEQ ID NO: 1456479 - RNA, 19 nt, Artificial Sequence
  Description of Artificial Sequence: Synthetic oligonucleotide
  Antisense strand to SEQ ID NO: 1456478
uuuccucugccaagguagc

SEQ ID NO: 1456480 - RNA, 19 nt, Artificial Sequence
  Description of Artificial Sequence: Synthetic oligonucleotide
  Sense strand starting at position 878 of SEQ ID NO: 1243987
uugagauucuuggugcaaa

SEQ ID NO: 1456481 - RNA, 19 nt, Artificial Sequence
  Description of Artificial Sequence: Synthetic oligonucleotide
  Antisense strand to SEQ ID NO: 1456480
uuugcaccaagaaucucaa

SEQ ID NO: 1456482 - RNA, 19 nt, Artificial Sequence
  Description of Artificial Sequence: Synthetic oligonucleotide
  Sense strand starting at position 933 of SEQ ID NO: 1243987
agacuuaggcuuggcaaga

SEQ ID NO: 1456483 - RNA, 19 nt, Artificial Sequence
  Description of Artificial Sequence: Synthetic oligonucleotide
  Antisense strand to SEQ ID NO: 1456482
ucuugccaagccuaagucu

SEQ ID NO: 1456484 - RNA, 19 nt, Artificial Sequence
  Description of Artificial Sequence: Synthetic oligonucleotide
  Sense strand starting at position 934 of SEQ ID NO: 1243987
gacuuaggcuuggcaagaa

SEQ ID NO: 1456485 - RNA, 19 nt, Artificial Sequence
  Description of Artificial Sequence: Synthetic oligonucleotide
  Antisense strand to SEQ ID NO: 1456484
uucuugccaagccuaaguc

SEQ ID NO: 1456486 - RNA, 19 nt, Artificial Sequence
  Description of Artificial Sequence: Synthetic oligonucleotide
  Sense strand starting at position 966 of SEQ ID NO: 1243987
aagcaagaaucaugaugga

SEQ ID NO: 1456487 - RNA, 19 nt, Artificial Sequence
  Description of Artificial Sequence: Synthetic oligonucleotide
  Antisense strand to SEQ ID NO: 1456486
uccaucaugauucuugcuu

SEQ ID NO: 1456488 - RNA, 19 nt, Artificial Sequence
  Description of Artificial Sequence: Synthetic oligonucleotide
  Sense strand starting at position 1022 of SEQ ID NO: 1243987
ggcuguaaacuuuggaaag

SEQ ID NO: 1456489 - RNA, 19 nt, Artificial Sequence
  Description of Artificial Sequence: Synthetic oligonucleotide
  Antisense strand to SEQ ID NO: 1456488
cuuuccaaaguuuacagcc

SEQ ID NO: 1456490 - RNA, 19 nt, Artificial Sequence
  Description of Artificial Sequence: Synthetic oligonucleotide
  Sense strand starting at position 1024 of SEQ ID NO: 1243987
cuguaaacuuuggaaagga

SEQ ID NO: 1456491 - RNA, 19 nt, Artificial Sequence
  Description of Artificial Sequence: Synthetic oligonucleotide
  Antisense strand to SEQ ID NO: 1456490
uccuuuccaaaguuuacag

SEQ ID NO: 1456492 - RNA, 19 nt, Artificial Sequence
  Description of Artificial Sequence: Synthetic oligonucleotide
  Sense strand starting at position 1077 of SEQ ID NO: 1243987
gcucaaugagcuugaacuc

SEQ ID NO: 1456493 - RNA, 19 nt, Artificial Sequence
  Description of Artificial Sequence: Synthetic oligonucleotide
  Antisense strand to SEQ ID NO: 1456492
gaguucaagcucauugagc

SEQ ID NO: 1456494 - RNA, 19 nt, Artificial Sequence
  Description of Artificial Sequence: Synthetic oligonucleotide
  Sense strand starting at position 1124 of SEQ ID NO: 1243987
ugggcauuuguugggucau

SEQ ID NO: 1456495 - RNA, 19 nt, Artificial Sequence
  Description of Artificial Sequence: Synthetic oligonucleotide
  Antisense strand to SEQ ID NO: 1456494
augacccaacaaaugccca

SEQ ID NO: 1456496 - RNA, 19 nt, Artificial Sequence
  Description of Artificial Sequence: Synthetic oligonucleotide
  Sense strand starting at position 1396 of SEQ ID NO: 1243987
gggacacagcgugauaaga

SEQ ID NO: 1456497 - RNA, 19 nt, Artificial Sequence
  Description of Artificial Sequence: Synthetic oligonucleotide
  Antisense strand to SEQ ID NO: 1456496
ucuuaucacgcuguguccc

SEQ ID NO: 1456498 - RNA, 19 nt, Artificial Sequence
  Description of Artificial Sequence: Synthetic oligonucleotide
  Sense strand starting at position 1406 of SEQ ID NO: 1243987
gugauaagaccuugacccu

SEQ ID NO: 1456499 - RNA, 19 nt, Artificial Sequence
  Description of Artificial Sequence: Synthetic oligonucleotide
  Antisense strand to SEQ ID NO: 1456498
agggucaaggucuuaucac

SEQ ID NO: 1456500 - RNA, 19 nt, Artificial Sequence
  Description of Artificial Sequence: Synthetic oligonucleotide
  Sense strand starting at position 1451 of SEQ ID NO: 1243987
ucaaauuucucagggacaa

SEQ ID NO: 1456501 - RNA, 19 nt, Artificial Sequence
  Description of Artificial Sequence: Synthetic oligonucleotide
  Antisense strand to SEQ ID NO: 1456500
uugucccugagaaauuuga

SEQ ID NO: 1456502 - RNA, 19 nt, Artificial Sequence
  Description of Artificial Sequence: Synthetic oligonucleotide
  Sense strand starting at position 1471 of SEQ ID NO: 1243987
gcagacaucaucugggaau

SEQ ID NO: 1456503 - RNA, 19 nt, Artificial Sequence
  Description of Artificial Sequence: Synthetic oligonucleotide
  Antisense strand to SEQ ID NO: 1456502
auucccagaugaugucugc

SEQ ID NO: 1456504 - RNA, 19 nt, Artificial Sequence
  Description of Artificial Sequence: Synthetic oligonucleotide
  Sense strand starting at position 1472 of SEQ ID NO: 1243987
cagacaucaucugggaaug

SEQ ID NO: 1456505 - RNA, 19 nt, Artificial Sequence
  Description of Artificial Sequence: Synthetic oligonucleotide
  Antisense strand to SEQ ID NO: 1456504
cauucccagaugaugucug

SEQ ID NO: 1456506 - RNA, 19 nt, Artificial Sequence
  Description of Artificial Sequence: Synthetic oligonucleotide
  Sense strand starting at position 1474 of SEQ ID NO: 1243987
gacaucaucugggaauggu

SEQ ID NO: 1456507 - RNA, 19 nt, Artificial Sequence
  Description of Artificial Sequence: Synthetic oligonucleotide
  Antisense strand to SEQ ID NO: 1456506
accauucccagaugauguc

SEQ ID NO: 1456508 - RNA, 19 nt, Artificial Sequence
  Description of Artificial Sequence: Synthetic oligonucleotide
  Sense strand starting at position 1485 of SEQ ID NO: 1243987
ggaauggucgcagagguuu

SEQ ID NO: 1456509 - RNA, 19 nt, Artificial Sequence
  Description of Artificial Sequence: Synthetic oligonucleotide
  Antisense strand to SEQ ID NO: 1456508
aaaccucugcgaccauucc

SEQ ID NO: 1456510 - RNA, 19 nt, Artificial Sequence
  Description of Artificial Sequence: Synthetic oligonucleotide
  Sense strand starting at position 1514 of SEQ ID NO: 1243987
uagccuuguggaggaaauu

SEQ ID NO: 1456511 - RNA, 19 nt, Artificial Sequence
  Description of Artificial Sequence: Synthetic oligonucleotide
  Antisense strand to SEQ ID NO: 1456510
aauuuccuccacaaggcua

SEQ ID NO: 1456512 - RNA, 19 nt, Artificial Sequence
  Description of Artificial Sequence: Synthetic oligonucleotide
  Sense strand starting at position 2084 of SEQ ID NO: 1243987
gaaagaguucgguguccac

SEQ ID NO: 1456513 - RNA, 19 nt, Artificial Sequence
  Description of Artificial Sequence: Synthetic oligonucleotide
  Antisense strand to SEQ ID NO: 1456512
guggacaccgaacucuuuc

SEQ ID NO: 1456514 - RNA, 19 nt, Artificial Sequence
  Description of Artificial Sequence: Synthetic oligonucleotide
  Sense strand starting at position 2103 of SEQ ID NO: 1243987
gccuaagacucccucagaa

SEQ ID NO: 1456515 - RNA, 19 nt, Artificial Sequence
  Description of Artificial Sequence: Synthetic oligonucleotide
  Antisense strand to SEQ ID NO: 1456514
uucugagggagucuuaggc

SEQ ID NO: 1456516 - RNA, 19 nt, Artificial Sequence
  Description of Artificial Sequence: Synthetic oligonucleotide
  Sense strand starting at position 2417 of SEQ ID NO: 1243987
augagaagauggugaaaca

SEQ ID NO: 1456517 - RNA, 19 nt, Artificial Sequence
  Description of Artificial Sequence: Synthetic oligonucleotide
  Antisense strand to SEQ ID NO: 1456516
uguuucaccaucuucucau

SEQ ID NO: 1456518 - RNA, 19 nt, Artificial Sequence
  Description of Artificial Sequence: Synthetic oligonucleotide
  Sense strand starting at position 2492 of SEQ ID NO: 1243987
uggaauuccugacuccauu

SEQ ID NO: 1456519 - RNA, 19 nt, Artificial Sequence
  Description of Artificial Sequence: Synthetic oligonucleotide
  Antisense strand to SEQ ID NO: 1456518
aauggagucaggaauucca

SEQ ID NO: 1456520 - RNA, 19 nt, Artificial Sequence
  Description of Artificial Sequence: Synthetic oligonucleotide
  Sense strand starting at position 2535 of SEQ ID NO: 1243987
ggaguucaagggcauguaa

SEQ ID NO: 1456521 - RNA, 19 nt, Artificial Sequence
  Description of Artificial Sequence: Synthetic oligonucleotide
  Antisense strand to SEQ ID NO: 1456520
uuacaugcccuugaacucc

SEQ ID NO: 1456522 - RNA, 19 nt, Artificial Sequence
  Description of Artificial Sequence: Synthetic oligonucleotide
  Sense strand starting at position 2642 of SEQ ID NO: 1243987
aggcuuaugcccuggauuu

SEQ ID NO: 1456523 - RNA, 19 nt, Artificial Sequence
  Description of Artificial Sequence: Synthetic oligonucleotide
  Antisense strand to SEQ ID NO: 1456522
aaauccagggcauaagccu

SEQ ID NO: 1456524 - RNA, 19 nt, Artificial Sequence
  Description of Artificial Sequence: Synthetic oligonucleotide
  Sense strand starting at position 2643 of SEQ ID NO: 1243987
ggcuuaugcccuggauuug

SEQ ID NO: 1456525 - RNA, 19 nt, Artificial Sequence
  Description of Artificial Sequence: Synthetic oligonucleotide
  Antisense strand to SEQ ID NO: 1456524
caaauccagggcauaagcc

SEQ ID NO: 1456526 - RNA, 19 nt, Artificial Sequence
  Description of Artificial Sequence: Synthetic oligonucleotide
  Sense strand starting at position 2677 of SEQ ID NO: 1243987
uccgguucuuaguuggaca

SEQ ID NO: 1456527 - RNA, 19 nt, Artificial Sequence
  Description of Artificial Sequence: Synthetic oligonucleotide
  Antisense strand to SEQ ID NO: 1456526
uguccaacuaagaaccgga

SEQ ID NO: 1456528 - RNA, 19 nt, Artificial Sequence
  Description of Artificial Sequence: Synthetic oligonucleotide
  Sense strand starting at position 2779 of SEQ ID NO: 1243987
cugggccuacucuaauaaa

SEQ ID NO: 1456529 - RNA, 19 nt, Artificial Sequence
  Description of Artificial Sequence: Synthetic oligonucleotide
  Antisense strand to SEQ ID NO: 1456528
uuuauuagaguaggcccag

SEQ ID NO: 1456530 - RNA, 19 nt, Artificial Sequence
  Description of Artificial Sequence: Synthetic oligonucleotide
  Sense strand starting at position 3327 of SEQ ID NO: 1243987
ccaugagccuggcuaguuu

SEQ ID NO: 1456531 - RNA, 19 nt, Artificial Sequence
  Description of Artificial Sequence: Synthetic oligonucleotide
  Antisense strand to SEQ ID NO: 1456530
aaacuagccaggcucaugg

SEQ ID NO: 1456532 - RNA, 19 nt, Artificial Sequence
  Description of Artificial Sequence: Synthetic oligonucleotide
  Sense strand starting at position 3464 of SEQ ID NO: 1243987
cacaguaguuuggucuuaa

SEQ ID NO: 1456533 - RNA, 19 nt, Artificial Sequence
  Description of Artificial Sequence: Synthetic oligonucleotide
  Antisense strand to SEQ ID NO: 1456532
uuaagaccaaacuacugug

SEQ ID NO: 1456534 - RNA, 19 nt, Artificial Sequence
  Description of Artificial Sequence: Synthetic oligonucleotide
  Sense strand starting at position 3465 of SEQ ID NO: 1243987
acaguaguuuggucuuaau

SEQ ID NO: 1456535 - RNA, 19 nt, Artificial Sequence
  Description of Artificial Sequence: Synthetic oligonucleotide
  Antisense strand to SEQ ID NO: 1456534
auuaagaccaaacuacugu

SEQ ID NO: 1456536 - RNA, 19 nt, Artificial Sequence
  Description of Artificial Sequence: Synthetic oligonucleotide
  Sense strand starting at position 3474 of SEQ ID NO: 1243987
uggucuuaauagguaauua

SEQ ID NO: 1456537 - RNA, 19 nt, Artificial Sequence
  Description of Artificial Sequence: Synthetic oligonucleotide
  Antisense strand to SEQ ID NO: 1456536
uaauuaccuauuaagacca

SEQ ID NO: 1456538 - RNA, 19 nt, Artificial Sequence
  Description of Artificial Sequence: Synthetic oligonucleotide
  Sense strand starting at position 3632 of SEQ ID NO: 1243987
cuaagcuggccuugaacua

SEQ ID NO: 1456539 - RNA, 19 nt, Artificial Sequence
  Description of Artificial Sequence: Synthetic oligonucleotide
  Antisense strand to SEQ ID NO: 1456538
uaguucaaggccagcuuag

SEQ ID NO: 1456540 - RNA, 19 nt, Artificial Sequence
  Description of Artificial Sequence: Synthetic oligonucleotide
  Sense strand starting at position 3647 of SEQ ID NO: 1243987
acuaauuccugggcucaaa

SEQ ID NO: 1456541 - RNA, 19 nt, Artificial Sequence
  Description of Artificial Sequence: Synthetic oligonucleotide
  Antisense strand to SEQ ID NO: 1456540
uuugagcccaggaauuagu

SEQ ID NO: 1456542 - RNA, 19 nt, Artificial Sequence
  Description of Artificial Sequence: Synthetic oligonucleotide
  Sense strand starting at position 3748 of SEQ ID NO: 1243987
ugaauauagguuugcucau

SEQ ID NO: 1456543 - RNA, 19 nt, Artificial Sequence
  Description of Artificial Sequence: Synthetic oligonucleotide
  Antisense strand to SEQ ID NO: 1456542
augagcaaaccuauauuca

SEQ ID NO: 1456544 - RNA, 19 nt, Artificial Sequence
  Description of Artificial Sequence: Synthetic oligonucleotide
  Sense strand starting at position 3749 of SEQ ID NO: 1243987
gaauauagguuugcucauu

SEQ ID NO: 1456545 - RNA, 19 nt, Artificial Sequence
  Description of Artificial Sequence: Synthetic oligonucleotide
  Antisense strand to SEQ ID NO: 1456544
aaugagcaaaccuauauuc

SEQ ID NO: 1456546 - RNA, 19 nt, Artificial Sequence
  Description of Artificial Sequence: Synthetic oligonucleotide
  Sense strand starting at position 3772 of SEQ ID NO: 1243987
aguaauaauuuguccgggu

SEQ ID NO: 1456547 - RNA, 19 nt, Artificial Sequence
  Description of Artificial Sequence: Synthetic oligonucleotide
  Antisense strand to SEQ ID NO: 1456546
acccggacaaauuauuacu

SEQ ID NO: 1456548 - RNA, 19 nt, Artificial Sequence
  Description of Artificial Sequence: Synthetic oligonucleotide
  Sense strand starting at position 3773 of SEQ ID NO: 1243987
guaauaauuuguccgggug

SEQ ID NO: 1456549 - RNA, 19 nt, Artificial Sequence
  Description of Artificial Sequence: Synthetic oligonucleotide
  Antisense strand to SEQ ID NO: 1456548
cacccggacaaauuauuac

SEQ ID NO: 1456550 - RNA, 19 nt, Artificial Sequence
  Description of Artificial Sequence: Synthetic oligonucleotide
  Sense strand starting at position 3775 of SEQ ID NO: 1243987
aauaauuuguccgggugag

SEQ ID NO: 1456551 - RNA, 19 nt, Artificial Sequence
  Description of Artificial Sequence: Synthetic oligonucleotide
  Antisense strand to SEQ ID NO: 1456550
cucacccggacaaauuauu

SEQ ID NO: 1456552 - RNA, 19 nt, Artificial Sequence
  Description of Artificial Sequence: Synthetic oligonucleotide
  Sense strand starting at position 30 of SEQ ID NO: 1243988
uuccucugaguagacuuaa

SEQ ID NO: 1456553 - RNA, 19 nt, Artificial Sequence
  Description of Artificial Sequence: Synthetic oligonucleotide
  Antisense strand to SEQ ID NO: 1456552
uuaagucuacucagaggaa

SEQ ID NO: 1456554 - RNA, 19 nt, Artificial Sequence
  Description of Artificial Sequence: Synthetic oligonucleotide
  Sense strand starting at position 168 of SEQ ID NO: 1243988
cuugaugauuugggaugaa

SEQ ID NO: 1456555 - RNA, 19 nt, Artificial Sequence
  Description of Artificial Sequence: Synthetic oligonucleotide
  Antisense strand to SEQ ID NO: 1456554
uucaucccaaaucaucaag

SEQ ID NO: 1456556 - RNA, 19 nt, Artificial Sequence
  Description of Artificial Sequence: Synthetic oligonucleotide
  Sense strand starting at position 181 of SEQ ID NO: 1243988
gaugaaguggcagguuaua

SEQ ID NO: 1456557 - RNA, 19 nt, Artificial Sequence
  Description of Artificial Sequence: Synthetic oligonucleotide
  Antisense strand to SEQ ID NO: 1456556
uauaaccugccacuucauc

SEQ ID NO: 1456558 - RNA, 19 nt, Artificial Sequence
  Description of Artificial Sequence: Synthetic oligonucleotide
  Sense strand starting at position 245 of SEQ ID NO: 1243988
cugagcuugcuggaaacua

SEQ ID NO: 1456559 - RNA, 19 nt, Artificial Sequence
  Description of Artificial Sequence: Synthetic oligonucleotide
  Antisense strand to SEQ ID NO: 1456558
uaguuuccagcaagcucag

SEQ ID NO: 1456560 - RNA, 19 nt, Artificial Sequence
  Description of Artificial Sequence: Synthetic oligonucleotide
  Sense strand starting at position 493 of SEQ ID NO: 1243988
cuauauuguucuccugaga

SEQ ID NO: 1456561 - RNA, 19 nt, Artificial Sequence
  Description of Artificial Sequence: Synthetic oligonucleotide
  Antisense strand to SEQ ID NO: 1456560
ucucaggagaacaauauag

SEQ ID NO: 1456562 - RNA, 19 nt, Artificial Sequence
  Description of Artificial Sequence: Synthetic oligonucleotide
  Sense strand starting at position 520 of SEQ ID NO: 1243988
augaaauugccugguuaag

SEQ ID NO: 1456563 - RNA, 19 nt, Artificial Sequence
  Description of Artificial Sequence: Synthetic oligonucleotide
  Antisense strand to SEQ ID NO: 1456562
cuuaaccaggcaauuucau

SEQ ID NO: 1456564 - RNA, 19 nt, Artificial Sequence
  Description of Artificial Sequence: Synthetic oligonucleotide
  Sense strand starting at position 522 of SEQ ID NO: 1243988
gaaauugccugguuaagaa

SEQ ID NO: 1456565 - RNA, 19 nt, Artificial Sequence
  Description of Artificial Sequence: Synthetic oligonucleotide
  Antisense strand to SEQ ID NO: 1456564
uucuuaaccaggcaauuuc

SEQ ID NO: 1456566 - RNA, 19 nt, Artificial Sequence
  Description of Artificial Sequence: Synthetic oligonucleotide
  Sense strand starting at position 532 of SEQ ID NO: 1243988
gguuaagaacccuacguau

SEQ ID NO: 1456567 - RNA, 19 nt, Artificial Sequence
  Description of Artificial Sequence: Synthetic oligonucleotide
  Antisense strand to SEQ ID NO: 1456566
auacguaggguucuuaacc

SEQ ID NO: 1456568 - RNA, 19 nt, Artificial Sequence
  Description of Artificial Sequence: Synthetic oligonucleotide
  Sense strand starting at position 543 of SEQ ID NO: 1243988
cuacguaugcuauagaaau

SEQ ID NO: 1456569 - RNA, 19 nt, Artificial Sequence
  Description of Artificial Sequence: Synthetic oligonucleotide
  Antisense strand to SEQ ID NO: 1456568
auuucuauagcauacguag

SEQ ID NO: 1456570 - RNA, 19 nt, Artificial Sequence
  Description of Artificial Sequence: Synthetic oligonucleotide
  Sense strand starting at position 633 of SEQ ID NO: 1243988
auagguagggccugaaagu

SEQ ID NO: 1456571 - RNA, 19 nt, Artificial Sequence
  Description of Artificial Sequence: Synthetic oligonucleotide
  Antisense strand to SEQ ID NO: 1456570
acuuucaggcccuaccuau

SEQ ID NO: 1456572 - RNA, 19 nt, Artificial Sequence
  Description of Artificial Sequence: Synthetic oligonucleotide
  Sense strand starting at position 725 of SEQ ID NO: 1243988
aagaaaugguuguuauaug

SEQ ID NO: 1456573 - RNA, 19 nt, Artificial Sequence
  Description of Artificial Sequence: Synthetic oligonucleotide
  Antisense strand to SEQ ID NO: 1456572
cauauaacaaccauuucuu

SEQ ID NO: 1456574 - RNA, 19 nt, Artificial Sequence
  Description of Artificial Sequence: Synthetic oligonucleotide
  Sense strand starting at position 803 of SEQ ID NO: 1243988
cguugaguuaugcaaacaa

SEQ ID NO: 1456575 - RNA, 19 nt, Artificial Sequence
  Description of Artificial Sequence: Synthetic oligonucleotide
  Antisense strand to SEQ ID NO: 1456574
uuguuugcauaacucaacg

SEQ ID NO: 1456576 - RNA, 19 nt, Artificial Sequence
  Description of Artificial Sequence: Synthetic oligonucleotide
  Sense strand starting at position 923 of SEQ ID NO: 1243988
uuaugaccuuuaguagaca

SEQ ID NO: 1456577 - RNA, 19 nt, Artificial Sequence
  Description of Artificial Sequence: Synthetic oligonucleotide
  Antisense strand to SEQ ID NO: 1456576
ugucuacuaaaggucauaa

SEQ ID NO: 1456578 - RNA, 19 nt, Artificial Sequence
  Description of Artificial Sequence: Synthetic oligonucleotide
  Sense strand starting at position 1053 of SEQ ID NO: 1243988
gaaauuggauuagcaagua

SEQ ID NO: 1456579 - RNA, 19 nt, Artificial Sequence
  Description of Artificial Sequence: Synthetic oligonucleotide
  Antisense strand to SEQ ID NO: 1456578
uacuugcuaauccaauuuc

SEQ ID NO: 1456580 - RNA, 19 nt, Artificial Sequence
  Description of Artificial Sequence: Synthetic oligonucleotide
  Sense strand starting at position 1153 of SEQ ID NO: 1243988
ucauuaacaguguaguaua

SEQ ID NO: 1456581 - RNA, 19 nt, Artificial Sequence
  Description of Artificial Sequence: Synthetic oligonucleotide
  Antisense strand to SEQ ID NO: 1456580
uauacuacacuguuaauga

SEQ ID NO: 1456582 - RNA, 19 nt, Artificial Sequence
  Description of Artificial Sequence: Synthetic oligonucleotide
  Sense strand starting at position 1163 of SEQ ID NO: 1243988
uguaguauacaucauagua

SEQ ID NO: 1456583 - RNA, 19 nt, Artificial Sequence
  Description of Artificial Sequence: Synthetic oligonucleotide
  Antisense strand to SEQ ID NO: 1456582
uacuaugauguauacuaca

SEQ ID NO: 1456584 - RNA, 19 nt, Artificial Sequence
  Description of Artificial Sequence: Synthetic oligonucleotide
  Sense strand starting at position 1173 of SEQ ID NO: 1243988
aucauaguauugguacaca

SEQ ID NO: 1456585 - RNA, 19 nt, Artificial Sequence
  Description of Artificial Sequence: Synthetic oligonucleotide
  Antisense strand to SEQ ID NO: 1456584
uguguaccaauacuaugau

SEQ ID NO: 1456586 - RNA, 19 nt, Artificial Sequence
  Description of Artificial Sequence: Synthetic oligonucleotide
  Sense strand starting at position 1200 of SEQ ID NO: 1243988
gugcuuaccacggaacaga

SEQ ID NO: 1456587 - RNA, 19 nt, Artificial Sequence
  Description of Artificial Sequence: Synthetic oligonucleotide
  Antisense strand to SEQ ID NO: 1456586
ucuguuccgugguaagcac

SEQ ID NO: 1456588 - RNA, 19 nt, Artificial Sequence
  Description of Artificial Sequence: Synthetic oligonucleotide
  Sense strand starting at position 1307 of SEQ ID NO: 1243988
ccuuacaaaugccugagaa

SEQ ID NO: 1456589 - RNA, 19 nt, Artificial Sequence
  Description of Artificial Sequence: Synthetic oligonucleotide
  Antisense strand to SEQ ID NO: 1456588
uucucaggcauuuguaagg

SEQ ID NO: 1456590 - RNA, 19 nt, Artificial Sequence
  Description of Artificial Sequence: Synthetic oligonucleotide
  Sense strand starting at position 1308 of SEQ ID NO: 1243988
cuuacaaaugccugagaau

SEQ ID NO: 1456591 - RNA, 19 nt, Artificial Sequence
  Description of Artificial Sequence: Synthetic oligonucleotide
  Antisense strand to SEQ ID NO: 1456590
auucucaggcauuuguaag

SEQ ID NO: 1456592 - RNA, 19 nt, Artificial Sequence
  Description of Artificial Sequence: Synthetic oligonucleotide
  Sense strand starting at position 1364 of SEQ ID NO: 1243988
cagguuguguuaucagaag

SEQ ID NO: 1456593 - RNA, 19 nt, Artificial Sequence
  Description of Artificial Sequence: Synthetic oligonucleotide
  Antisense strand to SEQ ID NO: 1456592
cuucugauaacacaaccug

SEQ ID NO: 1456594 - RNA, 19 nt, Artificial Sequence
  Description of Artificial Sequence: Synthetic oligonucleotide
  Sense strand starting at position 1435 of SEQ ID NO: 1243988
auguccaagcauuaguaau

SEQ ID NO: 1456595 - RNA, 19 nt, Artificial Sequence
  Description of Artificial Sequence: Synthetic oligonucleotide
  Antisense strand to SEQ ID NO: 1456594
auuacuaaugcuuggacau

SEQ ID NO: 1456596 - RNA, 19 nt, Artificial Sequence
  Description of Artificial Sequence: Synthetic oligonucleotide
  Sense strand starting at position 1437 of SEQ ID NO: 1243988
guccaagcauuaguaauga

SEQ ID NO: 1456597 - RNA, 19 nt, Artificial Sequence
  Description of Artificial Sequence: Synthetic oligonucleotide
  Antisense strand to SEQ ID NO: 1456596
ucauuacuaaugcuuggac

SEQ ID NO: 1456598 - RNA, 19 nt, Artificial Sequence
  Description of Artificial Sequence: Synthetic oligonucleotide
  Sense strand starting at position 1824 of SEQ ID NO: 1243988
agaauagacuuggagaaua

SEQ ID NO: 1456599 - RNA, 19 nt, Artificial Sequence
  Description of Artificial Sequence: Synthetic oligonucleotide
  Antisense strand to SEQ ID NO: 1456598
uauucuccaagucuauucu

SEQ ID NO: 1456600 - RNA, 19 nt, Artificial Sequence
  Description of Artificial Sequence: Synthetic oligonucleotide
  Sense strand starting at position 1834 of SEQ ID NO: 1243988
uggagaauaugagccuuaa

SEQ ID NO: 1456601 - RNA, 19 nt, Artificial Sequence
  Description of Artificial Sequence: Synthetic oligonucleotide
  Antisense strand to SEQ ID NO: 1456600
uuaaggcucauauucucca

SEQ ID NO: 1456602 - RNA, 19 nt, Artificial Sequence
  Description of Artificial Sequence: Synthetic oligonucleotide
  Sense strand starting at position 2141 of SEQ ID NO: 1243988
uugaaaugguaucuuccau

SEQ ID NO: 1456603 - RNA, 19 nt, Artificial Sequence
  Description of Artificial Sequence: Synthetic oligonucleotide
  Antisense strand to SEQ ID NO: 1456602
auggaagauaccauuucaa

SEQ ID NO: 1456604 - RNA, 19 nt, Artificial Sequence
  Description of Artificial Sequence: Synthetic oligonucleotide
  Sense strand starting at position 2257 of SEQ ID NO: 1243988
guggaacugcagcaauuau

SEQ ID NO: 1456605 - RNA, 19 nt, Artificial Sequence
  Description of Artificial Sequence: Synthetic oligonucleotide
  Antisense strand to SEQ ID NO: 1456604
auaauugcugcaguuccac

SEQ ID NO: 1456606 - RNA, 19 nt, Artificial Sequence
  Description of Artificial Sequence: Synthetic oligonucleotide
  Sense strand starting at position 2394 of SEQ ID NO: 1243988
cugucaucaccucaaguuu

SEQ ID NO: 1456607 - RNA, 19 nt, Artificial Sequence
  Description of Artificial Sequence: Synthetic oligonucleotide
  Antisense strand to SEQ ID NO: 1456606
aaacuugaggugaugacag

SEQ ID NO: 1456608 - RNA, 19 nt, Artificial Sequence
  Description of Artificial Sequence: Synthetic oligonucleotide
  Sense strand starting at position 2666 of SEQ ID NO: 1243988
ggcugcagagaucaugaga

SEQ ID NO: 1456609 - RNA, 19 nt, Artificial Sequence
  Description of Artificial Sequence: Synthetic oligonucleotide
  Antisense strand to SEQ ID NO: 1456608
ucucaugaucucugcagcc

SEQ ID NO: 1456610 - RNA, 19 nt, Artificial Sequence
  Description of Artificial Sequence: Synthetic oligonucleotide
  Sense strand starting at position 2792 of SEQ ID NO: 1243988
uggauauggcagcacauau

SEQ ID NO: 1456611 - RNA, 19 nt, Artificial Sequence
  Description of Artificial Sequence: Synthetic oligonucleotide
  Antisense strand to SEQ ID NO: 1456610
auaugugcugccauaucca

SEQ ID NO: 1456612 - RNA, 19 nt, Artificial Sequence
  Description of Artificial Sequence: Synthetic oligonucleotide
  Sense strand starting at position 3012 of SEQ ID NO: 1243988
auaucagaggcuuaguaua

SEQ ID NO: 1456613 - RNA, 19 nt, Artificial Sequence
  Description of Artificial Sequence: Synthetic oligonucleotide
  Antisense strand to SEQ ID NO: 1456612
uauacuaagccucugauau

SEQ ID NO: 1456614 - RNA, 19 nt, Artificial Sequence
  Description of Artificial Sequence: Synthetic oligonucleotide
  Sense strand starting at position 3014 of SEQ ID NO: 1243988
aucagaggcuuaguauaca

SEQ ID NO: 1456615 - RNA, 19 nt, Artificial Sequence
  Description of Artificial Sequence: Synthetic oligonucleotide
  Antisense strand to SEQ ID NO: 1456614
uguauacuaagccucugau

SEQ ID NO: 1456616 - RNA, 19 nt, Artificial Sequence
  Description of Artificial Sequence: Synthetic oligonucleotide
  Sense strand starting at position 3054 of SEQ ID NO: 1243988
ccucucaguccugaucaga

SEQ ID NO: 1456617 - RNA, 19 nt, Artificial Sequence
  Description of Artificial Sequence: Synthetic oligonucleotide
  Antisense strand to SEQ ID NO: 1456616
ucugaucaggacugagagg

SEQ ID NO: 1456618 - RNA, 19 nt, Artificial Sequence
  Description of Artificial Sequence: Synthetic oligonucleotide
  Sense strand starting at position 3057 of SEQ ID NO: 1243988
cucaguccugaucagacuu

SEQ ID NO: 1456619 - RNA, 19 nt, Artificial Sequence
  Description of Artificial Sequence: Synthetic oligonucleotide
  Antisense strand to SEQ ID NO: 1456618
aagucugaucaggacugag

SEQ ID NO: 1456620 - RNA, 19 nt, Artificial Sequence
  Description of Artificial Sequence: Synthetic oligonucleotide
  Sense strand starting at position 3064 of SEQ ID NO: 1243988
cugaucagacuuugaauca

SEQ ID NO: 1456621 - RNA, 19 nt, Artificial Sequence
  Description of Artificial Sequence: Synthetic oligonucleotide
  Antisense strand to SEQ ID NO: 1456620
ugauucaaagucugaucag

SEQ ID NO: 1456622 - RNA, 19 nt, Artificial Sequence
  Description of Artificial Sequence: Synthetic oligonucleotide
  Sense strand starting at position 3277 of SEQ ID NO: 1243988
guugaacaguucccuaaua

SEQ ID NO: 1456623 - RNA, 19 nt, Artificial Sequence
  Description of Artificial Sequence: Synthetic oligonucleotide
  Antisense strand to SEQ ID NO: 1456622
uauuagggaacuguucaac

SEQ ID NO: 1456624 - RNA, 19 nt, Artificial Sequence
  Description of Artificial Sequence: Synthetic oligonucleotide
  Sense strand starting at position 3312 of SEQ ID NO: 1243988
agaaauguuuguguacaua

SEQ ID NO: 1456625 - RNA, 19 nt, Artificial Sequence
  Description of Artificial Sequence: Synthetic oligonucleotide
  Antisense strand to SEQ ID NO: 1456624
uauguacacaaacauuucu

SEQ ID NO: 1456626 - RNA, 19 nt, Artificial Sequence
  Description of Artificial Sequence: Synthetic oligonucleotide
  Sense strand starting at position 3326 of SEQ ID NO: 1243988
acauaaacaucagaugaga

SEQ ID NO: 1456627 - RNA, 19 nt, Artificial Sequence
  Description of Artificial Sequence: Synthetic oligonucleotide
  Antisense strand to SEQ ID NO: 1456626
ucucaucugauguuuaugu

SEQ ID NO: 1456628 - RNA, 19 nt, Artificial Sequence
  Description of Artificial Sequence: Synthetic oligonucleotide
  Sense strand starting at position 3762 of SEQ ID NO: 1243988
gccaguaguccacagaaca

SEQ ID NO: 1456629 - RNA, 19 nt, Artificial Sequence
  Description of Artificial Sequence: Synthetic oligonucleotide
  Antisense strand to SEQ ID NO: 1456628
uguucuguggacuacuggc

SEQ ID NO: 1456630 - RNA, 19 nt, Artificial Sequence
  Description of Artificial Sequence: Synthetic oligonucleotide
  Sense strand starting at position 3908 of SEQ ID NO: 1243988
cuccauucuggcuagacua

SEQ ID NO: 1456631 - RNA, 19 nt, Artificial Sequence
  Description of Artificial Sequence: Synthetic oligonucleotide
  Antisense strand to SEQ ID NO: 1456630
uagucuagccagaauggag

SEQ ID NO: 1456632 - RNA, 19 nt, Artificial Sequence
  Description of Artificial Sequence: Synthetic oligonucleotide
  Sense strand starting at position 18 of SEQ ID NO: 1243989
guuuccuucuaaguagaau

SEQ ID NO: 1456633 - RNA, 19 nt, Artificial Sequence
  Description of Artificial Sequence: Synthetic oligonucleotide
  Antisense strand to SEQ ID NO: 1456632
auucuacuuagaaggaaac

SEQ ID NO: 1456634 - RNA, 19 nt, Artificial Sequence
  Description of Artificial Sequence: Synthetic oligonucleotide
  Sense strand starting at position 29 of SEQ ID NO: 1243989
aguagaauuaugugggaau

SEQ ID NO: 1456635 - RNA, 19 nt, Artificial Sequence
  Description of Artificial Sequence: Synthetic oligonucleotide
  Antisense strand to SEQ ID NO: 1456634
auucccacauaauucuacu

SEQ ID NO: 1456636 - RNA, 19 nt, Artificial Sequence
  Description of Artificial Sequence: Synthetic oligonucleotide
  Sense strand starting at position 77 of SEQ ID NO: 1243989
acuuuagauuugggacuaa

SEQ ID NO: 1456637 - RNA, 19 nt, Artificial Sequence
  Description of Artificial Sequence: Synthetic oligonucleotide
  Antisense strand to SEQ ID NO: 1456636
uuagucccaaaucuaaagu

SEQ ID NO: 1456638 - RNA, 19 nt, Artificial Sequence
  Description of Artificial Sequence: Synthetic oligonucleotide
  Sense strand starting at position 454 of SEQ ID NO: 1243989
aaggaucgaugggaaauuu

SEQ ID NO: 1456639 - RNA, 19 nt, Artificial Sequence
  Description of Artificial Sequence: Synthetic oligonucleotide
  Antisense strand to SEQ ID NO: 1456638
aaauuucccaucgauccuu

SEQ ID NO: 1456640 - RNA, 19 nt, Artificial Sequence
  Description of Artificial Sequence: Synthetic oligonucleotide
  Sense strand starting at position 818 of SEQ ID NO: 1243989
uucuauagguuucuucuau

SEQ ID NO: 1456641 - RNA, 19 nt, Artificial Sequence
  Description of Artificial Sequence: Synthetic oligonucleotide
  Antisense strand to SEQ ID NO: 1456640
auagaagaaaccuauagaa

SEQ ID NO: 1456642 - RNA, 19 nt, Artificial Sequence
  Description of Artificial Sequence: Synthetic oligonucleotide
  Sense strand starting at position 825 of SEQ ID NO: 1243989
gguuucuucuaucuuauac

SEQ ID NO: 1456643 - RNA, 19 nt, Artificial Sequence
  Description of Artificial Sequence: Synthetic oligonucleotide
  Antisense strand to SEQ ID NO: 1456642
guauaagauagaagaaacc

SEQ ID NO: 1456644 - RNA, 19 nt, Artificial Sequence
  Description of Artificial Sequence: Synthetic oligonucleotide
  Sense strand starting at position 867 of SEQ ID NO: 1243989
gugacauaaacacguagau

SEQ ID NO: 1456645 - RNA, 19 nt, Artificial Sequence
  Description of Artificial Sequence: Synthetic oligonucleotide
  Antisense strand to SEQ ID NO: 1456644
aucuacguguuuaugucac

SEQ ID NO: 1456646 - RNA, 19 nt, Artificial Sequence
  Description of Artificial Sequence: Synthetic oligonucleotide
  Sense strand starting at position 901 of SEQ ID NO: 1243989
augcauguuugauuauuga

SEQ ID NO: 1456647 - RNA, 19 nt, Artificial Sequence
  Description of Artificial Sequence: Synthetic oligonucleotide
  Antisense strand to SEQ ID NO: 1456646
ucaauaaucaaacaugcau

SEQ ID NO: 1456648 - RNA, 19 nt, Artificial Sequence
  Description of Artificial Sequence: Synthetic oligonucleotide
  Sense strand starting at position 1067 of SEQ ID NO: 1243989
aagugaaagugaccauucu

SEQ ID NO: 1456649 - RNA, 19 nt, Artificial Sequence
  Description of Artificial Sequence: Synthetic oligonucleotide
  Antisense strand to SEQ ID NO: 1456648
agaauggucacuuucacuu

SEQ ID NO: 1456650 - RNA, 19 nt, Artificial Sequence
  Description of Artificial Sequence: Synthetic oligonucleotide
  Sense strand starting at position 1068 of SEQ ID NO: 1243989
agugaaagugaccauucuu

SEQ ID NO: 1456651 - RNA, 19 nt, Artificial Sequence
  Description of Artificial Sequence: Synthetic oligonucleotide
  Antisense strand to SEQ ID NO: 1456650
aagaauggucacuuucacu

SEQ ID NO: 1456652 - RNA, 19 nt, Artificial Sequence
  Description of Artificial Sequence: Synthetic oligonucleotide
  Sense strand starting at position 1204 of SEQ ID NO: 1243989
ucagucauagccuguggaa

SEQ ID NO: 1456653 - RNA, 19 nt, Artificial Sequence
  Description of Artificial Sequence: Synthetic oligonucleotide
  Antisense strand to SEQ ID NO: 1456652
uuccacaggcuaugacuga

SEQ ID NO: 1456654 - RNA, 19 nt, Artificial Sequence
  Description of Artificial Sequence: Synthetic oligonucleotide
  Sense strand starting at position 1206 of SEQ ID NO: 1243989
agucauagccuguggaauc

SEQ ID NO: 1456655 - RNA, 19 nt, Artificial Sequence
  Description of Artificial Sequence: Synthetic oligonucleotide
  Antisense strand to SEQ ID NO: 1456654
gauuccacaggcuaugacu

SEQ ID NO: 1456656 - RNA, 19 nt, Artificial Sequence
  Description of Artificial Sequence: Synthetic oligonucleotide
  Sense strand starting at position 1216 of SEQ ID NO: 1243989
uguggaaucuaguucuauu

SEQ ID NO: 1456657 - RNA, 19 nt, Artificial Sequence
  Description of Artificial Sequence: Synthetic oligonucleotide
  Antisense strand to SEQ ID NO: 1456656
aauagaacuagauuccaca

SEQ ID NO: 1456658 - RNA, 19 nt, Artificial Sequence
  Description of Artificial Sequence: Synthetic oligonucleotide
  Sense strand starting at position 1219 of SEQ ID NO: 1243989
ggaaucuaguucuauuucu

SEQ ID NO: 1456659 - RNA, 19 nt, Artificial Sequence
  Description of Artificial Sequence: Synthetic oligonucleotide
  Antisense strand to SEQ ID NO: 1456658
agaaauagaacuagauucc

SEQ ID NO: 1456660 - RNA, 19 nt, Artificial Sequence
  Description of Artificial Sequence: Synthetic oligonucleotide
  Sense strand starting at position 1703 of SEQ ID NO: 1243989
gcaagcugaacugaguauu

SEQ ID NO: 1456661 - RNA, 19 nt, Artificial Sequence
  Description of Artificial Sequence: Synthetic oligonucleotide
  Antisense strand to SEQ ID NO: 1456660
aauacucaguucagcuugc

SEQ ID NO: 1456662 - RNA, 19 nt, Artificial Sequence
  Description of Artificial Sequence: Synthetic oligonucleotide
  Sense strand starting at position 1772 of SEQ ID NO: 1243989
acuaucagaguuuaaguuu

SEQ ID NO: 1456663 - RNA, 19 nt, Artificial Sequence
  Description of Artificial Sequence: Synthetic oligonucleotide
  Antisense strand to SEQ ID NO: 1456662
aaacuuaaacucugauagu

SEQ ID NO: 1456664 - RNA, 19 nt, Artificial Sequence
  Description of Artificial Sequence: Synthetic oligonucleotide
  Sense strand starting at position 1925 of SEQ ID NO: 1243989
ugauuuggcuaagaaagga

SEQ ID NO: 1456665 - RNA, 19 nt, Artificial Sequence
  Description of Artificial Sequence: Synthetic oligonucleotide
  Antisense strand to SEQ ID NO: 1456664
uccuuucuuagccaaauca

SEQ ID NO: 1456666 - RNA, 19 nt, Artificial Sequence
  Description of Artificial Sequence: Synthetic oligonucleotide
  Sense strand starting at position 1987 of SEQ ID NO: 1243989
cugaaauaguuucuguaga

SEQ ID NO: 1456667 - RNA, 19 nt, Artificial Sequence
  Description of Artificial Sequence: Synthetic oligonucleotide
  Antisense strand to SEQ ID NO: 1456666
ucuacagaaacuauuucag

SEQ ID NO: 1456668 - RNA, 19 nt, Artificial Sequence
  Description of Artificial Sequence: Synthetic oligonucleotide
  Sense strand starting at position 2027 of SEQ ID NO: 1243989
gcugguuccggaagugcaa

SEQ ID NO: 1456669 - RNA, 19 nt, Artificial Sequence
  Description of Artificial Sequence: Synthetic oligonucleotide
  Antisense strand to SEQ ID NO: 1456668
uugcacuuccggaaccagc

SEQ ID NO: 1456670 - RNA, 19 nt, Artificial Sequence
  Description of Artificial Sequence: Synthetic oligonucleotide
  Sense strand starting at position 2239 of SEQ ID NO: 1243989
ccaguuggguuaucacuua

SEQ ID NO: 1456671 - RNA, 19 nt, Artificial Sequence
  Description of Artificial Sequence: Synthetic oligonucleotide
  Antisense strand to SEQ ID NO: 1456670
uaagugauaacccaacugg

SEQ ID NO: 1456672 - RNA, 19 nt, Artificial Sequence
  Description of Artificial Sequence: Synthetic oligonucleotide
  Sense strand starting at position 2244 of SEQ ID NO: 1243989
uggguuaucacuuacagug

SEQ ID NO: 1456673 - RNA, 19 nt, Artificial Sequence
  Description of Artificial Sequence: Synthetic oligonucleotide
  Antisense strand to SEQ ID NO: 1456672
cacuguaagugauaaccca

SEQ ID NO: 1456674 - RNA, 19 nt, Artificial Sequence
  Description of Artificial Sequence: Synthetic oligonucleotide
  Sense strand starting at position 2271 of SEQ ID NO: 1243989
ucucauaagaagugaguga

SEQ ID NO: 1456675 - RNA, 19 nt, Artificial Sequence
  Description of Artificial Sequence: Synthetic oligonucleotide
  Antisense strand to SEQ ID NO: 1456674
ucacucacuucuuaugaga

SEQ ID NO: 1456676 - RNA, 19 nt, Artificial Sequence
  Description of Artificial Sequence: Synthetic oligonucleotide
  Sense strand starting at position 2297 of SEQ ID NO: 1243989
uguuuacuuguaugaccuu

SEQ ID NO: 1456677 - RNA, 19 nt, Artificial Sequence
  Description of Artificial Sequence: Synthetic oligonucleotide
  Antisense strand to SEQ ID NO: 1456676
aaggucauacaaguaaaca

SEQ ID NO: 1456678 - RNA, 19 nt, Artificial Sequence
  Description of Artificial Sequence: Synthetic oligonucleotide
  Sense strand starting at position 2303 of SEQ ID NO: 1243989
cuuguaugaccuuaggcaa

SEQ ID NO: 1456679 - RNA, 19 nt, Artificial Sequence
  Description of Artificial Sequence: Synthetic oligonucleotide
  Antisense strand to SEQ ID NO: 1456678
uugccuaaggucauacaag

SEQ ID NO: 1456680 - RNA, 19 nt, Artificial Sequence
  Description of Artificial Sequence: Synthetic oligonucleotide
  Sense strand starting at position 2341 of SEQ ID NO: 1243989
accguuuccuccucuaaag

SEQ ID NO: 1456681 - RNA, 19 nt, Artificial Sequence
  Description of Artificial Sequence: Synthetic oligonucleotide
  Antisense strand to SEQ ID NO: 1456680
cuuuagaggaggaaacggu

SEQ ID NO: 1456682 - RNA, 19 nt, Artificial Sequence
  Description of Artificial Sequence: Synthetic oligonucleotide
  Sense strand starting at position 2343 of SEQ ID NO: 1243989
cguuuccuccucuaaagga

SEQ ID NO: 1456683 - RNA, 19 nt, Artificial Sequence
  Description of Artificial Sequence: Synthetic oligonucleotide
  Antisense strand to SEQ ID NO: 1456682
uccuuuagaggaggaaacg

SEQ ID NO: 1456684 - RNA, 19 nt, Artificial Sequence
  Description of Artificial Sequence: Synthetic oligonucleotide
  Sense strand starting at position 2663 of SEQ ID NO: 1243989
agaugucucuuuguacagu

SEQ ID NO: 1456685 - RNA, 19 nt, Artificial Sequence
  Description of Artificial Sequence: Synthetic oligonucleotide
  Antisense strand to SEQ ID NO: 1456684
acuguacaaagagacaucu

SEQ ID NO: 1456686 - RNA, 19 nt, Artificial Sequence
  Description of Artificial Sequence: Synthetic oligonucleotide
  Sense strand starting at position 3069 of SEQ ID NO: 1243989
aguuacuucucaguggaaa

SEQ ID NO: 1456687 - RNA, 19 nt, Artificial Sequence
  Description of Artificial Sequence: Synthetic oligonucleotide
  Antisense strand to SEQ ID NO: 1456686
uuuccacugagaaguaacu

SEQ ID NO: 1456688 - RNA, 19 nt, Artificial Sequence
  Description of Artificial Sequence: Synthetic oligonucleotide
  Sense strand starting at position 3173 of SEQ ID NO: 1243989
gguguuaccaguuaauagg

SEQ ID NO: 1456689 - RNA, 19 nt, Artificial Sequence
  Description of Artificial Sequence: Synthetic oligonucleotide
  Antisense strand to SEQ ID NO: 1456688
ccuauuaacugguaacacc

SEQ ID NO: 1456690 - RNA, 19 nt, Artificial Sequence
  Description of Artificial Sequence: Synthetic oligonucleotide
  Sense strand starting at position 3179 of SEQ ID NO: 1243989
accaguuaauagguacaaa

SEQ ID NO: 1456691 - RNA, 19 nt, Artificial Sequence
  Description of Artificial Sequence: Synthetic oligonucleotide
  Antisense strand to SEQ ID NO: 1456690
uuuguaccuauuaacuggu

SEQ ID NO: 1456692 - RNA, 19 nt, Artificial Sequence
  Description of Artificial Sequence: Synthetic oligonucleotide
  Sense strand starting at position 3241 of SEQ ID NO: 1243989
gagugacugucauuaauac

SEQ ID NO: 1456693 - RNA, 19 nt, Artificial Sequence
  Description of Artificial Sequence: Synthetic oligonucleotide
  Antisense strand to SEQ ID NO: 1456692
guauuaaugacagucacuc

SEQ ID NO: 1456694 - RNA, 19 nt, Artificial Sequence
  Description of Artificial Sequence: Synthetic oligonucleotide
  Sense strand starting at position 3291 of SEQ ID NO: 1243989
guaauuggauccuuuguaa

SEQ ID NO: 1456695 - RNA, 19 nt, Artificial Sequence
  Description of Artificial Sequence: Synthetic oligonucleotide
  Antisense strand to SEQ ID NO: 1456694
uuacaaaggauccaauuac

SEQ ID NO: 1456696 - RNA, 19 nt, Artificial Sequence
  Description of Artificial Sequence: Synthetic oligonucleotide
  Sense strand starting at position 3360 of SEQ ID NO: 1243989
auuauuucacguugcguga

SEQ ID NO: 1456697 - RNA, 19 nt, Artificial Sequence
  Description of Artificial Sequence: Synthetic oligonucleotide
  Antisense strand to SEQ ID NO: 1456696
ucacgcaacgugaaauaau

SEQ ID NO: 1456698 - RNA, 19 nt, Artificial Sequence
  Description of Artificial Sequence: Synthetic oligonucleotide
  Sense strand starting at position 3369 of SEQ ID NO: 1243989
cguugcgugacuguaucaa

SEQ ID NO: 1456699 - RNA, 19 nt, Artificial Sequence
  Description of Artificial Sequence: Synthetic oligonucleotide
  Antisense strand to SEQ ID NO: 1456698
uugauacagucacgcaacg

SEQ ID NO: 1456700 - RNA, 19 nt, Artificial Sequence
  Description of Artificial Sequence: Synthetic oligonucleotide
  Sense strand starting at position 3474 of SEQ ID NO: 1243989
aguguauugaaaggaguga

SEQ ID NO: 1456701 - RNA, 19 nt, Artificial Sequence
  Description of Artificial Sequence: Synthetic oligonucleotide
  Antisense strand to SEQ ID NO: 1456700
ucacuccuuucaauacacu

SEQ ID NO: 1456702 - RNA, 19 nt, Artificial Sequence
  Description of Artificial Sequence: Synthetic oligonucleotide
  Sense strand starting at position 3565 of SEQ ID NO: 1243989
uuuauaagcuuauugugga

SEQ ID NO: 1456703 - RNA, 19 nt, Artificial Sequence
  Description of Artificial Sequence: Synthetic oligonucleotide
  Antisense strand to SEQ ID NO: 1456702
uccacaauaagcuuauaaa

SEQ ID NO: 1456704 - RNA, 19 nt, Artificial Sequence
  Description of Artificial Sequence: Synthetic oligonucleotide
  Sense strand starting at position 3594 of SEQ ID NO: 1243989
uguaaagugccuuggauga

SEQ ID NO: 1456705 - RNA, 19 nt, Artificial Sequence
  Description of Artificial Sequence: Synthetic oligonucleotide
  Antisense strand to SEQ ID NO: 1456704
ucauccaaggcacuuuaca

SEQ ID NO: 1456706 - RNA, 19 nt, Artificial Sequence
  Description of Artificial Sequence: Synthetic oligonucleotide
  Sense strand starting at position 3671 of SEQ ID NO: 1243989
gcgggaaacacagguuauu

SEQ ID NO: 1456707 - RNA, 19 nt, Artificial Sequence
  Description of Artificial Sequence: Synthetic oligonucleotide
  Antisense strand to SEQ ID NO: 1456706
aauaaccuguguuucccgc

SEQ ID NO: 1456708 - RNA, 19 nt, Artificial Sequence
  Description of Artificial Sequence: Synthetic oligonucleotide
  Sense strand starting at position 3682 of SEQ ID NO: 1243989
agguuauuaugaccuuguu

SEQ ID NO: 1456709 - RNA, 19 nt, Artificial Sequence
  Description of Artificial Sequence: Synthetic oligonucleotide
  Antisense strand to SEQ ID NO: 1456708
aacaaggucauaauaaccu

SEQ ID NO: 1456710 - RNA, 19 nt, Artificial Sequence
  Description of Artificial Sequence: Synthetic oligonucleotide
  Sense strand starting at position 3715 of SEQ ID NO: 1243989
acuuauagcuuggugcaaa

SEQ ID NO: 1456711 - RNA, 19 nt, Artificial Sequence
  Description of Artificial Sequence: Synthetic oligonucleotide
  Antisense strand to SEQ ID NO: 1456710
uuugcaccaagcuauaagu

SEQ ID NO: 1456712 - RNA, 19 nt, Artificial Sequence
  Description of Artificial Sequence: Synthetic oligonucleotide
  Sense strand starting at position 190 of SEQ ID NO: 1243990
gucacucagcgagaguguu

SEQ ID NO: 1456713 - RNA, 19 nt, Artificial Sequence
  Description of Artificial Sequence: Synthetic oligonucleotide
  Antisense strand to SEQ ID NO: 1456712
aacacucucgcugagugac

SEQ ID NO: 1456714 - RNA, 19 nt, Artificial Sequence
  Description of Artificial Sequence: Synthetic oligonucleotide
  Sense strand starting at position 196 of SEQ ID NO: 1243990
cagcgagaguguuagcuga

SEQ ID NO: 1456715 - RNA, 19 nt, Artificial Sequence
  Description of Artificial Sequence: Synthetic oligonucleotide
  Antisense strand to SEQ ID NO: 1456714
ucagcuaacacucucgcug

SEQ ID NO: 1456716 - RNA, 19 nt, Artificial Sequence
  Description of Artificial Sequence: Synthetic oligonucleotide
  Sense strand starting at position 198 of SEQ ID NO: 1243990
gcgagaguguuagcugaga

SEQ ID NO: 1456717 - RNA, 19 nt, Artificial Sequence
  Description of Artificial Sequence: Synthetic oligonucleotide
  Antisense strand to SEQ ID NO: 1456716
ucucagcuaacacucucgc

SEQ ID NO: 1456718 - RNA, 19 nt, Artificial Sequence
  Description of Artificial Sequence: Synthetic oligonucleotide
  Sense strand starting at position 200 of SEQ ID NO: 1243990
gagaguguuagcugagagu

SEQ ID NO: 1456719 - RNA, 19 nt, Artificial Sequence
  Description of Artificial Sequence: Synthetic oligonucleotide
  Antisense strand to SEQ ID NO: 1456718
acucucagcuaacacucuc

SEQ ID NO: 1456720 - RNA, 19 nt, Artificial Sequence
  Description of Artificial Sequence: Synthetic oligonucleotide
  Sense strand starting at position 203 of SEQ ID NO: 1243990
aguguuagcugagagucuu

SEQ ID NO: 1456721 - RNA, 19 nt, Artificial Sequence
  Description of Artificial Sequence: Synthetic oligonucleotide
  Antisense strand to SEQ ID NO: 1456720
aagacucucagcuaacacu

SEQ ID NO: 1456722 - RNA, 19 nt, Artificial Sequence
  Description of Artificial Sequence: Synthetic oligonucleotide
  Sense strand starting at position 209 of SEQ ID NO: 1243990
agcugagagucuuaaccac

SEQ ID NO: 1456723 - RNA, 19 nt, Artificial Sequence
  Description of Artificial Sequence: Synthetic oligonucleotide
  Antisense strand to SEQ ID NO: 1456722
gugguuaagacucucagcu

SEQ ID NO: 1456724 - RNA, 19 nt, Artificial Sequence
  Description of Artificial Sequence: Synthetic oligonucleotide
  Sense strand starting at position 787 of SEQ ID NO: 1243990
ggauugcaggcgugaggua

SEQ ID NO: 1456725 - RNA, 19 nt, Artificial Sequence
  Description of Artificial Sequence: Synthetic oligonucleotide
  Antisense strand to SEQ ID NO: 1456724
uaccucacgccugcaaucc

SEQ ID NO: 1456726 - RNA, 19 nt, Artificial Sequence
  Description of Artificial Sequence: Synthetic oligonucleotide
  Sense strand starting at position 789 of SEQ ID NO: 1243990
auugcaggcgugagguauu

SEQ ID NO: 1456727 - RNA, 19 nt, Artificial Sequence
  Description of Artificial Sequence: Synthetic oligonucleotide
  Antisense strand to SEQ ID NO: 1456726
aauaccucacgccugcaau

SEQ ID NO: 1456728 - RNA, 19 nt, Artificial Sequence
  Description of Artificial Sequence: Synthetic oligonucleotide
  Sense strand starting at position 798 of SEQ ID NO: 1243990
gugagguauugcgccagga

SEQ ID NO: 1456729 - RNA, 19 nt, Artificial Sequence
  Description of Artificial Sequence: Synthetic oligonucleotide
  Antisense strand to SEQ ID NO: 1456728
uccuggcgcaauaccucac

SEQ ID NO: 1456730 - RNA, 19 nt, Artificial Sequence
  Description of Artificial Sequence: Synthetic oligonucleotide
  Sense strand starting at position 800 of SEQ ID NO: 1243990
gagguauugcgccaggauu

SEQ ID NO: 1456731 - RNA, 19 nt, Artificial Sequence
  Description of Artificial Sequence: Synthetic oligonucleotide
  Antisense strand to SEQ ID NO: 1456730
aauccuggcgcaauaccuc

SEQ ID NO: 1456732 - RNA, 19 nt, Artificial Sequence
  Description of Artificial Sequence: Synthetic oligonucleotide
  Sense strand starting at position 1531 of SEQ ID NO: 1243990
gcccuuuggccucaggaca

SEQ ID NO: 1456733 - RNA, 19 nt, Artificial Sequence
  Description of Artificial Sequence: Synthetic oligonucleotide
  Antisense strand to SEQ ID NO: 1456732
uguccugaggccaaagggc

SEQ ID NO: 1456734 - RNA, 19 nt, Artificial Sequence
  Description of Artificial Sequence: Synthetic oligonucleotide
  Sense strand starting at position 1763 of SEQ ID NO: 1243990
ccuugaacauggucguaaa

SEQ ID NO: 1456735 - RNA, 19 nt, Artificial Sequence
  Description of Artificial Sequence: Synthetic oligonucleotide
  Antisense strand to SEQ ID NO: 1456734
uuuacgaccauguucaagg

SEQ ID NO: 1456736 - RNA, 19 nt, Artificial Sequence
  Description of Artificial Sequence: Synthetic oligonucleotide
  Sense strand starting at position 1802 of SEQ ID NO: 1243990
gggcuuggcuggcgaaaga

SEQ ID NO: 1456737 - RNA, 19 nt, Artificial Sequence
  Description of Artificial Sequence: Synthetic oligonucleotide
  Antisense strand to SEQ ID NO: 1456736
ucuuucgccagccaagccc

SEQ ID NO: 1456738 - RNA, 19 nt, Artificial Sequence
  Description of Artificial Sequence: Synthetic oligonucleotide
  Sense strand starting at position 2017 of SEQ ID NO: 1243990
caaccagucugggaggaaa

SEQ ID NO: 1456739 - RNA, 19 nt, Artificial Sequence
  Description of Artificial Sequence: Synthetic oligonucleotide
  Antisense strand to SEQ ID NO: 1456738
uuuccucccagacugguug

SEQ ID NO: 1456740 - RNA, 19 nt, Artificial Sequence
  Description of Artificial Sequence: Synthetic oligonucleotide
  Sense strand starting at position 2222 of SEQ ID NO: 1243990
cccggagcucaggauuaau

SEQ ID NO: 1456741 - RNA, 19 nt, Artificial Sequence
  Description of Artificial Sequence: Synthetic oligonucleotide
  Antisense strand to SEQ ID NO: 1456740
auuaauccugagcuccggg

SEQ ID NO: 1456742 - RNA, 19 nt, Artificial Sequence
  Description of Artificial Sequence: Synthetic oligonucleotide
  Sense strand starting at position 2348 of SEQ ID NO: 1243990
ucuguucuccacugacaug

SEQ ID NO: 1456743 - RNA, 19 nt, Artificial Sequence
  Description of Artificial Sequence: Synthetic oligonucleotide
  Antisense strand to SEQ ID NO: 1456742
caugucaguggagaacaga

SEQ ID NO: 1456744 - RNA, 19 nt, Artificial Sequence
  Description of Artificial Sequence: Synthetic oligonucleotide
  Sense strand starting at position 3049 of SEQ ID NO: 1243990
cgucgcuuuccaggucauu

SEQ ID NO: 1456745 - RNA, 19 nt, Artificial Sequence
  Description of Artificial Sequence: Synthetic oligonucleotide
  Antisense strand to SEQ ID NO: 1456744
aaugaccuggaaagcgacg

SEQ ID NO: 1456746 - RNA, 19 nt, Artificial Sequence
  Description of Artificial Sequence: Synthetic oligonucleotide
  Sense strand starting at position 3137 of SEQ ID NO: 1243990
ggugacaucaccuggacau

SEQ ID NO: 1456747 - RNA, 19 nt, Artificial Sequence
  Description of Artificial Sequence: Synthetic oligonucleotide
  Antisense strand to SEQ ID NO: 1456746
auguccaggugaugucacc

SEQ ID NO: 1456748 - RNA, 19 nt, Artificial Sequence
  Description of Artificial Sequence: Synthetic oligonucleotide
  Sense strand starting at position 3138 of SEQ ID NO: 1243990
gugacaucaccuggacauc

SEQ ID NO: 1456749 - RNA, 19 nt, Artificial Sequence
  Description of Artificial Sequence: Synthetic oligonucleotide
  Antisense strand to SEQ ID NO: 1456748
gauguccaggugaugucac

SEQ ID NO: 1456750 - RNA, 19 nt, Artificial Sequence
  Description of Artificial Sequence: Synthetic oligonucleotide
  Sense strand starting at position 3196 of SEQ ID NO: 1243990
agagaaagaucccagcaga

SEQ ID NO: 1456751 - RNA, 19 nt, Artificial Sequence
  Description of Artificial Sequence: Synthetic oligonucleotide
  Antisense strand to SEQ ID NO: 1456750
ucugcugggaucuuucucu

SEQ ID NO: 1456752 - RNA, 19 nt, Artificial Sequence
  Description of Artificial Sequence: Synthetic oligonucleotide
  Sense strand starting at position 3289 of SEQ ID NO: 1243990
ggcugaauuucaugggaag

SEQ ID NO: 1456753 - RNA, 19 nt, Artificial Sequence
  Description of Artificial Sequence: Synthetic oligonucleotide
  Antisense strand to SEQ ID NO: 1456752
cuucccaugaaauucagcc

SEQ ID NO: 1456754 - RNA, 19 nt, Artificial Sequence
  Description of Artificial Sequence: Synthetic oligonucleotide
  Sense strand starting at position 3300 of SEQ ID NO: 1243990
augggaagucccugaacuc

SEQ ID NO: 1456755 - RNA, 19 nt, Artificial Sequence
  Description of Artificial Sequence: Synthetic oligonucleotide
  Antisense strand to SEQ ID NO: 1456754
gaguucagggacuucccau

SEQ ID NO: 1456756 - RNA, 19 nt, Artificial Sequence
  Description of Artificial Sequence: Synthetic oligonucleotide
  Sense strand starting at position 3429 of SEQ ID NO: 1243990
agaggucuccaguguccuu

SEQ ID NO: 1456757 - RNA, 19 nt, Artificial Sequence
  Description of Artificial Sequence: Synthetic oligonucleotide
  Antisense strand to SEQ ID NO: 1456756
aaggacacuggagaccucu

SEQ ID NO: 1456758 - RNA, 19 nt, Artificial Sequence
  Description of Artificial Sequence: Synthetic oligonucleotide
  Sense strand starting at position 3456 of SEQ ID NO: 1243990
gcccgugucuugagugaga

SEQ ID NO: 1456759 - RNA, 19 nt, Artificial Sequence
  Description of Artificial Sequence: Synthetic oligonucleotide
  Antisense strand to SEQ ID NO: 1456758
ucucacucaagacacgggc

SEQ ID NO: 1456760 - RNA, 19 nt, Artificial Sequence
  Description of Artificial Sequence: Synthetic oligonucleotide
  Sense strand starting at position 3458 of SEQ ID NO: 1243990
ccgugucuugagugagaug

SEQ ID NO: 1456761 - RNA, 19 nt, Artificial Sequence
  Description of Artificial Sequence: Synthetic oligonucleotide
  Antisense strand to SEQ ID NO: 1456760
caucucacucaagacacgg

SEQ ID NO: 1456762 - RNA, 19 nt, Artificial Sequence
  Description of Artificial Sequence: Synthetic oligonucleotide
  Sense strand starting at position 3521 of SEQ ID NO: 1243990
ccacuuuauuccuggugac

SEQ ID NO: 1456763 - RNA, 19 nt, Artificial Sequence
  Description of Artificial Sequence: Synthetic oligonucleotide
  Antisense strand to SEQ ID NO: 1456762
gucaccaggaauaaagugg

SEQ ID NO: 1456764 - RNA, 19 nt, Artificial Sequence
  Description of Artificial Sequence: Synthetic oligonucleotide
  Sense strand starting at position 3524 of SEQ ID NO: 1243990
cuuuauuccuggugacacu

SEQ ID NO: 1456765 - RNA, 19 nt, Artificial Sequence
  Description of Artificial Sequence: Synthetic oligonucleotide
  Antisense strand to SEQ ID NO: 1456764
agugucaccaggaauaaag

SEQ ID NO: 1456766 - RNA, 19 nt, Artificial Sequence
  Description of Artificial Sequence: Synthetic oligonucleotide
  Sense strand starting at position 3525 of SEQ ID NO: 1243990
uuuauuccuggugacacuu

SEQ ID NO: 1456767 - RNA, 19 nt, Artificial Sequence
  Description of Artificial Sequence: Synthetic oligonucleotide
  Antisense strand to SEQ ID NO: 1456766
aagugucaccaggaauaaa

SEQ ID NO: 1456768 - RNA, 19 nt, Artificial Sequence
  Description of Artificial Sequence: Synthetic oligonucleotide
  Sense strand starting at position 3533 of SEQ ID NO: 1243990
uggugacacuugucuucua

SEQ ID NO: 1456769 - RNA, 19 nt, Artificial Sequence
  Description of Artificial Sequence: Synthetic oligonucleotide
  Antisense strand to SEQ ID NO: 1456768
uagaagacaagugucacca

SEQ ID NO: 1456770 - RNA, 19 nt, Artificial Sequence
  Description of Artificial Sequence: Synthetic oligonucleotide
  Sense strand starting at position 3588 of SEQ ID NO: 1243990
aaaggagccguuuguguga

SEQ ID NO: 1456771 - RNA, 19 nt, Artificial Sequence
  Description of Artificial Sequence: Synthetic oligonucleotide
  Antisense strand to SEQ ID NO: 1456770
ucacacaaacggcuccuuu

SEQ ID NO: 1456772 - RNA, 19 nt, Artificial Sequence
  Description of Artificial Sequence: Synthetic oligonucleotide
  Sense strand starting at position 3590 of SEQ ID NO: 1243990
aggagccguuugugugaau

SEQ ID NO: 1456773 - RNA, 19 nt, Artificial Sequence
  Description of Artificial Sequence: Synthetic oligonucleotide
  Antisense strand to SEQ ID NO: 1456772
auucacacaaacggcuccu

SEQ ID NO: 1456774 - RNA, 19 nt, Artificial Sequence
  Description of Artificial Sequence: Synthetic oligonucleotide
  Sense strand starting at position 3593 of SEQ ID NO: 1243990
agccguuugugugaaugac

SEQ ID NO: 1456775 - RNA, 19 nt, Artificial Sequence
  Description of Artificial Sequence: Synthetic oligonucleotide
  Antisense strand to SEQ ID NO: 1456774
gucauucacacaaacggcu

SEQ ID NO: 1456776 - RNA, 19 nt, Artificial Sequence
  Description of Artificial Sequence: Synthetic oligonucleotide
  Sense strand starting at position 70 of SEQ ID NO: 1243991
cuagaacaguccuggcaug

SEQ ID NO: 1456777 - RNA, 19 nt, Artificial Sequence
  Description of Artificial Sequence: Synthetic oligonucleotide
  Antisense strand to SEQ ID NO: 1456776
caugccaggacuguucuag

SEQ ID NO: 1456778 - RNA, 19 nt, Artificial Sequence
  Description of Artificial Sequence: Synthetic oligonucleotide
  Sense strand starting at position 335 of SEQ ID NO: 1243991
caggucacucagugagagu

SEQ ID NO: 1456779 - RNA, 19 nt, Artificial Sequence
  Description of Artificial Sequence: Synthetic oligonucleotide
  Antisense strand to SEQ ID NO: 1456778
acucucacugagugaccug

SEQ ID NO: 1456780 - RNA, 19 nt, Artificial Sequence
  Description of Artificial Sequence: Synthetic oligonucleotide
  Sense strand starting at position 338 of SEQ ID NO: 1243991
gucacucagugagaguguu

SEQ ID NO: 1456781 - RNA, 19 nt, Artificial Sequence
  Description of Artificial Sequence: Synthetic oligonucleotide
  Antisense strand to SEQ ID NO: 1456780
aacacucucacugagugac

SEQ ID NO: 1456782 - RNA, 19 nt, Artificial Sequence
  Description of Artificial Sequence: Synthetic oligonucleotide
  Sense strand starting at position 344 of SEQ ID NO: 1243991
cagugagaguguuagcuga

SEQ ID NO: 1456783 - RNA, 19 nt, Artificial Sequence
  Description of Artificial Sequence: Synthetic oligonucleotide
  Antisense strand to SEQ ID NO: 1456782
ucagcuaacacucucacug

SEQ ID NO: 1456784 - RNA, 19 nt, Artificial Sequence
  Description of Artificial Sequence: Synthetic oligonucleotide
  Sense strand starting at position 346 of SEQ ID NO: 1243991
gugagaguguuagcugaga

SEQ ID NO: 1456785 - RNA, 19 nt, Artificial Sequence
  Description of Artificial Sequence: Synthetic oligonucleotide
  Antisense strand to SEQ ID NO: 1456784
ucucagcuaacacucucac

SEQ ID NO: 1456786 - RNA, 19 nt, Artificial Sequence
  Description of Artificial Sequence: Synthetic oligonucleotide
  Sense strand starting at position 348 of SEQ ID NO: 1243991
gagaguguuagcugagagu

SEQ ID NO: 1456787 - RNA, 19 nt, Artificial Sequence
  Description of Artificial Sequence: Synthetic oligonucleotide
  Antisense strand to SEQ ID NO: 1456786
acucucagcuaacacucuc

SEQ ID NO: 1456788 - RNA, 19 nt, Artificial Sequence
  Description of Artificial Sequence: Synthetic oligonucleotide
  Sense strand starting at position 351 of SEQ ID NO: 1243991
aguguuagcugagagucuu

SEQ ID NO: 1456789 - RNA, 19 nt, Artificial Sequence
  Description of Artificial Sequence: Synthetic oligonucleotide
  Antisense strand to SEQ ID NO: 1456788
aagacucucagcuaacacu

SEQ ID NO: 1456790 - RNA, 19 nt, Artificial Sequence
  Description of Artificial Sequence: Synthetic oligonucleotide
  Sense strand starting at position 357 of SEQ ID NO: 1243991
agcugagagucuuaaccac

SEQ ID NO: 1456791 - RNA, 19 nt, Artificial Sequence
  Description of Artificial Sequence: Synthetic oligonucleotide
  Antisense strand to SEQ ID NO: 1456790
gugguuaagacucucagcu

SEQ ID NO: 1456792 - RNA, 19 nt, Artificial Sequence
  Description of Artificial Sequence: Synthetic oligonucleotide
  Sense strand starting at position 953 of SEQ ID NO: 1243991
gagguauugcaccaggauu

SEQ ID NO: 1456793 - RNA, 19 nt, Artificial Sequence
  Description of Artificial Sequence: Synthetic oligonucleotide
  Antisense strand to SEQ ID NO: 1456792
aauccuggugcaauaccuc

SEQ ID NO: 1456794 - RNA, 19 nt, Artificial Sequence
  Description of Artificial Sequence: Synthetic oligonucleotide
  Sense strand starting at position 1193 of SEQ ID NO: 1243991
cuccuaaagucagggauua

SEQ ID NO: 1456795 - RNA, 19 nt, Artificial Sequence
  Description of Artificial Sequence: Synthetic oligonucleotide
  Antisense strand to SEQ ID NO: 1456794
uaaucccugacuuuaggag

SEQ ID NO: 1456796 - RNA, 19 nt, Artificial Sequence
  Description of Artificial Sequence: Synthetic oligonucleotide
  Sense strand starting at position 1194 of SEQ ID NO: 1243991
uccuaaagucagggauuau

SEQ ID NO: 1456797 - RNA, 19 nt, Artificial Sequence
  Description of Artificial Sequence: Synthetic oligonucleotide
  Antisense strand to SEQ ID NO: 1456796
auaaucccugacuuuagga

SEQ ID NO: 1456798 - RNA, 19 nt, Artificial Sequence
  Description of Artificial Sequence: Synthetic oligonucleotide
  Sense strand starting at position 1645 of SEQ ID NO: 1243991
gcccuuuguccucgggaca

SEQ ID NO: 1456799 - RNA, 19 nt, Artificial Sequence
  Description of Artificial Sequence: Synthetic oligonucleotide
  Antisense strand to SEQ ID NO: 1456798
ugucccgaggacaaagggc

SEQ ID NO: 1456800 - RNA, 19 nt, Artificial Sequence
  Description of Artificial Sequence: Synthetic oligonucleotide
  Sense strand starting at position 2121 of SEQ ID NO: 1243991
uaaccagucugggaggaaa

SEQ ID NO: 1456801 - RNA, 19 nt, Artificial Sequence
  Description of Artificial Sequence: Synthetic oligonucleotide
  Antisense strand to SEQ ID NO: 1456800
uuuccucccagacugguua

SEQ ID NO: 1456802 - RNA, 19 nt, Artificial Sequence
  Description of Artificial Sequence: Synthetic oligonucleotide
  Sense strand starting at position 2265 of SEQ ID NO: 1243991
acagaugggucuggagaca

SEQ ID NO: 1456803 - RNA, 19 nt, Artificial Sequence
  Description of Artificial Sequence: Synthetic oligonucleotide
  Antisense strand to SEQ ID NO: 1456802
ugucuccagacccaucugu

SEQ ID NO: 1456804 - RNA, 19 nt, Artificial Sequence
  Description of Artificial Sequence: Synthetic oligonucleotide
  Sense strand starting at position 2452 of SEQ ID NO: 1243991
uguguucuccacugacaug

SEQ ID NO: 1456805 - RNA, 19 nt, Artificial Sequence
  Description of Artificial Sequence: Synthetic oligonucleotide
  Antisense strand to SEQ ID NO: 1456804
caugucaguggagaacaca

SEQ ID NO: 1456806 - RNA, 19 nt, Artificial Sequence
  Description of Artificial Sequence: Synthetic oligonucleotide
  Sense strand starting at position 3154 of SEQ ID NO: 1243991
cgucgcuuuccaggucauu

SEQ ID NO: 1456807 - RNA, 19 nt, Artificial Sequence
  Description of Artificial Sequence: Synthetic oligonucleotide
  Antisense strand to SEQ ID NO: 1456806
aaugaccuggaaagcgacg

SEQ ID NO: 1456808 - RNA, 19 nt, Artificial Sequence
  Description of Artificial Sequence: Synthetic oligonucleotide
  Sense strand starting at position 3163 of SEQ ID NO: 1243991
ccaggucauuccugaaauc

SEQ ID NO: 1456809 - RNA, 19 nt, Artificial Sequence
  Description of Artificial Sequence: Synthetic oligonucleotide
  Antisense strand to SEQ ID NO: 1456808
gauuucaggaaugaccugg

SEQ ID NO: 1456810 - RNA, 19 nt, Artificial Sequence
  Description of Artificial Sequence: Synthetic oligonucleotide
  Sense strand starting at position 3242 of SEQ ID NO: 1243991
ggugacaucaccuggucau

SEQ ID NO: 1456811 - RNA, 19 nt, Artificial Sequence
  Description of Artificial Sequence: Synthetic oligonucleotide
  Antisense strand to SEQ ID NO: 1456810
augaccaggugaugucacc

SEQ ID NO: 1456812 - RNA, 19 nt, Artificial Sequence
  Description of Artificial Sequence: Synthetic oligonucleotide
  Sense strand starting at position 3243 of SEQ ID NO: 1243991
gugacaucaccuggucauc

SEQ ID NO: 1456813 - RNA, 19 nt, Artificial Sequence
  Description of Artificial Sequence: Synthetic oligonucleotide
  Antisense strand to SEQ ID NO: 1456812
gaugaccaggugaugucac

SEQ ID NO: 1456814 - RNA, 19 nt, Artificial Sequence
  Description of Artificial Sequence: Synthetic oligonucleotide
  Sense strand starting at position 3299 of SEQ ID NO: 1243991
agagaaaggucccagcaga

SEQ ID NO: 1456815 - RNA, 19 nt, Artificial Sequence
  Description of Artificial Sequence: Synthetic oligonucleotide
  Antisense strand to SEQ ID NO: 1456814
ucugcugggaccuuucucu

SEQ ID NO: 1456816 - RNA, 19 nt, Artificial Sequence
  Description of Artificial Sequence: Synthetic oligonucleotide
  Sense strand starting at position 3390 of SEQ ID NO: 1243991
uugggugaaucucauggga

SEQ ID NO: 1456817 - RNA, 19 nt, Artificial Sequence
  Description of Artificial Sequence: Synthetic oligonucleotide
  Antisense strand to SEQ ID NO: 1456816
ucccaugagauucacccaa

SEQ ID NO: 1456818 - RNA, 19 nt, Artificial Sequence
  Description of Artificial Sequence: Synthetic oligonucleotide
  Sense strand starting at position 3392 of SEQ ID NO: 1243991
gggugaaucucaugggaag

SEQ ID NO: 1456819 - RNA, 19 nt, Artificial Sequence
  Description of Artificial Sequence: Synthetic oligonucleotide
  Antisense strand to SEQ ID NO: 1456818
cuucccaugagauucaccc

SEQ ID NO: 1456820 - RNA, 19 nt, Artificial Sequence
  Description of Artificial Sequence: Synthetic oligonucleotide
  Sense strand starting at position 3394 of SEQ ID NO: 1243991
gugaaucucaugggaagcu

SEQ ID NO: 1456821 - RNA, 19 nt, Artificial Sequence
  Description of Artificial Sequence: Synthetic oligonucleotide
  Antisense strand to SEQ ID NO: 1456820
agcuucccaugagauucac

SEQ ID NO: 1456822 - RNA, 19 nt, Artificial Sequence
  Description of Artificial Sequence: Synthetic oligonucleotide
  Sense strand starting at position 3557 of SEQ ID NO: 1243991
cggcccaugucuugaguga

SEQ ID NO: 1456823 - RNA, 19 nt, Artificial Sequence
  Description of Artificial Sequence: Synthetic oligonucleotide
  Antisense strand to SEQ ID NO: 1456822
ucacucaagacaugggccg

SEQ ID NO: 1456824 - RNA, 19 nt, Artificial Sequence
  Description of Artificial Sequence: Synthetic oligonucleotide
  Sense strand starting at position 3558 of SEQ ID NO: 1243991
ggcccaugucuugagugag

SEQ ID NO: 1456825 - RNA, 19 nt, Artificial Sequence
  Description of Artificial Sequence: Synthetic oligonucleotide
  Antisense strand to SEQ ID NO: 1456824
cucacucaagacaugggcc

SEQ ID NO: 1456826 - RNA, 19 nt, Artificial Sequence
  Description of Artificial Sequence: Synthetic oligonucleotide
  Sense strand starting at position 3561 of SEQ ID NO: 1243991
ccaugucuugagugagaug

SEQ ID NO: 1456827 - RNA, 19 nt, Artificial Sequence
  Description of Artificial Sequence: Synthetic oligonucleotide
  Antisense strand to SEQ ID NO: 1456826
caucucacucaagacaugg

SEQ ID NO: 1456828 - RNA, 19 nt, Artificial Sequence
  Description of Artificial Sequence: Synthetic oligonucleotide
  Sense strand starting at position 3566 of SEQ ID NO: 1243991
ucuugagugagaugccaau

SEQ ID NO: 1456829 - RNA, 19 nt, Artificial Sequence
  Description of Artificial Sequence: Synthetic oligonucleotide
  Antisense strand to SEQ ID NO: 1456828
auuggcaucucacucaaga

SEQ ID NO: 1456830 - RNA, 19 nt, Artificial Sequence
  Description of Artificial Sequence: Synthetic oligonucleotide
  Sense strand starting at position 3624 of SEQ ID NO: 1243991
ccacuuuauuccuggugac

SEQ ID NO: 1456831 - RNA, 19 nt, Artificial Sequence
  Description of Artificial Sequence: Synthetic oligonucleotide
  Antisense strand to SEQ ID NO: 1456830
gucaccaggaauaaagugg

SEQ ID NO: 1456832 - RNA, 19 nt, Artificial Sequence
  Description of Artificial Sequence: Synthetic oligonucleotide
  Sense strand starting at position 3627 of SEQ ID NO: 1243991
cuuuauuccuggugacacu

SEQ ID NO: 1456833 - RNA, 19 nt, Artificial Sequence
  Description of Artificial Sequence: Synthetic oligonucleotide
  Antisense strand to SEQ ID NO: 1456832
agugucaccaggaauaaag

SEQ ID NO: 1456834 - RNA, 19 nt, Artificial Sequence
  Description of Artificial Sequence: Synthetic oligonucleotide
  Sense strand starting at position 3628 of SEQ ID NO: 1243991
uuuauuccuggugacacuu

SEQ ID NO: 1456835 - RNA, 19 nt, Artificial Sequence
  Description of Artificial Sequence: Synthetic oligonucleotide
  Antisense strand to SEQ ID NO: 1456834
aagugucaccaggaauaaa

SEQ ID NO: 1456836 - RNA, 19 nt, Artificial Sequence
  Description of Artificial Sequence: Synthetic oligonucleotide
  Sense strand starting at position 3636 of SEQ ID NO: 1243991
uggugacacuugucuucua

SEQ ID NO: 1456837 - RNA, 19 nt, Artificial Sequence
  Description of Artificial Sequence: Synthetic oligonucleotide
  Antisense strand to SEQ ID NO: 1456836
uagaagacaagugucacca

SEQ ID NO: 1456838 - RNA, 19 nt, Artificial Sequence
  Description of Artificial Sequence: Synthetic oligonucleotide
  Sense strand starting at position 3637 of SEQ ID NO: 1243991
ggugacacuugucuucuaa

SEQ ID NO: 1456839 - RNA, 19 nt, Artificial Sequence
  Description of Artificial Sequence: Synthetic oligonucleotide
  Antisense strand to SEQ ID NO: 1456838
uuagaagacaagugucacc

SEQ ID NO: 1456840 - RNA, 19 nt, Artificial Sequence
  Description of Artificial Sequence: Synthetic oligonucleotide
  Sense strand starting at position 3662 of SEQ ID NO: 1243991
auuguacgccugcaaucaa

SEQ ID NO: 1456841 - RNA, 19 nt, Artificial Sequence
  Description of Artificial Sequence: Synthetic oligonucleotide
  Antisense strand to SEQ ID NO: 1456840
uugauugcaggcguacaau

SEQ ID NO: 1456842 - RNA, 19 nt, Artificial Sequence
  Description of Artificial Sequence: Synthetic oligonucleotide
  Sense strand starting at position 3691 of SEQ ID NO: 1243991
aaaggagccguuuguguga

SEQ ID NO: 1456843 - RNA, 19 nt, Artificial Sequence
  Description of Artificial Sequence: Synthetic oligonucleotide
  Antisense strand to SEQ ID NO: 1456842
ucacacaaacggcuccuuu

SEQ ID NO: 1456844 - RNA, 19 nt, Artificial Sequence
  Description of Artificial Sequence: Synthetic oligonucleotide
  Sense strand starting at position 3693 of SEQ ID NO: 1243991
aggagccguuugugugaau

SEQ ID NO: 1456845 - RNA, 19 nt, Artificial Sequence
  Description of Artificial Sequence: Synthetic oligonucleotide
  Antisense strand to SEQ ID NO: 1456844
auucacacaaacggcuccu

SEQ ID NO: 1456846 - RNA, 19 nt, Artificial Sequence
  Description of Artificial Sequence: Synthetic oligonucleotide
  Sense strand starting at position 3696 of SEQ ID NO: 1243991
agccguuugugugaaugac

SEQ ID NO: 1456847 - RNA, 19 nt, Artificial Sequence
  Description of Artificial Sequence: Synthetic oligonucleotide
  Antisense strand to SEQ ID NO: 1456846
gucauucacacaaacggcu

SEQ ID NO: 1456848 - RNA, 19 nt, Artificial Sequence
  Description of Artificial Sequence: Synthetic oligonucleotide
  Sense strand starting at position 23 of SEQ ID NO: 1243992
gauggaguucuccagcuuc

SEQ ID NO: 1456849 - RNA, 19 nt, Artificial Sequence
  Description of Artificial Sequence: Synthetic oligonucleotide
  Antisense strand to SEQ ID NO: 1456848
gaagcuggagaacuccauc

SEQ ID NO: 1456850 - RNA, 19 nt, Artificial Sequence
  Description of Artificial Sequence: Synthetic oligonucleotide
  Sense strand starting at position 47 of SEQ ID NO: 1243992
gcggcucucaaaggaugau

SEQ ID NO: 1456851 - RNA, 19 nt, Artificial Sequence
  Description of Artificial Sequence: Synthetic oligonucleotide
  Antisense strand to SEQ ID NO: 1456850
aucauccuuugagagccgc

SEQ ID NO: 1456852 - RNA, 19 nt, Artificial Sequence
  Description of Artificial Sequence: Synthetic oligonucleotide
  Sense strand starting at position 48 of SEQ ID NO: 1243992
cggcucucaaaggaugaua

SEQ ID NO: 1456853 - RNA, 19 nt, Artificial Sequence
  Description of Artificial Sequence: Synthetic oligonucleotide
  Antisense strand to SEQ ID NO: 1456852
uaucauccuuugagagccg

SEQ ID NO: 1456854 - RNA, 19 nt, Artificial Sequence
  Description of Artificial Sequence: Synthetic oligonucleotide
  Sense strand starting at position 53 of SEQ ID NO: 1243992
cucaaaggaugauaagaua

SEQ ID NO: 1456855 - RNA, 19 nt, Artificial Sequence
  Description of Artificial Sequence: Synthetic oligonucleotide
  Antisense strand to SEQ ID NO: 1456854
uaucuuaucauccuuugag

SEQ ID NO: 1456856 - RNA, 19 nt, Artificial Sequence
  Description of Artificial Sequence: Synthetic oligonucleotide
  Sense strand starting at position 238 of SEQ ID NO: 1243992
cuaucaugugccuggcaua

SEQ ID NO: 1456857 - RNA, 19 nt, Artificial Sequence
  Description of Artificial Sequence: Synthetic oligonucleotide
  Antisense strand to SEQ ID NO: 1456856
uaugccaggcacaugauag

SEQ ID NO: 1456858 - RNA, 19 nt, Artificial Sequence
  Description of Artificial Sequence: Synthetic oligonucleotide
  Sense strand starting at position 239 of SEQ ID NO: 1243992
uaucaugugccuggcauau

SEQ ID NO: 1456859 - RNA, 19 nt, Artificial Sequence
  Description of Artificial Sequence: Synthetic oligonucleotide
  Antisense strand to SEQ ID NO: 1456858
auaugccaggcacaugaua

SEQ ID NO: 1456860 - RNA, 19 nt, Artificial Sequence
  Description of Artificial Sequence: Synthetic oligonucleotide
  Sense strand starting at position 440 of SEQ ID NO: 1243992
ccucaaaugcauugcugua

SEQ ID NO: 1456861 - RNA, 19 nt, Artificial Sequence
  Description of Artificial Sequence: Synthetic oligonucleotide
  Antisense strand to SEQ ID NO: 1456860
uacagcaaugcauuugagg

SEQ ID NO: 1456862 - RNA, 19 nt, Artificial Sequence
  Description of Artificial Sequence: Synthetic oligonucleotide
  Sense strand starting at position 469 of SEQ ID NO: 1243992
ccucucuaaggaugaaacu

SEQ ID NO: 1456863 - RNA, 19 nt, Artificial Sequence
  Description of Artificial Sequence: Synthetic oligonucleotide
  Antisense strand to SEQ ID NO: 1456862
aguuucauccuuagagagg

SEQ ID NO: 1456864 - RNA, 19 nt, Artificial Sequence
  Description of Artificial Sequence: Synthetic oligonucleotide
  Sense strand starting at position 560 of SEQ ID NO: 1243992
ggagguuagcuugagacua

SEQ ID NO: 1456865 - RNA, 19 nt, Artificial Sequence
  Description of Artificial Sequence: Synthetic oligonucleotide
  Antisense strand to SEQ ID NO: 1456864
uagucucaagcuaaccucc

SEQ ID NO: 1456866 - RNA, 19 nt, Artificial Sequence
  Description of Artificial Sequence: Synthetic oligonucleotide
  Sense strand starting at position 865 of SEQ ID NO: 1243992
cuuuauuauugugugacua

SEQ ID NO: 1456867 - RNA, 19 nt, Artificial Sequence
  Description of Artificial Sequence: Synthetic oligonucleotide
  Antisense strand to SEQ ID NO: 1456866
uagucacacaauaauaaag

SEQ ID NO: 1456868 - RNA, 19 nt, Artificial Sequence
  Description of Artificial Sequence: Synthetic oligonucleotide
  Sense strand starting at position 869 of SEQ ID NO: 1243992
auuauugugugacuaaaug

SEQ ID NO: 1456869 - RNA, 19 nt, Artificial Sequence
  Description of Artificial Sequence: Synthetic oligonucleotide
  Antisense strand to SEQ ID NO: 1456868
cauuuagucacacaauaau

SEQ ID NO: 1456870 - RNA, 19 nt, Artificial Sequence
  Description of Artificial Sequence: Synthetic oligonucleotide
  Sense strand starting at position 1004 of SEQ ID NO: 1243992
caugcauuagcgcauauga

SEQ ID NO: 1456871 - RNA, 19 nt, Artificial Sequence
  Description of Artificial Sequence: Synthetic oligonucleotide
  Antisense strand to SEQ ID NO: 1456870
ucauaugcgcuaaugcaug

SEQ ID NO: 1456872 - RNA, 19 nt, Artificial Sequence
  Description of Artificial Sequence: Synthetic oligonucleotide
  Sense strand starting at position 1065 of SEQ ID NO: 1243992
gcagaugaauucgcugaca

SEQ ID NO: 1456873 - RNA, 19 nt, Artificial Sequence
  Description of Artificial Sequence: Synthetic oligonucleotide
  Antisense strand to SEQ ID NO: 1456872
ugucagcgaauucaucugc

SEQ ID NO: 1456874 - RNA, 19 nt, Artificial Sequence
  Description of Artificial Sequence: Synthetic oligonucleotide
  Sense strand starting at position 1067 of SEQ ID NO: 1243992
agaugaauucgcugacacc

SEQ ID NO: 1456875 - RNA, 19 nt, Artificial Sequence
  Description of Artificial Sequence: Synthetic oligonucleotide
  Antisense strand to SEQ ID NO: 1456874
ggugucagcgaauucaucu

SEQ ID NO: 1456876 - RNA, 19 nt, Artificial Sequence
  Description of Artificial Sequence: Synthetic oligonucleotide
  Sense strand starting at position 1068 of SEQ ID NO: 1243992
gaugaauucgcugacacca

SEQ ID NO: 1456877 - RNA, 19 nt, Artificial Sequence
  Description of Artificial Sequence: Synthetic oligonucleotide
  Antisense strand to SEQ ID NO: 1456876
uggugucagcgaauucauc

SEQ ID NO: 1456878 - RNA, 19 nt, Artificial Sequence
  Description of Artificial Sequence: Synthetic oligonucleotide
  Sense strand starting at position 1138 of SEQ ID NO: 1243992
agaucugccugacuuuaga

SEQ ID NO: 1456879 - RNA, 19 nt, Artificial Sequence
  Description of Artificial Sequence: Synthetic oligonucleotide
  Antisense strand to SEQ ID NO: 1456878
ucuaaagucaggcagaucu

SEQ ID NO: 1456880 - RNA, 19 nt, Artificial Sequence
  Description of Artificial Sequence: Synthetic oligonucleotide
  Sense strand starting at position 1198 of SEQ ID NO: 1243992
cuucucugcccucaggaau

SEQ ID NO: 1456881 - RNA, 19 nt, Artificial Sequence
  Description of Artificial Sequence: Synthetic oligonucleotide
  Antisense strand to SEQ ID NO: 1456880
auuccugagggcagagaag

SEQ ID NO: 1456882 - RNA, 19 nt, Artificial Sequence
  Description of Artificial Sequence: Synthetic oligonucleotide
  Sense strand starting at position 1239 of SEQ ID NO: 1243992
cagagaguccacugacaau

SEQ ID NO: 1456883 - RNA, 19 nt, Artificial Sequence
  Description of Artificial Sequence: Synthetic oligonucleotide
  Antisense strand to SEQ ID NO: 1456882
auugucaguggacucucug

SEQ ID NO: 1456884 - RNA, 19 nt, Artificial Sequence
  Description of Artificial Sequence: Synthetic oligonucleotide
  Sense strand starting at position 1245 of SEQ ID NO: 1243992
guccacugacaaugacaua

SEQ ID NO: 1456885 - RNA, 19 nt, Artificial Sequence
  Description of Artificial Sequence: Synthetic oligonucleotide
  Antisense strand to SEQ ID NO: 1456884
uaugucauugucaguggac

SEQ ID NO: 1456886 - RNA, 19 nt, Artificial Sequence
  Description of Artificial Sequence: Synthetic oligonucleotide
  Sense strand starting at position 1286 of SEQ ID NO: 1243992
gucagacucacugaguguu

SEQ ID NO: 1456887 - RNA, 19 nt, Artificial Sequence
  Description of Artificial Sequence: Synthetic oligonucleotide
  Antisense strand to SEQ ID NO: 1456886
aacacucagugagucugac

SEQ ID NO: 1456888 - RNA, 19 nt, Artificial Sequence
  Description of Artificial Sequence: Synthetic oligonucleotide
  Sense strand starting at position 1292 of SEQ ID NO: 1243992
cucacugaguguuugcaga

SEQ ID NO: 1456889 - RNA, 19 nt, Artificial Sequence
  Description of Artificial Sequence: Synthetic oligonucleotide
  Antisense strand to SEQ ID NO: 1456888
ucugcaaacacucagugag

SEQ ID NO: 1456890 - RNA, 19 nt, Artificial Sequence
  Description of Artificial Sequence: Synthetic oligonucleotide
  Sense strand starting at position 1294 of SEQ ID NO: 1243992
cacugaguguuugcagaag

SEQ ID NO: 1456891 - RNA, 19 nt, Artificial Sequence
  Description of Artificial Sequence: Synthetic oligonucleotide
  Antisense strand to SEQ ID NO: 1456890
cuucugcaaacacucagug

SEQ ID NO: 1456892 - RNA, 19 nt, Artificial Sequence
  Description of Artificial Sequence: Synthetic oligonucleotide
  Sense strand starting at position 1426 of SEQ ID NO: 1243992
gccaaacuguugcuagaua

SEQ ID NO: 1456893 - RNA, 19 nt, Artificial Sequence
  Description of Artificial Sequence: Synthetic oligonucleotide
  Antisense strand to SEQ ID NO: 1456892
uaucuagcaacaguuuggc

SEQ ID NO: 1456894 - RNA, 19 nt, Artificial Sequence
  Description of Artificial Sequence: Synthetic oligonucleotide
  Sense strand starting at position 1564 of SEQ ID NO: 1243992
ggagacucaccauguucuu

SEQ ID NO: 1456895 - RNA, 19 nt, Artificial Sequence
  Description of Artificial Sequence: Synthetic oligonucleotide
  Antisense strand to SEQ ID NO: 1456894
aagaacauggugagucucc

SEQ ID NO: 1456896 - RNA, 19 nt, Artificial Sequence
  Description of Artificial Sequence: Synthetic oligonucleotide
  Sense strand starting at position 1569 of SEQ ID NO: 1243992
cucaccauguucuuaguga

SEQ ID NO: 1456897 - RNA, 19 nt, Artificial Sequence
  Description of Artificial Sequence: Synthetic oligonucleotide
  Antisense strand to SEQ ID NO: 1456896
ucacuaagaacauggugag

SEQ ID NO: 1456898 - RNA, 19 nt, Artificial Sequence
  Description of Artificial Sequence: Synthetic oligonucleotide
  Sense strand starting at position 1603 of SEQ ID NO: 1243992
ccaggcugucucggaugaa

SEQ ID NO: 1456899 - RNA, 19 nt, Artificial Sequence
  Description of Artificial Sequence: Synthetic oligonucleotide
  Antisense strand to SEQ ID NO: 1456898
uucauccgagacagccugg

SEQ ID NO: 1456900 - RNA, 19 nt, Artificial Sequence
  Description of Artificial Sequence: Synthetic oligonucleotide
  Sense strand starting at position 1606 of SEQ ID NO: 1243992
ggcugucucggaugaagga

SEQ ID NO: 1456901 - RNA, 19 nt, Artificial Sequence
  Description of Artificial Sequence: Synthetic oligonucleotide
  Antisense strand to SEQ ID NO: 1456900
uccuucauccgagacagcc

SEQ ID NO: 1456902 - RNA, 19 nt, Artificial Sequence
  Description of Artificial Sequence: Synthetic oligonucleotide
  Sense strand starting at position 2103 of SEQ ID NO: 1243992
agagaaguguauucggaug

SEQ ID NO: 1456903 - RNA, 19 nt, Artificial Sequence
  Description of Artificial Sequence: Synthetic oligonucleotide
  Antisense strand to SEQ ID NO: 1456902
cauccgaauacacuucucu

SEQ ID NO: 1456904 - RNA, 19 nt, Artificial Sequence
  Description of Artificial Sequence: Synthetic oligonucleotide
  Sense strand starting at position 2142 of SEQ ID NO: 1243992
gguuccuugccucagcaga

SEQ ID NO: 1456905 - RNA, 19 nt, Artificial Sequence
  Description of Artificial Sequence: Synthetic oligonucleotide
  Antisense strand to SEQ ID NO: 1456904
ucugcugaggcaaggaacc

SEQ ID NO: 1456906 - RNA, 19 nt, Artificial Sequence
  Description of Artificial Sequence: Synthetic oligonucleotide
  Sense strand starting at position 2311 of SEQ ID NO: 1243992
ccaauugcguuucccacaa

SEQ ID NO: 1456907 - RNA, 19 nt, Artificial Sequence
  Description of Artificial Sequence: Synthetic oligonucleotide
  Antisense strand to SEQ ID NO: 1456906
uugugggaaacgcaauugg

SEQ ID NO: 1456908 - RNA, 19 nt, Artificial Sequence
  Description of Artificial Sequence: Synthetic oligonucleotide
  Sense strand starting at position 2587 of SEQ ID NO: 1243992
ucgaguuacuccuuccucu

SEQ ID NO: 1456909 - RNA, 19 nt, Artificial Sequence
  Description of Artificial Sequence: Synthetic oligonucleotide
  Antisense strand to SEQ ID NO: 1456908
agaggaaggaguaacucga

SEQ ID NO: 1456910 - RNA, 19 nt, Artificial Sequence
  Description of Artificial Sequence: Synthetic oligonucleotide
  Sense strand starting at position 2721 of SEQ ID NO: 1243992
gaggcaugugcugguagau

SEQ ID NO: 1456911 - RNA, 19 nt, Artificial Sequence
  Description of Artificial Sequence: Synthetic oligonucleotide
  Antisense strand to SEQ ID NO: 1456910
aucuaccagcacaugccuc

SEQ ID NO: 1456912 - RNA, 19 nt, Artificial Sequence
  Description of Artificial Sequence: Synthetic oligonucleotide
  Sense strand starting at position 3265 of SEQ ID NO: 1243992
ggcugauuccugugucagg

SEQ ID NO: 1456913 - RNA, 19 nt, Artificial Sequence
  Description of Artificial Sequence: Synthetic oligonucleotide
  Antisense strand to SEQ ID NO: 1456912
ccugacacaggaaucagcc

SEQ ID NO: 1456914 - RNA, 19 nt, Artificial Sequence
  Description of Artificial Sequence: Synthetic oligonucleotide
  Sense strand starting at position 3266 of SEQ ID NO: 1243992
gcugauuccugugucagga

SEQ ID NO: 1456915 - RNA, 19 nt, Artificial Sequence
  Description of Artificial Sequence: Synthetic oligonucleotide
  Antisense strand to SEQ ID NO: 1456914
uccugacacaggaaucagc

SEQ ID NO: 1456916 - RNA, 19 nt, Artificial Sequence
  Description of Artificial Sequence: Synthetic oligonucleotide
  Sense strand starting at position 3304 of SEQ ID NO: 1243992
cugacaugguccuugugua

SEQ ID NO: 1456917 - RNA, 19 nt, Artificial Sequence
  Description of Artificial Sequence: Synthetic oligonucleotide
  Antisense strand to SEQ ID NO: 1456916
uacacaaggaccaugucag

SEQ ID NO: 1456918 - RNA, 19 nt, Artificial Sequence
  Description of Artificial Sequence: Synthetic oligonucleotide
  Sense strand starting at position 3305 of SEQ ID NO: 1243992
ugacaugguccuuguguag

SEQ ID NO: 1456919 - RNA, 19 nt, Artificial Sequence
  Description of Artificial Sequence: Synthetic oligonucleotide
  Antisense strand to SEQ ID NO: 1456918
cuacacaaggaccauguca

SEQ ID NO: 1456920 - RNA, 19 nt, Artificial Sequence
  Description of Artificial Sequence: Synthetic oligonucleotide
  Sense strand starting at position 3312 of SEQ ID NO: 1243992
guccuuguguaguccaaag

SEQ ID NO: 1456921 - RNA, 19 nt, Artificial Sequence
  Description of Artificial Sequence: Synthetic oligonucleotide
  Antisense strand to SEQ ID NO: 1456920
cuuuggacuacacaaggac

SEQ ID NO: 1456922 - RNA, 19 nt, Artificial Sequence
  Description of Artificial Sequence: Synthetic oligonucleotide
  Sense strand starting at position 3331 of SEQ ID NO: 1243992
ggcuaaguaggagaaaguu

SEQ ID NO: 1456923 - RNA, 19 nt, Artificial Sequence
  Description of Artificial Sequence: Synthetic oligonucleotide
  Antisense strand to SEQ ID NO: 1456922
aacuuucuccuacuuagcc

SEQ ID NO: 1456924 - RNA, 19 nt, Artificial Sequence
  Description of Artificial Sequence: Synthetic oligonucleotide
  Sense strand starting at position 3384 of SEQ ID NO: 1243992
gcuaguuagccgcuguaga

SEQ ID NO: 1456925 - RNA, 19 nt, Artificial Sequence
  Description of Artificial Sequence: Synthetic oligonucleotide
  Antisense strand to SEQ ID NO: 1456924
ucuacagcggcuaacuagc

SEQ ID NO: 1456926 - RNA, 19 nt, Artificial Sequence
  Description of Artificial Sequence: Synthetic oligonucleotide
  Sense strand starting at position 3767 of SEQ ID NO: 1243992
uggccugagucucuaaaca

SEQ ID NO: 1456927 - RNA, 19 nt, Artificial Sequence
  Description of Artificial Sequence: Synthetic oligonucleotide
  Antisense strand to SEQ ID NO: 1456926
uguuuagagacucaggcca

SEQ ID NO: 1456928 - RNA, 19 nt, Artificial Sequence
  Description of Artificial Sequence: Synthetic oligonucleotide
  Sense strand starting at position 112 of SEQ ID NO: 1243993
cucugaugaucuucucagu

SEQ ID NO: 1456929 - RNA, 19 nt, Artificial Sequence
  Description of Artificial Sequence: Synthetic oligonucleotide
  Antisense strand to SEQ ID NO: 1456928
acugagaagaucaucagag

SEQ ID NO: 1456930 - RNA, 19 nt, Artificial Sequence
  Description of Artificial Sequence: Synthetic oligonucleotide
  Sense strand starting at position 118 of SEQ ID NO: 1243993
ugaucuucucagugucacu

SEQ ID NO: 1456931 - RNA, 19 nt, Artificial Sequence
  Description of Artificial Sequence: Synthetic oligonucleotide
  Antisense strand to SEQ ID NO: 1456930
agugacacugagaagauca

SEQ ID NO: 1456932 - RNA, 19 nt, Artificial Sequence
  Description of Artificial Sequence: Synthetic oligonucleotide
  Sense strand starting at position 174 of SEQ ID NO: 1243993
gacagcgucuucucaacau

SEQ ID NO: 1456933 - RNA, 19 nt, Artificial Sequence
  Description of Artificial Sequence: Synthetic oligonucleotide
  Antisense strand to SEQ ID NO: 1456932
auguugagaagacgcuguc

SEQ ID NO: 1456934 - RNA, 19 nt, Artificial Sequence
  Description of Artificial Sequence: Synthetic oligonucleotide
  Sense strand starting at position 208 of SEQ ID NO: 1243993
gcagauucuccgucugcuu

SEQ ID NO: 1456935 - RNA, 19 nt, Artificial Sequence
  Description of Artificial Sequence: Synthetic oligonucleotide
  Antisense strand to SEQ ID NO: 1456934
aagcagacggagaaucugc

SEQ ID NO: 1456936 - RNA, 19 nt, Artificial Sequence
  Description of Artificial Sequence: Synthetic oligonucleotide
  Sense strand starting at position 239 of SEQ ID NO: 1243993
gauggaguucuccagcuuc

SEQ ID NO: 1456937 - RNA, 19 nt, Artificial Sequence
  Description of Artificial Sequence: Synthetic oligonucleotide
  Antisense strand to SEQ ID NO: 1456936
gaagcuggagaacuccauc

SEQ ID NO: 1456938 - RNA, 19 nt, Artificial Sequence
  Description of Artificial Sequence: Synthetic oligonucleotide
  Sense strand starting at position 263 of SEQ ID NO: 1243993
gcggcucucaaaggaugau

SEQ ID NO: 1456939 - RNA, 19 nt, Artificial Sequence
  Description of Artificial Sequence: Synthetic oligonucleotide
  Antisense strand to SEQ ID NO: 1456938
aucauccuuugagagccgc

SEQ ID NO: 1456940 - RNA, 19 nt, Artificial Sequence
  Description of Artificial Sequence: Synthetic oligonucleotide
  Sense strand starting at position 264 of SEQ ID NO: 1243993
cggcucucaaaggaugaua

SEQ ID NO: 1456941 - RNA, 19 nt, Artificial Sequence
  Description of Artificial Sequence: Synthetic oligonucleotide
  Antisense strand to SEQ ID NO: 1456940
uaucauccuuugagagccg

SEQ ID NO: 1456942 - RNA, 19 nt, Artificial Sequence
  Description of Artificial Sequence: Synthetic oligonucleotide
  Sense strand starting at position 269 of SEQ ID NO: 1243993
cucaaaggaugauaagaua

SEQ ID NO: 1456943 - RNA, 19 nt, Artificial Sequence
  Description of Artificial Sequence: Synthetic oligonucleotide
  Antisense strand to SEQ ID NO: 1456942
uaucuuaucauccuuugag

SEQ ID NO: 1456944 - RNA, 19 nt, Artificial Sequence
  Description of Artificial Sequence: Synthetic oligonucleotide
  Sense strand starting at position 685 of SEQ ID NO: 1243993
ccucucuaaggaugaaacu

SEQ ID NO: 1456945 - RNA, 19 nt, Artificial Sequence
  Description of Artificial Sequence: Synthetic oligonucleotide
  Antisense strand to SEQ ID NO: 1456944
aguuucauccuuagagagg

SEQ ID NO: 1456946 - RNA, 19 nt, Artificial Sequence
  Description of Artificial Sequence: Synthetic oligonucleotide
  Sense strand starting at position 776 of SEQ ID NO: 1243993
ggagguuagcuugagacua

SEQ ID NO: 1456947 - RNA, 19 nt, Artificial Sequence
  Description of Artificial Sequence: Synthetic oligonucleotide
  Antisense strand to SEQ ID NO: 1456946
uagucucaagcuaaccucc

SEQ ID NO: 1456948 - RNA, 19 nt, Artificial Sequence
  Description of Artificial Sequence: Synthetic oligonucleotide
  Sense strand starting at position 1081 of SEQ ID NO: 1243993
cuuuauuauugugugacua

SEQ ID NO: 1456949 - RNA, 19 nt, Artificial Sequence
  Description of Artificial Sequence: Synthetic oligonucleotide
  Antisense strand to SEQ ID NO: 1456948
uagucacacaauaauaaag

SEQ ID NO: 1456950 - RNA, 19 nt, Artificial Sequence
  Description of Artificial Sequence: Synthetic oligonucleotide
  Sense strand starting at position 1085 of SEQ ID NO: 1243993
auuauugugugacuaaaug

SEQ ID NO: 1456951 - RNA, 19 nt, Artificial Sequence
  Description of Artificial Sequence: Synthetic oligonucleotide
  Antisense strand to SEQ ID NO: 1456950
cauuuagucacacaauaau

SEQ ID NO: 1456952 - RNA, 19 nt, Artificial Sequence
  Description of Artificial Sequence: Synthetic oligonucleotide
  Sense strand starting at position 1220 of SEQ ID NO: 1243993
caugcauuagcgcauauga

SEQ ID NO: 1456953 - RNA, 19 nt, Artificial Sequence
  Description of Artificial Sequence: Synthetic oligonucleotide
  Antisense strand to SEQ ID NO: 1456952
ucauaugcgcuaaugcaug

SEQ ID NO: 1456954 - RNA, 19 nt, Artificial Sequence
  Description of Artificial Sequence: Synthetic oligonucleotide
  Sense strand starting at position 1281 of SEQ ID NO: 1243993
gcagaugaauucgcugaca

SEQ ID NO: 1456955 - RNA, 19 nt, Artificial Sequence
  Description of Artificial Sequence: Synthetic oligonucleotide
  Antisense strand to SEQ ID NO: 1456954
ugucagcgaauucaucugc

SEQ ID NO: 1456956 - RNA, 19 nt, Artificial Sequence
  Description of Artificial Sequence: Synthetic oligonucleotide
  Sense strand starting at position 1283 of SEQ ID NO: 1243993
agaugaauucgcugacacc

SEQ ID NO: 1456957 - RNA, 19 nt, Artificial Sequence
  Description of Artificial Sequence: Synthetic oligonucleotide
  Antisense strand to SEQ ID NO: 1456956
ggugucagcgaauucaucu

SEQ ID NO: 1456958 - RNA, 19 nt, Artificial Sequence
  Description of Artificial Sequence: Synthetic oligonucleotide
  Sense strand starting at position 1284 of SEQ ID NO: 1243993
gaugaauucgcugacacca

SEQ ID NO: 1456959 - RNA, 19 nt, Artificial Sequence
  Description of Artificial Sequence: Synthetic oligonucleotide
  Antisense strand to SEQ ID NO: 1456958
uggugucagcgaauucauc

SEQ ID NO: 1456960 - RNA, 19 nt, Artificial Sequence
  Description of Artificial Sequence: Synthetic oligonucleotide
  Sense strand starting at position 1354 of SEQ ID NO: 1243993
agaucugccugacuuuaga

SEQ ID NO: 1456961 - RNA, 19 nt, Artificial Sequence
  Description of Artificial Sequence: Synthetic oligonucleotide
  Antisense strand to SEQ ID NO: 1456960
ucuaaagucaggcagaucu

SEQ ID NO: 1456962 - RNA, 19 nt, Artificial Sequence
  Description of Artificial Sequence: Synthetic oligonucleotide
  Sense strand starting at position 1414 of SEQ ID NO: 1243993
cuucucugcccucaggaau

SEQ ID NO: 1456963 - RNA, 19 nt, Artificial Sequence
  Description of Artificial Sequence: Synthetic oligonucleotide
  Antisense strand to SEQ ID NO: 1456962
auuccugagggcagagaag

SEQ ID NO: 1456964 - RNA, 19 nt, Artificial Sequence
  Description of Artificial Sequence: Synthetic oligonucleotide
  Sense strand starting at position 1455 of SEQ ID NO: 1243993
cagagaguccacugacaau

SEQ ID NO: 1456965 - RNA, 19 nt, Artificial Sequence
  Description of Artificial Sequence: Synthetic oligonucleotide
  Antisense strand to SEQ ID NO: 1456964
auugucaguggacucucug

SEQ ID NO: 1456966 - RNA, 19 nt, Artificial Sequence
  Description of Artificial Sequence: Synthetic oligonucleotide
  Sense strand starting at position 1461 of SEQ ID NO: 1243993
guccacugacaaugacaua

SEQ ID NO: 1456967 - RNA, 19 nt, Artificial Sequence
  Description of Artificial Sequence: Synthetic oligonucleotide
  Antisense strand to SEQ ID NO: 1456966
uaugucauugucaguggac

SEQ ID NO: 1456968 - RNA, 19 nt, Artificial Sequence
  Description of Artificial Sequence: Synthetic oligonucleotide
  Sense strand starting at position 1502 of SEQ ID NO: 1243993
gucagacucacugaguguu

SEQ ID NO: 1456969 - RNA, 19 nt, Artificial Sequence
  Description of Artificial Sequence: Synthetic oligonucleotide
  Antisense strand to SEQ ID NO: 1456968
aacacucagugagucugac

SEQ ID NO: 1456970 - RNA, 19 nt, Artificial Sequence
  Description of Artificial Sequence: Synthetic oligonucleotide
  Sense strand starting at position 1508 of SEQ ID NO: 1243993
cucacugaguguuugcaga

SEQ ID NO: 1456971 - RNA, 19 nt, Artificial Sequence
  Description of Artificial Sequence: Synthetic oligonucleotide
  Antisense strand to SEQ ID NO: 1456970
ucugcaaacacucagugag

SEQ ID NO: 1456972 - RNA, 19 nt, Artificial Sequence
  Description of Artificial Sequence: Synthetic oligonucleotide
  Sense strand starting at position 1510 of SEQ ID NO: 1243993
cacugaguguuugcagaag

SEQ ID NO: 1456973 - RNA, 19 nt, Artificial Sequence
  Description of Artificial Sequence: Synthetic oligonucleotide
  Antisense strand to SEQ ID NO: 1456972
cuucugcaaacacucagug

SEQ ID NO: 1456974 - RNA, 19 nt, Artificial Sequence
  Description of Artificial Sequence: Synthetic oligonucleotide
  Sense strand starting at position 1642 of SEQ ID NO: 1243993
gccaaacuguugcuagaua

SEQ ID NO: 1456975 - RNA, 19 nt, Artificial Sequence
  Description of Artificial Sequence: Synthetic oligonucleotide
  Antisense strand to SEQ ID NO: 1456974
uaucuagcaacaguuuggc

SEQ ID NO: 1456976 - RNA, 19 nt, Artificial Sequence
  Description of Artificial Sequence: Synthetic oligonucleotide
  Sense strand starting at position 1780 of SEQ ID NO: 1243993
ggagacucaccauguucuu

SEQ ID NO: 1456977 - RNA, 19 nt, Artificial Sequence
  Description of Artificial Sequence: Synthetic oligonucleotide
  Antisense strand to SEQ ID NO: 1456976
aagaacauggugagucucc

SEQ ID NO: 1456978 - RNA, 19 nt, Artificial Sequence
  Description of Artificial Sequence: Synthetic oligonucleotide
  Sense strand starting at position 1785 of SEQ ID NO: 1243993
cucaccauguucuuaguga

SEQ ID NO: 1456979 - RNA, 19 nt, Artificial Sequence
  Description of Artificial Sequence: Synthetic oligonucleotide
  Antisense strand to SEQ ID NO: 1456978
ucacuaagaacauggugag

SEQ ID NO: 1456980 - RNA, 19 nt, Artificial Sequence
  Description of Artificial Sequence: Synthetic oligonucleotide
  Sense strand starting at position 1819 of SEQ ID NO: 1243993
ccaggcugucucggaugaa

SEQ ID NO: 1456981 - RNA, 19 nt, Artificial Sequence
  Description of Artificial Sequence: Synthetic oligonucleotide
  Antisense strand to SEQ ID NO: 1456980
uucauccgagacagccugg

SEQ ID NO: 1456982 - RNA, 19 nt, Artificial Sequence
  Description of Artificial Sequence: Synthetic oligonucleotide
  Sense strand starting at position 1822 of SEQ ID NO: 1243993
ggcugucucggaugaagga

SEQ ID NO: 1456983 - RNA, 19 nt, Artificial Sequence
  Description of Artificial Sequence: Synthetic oligonucleotide
  Antisense strand to SEQ ID NO: 1456982
uccuucauccgagacagcc

SEQ ID NO: 1456984 - RNA, 19 nt, Artificial Sequence
  Description of Artificial Sequence: Synthetic oligonucleotide
  Sense strand starting at position 2319 of SEQ ID NO: 1243993
agagaaguguauucggaug

SEQ ID NO: 1456985 - RNA, 19 nt, Artificial Sequence
  Description of Artificial Sequence: Synthetic oligonucleotide
  Antisense strand to SEQ ID NO: 1456984
cauccgaauacacuucucu

SEQ ID NO: 1456986 - RNA, 19 nt, Artificial Sequence
  Description of Artificial Sequence: Synthetic oligonucleotide
  Sense strand starting at position 2358 of SEQ ID NO: 1243993
gguuccuugccucagcaga

SEQ ID NO: 1456987 - RNA, 19 nt, Artificial Sequence
  Description of Artificial Sequence: Synthetic oligonucleotide
  Antisense strand to SEQ ID NO: 1456986
ucugcugaggcaaggaacc

SEQ ID NO: 1456988 - RNA, 19 nt, Artificial Sequence
  Description of Artificial Sequence: Synthetic oligonucleotide
  Sense strand starting at position 2527 of SEQ ID NO: 1243993
ccaauugcguuucccacaa

SEQ ID NO: 1456989 - RNA, 19 nt, Artificial Sequence
  Description of Artificial Sequence: Synthetic oligonucleotide
  Antisense strand to SEQ ID NO: 1456988
uugugggaaacgcaauugg

SEQ ID NO: 1456990 - RNA, 19 nt, Artificial Sequence
  Description of Artificial Sequence: Synthetic oligonucleotide
  Sense strand starting at position 2937 of SEQ ID NO: 1243993
gaggcaugugcugguagau

SEQ ID NO: 1456991 - RNA, 19 nt, Artificial Sequence
  Description of Artificial Sequence: Synthetic oligonucleotide
  Antisense strand to SEQ ID NO: 1456990
aucuaccagcacaugccuc

SEQ ID NO: 1456992 - RNA, 19 nt, Artificial Sequence
  Description of Artificial Sequence: Synthetic oligonucleotide
  Sense strand starting at position 3481 of SEQ ID NO: 1243993
ggcugauuccugugucagg

SEQ ID NO: 1456993 - RNA, 19 nt, Artificial Sequence
  Description of Artificial Sequence: Synthetic oligonucleotide
  Antisense strand to SEQ ID NO: 1456992
ccugacacaggaaucagcc

SEQ ID NO: 1456994 - RNA, 19 nt, Artificial Sequence
  Description of Artificial Sequence: Synthetic oligonucleotide
  Sense strand starting at position 3482 of SEQ ID NO: 1243993
gcugauuccugugucagga

SEQ ID NO: 1456995 - RNA, 19 nt, Artificial Sequence
  Description of Artificial Sequence: Synthetic oligonucleotide
  Antisense strand to SEQ ID NO: 1456994
uccugacacaggaaucagc

SEQ ID NO: 1456996 - RNA, 19 nt, Artificial Sequence
  Description of Artificial Sequence: Synthetic oligonucleotide
  Sense strand starting at position 3520 of SEQ ID NO: 1243993
cugacaugguccuugugua

SEQ ID NO: 1456997 - RNA, 19 nt, Artificial Sequence
  Description of Artificial Sequence: Synthetic oligonucleotide
  Antisense strand to SEQ ID NO: 1456996
uacacaaggaccaugucag

SEQ ID NO: 1456998 - RNA, 19 nt, Artificial Sequence
  Description of Artificial Sequence: Synthetic oligonucleotide
  Sense strand starting at position 3521 of SEQ ID NO: 1243993
ugacaugguccuuguguag

SEQ ID NO: 1456999 - RNA, 19 nt, Artificial Sequence
  Description of Artificial Sequence: Synthetic oligonucleotide
  Antisense strand to SEQ ID NO: 1456998
cuacacaaggaccauguca

SEQ ID NO: 1457000 - RNA, 19 nt, Artificial Sequence
  Description of Artificial Sequence: Synthetic oligonucleotide
  Sense strand starting at position 3528 of SEQ ID NO: 1243993
guccuuguguaguccaaag

SEQ ID NO: 1457001 - RNA, 19 nt, Artificial Sequence
  Description of Artificial Sequence: Synthetic oligonucleotide
  Antisense strand to SEQ ID NO: 1457000
cuuuggacuacacaaggac

SEQ ID NO: 1457002 - RNA, 19 nt, Artificial Sequence
  Description of Artificial Sequence: Synthetic oligonucleotide
  Sense strand starting at position 3547 of SEQ ID NO: 1243993
ggcuaaguaggagaaaguu

SEQ ID NO: 1457003 - RNA, 19 nt, Artificial Sequence
  Description of Artificial Sequence: Synthetic oligonucleotide
  Antisense strand to SEQ ID NO: 1457002
aacuuucuccuacuuagcc

SEQ ID NO: 1457004 - RNA, 19 nt, Artificial Sequence
  Description of Artificial Sequence: Synthetic oligonucleotide
  Sense strand starting at position 3600 of SEQ ID NO: 1243993
gcuaguuagccgcuguaga

SEQ ID NO: 1457005 - RNA, 19 nt, Artificial Sequence
  Description of Artificial Sequence: Synthetic oligonucleotide
  Antisense strand to SEQ ID NO: 1457004
ucuacagcggcuaacuagc

SEQ ID NO: 1457006 - RNA, 19 nt, Artificial Sequence
  Description of Artificial Sequence: Synthetic oligonucleotide
  Sense strand starting at position 3983 of SEQ ID NO: 1243993
uggccugagucucuaaaca

SEQ ID NO: 1457007 - RNA, 19 nt, Artificial Sequence
  Description of Artificial Sequence: Synthetic oligonucleotide
  Antisense strand to SEQ ID NO: 1457006
uguuuagagacucaggcca

SEQ ID NO: 1457008 - RNA, 19 nt, Artificial Sequence
  Description of Artificial Sequence: Synthetic oligonucleotide
  Sense strand starting at position 300 of SEQ ID NO: 1243994
uagagauggaguuguccca

SEQ ID NO: 1457009 - RNA, 19 nt, Artificial Sequence
  Description of Artificial Sequence: Synthetic oligonucleotide
  Antisense strand to SEQ ID NO: 1457008
ugggacaacuccaucucua

SEQ ID NO: 1457010 - RNA, 19 nt, Artificial Sequence
  Description of Artificial Sequence: Synthetic oligonucleotide
  Sense strand starting at position 736 of SEQ ID NO: 1243994
acucucuccuauguaagua

SEQ ID NO: 1457011 - RNA, 19 nt, Artificial Sequence
  Description of Artificial Sequence: Synthetic oligonucleotide
  Antisense strand to SEQ ID NO: 1457010
uacuuacauaggagagagu

SEQ ID NO: 1457012 - RNA, 19 nt, Artificial Sequence
  Description of Artificial Sequence: Synthetic oligonucleotide
  Sense strand starting at position 740 of SEQ ID NO: 1243994
ucuccuauguaaguaaucu

SEQ ID NO: 1457013 - RNA, 19 nt, Artificial Sequence
  Description of Artificial Sequence: Synthetic oligonucleotide
  Antisense strand to SEQ ID NO: 1457012
agauuacuuacauaggaga

SEQ ID NO: 1457014 - RNA, 19 nt, Artificial Sequence
  Description of Artificial Sequence: Synthetic oligonucleotide
  Sense strand starting at position 744 of SEQ ID NO: 1243994
cuauguaaguaaucucuuu

SEQ ID NO: 1457015 - RNA, 19 nt, Artificial Sequence
  Description of Artificial Sequence: Synthetic oligonucleotide
  Antisense strand to SEQ ID NO: 1457014
aaagagauuacuuacauag

SEQ ID NO: 1457016 - RNA, 19 nt, Artificial Sequence
  Description of Artificial Sequence: Synthetic oligonucleotide
  Sense strand starting at position 1294 of SEQ ID NO: 1243994
cgaucauuggcgugagacc

SEQ ID NO: 1457017 - RNA, 19 nt, Artificial Sequence
  Description of Artificial Sequence: Synthetic oligonucleotide
  Antisense strand to SEQ ID NO: 1457016
ggucucacgccaaugaucg

SEQ ID NO: 1457018 - RNA, 19 nt, Artificial Sequence
  Description of Artificial Sequence: Synthetic oligonucleotide
  Sense strand starting at position 1295 of SEQ ID NO: 1243994
gaucauuggcgugagacca

SEQ ID NO: 1457019 - RNA, 19 nt, Artificial Sequence
  Description of Artificial Sequence: Synthetic oligonucleotide
  Antisense strand to SEQ ID NO: 1457018
uggucucacgccaaugauc

SEQ ID NO: 1457020 - RNA, 19 nt, Artificial Sequence
  Description of Artificial Sequence: Synthetic oligonucleotide
  Sense strand starting at position 1326 of SEQ ID NO: 1243994
gaaggagauucuugcucag

SEQ ID NO: 1457021 - RNA, 19 nt, Artificial Sequence
  Description of Artificial Sequence: Synthetic oligonucleotide
  Antisense strand to SEQ ID NO: 1457020
cugagcaagaaucuccuuc

SEQ ID NO: 1457022 - RNA, 19 nt, Artificial Sequence
  Description of Artificial Sequence: Synthetic oligonucleotide
  Sense strand starting at position 1418 of SEQ ID NO: 1243994
cugagucagugcuccuuua

SEQ ID NO: 1457023 - RNA, 19 nt, Artificial Sequence
  Description of Artificial Sequence: Synthetic oligonucleotide
  Antisense strand to SEQ ID NO: 1457022
uaaaggagcacugacucag

SEQ ID NO: 1457024 - RNA, 19 nt, Artificial Sequence
  Description of Artificial Sequence: Synthetic oligonucleotide
  Sense strand starting at position 1576 of SEQ ID NO: 1243994
cagaguccaccucgcuaaa

SEQ ID NO: 1457025 - RNA, 19 nt, Artificial Sequence
  Description of Artificial Sequence: Synthetic oligonucleotide
  Antisense strand to SEQ ID NO: 1457024
uuuagcgagguggacucug

SEQ ID NO: 1457026 - RNA, 19 nt, Artificial Sequence
  Description of Artificial Sequence: Synthetic oligonucleotide
  Sense strand starting at position 1833 of SEQ ID NO: 1243994
ggcagugugucccucggau

SEQ ID NO: 1457027 - RNA, 19 nt, Artificial Sequence
  Description of Artificial Sequence: Synthetic oligonucleotide
  Antisense strand to SEQ ID NO: 1457026
auccgagggacacacugcc

SEQ ID NO: 1457028 - RNA, 19 nt, Artificial Sequence
  Description of Artificial Sequence: Synthetic oligonucleotide
  Sense strand starting at position 1938 of SEQ ID NO: 1243994
aggcuuguuuacucacuca

SEQ ID NO: 1457029 - RNA, 19 nt, Artificial Sequence
  Description of Artificial Sequence: Synthetic oligonucleotide
  Antisense strand to SEQ ID NO: 1457028
ugagugaguaaacaagccu

SEQ ID NO: 1457030 - RNA, 19 nt, Artificial Sequence
  Description of Artificial Sequence: Synthetic oligonucleotide
  Sense strand starting at position 2088 of SEQ ID NO: 1243994
acugucauuugccgccaaa

SEQ ID NO: 1457031 - RNA, 19 nt, Artificial Sequence
  Description of Artificial Sequence: Synthetic oligonucleotide
  Antisense strand to SEQ ID NO: 1457030
uuuggcggcaaaugacagu

SEQ ID NO: 1457032 - RNA, 19 nt, Artificial Sequence
  Description of Artificial Sequence: Synthetic oligonucleotide
  Sense strand starting at position 2328 of SEQ ID NO: 1243994
ccuaccaguucuccagaca

SEQ ID NO: 1457033 - RNA, 19 nt, Artificial Sequence
  Description of Artificial Sequence: Synthetic oligonucleotide
  Antisense strand to SEQ ID NO: 1457032
ugucuggagaacugguagg

SEQ ID NO: 1457034 - RNA, 19 nt, Artificial Sequence
  Description of Artificial Sequence: Synthetic oligonucleotide
  Sense strand starting at position 2346 of SEQ ID NO: 1243994
accggucuauggguucuaa

SEQ ID NO: 1457035 - RNA, 19 nt, Artificial Sequence
  Description of Artificial Sequence: Synthetic oligonucleotide
  Antisense strand to SEQ ID NO: 1457034
uuagaacccauagaccggu

SEQ ID NO: 1457036 - RNA, 19 nt, Artificial Sequence
  Description of Artificial Sequence: Synthetic oligonucleotide
  Sense strand starting at position 2365 of SEQ ID NO: 1243994
gcccuuuauuuaugucuga

SEQ ID NO: 1457037 - RNA, 19 nt, Artificial Sequence
  Description of Artificial Sequence: Synthetic oligonucleotide
  Antisense strand to SEQ ID NO: 1457036
ucagacauaaauaaagggc

SEQ ID NO: 1457038 - RNA, 19 nt, Artificial Sequence
  Description of Artificial Sequence: Synthetic oligonucleotide
  Sense strand starting at position 2428 of SEQ ID NO: 1243994
auuauagccuuguaucgaa

SEQ ID NO: 1457039 - RNA, 19 nt, Artificial Sequence
  Description of Artificial Sequence: Synthetic oligonucleotide
  Antisense strand to SEQ ID NO: 1457038
uucgauacaaggcuauaau

SEQ ID NO: 1457040 - RNA, 19 nt, Artificial Sequence
  Description of Artificial Sequence: Synthetic oligonucleotide
  Sense strand starting at position 2504 of SEQ ID NO: 1243994
auaagaaucugucagacac

SEQ ID NO: 1457041 - RNA, 19 nt, Artificial Sequence
  Description of Artificial Sequence: Synthetic oligonucleotide
  Antisense strand to SEQ ID NO: 1457040
gugucugacagauucuuau

SEQ ID NO: 1457042 - RNA, 19 nt, Artificial Sequence
  Description of Artificial Sequence: Synthetic oligonucleotide
  Sense strand starting at position 2542 of SEQ ID NO: 1243994
aaguuagcaucacuaguga

SEQ ID NO: 1457043 - RNA, 19 nt, Artificial Sequence
  Description of Artificial Sequence: Synthetic oligonucleotide
  Antisense strand to SEQ ID NO: 1457042
ucacuagugaugcuaacuu

SEQ ID NO: 1457044 - RNA, 19 nt, Artificial Sequence
  Description of Artificial Sequence: Synthetic oligonucleotide
  Sense strand starting at position 2546 of SEQ ID NO: 1243994
uagcaucacuagugauaag

SEQ ID NO: 1457045 - RNA, 19 nt, Artificial Sequence
  Description of Artificial Sequence: Synthetic oligonucleotide
  Antisense strand to SEQ ID NO: 1457044
cuuaucacuagugaugcua

SEQ ID NO: 1457046 - RNA, 19 nt, Artificial Sequence
  Description of Artificial Sequence: Synthetic oligonucleotide
  Sense strand starting at position 2556 of SEQ ID NO: 1243994
agugauaagagguauuguu

SEQ ID NO: 1457047 - RNA, 19 nt, Artificial Sequence
  Description of Artificial Sequence: Synthetic oligonucleotide
  Antisense strand to SEQ ID NO: 1457046
aacaauaccucuuaucacu

SEQ ID NO: 1457048 - RNA, 19 nt, Artificial Sequence
  Description of Artificial Sequence: Synthetic oligonucleotide
  Sense strand starting at position 2611 of SEQ ID NO: 1243994
ggagucucgcuuuguuacu

SEQ ID NO: 1457049 - RNA, 19 nt, Artificial Sequence
  Description of Artificial Sequence: Synthetic oligonucleotide
  Antisense strand to SEQ ID NO: 1457048
aguaacaaagcgagacucc

SEQ ID NO: 1457050 - RNA, 19 nt, Artificial Sequence
  Description of Artificial Sequence: Synthetic oligonucleotide
  Sense strand starting at position 2613 of SEQ ID NO: 1243994
agucucgcuuuguuacuua

SEQ ID NO: 1457051 - RNA, 19 nt, Artificial Sequence
  Description of Artificial Sequence: Synthetic oligonucleotide
  Antisense strand to SEQ ID NO: 1457050
uaaguaacaaagcgagacu

SEQ ID NO: 1457052 - RNA, 19 nt, Artificial Sequence
  Description of Artificial Sequence: Synthetic oligonucleotide
  Sense strand starting at position 2617 of SEQ ID NO: 1243994
ucgcuuuguuacuuacaca

SEQ ID NO: 1457053 - RNA, 19 nt, Artificial Sequence
  Description of Artificial Sequence: Synthetic oligonucleotide
  Antisense strand to SEQ ID NO: 1457052
uguguaaguaacaaagcga

SEQ ID NO: 1457054 - RNA, 19 nt, Artificial Sequence
  Description of Artificial Sequence: Synthetic oligonucleotide
  Sense strand starting at position 3019 of SEQ ID NO: 1243994
ccagcugagagguauucuu

SEQ ID NO: 1457055 - RNA, 19 nt, Artificial Sequence
  Description of Artificial Sequence: Synthetic oligonucleotide
  Antisense strand to SEQ ID NO: 1457054
aagaauaccucucagcugg

SEQ ID NO: 1457056 - RNA, 19 nt, Artificial Sequence
  Description of Artificial Sequence: Synthetic oligonucleotide
  Sense strand starting at position 3027 of SEQ ID NO: 1243994
gagguauucuuaccagguc

SEQ ID NO: 1457057 - RNA, 19 nt, Artificial Sequence
  Description of Artificial Sequence: Synthetic oligonucleotide
  Antisense strand to SEQ ID NO: 1457056
gaccugguaagaauaccuc

SEQ ID NO: 1457058 - RNA, 19 nt, Artificial Sequence
  Description of Artificial Sequence: Synthetic oligonucleotide
  Sense strand starting at position 3087 of SEQ ID NO: 1243994
ugugguauucuugacgaac

SEQ ID NO: 1457059 - RNA, 19 nt, Artificial Sequence
  Description of Artificial Sequence: Synthetic oligonucleotide
  Antisense strand to SEQ ID NO: 1457058
guucgucaagaauaccaca

SEQ ID NO: 1457060 - RNA, 19 nt, Artificial Sequence
  Description of Artificial Sequence: Synthetic oligonucleotide
  Sense strand starting at position 3281 of SEQ ID NO: 1243994
acuacuauacccggcaaau

SEQ ID NO: 1457061 - RNA, 19 nt, Artificial Sequence
  Description of Artificial Sequence: Synthetic oligonucleotide
  Antisense strand to SEQ ID NO: 1457060
auuugccggguauaguagu

SEQ ID NO: 1457062 - RNA, 19 nt, Artificial Sequence
  Description of Artificial Sequence: Synthetic oligonucleotide
  Sense strand starting at position 3514 of SEQ ID NO: 1243994
gugucaagaucaugaaaga

SEQ ID NO: 1457063 - RNA, 19 nt, Artificial Sequence
  Description of Artificial Sequence: Synthetic oligonucleotide
  Antisense strand to SEQ ID NO: 1457062
ucuuucaugaucuugacac

SEQ ID NO: 1457064 - RNA, 19 nt, Artificial Sequence
  Description of Artificial Sequence: Synthetic oligonucleotide
  Sense strand starting at position 3591 of SEQ ID NO: 1243994
augugugauccuggcuuga

SEQ ID NO: 1457065 - RNA, 19 nt, Artificial Sequence
  Description of Artificial Sequence: Synthetic oligonucleotide
  Antisense strand to SEQ ID NO: 1457064
ucaagccaggaucacacau

SEQ ID NO: 1457066 - RNA, 19 nt, Artificial Sequence
  Description of Artificial Sequence: Synthetic oligonucleotide
  Sense strand starting at position 3593 of SEQ ID NO: 1243994
gugugauccuggcuugaau

SEQ ID NO: 1457067 - RNA, 19 nt, Artificial Sequence
  Description of Artificial Sequence: Synthetic oligonucleotide
  Antisense strand to SEQ ID NO: 1457066
auucaagccaggaucacac

SEQ ID NO: 1457068 - RNA, 19 nt, Artificial Sequence
  Description of Artificial Sequence: Synthetic oligonucleotide
  Sense strand starting at position 3605 of SEQ ID NO: 1243994
cuugaauccugguccagaa

SEQ ID NO: 1457069 - RNA, 19 nt, Artificial Sequence
  Description of Artificial Sequence: Synthetic oligonucleotide
  Antisense strand to SEQ ID NO: 1457068
uucuggaccaggauucaag

SEQ ID NO: 1457070 - RNA, 19 nt, Artificial Sequence
  Description of Artificial Sequence: Synthetic oligonucleotide
  Sense strand starting at position 3627 of SEQ ID NO: 1243994
gaacaccagugggauaauu

SEQ ID NO: 1457071 - RNA, 19 nt, Artificial Sequence
  Description of Artificial Sequence: Synthetic oligonucleotide
  Antisense strand to SEQ ID NO: 1457070
aauuaucccacugguguuc

SEQ ID NO: 1457072 - RNA, 19 nt, Artificial Sequence
  Description of Artificial Sequence: Synthetic oligonucleotide
  Sense strand starting at position 3637 of SEQ ID NO: 1243994
gggauaauuugaugaaauu

SEQ ID NO: 1457073 - RNA, 19 nt, Artificial Sequence
  Description of Artificial Sequence: Synthetic oligonucleotide
  Antisense strand to SEQ ID NO: 1457072
aauuucaucaaauuauccc

SEQ ID NO: 1457074 - RNA, 19 nt, Artificial Sequence
  Description of Artificial Sequence: Synthetic oligonucleotide
  Sense strand starting at position 3710 of SEQ ID NO: 1243994
uaaucauuguaauugagga

SEQ ID NO: 1457075 - RNA, 19 nt, Artificial Sequence
  Description of Artificial Sequence: Synthetic oligonucleotide
  Antisense strand to SEQ ID NO: 1457074
uccucaauuacaaugauua

SEQ ID NO: 1457076 - RNA, 19 nt, Artificial Sequence
  Description of Artificial Sequence: Synthetic oligonucleotide
  Sense strand starting at position 3714 of SEQ ID NO: 1243994
cauuguaauugaggaaguu

SEQ ID NO: 1457077 - RNA, 19 nt, Artificial Sequence
  Description of Artificial Sequence: Synthetic oligonucleotide
  Antisense strand to SEQ ID NO: 1457076
aacuuccucaauuacaaug

SEQ ID NO: 1457078 - RNA, 19 nt, Artificial Sequence
  Description of Artificial Sequence: Synthetic oligonucleotide
  Sense strand starting at position 3724 of SEQ ID NO: 1243994
gaggaaguuugauggacau

SEQ ID NO: 1457079 - RNA, 19 nt, Artificial Sequence
  Description of Artificial Sequence: Synthetic oligonucleotide
  Antisense strand to SEQ ID NO: 1457078
auguccaucaaacuuccuc

SEQ ID NO: 1457080 - RNA, 19 nt, Artificial Sequence
  Description of Artificial Sequence: Synthetic oligonucleotide
  Sense strand starting at position 3853 of SEQ ID NO: 1243994
ugucucaaaguguauaauu

SEQ ID NO: 1457081 - RNA, 19 nt, Artificial Sequence
  Description of Artificial Sequence: Synthetic oligonucleotide
  Antisense strand to SEQ ID NO: 1457080
aauuauacacuuugagaca

SEQ ID NO: 1457082 - RNA, 19 nt, Artificial Sequence
  Description of Artificial Sequence: Synthetic oligonucleotide
  Sense strand starting at position 3955 of SEQ ID NO: 1243994
agguuauucuggccuaaag

SEQ ID NO: 1457083 - RNA, 19 nt, Artificial Sequence
  Description of Artificial Sequence: Synthetic oligonucleotide
  Antisense strand to SEQ ID NO: 1457082
cuuuaggccagaauaaccu

SEQ ID NO: 1457084 - RNA, 19 nt, Artificial Sequence
  Description of Artificial Sequence: Synthetic oligonucleotide
  Sense strand starting at position 3957 of SEQ ID NO: 1243994
guuauucuggccuaaagga

SEQ ID NO: 1457085 - RNA, 19 nt, Artificial Sequence
  Description of Artificial Sequence: Synthetic oligonucleotide
  Antisense strand to SEQ ID NO: 1457084
uccuuuaggccagaauaac

SEQ ID NO: 1457086 - RNA, 19 nt, Artificial Sequence
  Description of Artificial Sequence: Synthetic oligonucleotide
  Sense strand starting at position 3977 of SEQ ID NO: 1243994
uuagaagacuugccuuaca

SEQ ID NO: 1457087 - RNA, 19 nt, Artificial Sequence
  Description of Artificial Sequence: Synthetic oligonucleotide
  Antisense strand to SEQ ID NO: 1457086
uguaaggcaagucuucuaa

SEQ ID NO: 1457088 - RNA, 19 nt, Artificial Sequence
  Description of Artificial Sequence: Synthetic oligonucleotide
  Sense strand starting at position 3 of SEQ ID NO: 1243995
gucccagcuuuccuauuua

SEQ ID NO: 1457089 - RNA, 19 nt, Artificial Sequence
  Description of Artificial Sequence: Synthetic oligonucleotide
  Antisense strand to SEQ ID NO: 1457088
uaaauaggaaagcugggac

SEQ ID NO: 1457090 - RNA, 19 nt, Artificial Sequence
  Description of Artificial Sequence: Synthetic oligonucleotide
  Sense strand starting at position 53 of SEQ ID NO: 1243995
ggaaccaucaccuggguga

SEQ ID NO: 1457091 - RNA, 19 nt, Artificial Sequence
  Description of Artificial Sequence: Synthetic oligonucleotide
  Antisense strand to SEQ ID NO: 1457090
ucacccaggugaugguucc

SEQ ID NO: 1457092 - RNA, 19 nt, Artificial Sequence
  Description of Artificial Sequence: Synthetic oligonucleotide
  Sense strand starting at position 262 of SEQ ID NO: 1243995
ggguacuuccuggagcuga

SEQ ID NO: 1457093 - RNA, 19 nt, Artificial Sequence
  Description of Artificial Sequence: Synthetic oligonucleotide
  Antisense strand to SEQ ID NO: 1457092
ucagcuccaggaaguaccc

SEQ ID NO: 1457094 - RNA, 19 nt, Artificial Sequence
  Description of Artificial Sequence: Synthetic oligonucleotide
  Sense strand starting at position 333 of SEQ ID NO: 1243995
aggagcaucauccggagua

SEQ ID NO: 1457095 - RNA, 19 nt, Artificial Sequence
  Description of Artificial Sequence: Synthetic oligonucleotide
  Antisense strand to SEQ ID NO: 1457094
uacuccggaugaugcuccu

SEQ ID NO: 1457096 - RNA, 19 nt, Artificial Sequence
  Description of Artificial Sequence: Synthetic oligonucleotide
  Sense strand starting at position 334 of SEQ ID NO: 1243995
ggagcaucauccggaguaa

SEQ ID NO: 1457097 - RNA, 19 nt, Artificial Sequence
  Description of Artificial Sequence: Synthetic oligonucleotide
  Antisense strand to SEQ ID NO: 1457096
uuacuccggaugaugcucc

SEQ ID NO: 1457098 - RNA, 19 nt, Artificial Sequence
  Description of Artificial Sequence: Synthetic oligonucleotide
  Sense strand starting at position 335 of SEQ ID NO: 1243995
gagcaucauccggaguaag

SEQ ID NO: 1457099 - RNA, 19 nt, Artificial Sequence
  Description of Artificial Sequence: Synthetic oligonucleotide
  Antisense strand to SEQ ID NO: 1457098
cuuacuccggaugaugcuc

SEQ ID NO: 1457100 - RNA, 19 nt, Artificial Sequence
  Description of Artificial Sequence: Synthetic oligonucleotide
  Sense strand starting at position 474 of SEQ ID NO: 1243995
gcggcauacucauccuaca

SEQ ID NO: 1457101 - RNA, 19 nt, Artificial Sequence
  Description of Artificial Sequence: Synthetic oligonucleotide
  Antisense strand to SEQ ID NO: 1457100
uguaggaugaguaugccgc

SEQ ID NO: 1457102 - RNA, 19 nt, Artificial Sequence
  Description of Artificial Sequence: Synthetic oligonucleotide
  Sense strand starting at position 520 of SEQ ID NO: 1243995
cgcucaagggcuuggagaa

SEQ ID NO: 1457103 - RNA, 19 nt, Artificial Sequence
  Description of Artificial Sequence: Synthetic oligonucleotide
  Antisense strand to SEQ ID NO: 1457102
uucuccaagcccuugagcg

SEQ ID NO: 1457104 - RNA, 19 nt, Artificial Sequence
  Description of Artificial Sequence: Synthetic oligonucleotide
  Sense strand starting at position 651 of SEQ ID NO: 1243995
gaagaaugaggcugccaca

SEQ ID NO: 1457105 - RNA, 19 nt, Artificial Sequence
  Description of Artificial Sequence: Synthetic oligonucleotide
  Antisense strand to SEQ ID NO: 1457104
uguggcagccucauucuuc

SEQ ID NO: 1457106 - RNA, 19 nt, Artificial Sequence
  Description of Artificial Sequence: Synthetic oligonucleotide
  Sense strand starting at position 897 of SEQ ID NO: 1243995
gaagacgggucuuucucua

SEQ ID NO: 1457107 - RNA, 19 nt, Artificial Sequence
  Description of Artificial Sequence: Synthetic oligonucleotide
  Antisense strand to SEQ ID NO: 1457106
uagagaaagacccgucuuc

SEQ ID NO: 1457108 - RNA, 19 nt, Artificial Sequence
  Description of Artificial Sequence: Synthetic oligonucleotide
  Sense strand starting at position 909 of SEQ ID NO: 1243995
uucucuagcucugggugau

SEQ ID NO: 1457109 - RNA, 19 nt, Artificial Sequence
  Description of Artificial Sequence: Synthetic oligonucleotide
  Antisense strand to SEQ ID NO: 1457108
aucacccagagcuagagaa

SEQ ID NO: 1457110 - RNA, 19 nt, Artificial Sequence
  Description of Artificial Sequence: Synthetic oligonucleotide
  Sense strand starting at position 2200 of SEQ ID NO: 1243995
gucccugagaucuguccga

SEQ ID NO: 1457111 - RNA, 19 nt, Artificial Sequence
  Description of Artificial Sequence: Synthetic oligonucleotide
  Antisense strand to SEQ ID NO: 1457110
ucggacagaucucagggac

SEQ ID NO: 1457112 - RNA, 19 nt, Artificial Sequence
  Description of Artificial Sequence: Synthetic oligonucleotide
  Sense strand starting at position 2204 of SEQ ID NO: 1243995
cugagaucuguccgagcau

SEQ ID NO: 1457113 - RNA, 19 nt, Artificial Sequence
  Description of Artificial Sequence: Synthetic oligonucleotide
  Antisense strand to SEQ ID NO: 1457112
augcucggacagaucucag

SEQ ID NO: 1457114 - RNA, 19 nt, Artificial Sequence
  Description of Artificial Sequence: Synthetic oligonucleotide
  Sense strand starting at position 2205 of SEQ ID NO: 1243995
ugagaucuguccgagcauu

SEQ ID NO: 1457115 - RNA, 19 nt, Artificial Sequence
  Description of Artificial Sequence: Synthetic oligonucleotide
  Antisense strand to SEQ ID NO: 1457114
aaugcucggacagaucuca

SEQ ID NO: 1457116 - RNA, 19 nt, Artificial Sequence
  Description of Artificial Sequence: Synthetic oligonucleotide
  Sense strand starting at position 2234 of SEQ ID NO: 1243995
gacccugacuauucguagu

SEQ ID NO: 1457117 - RNA, 19 nt, Artificial Sequence
  Description of Artificial Sequence: Synthetic oligonucleotide
  Antisense strand to SEQ ID NO: 1457116
acuacgaauagucaggguc

SEQ ID NO: 1457118 - RNA, 19 nt, Artificial Sequence
  Description of Artificial Sequence: Synthetic oligonucleotide
  Sense strand starting at position 2273 of SEQ ID NO: 1243995
guacgugacacacaugaca

SEQ ID NO: 1457119 - RNA, 19 nt, Artificial Sequence
  Description of Artificial Sequence: Synthetic oligonucleotide
  Antisense strand to SEQ ID NO: 1457118
ugucaugugugucacguac

SEQ ID NO: 1457120 - RNA, 19 nt, Artificial Sequence
  Description of Artificial Sequence: Synthetic oligonucleotide
  Sense strand starting at position 2301 of SEQ ID NO: 1243995
gucugucucugccaacaga

SEQ ID NO: 1457121 - RNA, 19 nt, Artificial Sequence
  Description of Artificial Sequence: Synthetic oligonucleotide
  Antisense strand to SEQ ID NO: 1457120
ucuguuggcagagacagac

SEQ ID NO: 1457122 - RNA, 19 nt, Artificial Sequence
  Description of Artificial Sequence: Synthetic oligonucleotide
  Sense strand starting at position 2334 of SEQ ID NO: 1243995
cguagagacguccucguuu

SEQ ID NO: 1457123 - RNA, 19 nt, Artificial Sequence
  Description of Artificial Sequence: Synthetic oligonucleotide
  Antisense strand to SEQ ID NO: 1457122
aaacgaggacgucucuacg

SEQ ID NO: 1457124 - RNA, 19 nt, Artificial Sequence
  Description of Artificial Sequence: Synthetic oligonucleotide
  Sense strand starting at position 2379 of SEQ ID NO: 1243995
gggcaaugcuuggcacaga

SEQ ID NO: 1457125 - RNA, 19 nt, Artificial Sequence
  Description of Artificial Sequence: Synthetic oligonucleotide
  Antisense strand to SEQ ID NO: 1457124
ucugugccaagcauugccc

SEQ ID NO: 1457126 - RNA, 19 nt, Artificial Sequence
  Description of Artificial Sequence: Synthetic oligonucleotide
  Sense strand starting at position 2380 of SEQ ID NO: 1243995
ggcaaugcuuggcacagaa

SEQ ID NO: 1457127 - RNA, 19 nt, Artificial Sequence
  Description of Artificial Sequence: Synthetic oligonucleotide
  Antisense strand to SEQ ID NO: 1457126
uucugugccaagcauugcc

SEQ ID NO: 1457128 - RNA, 19 nt, Artificial Sequence
  Description of Artificial Sequence: Synthetic oligonucleotide
  Sense strand starting at position 2393 of SEQ ID NO: 1243995
acagaaacaucugggaauu

SEQ ID NO: 1457129 - RNA, 19 nt, Artificial Sequence
  Description of Artificial Sequence: Synthetic oligonucleotide
  Antisense strand to SEQ ID NO: 1457128
aauucccagauguuucugu

SEQ ID NO: 1457130 - RNA, 19 nt, Artificial Sequence
  Description of Artificial Sequence: Synthetic oligonucleotide
  Sense strand starting at position 2404 of SEQ ID NO: 1243995
ugggaauuccuagggcaga

SEQ ID NO: 1457131 - RNA, 19 nt, Artificial Sequence
  Description of Artificial Sequence: Synthetic oligonucleotide
  Antisense strand to SEQ ID NO: 1457130
ucugcccuaggaauuccca

SEQ ID NO: 1457132 - RNA, 19 nt, Artificial Sequence
  Description of Artificial Sequence: Synthetic oligonucleotide
  Sense strand starting at position 2405 of SEQ ID NO: 1243995
gggaauuccuagggcagaa

SEQ ID NO: 1457133 - RNA, 19 nt, Artificial Sequence
  Description of Artificial Sequence: Synthetic oligonucleotide
  Antisense strand to SEQ ID NO: 1457132
uucugcccuaggaauuccc

SEQ ID NO: 1457134 - RNA, 19 nt, Artificial Sequence
  Description of Artificial Sequence: Synthetic oligonucleotide
  Sense strand starting at position 2480 of SEQ ID NO: 1243995
ugaguauggcuucagcaga

SEQ ID NO: 1457135 - RNA, 19 nt, Artificial Sequence
  Description of Artificial Sequence: Synthetic oligonucleotide
  Antisense strand to SEQ ID NO: 1457134
ucugcugaagccauacuca

SEQ ID NO: 1457136 - RNA, 19 nt, Artificial Sequence
  Description of Artificial Sequence: Synthetic oligonucleotide
  Sense strand starting at position 2672 of SEQ ID NO: 1243995
agccaagcccucugagaug

SEQ ID NO: 1457137 - RNA, 19 nt, Artificial Sequence
  Description of Artificial Sequence: Synthetic oligonucleotide
  Antisense strand to SEQ ID NO: 1457136
caucucagagggcuuggcu

SEQ ID NO: 1457138 - RNA, 19 nt, Artificial Sequence
  Description of Artificial Sequence: Synthetic oligonucleotide
  Sense strand starting at position 2863 of SEQ ID NO: 1243995
acuuaagggaucugguaug

SEQ ID NO: 1457139 - RNA, 19 nt, Artificial Sequence
  Description of Artificial Sequence: Synthetic oligonucleotide
  Antisense strand to SEQ ID NO: 1457138
cauaccagaucccuuaagu

SEQ ID NO: 1457140 - RNA, 19 nt, Artificial Sequence
  Description of Artificial Sequence: Synthetic oligonucleotide
  Sense strand starting at position 2874 of SEQ ID NO: 1243995
cugguauggugaggacagu

SEQ ID NO: 1457141 - RNA, 19 nt, Artificial Sequence
  Description of Artificial Sequence: Synthetic oligonucleotide
  Antisense strand to SEQ ID NO: 1457140
acuguccucaccauaccag

SEQ ID NO: 1457142 - RNA, 19 nt, Artificial Sequence
  Description of Artificial Sequence: Synthetic oligonucleotide
  Sense strand starting at position 2892 of SEQ ID NO: 1243995
uggcaucuuuagcaggaga

SEQ ID NO: 1457143 - RNA, 19 nt, Artificial Sequence
  Description of Artificial Sequence: Synthetic oligonucleotide
  Antisense strand to SEQ ID NO: 1457142
ucuccugcuaaagaugcca

SEQ ID NO: 1457144 - RNA, 19 nt, Artificial Sequence
  Description of Artificial Sequence: Synthetic oligonucleotide
  Sense strand starting at position 2960 of SEQ ID NO: 1243995
ggauccuaaugacauugau

SEQ ID NO: 1457145 - RNA, 19 nt, Artificial Sequence
  Description of Artificial Sequence: Synthetic oligonucleotide
  Antisense strand to SEQ ID NO: 1457144
aucaaugucauuaggaucc

SEQ ID NO: 1457146 - RNA, 19 nt, Artificial Sequence
  Description of Artificial Sequence: Synthetic oligonucleotide
  Sense strand starting at position 3195 of SEQ ID NO: 1243995
caugaauucguaugagcuu

SEQ ID NO: 1457147 - RNA, 19 nt, Artificial Sequence
  Description of Artificial Sequence: Synthetic oligonucleotide
  Antisense strand to SEQ ID NO: 1457146
aagcucauacgaauucaug

SEQ ID NO: 1457148 - RNA, 19 nt, Artificial Sequence
  Description of Artificial Sequence: Synthetic oligonucleotide
  Sense strand starting at position 3196 of SEQ ID NO: 1243995
augaauucguaugagcuua

SEQ ID NO: 1457149 - RNA, 19 nt, Artificial Sequence
  Description of Artificial Sequence: Synthetic oligonucleotide
  Antisense strand to SEQ ID NO: 1457148
uaagcucauacgaauucau

SEQ ID NO: 1457150 - RNA, 19 nt, Artificial Sequence
  Description of Artificial Sequence: Synthetic oligonucleotide
  Sense strand starting at position 3198 of SEQ ID NO: 1243995
gaauucguaugagcuuauu

SEQ ID NO: 1457151 - RNA, 19 nt, Artificial Sequence
  Description of Artificial Sequence: Synthetic oligonucleotide
  Antisense strand to SEQ ID NO: 1457150
aauaagcucauacgaauuc

SEQ ID NO: 1457152 - RNA, 19 nt, Artificial Sequence
  Description of Artificial Sequence: Synthetic oligonucleotide
  Sense strand starting at position 3204 of SEQ ID NO: 1243995
guaugagcuuauuccuuua

SEQ ID NO: 1457153 - RNA, 19 nt, Artificial Sequence
  Description of Artificial Sequence: Synthetic oligonucleotide
  Antisense strand to SEQ ID NO: 1457152
uaaaggaauaagcucauac

SEQ ID NO: 1457154 - RNA, 19 nt, Artificial Sequence
  Description of Artificial Sequence: Synthetic oligonucleotide
  Sense strand starting at position 3249 of SEQ ID NO: 1243995
uuaccagcucaguauucua

SEQ ID NO: 1457155 - RNA, 19 nt, Artificial Sequence
  Description of Artificial Sequence: Synthetic oligonucleotide
  Antisense strand to SEQ ID NO: 1457154
uagaauacugagcugguaa

SEQ ID NO: 1457156 - RNA, 19 nt, Artificial Sequence
  Description of Artificial Sequence: Synthetic oligonucleotide
  Sense strand starting at position 3254 of SEQ ID NO: 1243995
agcucaguauucuaaggga

SEQ ID NO: 1457157 - RNA, 19 nt, Artificial Sequence
  Description of Artificial Sequence: Synthetic oligonucleotide
  Antisense strand to SEQ ID NO: 1457156
ucccuuagaauacugagcu

SEQ ID NO: 1457158 - RNA, 19 nt, Artificial Sequence
  Description of Artificial Sequence: Synthetic oligonucleotide
  Sense strand starting at position 3257 of SEQ ID NO: 1243995
ucaguauucuaagggacug

SEQ ID NO: 1457159 - RNA, 19 nt, Artificial Sequence
  Description of Artificial Sequence: Synthetic oligonucleotide
  Antisense strand to SEQ ID NO: 1457158
cagucccuuagaauacuga

SEQ ID NO: 1457160 - RNA, 19 nt, Artificial Sequence
  Description of Artificial Sequence: Synthetic oligonucleotide
  Sense strand starting at position 3328 of SEQ ID NO: 1243995
gcagguuaucauugacuuu

SEQ ID NO: 1457161 - RNA, 19 nt, Artificial Sequence
  Description of Artificial Sequence: Synthetic oligonucleotide
  Antisense strand to SEQ ID NO: 1457160
aaagucaaugauaaccugc

SEQ ID NO: 1457162 - RNA, 19 nt, Artificial Sequence
  Description of Artificial Sequence: Synthetic oligonucleotide
  Sense strand starting at position 3568 of SEQ ID NO: 1243995
acaagcuauucgggagacu

SEQ ID NO: 1457163 - RNA, 19 nt, Artificial Sequence
  Description of Artificial Sequence: Synthetic oligonucleotide
  Antisense strand to SEQ ID NO: 1457162
agucucccgaauagcuugu

SEQ ID NO: 1457164 - RNA, 19 nt, Artificial Sequence
  Description of Artificial Sequence: Synthetic oligonucleotide
  Sense strand starting at position 3804 of SEQ ID NO: 1243995
ccaggagcuucuccaaaug

SEQ ID NO: 1457165 - RNA, 19 nt, Artificial Sequence
  Description of Artificial Sequence: Synthetic oligonucleotide
  Antisense strand to SEQ ID NO: 1457164
cauuuggagaagcuccugg

SEQ ID NO: 1457166 - RNA, 19 nt, Artificial Sequence
  Description of Artificial Sequence: Synthetic oligonucleotide
  Sense strand starting at position 3821 of SEQ ID NO: 1243995
ugcaaugguuuccaugaga

SEQ ID NO: 1457167 - RNA, 19 nt, Artificial Sequence
  Description of Artificial Sequence: Synthetic oligonucleotide
  Antisense strand to SEQ ID NO: 1457166
ucucauggaaaccauugca

SEQ ID NO: 1457168 - RNA, 19 nt, Artificial Sequence
  Description of Artificial Sequence: Synthetic oligonucleotide
  Sense strand starting at position 451 of SEQ ID NO: 1243996
cuaucagcucuuuaaugag

SEQ ID NO: 1457169 - RNA, 19 nt, Artificial Sequence
  Description of Artificial Sequence: Synthetic oligonucleotide
  Antisense strand to SEQ ID NO: 1457168
cucauuaaagagcugauag

SEQ ID NO: 1457170 - RNA, 19 nt, Artificial Sequence
  Description of Artificial Sequence: Synthetic oligonucleotide
  Sense strand starting at position 457 of SEQ ID NO: 1243996
gcucuuuaaugagaggaua

SEQ ID NO: 1457171 - RNA, 19 nt, Artificial Sequence
  Description of Artificial Sequence: Synthetic oligonucleotide
  Antisense strand to SEQ ID NO: 1457170
uauccucucauuaaagagc

SEQ ID NO: 1457172 - RNA, 19 nt, Artificial Sequence
  Description of Artificial Sequence: Synthetic oligonucleotide
  Sense strand starting at position 491 of SEQ ID NO: 1243996
cuugaaugcugguucugaa

SEQ ID NO: 1457173 - RNA, 19 nt, Artificial Sequence
  Description of Artificial Sequence: Synthetic oligonucleotide
  Antisense strand to SEQ ID NO: 1457172
uucagaaccagcauucaag

SEQ ID NO: 1457174 - RNA, 19 nt, Artificial Sequence
  Description of Artificial Sequence: Synthetic oligonucleotide
  Sense strand starting at position 504 of SEQ ID NO: 1243996
ucugaaaguuuggcuauac

SEQ ID NO: 1457175 - RNA, 19 nt, Artificial Sequence
  Description of Artificial Sequence: Synthetic oligonucleotide
  Antisense strand to SEQ ID NO: 1457174
guauagccaaacuuucaga

SEQ ID NO: 1457176 - RNA, 19 nt, Artificial Sequence
  Description of Artificial Sequence: Synthetic oligonucleotide
  Sense strand starting at position 576 of SEQ ID NO: 1243996
ccuacauaucuggguaucu

SEQ ID NO: 1457177 - RNA, 19 nt, Artificial Sequence
  Description of Artificial Sequence: Synthetic oligonucleotide
  Antisense strand to SEQ ID NO: 1457176
agauacccagauauguagg

SEQ ID NO: 1457178 - RNA, 19 nt, Artificial Sequence
  Description of Artificial Sequence: Synthetic oligonucleotide
  Sense strand starting at position 585 of SEQ ID NO: 1243996
cuggguaucugacuuauca

SEQ ID NO: 1457179 - RNA, 19 nt, Artificial Sequence
  Description of Artificial Sequence: Synthetic oligonucleotide
  Antisense strand to SEQ ID NO: 1457178
ugauaagucagauacccag

SEQ ID NO: 1457180 - RNA, 19 nt, Artificial Sequence
  Description of Artificial Sequence: Synthetic oligonucleotide
  Sense strand starting at position 589 of SEQ ID NO: 1243996
guaucugacuuaucaauga

SEQ ID NO: 1457181 - RNA, 19 nt, Artificial Sequence
  Description of Artificial Sequence: Synthetic oligonucleotide
  Antisense strand to SEQ ID NO: 1457180
ucauugauaagucagauac

SEQ ID NO: 1457182 - RNA, 19 nt, Artificial Sequence
  Description of Artificial Sequence: Synthetic oligonucleotide
  Sense strand starting at position 593 of SEQ ID NO: 1243996
cugacuuaucaaugaaagc

SEQ ID NO: 1457183 - RNA, 19 nt, Artificial Sequence
  Description of Artificial Sequence: Synthetic oligonucleotide
  Antisense strand to SEQ ID NO: 1457182
gcuuucauugauaagucag

SEQ ID NO: 1457184 - RNA, 19 nt, Artificial Sequence
  Description of Artificial Sequence: Synthetic oligonucleotide
  Sense strand starting at position 647 of SEQ ID NO: 1243996
aucuguguuccucaggcau

SEQ ID NO: 1457185 - RNA, 19 nt, Artificial Sequence
  Description of Artificial Sequence: Synthetic oligonucleotide
  Antisense strand to SEQ ID NO: 1457184
augccugaggaacacagau

SEQ ID NO: 1457186 - RNA, 19 nt, Artificial Sequence
  Description of Artificial Sequence: Synthetic oligonucleotide
  Sense strand starting at position 970 of SEQ ID NO: 1243996
gccagaaugcuggauucua

SEQ ID NO: 1457187 - RNA, 19 nt, Artificial Sequence
  Description of Artificial Sequence: Synthetic oligonucleotide
  Antisense strand to SEQ ID NO: 1457186
uagaauccagcauucuggc

SEQ ID NO: 1457188 - RNA, 19 nt, Artificial Sequence
  Description of Artificial Sequence: Synthetic oligonucleotide
  Sense strand starting at position 1058 of SEQ ID NO: 1243996
gaaugcuuauagcuuugua

SEQ ID NO: 1457189 - RNA, 19 nt, Artificial Sequence
  Description of Artificial Sequence: Synthetic oligonucleotide
  Antisense strand to SEQ ID NO: 1457188
uacaaagcuauaagcauuc

SEQ ID NO: 1457190 - RNA, 19 nt, Artificial Sequence
  Description of Artificial Sequence: Synthetic oligonucleotide
  Sense strand starting at position 1061 of SEQ ID NO: 1243996
ugcuuauagcuuuguagau

SEQ ID NO: 1457191 - RNA, 19 nt, Artificial Sequence
  Description of Artificial Sequence: Synthetic oligonucleotide
  Antisense strand to SEQ ID NO: 1457190
aucuacaaagcuauaagca

SEQ ID NO: 1457192 - RNA, 19 nt, Artificial Sequence
  Description of Artificial Sequence: Synthetic oligonucleotide
  Sense strand starting at position 1062 of SEQ ID NO: 1243996
gcuuauagcuuuguagaua

SEQ ID NO: 1457193 - RNA, 19 nt, Artificial Sequence
  Description of Artificial Sequence: Synthetic oligonucleotide
  Antisense strand to SEQ ID NO: 1457192
uaucuacaaagcuauaagc

SEQ ID NO: 1457194 - RNA, 19 nt, Artificial Sequence
  Description of Artificial Sequence: Synthetic oligonucleotide
  Sense strand starting at position 1088 of SEQ ID NO: 1243996
gaguaugagcgucacauac

SEQ ID NO: 1457195 - RNA, 19 nt, Artificial Sequence
  Description of Artificial Sequence: Synthetic oligonucleotide
  Antisense strand to SEQ ID NO: 1457194
guaugugacgcucauacuc

SEQ ID NO: 1457196 - RNA, 19 nt, Artificial Sequence
  Description of Artificial Sequence: Synthetic oligonucleotide
  Sense strand starting at position 1149 of SEQ ID NO: 1243996
uggucaggugaguaagaau

SEQ ID NO: 1457197 - RNA, 19 nt, Artificial Sequence
  Description of Artificial Sequence: Synthetic oligonucleotide
  Antisense strand to SEQ ID NO: 1457196
auucuuacucaccugacca

SEQ ID NO: 1457198 - RNA, 19 nt, Artificial Sequence
  Description of Artificial Sequence: Synthetic oligonucleotide
  Sense strand starting at position 1180 of SEQ ID NO: 1243996
cugugaguggaacggaaau

SEQ ID NO: 1457199 - RNA, 19 nt, Artificial Sequence
  Description of Artificial Sequence: Synthetic oligonucleotide
  Antisense strand to SEQ ID NO: 1457198
auuuccguuccacucacag

SEQ ID NO: 1457200 - RNA, 19 nt, Artificial Sequence
  Description of Artificial Sequence: Synthetic oligonucleotide
  Sense strand starting at position 1311 of SEQ ID NO: 1243996
ugaugaaccucgucuuugu

SEQ ID NO: 1457201 - RNA, 19 nt, Artificial Sequence
  Description of Artificial Sequence: Synthetic oligonucleotide
  Antisense strand to SEQ ID NO: 1457200
acaaagacgagguucauca

SEQ ID NO: 1457202 - RNA, 19 nt, Artificial Sequence
  Description of Artificial Sequence: Synthetic oligonucleotide
  Sense strand starting at position 1322 of SEQ ID NO: 1243996
gucuuuguuccaugucaaa

SEQ ID NO: 1457203 - RNA, 19 nt, Artificial Sequence
  Description of Artificial Sequence: Synthetic oligonucleotide
  Antisense strand to SEQ ID NO: 1457202
uuugacauggaacaaagac

SEQ ID NO: 1457204 - RNA, 19 nt, Artificial Sequence
  Description of Artificial Sequence: Synthetic oligonucleotide
  Sense strand starting at position 1458 of SEQ ID NO: 1243996
cccagauaauccuggauga

SEQ ID NO: 1457205 - RNA, 19 nt, Artificial Sequence
  Description of Artificial Sequence: Synthetic oligonucleotide
  Antisense strand to SEQ ID NO: 1457204
ucauccaggauuaucuggg

SEQ ID NO: 1457206 - RNA, 19 nt, Artificial Sequence
  Description of Artificial Sequence: Synthetic oligonucleotide
  Sense strand starting at position 1498 of SEQ ID NO: 1243996
agcgcuugccuagugaaau

SEQ ID NO: 1457207 - RNA, 19 nt, Artificial Sequence
  Description of Artificial Sequence: Synthetic oligonucleotide
  Antisense strand to SEQ ID NO: 1457206
auuucacuaggcaagcgcu

SEQ ID NO: 1457208 - RNA, 19 nt, Artificial Sequence
  Description of Artificial Sequence: Synthetic oligonucleotide
  Sense strand starting at position 1510 of SEQ ID NO: 1243996
gugaaauuauacuaugaga

SEQ ID NO: 1457209 - RNA, 19 nt, Artificial Sequence
  Description of Artificial Sequence: Synthetic oligonucleotide
  Antisense strand to SEQ ID NO: 1457208
ucucauaguauaauuucac

SEQ ID NO: 1457210 - RNA, 19 nt, Artificial Sequence
  Description of Artificial Sequence: Synthetic oligonucleotide
  Sense strand starting at position 1625 of SEQ ID NO: 1243996
cucugacagccaugauaca

SEQ ID NO: 1457211 - RNA, 19 nt, Artificial Sequence
  Description of Artificial Sequence: Synthetic oligonucleotide
  Antisense strand to SEQ ID NO: 1457210
uguaucauggcugucagag

SEQ ID NO: 1457212 - RNA, 19 nt, Artificial Sequence
  Description of Artificial Sequence: Synthetic oligonucleotide
  Sense strand starting at position 1626 of SEQ ID NO: 1243996
ucugacagccaugauacau

SEQ ID NO: 1457213 - RNA, 19 nt, Artificial Sequence
  Description of Artificial Sequence: Synthetic oligonucleotide
  Antisense strand to SEQ ID NO: 1457212
auguaucauggcugucaga

SEQ ID NO: 1457214 - RNA, 19 nt, Artificial Sequence
  Description of Artificial Sequence: Synthetic oligonucleotide
  Sense strand starting at position 1821 of SEQ ID NO: 1243996
gcauuaauaucuggaauaa

SEQ ID NO: 1457215 - RNA, 19 nt, Artificial Sequence
  Description of Artificial Sequence: Synthetic oligonucleotide
  Antisense strand to SEQ ID NO: 1457214
uuauuccagauauuaaugc

SEQ ID NO: 1457216 - RNA, 19 nt, Artificial Sequence
  Description of Artificial Sequence: Synthetic oligonucleotide
  Sense strand starting at position 2123 of SEQ ID NO: 1243996
cguacaaucucagcucacu

SEQ ID NO: 1457217 - RNA, 19 nt, Artificial Sequence
  Description of Artificial Sequence: Synthetic oligonucleotide
  Antisense strand to SEQ ID NO: 1457216
agugagcugagauuguacg

SEQ ID NO: 1457218 - RNA, 19 nt, Artificial Sequence
  Description of Artificial Sequence: Synthetic oligonucleotide
  Sense strand starting at position 2389 of SEQ ID NO: 1243996
cuaagcauugcccacagaa

SEQ ID NO: 1457219 - RNA, 19 nt, Artificial Sequence
  Description of Artificial Sequence: Synthetic oligonucleotide
  Antisense strand to SEQ ID NO: 1457218
uucugugggcaaugcuuag

SEQ ID NO: 1457220 - RNA, 19 nt, Artificial Sequence
  Description of Artificial Sequence: Synthetic oligonucleotide
  Sense strand starting at position 3494 of SEQ ID NO: 1243996
acuuuccgcuauccagaau

SEQ ID NO: 1457221 - RNA, 19 nt, Artificial Sequence
  Description of Artificial Sequence: Synthetic oligonucleotide
  Antisense strand to SEQ ID NO: 1457220
auucuggauagcggaaagu

SEQ ID NO: 1457222 - RNA, 19 nt, Artificial Sequence
  Description of Artificial Sequence: Synthetic oligonucleotide
  Sense strand starting at position 3497 of SEQ ID NO: 1243996
uuccgcuauccagaauacu

SEQ ID NO: 1457223 - RNA, 19 nt, Artificial Sequence
  Description of Artificial Sequence: Synthetic oligonucleotide
  Antisense strand to SEQ ID NO: 1457222
aguauucuggauagcggaa

SEQ ID NO: 1457224 - RNA, 19 nt, Artificial Sequence
  Description of Artificial Sequence: Synthetic oligonucleotide
  Sense strand starting at position 3506 of SEQ ID NO: 1243996
ccagaauacucagugaacc

SEQ ID NO: 1457225 - RNA, 19 nt, Artificial Sequence
  Description of Artificial Sequence: Synthetic oligonucleotide
  Antisense strand to SEQ ID NO: 1457224
gguucacugaguauucugg

SEQ ID NO: 1457226 - RNA, 19 nt, Artificial Sequence
  Description of Artificial Sequence: Synthetic oligonucleotide
  Sense strand starting at position 3561 of SEQ ID NO: 1243996
ggacguucugauuaaccaa

SEQ ID NO: 1457227 - RNA, 19 nt, Artificial Sequence
  Description of Artificial Sequence: Synthetic oligonucleotide
  Antisense strand to SEQ ID NO: 1457226
uugguuaaucagaacgucc

SEQ ID NO: 1457228 - RNA, 19 nt, Artificial Sequence
  Description of Artificial Sequence: Synthetic oligonucleotide
  Sense strand starting at position 3564 of SEQ ID NO: 1243996
cguucugauuaaccaagaa

SEQ ID NO: 1457229 - RNA, 19 nt, Artificial Sequence
  Description of Artificial Sequence: Synthetic oligonucleotide
  Antisense strand to SEQ ID NO: 1457228
uucuugguuaaucagaacg

SEQ ID NO: 1457230 - RNA, 19 nt, Artificial Sequence
  Description of Artificial Sequence: Synthetic oligonucleotide
  Sense strand starting at position 3591 of SEQ ID NO: 1243996
agaagucaguuacauccua

SEQ ID NO: 1457231 - RNA, 19 nt, Artificial Sequence
  Description of Artificial Sequence: Synthetic oligonucleotide
  Antisense strand to SEQ ID NO: 1457230
uaggauguaacugacuucu

SEQ ID NO: 1457232 - RNA, 19 nt, Artificial Sequence
  Description of Artificial Sequence: Synthetic oligonucleotide
  Sense strand starting at position 3596 of SEQ ID NO: 1243996
ucaguuacauccuagacau

SEQ ID NO: 1457233 - RNA, 19 nt, Artificial Sequence
  Description of Artificial Sequence: Synthetic oligonucleotide
  Antisense strand to SEQ ID NO: 1457232
augucuaggauguaacuga

SEQ ID NO: 1457234 - RNA, 19 nt, Artificial Sequence
  Description of Artificial Sequence: Synthetic oligonucleotide
  Sense strand starting at position 3653 of SEQ ID NO: 1243996
cguguuaaagagugcaaag

SEQ ID NO: 1457235 - RNA, 19 nt, Artificial Sequence
  Description of Artificial Sequence: Synthetic oligonucleotide
  Antisense strand to SEQ ID NO: 1457234
cuuugcacucuuuaacacg

SEQ ID NO: 1457236 - RNA, 19 nt, Artificial Sequence
  Description of Artificial Sequence: Synthetic oligonucleotide
  Sense strand starting at position 3655 of SEQ ID NO: 1243996
uguuaaagagugcaaagau

SEQ ID NO: 1457237 - RNA, 19 nt, Artificial Sequence
  Description of Artificial Sequence: Synthetic oligonucleotide
  Antisense strand to SEQ ID NO: 1457236
aucuuugcacucuuuaaca

SEQ ID NO: 1457238 - RNA, 19 nt, Artificial Sequence
  Description of Artificial Sequence: Synthetic oligonucleotide
  Sense strand starting at position 3717 of SEQ ID NO: 1243996
ugguucacucgggaucuau

SEQ ID NO: 1457239 - RNA, 19 nt, Artificial Sequence
  Description of Artificial Sequence: Synthetic oligonucleotide
  Antisense strand to SEQ ID NO: 1457238
auagaucccgagugaacca

SEQ ID NO: 1457240 - RNA, 19 nt, Artificial Sequence
  Description of Artificial Sequence: Synthetic oligonucleotide
  Sense strand starting at position 3743 of SEQ ID NO: 1243996
uuugccuaauuugagagaa

SEQ ID NO: 1457241 - RNA, 19 nt, Artificial Sequence
  Description of Artificial Sequence: Synthetic oligonucleotide
  Antisense strand to SEQ ID NO: 1457240
uucucucaaauuaggcaaa

SEQ ID NO: 1457242 - RNA, 19 nt, Artificial Sequence
  Description of Artificial Sequence: Synthetic oligonucleotide
  Sense strand starting at position 3804 of SEQ ID NO: 1243996
cccacaucucccgaggaca

SEQ ID NO: 1457243 - RNA, 19 nt, Artificial Sequence
  Description of Artificial Sequence: Synthetic oligonucleotide
  Antisense strand to SEQ ID NO: 1457242
uguccucgggagauguggg

SEQ ID NO: 1457244 - RNA, 19 nt, Artificial Sequence
  Description of Artificial Sequence: Synthetic oligonucleotide
  Sense strand starting at position 3830 of SEQ ID NO: 1243996
aggcaaacguuucuagaag

SEQ ID NO: 1457245 - RNA, 19 nt, Artificial Sequence
  Description of Artificial Sequence: Synthetic oligonucleotide
  Antisense strand to SEQ ID NO: 1457244
cuucuagaaacguuugccu

SEQ ID NO: 1457246 - RNA, 19 nt, Artificial Sequence
  Description of Artificial Sequence: Synthetic oligonucleotide
  Sense strand starting at position 3857 of SEQ ID NO: 1243996
ugagaccuuuauccugaga

SEQ ID NO: 1457247 - RNA, 19 nt, Artificial Sequence
  Description of Artificial Sequence: Synthetic oligonucleotide
  Antisense strand to SEQ ID NO: 1457246
ucucaggauaaaggucuca

SEQ ID NO: 1457248 - RNA, 19 nt, Artificial Sequence
  Description of Artificial Sequence: Synthetic oligonucleotide
  Sense strand starting at position 207 of SEQ ID NO: 1243997
uggccagagugaucuccaa

SEQ ID NO: 1457249 - RNA, 19 nt, Artificial Sequence
  Description of Artificial Sequence: Synthetic oligonucleotide
  Antisense strand to SEQ ID NO: 1457248
uuggagaucacucuggcca

SEQ ID NO: 1457250 - RNA, 19 nt, Artificial Sequence
  Description of Artificial Sequence: Synthetic oligonucleotide
  Sense strand starting at position 414 of SEQ ID NO: 1243997
ugagauuauuuguguacaa

SEQ ID NO: 1457251 - RNA, 19 nt, Artificial Sequence
  Description of Artificial Sequence: Synthetic oligonucleotide
  Antisense strand to SEQ ID NO: 1457250
uuguacacaaauaaucuca

SEQ ID NO: 1457252 - RNA, 19 nt, Artificial Sequence
  Description of Artificial Sequence: Synthetic oligonucleotide
  Sense strand starting at position 467 of SEQ ID NO: 1243997
cagauuaguuauguacagu

SEQ ID NO: 1457253 - RNA, 19 nt, Artificial Sequence
  Description of Artificial Sequence: Synthetic oligonucleotide
  Antisense strand to SEQ ID NO: 1457252
acuguacauaacuaaucug

SEQ ID NO: 1457254 - RNA, 19 nt, Artificial Sequence
  Description of Artificial Sequence: Synthetic oligonucleotide
  Sense strand starting at position 468 of SEQ ID NO: 1243997
agauuaguuauguacagua

SEQ ID NO: 1457255 - RNA, 19 nt, Artificial Sequence
  Description of Artificial Sequence: Synthetic oligonucleotide
  Antisense strand to SEQ ID NO: 1457254
uacuguacauaacuaaucu

SEQ ID NO: 1457256 - RNA, 19 nt, Artificial Sequence
  Description of Artificial Sequence: Synthetic oligonucleotide
  Sense strand starting at position 470 of SEQ ID NO: 1243997
auuaguuauguacaguaga

SEQ ID NO: 1457257 - RNA, 19 nt, Artificial Sequence
  Description of Artificial Sequence: Synthetic oligonucleotide
  Antisense strand to SEQ ID NO: 1457256
ucuacuguacauaacuaau

SEQ ID NO: 1457258 - RNA, 19 nt, Artificial Sequence
  Description of Artificial Sequence: Synthetic oligonucleotide
  Sense strand starting at position 473 of SEQ ID NO: 1243997
aguuauguacaguagaauu

SEQ ID NO: 1457259 - RNA, 19 nt, Artificial Sequence
  Description of Artificial Sequence: Synthetic oligonucleotide
  Antisense strand to SEQ ID NO: 1457258
aauucuacuguacauaacu

SEQ ID NO: 1457260 - RNA, 19 nt, Artificial Sequence
  Description of Artificial Sequence: Synthetic oligonucleotide
  Sense strand starting at position 625 of SEQ ID NO: 1243997
uccuaauuccgauggcaug

SEQ ID NO: 1457261 - RNA, 19 nt, Artificial Sequence
  Description of Artificial Sequence: Synthetic oligonucleotide
  Antisense strand to SEQ ID NO: 1457260
caugccaucggaauuagga

SEQ ID NO: 1457262 - RNA, 19 nt, Artificial Sequence
  Description of Artificial Sequence: Synthetic oligonucleotide
  Sense strand starting at position 635 of SEQ ID NO: 1243997
gauggcaugucuguaauug

SEQ ID NO: 1457263 - RNA, 19 nt, Artificial Sequence
  Description of Artificial Sequence: Synthetic oligonucleotide
  Antisense strand to SEQ ID NO: 1457262
caauuacagacaugccauc

SEQ ID NO: 1457264 - RNA, 19 nt, Artificial Sequence
  Description of Artificial Sequence: Synthetic oligonucleotide
  Sense strand starting at position 959 of SEQ ID NO: 1243997
caacuuaguccggacucua

SEQ ID NO: 1457265 - RNA, 19 nt, Artificial Sequence
  Description of Artificial Sequence: Synthetic oligonucleotide
  Antisense strand to SEQ ID NO: 1457264
uagaguccggacuaaguug

SEQ ID NO: 1457266 - RNA, 19 nt, Artificial Sequence
  Description of Artificial Sequence: Synthetic oligonucleotide
  Sense strand starting at position 974 of SEQ ID NO: 1243997
ucuaguaguacaugucaag

SEQ ID NO: 1457267 - RNA, 19 nt, Artificial Sequence
  Description of Artificial Sequence: Synthetic oligonucleotide
  Antisense strand to SEQ ID NO: 1457266
cuugacauguacuacuaga

SEQ ID NO: 1457268 - RNA, 19 nt, Artificial Sequence
  Description of Artificial Sequence: Synthetic oligonucleotide
  Sense strand starting at position 1209 of SEQ ID NO: 1243997
acaaguucuucggucuaac

SEQ ID NO: 1457269 - RNA, 19 nt, Artificial Sequence
  Description of Artificial Sequence: Synthetic oligonucleotide
  Antisense strand to SEQ ID NO: 1457268
guuagaccgaagaacuugu

SEQ ID NO: 1457270 - RNA, 19 nt, Artificial Sequence
  Description of Artificial Sequence: Synthetic oligonucleotide
  Sense strand starting at position 1212 of SEQ ID NO: 1243997
aguucuucggucuaaccga

SEQ ID NO: 1457271 - RNA, 19 nt, Artificial Sequence
  Description of Artificial Sequence: Synthetic oligonucleotide
  Antisense strand to SEQ ID NO: 1457270
ucgguuagaccgaagaacu

SEQ ID NO: 1457272 - RNA, 19 nt, Artificial Sequence
  Description of Artificial Sequence: Synthetic oligonucleotide
  Sense strand starting at position 1337 of SEQ ID NO: 1243997
agaugagacguuuauccca

SEQ ID NO: 1457273 - RNA, 19 nt, Artificial Sequence
  Description of Artificial Sequence: Synthetic oligonucleotide
  Antisense strand to SEQ ID NO: 1457272
ugggauaaacgucucaucu

SEQ ID NO: 1457274 - RNA, 19 nt, Artificial Sequence
  Description of Artificial Sequence: Synthetic oligonucleotide
  Sense strand starting at position 1418 of SEQ ID NO: 1243997
cgaucacacuucguuccaa

SEQ ID NO: 1457275 - RNA, 19 nt, Artificial Sequence
  Description of Artificial Sequence: Synthetic oligonucleotide
  Antisense strand to SEQ ID NO: 1457274
uuggaacgaagugugaucg

SEQ ID NO: 1457276 - RNA, 19 nt, Artificial Sequence
  Description of Artificial Sequence: Synthetic oligonucleotide
  Sense strand starting at position 2154 of SEQ ID NO: 1243997
auacaaguauuugaguuga

SEQ ID NO: 1457277 - RNA, 19 nt, Artificial Sequence
  Description of Artificial Sequence: Synthetic oligonucleotide
  Antisense strand to SEQ ID NO: 1457276
ucaacucaaauacuuguau

SEQ ID NO: 1457278 - RNA, 19 nt, Artificial Sequence
  Description of Artificial Sequence: Synthetic oligonucleotide
  Sense strand starting at position 2164 of SEQ ID NO: 1243997
uugaguugaauccguguaa

SEQ ID NO: 1457279 - RNA, 19 nt, Artificial Sequence
  Description of Artificial Sequence: Synthetic oligonucleotide
  Antisense strand to SEQ ID NO: 1457278
uuacacggauucaacucaa

SEQ ID NO: 1457280 - RNA, 19 nt, Artificial Sequence
  Description of Artificial Sequence: Synthetic oligonucleotide
  Sense strand starting at position 2165 of SEQ ID NO: 1243997
ugaguugaauccguguaac

SEQ ID NO: 1457281 - RNA, 19 nt, Artificial Sequence
  Description of Artificial Sequence: Synthetic oligonucleotide
  Antisense strand to SEQ ID NO: 1457280
guuacacggauucaacuca

SEQ ID NO: 1457282 - RNA, 19 nt, Artificial Sequence
  Description of Artificial Sequence: Synthetic oligonucleotide
  Sense strand starting at position 2168 of SEQ ID NO: 1243997
guugaauccguguaacaua

SEQ ID NO: 1457283 - RNA, 19 nt, Artificial Sequence
  Description of Artificial Sequence: Synthetic oligonucleotide
  Antisense strand to SEQ ID NO: 1457282
uauguuacacggauucaac

SEQ ID NO: 1457284 - RNA, 19 nt, Artificial Sequence
  Description of Artificial Sequence: Synthetic oligonucleotide
  Sense strand starting at position 2171 of SEQ ID NO: 1243997
gaauccguguaacauauuu

SEQ ID NO: 1457285 - RNA, 19 nt, Artificial Sequence
  Description of Artificial Sequence: Synthetic oligonucleotide
  Antisense strand to SEQ ID NO: 1457284
aaauauguuacacggauuc

SEQ ID NO: 1457286 - RNA, 19 nt, Artificial Sequence
  Description of Artificial Sequence: Synthetic oligonucleotide
  Sense strand starting at position 2559 of SEQ ID NO: 1243997
gcagaaucagaacagcuuu

SEQ ID NO: 1457287 - RNA, 19 nt, Artificial Sequence
  Description of Artificial Sequence: Synthetic oligonucleotide
  Antisense strand to SEQ ID NO: 1457286
aaagcuguucugauucugc

SEQ ID NO: 1457288 - RNA, 19 nt, Artificial Sequence
  Description of Artificial Sequence: Synthetic oligonucleotide
  Sense strand starting at position 2715 of SEQ ID NO: 1243997
ggucuuaacucucugcuuu

SEQ ID NO: 1457289 - RNA, 19 nt, Artificial Sequence
  Description of Artificial Sequence: Synthetic oligonucleotide
  Antisense strand to SEQ ID NO: 1457288
aaagcagagaguuaagacc

SEQ ID NO: 1457290 - RNA, 19 nt, Artificial Sequence
  Description of Artificial Sequence: Synthetic oligonucleotide
  Sense strand starting at position 2733 of SEQ ID NO: 1243997
uccggaaccuguguuucua

SEQ ID NO: 1457291 - RNA, 19 nt, Artificial Sequence
  Description of Artificial Sequence: Synthetic oligonucleotide
  Antisense strand to SEQ ID NO: 1457290
uagaaacacagguuccgga

SEQ ID NO: 1457292 - RNA, 19 nt, Artificial Sequence
  Description of Artificial Sequence: Synthetic oligonucleotide
  Sense strand starting at position 2735 of SEQ ID NO: 1243997
cggaaccuguguuucuauu

SEQ ID NO: 1457293 - RNA, 19 nt, Artificial Sequence
  Description of Artificial Sequence: Synthetic oligonucleotide
  Antisense strand to SEQ ID NO: 1457292
aauagaaacacagguuccg

SEQ ID NO: 1457294 - RNA, 19 nt, Artificial Sequence
  Description of Artificial Sequence: Synthetic oligonucleotide
  Sense strand starting at position 2805 of SEQ ID NO: 1243997
gucugaucguguccuacac

SEQ ID NO: 1457295 - RNA, 19 nt, Artificial Sequence
  Description of Artificial Sequence: Synthetic oligonucleotide
  Antisense strand to SEQ ID NO: 1457294
guguaggacacgaucagac

SEQ ID NO: 1457296 - RNA, 19 nt, Artificial Sequence
  Description of Artificial Sequence: Synthetic oligonucleotide
  Sense strand starting at position 2949 of SEQ ID NO: 1243997
cacguauagacguuaucgu

SEQ ID NO: 1457297 - RNA, 19 nt, Artificial Sequence
  Description of Artificial Sequence: Synthetic oligonucleotide
  Antisense strand to SEQ ID NO: 1457296
acgauaacgucuauacgug

SEQ ID NO: 1457298 - RNA, 19 nt, Artificial Sequence
  Description of Artificial Sequence: Synthetic oligonucleotide
  Sense strand starting at position 2956 of SEQ ID NO: 1243997
agacguuaucgugggaaug

SEQ ID NO: 1457299 - RNA, 19 nt, Artificial Sequence
  Description of Artificial Sequence: Synthetic oligonucleotide
  Antisense strand to SEQ ID NO: 1457298
cauucccacgauaacgucu

SEQ ID NO: 1457300 - RNA, 19 nt, Artificial Sequence
  Description of Artificial Sequence: Synthetic oligonucleotide
  Sense strand starting at position 2957 of SEQ ID NO: 1243997
gacguuaucgugggaaugu

SEQ ID NO: 1457301 - RNA, 19 nt, Artificial Sequence
  Description of Artificial Sequence: Synthetic oligonucleotide
  Antisense strand to SEQ ID NO: 1457300
acauucccacgauaacguc

SEQ ID NO: 1457302 - RNA, 19 nt, Artificial Sequence
  Description of Artificial Sequence: Synthetic oligonucleotide
  Sense strand starting at position 2968 of SEQ ID NO: 1243997
gggaauguaccgggaucuu

SEQ ID NO: 1457303 - RNA, 19 nt, Artificial Sequence
  Description of Artificial Sequence: Synthetic oligonucleotide
  Antisense strand to SEQ ID NO: 1457302
aagaucccgguacauuccc

SEQ ID NO: 1457304 - RNA, 19 nt, Artificial Sequence
  Description of Artificial Sequence: Synthetic oligonucleotide
  Sense strand starting at position 3131 of SEQ ID NO: 1243997
guuaguguguaccuccaaa

SEQ ID NO: 1457305 - RNA, 19 nt, Artificial Sequence
  Description of Artificial Sequence: Synthetic oligonucleotide
  Antisense strand to SEQ ID NO: 1457304
uuuggagguacacacuaac

SEQ ID NO: 1457306 - RNA, 19 nt, Artificial Sequence
  Description of Artificial Sequence: Synthetic oligonucleotide
  Sense strand starting at position 3520 of SEQ ID NO: 1243997
cuguaaucuguuggcagaa

SEQ ID NO: 1457307 - RNA, 19 nt, Artificial Sequence
  Description of Artificial Sequence: Synthetic oligonucleotide
  Antisense strand to SEQ ID NO: 1457306
uucugccaacagauuacag

SEQ ID NO: 1457308 - RNA, 19 nt, Artificial Sequence
  Description of Artificial Sequence: Synthetic oligonucleotide
  Sense strand starting at position 3521 of SEQ ID NO: 1243997
uguaaucuguuggcagaaa

SEQ ID NO: 1457309 - RNA, 19 nt, Artificial Sequence
  Description of Artificial Sequence: Synthetic oligonucleotide
  Antisense strand to SEQ ID NO: 1457308
uuucugccaacagauuaca

SEQ ID NO: 1457310 - RNA, 19 nt, Artificial Sequence
  Description of Artificial Sequence: Synthetic oligonucleotide
  Sense strand starting at position 3556 of SEQ ID NO: 1243997
ggacuucguacaggauaag

SEQ ID NO: 1457311 - RNA, 19 nt, Artificial Sequence
  Description of Artificial Sequence: Synthetic oligonucleotide
  Antisense strand to SEQ ID NO: 1457310
cuuauccuguacgaagucc

SEQ ID NO: 1457312 - RNA, 19 nt, Artificial Sequence
  Description of Artificial Sequence: Synthetic oligonucleotide
  Sense strand starting at position 3582 of SEQ ID NO: 1243997
gguugcuuuauugaaugga

SEQ ID NO: 1457313 - RNA, 19 nt, Artificial Sequence
  Description of Artificial Sequence: Synthetic oligonucleotide
  Antisense strand to SEQ ID NO: 1457312
uccauucaauaaagcaacc

SEQ ID NO: 1457314 - RNA, 19 nt, Artificial Sequence
  Description of Artificial Sequence: Synthetic oligonucleotide
  Sense strand starting at position 3603 of SEQ ID NO: 1243997
ggugaagauugugucuauu

SEQ ID NO: 1457315 - RNA, 19 nt, Artificial Sequence
  Description of Artificial Sequence: Synthetic oligonucleotide
  Antisense strand to SEQ ID NO: 1457314
aauagacacaaucuucacc

SEQ ID NO: 1457316 - RNA, 19 nt, Artificial Sequence
  Description of Artificial Sequence: Synthetic oligonucleotide
  Sense strand starting at position 3647 of SEQ ID NO: 1243997
uuaaucucuuugguaguca

SEQ ID NO: 1457317 - RNA, 19 nt, Artificial Sequence
  Description of Artificial Sequence: Synthetic oligonucleotide
  Antisense strand to SEQ ID NO: 1457316
ugacuaccaaagagauuaa

SEQ ID NO: 1457318 - RNA, 19 nt, Artificial Sequence
  Description of Artificial Sequence: Synthetic oligonucleotide
  Sense strand starting at position 3651 of SEQ ID NO: 1243997
ucucuuugguagucagaag

SEQ ID NO: 1457319 - RNA, 19 nt, Artificial Sequence
  Description of Artificial Sequence: Synthetic oligonucleotide
  Antisense strand to SEQ ID NO: 1457318
cuucugacuaccaaagaga

SEQ ID NO: 1457320 - RNA, 19 nt, Artificial Sequence
  Description of Artificial Sequence: Synthetic oligonucleotide
  Sense strand starting at position 3652 of SEQ ID NO: 1243997
cucuuugguagucagaaga

SEQ ID NO: 1457321 - RNA, 19 nt, Artificial Sequence
  Description of Artificial Sequence: Synthetic oligonucleotide
  Antisense strand to SEQ ID NO: 1457320
ucuucugacuaccaaagag

SEQ ID NO: 1457322 - RNA, 19 nt, Artificial Sequence
  Description of Artificial Sequence: Synthetic oligonucleotide
  Sense strand starting at position 3667 of SEQ ID NO: 1243997
aagauauuaucaguuguag

SEQ ID NO: 1457323 - RNA, 19 nt, Artificial Sequence
  Description of Artificial Sequence: Synthetic oligonucleotide
  Antisense strand to SEQ ID NO: 1457322
cuacaacugauaauaucuu

SEQ ID NO: 1457324 - RNA, 19 nt, Artificial Sequence
  Description of Artificial Sequence: Synthetic oligonucleotide
  Sense strand starting at position 3771 of SEQ ID NO: 1243997
agcugugugcaggauagau

SEQ ID NO: 1457325 - RNA, 19 nt, Artificial Sequence
  Description of Artificial Sequence: Synthetic oligonucleotide
  Antisense strand to SEQ ID NO: 1457324
aucuauccugcacacagcu

SEQ ID NO: 1457326 - RNA, 19 nt, Artificial Sequence
  Description of Artificial Sequence: Synthetic oligonucleotide
  Sense strand starting at position 3773 of SEQ ID NO: 1243997
cugugugcaggauagauau

SEQ ID NO: 1457327 - RNA, 19 nt, Artificial Sequence
  Description of Artificial Sequence: Synthetic oligonucleotide
  Antisense strand to SEQ ID NO: 1457326
auaucuauccugcacacag

SEQ ID NO: 1457328 - RNA, 19 nt, Artificial Sequence
  Description of Artificial Sequence: Synthetic oligonucleotide
  Sense strand starting at position 538 of SEQ ID NO: 1243998
aggauucuacucugcacuu

SEQ ID NO: 1457329 - RNA, 19 nt, Artificial Sequence
  Description of Artificial Sequence: Synthetic oligonucleotide
  Antisense strand to SEQ ID NO: 1457328
aagugcagaguagaauccu

SEQ ID NO: 1457330 - RNA, 19 nt, Artificial Sequence
  Description of Artificial Sequence: Synthetic oligonucleotide
  Sense strand starting at position 577 of SEQ ID NO: 1243998
uguuaccuacaugaaaguu

SEQ ID NO: 1457331 - RNA, 19 nt, Artificial Sequence
  Description of Artificial Sequence: Synthetic oligonucleotide
  Antisense strand to SEQ ID NO: 1457330
aacuuucauguagguaaca

SEQ ID NO: 1457332 - RNA, 19 nt, Artificial Sequence
  Description of Artificial Sequence: Synthetic oligonucleotide
  Sense strand starting at position 709 of SEQ ID NO: 1243998
agaauucuacugugaguua

SEQ ID NO: 1457333 - RNA, 19 nt, Artificial Sequence
  Description of Artificial Sequence: Synthetic oligonucleotide
  Antisense strand to SEQ ID NO: 1457332
uaacucacaguagaauucu

SEQ ID NO: 1457334 - RNA, 19 nt, Artificial Sequence
  Description of Artificial Sequence: Synthetic oligonucleotide
  Sense strand starting at position 712 of SEQ ID NO: 1243998
auucuacugugaguuauga

SEQ ID NO: 1457335 - RNA, 19 nt, Artificial Sequence
  Description of Artificial Sequence: Synthetic oligonucleotide
  Antisense strand to SEQ ID NO: 1457334
ucauaacucacaguagaau

SEQ ID NO: 1457336 - RNA, 19 nt, Artificial Sequence
  Description of Artificial Sequence: Synthetic oligonucleotide
  Sense strand starting at position 791 of SEQ ID NO: 1243998
ucucuaggugcauaacuua

SEQ ID NO: 1457337 - RNA, 19 nt, Artificial Sequence
  Description of Artificial Sequence: Synthetic oligonucleotide
  Antisense strand to SEQ ID NO: 1457336
uaaguuaugcaccuagaga

SEQ ID NO: 1457338 - RNA, 19 nt, Artificial Sequence
  Description of Artificial Sequence: Synthetic oligonucleotide
  Sense strand starting at position 794 of SEQ ID NO: 1243998
cuaggugcauaacuuaaua

SEQ ID NO: 1457339 - RNA, 19 nt, Artificial Sequence
  Description of Artificial Sequence: Synthetic oligonucleotide
  Antisense strand to SEQ ID NO: 1457338
uauuaaguuaugcaccuag

SEQ ID NO: 1457340 - RNA, 19 nt, Artificial Sequence
  Description of Artificial Sequence: Synthetic oligonucleotide
  Sense strand starting at position 1018 of SEQ ID NO: 1243998
ugggauucugcauacacau

SEQ ID NO: 1457341 - RNA, 19 nt, Artificial Sequence
  Description of Artificial Sequence: Synthetic oligonucleotide
  Antisense strand to SEQ ID NO: 1457340
auguguaugcagaauccca

SEQ ID NO: 1457342 - RNA, 19 nt, Artificial Sequence
  Description of Artificial Sequence: Synthetic oligonucleotide
  Sense strand starting at position 1218 of SEQ ID NO: 1243998
uacaaaugaguguguacau

SEQ ID NO: 1457343 - RNA, 19 nt, Artificial Sequence
  Description of Artificial Sequence: Synthetic oligonucleotide
  Antisense strand to SEQ ID NO: 1457342
auguacacacucauuugua

SEQ ID NO: 1457344 - RNA, 19 nt, Artificial Sequence
  Description of Artificial Sequence: Synthetic oligonucleotide
  Sense strand starting at position 1219 of SEQ ID NO: 1243998
acaaaugaguguguacaua

SEQ ID NO: 1457345 - RNA, 19 nt, Artificial Sequence
  Description of Artificial Sequence: Synthetic oligonucleotide
  Antisense strand to SEQ ID NO: 1457344
uauguacacacucauuugu

SEQ ID NO: 1457346 - RNA, 19 nt, Artificial Sequence
  Description of Artificial Sequence: Synthetic oligonucleotide
  Sense strand starting at position 1237 of SEQ ID NO: 1243998
auaugacuaugugcacaua

SEQ ID NO: 1457347 - RNA, 19 nt, Artificial Sequence
  Description of Artificial Sequence: Synthetic oligonucleotide
  Antisense strand to SEQ ID NO: 1457346
uaugugcacauagucauau

SEQ ID NO: 1457348 - RNA, 19 nt, Artificial Sequence
  Description of Artificial Sequence: Synthetic oligonucleotide
  Sense strand starting at position 1240 of SEQ ID NO: 1243998
ugacuaugugcacauaugu

SEQ ID NO: 1457349 - RNA, 19 nt, Artificial Sequence
  Description of Artificial Sequence: Synthetic oligonucleotide
  Antisense strand to SEQ ID NO: 1457348
acauaugugcacauaguca

SEQ ID NO: 1457350 - RNA, 19 nt, Artificial Sequence
  Description of Artificial Sequence: Synthetic oligonucleotide
  Sense strand starting at position 1298 of SEQ ID NO: 1243998
ggacccugauuuggaaaca

SEQ ID NO: 1457351 - RNA, 19 nt, Artificial Sequence
  Description of Artificial Sequence: Synthetic oligonucleotide
  Antisense strand to SEQ ID NO: 1457350
uguuuccaaaucagggucc

SEQ ID NO: 1457352 - RNA, 19 nt, Artificial Sequence
  Description of Artificial Sequence: Synthetic oligonucleotide
  Sense strand starting at position 1676 of SEQ ID NO: 1243998
aucccaauagguuaucagu

SEQ ID NO: 1457353 - RNA, 19 nt, Artificial Sequence
  Description of Artificial Sequence: Synthetic oligonucleotide
  Antisense strand to SEQ ID NO: 1457352
acugauaaccuauugggau

SEQ ID NO: 1457354 - RNA, 19 nt, Artificial Sequence
  Description of Artificial Sequence: Synthetic oligonucleotide
  Sense strand starting at position 1683 of SEQ ID NO: 1243998
uagguuaucaguuggaagu

SEQ ID NO: 1457355 - RNA, 19 nt, Artificial Sequence
  Description of Artificial Sequence: Synthetic oligonucleotide
  Antisense strand to SEQ ID NO: 1457354
acuuccaacugauaaccua

SEQ ID NO: 1457356 - RNA, 19 nt, Artificial Sequence
  Description of Artificial Sequence: Synthetic oligonucleotide
  Sense strand starting at position 1684 of SEQ ID NO: 1243998
agguuaucaguuggaagua

SEQ ID NO: 1457357 - RNA, 19 nt, Artificial Sequence
  Description of Artificial Sequence: Synthetic oligonucleotide
  Antisense strand to SEQ ID NO: 1457356
uacuuccaacugauaaccu

SEQ ID NO: 1457358 - RNA, 19 nt, Artificial Sequence
  Description of Artificial Sequence: Synthetic oligonucleotide
  Sense strand starting at position 1747 of SEQ ID NO: 1243998
cgaggucaagcuuaaguua

SEQ ID NO: 1457359 - RNA, 19 nt, Artificial Sequence
  Description of Artificial Sequence: Synthetic oligonucleotide
  Antisense strand to SEQ ID NO: 1457358
uaacuuaagcuugaccucg

SEQ ID NO: 1457360 - RNA, 19 nt, Artificial Sequence
  Description of Artificial Sequence: Synthetic oligonucleotide
  Sense strand starting at position 1806 of SEQ ID NO: 1243998
gucuguugggacugaaaca

SEQ ID NO: 1457361 - RNA, 19 nt, Artificial Sequence
  Description of Artificial Sequence: Synthetic oligonucleotide
  Antisense strand to SEQ ID NO: 1457360
uguuucagucccaacagac

SEQ ID NO: 1457362 - RNA, 19 nt, Artificial Sequence
  Description of Artificial Sequence: Synthetic oligonucleotide
  Sense strand starting at position 1835 of SEQ ID NO: 1243998
gagguuaaugacuaagcuu

SEQ ID NO: 1457363 - RNA, 19 nt, Artificial Sequence
  Description of Artificial Sequence: Synthetic oligonucleotide
  Antisense strand to SEQ ID NO: 1457362
aagcuuagucauuaaccuc

SEQ ID NO: 1457364 - RNA, 19 nt, Artificial Sequence
  Description of Artificial Sequence: Synthetic oligonucleotide
  Sense strand starting at position 1904 of SEQ ID NO: 1243998
aggauuccgaguuaccuaa

SEQ ID NO: 1457365 - RNA, 19 nt, Artificial Sequence
  Description of Artificial Sequence: Synthetic oligonucleotide
  Antisense strand to SEQ ID NO: 1457364
uuagguaacucggaauccu

SEQ ID NO: 1457366 - RNA, 19 nt, Artificial Sequence
  Description of Artificial Sequence: Synthetic oligonucleotide
  Sense strand starting at position 1906 of SEQ ID NO: 1243998
gauuccgaguuaccuaauu

SEQ ID NO: 1457367 - RNA, 19 nt, Artificial Sequence
  Description of Artificial Sequence: Synthetic oligonucleotide
  Antisense strand to SEQ ID NO: 1457366
aauuagguaacucggaauc

SEQ ID NO: 1457368 - RNA, 19 nt, Artificial Sequence
  Description of Artificial Sequence: Synthetic oligonucleotide
  Sense strand starting at position 1970 of SEQ ID NO: 1243998
uugccuauuugcccugaaa

SEQ ID NO: 1457369 - RNA, 19 nt, Artificial Sequence
  Description of Artificial Sequence: Synthetic oligonucleotide
  Antisense strand to SEQ ID NO: 1457368
uuucagggcaaauaggcaa

SEQ ID NO: 1457370 - RNA, 19 nt, Artificial Sequence
  Description of Artificial Sequence: Synthetic oligonucleotide
  Sense strand starting at position 2071 of SEQ ID NO: 1243998
acuagauuguuacuaugag

SEQ ID NO: 1457371 - RNA, 19 nt, Artificial Sequence
  Description of Artificial Sequence: Synthetic oligonucleotide
  Antisense strand to SEQ ID NO: 1457370
cucauaguaacaaucuagu

SEQ ID NO: 1457372 - RNA, 19 nt, Artificial Sequence
  Description of Artificial Sequence: Synthetic oligonucleotide
  Sense strand starting at position 2547 of SEQ ID NO: 1243998
agcuuucuauaguuaagag

SEQ ID NO: 1457373 - RNA, 19 nt, Artificial Sequence
  Description of Artificial Sequence: Synthetic oligonucleotide
  Antisense strand to SEQ ID NO: 1457372
cucuuaacuauagaaagcu

SEQ ID NO: 1457374 - RNA, 19 nt, Artificial Sequence
  Description of Artificial Sequence: Synthetic oligonucleotide
  Sense strand starting at position 2602 of SEQ ID NO: 1243998
cauguacauuuggaggaua

SEQ ID NO: 1457375 - RNA, 19 nt, Artificial Sequence
  Description of Artificial Sequence: Synthetic oligonucleotide
  Antisense strand to SEQ ID NO: 1457374
uauccuccaaauguacaug

SEQ ID NO: 1457376 - RNA, 19 nt, Artificial Sequence
  Description of Artificial Sequence: Synthetic oligonucleotide
  Sense strand starting at position 2615 of SEQ ID NO: 1243998
aggauauagugucuucuaa

SEQ ID NO: 1457377 - RNA, 19 nt, Artificial Sequence
  Description of Artificial Sequence: Synthetic oligonucleotide
  Antisense strand to SEQ ID NO: 1457376
uuagaagacacuauauccu

SEQ ID NO: 1457378 - RNA, 19 nt, Artificial Sequence
  Description of Artificial Sequence: Synthetic oligonucleotide
  Sense strand starting at position 2640 of SEQ ID NO: 1243998
auacacuuucuaugagagu

SEQ ID NO: 1457379 - RNA, 19 nt, Artificial Sequence
  Description of Artificial Sequence: Synthetic oligonucleotide
  Antisense strand to SEQ ID NO: 1457378
acucucauagaaaguguau

SEQ ID NO: 1457380 - RNA, 19 nt, Artificial Sequence
  Description of Artificial Sequence: Synthetic oligonucleotide
  Sense strand starting at position 2769 of SEQ ID NO: 1243998
ucugaauaggucuaacuuu

SEQ ID NO: 1457381 - RNA, 19 nt, Artificial Sequence
  Description of Artificial Sequence: Synthetic oligonucleotide
  Antisense strand to SEQ ID NO: 1457380
aaaguuagaccuauucaga

SEQ ID NO: 1457382 - RNA, 19 nt, Artificial Sequence
  Description of Artificial Sequence: Synthetic oligonucleotide
  Sense strand starting at position 2784 of SEQ ID NO: 1243998
cuuuaauaaugaguaugga

SEQ ID NO: 1457383 - RNA, 19 nt, Artificial Sequence
  Description of Artificial Sequence: Synthetic oligonucleotide
  Antisense strand to SEQ ID NO: 1457382
uccauacucauuauuaaag

SEQ ID NO: 1457384 - RNA, 19 nt, Artificial Sequence
  Description of Artificial Sequence: Synthetic oligonucleotide
  Sense strand starting at position 2805 of SEQ ID NO: 1243998
ccagcuuaaguuuggaaua

SEQ ID NO: 1457385 - RNA, 19 nt, Artificial Sequence
  Description of Artificial Sequence: Synthetic oligonucleotide
  Antisense strand to SEQ ID NO: 1457384
uauuccaaacuuaagcugg

SEQ ID NO: 1457386 - RNA, 19 nt, Artificial Sequence
  Description of Artificial Sequence: Synthetic oligonucleotide
  Sense strand starting at position 2929 of SEQ ID NO: 1243998
agaucuuagcugcacauua

SEQ ID NO: 1457387 - RNA, 19 nt, Artificial Sequence
  Description of Artificial Sequence: Synthetic oligonucleotide
  Antisense strand to SEQ ID NO: 1457386
uaaugugcagcuaagaucu

SEQ ID NO: 1457388 - RNA, 19 nt, Artificial Sequence
  Description of Artificial Sequence: Synthetic oligonucleotide
  Sense strand starting at position 2952 of SEQ ID NO: 1243998
gaaguaguuggagguuaaa

SEQ ID NO: 1457389 - RNA, 19 nt, Artificial Sequence
  Description of Artificial Sequence: Synthetic oligonucleotide
  Antisense strand to SEQ ID NO: 1457388
uuuaaccuccaacuacuuc

SEQ ID NO: 1457390 - RNA, 19 nt, Artificial Sequence
  Description of Artificial Sequence: Synthetic oligonucleotide
  Sense strand starting at position 3084 of SEQ ID NO: 1243998
gaguguucugcagaggcaa

SEQ ID NO: 1457391 - RNA, 19 nt, Artificial Sequence
  Description of Artificial Sequence: Synthetic oligonucleotide
  Antisense strand to SEQ ID NO: 1457390
uugccucugcagaacacuc

SEQ ID NO: 1457392 - RNA, 19 nt, Artificial Sequence
  Description of Artificial Sequence: Synthetic oligonucleotide
  Sense strand starting at position 3140 of SEQ ID NO: 1243998
gaaagucauugaguaagua

SEQ ID NO: 1457393 - RNA, 19 nt, Artificial Sequence
  Description of Artificial Sequence: Synthetic oligonucleotide
  Antisense strand to SEQ ID NO: 1457392
uacuuacucaaugacuuuc

SEQ ID NO: 1457394 - RNA, 19 nt, Artificial Sequence
  Description of Artificial Sequence: Synthetic oligonucleotide
  Sense strand starting at position 3312 of SEQ ID NO: 1243998
uaugaaugucaaggagguu

SEQ ID NO: 1457395 - RNA, 19 nt, Artificial Sequence
  Description of Artificial Sequence: Synthetic oligonucleotide
  Antisense strand to SEQ ID NO: 1457394
aaccuccuugacauucaua

SEQ ID NO: 1457396 - RNA, 19 nt, Artificial Sequence
  Description of Artificial Sequence: Synthetic oligonucleotide
  Sense strand starting at position 3385 of SEQ ID NO: 1243998
aacuaaucucugggagagu

SEQ ID NO: 1457397 - RNA, 19 nt, Artificial Sequence
  Description of Artificial Sequence: Synthetic oligonucleotide
  Antisense strand to SEQ ID NO: 1457396
acucucccagagauuaguu

SEQ ID NO: 1457398 - RNA, 19 nt, Artificial Sequence
  Description of Artificial Sequence: Synthetic oligonucleotide
  Sense strand starting at position 3452 of SEQ ID NO: 1243998
agaauaaucucuuuggccu

SEQ ID NO: 1457399 - RNA, 19 nt, Artificial Sequence
  Description of Artificial Sequence: Synthetic oligonucleotide
  Antisense strand to SEQ ID NO: 1457398
aggccaaagagauuauucu

SEQ ID NO: 1457400 - RNA, 19 nt, Artificial Sequence
  Description of Artificial Sequence: Synthetic oligonucleotide
  Sense strand starting at position 3590 of SEQ ID NO: 1243998
guguuaacaacuggcaaga

SEQ ID NO: 1457401 - RNA, 19 nt, Artificial Sequence
  Description of Artificial Sequence: Synthetic oligonucleotide
  Antisense strand to SEQ ID NO: 1457400
ucuugccaguuguuaacac

SEQ ID NO: 1457402 - RNA, 19 nt, Artificial Sequence
  Description of Artificial Sequence: Synthetic oligonucleotide
  Sense strand starting at position 3662 of SEQ ID NO: 1243998
gcauuaaugccacagacca

SEQ ID NO: 1457403 - RNA, 19 nt, Artificial Sequence
  Description of Artificial Sequence: Synthetic oligonucleotide
  Antisense strand to SEQ ID NO: 1457402
uggucuguggcauuaaugc

SEQ ID NO: 1457404 - RNA, 19 nt, Artificial Sequence
  Description of Artificial Sequence: Synthetic oligonucleotide
  Sense strand starting at position 3776 of SEQ ID NO: 1243998
gguugauuccaucacguug

SEQ ID NO: 1457405 - RNA, 19 nt, Artificial Sequence
  Description of Artificial Sequence: Synthetic oligonucleotide
  Antisense strand to SEQ ID NO: 1457404
caacgugauggaaucaacc

SEQ ID NO: 1457406 - RNA, 19 nt, Artificial Sequence
  Description of Artificial Sequence: Synthetic oligonucleotide
  Sense strand starting at position 3830 of SEQ ID NO: 1243998
ccuagagacucggcauaga

SEQ ID NO: 1457407 - RNA, 19 nt, Artificial Sequence
  Description of Artificial Sequence: Synthetic oligonucleotide
  Antisense strand to SEQ ID NO: 1457406
ucuaugccgagucucuagg

SEQ ID NO: 1457408 - RNA, 19 nt, Artificial Sequence
  Description of Artificial Sequence: Synthetic oligonucleotide
  Sense strand starting at position 164 of SEQ ID NO: 1243999
guuuguagucuugugguuu

SEQ ID NO: 1457409 - RNA, 19 nt, Artificial Sequence
  Description of Artificial Sequence: Synthetic oligonucleotide
  Antisense strand to SEQ ID NO: 1457408
aaaccacaagacuacaaac

SEQ ID NO: 1457410 - RNA, 19 nt, Artificial Sequence
  Description of Artificial Sequence: Synthetic oligonucleotide
  Sense strand starting at position 191 of SEQ ID NO: 1243999
acucaugauaggcaugagu

SEQ ID NO: 1457411 - RNA, 19 nt, Artificial Sequence
  Description of Artificial Sequence: Synthetic oligonucleotide
  Antisense strand to SEQ ID NO: 1457410
acucaugccuaucaugagu

SEQ ID NO: 1457412 - RNA, 19 nt, Artificial Sequence
  Description of Artificial Sequence: Synthetic oligonucleotide
  Sense strand starting at position 193 of SEQ ID NO: 1243999
ucaugauaggcaugaguua

SEQ ID NO: 1457413 - RNA, 19 nt, Artificial Sequence
  Description of Artificial Sequence: Synthetic oligonucleotide
  Antisense strand to SEQ ID NO: 1457412
uaacucaugccuaucauga

SEQ ID NO: 1457414 - RNA, 19 nt, Artificial Sequence
  Description of Artificial Sequence: Synthetic oligonucleotide
  Sense strand starting at position 300 of SEQ ID NO: 1243999
ucugcaucccaagauguga

SEQ ID NO: 1457415 - RNA, 19 nt, Artificial Sequence
  Description of Artificial Sequence: Synthetic oligonucleotide
  Antisense strand to SEQ ID NO: 1457414
ucacaucuugggaugcaga

SEQ ID NO: 1457416 - RNA, 19 nt, Artificial Sequence
  Description of Artificial Sequence: Synthetic oligonucleotide
  Sense strand starting at position 456 of SEQ ID NO: 1243999
ggagaugugcaguaacuag

SEQ ID NO: 1457417 - RNA, 19 nt, Artificial Sequence
  Description of Artificial Sequence: Synthetic oligonucleotide
  Antisense strand to SEQ ID NO: 1457416
cuaguuacugcacaucucc

SEQ ID NO: 1457418 - RNA, 19 nt, Artificial Sequence
  Description of Artificial Sequence: Synthetic oligonucleotide
  Sense strand starting at position 468 of SEQ ID NO: 1243999
uaacuaggcuugguaauca

SEQ ID NO: 1457419 - RNA, 19 nt, Artificial Sequence
  Description of Artificial Sequence: Synthetic oligonucleotide
  Antisense strand to SEQ ID NO: 1457418
ugauuaccaagccuaguua

SEQ ID NO: 1457420 - RNA, 19 nt, Artificial Sequence
  Description of Artificial Sequence: Synthetic oligonucleotide
  Sense strand starting at position 473 of SEQ ID NO: 1243999
aggcuugguaaucaucaga

SEQ ID NO: 1457421 - RNA, 19 nt, Artificial Sequence
  Description of Artificial Sequence: Synthetic oligonucleotide
  Antisense strand to SEQ ID NO: 1457420
ucugaugauuaccaagccu

SEQ ID NO: 1457422 - RNA, 19 nt, Artificial Sequence
  Description of Artificial Sequence: Synthetic oligonucleotide
  Sense strand starting at position 506 of SEQ ID NO: 1243999
ugguuuagagaaugucauu

SEQ ID NO: 1457423 - RNA, 19 nt, Artificial Sequence
  Description of Artificial Sequence: Synthetic oligonucleotide
  Antisense strand to SEQ ID NO: 1457422
aaugacauucucuaaacca

SEQ ID NO: 1457424 - RNA, 19 nt, Artificial Sequence
  Description of Artificial Sequence: Synthetic oligonucleotide
  Sense strand starting at position 512 of SEQ ID NO: 1243999
agagaaugucauuaaccgu

SEQ ID NO: 1457425 - RNA, 19 nt, Artificial Sequence
  Description of Artificial Sequence: Synthetic oligonucleotide
  Antisense strand to SEQ ID NO: 1457424
acgguuaaugacauucucu

SEQ ID NO: 1457426 - RNA, 19 nt, Artificial Sequence
  Description of Artificial Sequence: Synthetic oligonucleotide
  Sense strand starting at position 515 of SEQ ID NO: 1243999
gaaugucauuaaccguuaa

SEQ ID NO: 1457427 - RNA, 19 nt, Artificial Sequence
  Description of Artificial Sequence: Synthetic oligonucleotide
  Antisense strand to SEQ ID NO: 1457426
uuaacgguuaaugacauuc

SEQ ID NO: 1457428 - RNA, 19 nt, Artificial Sequence
  Description of Artificial Sequence: Synthetic oligonucleotide
  Sense strand starting at position 519 of SEQ ID NO: 1243999
gucauuaaccguuaagacg

SEQ ID NO: 1457429 - RNA, 19 nt, Artificial Sequence
  Description of Artificial Sequence: Synthetic oligonucleotide
  Antisense strand to SEQ ID NO: 1457428
cgucuuaacgguuaaugac

SEQ ID NO: 1457430 - RNA, 19 nt, Artificial Sequence
  Description of Artificial Sequence: Synthetic oligonucleotide
  Sense strand starting at position 527 of SEQ ID NO: 1243999
ccguuaagacggcaggaau

SEQ ID NO: 1457431 - RNA, 19 nt, Artificial Sequence
  Description of Artificial Sequence: Synthetic oligonucleotide
  Antisense strand to SEQ ID NO: 1457430
auuccugccgucuuaacgg

SEQ ID NO: 1457432 - RNA, 19 nt, Artificial Sequence
  Description of Artificial Sequence: Synthetic oligonucleotide
  Sense strand starting at position 579 of SEQ ID NO: 1243999
uuuggaagugugcaaugau

SEQ ID NO: 1457433 - RNA, 19 nt, Artificial Sequence
  Description of Artificial Sequence: Synthetic oligonucleotide
  Antisense strand to SEQ ID NO: 1457432
aucauugcacacuuccaaa

SEQ ID NO: 1457434 - RNA, 19 nt, Artificial Sequence
  Description of Artificial Sequence: Synthetic oligonucleotide
  Sense strand starting at position 602 of SEQ ID NO: 1243999
ucacaucuggugugaauca

SEQ ID NO: 1457435 - RNA, 19 nt, Artificial Sequence
  Description of Artificial Sequence: Synthetic oligonucleotide
  Antisense strand to SEQ ID NO: 1457434
ugauucacaccagauguga

SEQ ID NO: 1457436 - RNA, 19 nt, Artificial Sequence
  Description of Artificial Sequence: Synthetic oligonucleotide
  Sense strand starting at position 714 of SEQ ID NO: 1243999
agauuugaguaucaaagca

SEQ ID NO: 1457437 - RNA, 19 nt, Artificial Sequence
  Description of Artificial Sequence: Synthetic oligonucleotide
  Antisense strand to SEQ ID NO: 1457436
ugcuuugauacucaaaucu

SEQ ID NO: 1457438 - RNA, 19 nt, Artificial Sequence
  Description of Artificial Sequence: Synthetic oligonucleotide
  Sense strand starting at position 719 of SEQ ID NO: 1243999
ugaguaucaaagcaagguu

SEQ ID NO: 1457439 - RNA, 19 nt, Artificial Sequence
  Description of Artificial Sequence: Synthetic oligonucleotide
  Antisense strand to SEQ ID NO: 1457438
aaccuugcuuugauacuca

SEQ ID NO: 1457440 - RNA, 19 nt, Artificial Sequence
  Description of Artificial Sequence: Synthetic oligonucleotide
  Sense strand starting at position 1071 of SEQ ID NO: 1243999
guacaacuucugggacaca

SEQ ID NO: 1457441 - RNA, 19 nt, Artificial Sequence
  Description of Artificial Sequence: Synthetic oligonucleotide
  Antisense strand to SEQ ID NO: 1457440
ugugucccagaaguuguac

SEQ ID NO: 1457442 - RNA, 19 nt, Artificial Sequence
  Description of Artificial Sequence: Synthetic oligonucleotide
  Sense strand starting at position 1113 of SEQ ID NO: 1243999
gcauuugcaccacgguaaa

SEQ ID NO: 1457443 - RNA, 19 nt, Artificial Sequence
  Description of Artificial Sequence: Synthetic oligonucleotide
  Antisense strand to SEQ ID NO: 1457442
uuuaccguggugcaaaugc

SEQ ID NO: 1457444 - RNA, 19 nt, Artificial Sequence
  Description of Artificial Sequence: Synthetic oligonucleotide
  Sense strand starting at position 1199 of SEQ ID NO: 1243999
acgugaagugguggagaau

SEQ ID NO: 1457445 - RNA, 19 nt, Artificial Sequence
  Description of Artificial Sequence: Synthetic oligonucleotide
  Antisense strand to SEQ ID NO: 1457444
auucuccaccacuucacgu

SEQ ID NO: 1457446 - RNA, 19 nt, Artificial Sequence
  Description of Artificial Sequence: Synthetic oligonucleotide
  Sense strand starting at position 2113 of SEQ ID NO: 1243999
gaggaugauuggucgauga

SEQ ID NO: 1457447 - RNA, 19 nt, Artificial Sequence
  Description of Artificial Sequence: Synthetic oligonucleotide
  Antisense strand to SEQ ID NO: 1457446
ucaucgaccaaucauccuc

SEQ ID NO: 1457448 - RNA, 19 nt, Artificial Sequence
  Description of Artificial Sequence: Synthetic oligonucleotide
  Sense strand starting at position 2115 of SEQ ID NO: 1243999
ggaugauuggucgaugagc

SEQ ID NO: 1457449 - RNA, 19 nt, Artificial Sequence
  Description of Artificial Sequence: Synthetic oligonucleotide
  Antisense strand to SEQ ID NO: 1457448
gcucaucgaccaaucaucc

SEQ ID NO: 1457450 - RNA, 19 nt, Artificial Sequence
  Description of Artificial Sequence: Synthetic oligonucleotide
  Sense strand starting at position 2201 of SEQ ID NO: 1243999
cugauuggccuguacagaa

SEQ ID NO: 1457451 - RNA, 19 nt, Artificial Sequence
  Description of Artificial Sequence: Synthetic oligonucleotide
  Antisense strand to SEQ ID NO: 1457450
uucuguacaggccaaucag

SEQ ID NO: 1457452 - RNA, 19 nt, Artificial Sequence
  Description of Artificial Sequence: Synthetic oligonucleotide
  Sense strand starting at position 2355 of SEQ ID NO: 1243999
guuggagucaaacacuagu

SEQ ID NO: 1457453 - RNA, 19 nt, Artificial Sequence
  Description of Artificial Sequence: Synthetic oligonucleotide
  Antisense strand to SEQ ID NO: 1457452
acuaguguuugacuccaac

SEQ ID NO: 1457454 - RNA, 19 nt, Artificial Sequence
  Description of Artificial Sequence: Synthetic oligonucleotide
  Sense strand starting at position 2420 of SEQ ID NO: 1243999
acaguugagucccugaauc

SEQ ID NO: 1457455 - RNA, 19 nt, Artificial Sequence
  Description of Artificial Sequence: Synthetic oligonucleotide
  Antisense strand to SEQ ID NO: 1457454
gauucagggacucaacugu

SEQ ID NO: 1457456 - RNA, 19 nt, Artificial Sequence
  Description of Artificial Sequence: Synthetic oligonucleotide
  Sense strand starting at position 2422 of SEQ ID NO: 1243999
aguugagucccugaaucac

SEQ ID NO: 1457457 - RNA, 19 nt, Artificial Sequence
  Description of Artificial Sequence: Synthetic oligonucleotide
  Antisense strand to SEQ ID NO: 1457456
gugauucagggacucaacu

SEQ ID NO: 1457458 - RNA, 19 nt, Artificial Sequence
  Description of Artificial Sequence: Synthetic oligonucleotide
  Sense strand starting at position 2701 of SEQ ID NO: 1243999
auugcuagccuguaaauua

SEQ ID NO: 1457459 - RNA, 19 nt, Artificial Sequence
  Description of Artificial Sequence: Synthetic oligonucleotide
  Antisense strand to SEQ ID NO: 1457458
uaauuuacaggcuagcaau

SEQ ID NO: 1457460 - RNA, 19 nt, Artificial Sequence
  Description of Artificial Sequence: Synthetic oligonucleotide
  Sense strand starting at position 2852 of SEQ ID NO: 1243999
cuggucuuccaagaucaau

SEQ ID NO: 1457461 - RNA, 19 nt, Artificial Sequence
  Description of Artificial Sequence: Synthetic oligonucleotide
  Antisense strand to SEQ ID NO: 1457460
auugaucuuggaagaccag

SEQ ID NO: 1457462 - RNA, 19 nt, Artificial Sequence
  Description of Artificial Sequence: Synthetic oligonucleotide
  Sense strand starting at position 2914 of SEQ ID NO: 1243999
agagaaugcaugcaguugu

SEQ ID NO: 1457463 - RNA, 19 nt, Artificial Sequence
  Description of Artificial Sequence: Synthetic oligonucleotide
  Antisense strand to SEQ ID NO: 1457462
acaacugcaugcauucucu

SEQ ID NO: 1457464 - RNA, 19 nt, Artificial Sequence
  Description of Artificial Sequence: Synthetic oligonucleotide
  Sense strand starting at position 3228 of SEQ ID NO: 1243999
agaagauauucccugaagc

SEQ ID NO: 1457465 - RNA, 19 nt, Artificial Sequence
  Description of Artificial Sequence: Synthetic oligonucleotide
  Antisense strand to SEQ ID NO: 1457464
gcuucagggaauaucuucu

SEQ ID NO: 1457466 - RNA, 19 nt, Artificial Sequence
  Description of Artificial Sequence: Synthetic oligonucleotide
  Sense strand starting at position 3303 of SEQ ID NO: 1243999
gaagucauucugggauuaa

SEQ ID NO: 1457467 - RNA, 19 nt, Artificial Sequence
  Description of Artificial Sequence: Synthetic oligonucleotide
  Antisense strand to SEQ ID NO: 1457466
uuaaucccagaaugacuuc

SEQ ID NO: 1457468 - RNA, 19 nt, Artificial Sequence
  Description of Artificial Sequence: Synthetic oligonucleotide
  Sense strand starting at position 3330 of SEQ ID NO: 1243999
aguagauaauacccaaagu

SEQ ID NO: 1457469 - RNA, 19 nt, Artificial Sequence
  Description of Artificial Sequence: Synthetic oligonucleotide
  Antisense strand to SEQ ID NO: 1457468
acuuuggguauuaucuacu

SEQ ID NO: 1457470 - RNA, 19 nt, Artificial Sequence
  Description of Artificial Sequence: Synthetic oligonucleotide
  Sense strand starting at position 3353 of SEQ ID NO: 1243999
auucaagaguggguugaau

SEQ ID NO: 1457471 - RNA, 19 nt, Artificial Sequence
  Description of Artificial Sequence: Synthetic oligonucleotide
  Antisense strand to SEQ ID NO: 1457470
auucaacccacucuugaau

SEQ ID NO: 1457472 - RNA, 19 nt, Artificial Sequence
  Description of Artificial Sequence: Synthetic oligonucleotide
  Sense strand starting at position 3355 of SEQ ID NO: 1243999
ucaagaguggguugaauau

SEQ ID NO: 1457473 - RNA, 19 nt, Artificial Sequence
  Description of Artificial Sequence: Synthetic oligonucleotide
  Antisense strand to SEQ ID NO: 1457472
auauucaacccacucuuga

SEQ ID NO: 1457474 - RNA, 19 nt, Artificial Sequence
  Description of Artificial Sequence: Synthetic oligonucleotide
  Sense strand starting at position 3513 of SEQ ID NO: 1243999
gaagaaaugcuguacuacu

SEQ ID NO: 1457475 - RNA, 19 nt, Artificial Sequence
  Description of Artificial Sequence: Synthetic oligonucleotide
  Antisense strand to SEQ ID NO: 1457474
aguaguacagcauuucuuc

SEQ ID NO: 1457476 - RNA, 19 nt, Artificial Sequence
  Description of Artificial Sequence: Synthetic oligonucleotide
  Sense strand starting at position 3647 of SEQ ID NO: 1243999
gcauuuauauuguuccuca

SEQ ID NO: 1457477 - RNA, 19 nt, Artificial Sequence
  Description of Artificial Sequence: Synthetic oligonucleotide
  Antisense strand to SEQ ID NO: 1457476
ugaggaacaauauaaaugc

SEQ ID NO: 1457478 - RNA, 19 nt, Artificial Sequence
  Description of Artificial Sequence: Synthetic oligonucleotide
  Sense strand starting at position 3736 of SEQ ID NO: 1243999
ggauucuuaccauguuaca

SEQ ID NO: 1457479 - RNA, 19 nt, Artificial Sequence
  Description of Artificial Sequence: Synthetic oligonucleotide
  Antisense strand to SEQ ID NO: 1457478
uguaacaugguaagaaucc

SEQ ID NO: 1457480 - RNA, 19 nt, Artificial Sequence
  Description of Artificial Sequence: Synthetic oligonucleotide
  Sense strand starting at position 3789 of SEQ ID NO: 1243999
uuugauuccuagcucagau

SEQ ID NO: 1457481 - RNA, 19 nt, Artificial Sequence
  Description of Artificial Sequence: Synthetic oligonucleotide
  Antisense strand to SEQ ID NO: 1457480
aucugagcuaggaaucaaa

SEQ ID NO: 1457482 - RNA, 19 nt, Artificial Sequence
  Description of Artificial Sequence: Synthetic oligonucleotide
  Sense strand starting at position 3956 of SEQ ID NO: 1243999
acacuugugaaauggguau

SEQ ID NO: 1457483 - RNA, 19 nt, Artificial Sequence
  Description of Artificial Sequence: Synthetic oligonucleotide
  Antisense strand to SEQ ID NO: 1457482
auacccauuucacaagugu

SEQ ID NO: 1457484 - RNA, 19 nt, Artificial Sequence
  Description of Artificial Sequence: Synthetic oligonucleotide
  Sense strand starting at position 3958 of SEQ ID NO: 1243999
acuugugaaauggguauua

SEQ ID NO: 1457485 - RNA, 19 nt, Artificial Sequence
  Description of Artificial Sequence: Synthetic oligonucleotide
  Antisense strand to SEQ ID NO: 1457484
uaauacccauuucacaagu

SEQ ID NO: 1457486 - RNA, 19 nt, Artificial Sequence
  Description of Artificial Sequence: Synthetic oligonucleotide
  Sense strand starting at position 3960 of SEQ ID NO: 1243999
uugugaaauggguauuauu

SEQ ID NO: 1457487 - RNA, 19 nt, Artificial Sequence
  Description of Artificial Sequence: Synthetic oligonucleotide
  Antisense strand to SEQ ID NO: 1457486
aauaauacccauuucacaa

SEQ ID NO: 1457488 - RNA, 19 nt, Artificial Sequence
  Description of Artificial Sequence: Synthetic oligonucleotide
  Sense strand starting at position 436 of SEQ ID NO: 1244000
aaaguuuaccaucgaguuu

SEQ ID NO: 1457489 - RNA, 19 nt, Artificial Sequence
  Description of Artificial Sequence: Synthetic oligonucleotide
  Antisense strand to SEQ ID NO: 1457488
aaacucgaugguaaacuuu

SEQ ID NO: 1457490 - RNA, 19 nt, Artificial Sequence
  Description of Artificial Sequence: Synthetic oligonucleotide
  Sense strand starting at position 442 of SEQ ID NO: 1244000
uaccaucgaguuugcuaaa

SEQ ID NO: 1457491 - RNA, 19 nt, Artificial Sequence
  Description of Artificial Sequence: Synthetic oligonucleotide
  Antisense strand to SEQ ID NO: 1457490
uuuagcaaacucgauggua

SEQ ID NO: 1457492 - RNA, 19 nt, Artificial Sequence
  Description of Artificial Sequence: Synthetic oligonucleotide
  Sense strand starting at position 527 of SEQ ID NO: 1244000
agaggauuagcuuaauagc

SEQ ID NO: 1457493 - RNA, 19 nt, Artificial Sequence
  Description of Artificial Sequence: Synthetic oligonucleotide
  Antisense strand to SEQ ID NO: 1457492
gcuauuaagcuaauccucu

SEQ ID NO: 1457494 - RNA, 19 nt, Artificial Sequence
  Description of Artificial Sequence: Synthetic oligonucleotide
  Sense strand starting at position 535 of SEQ ID NO: 1244000
agcuuaauagcugaacacu

SEQ ID NO: 1457495 - RNA, 19 nt, Artificial Sequence
  Description of Artificial Sequence: Synthetic oligonucleotide
  Antisense strand to SEQ ID NO: 1457494
aguguucagcuauuaagcu

SEQ ID NO: 1457496 - RNA, 19 nt, Artificial Sequence
  Description of Artificial Sequence: Synthetic oligonucleotide
  Sense strand starting at position 561 of SEQ ID NO: 1244000
ggucaaugaacuuggaauu

SEQ ID NO: 1457497 - RNA, 19 nt, Artificial Sequence
  Description of Artificial Sequence: Synthetic oligonucleotide
  Antisense strand to SEQ ID NO: 1457496
aauuccaaguucauugacc

SEQ ID NO: 1457498 - RNA, 19 nt, Artificial Sequence
  Description of Artificial Sequence: Synthetic oligonucleotide
  Sense strand starting at position 562 of SEQ ID NO: 1244000
gucaaugaacuuggaauua

SEQ ID NO: 1457499 - RNA, 19 nt, Artificial Sequence
  Description of Artificial Sequence: Synthetic oligonucleotide
  Antisense strand to SEQ ID NO: 1457498
uaauuccaaguucauugac

SEQ ID NO: 1457500 - RNA, 19 nt, Artificial Sequence
  Description of Artificial Sequence: Synthetic oligonucleotide
  Sense strand starting at position 574 of SEQ ID NO: 1244000
ggaauuauuuguucugcuu

SEQ ID NO: 1457501 - RNA, 19 nt, Artificial Sequence
  Description of Artificial Sequence: Synthetic oligonucleotide
  Antisense strand to SEQ ID NO: 1457500
aagcagaacaaauaauucc

SEQ ID NO: 1457502 - RNA, 19 nt, Artificial Sequence
  Description of Artificial Sequence: Synthetic oligonucleotide
  Sense strand starting at position 712 of SEQ ID NO: 1244000
caggcuuauccagaauagu

SEQ ID NO: 1457503 - RNA, 19 nt, Artificial Sequence
  Description of Artificial Sequence: Synthetic oligonucleotide
  Antisense strand to SEQ ID NO: 1457502
acuauucuggauaagccug

SEQ ID NO: 1457504 - RNA, 19 nt, Artificial Sequence
  Description of Artificial Sequence: Synthetic oligonucleotide
  Sense strand starting at position 715 of SEQ ID NO: 1244000
gcuuauccagaauagucuu

SEQ ID NO: 1457505 - RNA, 19 nt, Artificial Sequence
  Description of Artificial Sequence: Synthetic oligonucleotide
  Antisense strand to SEQ ID NO: 1457504
aagacuauucuggauaagc

SEQ ID NO: 1457506 - RNA, 19 nt, Artificial Sequence
  Description of Artificial Sequence: Synthetic oligonucleotide
  Sense strand starting at position 762 of SEQ ID NO: 1244000
uaagucaguucccuuggaa

SEQ ID NO: 1457507 - RNA, 19 nt, Artificial Sequence
  Description of Artificial Sequence: Synthetic oligonucleotide
  Antisense strand to SEQ ID NO: 1457506
uuccaagggaacugacuua

SEQ ID NO: 1457508 - RNA, 19 nt, Artificial Sequence
  Description of Artificial Sequence: Synthetic oligonucleotide
  Sense strand starting at position 805 of SEQ ID NO: 1244000
aaauuaugguugguagauc

SEQ ID NO: 1457509 - RNA, 19 nt, Artificial Sequence
  Description of Artificial Sequence: Synthetic oligonucleotide
  Antisense strand to SEQ ID NO: 1457508
gaucuaccaaccauaauuu

SEQ ID NO: 1457510 - RNA, 19 nt, Artificial Sequence
  Description of Artificial Sequence: Synthetic oligonucleotide
  Sense strand starting at position 813 of SEQ ID NO: 1244000
guugguagauccuaugaag

SEQ ID NO: 1457511 - RNA, 19 nt, Artificial Sequence
  Description of Artificial Sequence: Synthetic oligonucleotide
  Antisense strand to SEQ ID NO: 1457510
cuucauaggaucuaccaac

SEQ ID NO: 1457512 - RNA, 19 nt, Artificial Sequence
  Description of Artificial Sequence: Synthetic oligonucleotide
  Sense strand starting at position 910 of SEQ ID NO: 1244000
gcauauuuacagugcuacu

SEQ ID NO: 1457513 - RNA, 19 nt, Artificial Sequence
  Description of Artificial Sequence: Synthetic oligonucleotide
  Antisense strand to SEQ ID NO: 1457512
aguagcacuguaaauaugc

SEQ ID NO: 1457514 - RNA, 19 nt, Artificial Sequence
  Description of Artificial Sequence: Synthetic oligonucleotide
  Sense strand starting at position 977 of SEQ ID NO: 1244000
gccuauaaaccauggcuaa

SEQ ID NO: 1457515 - RNA, 19 nt, Artificial Sequence
  Description of Artificial Sequence: Synthetic oligonucleotide
  Antisense strand to SEQ ID NO: 1457514
uuagccaugguuuauaggc

SEQ ID NO: 1457516 - RNA, 19 nt, Artificial Sequence
  Description of Artificial Sequence: Synthetic oligonucleotide
  Sense strand starting at position 1004 of SEQ ID NO: 1244000
cucuaauuccuuggaacag

SEQ ID NO: 1457517 - RNA, 19 nt, Artificial Sequence
  Description of Artificial Sequence: Synthetic oligonucleotide
  Antisense strand to SEQ ID NO: 1457516
cuguuccaaggaauuagag

SEQ ID NO: 1457518 - RNA, 19 nt, Artificial Sequence
  Description of Artificial Sequence: Synthetic oligonucleotide
  Sense strand starting at position 1046 of SEQ ID NO: 1244000
cuuugacacgcguguaauc

SEQ ID NO: 1457519 - RNA, 19 nt, Artificial Sequence
  Description of Artificial Sequence: Synthetic oligonucleotide
  Antisense strand to SEQ ID NO: 1457518
gauuacacgcgugucaaag

SEQ ID NO: 1457520 - RNA, 19 nt, Artificial Sequence
  Description of Artificial Sequence: Synthetic oligonucleotide
  Sense strand starting at position 1056 of SEQ ID NO: 1244000
cguguaaucuccgucauca

SEQ ID NO: 1457521 - RNA, 19 nt, Artificial Sequence
  Description of Artificial Sequence: Synthetic oligonucleotide
  Antisense strand to SEQ ID NO: 1457520
ugaugacggagauuacacg

SEQ ID NO: 1457522 - RNA, 19 nt, Artificial Sequence
  Description of Artificial Sequence: Synthetic oligonucleotide
  Sense strand starting at position 1058 of SEQ ID NO: 1244000
uguaaucuccgucaucauu

SEQ ID NO: 1457523 - RNA, 19 nt, Artificial Sequence
  Description of Artificial Sequence: Synthetic oligonucleotide
  Antisense strand to SEQ ID NO: 1457522
aaugaugacggagauuaca

SEQ ID NO: 1457524 - RNA, 19 nt, Artificial Sequence
  Description of Artificial Sequence: Synthetic oligonucleotide
  Sense strand starting at position 1068 of SEQ ID NO: 1244000
gucaucauuuccuaacugu

SEQ ID NO: 1457525 - RNA, 19 nt, Artificial Sequence
  Description of Artificial Sequence: Synthetic oligonucleotide
  Antisense strand to SEQ ID NO: 1457524
acaguuaggaaaugaugac

SEQ ID NO: 1457526 - RNA, 19 nt, Artificial Sequence
  Description of Artificial Sequence: Synthetic oligonucleotide
  Sense strand starting at position 1189 of SEQ ID NO: 1244000
augcgaaucgcucaagcuu

SEQ ID NO: 1457527 - RNA, 19 nt, Artificial Sequence
  Description of Artificial Sequence: Synthetic oligonucleotide
  Antisense strand to SEQ ID NO: 1457526
aagcuugagcgauucgcau

SEQ ID NO: 1457528 - RNA, 19 nt, Artificial Sequence
  Description of Artificial Sequence: Synthetic oligonucleotide
  Sense strand starting at position 1226 of SEQ ID NO: 1244000
uggauaccuuugcaagacu

SEQ ID NO: 1457529 - RNA, 19 nt, Artificial Sequence
  Description of Artificial Sequence: Synthetic oligonucleotide
  Antisense strand to SEQ ID NO: 1457528
agucuugcaaagguaucca

SEQ ID NO: 1457530 - RNA, 19 nt, Artificial Sequence
  Description of Artificial Sequence: Synthetic oligonucleotide
  Sense strand starting at position 1320 of SEQ ID NO: 1244000
aaaggaagugauggcuuua

SEQ ID NO: 1457531 - RNA, 19 nt, Artificial Sequence
  Description of Artificial Sequence: Synthetic oligonucleotide
  Antisense strand to SEQ ID NO: 1457530
uaaagccaucacuuccuuu

SEQ ID NO: 1457532 - RNA, 19 nt, Artificial Sequence
  Description of Artificial Sequence: Synthetic oligonucleotide
  Sense strand starting at position 1392 of SEQ ID NO: 1244000
ggcucaagauguuaccaga

SEQ ID NO: 1457533 - RNA, 19 nt, Artificial Sequence
  Description of Artificial Sequence: Synthetic oligonucleotide
  Antisense strand to SEQ ID NO: 1457532
ucugguaacaucuugagcc

SEQ ID NO: 1457534 - RNA, 19 nt, Artificial Sequence
  Description of Artificial Sequence: Synthetic oligonucleotide
  Sense strand starting at position 2406 of SEQ ID NO: 1244000
augggaucucgcuguggga

SEQ ID NO: 1457535 - RNA, 19 nt, Artificial Sequence
  Description of Artificial Sequence: Synthetic oligonucleotide
  Antisense strand to SEQ ID NO: 1457534
ucccacagcgagaucccau

SEQ ID NO: 1457536 - RNA, 19 nt, Artificial Sequence
  Description of Artificial Sequence: Synthetic oligonucleotide
  Sense strand starting at position 2433 of SEQ ID NO: 1244000
uccaucuguccuugccaga

SEQ ID NO: 1457537 - RNA, 19 nt, Artificial Sequence
  Description of Artificial Sequence: Synthetic oligonucleotide
  Antisense strand to SEQ ID NO: 1457536
ucuggcaaggacagaugga

SEQ ID NO: 1457538 - RNA, 19 nt, Artificial Sequence
  Description of Artificial Sequence: Synthetic oligonucleotide
  Sense strand starting at position 2452 of SEQ ID NO: 1244000
aucguaguucucugaaagg

SEQ ID NO: 1457539 - RNA, 19 nt, Artificial Sequence
  Description of Artificial Sequence: Synthetic oligonucleotide
  Antisense strand to SEQ ID NO: 1457538
ccuuucagagaacuacgau

SEQ ID NO: 1457540 - RNA, 19 nt, Artificial Sequence
  Description of Artificial Sequence: Synthetic oligonucleotide
  Sense strand starting at position 2470 of SEQ ID NO: 1244000
gcgagacaucccugaccca

SEQ ID NO: 1457541 - RNA, 19 nt, Artificial Sequence
  Description of Artificial Sequence: Synthetic oligonucleotide
  Antisense strand to SEQ ID NO: 1457540
ugggucagggaugucucgc

SEQ ID NO: 1457542 - RNA, 19 nt, Artificial Sequence
  Description of Artificial Sequence: Synthetic oligonucleotide
  Sense strand starting at position 2540 of SEQ ID NO: 1244000
acaguccuuuccucagaca

SEQ ID NO: 1457543 - RNA, 19 nt, Artificial Sequence
  Description of Artificial Sequence: Synthetic oligonucleotide
  Antisense strand to SEQ ID NO: 1457542
ugucugaggaaaggacugu

SEQ ID NO: 1457544 - RNA, 19 nt, Artificial Sequence
  Description of Artificial Sequence: Synthetic oligonucleotide
  Sense strand starting at position 2580 of SEQ ID NO: 1244000
cuucuuaucccuggacgca

SEQ ID NO: 1457545 - RNA, 19 nt, Artificial Sequence
  Description of Artificial Sequence: Synthetic oligonucleotide
  Antisense strand to SEQ ID NO: 1457544
ugcguccagggauaagaag

SEQ ID NO: 1457546 - RNA, 19 nt, Artificial Sequence
  Description of Artificial Sequence: Synthetic oligonucleotide
  Sense strand starting at position 2636 of SEQ ID NO: 1244000
ggaccuagauaucuucuuu

SEQ ID NO: 1457547 - RNA, 19 nt, Artificial Sequence
  Description of Artificial Sequence: Synthetic oligonucleotide
  Antisense strand to SEQ ID NO: 1457546
aaagaagauaucuaggucc

SEQ ID NO: 1457548 - RNA, 19 nt, Artificial Sequence
  Description of Artificial Sequence: Synthetic oligonucleotide
  Sense strand starting at position 3216 of SEQ ID NO: 1244000
cuaugacgucccgaagaga

SEQ ID NO: 1457549 - RNA, 19 nt, Artificial Sequence
  Description of Artificial Sequence: Synthetic oligonucleotide
  Antisense strand to SEQ ID NO: 1457548
ucucuucgggacgucauag

SEQ ID NO: 1457550 - RNA, 19 nt, Artificial Sequence
  Description of Artificial Sequence: Synthetic oligonucleotide
  Sense strand starting at position 3242 of SEQ ID NO: 1244000
ccggaucagggauguauga

SEQ ID NO: 1457551 - RNA, 19 nt, Artificial Sequence
  Description of Artificial Sequence: Synthetic oligonucleotide
  Antisense strand to SEQ ID NO: 1457550
ucauacaucccugauccgg

SEQ ID NO: 1457552 - RNA, 19 nt, Artificial Sequence
  Description of Artificial Sequence: Synthetic oligonucleotide
  Sense strand starting at position 3287 of SEQ ID NO: 1244000
gggaguggacuauguaaua

SEQ ID NO: 1457553 - RNA, 19 nt, Artificial Sequence
  Description of Artificial Sequence: Synthetic oligonucleotide
  Antisense strand to SEQ ID NO: 1457552
uauuacauaguccacuccc

SEQ ID NO: 1457554 - RNA, 19 nt, Artificial Sequence
  Description of Artificial Sequence: Synthetic oligonucleotide
  Sense strand starting at position 3330 of SEQ ID NO: 1244000
ugcagugugccaggucauu

SEQ ID NO: 1457555 - RNA, 19 nt, Artificial Sequence
  Description of Artificial Sequence: Synthetic oligonucleotide
  Antisense strand to SEQ ID NO: 1457554
aaugaccuggcacacugca

SEQ ID NO: 1457556 - RNA, 19 nt, Artificial Sequence
  Description of Artificial Sequence: Synthetic oligonucleotide
  Sense strand starting at position 3341 of SEQ ID NO: 1244000
aggucauucuaagugcuuu

SEQ ID NO: 1457557 - RNA, 19 nt, Artificial Sequence
  Description of Artificial Sequence: Synthetic oligonucleotide
  Antisense strand to SEQ ID NO: 1457556
aaagcacuuagaaugaccu

SEQ ID NO: 1457558 - RNA, 19 nt, Artificial Sequence
  Description of Artificial Sequence: Synthetic oligonucleotide
  Sense strand starting at position 3840 of SEQ ID NO: 1244000
gcccuauaguuucuaucca

SEQ ID NO: 1457559 - RNA, 19 nt, Artificial Sequence
  Description of Artificial Sequence: Synthetic oligonucleotide
  Antisense strand to SEQ ID NO: 1457558
uggauagaaacuauagggc

SEQ ID NO: 1457560 - RNA, 19 nt, Artificial Sequence
  Description of Artificial Sequence: Synthetic oligonucleotide
  Sense strand starting at position 3859 of SEQ ID NO: 1244000
acuuacugucauuagugau

SEQ ID NO: 1457561 - RNA, 19 nt, Artificial Sequence
  Description of Artificial Sequence: Synthetic oligonucleotide
  Antisense strand to SEQ ID NO: 1457560
aucacuaaugacaguaagu

SEQ ID NO: 1457562 - RNA, 19 nt, Artificial Sequence
  Description of Artificial Sequence: Synthetic oligonucleotide
  Sense strand starting at position 3907 of SEQ ID NO: 1244000
ugauuaacgugcuucugau

SEQ ID NO: 1457563 - RNA, 19 nt, Artificial Sequence
  Description of Artificial Sequence: Synthetic oligonucleotide
  Antisense strand to SEQ ID NO: 1457562
aucagaagcacguuaauca

SEQ ID NO: 1457564 - RNA, 19 nt, Artificial Sequence
  Description of Artificial Sequence: Synthetic oligonucleotide
  Sense strand starting at position 3913 of SEQ ID NO: 1244000
acgugcuucugauuaaaua

SEQ ID NO: 1457565 - RNA, 19 nt, Artificial Sequence
  Description of Artificial Sequence: Synthetic oligonucleotide
  Antisense strand to SEQ ID NO: 1457564
uauuuaaucagaagcacgu

SEQ ID NO: 1457566 - RNA, 19 nt, Artificial Sequence
  Description of Artificial Sequence: Synthetic oligonucleotide
  Sense strand starting at position 3914 of SEQ ID NO: 1244000
cgugcuucugauuaaauaa

SEQ ID NO: 1457567 - RNA, 19 nt, Artificial Sequence
  Description of Artificial Sequence: Synthetic oligonucleotide
  Antisense strand to SEQ ID NO: 1457566
uuauuuaaucagaagcacg

SEQ ID NO: 1457568 - RNA, 19 nt, Artificial Sequence
  Description of Artificial Sequence: Synthetic oligonucleotide
  Sense strand starting at position 100 of SEQ ID NO: 1244001
ggaucccgagucugagaua

SEQ ID NO: 1457569 - RNA, 19 nt, Artificial Sequence
  Description of Artificial Sequence: Synthetic oligonucleotide
  Antisense strand to SEQ ID NO: 1457568
uaucucagacucgggaucc

SEQ ID NO: 1457570 - RNA, 19 nt, Artificial Sequence
  Description of Artificial Sequence: Synthetic oligonucleotide
  Sense strand starting at position 101 of SEQ ID NO: 1244001
gaucccgagucugagauau

SEQ ID NO: 1457571 - RNA, 19 nt, Artificial Sequence
  Description of Artificial Sequence: Synthetic oligonucleotide
  Antisense strand to SEQ ID NO: 1457570
auaucucagacucgggauc

SEQ ID NO: 1457572 - RNA, 19 nt, Artificial Sequence
  Description of Artificial Sequence: Synthetic oligonucleotide
  Sense strand starting at position 107 of SEQ ID NO: 1244001
gagucugagauauggucau

SEQ ID NO: 1457573 - RNA, 19 nt, Artificial Sequence
  Description of Artificial Sequence: Synthetic oligonucleotide
  Antisense strand to SEQ ID NO: 1457572
augaccauaucucagacuc

SEQ ID NO: 1457574 - RNA, 19 nt, Artificial Sequence
  Description of Artificial Sequence: Synthetic oligonucleotide
  Sense strand starting at position 134 of SEQ ID NO: 1244001
augccuuggguucaagagu

SEQ ID NO: 1457575 - RNA, 19 nt, Artificial Sequence
  Description of Artificial Sequence: Synthetic oligonucleotide
  Antisense strand to SEQ ID NO: 1457574
acucuugaacccaaggcau

SEQ ID NO: 1457576 - RNA, 19 nt, Artificial Sequence
  Description of Artificial Sequence: Synthetic oligonucleotide
  Sense strand starting at position 151 of SEQ ID NO: 1244001
gucagaguuucagaagagg

SEQ ID NO: 1457577 - RNA, 19 nt, Artificial Sequence
  Description of Artificial Sequence: Synthetic oligonucleotide
  Antisense strand to SEQ ID NO: 1457576
ccucuucugaaacucugac

SEQ ID NO: 1457578 - RNA, 19 nt, Artificial Sequence
  Description of Artificial Sequence: Synthetic oligonucleotide
  Sense strand starting at position 202 of SEQ ID NO: 1244001
ugguaaggaucugugccaa

SEQ ID NO: 1457579 - RNA, 19 nt, Artificial Sequence
  Description of Artificial Sequence: Synthetic oligonucleotide
  Antisense strand to SEQ ID NO: 1457578
uuggcacagauccuuacca

SEQ ID NO: 1457580 - RNA, 19 nt, Artificial Sequence
  Description of Artificial Sequence: Synthetic oligonucleotide
  Sense strand starting at position 486 of SEQ ID NO: 1244001
uuccucgaagccugacauu

SEQ ID NO: 1457581 - RNA, 19 nt, Artificial Sequence
  Description of Artificial Sequence: Synthetic oligonucleotide
  Antisense strand to SEQ ID NO: 1457580
aaugucaggcuucgaggaa

SEQ ID NO: 1457582 - RNA, 19 nt, Artificial Sequence
  Description of Artificial Sequence: Synthetic oligonucleotide
  Sense strand starting at position 766 of SEQ ID NO: 1244001
ugggauguguugucagggu

SEQ ID NO: 1457583 - RNA, 19 nt, Artificial Sequence
  Description of Artificial Sequence: Synthetic oligonucleotide
  Antisense strand to SEQ ID NO: 1457582
acccugacaacacauccca

SEQ ID NO: 1457584 - RNA, 19 nt, Artificial Sequence
  Description of Artificial Sequence: Synthetic oligonucleotide
  Sense strand starting at position 768 of SEQ ID NO: 1244001
ggauguguugucagggucu

SEQ ID NO: 1457585 - RNA, 19 nt, Artificial Sequence
  Description of Artificial Sequence: Synthetic oligonucleotide
  Antisense strand to SEQ ID NO: 1457584
agacccugacaacacaucc

SEQ ID NO: 1457586 - RNA, 19 nt, Artificial Sequence
  Description of Artificial Sequence: Synthetic oligonucleotide
  Sense strand starting at position 1097 of SEQ ID NO: 1244001
cggcucguccuccaucaua

SEQ ID NO: 1457587 - RNA, 19 nt, Artificial Sequence
  Description of Artificial Sequence: Synthetic oligonucleotide
  Antisense strand to SEQ ID NO: 1457586
uaugauggaggacgagccg

SEQ ID NO: 1457588 - RNA, 19 nt, Artificial Sequence
  Description of Artificial Sequence: Synthetic oligonucleotide
  Sense strand starting at position 1398 of SEQ ID NO: 1244001
ggcgggugucuucgguaga

SEQ ID NO: 1457589 - RNA, 19 nt, Artificial Sequence
  Description of Artificial Sequence: Synthetic oligonucleotide
  Antisense strand to SEQ ID NO: 1457588
ucuaccgaagacacccgcc

SEQ ID NO: 1457590 - RNA, 19 nt, Artificial Sequence
  Description of Artificial Sequence: Synthetic oligonucleotide
  Sense strand starting at position 1400 of SEQ ID NO: 1244001
cgggugucuucgguagaca

SEQ ID NO: 1457591 - RNA, 19 nt, Artificial Sequence
  Description of Artificial Sequence: Synthetic oligonucleotide
  Antisense strand to SEQ ID NO: 1457590
ugucuaccgaagacacccg

SEQ ID NO: 1457592 - RNA, 19 nt, Artificial Sequence
  Description of Artificial Sequence: Synthetic oligonucleotide
  Sense strand starting at position 1401 of SEQ ID NO: 1244001
gggugucuucgguagacaa

SEQ ID NO: 1457593 - RNA, 19 nt, Artificial Sequence
  Description of Artificial Sequence: Synthetic oligonucleotide
  Antisense strand to SEQ ID NO: 1457592
uugucuaccgaagacaccc

SEQ ID NO: 1457594 - RNA, 19 nt, Artificial Sequence
  Description of Artificial Sequence: Synthetic oligonucleotide
  Sense strand starting at position 1403 of SEQ ID NO: 1244001
gugucuucgguagacaaug

SEQ ID NO: 1457595 - RNA, 19 nt, Artificial Sequence
  Description of Artificial Sequence: Synthetic oligonucleotide
  Antisense strand to SEQ ID NO: 1457594
cauugucuaccgaagacac

SEQ ID NO: 1457596 - RNA, 19 nt, Artificial Sequence
  Description of Artificial Sequence: Synthetic oligonucleotide
  Sense strand starting at position 2151 of SEQ ID NO: 1244001
aaaggagugucgggauuag

SEQ ID NO: 1457597 - RNA, 19 nt, Artificial Sequence
  Description of Artificial Sequence: Synthetic oligonucleotide
  Antisense strand to SEQ ID NO: 1457596
cuaaucccgacacuccuuu

SEQ ID NO: 1457598 - RNA, 19 nt, Artificial Sequence
  Description of Artificial Sequence: Synthetic oligonucleotide
  Sense strand starting at position 2245 of SEQ ID NO: 1244001
aguggauauugccuacaac

SEQ ID NO: 1457599 - RNA, 19 nt, Artificial Sequence
  Description of Artificial Sequence: Synthetic oligonucleotide
  Antisense strand to SEQ ID NO: 1457598
guuguaggcaauauccacu

SEQ ID NO: 1457600 - RNA, 19 nt, Artificial Sequence
  Description of Artificial Sequence: Synthetic oligonucleotide
  Sense strand starting at position 2246 of SEQ ID NO: 1244001
guggauauugccuacaaca

SEQ ID NO: 1457601 - RNA, 19 nt, Artificial Sequence
  Description of Artificial Sequence: Synthetic oligonucleotide
  Antisense strand to SEQ ID NO: 1457600
uguuguaggcaauauccac

SEQ ID NO: 1457602 - RNA, 19 nt, Artificial Sequence
  Description of Artificial Sequence: Synthetic oligonucleotide
  Sense strand starting at position 2248 of SEQ ID NO: 1244001
ggauauugccuacaacacu

SEQ ID NO: 1457603 - RNA, 19 nt, Artificial Sequence
  Description of Artificial Sequence: Synthetic oligonucleotide
  Antisense strand to SEQ ID NO: 1457602
aguguuguaggcaauaucc

SEQ ID NO: 1457604 - RNA, 19 nt, Artificial Sequence
  Description of Artificial Sequence: Synthetic oligonucleotide
  Sense strand starting at position 2302 of SEQ ID NO: 1244001
guaagaacucccugcucga

SEQ ID NO: 1457605 - RNA, 19 nt, Artificial Sequence
  Description of Artificial Sequence: Synthetic oligonucleotide
  Antisense strand to SEQ ID NO: 1457604
ucgagcagggaguucuuac

SEQ ID NO: 1457606 - RNA, 19 nt, Artificial Sequence
  Description of Artificial Sequence: Synthetic oligonucleotide
  Sense strand starting at position 2326 of SEQ ID NO: 1244001
cccuucucccgguagaaca

SEQ ID NO: 1457607 - RNA, 19 nt, Artificial Sequence
  Description of Artificial Sequence: Synthetic oligonucleotide
  Antisense strand to SEQ ID NO: 1457606
uguucuaccgggagaaggg

SEQ ID NO: 1457608 - RNA, 19 nt, Artificial Sequence
  Description of Artificial Sequence: Synthetic oligonucleotide
  Sense strand starting at position 2575 of SEQ ID NO: 1244001
augcuagaguuacucacuu

SEQ ID NO: 1457609 - RNA, 19 nt, Artificial Sequence
  Description of Artificial Sequence: Synthetic oligonucleotide
  Antisense strand to SEQ ID NO: 1457608
aagugaguaacucuagcau

SEQ ID NO: 1457610 - RNA, 19 nt, Artificial Sequence
  Description of Artificial Sequence: Synthetic oligonucleotide
  Sense strand starting at position 2628 of SEQ ID NO: 1244001
uggaaacuggacugugauu

SEQ ID NO: 1457611 - RNA, 19 nt, Artificial Sequence
  Description of Artificial Sequence: Synthetic oligonucleotide
  Antisense strand to SEQ ID NO: 1457610
aaucacaguccaguuucca

SEQ ID NO: 1457612 - RNA, 19 nt, Artificial Sequence
  Description of Artificial Sequence: Synthetic oligonucleotide
  Sense strand starting at position 3158 of SEQ ID NO: 1244001
ggcggaugagcugacugau

SEQ ID NO: 1457613 - RNA, 19 nt, Artificial Sequence
  Description of Artificial Sequence: Synthetic oligonucleotide
  Antisense strand to SEQ ID NO: 1457612
aucagucagcucauccgcc

SEQ ID NO: 1457614 - RNA, 19 nt, Artificial Sequence
  Description of Artificial Sequence: Synthetic oligonucleotide
  Sense strand starting at position 3265 of SEQ ID NO: 1244001
gggcguaacaaccaugaga

SEQ ID NO: 1457615 - RNA, 19 nt, Artificial Sequence
  Description of Artificial Sequence: Synthetic oligonucleotide
  Antisense strand to SEQ ID NO: 1457614
ucucaugguuguuacgccc

SEQ ID NO: 1457616 - RNA, 19 nt, Artificial Sequence
  Description of Artificial Sequence: Synthetic oligonucleotide
  Sense strand starting at position 3325 of SEQ ID NO: 1244001
aggucuuccaagcaaacga

SEQ ID NO: 1457617 - RNA, 19 nt, Artificial Sequence
  Description of Artificial Sequence: Synthetic oligonucleotide
  Antisense strand to SEQ ID NO: 1457616
ucguuugcuuggaagaccu

SEQ ID NO: 1457618 - RNA, 19 nt, Artificial Sequence
  Description of Artificial Sequence: Synthetic oligonucleotide
  Sense strand starting at position 3377 of SEQ ID NO: 1244001
uguugucugucagaggaau

SEQ ID NO: 1457619 - RNA, 19 nt, Artificial Sequence
  Description of Artificial Sequence: Synthetic oligonucleotide
  Antisense strand to SEQ ID NO: 1457618
auuccucugacagacaaca

SEQ ID NO: 1457620 - RNA, 19 nt, Artificial Sequence
  Description of Artificial Sequence: Synthetic oligonucleotide
  Sense strand starting at position 3383 of SEQ ID NO: 1244001
cugucagaggaauggucuu

SEQ ID NO: 1457621 - RNA, 19 nt, Artificial Sequence
  Description of Artificial Sequence: Synthetic oligonucleotide
  Antisense strand to SEQ ID NO: 1457620
aagaccauuccucugacag

SEQ ID NO: 1457622 - RNA, 19 nt, Artificial Sequence
  Description of Artificial Sequence: Synthetic oligonucleotide
  Sense strand starting at position 3389 of SEQ ID NO: 1244001
gaggaauggucuuauuccu

SEQ ID NO: 1457623 - RNA, 19 nt, Artificial Sequence
  Description of Artificial Sequence: Synthetic oligonucleotide
  Antisense strand to SEQ ID NO: 1457622
aggaauaagaccauuccuc

SEQ ID NO: 1457624 - RNA, 19 nt, Artificial Sequence
  Description of Artificial Sequence: Synthetic oligonucleotide
  Sense strand starting at position 3396 of SEQ ID NO: 1244001
ggucuuauuccuuauuccu

SEQ ID NO: 1457625 - RNA, 19 nt, Artificial Sequence
  Description of Artificial Sequence: Synthetic oligonucleotide
  Antisense strand to SEQ ID NO: 1457624
aggaauaaggaauaagacc

SEQ ID NO: 1457626 - RNA, 19 nt, Artificial Sequence
  Description of Artificial Sequence: Synthetic oligonucleotide
  Sense strand starting at position 3559 of SEQ ID NO: 1244001
uaggcaaagucuuacaaug

SEQ ID NO: 1457627 - RNA, 19 nt, Artificial Sequence
  Description of Artificial Sequence: Synthetic oligonucleotide
  Antisense strand to SEQ ID NO: 1457626
cauuguaagacuuugccua

SEQ ID NO: 1457628 - RNA, 19 nt, Artificial Sequence
  Description of Artificial Sequence: Synthetic oligonucleotide
  Sense strand starting at position 3561 of SEQ ID NO: 1244001
ggcaaagucuuacaauggu

SEQ ID NO: 1457629 - RNA, 19 nt, Artificial Sequence
  Description of Artificial Sequence: Synthetic oligonucleotide
  Antisense strand to SEQ ID NO: 1457628
accauuguaagacuuugcc

SEQ ID NO: 1457630 - RNA, 19 nt, Artificial Sequence
  Description of Artificial Sequence: Synthetic oligonucleotide
  Sense strand starting at position 3606 of SEQ ID NO: 1244001
caauucuuucgauguguac

SEQ ID NO: 1457631 - RNA, 19 nt, Artificial Sequence
  Description of Artificial Sequence: Synthetic oligonucleotide
  Antisense strand to SEQ ID NO: 1457630
guacacaucgaaagaauug

SEQ ID NO: 1457632 - RNA, 19 nt, Artificial Sequence
  Description of Artificial Sequence: Synthetic oligonucleotide
  Sense strand starting at position 3610 of SEQ ID NO: 1244001
ucuuucgauguguacaaca

SEQ ID NO: 1457633 - RNA, 19 nt, Artificial Sequence
  Description of Artificial Sequence: Synthetic oligonucleotide
  Antisense strand to SEQ ID NO: 1457632
uguuguacacaucgaaaga

SEQ ID NO: 1457634 - RNA, 19 nt, Artificial Sequence
  Description of Artificial Sequence: Synthetic oligonucleotide
  Sense strand starting at position 3612 of SEQ ID NO: 1244001
uuucgauguguacaacaaa

SEQ ID NO: 1457635 - RNA, 19 nt, Artificial Sequence
  Description of Artificial Sequence: Synthetic oligonucleotide
  Antisense strand to SEQ ID NO: 1457634
uuuguuguacacaucgaaa

SEQ ID NO: 1457636 - RNA, 19 nt, Artificial Sequence
  Description of Artificial Sequence: Synthetic oligonucleotide
  Sense strand starting at position 3680 of SEQ ID NO: 1244001
aguugucugagaugcacuu

SEQ ID NO: 1457637 - RNA, 19 nt, Artificial Sequence
  Description of Artificial Sequence: Synthetic oligonucleotide
  Antisense strand to SEQ ID NO: 1457636
aagugcaucucagacaacu

SEQ ID NO: 1457638 - RNA, 19 nt, Artificial Sequence
  Description of Artificial Sequence: Synthetic oligonucleotide
  Sense strand starting at position 3687 of SEQ ID NO: 1244001
ugagaugcacuuugucaca

SEQ ID NO: 1457639 - RNA, 19 nt, Artificial Sequence
  Description of Artificial Sequence: Synthetic oligonucleotide
  Antisense strand to SEQ ID NO: 1457638
ugugacaaagugcaucuca

SEQ ID NO: 1457640 - RNA, 19 nt, Artificial Sequence
  Description of Artificial Sequence: Synthetic oligonucleotide
  Sense strand starting at position 3689 of SEQ ID NO: 1244001
agaugcacuuugucacauu

SEQ ID NO: 1457641 - RNA, 19 nt, Artificial Sequence
  Description of Artificial Sequence: Synthetic oligonucleotide
  Antisense strand to SEQ ID NO: 1457640
aaugugacaaagugcaucu

SEQ ID NO: 1457642 - RNA, 19 nt, Artificial Sequence
  Description of Artificial Sequence: Synthetic oligonucleotide
  Sense strand starting at position 3895 of SEQ ID NO: 1244001
uaguguugcagcuaccgau

SEQ ID NO: 1457643 - RNA, 19 nt, Artificial Sequence
  Description of Artificial Sequence: Synthetic oligonucleotide
  Antisense strand to SEQ ID NO: 1457642
aucgguagcugcaacacua

SEQ ID NO: 1457644 - RNA, 19 nt, Artificial Sequence
  Description of Artificial Sequence: Synthetic oligonucleotide
  Sense strand starting at position 3902 of SEQ ID NO: 1244001
gcagcuaccgaucauuaag

SEQ ID NO: 1457645 - RNA, 19 nt, Artificial Sequence
  Description of Artificial Sequence: Synthetic oligonucleotide
  Antisense strand to SEQ ID NO: 1457644
cuuaaugaucgguagcugc

SEQ ID NO: 1457646 - RNA, 19 nt, Artificial Sequence
  Description of Artificial Sequence: Synthetic oligonucleotide
  Sense strand starting at position 3905 of SEQ ID NO: 1244001
gcuaccgaucauuaagaca

SEQ ID NO: 1457647 - RNA, 19 nt, Artificial Sequence
  Description of Artificial Sequence: Synthetic oligonucleotide
  Antisense strand to SEQ ID NO: 1457646
ugucuuaaugaucgguagc

SEQ ID NO: 1457648 - RNA, 19 nt, Artificial Sequence
  Description of Artificial Sequence: Synthetic oligonucleotide
  Sense strand starting at position 139 of SEQ ID NO: 1244002
ggaugcuguugauuaucaa

SEQ ID NO: 1457649 - RNA, 19 nt, Artificial Sequence
  Description of Artificial Sequence: Synthetic oligonucleotide
  Antisense strand to SEQ ID NO: 1457648
uugauaaucaacagcaucc

SEQ ID NO: 1457650 - RNA, 19 nt, Artificial Sequence
  Description of Artificial Sequence: Synthetic oligonucleotide
  Sense strand starting at position 142 of SEQ ID NO: 1244002
ugcuguugauuaucaagaa

SEQ ID NO: 1457651 - RNA, 19 nt, Artificial Sequence
  Description of Artificial Sequence: Synthetic oligonucleotide
  Antisense strand to SEQ ID NO: 1457650
uucuugauaaucaacagca

SEQ ID NO: 1457652 - RNA, 19 nt, Artificial Sequence
  Description of Artificial Sequence: Synthetic oligonucleotide
  Sense strand starting at position 143 of SEQ ID NO: 1244002
gcuguugauuaucaagaau

SEQ ID NO: 1457653 - RNA, 19 nt, Artificial Sequence
  Description of Artificial Sequence: Synthetic oligonucleotide
  Antisense strand to SEQ ID NO: 1457652
auucuugauaaucaacagc

SEQ ID NO: 1457654 - RNA, 19 nt, Artificial Sequence
  Description of Artificial Sequence: Synthetic oligonucleotide
  Sense strand starting at position 165 of SEQ ID NO: 1244002
acaacucuucuggguaaac

SEQ ID NO: 1457655 - RNA, 19 nt, Artificial Sequence
  Description of Artificial Sequence: Synthetic oligonucleotide
  Antisense strand to SEQ ID NO: 1457654
guuuacccagaagaguugu

SEQ ID NO: 1457656 - RNA, 19 nt, Artificial Sequence
  Description of Artificial Sequence: Synthetic oligonucleotide
  Sense strand starting at position 371 of SEQ ID NO: 1244002
ccaguucagcgcugaagga

SEQ ID NO: 1457657 - RNA, 19 nt, Artificial Sequence
  Description of Artificial Sequence: Synthetic oligonucleotide
  Antisense strand to SEQ ID NO: 1457656
uccuucagcgcugaacugg

SEQ ID NO: 1457658 - RNA, 19 nt, Artificial Sequence
  Description of Artificial Sequence: Synthetic oligonucleotide
  Sense strand starting at position 557 of SEQ ID NO: 1244002
ccauguggcuuugcucaga

SEQ ID NO: 1457659 - RNA, 19 nt, Artificial Sequence
  Description of Artificial Sequence: Synthetic oligonucleotide
  Antisense strand to SEQ ID NO: 1457658
ucugagcaaagccacaugg

SEQ ID NO: 1457660 - RNA, 19 nt, Artificial Sequence
  Description of Artificial Sequence: Synthetic oligonucleotide
  Sense strand starting at position 605 of SEQ ID NO: 1244002
agucgcauuggguagaacu

SEQ ID NO: 1457661 - RNA, 19 nt, Artificial Sequence
  Description of Artificial Sequence: Synthetic oligonucleotide
  Antisense strand to SEQ ID NO: 1457660
aguucuacccaaugcgacu

SEQ ID NO: 1457662 - RNA, 19 nt, Artificial Sequence
  Description of Artificial Sequence: Synthetic oligonucleotide
  Sense strand starting at position 607 of SEQ ID NO: 1244002
ucgcauuggguagaacuau

SEQ ID NO: 1457663 - RNA, 19 nt, Artificial Sequence
  Description of Artificial Sequence: Synthetic oligonucleotide
  Antisense strand to SEQ ID NO: 1457662
auaguucuacccaaugcga

SEQ ID NO: 1457664 - RNA, 19 nt, Artificial Sequence
  Description of Artificial Sequence: Synthetic oligonucleotide
  Sense strand starting at position 613 of SEQ ID NO: 1244002
uggguagaacuauguagaa

SEQ ID NO: 1457665 - RNA, 19 nt, Artificial Sequence
  Description of Artificial Sequence: Synthetic oligonucleotide
  Antisense strand to SEQ ID NO: 1457664
uucuacauaguucuaccca

SEQ ID NO: 1457666 - RNA, 19 nt, Artificial Sequence
  Description of Artificial Sequence: Synthetic oligonucleotide
  Sense strand starting at position 770 of SEQ ID NO: 1244002
ccagcaacgugacaauagu

SEQ ID NO: 1457667 - RNA, 19 nt, Artificial Sequence
  Description of Artificial Sequence: Synthetic oligonucleotide
  Antisense strand to SEQ ID NO: 1457666
acuauugucacguugcugg

SEQ ID NO: 1457668 - RNA, 19 nt, Artificial Sequence
  Description of Artificial Sequence: Synthetic oligonucleotide
  Sense strand starting at position 776 of SEQ ID NO: 1244002
acgugacaauagugagguu

SEQ ID NO: 1457669 - RNA, 19 nt, Artificial Sequence
  Description of Artificial Sequence: Synthetic oligonucleotide
  Antisense strand to SEQ ID NO: 1457668
aaccucacuauugucacgu

SEQ ID NO: 1457670 - RNA, 19 nt, Artificial Sequence
  Description of Artificial Sequence: Synthetic oligonucleotide
  Sense strand starting at position 829 of SEQ ID NO: 1244002
ccaugcuccuccggaguuu

SEQ ID NO: 1457671 - RNA, 19 nt, Artificial Sequence
  Description of Artificial Sequence: Synthetic oligonucleotide
  Antisense strand to SEQ ID NO: 1457670
aaacuccggaggagcaugg

SEQ ID NO: 1457672 - RNA, 19 nt, Artificial Sequence
  Description of Artificial Sequence: Synthetic oligonucleotide
  Sense strand starting at position 840 of SEQ ID NO: 1244002
cggaguuucugagauucaa

SEQ ID NO: 1457673 - RNA, 19 nt, Artificial Sequence
  Description of Artificial Sequence: Synthetic oligonucleotide
  Antisense strand to SEQ ID NO: 1457672
uugaaucucagaaacuccg

SEQ ID NO: 1457674 - RNA, 19 nt, Artificial Sequence
  Description of Artificial Sequence: Synthetic oligonucleotide
  Sense strand starting at position 881 of SEQ ID NO: 1244002
cuucguguucugugucuuu

SEQ ID NO: 1457675 - RNA, 19 nt, Artificial Sequence
  Description of Artificial Sequence: Synthetic oligonucleotide
  Antisense strand to SEQ ID NO: 1457674
aaagacacagaacacgaag

SEQ ID NO: 1457676 - RNA, 19 nt, Artificial Sequence
  Description of Artificial Sequence: Synthetic oligonucleotide
  Sense strand starting at position 946 of SEQ ID NO: 1244002
cgaggauacggcugucaca

SEQ ID NO: 1457677 - RNA, 19 nt, Artificial Sequence
  Description of Artificial Sequence: Synthetic oligonucleotide
  Antisense strand to SEQ ID NO: 1457676
ugugacagccguauccucg

SEQ ID NO: 1457678 - RNA, 19 nt, Artificial Sequence
  Description of Artificial Sequence: Synthetic oligonucleotide
  Sense strand starting at position 1255 of SEQ ID NO: 1244002
agcugucuucucugcccaa

SEQ ID NO: 1457679 - RNA, 19 nt, Artificial Sequence
  Description of Artificial Sequence: Synthetic oligonucleotide
  Antisense strand to SEQ ID NO: 1457678
uugggcagagaagacagcu

SEQ ID NO: 1457680 - RNA, 19 nt, Artificial Sequence
  Description of Artificial Sequence: Synthetic oligonucleotide
  Sense strand starting at position 1256 of SEQ ID NO: 1244002
gcugucuucucugcccaaa

SEQ ID NO: 1457681 - RNA, 19 nt, Artificial Sequence
  Description of Artificial Sequence: Synthetic oligonucleotide
  Antisense strand to SEQ ID NO: 1457680
uuugggcagagaagacagc

SEQ ID NO: 1457682 - RNA, 19 nt, Artificial Sequence
  Description of Artificial Sequence: Synthetic oligonucleotide
  Sense strand starting at position 2228 of SEQ ID NO: 1244002
gggagucacguuuauugaa

SEQ ID NO: 1457683 - RNA, 19 nt, Artificial Sequence
  Description of Artificial Sequence: Synthetic oligonucleotide
  Antisense strand to SEQ ID NO: 1457682
uucaauaaacgugacuccc

SEQ ID NO: 1457684 - RNA, 19 nt, Artificial Sequence
  Description of Artificial Sequence: Synthetic oligonucleotide
  Sense strand starting at position 2473 of SEQ ID NO: 1244002
ccuuguaguccgggucgau

SEQ ID NO: 1457685 - RNA, 19 nt, Artificial Sequence
  Description of Artificial Sequence: Synthetic oligonucleotide
  Antisense strand to SEQ ID NO: 1457684
aucgacccggacuacaagg

SEQ ID NO: 1457686 - RNA, 19 nt, Artificial Sequence
  Description of Artificial Sequence: Synthetic oligonucleotide
  Sense strand starting at position 2534 of SEQ ID NO: 1244002
guccgcucccagggagaua

SEQ ID NO: 1457687 - RNA, 19 nt, Artificial Sequence
  Description of Artificial Sequence: Synthetic oligonucleotide
  Antisense strand to SEQ ID NO: 1457686
uaucucccugggagcggac

SEQ ID NO: 1457688 - RNA, 19 nt, Artificial Sequence
  Description of Artificial Sequence: Synthetic oligonucleotide
  Sense strand starting at position 2740 of SEQ ID NO: 1244002
guugguucuauugaggaca

SEQ ID NO: 1457689 - RNA, 19 nt, Artificial Sequence
  Description of Artificial Sequence: Synthetic oligonucleotide
  Antisense strand to SEQ ID NO: 1457688
uguccucaauagaaccaac

SEQ ID NO: 1457690 - RNA, 19 nt, Artificial Sequence
  Description of Artificial Sequence: Synthetic oligonucleotide
  Sense strand starting at position 2742 of SEQ ID NO: 1244002
ugguucuauugaggacaaa

SEQ ID NO: 1457691 - RNA, 19 nt, Artificial Sequence
  Description of Artificial Sequence: Synthetic oligonucleotide
  Antisense strand to SEQ ID NO: 1457690
uuuguccucaauagaacca

SEQ ID NO: 1457692 - RNA, 19 nt, Artificial Sequence
  Description of Artificial Sequence: Synthetic oligonucleotide
  Sense strand starting at position 2775 of SEQ ID NO: 1244002
uccagaagccucuaggguu

SEQ ID NO: 1457693 - RNA, 19 nt, Artificial Sequence
  Description of Artificial Sequence: Synthetic oligonucleotide
  Antisense strand to SEQ ID NO: 1457692
aacccuagaggcuucugga

SEQ ID NO: 1457694 - RNA, 19 nt, Artificial Sequence
  Description of Artificial Sequence: Synthetic oligonucleotide
  Sense strand starting at position 2995 of SEQ ID NO: 1244002
gaggguucuugucacgaac

SEQ ID NO: 1457695 - RNA, 19 nt, Artificial Sequence
  Description of Artificial Sequence: Synthetic oligonucleotide
  Antisense strand to SEQ ID NO: 1457694
guucgugacaagaacccuc

SEQ ID NO: 1457696 - RNA, 19 nt, Artificial Sequence
  Description of Artificial Sequence: Synthetic oligonucleotide
  Sense strand starting at position 3175 of SEQ ID NO: 1244002
gguucaagccuguguagac

SEQ ID NO: 1457697 - RNA, 19 nt, Artificial Sequence
  Description of Artificial Sequence: Synthetic oligonucleotide
  Antisense strand to SEQ ID NO: 1457696
gucuacacaggcuugaacc

SEQ ID NO: 1457698 - RNA, 19 nt, Artificial Sequence
  Description of Artificial Sequence: Synthetic oligonucleotide
  Sense strand starting at position 3263 of SEQ ID NO: 1244002
gccucaucucgcuggugaa

SEQ ID NO: 1457699 - RNA, 19 nt, Artificial Sequence
  Description of Artificial Sequence: Synthetic oligonucleotide
  Antisense strand to SEQ ID NO: 1457698
uucaccagcgagaugaggc

SEQ ID NO: 1457700 - RNA, 19 nt, Artificial Sequence
  Description of Artificial Sequence: Synthetic oligonucleotide
  Sense strand starting at position 3264 of SEQ ID NO: 1244002
ccucaucucgcuggugaau

SEQ ID NO: 1457701 - RNA, 19 nt, Artificial Sequence
  Description of Artificial Sequence: Synthetic oligonucleotide
  Antisense strand to SEQ ID NO: 1457700
auucaccagcgagaugagg

SEQ ID NO: 1457702 - RNA, 19 nt, Artificial Sequence
  Description of Artificial Sequence: Synthetic oligonucleotide
  Sense strand starting at position 3766 of SEQ ID NO: 1244002
cggccucugacuugcuuau

SEQ ID NO: 1457703 - RNA, 19 nt, Artificial Sequence
  Description of Artificial Sequence: Synthetic oligonucleotide
  Antisense strand to SEQ ID NO: 1457702
auaagcaagucagaggccg

SEQ ID NO: 1457704 - RNA, 19 nt, Artificial Sequence
  Description of Artificial Sequence: Synthetic oligonucleotide
  Sense strand starting at position 3768 of SEQ ID NO: 1244002
gccucugacuugcuuauau

SEQ ID NO: 1457705 - RNA, 19 nt, Artificial Sequence
  Description of Artificial Sequence: Synthetic oligonucleotide
  Antisense strand to SEQ ID NO: 1457704
auauaagcaagucagaggc

SEQ ID NO: 1457706 - RNA, 19 nt, Artificial Sequence
  Description of Artificial Sequence: Synthetic oligonucleotide
  Sense strand starting at position 3770 of SEQ ID NO: 1244002
cucugacuugcuuauauag

SEQ ID NO: 1457707 - RNA, 19 nt, Artificial Sequence
  Description of Artificial Sequence: Synthetic oligonucleotide
  Antisense strand to SEQ ID NO: 1457706
cuauauaagcaagucagag

SEQ ID NO: 1457708 - RNA, 19 nt, Artificial Sequence
  Description of Artificial Sequence: Synthetic oligonucleotide
  Sense strand starting at position 3869 of SEQ ID NO: 1244002
cccagaucauguuuaguga

SEQ ID NO: 1457709 - RNA, 19 nt, Artificial Sequence
  Description of Artificial Sequence: Synthetic oligonucleotide
  Antisense strand to SEQ ID NO: 1457708
ucacuaaacaugaucuggg

SEQ ID NO: 1457710 - RNA, 19 nt, Artificial Sequence
  Description of Artificial Sequence: Synthetic oligonucleotide
  Sense strand starting at position 3873 of SEQ ID NO: 1244002
gaucauguuuagugacuca

SEQ ID NO: 1457711 - RNA, 19 nt, Artificial Sequence
  Description of Artificial Sequence: Synthetic oligonucleotide
  Antisense strand to SEQ ID NO: 1457710
ugagucacuaaacaugauc

SEQ ID NO: 1457712 - RNA, 19 nt, Artificial Sequence
  Description of Artificial Sequence: Synthetic oligonucleotide
  Sense strand starting at position 34 of SEQ ID NO: 1244003
acaguuaacguggaauuga

SEQ ID NO: 1457713 - RNA, 19 nt, Artificial Sequence
  Description of Artificial Sequence: Synthetic oligonucleotide
  Antisense strand to SEQ ID NO: 1457712
ucaauuccacguuaacugu

SEQ ID NO: 1457714 - RNA, 19 nt, Artificial Sequence
  Description of Artificial Sequence: Synthetic oligonucleotide
  Sense strand starting at position 75 of SEQ ID NO: 1244003
aaaugugagccguagaguu

SEQ ID NO: 1457715 - RNA, 19 nt, Artificial Sequence
  Description of Artificial Sequence: Synthetic oligonucleotide
  Antisense strand to SEQ ID NO: 1457714
aacucuacggcucacauuu

SEQ ID NO: 1457716 - RNA, 19 nt, Artificial Sequence
  Description of Artificial Sequence: Synthetic oligonucleotide
  Sense strand starting at position 242 of SEQ ID NO: 1244003
gauuuauggucugcucauc

SEQ ID NO: 1457717 - RNA, 19 nt, Artificial Sequence
  Description of Artificial Sequence: Synthetic oligonucleotide
  Antisense strand to SEQ ID NO: 1457716
gaugagcagaccauaaauc

SEQ ID NO: 1457718 - RNA, 19 nt, Artificial Sequence
  Description of Artificial Sequence: Synthetic oligonucleotide
  Sense strand starting at position 339 of SEQ ID NO: 1244003
gauagugaacucugcaugu

SEQ ID NO: 1457719 - RNA, 19 nt, Artificial Sequence
  Description of Artificial Sequence: Synthetic oligonucleotide
  Antisense strand to SEQ ID NO: 1457718
acaugcagaguucacuauc

SEQ ID NO: 1457720 - RNA, 19 nt, Artificial Sequence
  Description of Artificial Sequence: Synthetic oligonucleotide
  Sense strand starting at position 341 of SEQ ID NO: 1244003
uagugaacucugcauguga

SEQ ID NO: 1457721 - RNA, 19 nt, Artificial Sequence
  Description of Artificial Sequence: Synthetic oligonucleotide
  Antisense strand to SEQ ID NO: 1457720
ucacaugcagaguucacua

SEQ ID NO: 1457722 - RNA, 19 nt, Artificial Sequence
  Description of Artificial Sequence: Synthetic oligonucleotide
  Sense strand starting at position 350 of SEQ ID NO: 1244003
cugcaugugagugguauuu

SEQ ID NO: 1457723 - RNA, 19 nt, Artificial Sequence
  Description of Artificial Sequence: Synthetic oligonucleotide
  Antisense strand to SEQ ID NO: 1457722
aaauaccacucacaugcag

SEQ ID NO: 1457724 - RNA, 19 nt, Artificial Sequence
  Description of Artificial Sequence: Synthetic oligonucleotide
  Sense strand starting at position 756 of SEQ ID NO: 1244003
ccuugugaucucugaaacu

SEQ ID NO: 1457725 - RNA, 19 nt, Artificial Sequence
  Description of Artificial Sequence: Synthetic oligonucleotide
  Antisense strand to SEQ ID NO: 1457724
aguuucagagaucacaagg

SEQ ID NO: 1457726 - RNA, 19 nt, Artificial Sequence
  Description of Artificial Sequence: Synthetic oligonucleotide
  Sense strand starting at position 817 of SEQ ID NO: 1244003
gaaacaugcuuucuggaag

SEQ ID NO: 1457727 - RNA, 19 nt, Artificial Sequence
  Description of Artificial Sequence: Synthetic oligonucleotide
  Antisense strand to SEQ ID NO: 1457726
cuuccagaaagcauguuuc

SEQ ID NO: 1457728 - RNA, 19 nt, Artificial Sequence
  Description of Artificial Sequence: Synthetic oligonucleotide
  Sense strand starting at position 1122 of SEQ ID NO: 1244003
gacugugaggucugcaaca

SEQ ID NO: 1457729 - RNA, 19 nt, Artificial Sequence
  Description of Artificial Sequence: Synthetic oligonucleotide
  Antisense strand to SEQ ID NO: 1457728
uguugcagaccucacaguc

SEQ ID NO: 1457730 - RNA, 19 nt, Artificial Sequence
  Description of Artificial Sequence: Synthetic oligonucleotide
  Sense strand starting at position 2623 of SEQ ID NO: 1244003
cuguaagcuuugccaaaug

SEQ ID NO: 1457731 - RNA, 19 nt, Artificial Sequence
  Description of Artificial Sequence: Synthetic oligonucleotide
  Antisense strand to SEQ ID NO: 1457730
cauuuggcaaagcuuacag

SEQ ID NO: 1457732 - RNA, 19 nt, Artificial Sequence
  Description of Artificial Sequence: Synthetic oligonucleotide
  Sense strand starting at position 2805 of SEQ ID NO: 1244003
gcucuuggugaaggaaaga

SEQ ID NO: 1457733 - RNA, 19 nt, Artificial Sequence
  Description of Artificial Sequence: Synthetic oligonucleotide
  Antisense strand to SEQ ID NO: 1457732
ucuuuccuucaccaagagc

SEQ ID NO: 1457734 - RNA, 19 nt, Artificial Sequence
  Description of Artificial Sequence: Synthetic oligonucleotide
  Sense strand starting at position 2874 of SEQ ID NO: 1244003
uccuguuuggaaggaguuu

SEQ ID NO: 1457735 - RNA, 19 nt, Artificial Sequence
  Description of Artificial Sequence: Synthetic oligonucleotide
  Antisense strand to SEQ ID NO: 1457734
aaacuccuuccaaacagga

SEQ ID NO: 1457736 - RNA, 19 nt, Artificial Sequence
  Description of Artificial Sequence: Synthetic oligonucleotide
  Sense strand starting at position 2883 of SEQ ID NO: 1244003
gaaggaguuugauuccaac

SEQ ID NO: 1457737 - RNA, 19 nt, Artificial Sequence
  Description of Artificial Sequence: Synthetic oligonucleotide
  Antisense strand to SEQ ID NO: 1457736
guuggaaucaaacuccuuc

SEQ ID NO: 1457738 - RNA, 19 nt, Artificial Sequence
  Description of Artificial Sequence: Synthetic oligonucleotide
  Sense strand starting at position 2922 of SEQ ID NO: 1244003
aggaaauguuucuugcacu

SEQ ID NO: 1457739 - RNA, 19 nt, Artificial Sequence
  Description of Artificial Sequence: Synthetic oligonucleotide
  Antisense strand to SEQ ID NO: 1457738
agugcaagaaacauuuccu

SEQ ID NO: 1457740 - RNA, 19 nt, Artificial Sequence
  Description of Artificial Sequence: Synthetic oligonucleotide
  Sense strand starting at position 2981 of SEQ ID NO: 1244003
gaguuuagcuuggugugaa

SEQ ID NO: 1457741 - RNA, 19 nt, Artificial Sequence
  Description of Artificial Sequence: Synthetic oligonucleotide
  Antisense strand to SEQ ID NO: 1457740
uucacaccaagcuaaacuc

SEQ ID NO: 1457742 - RNA, 19 nt, Artificial Sequence
  Description of Artificial Sequence: Synthetic oligonucleotide
  Sense strand starting at position 2995 of SEQ ID NO: 1244003
gugaaaguaguccacccaa

SEQ ID NO: 1457743 - RNA, 19 nt, Artificial Sequence
  Description of Artificial Sequence: Synthetic oligonucleotide
  Antisense strand to SEQ ID NO: 1457742
uuggguggacuacuuucac

SEQ ID NO: 1457744 - RNA, 19 nt, Artificial Sequence
  Description of Artificial Sequence: Synthetic oligonucleotide
  Sense strand starting at position 3038 of SEQ ID NO: 1244003
ggcuuucuccaauauucug

SEQ ID NO: 1457745 - RNA, 19 nt, Artificial Sequence
  Description of Artificial Sequence: Synthetic oligonucleotide
  Antisense strand to SEQ ID NO: 1457744
cagaauauuggagaaagcc

SEQ ID NO: 1457746 - RNA, 19 nt, Artificial Sequence
  Description of Artificial Sequence: Synthetic oligonucleotide
  Sense strand starting at position 3044 of SEQ ID NO: 1244003
cuccaauauucugugaggu

SEQ ID NO: 1457747 - RNA, 19 nt, Artificial Sequence
  Description of Artificial Sequence: Synthetic oligonucleotide
  Antisense strand to SEQ ID NO: 1457746
accucacagaauauuggag

SEQ ID NO: 1457748 - RNA, 19 nt, Artificial Sequence
  Description of Artificial Sequence: Synthetic oligonucleotide
  Sense strand starting at position 3045 of SEQ ID NO: 1244003
uccaauauucugugaggua

SEQ ID NO: 1457749 - RNA, 19 nt, Artificial Sequence
  Description of Artificial Sequence: Synthetic oligonucleotide
  Antisense strand to SEQ ID NO: 1457748
uaccucacagaauauugga

SEQ ID NO: 1457750 - RNA, 19 nt, Artificial Sequence
  Description of Artificial Sequence: Synthetic oligonucleotide
  Sense strand starting at position 3158 of SEQ ID NO: 1244003
agugaagucugauuggaga

SEQ ID NO: 1457751 - RNA, 19 nt, Artificial Sequence
  Description of Artificial Sequence: Synthetic oligonucleotide
  Antisense strand to SEQ ID NO: 1457750
ucuccaaucagacuucacu

SEQ ID NO: 1457752 - RNA, 19 nt, Artificial Sequence
  Description of Artificial Sequence: Synthetic oligonucleotide
  Sense strand starting at position 3312 of SEQ ID NO: 1244003
uuugacuuguggguucaga

SEQ ID NO: 1457753 - RNA, 19 nt, Artificial Sequence
  Description of Artificial Sequence: Synthetic oligonucleotide
  Antisense strand to SEQ ID NO: 1457752
ucugaacccacaagucaaa

SEQ ID NO: 1457754 - RNA, 19 nt, Artificial Sequence
  Description of Artificial Sequence: Synthetic oligonucleotide
  Sense strand starting at position 3320 of SEQ ID NO: 1244003
guggguucagaccagaguu

SEQ ID NO: 1457755 - RNA, 19 nt, Artificial Sequence
  Description of Artificial Sequence: Synthetic oligonucleotide
  Antisense strand to SEQ ID NO: 1457754
aacucuggucugaacccac

SEQ ID NO: 1457756 - RNA, 19 nt, Artificial Sequence
  Description of Artificial Sequence: Synthetic oligonucleotide
  Sense strand starting at position 3347 of SEQ ID NO: 1244003
cgugguucaguguaagauu

SEQ ID NO: 1457757 - RNA, 19 nt, Artificial Sequence
  Description of Artificial Sequence: Synthetic oligonucleotide
  Antisense strand to SEQ ID NO: 1457756
aaucuuacacugaaccacg

SEQ ID NO: 1457758 - RNA, 19 nt, Artificial Sequence
  Description of Artificial Sequence: Synthetic oligonucleotide
  Sense strand starting at position 3376 of SEQ ID NO: 1244003
uuugcagucuccucaaaug

SEQ ID NO: 1457759 - RNA, 19 nt, Artificial Sequence
  Description of Artificial Sequence: Synthetic oligonucleotide
  Antisense strand to SEQ ID NO: 1457758
cauuugaggagacugcaaa

SEQ ID NO: 1457760 - RNA, 19 nt, Artificial Sequence
  Description of Artificial Sequence: Synthetic oligonucleotide
  Sense strand starting at position 3464 of SEQ ID NO: 1244003
augugucacgucugagaaa

SEQ ID NO: 1457761 - RNA, 19 nt, Artificial Sequence
  Description of Artificial Sequence: Synthetic oligonucleotide
  Antisense strand to SEQ ID NO: 1457760
uuucucagacgugacacau

SEQ ID NO: 1457762 - RNA, 19 nt, Artificial Sequence
  Description of Artificial Sequence: Synthetic oligonucleotide
  Sense strand starting at position 3584 of SEQ ID NO: 1244003
uguugauccuagguacaaa

SEQ ID NO: 1457763 - RNA, 19 nt, Artificial Sequence
  Description of Artificial Sequence: Synthetic oligonucleotide
  Antisense strand to SEQ ID NO: 1457762
uuuguaccuaggaucaaca

SEQ ID NO: 1457764 - RNA, 19 nt, Artificial Sequence
  Description of Artificial Sequence: Synthetic oligonucleotide
  Sense strand starting at position 3628 of SEQ ID NO: 1244003
gcuguagggaguuguaaca

SEQ ID NO: 1457765 - RNA, 19 nt, Artificial Sequence
  Description of Artificial Sequence: Synthetic oligonucleotide
  Antisense strand to SEQ ID NO: 1457764
uguuacaacucccuacagc

SEQ ID NO: 1457766 - RNA, 19 nt, Artificial Sequence
  Description of Artificial Sequence: Synthetic oligonucleotide
  Sense strand starting at position 3654 of SEQ ID NO: 1244003
gaguacuugugugucuaaa

SEQ ID NO: 1457767 - RNA, 19 nt, Artificial Sequence
  Description of Artificial Sequence: Synthetic oligonucleotide
  Antisense strand to SEQ ID NO: 1457766
uuuagacacacaaguacuc

SEQ ID NO: 1457768 - RNA, 19 nt, Artificial Sequence
  Description of Artificial Sequence: Synthetic oligonucleotide
  Sense strand starting at position 3747 of SEQ ID NO: 1244003
ggcacuugacuauguauaa

SEQ ID NO: 1457769 - RNA, 19 nt, Artificial Sequence
  Description of Artificial Sequence: Synthetic oligonucleotide
  Antisense strand to SEQ ID NO: 1457768
uuauacauagucaagugcc

SEQ ID NO: 1457770 - RNA, 19 nt, Artificial Sequence
  Description of Artificial Sequence: Synthetic oligonucleotide
  Sense strand starting at position 3748 of SEQ ID NO: 1244003
gcacuugacuauguauaaa

SEQ ID NO: 1457771 - RNA, 19 nt, Artificial Sequence
  Description of Artificial Sequence: Synthetic oligonucleotide
  Antisense strand to SEQ ID NO: 1457770
uuuauacauagucaagugc

SEQ ID NO: 1457772 - RNA, 19 nt, Artificial Sequence
  Description of Artificial Sequence: Synthetic oligonucleotide
  Sense strand starting at position 3792 of SEQ ID NO: 1244003
ccuaaauaagugugaaaua

SEQ ID NO: 1457773 - RNA, 19 nt, Artificial Sequence
  Description of Artificial Sequence: Synthetic oligonucleotide
  Antisense strand to SEQ ID NO: 1457772
uauuucacacuuauuuagg

SEQ ID NO: 1457774 - RNA, 19 nt, Artificial Sequence
  Description of Artificial Sequence: Synthetic oligonucleotide
  Sense strand starting at position 3797 of SEQ ID NO: 1244003
auaagugugaaauaugugu

SEQ ID NO: 1457775 - RNA, 19 nt, Artificial Sequence
  Description of Artificial Sequence: Synthetic oligonucleotide
  Antisense strand to SEQ ID NO: 1457774
acacauauuucacacuuau

SEQ ID NO: 1457776 - RNA, 19 nt, Artificial Sequence
  Description of Artificial Sequence: Synthetic oligonucleotide
  Sense strand starting at position 3804 of SEQ ID NO: 1244003
ugaaauauguguuugcuau

SEQ ID NO: 1457777 - RNA, 19 nt, Artificial Sequence
  Description of Artificial Sequence: Synthetic oligonucleotide
  Antisense strand to SEQ ID NO: 1457776
auagcaaacacauauuuca

SEQ ID NO: 1457778 - RNA, 19 nt, Artificial Sequence
  Description of Artificial Sequence: Synthetic oligonucleotide
  Sense strand starting at position 3805 of SEQ ID NO: 1244003
gaaauauguguuugcuauc

SEQ ID NO: 1457779 - RNA, 19 nt, Artificial Sequence
  Description of Artificial Sequence: Synthetic oligonucleotide
  Antisense strand to SEQ ID NO: 1457778
gauagcaaacacauauuuc

SEQ ID NO: 1457780 - RNA, 19 nt, Artificial Sequence
  Description of Artificial Sequence: Synthetic oligonucleotide
  Sense strand starting at position 3814 of SEQ ID NO: 1244003
guuugcuaucauuaugauu

SEQ ID NO: 1457781 - RNA, 19 nt, Artificial Sequence
  Description of Artificial Sequence: Synthetic oligonucleotide
  Antisense strand to SEQ ID NO: 1457780
aaucauaaugauagcaaac

SEQ ID NO: 1457782 - RNA, 19 nt, Artificial Sequence
  Description of Artificial Sequence: Synthetic oligonucleotide
  Sense strand starting at position 3851 of SEQ ID NO: 1244003
uacacuaggcuugguuaga

SEQ ID NO: 1457783 - RNA, 19 nt, Artificial Sequence
  Description of Artificial Sequence: Synthetic oligonucleotide
  Antisense strand to SEQ ID NO: 1457782
ucuaaccaagccuagugua

SEQ ID NO: 1457784 - RNA, 19 nt, Artificial Sequence
  Description of Artificial Sequence: Synthetic oligonucleotide
  Sense strand starting at position 3861 of SEQ ID NO: 1244003
uugguuagagacugcucau

SEQ ID NO: 1457785 - RNA, 19 nt, Artificial Sequence
  Description of Artificial Sequence: Synthetic oligonucleotide
  Antisense strand to SEQ ID NO: 1457784
augagcagucucuaaccaa

SEQ ID NO: 1457786 - RNA, 19 nt, Artificial Sequence
  Description of Artificial Sequence: Synthetic oligonucleotide
  Sense strand starting at position 3871 of SEQ ID NO: 1244003
acugcucaucgcuaggaca

SEQ ID NO: 1457787 - RNA, 19 nt, Artificial Sequence
  Description of Artificial Sequence: Synthetic oligonucleotide
  Antisense strand to SEQ ID NO: 1457786
uguccuagcgaugagcagu

SEQ ID NO: 1457788 - RNA, 19 nt, Artificial Sequence
  Description of Artificial Sequence: Synthetic oligonucleotide
  Sense strand starting at position 3873 of SEQ ID NO: 1244003
ugcucaucgcuaggacaaa

SEQ ID NO: 1457789 - RNA, 19 nt, Artificial Sequence
  Description of Artificial Sequence: Synthetic oligonucleotide
  Antisense strand to SEQ ID NO: 1457788
uuuguccuagcgaugagca

SEQ ID NO: 1457790 - RNA, 19 nt, Artificial Sequence
  Description of Artificial Sequence: Synthetic oligonucleotide
  Sense strand starting at position 3945 of SEQ ID NO: 1244003
auaacauuguggccugagu

SEQ ID NO: 1457791 - RNA, 19 nt, Artificial Sequence
  Description of Artificial Sequence: Synthetic oligonucleotide
  Antisense strand to SEQ ID NO: 1457790
acucaggccacaauguuau

SEQ ID NO: 1457792 - RNA, 19 nt, Artificial Sequence
  Description of Artificial Sequence: Synthetic oligonucleotide
  Sense strand starting at position 837 of SEQ ID NO: 1244004
uucucaacucguuaaagca

SEQ ID NO: 1457793 - RNA, 19 nt, Artificial Sequence
  Description of Artificial Sequence: Synthetic oligonucleotide
  Antisense strand to SEQ ID NO: 1457792
ugcuuuaacgaguugagaa

SEQ ID NO: 1457794 - RNA, 19 nt, Artificial Sequence
  Description of Artificial Sequence: Synthetic oligonucleotide
  Sense strand starting at position 872 of SEQ ID NO: 1244004
guuauaaggcaacaugagu

SEQ ID NO: 1457795 - RNA, 19 nt, Artificial Sequence
  Description of Artificial Sequence: Synthetic oligonucleotide
  Antisense strand to SEQ ID NO: 1457794
acucauguugccuuauaac

SEQ ID NO: 1457796 - RNA, 19 nt, Artificial Sequence
  Description of Artificial Sequence: Synthetic oligonucleotide
  Sense strand starting at position 879 of SEQ ID NO: 1244004
ggcaacaugaguuagcuau

SEQ ID NO: 1457797 - RNA, 19 nt, Artificial Sequence
  Description of Artificial Sequence: Synthetic oligonucleotide
  Antisense strand to SEQ ID NO: 1457796
auagcuaacucauguugcc

SEQ ID NO: 1457798 - RNA, 19 nt, Artificial Sequence
  Description of Artificial Sequence: Synthetic oligonucleotide
  Sense strand starting at position 881 of SEQ ID NO: 1244004
caacaugaguuagcuaugu

SEQ ID NO: 1457799 - RNA, 19 nt, Artificial Sequence
  Description of Artificial Sequence: Synthetic oligonucleotide
  Antisense strand to SEQ ID NO: 1457798
acauagcuaacucauguug

SEQ ID NO: 1457800 - RNA, 19 nt, Artificial Sequence
  Description of Artificial Sequence: Synthetic oligonucleotide
  Sense strand starting at position 929 of SEQ ID NO: 1244004
cauccuuucgggugaggag

SEQ ID NO: 1457801 - RNA, 19 nt, Artificial Sequence
  Description of Artificial Sequence: Synthetic oligonucleotide
  Antisense strand to SEQ ID NO: 1457800
cuccucacccgaaaggaug

SEQ ID NO: 1457802 - RNA, 19 nt, Artificial Sequence
  Description of Artificial Sequence: Synthetic oligonucleotide
  Sense strand starting at position 1142 of SEQ ID NO: 1244004
aacgguaaggucuaaauuc

SEQ ID NO: 1457803 - RNA, 19 nt, Artificial Sequence
  Description of Artificial Sequence: Synthetic oligonucleotide
  Antisense strand to SEQ ID NO: 1457802
gaauuuagaccuuaccguu

SEQ ID NO: 1457804 - RNA, 19 nt, Artificial Sequence
  Description of Artificial Sequence: Synthetic oligonucleotide
  Sense strand starting at position 1160 of SEQ ID NO: 1244004
ccacuaacauuguugguga

SEQ ID NO: 1457805 - RNA, 19 nt, Artificial Sequence
  Description of Artificial Sequence: Synthetic oligonucleotide
  Antisense strand to SEQ ID NO: 1457804
ucaccaacaauguuagugg

SEQ ID NO: 1457806 - RNA, 19 nt, Artificial Sequence
  Description of Artificial Sequence: Synthetic oligonucleotide
  Sense strand starting at position 1162 of SEQ ID NO: 1244004
acuaacauuguuggugaua

SEQ ID NO: 1457807 - RNA, 19 nt, Artificial Sequence
  Description of Artificial Sequence: Synthetic oligonucleotide
  Antisense strand to SEQ ID NO: 1457806
uaucaccaacaauguuagu

SEQ ID NO: 1457808 - RNA, 19 nt, Artificial Sequence
  Description of Artificial Sequence: Synthetic oligonucleotide
  Sense strand starting at position 1165 of SEQ ID NO: 1244004
aacauuguuggugauacau

SEQ ID NO: 1457809 - RNA, 19 nt, Artificial Sequence
  Description of Artificial Sequence: Synthetic oligonucleotide
  Antisense strand to SEQ ID NO: 1457808
auguaucaccaacaauguu

SEQ ID NO: 1457810 - RNA, 19 nt, Artificial Sequence
  Description of Artificial Sequence: Synthetic oligonucleotide
  Sense strand starting at position 1237 of SEQ ID NO: 1244004
auaggugaugcuugcaaua

SEQ ID NO: 1457811 - RNA, 19 nt, Artificial Sequence
  Description of Artificial Sequence: Synthetic oligonucleotide
  Antisense strand to SEQ ID NO: 1457810
uauugcaagcaucaccuau

SEQ ID NO: 1457812 - RNA, 19 nt, Artificial Sequence
  Description of Artificial Sequence: Synthetic oligonucleotide
  Sense strand starting at position 1256 of SEQ ID NO: 1244004
gcccguuugaagcaugaca

SEQ ID NO: 1457813 - RNA, 19 nt, Artificial Sequence
  Description of Artificial Sequence: Synthetic oligonucleotide
  Antisense strand to SEQ ID NO: 1457812
ugucaugcuucaaacgggc

SEQ ID NO: 1457814 - RNA, 19 nt, Artificial Sequence
  Description of Artificial Sequence: Synthetic oligonucleotide
  Sense strand starting at position 1325 of SEQ ID NO: 1244004
cagcuuuaucaauggugga

SEQ ID NO: 1457815 - RNA, 19 nt, Artificial Sequence
  Description of Artificial Sequence: Synthetic oligonucleotide
  Antisense strand to SEQ ID NO: 1457814
uccaccauugauaaagcug

SEQ ID NO: 1457816 - RNA, 19 nt, Artificial Sequence
  Description of Artificial Sequence: Synthetic oligonucleotide
  Sense strand starting at position 1437 of SEQ ID NO: 1244004
cccagagcagccuauuacu

SEQ ID NO: 1457817 - RNA, 19 nt, Artificial Sequence
  Description of Artificial Sequence: Synthetic oligonucleotide
  Antisense strand to SEQ ID NO: 1457816
aguaauaggcugcucuggg

SEQ ID NO: 1457818 - RNA, 19 nt, Artificial Sequence
  Description of Artificial Sequence: Synthetic oligonucleotide
  Sense strand starting at position 1445 of SEQ ID NO: 1244004
agccuauuacuccgggaga

SEQ ID NO: 1457819 - RNA, 19 nt, Artificial Sequence
  Description of Artificial Sequence: Synthetic oligonucleotide
  Antisense strand to SEQ ID NO: 1457818
ucucccggaguaauaggcu

SEQ ID NO: 1457820 - RNA, 19 nt, Artificial Sequence
  Description of Artificial Sequence: Synthetic oligonucleotide
  Sense strand starting at position 1495 of SEQ ID NO: 1244004
cuucuuaagcuccagcaga

SEQ ID NO: 1457821 - RNA, 19 nt, Artificial Sequence
  Description of Artificial Sequence: Synthetic oligonucleotide
  Antisense strand to SEQ ID NO: 1457820
ucugcuggagcuuaagaag

SEQ ID NO: 1457822 - RNA, 19 nt, Artificial Sequence
  Description of Artificial Sequence: Synthetic oligonucleotide
  Sense strand starting at position 1539 of SEQ ID NO: 1244004
ccgcaaucauucucugaaa

SEQ ID NO: 1457823 - RNA, 19 nt, Artificial Sequence
  Description of Artificial Sequence: Synthetic oligonucleotide
  Antisense strand to SEQ ID NO: 1457822
uuucagagaaugauugcgg

SEQ ID NO: 1457824 - RNA, 19 nt, Artificial Sequence
  Description of Artificial Sequence: Synthetic oligonucleotide
  Sense strand starting at position 1540 of SEQ ID NO: 1244004
cgcaaucauucucugaaag

SEQ ID NO: 1457825 - RNA, 19 nt, Artificial Sequence
  Description of Artificial Sequence: Synthetic oligonucleotide
  Antisense strand to SEQ ID NO: 1457824
cuuucagagaaugauugcg

SEQ ID NO: 1457826 - RNA, 19 nt, Artificial Sequence
  Description of Artificial Sequence: Synthetic oligonucleotide
  Sense strand starting at position 1541 of SEQ ID NO: 1244004
gcaaucauucucugaaaga

SEQ ID NO: 1457827 - RNA, 19 nt, Artificial Sequence
  Description of Artificial Sequence: Synthetic oligonucleotide
  Antisense strand to SEQ ID NO: 1457826
ucuuucagagaaugauugc

SEQ ID NO: 1457828 - RNA, 19 nt, Artificial Sequence
  Description of Artificial Sequence: Synthetic oligonucleotide
  Sense strand starting at position 2086 of SEQ ID NO: 1244004
gggagcuggccuugaagaa

SEQ ID NO: 1457829 - RNA, 19 nt, Artificial Sequence
  Description of Artificial Sequence: Synthetic oligonucleotide
  Antisense strand to SEQ ID NO: 1457828
uucuucaaggccagcuccc

SEQ ID NO: 1457830 - RNA, 19 nt, Artificial Sequence
  Description of Artificial Sequence: Synthetic oligonucleotide
  Sense strand starting at position 2087 of SEQ ID NO: 1244004
ggagcuggccuugaagaau

SEQ ID NO: 1457831 - RNA, 19 nt, Artificial Sequence
  Description of Artificial Sequence: Synthetic oligonucleotide
  Antisense strand to SEQ ID NO: 1457830
auucuucaaggccagcucc

SEQ ID NO: 1457832 - RNA, 19 nt, Artificial Sequence
  Description of Artificial Sequence: Synthetic oligonucleotide
  Sense strand starting at position 2208 of SEQ ID NO: 1244004
cuuacuggcucuuccagaa

SEQ ID NO: 1457833 - RNA, 19 nt, Artificial Sequence
  Description of Artificial Sequence: Synthetic oligonucleotide
  Antisense strand to SEQ ID NO: 1457832
uucuggaagagccaguaag

SEQ ID NO: 1457834 - RNA, 19 nt, Artificial Sequence
  Description of Artificial Sequence: Synthetic oligonucleotide
  Sense strand starting at position 2212 of SEQ ID NO: 1244004
cuggcucuuccagaauucu

SEQ ID NO: 1457835 - RNA, 19 nt, Artificial Sequence
  Description of Artificial Sequence: Synthetic oligonucleotide
  Antisense strand to SEQ ID NO: 1457834
agaauucuggaagagccag

SEQ ID NO: 1457836 - RNA, 19 nt, Artificial Sequence
  Description of Artificial Sequence: Synthetic oligonucleotide
  Sense strand starting at position 2270 of SEQ ID NO: 1244004
ugaggugaccacugaugau

SEQ ID NO: 1457837 - RNA, 19 nt, Artificial Sequence
  Description of Artificial Sequence: Synthetic oligonucleotide
  Antisense strand to SEQ ID NO: 1457836
aucaucaguggucaccuca

SEQ ID NO: 1457838 - RNA, 19 nt, Artificial Sequence
  Description of Artificial Sequence: Synthetic oligonucleotide
  Sense strand starting at position 2283 of SEQ ID NO: 1244004
gaugauaaauuugggucuu

SEQ ID NO: 1457839 - RNA, 19 nt, Artificial Sequence
  Description of Artificial Sequence: Synthetic oligonucleotide
  Antisense strand to SEQ ID NO: 1457838
aagacccaaauuuaucauc

SEQ ID NO: 1457840 - RNA, 19 nt, Artificial Sequence
  Description of Artificial Sequence: Synthetic oligonucleotide
  Sense strand starting at position 2359 of SEQ ID NO: 1244004
gcgugaucucggcucaaac

SEQ ID NO: 1457841 - RNA, 19 nt, Artificial Sequence
  Description of Artificial Sequence: Synthetic oligonucleotide
  Antisense strand to SEQ ID NO: 1457840
guuugagccgagaucacgc

SEQ ID NO: 1457842 - RNA, 19 nt, Artificial Sequence
  Description of Artificial Sequence: Synthetic oligonucleotide
  Sense strand starting at position 2361 of SEQ ID NO: 1244004
gugaucucggcucaaacaa

SEQ ID NO: 1457843 - RNA, 19 nt, Artificial Sequence
  Description of Artificial Sequence: Synthetic oligonucleotide
  Antisense strand to SEQ ID NO: 1457842
uuguuugagccgagaucac

SEQ ID NO: 1457844 - RNA, 19 nt, Artificial Sequence
  Description of Artificial Sequence: Synthetic oligonucleotide
  Sense strand starting at position 2892 of SEQ ID NO: 1244004
agucaccaugccugguaaa

SEQ ID NO: 1457845 - RNA, 19 nt, Artificial Sequence
  Description of Artificial Sequence: Synthetic oligonucleotide
  Antisense strand to SEQ ID NO: 1457844
uuuaccaggcauggugacu

SEQ ID NO: 1457846 - RNA, 19 nt, Artificial Sequence
  Description of Artificial Sequence: Synthetic oligonucleotide
  Sense strand starting at position 2927 of SEQ ID NO: 1244004
agaugaucgugucuagaau

SEQ ID NO: 1457847 - RNA, 19 nt, Artificial Sequence
  Description of Artificial Sequence: Synthetic oligonucleotide
  Antisense strand to SEQ ID NO: 1457846
auucuagacacgaucaucu

SEQ ID NO: 1457848 - RNA, 19 nt, Artificial Sequence
  Description of Artificial Sequence: Synthetic oligonucleotide
  Sense strand starting at position 2928 of SEQ ID NO: 1244004
gaugaucgugucuagaaug

SEQ ID NO: 1457849 - RNA, 19 nt, Artificial Sequence
  Description of Artificial Sequence: Synthetic oligonucleotide
  Antisense strand to SEQ ID NO: 1457848
cauucuagacacgaucauc

SEQ ID NO: 1457850 - RNA, 19 nt, Artificial Sequence
  Description of Artificial Sequence: Synthetic oligonucleotide
  Sense strand starting at position 3039 of SEQ ID NO: 1244004
ggugaccucgccuagaaug

SEQ ID NO: 1457851 - RNA, 19 nt, Artificial Sequence
  Description of Artificial Sequence: Synthetic oligonucleotide
  Antisense strand to SEQ ID NO: 1457850
cauucuaggcgaggucacc

SEQ ID NO: 1457852 - RNA, 19 nt, Artificial Sequence
  Description of Artificial Sequence: Synthetic oligonucleotide
  Sense strand starting at position 3078 of SEQ ID NO: 1244004
ucaguauguuuaucaagca

SEQ ID NO: 1457853 - RNA, 19 nt, Artificial Sequence
  Description of Artificial Sequence: Synthetic oligonucleotide
  Antisense strand to SEQ ID NO: 1457852
ugcuugauaaacauacuga

SEQ ID NO: 1457854 - RNA, 19 nt, Artificial Sequence
  Description of Artificial Sequence: Synthetic oligonucleotide
  Sense strand starting at position 3134 of SEQ ID NO: 1244004
guguaugcuauugaggaau

SEQ ID NO: 1457855 - RNA, 19 nt, Artificial Sequence
  Description of Artificial Sequence: Synthetic oligonucleotide
  Antisense strand to SEQ ID NO: 1457854
auuccucaauagcauacac

SEQ ID NO: 1457856 - RNA, 19 nt, Artificial Sequence
  Description of Artificial Sequence: Synthetic oligonucleotide
  Sense strand starting at position 3146 of SEQ ID NO: 1244004
gaggaauucgcaggcaaau

SEQ ID NO: 1457857 - RNA, 19 nt, Artificial Sequence
  Description of Artificial Sequence: Synthetic oligonucleotide
  Antisense strand to SEQ ID NO: 1457856
auuugccugcgaauuccuc

SEQ ID NO: 1457858 - RNA, 19 nt, Artificial Sequence
  Description of Artificial Sequence: Synthetic oligonucleotide
  Sense strand starting at position 3249 of SEQ ID NO: 1244004
acugucagucccuagacua

SEQ ID NO: 1457859 - RNA, 19 nt, Artificial Sequence
  Description of Artificial Sequence: Synthetic oligonucleotide
  Antisense strand to SEQ ID NO: 1457858
uagucuagggacugacagu

SEQ ID NO: 1457860 - RNA, 19 nt, Artificial Sequence
  Description of Artificial Sequence: Synthetic oligonucleotide
  Sense strand starting at position 3278 of SEQ ID NO: 1244004
uuggcauagccugacaaga

SEQ ID NO: 1457861 - RNA, 19 nt, Artificial Sequence
  Description of Artificial Sequence: Synthetic oligonucleotide
  Antisense strand to SEQ ID NO: 1457860
ucuugucaggcuaugccaa

SEQ ID NO: 1457862 - RNA, 19 nt, Artificial Sequence
  Description of Artificial Sequence: Synthetic oligonucleotide
  Sense strand starting at position 3494 of SEQ ID NO: 1244004
agacaaguugagugcucaa

SEQ ID NO: 1457863 - RNA, 19 nt, Artificial Sequence
  Description of Artificial Sequence: Synthetic oligonucleotide
  Antisense strand to SEQ ID NO: 1457862
uugagcacucaacuugucu

SEQ ID NO: 1457864 - RNA, 19 nt, Artificial Sequence
  Description of Artificial Sequence: Synthetic oligonucleotide
  Sense strand starting at position 3497 of SEQ ID NO: 1244004
caaguugagugcucaauga

SEQ ID NO: 1457865 - RNA, 19 nt, Artificial Sequence
  Description of Artificial Sequence: Synthetic oligonucleotide
  Antisense strand to SEQ ID NO: 1457864
ucauugagcacucaacuug

SEQ ID NO: 1457866 - RNA, 19 nt, Artificial Sequence
  Description of Artificial Sequence: Synthetic oligonucleotide
  Sense strand starting at position 3501 of SEQ ID NO: 1244004
uugagugcucaaugaggaa

SEQ ID NO: 1457867 - RNA, 19 nt, Artificial Sequence
  Description of Artificial Sequence: Synthetic oligonucleotide
  Antisense strand to SEQ ID NO: 1457866
uuccucauugagcacucaa

SEQ ID NO: 1457868 - RNA, 19 nt, Artificial Sequence
  Description of Artificial Sequence: Synthetic oligonucleotide
  Sense strand starting at position 3505 of SEQ ID NO: 1244004
gugcucaaugaggaauguu

SEQ ID NO: 1457869 - RNA, 19 nt, Artificial Sequence
  Description of Artificial Sequence: Synthetic oligonucleotide
  Antisense strand to SEQ ID NO: 1457868
aacauuccucauugagcac

SEQ ID NO: 1457870 - RNA, 19 nt, Artificial Sequence
  Description of Artificial Sequence: Synthetic oligonucleotide
  Sense strand starting at position 3848 of SEQ ID NO: 1244004
ggcauagugacuuaugcuu

SEQ ID NO: 1457871 - RNA, 19 nt, Artificial Sequence
  Description of Artificial Sequence: Synthetic oligonucleotide
  Antisense strand to SEQ ID NO: 1457870
aagcauaagucacuaugcc

SEQ ID NO: 1457872 - RNA, 19 nt, Artificial Sequence
  Description of Artificial Sequence: Synthetic oligonucleotide
  Sense strand starting at position 154 of SEQ ID NO: 1244005
guagcaaguuaacuaguca

SEQ ID NO: 1457873 - RNA, 19 nt, Artificial Sequence
  Description of Artificial Sequence: Synthetic oligonucleotide
  Antisense strand to SEQ ID NO: 1457872
ugacuaguuaacuugcuac

SEQ ID NO: 1457874 - RNA, 19 nt, Artificial Sequence
  Description of Artificial Sequence: Synthetic oligonucleotide
  Sense strand starting at position 262 of SEQ ID NO: 1244005
acaggauuacugugaaucu

SEQ ID NO: 1457875 - RNA, 19 nt, Artificial Sequence
  Description of Artificial Sequence: Synthetic oligonucleotide
  Antisense strand to SEQ ID NO: 1457874
agauucacaguaauccugu

SEQ ID NO: 1457876 - RNA, 19 nt, Artificial Sequence
  Description of Artificial Sequence: Synthetic oligonucleotide
  Sense strand starting at position 336 of SEQ ID NO: 1244005
uaaaguaagcuucguaauc

SEQ ID NO: 1457877 - RNA, 19 nt, Artificial Sequence
  Description of Artificial Sequence: Synthetic oligonucleotide
  Antisense strand to SEQ ID NO: 1457876
gauuacgaagcuuacuuua

SEQ ID NO: 1457878 - RNA, 19 nt, Artificial Sequence
  Description of Artificial Sequence: Synthetic oligonucleotide
  Sense strand starting at position 377 of SEQ ID NO: 1244005
augguuuccuaucccauua

SEQ ID NO: 1457879 - RNA, 19 nt, Artificial Sequence
  Description of Artificial Sequence: Synthetic oligonucleotide
  Antisense strand to SEQ ID NO: 1457878
uaaugggauaggaaaccau

SEQ ID NO: 1457880 - RNA, 19 nt, Artificial Sequence
  Description of Artificial Sequence: Synthetic oligonucleotide
  Sense strand starting at position 433 of SEQ ID NO: 1244005
gcuccuaauugucuagaga

SEQ ID NO: 1457881 - RNA, 19 nt, Artificial Sequence
  Description of Artificial Sequence: Synthetic oligonucleotide
  Antisense strand to SEQ ID NO: 1457880
ucucuagacaauuaggagc

SEQ ID NO: 1457882 - RNA, 19 nt, Artificial Sequence
  Description of Artificial Sequence: Synthetic oligonucleotide
  Sense strand starting at position 434 of SEQ ID NO: 1244005
cuccuaauugucuagagau

SEQ ID NO: 1457883 - RNA, 19 nt, Artificial Sequence
  Description of Artificial Sequence: Synthetic oligonucleotide
  Antisense strand to SEQ ID NO: 1457882
aucucuagacaauuaggag

SEQ ID NO: 1457884 - RNA, 19 nt, Artificial Sequence
  Description of Artificial Sequence: Synthetic oligonucleotide
  Sense strand starting at position 436 of SEQ ID NO: 1244005
ccuaauugucuagagaucu

SEQ ID NO: 1457885 - RNA, 19 nt, Artificial Sequence
  Description of Artificial Sequence: Synthetic oligonucleotide
  Antisense strand to SEQ ID NO: 1457884
agaucucuagacaauuagg

SEQ ID NO: 1457886 - RNA, 19 nt, Artificial Sequence
  Description of Artificial Sequence: Synthetic oligonucleotide
  Sense strand starting at position 499 of SEQ ID NO: 1244005
guaagacagcuccagugua

SEQ ID NO: 1457887 - RNA, 19 nt, Artificial Sequence
  Description of Artificial Sequence: Synthetic oligonucleotide
  Antisense strand to SEQ ID NO: 1457886
uacacuggagcugucuuac

SEQ ID NO: 1457888 - RNA, 19 nt, Artificial Sequence
  Description of Artificial Sequence: Synthetic oligonucleotide
  Sense strand starting at position 504 of SEQ ID NO: 1244005
acagcuccaguguaucaau

SEQ ID NO: 1457889 - RNA, 19 nt, Artificial Sequence
  Description of Artificial Sequence: Synthetic oligonucleotide
  Antisense strand to SEQ ID NO: 1457888
auugauacacuggagcugu

SEQ ID NO: 1457890 - RNA, 19 nt, Artificial Sequence
  Description of Artificial Sequence: Synthetic oligonucleotide
  Sense strand starting at position 549 of SEQ ID NO: 1244005
acaacaaucgugggaaacu

SEQ ID NO: 1457891 - RNA, 19 nt, Artificial Sequence
  Description of Artificial Sequence: Synthetic oligonucleotide
  Antisense strand to SEQ ID NO: 1457890
aguuucccacgauuguugu

SEQ ID NO: 1457892 - RNA, 19 nt, Artificial Sequence
  Description of Artificial Sequence: Synthetic oligonucleotide
  Sense strand starting at position 690 of SEQ ID NO: 1244005
gcuccaaacacguuucguu

SEQ ID NO: 1457893 - RNA, 19 nt, Artificial Sequence
  Description of Artificial Sequence: Synthetic oligonucleotide
  Antisense strand to SEQ ID NO: 1457892
aacgaaacguguuuggagc

SEQ ID NO: 1457894 - RNA, 19 nt, Artificial Sequence
  Description of Artificial Sequence: Synthetic oligonucleotide
  Sense strand starting at position 694 of SEQ ID NO: 1244005
caaacacguuucguugaaa

SEQ ID NO: 1457895 - RNA, 19 nt, Artificial Sequence
  Description of Artificial Sequence: Synthetic oligonucleotide
  Antisense strand to SEQ ID NO: 1457894
uuucaacgaaacguguuug

SEQ ID NO: 1457896 - RNA, 19 nt, Artificial Sequence
  Description of Artificial Sequence: Synthetic oligonucleotide
  Sense strand starting at position 1106 of SEQ ID NO: 1244005
cuccgagggucugugaaua

SEQ ID NO: 1457897 - RNA, 19 nt, Artificial Sequence
  Description of Artificial Sequence: Synthetic oligonucleotide
  Antisense strand to SEQ ID NO: 1457896
uauucacagacccucggag

SEQ ID NO: 1457898 - RNA, 19 nt, Artificial Sequence
  Description of Artificial Sequence: Synthetic oligonucleotide
  Sense strand starting at position 1182 of SEQ ID NO: 1244005
uaaguuugccugcucuagu

SEQ ID NO: 1457899 - RNA, 19 nt, Artificial Sequence
  Description of Artificial Sequence: Synthetic oligonucleotide
  Antisense strand to SEQ ID NO: 1457898
acuagagcaggcaaacuua

SEQ ID NO: 1457900 - RNA, 19 nt, Artificial Sequence
  Description of Artificial Sequence: Synthetic oligonucleotide
  Sense strand starting at position 1229 of SEQ ID NO: 1244005
acacaaagccggugacaau

SEQ ID NO: 1457901 - RNA, 19 nt, Artificial Sequence
  Description of Artificial Sequence: Synthetic oligonucleotide
  Antisense strand to SEQ ID NO: 1457900
auugucaccggcuuugugu

SEQ ID NO: 1457902 - RNA, 19 nt, Artificial Sequence
  Description of Artificial Sequence: Synthetic oligonucleotide
  Sense strand starting at position 1240 of SEQ ID NO: 1244005
gugacaauguacuccagga

SEQ ID NO: 1457903 - RNA, 19 nt, Artificial Sequence
  Description of Artificial Sequence: Synthetic oligonucleotide
  Antisense strand to SEQ ID NO: 1457902
uccuggaguacauugucac

SEQ ID NO: 1457904 - RNA, 19 nt, Artificial Sequence
  Description of Artificial Sequence: Synthetic oligonucleotide
  Sense strand starting at position 1363 of SEQ ID NO: 1244005
auuguuauugcugaucaag

SEQ ID NO: 1457905 - RNA, 19 nt, Artificial Sequence
  Description of Artificial Sequence: Synthetic oligonucleotide
  Antisense strand to SEQ ID NO: 1457904
cuugaucagcaauaacaau

SEQ ID NO: 1457906 - RNA, 19 nt, Artificial Sequence
  Description of Artificial Sequence: Synthetic oligonucleotide
  Sense strand starting at position 1366 of SEQ ID NO: 1244005
guuauugcugaucaaggca

SEQ ID NO: 1457907 - RNA, 19 nt, Artificial Sequence
  Description of Artificial Sequence: Synthetic oligonucleotide
  Antisense strand to SEQ ID NO: 1457906
ugccuugaucagcaauaac

SEQ ID NO: 1457908 - RNA, 19 nt, Artificial Sequence
  Description of Artificial Sequence: Synthetic oligonucleotide
  Sense strand starting at position 1482 of SEQ ID NO: 1244005
uacgguuuacugcaucaga

SEQ ID NO: 1457909 - RNA, 19 nt, Artificial Sequence
  Description of Artificial Sequence: Synthetic oligonucleotide
  Antisense strand to SEQ ID NO: 1457908
ucugaugcaguaaaccgua

SEQ ID NO: 1457910 - RNA, 19 nt, Artificial Sequence
  Description of Artificial Sequence: Synthetic oligonucleotide
  Sense strand starting at position 1485 of SEQ ID NO: 1244005
gguuuacugcaucagauac

SEQ ID NO: 1457911 - RNA, 19 nt, Artificial Sequence
  Description of Artificial Sequence: Synthetic oligonucleotide
  Antisense strand to SEQ ID NO: 1457910
guaucugaugcaguaaacc

SEQ ID NO: 1457912 - RNA, 19 nt, Artificial Sequence
  Description of Artificial Sequence: Synthetic oligonucleotide
  Sense strand starting at position 1542 of SEQ ID NO: 1244005
uuacuaugcgaccgauauc

SEQ ID NO: 1457913 - RNA, 19 nt, Artificial Sequence
  Description of Artificial Sequence: Synthetic oligonucleotide
  Antisense strand to SEQ ID NO: 1457912
gauaucggucgcauaguaa

SEQ ID NO: 1457914 - RNA, 19 nt, Artificial Sequence
  Description of Artificial Sequence: Synthetic oligonucleotide
  Sense strand starting at position 1551 of SEQ ID NO: 1244005
gaccgauaucgacacauca

SEQ ID NO: 1457915 - RNA, 19 nt, Artificial Sequence
  Description of Artificial Sequence: Synthetic oligonucleotide
  Antisense strand to SEQ ID NO: 1457914
ugaugugucgauaucgguc

SEQ ID NO: 1457916 - RNA, 19 nt, Artificial Sequence
  Description of Artificial Sequence: Synthetic oligonucleotide
  Sense strand starting at position 1553 of SEQ ID NO: 1244005
ccgauaucgacacaucagu

SEQ ID NO: 1457917 - RNA, 19 nt, Artificial Sequence
  Description of Artificial Sequence: Synthetic oligonucleotide
  Antisense strand to SEQ ID NO: 1457916
acugaugugucgauaucgg

SEQ ID NO: 1457918 - RNA, 19 nt, Artificial Sequence
  Description of Artificial Sequence: Synthetic oligonucleotide
  Sense strand starting at position 1674 of SEQ ID NO: 1244005
ugaugcgauccagagacau

SEQ ID NO: 1457919 - RNA, 19 nt, Artificial Sequence
  Description of Artificial Sequence: Synthetic oligonucleotide
  Antisense strand to SEQ ID NO: 1457918
augucucuggaucgcauca

SEQ ID NO: 1457920 - RNA, 19 nt, Artificial Sequence
  Description of Artificial Sequence: Synthetic oligonucleotide
  Sense strand starting at position 1676 of SEQ ID NO: 1244005
augcgauccagagacauua

SEQ ID NO: 1457921 - RNA, 19 nt, Artificial Sequence
  Description of Artificial Sequence: Synthetic oligonucleotide
  Antisense strand to SEQ ID NO: 1457920
uaaugucucuggaucgcau

SEQ ID NO: 1457922 - RNA, 19 nt, Artificial Sequence
  Description of Artificial Sequence: Synthetic oligonucleotide
  Sense strand starting at position 1678 of SEQ ID NO: 1244005
gcgauccagagacauuauu

SEQ ID NO: 1457923 - RNA, 19 nt, Artificial Sequence
  Description of Artificial Sequence: Synthetic oligonucleotide
  Antisense strand to SEQ ID NO: 1457922
aauaaugucucuggaucgc

SEQ ID NO: 1457924 - RNA, 19 nt, Artificial Sequence
  Description of Artificial Sequence: Synthetic oligonucleotide
  Sense strand starting at position 1722 of SEQ ID NO: 1244005
caagguuaagucggcugaa

SEQ ID NO: 1457925 - RNA, 19 nt, Artificial Sequence
  Description of Artificial Sequence: Synthetic oligonucleotide
  Antisense strand to SEQ ID NO: 1457924
uucagccgacuuaaccuug

SEQ ID NO: 1457926 - RNA, 19 nt, Artificial Sequence
  Description of Artificial Sequence: Synthetic oligonucleotide
  Sense strand starting at position 2504 of SEQ ID NO: 1244005
gauuuaggauugcauauua

SEQ ID NO: 1457927 - RNA, 19 nt, Artificial Sequence
  Description of Artificial Sequence: Synthetic oligonucleotide
  Antisense strand to SEQ ID NO: 1457926
uaauaugcaauccuaaauc

SEQ ID NO: 1457928 - RNA, 19 nt, Artificial Sequence
  Description of Artificial Sequence: Synthetic oligonucleotide
  Sense strand starting at position 2564 of SEQ ID NO: 1244005
cuucccgugacgcagaaau

SEQ ID NO: 1457929 - RNA, 19 nt, Artificial Sequence
  Description of Artificial Sequence: Synthetic oligonucleotide
  Antisense strand to SEQ ID NO: 1457928
auuucugcgucacgggaag

SEQ ID NO: 1457930 - RNA, 19 nt, Artificial Sequence
  Description of Artificial Sequence: Synthetic oligonucleotide
  Sense strand starting at position 2566 of SEQ ID NO: 1244005
ucccgugacgcagaaauua

SEQ ID NO: 1457931 - RNA, 19 nt, Artificial Sequence
  Description of Artificial Sequence: Synthetic oligonucleotide
  Antisense strand to SEQ ID NO: 1457930
uaauuucugcgucacggga

SEQ ID NO: 1457932 - RNA, 19 nt, Artificial Sequence
  Description of Artificial Sequence: Synthetic oligonucleotide
  Sense strand starting at position 2629 of SEQ ID NO: 1244005
uugggaaaguauguaucua

SEQ ID NO: 1457933 - RNA, 19 nt, Artificial Sequence
  Description of Artificial Sequence: Synthetic oligonucleotide
  Antisense strand to SEQ ID NO: 1457932
uagauacauacuuucccaa

SEQ ID NO: 1457934 - RNA, 19 nt, Artificial Sequence
  Description of Artificial Sequence: Synthetic oligonucleotide
  Sense strand starting at position 2633 of SEQ ID NO: 1244005
gaaaguauguaucuagaag

SEQ ID NO: 1457935 - RNA, 19 nt, Artificial Sequence
  Description of Artificial Sequence: Synthetic oligonucleotide
  Antisense strand to SEQ ID NO: 1457934
cuucuagauacauacuuuc

SEQ ID NO: 1457936 - RNA, 19 nt, Artificial Sequence
  Description of Artificial Sequence: Synthetic oligonucleotide
  Sense strand starting at position 2956 of SEQ ID NO: 1244005
gugugauucugaccuggau

SEQ ID NO: 1457937 - RNA, 19 nt, Artificial Sequence
  Description of Artificial Sequence: Synthetic oligonucleotide
  Antisense strand to SEQ ID NO: 1457936
auccaggucagaaucacac

SEQ ID NO: 1457938 - RNA, 19 nt, Artificial Sequence
  Description of Artificial Sequence: Synthetic oligonucleotide
  Sense strand starting at position 3021 of SEQ ID NO: 1244005
ugaagaggaucugauaauu

SEQ ID NO: 1457939 - RNA, 19 nt, Artificial Sequence
  Description of Artificial Sequence: Synthetic oligonucleotide
  Antisense strand to SEQ ID NO: 1457938
aauuaucagauccucuuca

SEQ ID NO: 1457940 - RNA, 19 nt, Artificial Sequence
  Description of Artificial Sequence: Synthetic oligonucleotide
  Sense strand starting at position 3450 of SEQ ID NO: 1244005
gguguagugauagagcacu

SEQ ID NO: 1457941 - RNA, 19 nt, Artificial Sequence
  Description of Artificial Sequence: Synthetic oligonucleotide
  Antisense strand to SEQ ID NO: 1457940
agugcucuaucacuacacc

SEQ ID NO: 1457942 - RNA, 19 nt, Artificial Sequence
  Description of Artificial Sequence: Synthetic oligonucleotide
  Sense strand starting at position 3788 of SEQ ID NO: 1244005
gcaagcuauuaccuagaau

SEQ ID NO: 1457943 - RNA, 19 nt, Artificial Sequence
  Description of Artificial Sequence: Synthetic oligonucleotide
  Antisense strand to SEQ ID NO: 1457942
auucuagguaauagcuugc

SEQ ID NO: 1457944 - RNA, 19 nt, Artificial Sequence
  Description of Artificial Sequence: Synthetic oligonucleotide
  Sense strand starting at position 3791 of SEQ ID NO: 1244005
agcuauuaccuagaauguc

SEQ ID NO: 1457945 - RNA, 19 nt, Artificial Sequence
  Description of Artificial Sequence: Synthetic oligonucleotide
  Antisense strand to SEQ ID NO: 1457944
gacauucuagguaauagcu

SEQ ID NO: 1457946 - RNA, 19 nt, Artificial Sequence
  Description of Artificial Sequence: Synthetic oligonucleotide
  Sense strand starting at position 3821 of SEQ ID NO: 1244005
gcguucuugcaagugcaua

SEQ ID NO: 1457947 - RNA, 19 nt, Artificial Sequence
  Description of Artificial Sequence: Synthetic oligonucleotide
  Antisense strand to SEQ ID NO: 1457946
uaugcacuugcaagaacgc

SEQ ID NO: 1457948 - RNA, 19 nt, Artificial Sequence
  Description of Artificial Sequence: Synthetic oligonucleotide
  Sense strand starting at position 3826 of SEQ ID NO: 1244005
cuugcaagugcauaacauu

SEQ ID NO: 1457949 - RNA, 19 nt, Artificial Sequence
  Description of Artificial Sequence: Synthetic oligonucleotide
  Antisense strand to SEQ ID NO: 1457948
aauguuaugcacuugcaag

SEQ ID NO: 1457950 - RNA, 19 nt, Artificial Sequence
  Description of Artificial Sequence: Synthetic oligonucleotide
  Sense strand starting at position 3975 of SEQ ID NO: 1244005
cucaguacuccuggaagau

SEQ ID NO: 1457951 - RNA, 19 nt, Artificial Sequence
  Description of Artificial Sequence: Synthetic oligonucleotide
  Antisense strand to SEQ ID NO: 1457950
aucuuccaggaguacugag

SEQ ID NO: 1457952 - RNA, 19 nt, Artificial Sequence
  Description of Artificial Sequence: Synthetic oligonucleotide
  Sense strand starting at position 251 of SEQ ID NO: 1244006
gccugaggucucgacagga

SEQ ID NO: 1457953 - RNA, 19 nt, Artificial Sequence
  Description of Artificial Sequence: Synthetic oligonucleotide
  Antisense strand to SEQ ID NO: 1457952
uccugucgagaccucaggc

SEQ ID NO: 1457954 - RNA, 19 nt, Artificial Sequence
  Description of Artificial Sequence: Synthetic oligonucleotide
  Sense strand starting at position 469 of SEQ ID NO: 1244006
gugucuacaaucgauguca

SEQ ID NO: 1457955 - RNA, 19 nt, Artificial Sequence
  Description of Artificial Sequence: Synthetic oligonucleotide
  Antisense strand to SEQ ID NO: 1457954
ugacaucgauuguagacac

SEQ ID NO: 1457956 - RNA, 19 nt, Artificial Sequence
  Description of Artificial Sequence: Synthetic oligonucleotide
  Sense strand starting at position 471 of SEQ ID NO: 1244006
gucuacaaucgaugucacu

SEQ ID NO: 1457957 - RNA, 19 nt, Artificial Sequence
  Description of Artificial Sequence: Synthetic oligonucleotide
  Antisense strand to SEQ ID NO: 1457956
agugacaucgauuguagac

SEQ ID NO: 1457958 - RNA, 19 nt, Artificial Sequence
  Description of Artificial Sequence: Synthetic oligonucleotide
  Sense strand starting at position 747 of SEQ ID NO: 1244006
gggagaaagugagugugau

SEQ ID NO: 1457959 - RNA, 19 nt, Artificial Sequence
  Description of Artificial Sequence: Synthetic oligonucleotide
  Antisense strand to SEQ ID NO: 1457958
aucacacucacuuucuccc

SEQ ID NO: 1457960 - RNA, 19 nt, Artificial Sequence
  Description of Artificial Sequence: Synthetic oligonucleotide
  Sense strand starting at position 748 of SEQ ID NO: 1244006
ggagaaagugagugugauu

SEQ ID NO: 1457961 - RNA, 19 nt, Artificial Sequence
  Description of Artificial Sequence: Synthetic oligonucleotide
  Antisense strand to SEQ ID NO: 1457960
aaucacacucacuuucucc

SEQ ID NO: 1457962 - RNA, 19 nt, Artificial Sequence
  Description of Artificial Sequence: Synthetic oligonucleotide
  Sense strand starting at position 759 of SEQ ID NO: 1244006
gugugauuccagcaagacc

SEQ ID NO: 1457963 - RNA, 19 nt, Artificial Sequence
  Description of Artificial Sequence: Synthetic oligonucleotide
  Antisense strand to SEQ ID NO: 1457962
ggucuugcuggaaucacac

SEQ ID NO: 1457964 - RNA, 19 nt, Artificial Sequence
  Description of Artificial Sequence: Synthetic oligonucleotide
  Sense strand starting at position 847 of SEQ ID NO: 1244006
cgacuauucuggucuuaau

SEQ ID NO: 1457965 - RNA, 19 nt, Artificial Sequence
  Description of Artificial Sequence: Synthetic oligonucleotide
  Antisense strand to SEQ ID NO: 1457964
auuaagaccagaauagucg

SEQ ID NO: 1457966 - RNA, 19 nt, Artificial Sequence
  Description of Artificial Sequence: Synthetic oligonucleotide
  Sense strand starting at position 857 of SEQ ID NO: 1244006
ggucuuaauuuaugauuug

SEQ ID NO: 1457967 - RNA, 19 nt, Artificial Sequence
  Description of Artificial Sequence: Synthetic oligonucleotide
  Antisense strand to SEQ ID NO: 1457966
caaaucauaaauuaagacc

SEQ ID NO: 1457968 - RNA, 19 nt, Artificial Sequence
  Description of Artificial Sequence: Synthetic oligonucleotide
  Sense strand starting at position 929 of SEQ ID NO: 1244006
cucugauagacguacaagu

SEQ ID NO: 1457969 - RNA, 19 nt, Artificial Sequence
  Description of Artificial Sequence: Synthetic oligonucleotide
  Antisense strand to SEQ ID NO: 1457968
acuuguacgucuaucagag

SEQ ID NO: 1457970 - RNA, 19 nt, Artificial Sequence
  Description of Artificial Sequence: Synthetic oligonucleotide
  Sense strand starting at position 983 of SEQ ID NO: 1244006
uuagcaaaucugcaggaaa

SEQ ID NO: 1457971 - RNA, 19 nt, Artificial Sequence
  Description of Artificial Sequence: Synthetic oligonucleotide
  Antisense strand to SEQ ID NO: 1457970
uuuccugcagauuugcuaa

SEQ ID NO: 1457972 - RNA, 19 nt, Artificial Sequence
  Description of Artificial Sequence: Synthetic oligonucleotide
  Sense strand starting at position 1037 of SEQ ID NO: 1244006
guugguuccuuuccaugga

SEQ ID NO: 1457973 - RNA, 19 nt, Artificial Sequence
  Description of Artificial Sequence: Synthetic oligonucleotide
  Antisense strand to SEQ ID NO: 1457972
uccauggaaaggaaccaac

SEQ ID NO: 1457974 - RNA, 19 nt, Artificial Sequence
  Description of Artificial Sequence: Synthetic oligonucleotide
  Sense strand starting at position 1167 of SEQ ID NO: 1244006
acgcuuaucucuuccauga

SEQ ID NO: 1457975 - RNA, 19 nt, Artificial Sequence
  Description of Artificial Sequence: Synthetic oligonucleotide
  Antisense strand to SEQ ID NO: 1457974
ucauggaagagauaagcgu

SEQ ID NO: 1457976 - RNA, 19 nt, Artificial Sequence
  Description of Artificial Sequence: Synthetic oligonucleotide
  Sense strand starting at position 1171 of SEQ ID NO: 1244006
uuaucucuuccaugaagga

SEQ ID NO: 1457977 - RNA, 19 nt, Artificial Sequence
  Description of Artificial Sequence: Synthetic oligonucleotide
  Antisense strand to SEQ ID NO: 1457976
uccuucauggaagagauaa

SEQ ID NO: 1457978 - RNA, 19 nt, Artificial Sequence
  Description of Artificial Sequence: Synthetic oligonucleotide
  Sense strand starting at position 1242 of SEQ ID NO: 1244006
cccucauuuccguggacuu

SEQ ID NO: 1457979 - RNA, 19 nt, Artificial Sequence
  Description of Artificial Sequence: Synthetic oligonucleotide
  Antisense strand to SEQ ID NO: 1457978
aaguccacggaaaugaggg

SEQ ID NO: 1457980 - RNA, 19 nt, Artificial Sequence
  Description of Artificial Sequence: Synthetic oligonucleotide
  Sense strand starting at position 1243 of SEQ ID NO: 1244006
ccucauuuccguggacuuu

SEQ ID NO: 1457981 - RNA, 19 nt, Artificial Sequence
  Description of Artificial Sequence: Synthetic oligonucleotide
  Antisense strand to SEQ ID NO: 1457980
aaaguccacggaaaugagg

SEQ ID NO: 1457982 - RNA, 19 nt, Artificial Sequence
  Description of Artificial Sequence: Synthetic oligonucleotide
  Sense strand starting at position 1373 of SEQ ID NO: 1244006
cugcgagcuacugaaaugu

SEQ ID NO: 1457983 - RNA, 19 nt, Artificial Sequence
  Description of Artificial Sequence: Synthetic oligonucleotide
  Antisense strand to SEQ ID NO: 1457982
acauuucaguagcucgcag

SEQ ID NO: 1457984 - RNA, 19 nt, Artificial Sequence
  Description of Artificial Sequence: Synthetic oligonucleotide
  Sense strand starting at position 2770 of SEQ ID NO: 1244006
guucacaacgugucguuau

SEQ ID NO: 1457985 - RNA, 19 nt, Artificial Sequence
  Description of Artificial Sequence: Synthetic oligonucleotide
  Antisense strand to SEQ ID NO: 1457984
auaacgacacguugugaac

SEQ ID NO: 1457986 - RNA, 19 nt, Artificial Sequence
  Description of Artificial Sequence: Synthetic oligonucleotide
  Sense strand starting at position 2773 of SEQ ID NO: 1244006
cacaacgugucguuauuua

SEQ ID NO: 1457987 - RNA, 19 nt, Artificial Sequence
  Description of Artificial Sequence: Synthetic oligonucleotide
  Antisense strand to SEQ ID NO: 1457986
uaaauaacgacacguugug

SEQ ID NO: 1457988 - RNA, 19 nt, Artificial Sequence
  Description of Artificial Sequence: Synthetic oligonucleotide
  Sense strand starting at position 3111 of SEQ ID NO: 1244006
gggacaggcgucuaaacuu

SEQ ID NO: 1457989 - RNA, 19 nt, Artificial Sequence
  Description of Artificial Sequence: Synthetic oligonucleotide
  Antisense strand to SEQ ID NO: 1457988
aaguuuagacgccuguccc

SEQ ID NO: 1457990 - RNA, 19 nt, Artificial Sequence
  Description of Artificial Sequence: Synthetic oligonucleotide
  Sense strand starting at position 3117 of SEQ ID NO: 1244006
ggcgucuaaacuugaauga

SEQ ID NO: 1457991 - RNA, 19 nt, Artificial Sequence
  Description of Artificial Sequence: Synthetic oligonucleotide
  Antisense strand to SEQ ID NO: 1457990
ucauucaaguuuagacgcc

SEQ ID NO: 1457992 - RNA, 19 nt, Artificial Sequence
  Description of Artificial Sequence: Synthetic oligonucleotide
  Sense strand starting at position 3118 of SEQ ID NO: 1244006
gcgucuaaacuugaaugaa

SEQ ID NO: 1457993 - RNA, 19 nt, Artificial Sequence
  Description of Artificial Sequence: Synthetic oligonucleotide
  Antisense strand to SEQ ID NO: 1457992
uucauucaaguuuagacgc

SEQ ID NO: 1457994 - RNA, 19 nt, Artificial Sequence
  Description of Artificial Sequence: Synthetic oligonucleotide
  Sense strand starting at position 3128 of SEQ ID NO: 1244006
uugaaugaauuggaauaca

SEQ ID NO: 1457995 - RNA, 19 nt, Artificial Sequence
  Description of Artificial Sequence: Synthetic oligonucleotide
  Antisense strand to SEQ ID NO: 1457994
uguauuccaauucauucaa

SEQ ID NO: 1457996 - RNA, 19 nt, Artificial Sequence
  Description of Artificial Sequence: Synthetic oligonucleotide
  Sense strand starting at position 3202 of SEQ ID NO: 1244006
uggcuucuguccuuuagga

SEQ ID NO: 1457997 - RNA, 19 nt, Artificial Sequence
  Description of Artificial Sequence: Synthetic oligonucleotide
  Antisense strand to SEQ ID NO: 1457996
uccuaaaggacagaagcca

SEQ ID NO: 1457998 - RNA, 19 nt, Artificial Sequence
  Description of Artificial Sequence: Synthetic oligonucleotide
  Sense strand starting at position 3204 of SEQ ID NO: 1244006
gcuucuguccuuuaggaac

SEQ ID NO: 1457999 - RNA, 19 nt, Artificial Sequence
  Description of Artificial Sequence: Synthetic oligonucleotide
  Antisense strand to SEQ ID NO: 1457998
guuccuaaaggacagaagc

SEQ ID NO: 1458000 - RNA, 19 nt, Artificial Sequence
  Description of Artificial Sequence: Synthetic oligonucleotide
  Sense strand starting at position 3331 of SEQ ID NO: 1244006
ucagaucaccgucaugcaa

SEQ ID NO: 1458001 - RNA, 19 nt, Artificial Sequence
  Description of Artificial Sequence: Synthetic oligonucleotide
  Antisense strand to SEQ ID NO: 1458000
uugcaugacggugaucuga

SEQ ID NO: 1458002 - RNA, 19 nt, Artificial Sequence
  Description of Artificial Sequence: Synthetic oligonucleotide
  Sense strand starting at position 3368 of SEQ ID NO: 1244006
guaugaggacuucggaaca

SEQ ID NO: 1458003 - RNA, 19 nt, Artificial Sequence
  Description of Artificial Sequence: Synthetic oligonucleotide
  Antisense strand to SEQ ID NO: 1458002
uguuccgaaguccucauac

SEQ ID NO: 1458004 - RNA, 19 nt, Artificial Sequence
  Description of Artificial Sequence: Synthetic oligonucleotide
  Sense strand starting at position 3409 of SEQ ID NO: 1244006
acgauuugcugguccguga

SEQ ID NO: 1458005 - RNA, 19 nt, Artificial Sequence
  Description of Artificial Sequence: Synthetic oligonucleotide
  Antisense strand to SEQ ID NO: 1458004
ucacggaccagcaaaucgu

SEQ ID NO: 1458006 - RNA, 19 nt, Artificial Sequence
  Description of Artificial Sequence: Synthetic oligonucleotide
  Sense strand starting at position 3412 of SEQ ID NO: 1244006
auuugcugguccgugaaau

SEQ ID NO: 1458007 - RNA, 19 nt, Artificial Sequence
  Description of Artificial Sequence: Synthetic oligonucleotide
  Antisense strand to SEQ ID NO: 1458006
auuucacggaccagcaaau

SEQ ID NO: 1458008 - RNA, 19 nt, Artificial Sequence
  Description of Artificial Sequence: Synthetic oligonucleotide
  Sense strand starting at position 3416 of SEQ ID NO: 1244006
gcugguccgugaaaugaga

SEQ ID NO: 1458009 - RNA, 19 nt, Artificial Sequence
  Description of Artificial Sequence: Synthetic oligonucleotide
  Antisense strand to SEQ ID NO: 1458008
ucucauuucacggaccagc

SEQ ID NO: 1458010 - RNA, 19 nt, Artificial Sequence
  Description of Artificial Sequence: Synthetic oligonucleotide
  Sense strand starting at position 3441 of SEQ ID NO: 1244006
cuggaucacuagcucuuua

SEQ ID NO: 1458011 - RNA, 19 nt, Artificial Sequence
  Description of Artificial Sequence: Synthetic oligonucleotide
  Antisense strand to SEQ ID NO: 1458010
uaaagagcuagugauccag

SEQ ID NO: 1458012 - RNA, 19 nt, Artificial Sequence
  Description of Artificial Sequence: Synthetic oligonucleotide
  Sense strand starting at position 3479 of SEQ ID NO: 1244006
uucuuaugagucuaugacu

SEQ ID NO: 1458013 - RNA, 19 nt, Artificial Sequence
  Description of Artificial Sequence: Synthetic oligonucleotide
  Antisense strand to SEQ ID NO: 1458012
agucauagacucauaagaa

SEQ ID NO: 1458014 - RNA, 19 nt, Artificial Sequence
  Description of Artificial Sequence: Synthetic oligonucleotide
  Sense strand starting at position 3553 of SEQ ID NO: 1244006
caguuagugauguaggaac

SEQ ID NO: 1458015 - RNA, 19 nt, Artificial Sequence
  Description of Artificial Sequence: Synthetic oligonucleotide
  Antisense strand to SEQ ID NO: 1458014
guuccuacaucacuaacug

SEQ ID NO: 1458016 - RNA, 19 nt, Artificial Sequence
  Description of Artificial Sequence: Synthetic oligonucleotide
  Sense strand starting at position 3560 of SEQ ID NO: 1244006
ugauguaggaacuggugua

SEQ ID NO: 1458017 - RNA, 19 nt, Artificial Sequence
  Description of Artificial Sequence: Synthetic oligonucleotide
  Antisense strand to SEQ ID NO: 1458016
uacaccaguuccuacauca

SEQ ID NO: 1458018 - RNA, 19 nt, Artificial Sequence
  Description of Artificial Sequence: Synthetic oligonucleotide
  Sense strand starting at position 3625 of SEQ ID NO: 1244006
ggagucugaagauguuucu

SEQ ID NO: 1458019 - RNA, 19 nt, Artificial Sequence
  Description of Artificial Sequence: Synthetic oligonucleotide
  Antisense strand to SEQ ID NO: 1458018
agaaacaucuucagacucc

SEQ ID NO: 1458020 - RNA, 19 nt, Artificial Sequence
  Description of Artificial Sequence: Synthetic oligonucleotide
  Sense strand starting at position 3628 of SEQ ID NO: 1244006
gucugaagauguuucucag

SEQ ID NO: 1458021 - RNA, 19 nt, Artificial Sequence
  Description of Artificial Sequence: Synthetic oligonucleotide
  Antisense strand to SEQ ID NO: 1458020
cugagaaacaucuucagac

SEQ ID NO: 1458022 - RNA, 19 nt, Artificial Sequence
  Description of Artificial Sequence: Synthetic oligonucleotide
  Sense strand starting at position 3631 of SEQ ID NO: 1244006
ugaagauguuucucagguu

SEQ ID NO: 1458023 - RNA, 19 nt, Artificial Sequence
  Description of Artificial Sequence: Synthetic oligonucleotide
  Antisense strand to SEQ ID NO: 1458022
aaccugagaaacaucuuca

SEQ ID NO: 1458024 - RNA, 19 nt, Artificial Sequence
  Description of Artificial Sequence: Synthetic oligonucleotide
  Sense strand starting at position 3670 of SEQ ID NO: 1244006
gugguaguaucaguuacua

SEQ ID NO: 1458025 - RNA, 19 nt, Artificial Sequence
  Description of Artificial Sequence: Synthetic oligonucleotide
  Antisense strand to SEQ ID NO: 1458024
uaguaacugauacuaccac

SEQ ID NO: 1458026 - RNA, 19 nt, Artificial Sequence
  Description of Artificial Sequence: Synthetic oligonucleotide
  Sense strand starting at position 3728 of SEQ ID NO: 1244006
uccuauaugugguuaagaa

SEQ ID NO: 1458027 - RNA, 19 nt, Artificial Sequence
  Description of Artificial Sequence: Synthetic oligonucleotide
  Antisense strand to SEQ ID NO: 1458026
uucuuaaccacauauagga

SEQ ID NO: 1458028 - RNA, 19 nt, Artificial Sequence
  Description of Artificial Sequence: Synthetic oligonucleotide
  Sense strand starting at position 3842 of SEQ ID NO: 1244006
cugacauacucagugaaag

SEQ ID NO: 1458029 - RNA, 19 nt, Artificial Sequence
  Description of Artificial Sequence: Synthetic oligonucleotide
  Antisense strand to SEQ ID NO: 1458028
cuuucacugaguaugucag

SEQ ID NO: 1458030 - RNA, 19 nt, Artificial Sequence
  Description of Artificial Sequence: Synthetic oligonucleotide
  Sense strand starting at position 3881 of SEQ ID NO: 1244006
gucccaagauaucugacaa

SEQ ID NO: 1458031 - RNA, 19 nt, Artificial Sequence
  Description of Artificial Sequence: Synthetic oligonucleotide
  Antisense strand to SEQ ID NO: 1458030
uugucagauaucuugggac

SEQ ID NO: 1458032 - RNA, 19 nt, Artificial Sequence
  Description of Artificial Sequence: Synthetic oligonucleotide
  Sense strand starting at position 176 of SEQ ID NO: 1244007
ccuccagcucuggguuuaa

SEQ ID NO: 1458033 - RNA, 19 nt, Artificial Sequence
  Description of Artificial Sequence: Synthetic oligonucleotide
  Antisense strand to SEQ ID NO: 1458032
uuaaacccagagcuggagg

SEQ ID NO: 1458034 - RNA, 19 nt, Artificial Sequence
  Description of Artificial Sequence: Synthetic oligonucleotide
  Sense strand starting at position 180 of SEQ ID NO: 1244007
cagcucuggguuuaaagau

SEQ ID NO: 1458035 - RNA, 19 nt, Artificial Sequence
  Description of Artificial Sequence: Synthetic oligonucleotide
  Antisense strand to SEQ ID NO: 1458034
aucuuuaaacccagagcug

SEQ ID NO: 1458036 - RNA, 19 nt, Artificial Sequence
  Description of Artificial Sequence: Synthetic oligonucleotide
  Sense strand starting at position 196 of SEQ ID NO: 1244007
gaugcaucccuugaagggu

SEQ ID NO: 1458037 - RNA, 19 nt, Artificial Sequence
  Description of Artificial Sequence: Synthetic oligonucleotide
  Antisense strand to SEQ ID NO: 1458036
acccuucaagggaugcauc

SEQ ID NO: 1458038 - RNA, 19 nt, Artificial Sequence
  Description of Artificial Sequence: Synthetic oligonucleotide
  Sense strand starting at position 240 of SEQ ID NO: 1244007
ggacgucuuccugacagca

SEQ ID NO: 1458039 - RNA, 19 nt, Artificial Sequence
  Description of Artificial Sequence: Synthetic oligonucleotide
  Antisense strand to SEQ ID NO: 1458038
ugcugucaggaagacgucc

SEQ ID NO: 1458040 - RNA, 19 nt, Artificial Sequence
  Description of Artificial Sequence: Synthetic oligonucleotide
  Sense strand starting at position 252 of SEQ ID NO: 1244007
gacagcagcucucauuuga

SEQ ID NO: 1458041 - RNA, 19 nt, Artificial Sequence
  Description of Artificial Sequence: Synthetic oligonucleotide
  Antisense strand to SEQ ID NO: 1458040
ucaaaugagagcugcuguc

SEQ ID NO: 1458042 - RNA, 19 nt, Artificial Sequence
  Description of Artificial Sequence: Synthetic oligonucleotide
  Sense strand starting at position 259 of SEQ ID NO: 1244007
gcucucauuugacagcaaa

SEQ ID NO: 1458043 - RNA, 19 nt, Artificial Sequence
  Description of Artificial Sequence: Synthetic oligonucleotide
  Antisense strand to SEQ ID NO: 1458042
uuugcugucaaaugagagc

SEQ ID NO: 1458044 - RNA, 19 nt, Artificial Sequence
  Description of Artificial Sequence: Synthetic oligonucleotide
  Sense strand starting at position 409 of SEQ ID NO: 1244007
ugcuaauuagaccagacuu

SEQ ID NO: 1458045 - RNA, 19 nt, Artificial Sequence
  Description of Artificial Sequence: Synthetic oligonucleotide
  Antisense strand to SEQ ID NO: 1458044
aagucuggucuaauuagca

SEQ ID NO: 1458046 - RNA, 19 nt, Artificial Sequence
  Description of Artificial Sequence: Synthetic oligonucleotide
  Sense strand starting at position 455 of SEQ ID NO: 1244007
ugaucauuccugggagagu

SEQ ID NO: 1458047 - RNA, 19 nt, Artificial Sequence
  Description of Artificial Sequence: Synthetic oligonucleotide
  Antisense strand to SEQ ID NO: 1458046
acucucccaggaaugauca

SEQ ID NO: 1458048 - RNA, 19 nt, Artificial Sequence
  Description of Artificial Sequence: Synthetic oligonucleotide
  Sense strand starting at position 549 of SEQ ID NO: 1244007
ggcucuccucagggauaca

SEQ ID NO: 1458049 - RNA, 19 nt, Artificial Sequence
  Description of Artificial Sequence: Synthetic oligonucleotide
  Antisense strand to SEQ ID NO: 1458048
uguaucccugaggagagcc

SEQ ID NO: 1458050 - RNA, 19 nt, Artificial Sequence
  Description of Artificial Sequence: Synthetic oligonucleotide
  Sense strand starting at position 652 of SEQ ID NO: 1244007
cuuugcuucccugggugaa

SEQ ID NO: 1458051 - RNA, 19 nt, Artificial Sequence
  Description of Artificial Sequence: Synthetic oligonucleotide
  Antisense strand to SEQ ID NO: 1458050
uucacccagggaagcaaag

SEQ ID NO: 1458052 - RNA, 19 nt, Artificial Sequence
  Description of Artificial Sequence: Synthetic oligonucleotide
  Sense strand starting at position 662 of SEQ ID NO: 1244007
cugggugaacucuggaauc

SEQ ID NO: 1458053 - RNA, 19 nt, Artificial Sequence
  Description of Artificial Sequence: Synthetic oligonucleotide
  Antisense strand to SEQ ID NO: 1458052
gauuccagaguucacccag

SEQ ID NO: 1458054 - RNA, 19 nt, Artificial Sequence
  Description of Artificial Sequence: Synthetic oligonucleotide
  Sense strand starting at position 717 of SEQ ID NO: 1244007
uuuggugagccucacuauu

SEQ ID NO: 1458055 - RNA, 19 nt, Artificial Sequence
  Description of Artificial Sequence: Synthetic oligonucleotide
  Antisense strand to SEQ ID NO: 1458054
aauagugaggcucaccaaa

SEQ ID NO: 1458056 - RNA, 19 nt, Artificial Sequence
  Description of Artificial Sequence: Synthetic oligonucleotide
  Sense strand starting at position 737 of SEQ ID NO: 1244007
gucacuugcuuugcaauuu

SEQ ID NO: 1458057 - RNA, 19 nt, Artificial Sequence
  Description of Artificial Sequence: Synthetic oligonucleotide
  Antisense strand to SEQ ID NO: 1458056
aaauugcaaagcaagugac

SEQ ID NO: 1458058 - RNA, 19 nt, Artificial Sequence
  Description of Artificial Sequence: Synthetic oligonucleotide
  Sense strand starting at position 781 of SEQ ID NO: 1244007
ugguauugugagcaucugu

SEQ ID NO: 1458059 - RNA, 19 nt, Artificial Sequence
  Description of Artificial Sequence: Synthetic oligonucleotide
  Antisense strand to SEQ ID NO: 1458058
acagaugcucacaauacca

SEQ ID NO: 1458060 - RNA, 19 nt, Artificial Sequence
  Description of Artificial Sequence: Synthetic oligonucleotide
  Sense strand starting at position 792 of SEQ ID NO: 1244007
gcaucuguuuccuccaaga

SEQ ID NO: 1458061 - RNA, 19 nt, Artificial Sequence
  Description of Artificial Sequence: Synthetic oligonucleotide
  Antisense strand to SEQ ID NO: 1458060
ucuuggaggaaacagaugc

SEQ ID NO: 1458062 - RNA, 19 nt, Artificial Sequence
  Description of Artificial Sequence: Synthetic oligonucleotide
  Sense strand starting at position 849 of SEQ ID NO: 1244007
cuauaugugccaggaacua

SEQ ID NO: 1458063 - RNA, 19 nt, Artificial Sequence
  Description of Artificial Sequence: Synthetic oligonucleotide
  Antisense strand to SEQ ID NO: 1458062
uaguuccuggcacauauag

SEQ ID NO: 1458064 - RNA, 19 nt, Artificial Sequence
  Description of Artificial Sequence: Synthetic oligonucleotide
  Sense strand starting at position 880 of SEQ ID NO: 1244007
gggaaacagcagugaacua

SEQ ID NO: 1458065 - RNA, 19 nt, Artificial Sequence
  Description of Artificial Sequence: Synthetic oligonucleotide
  Antisense strand to SEQ ID NO: 1458064
uaguucacugcuguuuccc

SEQ ID NO: 1458066 - RNA, 19 nt, Artificial Sequence
  Description of Artificial Sequence: Synthetic oligonucleotide
  Sense strand starting at position 990 of SEQ ID NO: 1244007
ugauuaguguugucaguau

SEQ ID NO: 1458067 - RNA, 19 nt, Artificial Sequence
  Description of Artificial Sequence: Synthetic oligonucleotide
  Antisense strand to SEQ ID NO: 1458066
auacugacaacacuaauca

SEQ ID NO: 1458068 - RNA, 19 nt, Artificial Sequence
  Description of Artificial Sequence: Synthetic oligonucleotide
  Sense strand starting at position 994 of SEQ ID NO: 1244007
uaguguugucaguauuacc

SEQ ID NO: 1458069 - RNA, 19 nt, Artificial Sequence
  Description of Artificial Sequence: Synthetic oligonucleotide
  Antisense strand to SEQ ID NO: 1458068
gguaauacugacaacacua

SEQ ID NO: 1458070 - RNA, 19 nt, Artificial Sequence
  Description of Artificial Sequence: Synthetic oligonucleotide
  Sense strand starting at position 1001 of SEQ ID NO: 1244007
gucaguauuaccugggaca

SEQ ID NO: 1458071 - RNA, 19 nt, Artificial Sequence
  Description of Artificial Sequence: Synthetic oligonucleotide
  Antisense strand to SEQ ID NO: 1458070
ugucccagguaauacugac

SEQ ID NO: 1458072 - RNA, 19 nt, Artificial Sequence
  Description of Artificial Sequence: Synthetic oligonucleotide
  Sense strand starting at position 1002 of SEQ ID NO: 1244007
ucaguauuaccugggacac

SEQ ID NO: 1458073 - RNA, 19 nt, Artificial Sequence
  Description of Artificial Sequence: Synthetic oligonucleotide
  Antisense strand to SEQ ID NO: 1458072
gugucccagguaauacuga

SEQ ID NO: 1458074 - RNA, 19 nt, Artificial Sequence
  Description of Artificial Sequence: Synthetic oligonucleotide
  Sense strand starting at position 2103 of SEQ ID NO: 1244007
gcaaaugcugcgcuuggau

SEQ ID NO: 1458075 - RNA, 19 nt, Artificial Sequence
  Description of Artificial Sequence: Synthetic oligonucleotide
  Antisense strand to SEQ ID NO: 1458074
auccaagcgcagcauuugc

SEQ ID NO: 1458076 - RNA, 19 nt, Artificial Sequence
  Description of Artificial Sequence: Synthetic oligonucleotide
  Sense strand starting at position 2811 of SEQ ID NO: 1244007
guuacuucuccgcacaaga

SEQ ID NO: 1458077 - RNA, 19 nt, Artificial Sequence
  Description of Artificial Sequence: Synthetic oligonucleotide
  Antisense strand to SEQ ID NO: 1458076
ucuugugcggagaaguaac

SEQ ID NO: 1458078 - RNA, 19 nt, Artificial Sequence
  Description of Artificial Sequence: Synthetic oligonucleotide
  Sense strand starting at position 2836 of SEQ ID NO: 1244007
gaugauggcuucuugagac

SEQ ID NO: 1458079 - RNA, 19 nt, Artificial Sequence
  Description of Artificial Sequence: Synthetic oligonucleotide
  Antisense strand to SEQ ID NO: 1458078
gucucaagaagccaucauc

SEQ ID NO: 1458080 - RNA, 19 nt, Artificial Sequence
  Description of Artificial Sequence: Synthetic oligonucleotide
  Sense strand starting at position 2895 of SEQ ID NO: 1244007
cuccuuuggccucagugau

SEQ ID NO: 1458081 - RNA, 19 nt, Artificial Sequence
  Description of Artificial Sequence: Synthetic oligonucleotide
  Antisense strand to SEQ ID NO: 1458080
aucacugaggccaaaggag

SEQ ID NO: 1458082 - RNA, 19 nt, Artificial Sequence
  Description of Artificial Sequence: Synthetic oligonucleotide
  Sense strand starting at position 2905 of SEQ ID NO: 1244007
cucagugauuuccaaggaa

SEQ ID NO: 1458083 - RNA, 19 nt, Artificial Sequence
  Description of Artificial Sequence: Synthetic oligonucleotide
  Antisense strand to SEQ ID NO: 1458082
uuccuuggaaaucacugag

SEQ ID NO: 1458084 - RNA, 19 nt, Artificial Sequence
  Description of Artificial Sequence: Synthetic oligonucleotide
  Sense strand starting at position 2919 of SEQ ID NO: 1244007
aggaaaggaugaugauaau

SEQ ID NO: 1458085 - RNA, 19 nt, Artificial Sequence
  Description of Artificial Sequence: Synthetic oligonucleotide
  Antisense strand to SEQ ID NO: 1458084
auuaucaucauccuuuccu

SEQ ID NO: 1458086 - RNA, 19 nt, Artificial Sequence
  Description of Artificial Sequence: Synthetic oligonucleotide
  Sense strand starting at position 2922 of SEQ ID NO: 1244007
aaaggaugaugauaaugau

SEQ ID NO: 1458087 - RNA, 19 nt, Artificial Sequence
  Description of Artificial Sequence: Synthetic oligonucleotide
  Antisense strand to SEQ ID NO: 1458086
aucauuaucaucauccuuu

SEQ ID NO: 1458088 - RNA, 19 nt, Artificial Sequence
  Description of Artificial Sequence: Synthetic oligonucleotide
  Sense strand starting at position 2925 of SEQ ID NO: 1244007
ggaugaugauaaugauuaa

SEQ ID NO: 1458089 - RNA, 19 nt, Artificial Sequence
  Description of Artificial Sequence: Synthetic oligonucleotide
  Antisense strand to SEQ ID NO: 1458088
uuaaucauuaucaucaucc

SEQ ID NO: 1458090 - RNA, 19 nt, Artificial Sequence
  Description of Artificial Sequence: Synthetic oligonucleotide
  Sense strand starting at position 2928 of SEQ ID NO: 1244007
ugaugauaaugauuaacgu

SEQ ID NO: 1458091 - RNA, 19 nt, Artificial Sequence
  Description of Artificial Sequence: Synthetic oligonucleotide
  Antisense strand to SEQ ID NO: 1458090
acguuaaucauuaucauca

SEQ ID NO: 1458092 - RNA, 19 nt, Artificial Sequence
  Description of Artificial Sequence: Synthetic oligonucleotide
  Sense strand starting at position 2947 of SEQ ID NO: 1244007
guauauggcacuuaguaug

SEQ ID NO: 1458093 - RNA, 19 nt, Artificial Sequence
  Description of Artificial Sequence: Synthetic oligonucleotide
  Antisense strand to SEQ ID NO: 1458092
cauacuaagugccauauac

SEQ ID NO: 1458094 - RNA, 19 nt, Artificial Sequence
  Description of Artificial Sequence: Synthetic oligonucleotide
  Sense strand starting at position 2973 of SEQ ID NO: 1244007
accgguguugcaguuuauu

SEQ ID NO: 1458095 - RNA, 19 nt, Artificial Sequence
  Description of Artificial Sequence: Synthetic oligonucleotide
  Antisense strand to SEQ ID NO: 1458094
aauaaacugcaacaccggu

SEQ ID NO: 1458096 - RNA, 19 nt, Artificial Sequence
  Description of Artificial Sequence: Synthetic oligonucleotide
  Sense strand starting at position 2976 of SEQ ID NO: 1244007
gguguugcaguuuauuaac

SEQ ID NO: 1458097 - RNA, 19 nt, Artificial Sequence
  Description of Artificial Sequence: Synthetic oligonucleotide
  Antisense strand to SEQ ID NO: 1458096
guuaauaaacugcaacacc

SEQ ID NO: 1458098 - RNA, 19 nt, Artificial Sequence
  Description of Artificial Sequence: Synthetic oligonucleotide
  Sense strand starting at position 3039 of SEQ ID NO: 1244007
acauguuggaaauguaaug

SEQ ID NO: 1458099 - RNA, 19 nt, Artificial Sequence
  Description of Artificial Sequence: Synthetic oligonucleotide
  Antisense strand to SEQ ID NO: 1458098
cauuacauuuccaacaugu

SEQ ID NO: 1458100 - RNA, 19 nt, Artificial Sequence
  Description of Artificial Sequence: Synthetic oligonucleotide
  Sense strand starting at position 3065 of SEQ ID NO: 1244007
ucauauaucgguggcauuu

SEQ ID NO: 1458101 - RNA, 19 nt, Artificial Sequence
  Description of Artificial Sequence: Synthetic oligonucleotide
  Antisense strand to SEQ ID NO: 1458100
aaaugccaccgauauauga

SEQ ID NO: 1458102 - RNA, 19 nt, Artificial Sequence
  Description of Artificial Sequence: Synthetic oligonucleotide
  Sense strand starting at position 3455 of SEQ ID NO: 1244007
agcaaauuguagccagaug

SEQ ID NO: 1458103 - RNA, 19 nt, Artificial Sequence
  Description of Artificial Sequence: Synthetic oligonucleotide
  Antisense strand to SEQ ID NO: 1458102
caucuggcuacaauuugcu

SEQ ID NO: 1458104 - RNA, 19 nt, Artificial Sequence
  Description of Artificial Sequence: Synthetic oligonucleotide
  Sense strand starting at position 3473 of SEQ ID NO: 1244007
gguguaacuuaagucaauc

SEQ ID NO: 1458105 - RNA, 19 nt, Artificial Sequence
  Description of Artificial Sequence: Synthetic oligonucleotide
  Antisense strand to SEQ ID NO: 1458104
gauugacuuaaguuacacc

SEQ ID NO: 1458106 - RNA, 19 nt, Artificial Sequence
  Description of Artificial Sequence: Synthetic oligonucleotide
  Sense strand starting at position 3574 of SEQ ID NO: 1244007
ucaacaauaugguuuagga

SEQ ID NO: 1458107 - RNA, 19 nt, Artificial Sequence
  Description of Artificial Sequence: Synthetic oligonucleotide
  Antisense strand to SEQ ID NO: 1458106
uccuaaaccauauuguuga

SEQ ID NO: 1458108 - RNA, 19 nt, Artificial Sequence
  Description of Artificial Sequence: Synthetic oligonucleotide
  Sense strand starting at position 3584 of SEQ ID NO: 1244007
gguuuaggaauaugcacau

SEQ ID NO: 1458109 - RNA, 19 nt, Artificial Sequence
  Description of Artificial Sequence: Synthetic oligonucleotide
  Antisense strand to SEQ ID NO: 1458108
augugcauauuccuaaacc

SEQ ID NO: 1458110 - RNA, 19 nt, Artificial Sequence
  Description of Artificial Sequence: Synthetic oligonucleotide
  Sense strand starting at position 3611 of SEQ ID NO: 1244007
ggacaaagcuauuauggaa

SEQ ID NO: 1458111 - RNA, 19 nt, Artificial Sequence
  Description of Artificial Sequence: Synthetic oligonucleotide
  Antisense strand to SEQ ID NO: 1458110
uuccauaauagcuuugucc

SEQ ID NO: 1458112 - RNA, 19 nt, Artificial Sequence
  Description of Artificial Sequence: Synthetic oligonucleotide
  Sense strand starting at position 13 of SEQ ID NO: 1244008
gacggugugucagccaaga

SEQ ID NO: 1458113 - RNA, 19 nt, Artificial Sequence
  Description of Artificial Sequence: Synthetic oligonucleotide
  Antisense strand to SEQ ID NO: 1458112
ucuuggcugacacaccguc

SEQ ID NO: 1458114 - RNA, 19 nt, Artificial Sequence
  Description of Artificial Sequence: Synthetic oligonucleotide
  Sense strand starting at position 15 of SEQ ID NO: 1244008
cggugugucagccaagaau

SEQ ID NO: 1458115 - RNA, 19 nt, Artificial Sequence
  Description of Artificial Sequence: Synthetic oligonucleotide
  Antisense strand to SEQ ID NO: 1458114
auucuuggcugacacaccg

SEQ ID NO: 1458116 - RNA, 19 nt, Artificial Sequence
  Description of Artificial Sequence: Synthetic oligonucleotide
  Sense strand starting at position 192 of SEQ ID NO: 1244008
gcauccuggccuggaaagu

SEQ ID NO: 1458117 - RNA, 19 nt, Artificial Sequence
  Description of Artificial Sequence: Synthetic oligonucleotide
  Antisense strand to SEQ ID NO: 1458116
acuuuccaggccaggaugc

SEQ ID NO: 1458118 - RNA, 19 nt, Artificial Sequence
  Description of Artificial Sequence: Synthetic oligonucleotide
  Sense strand starting at position 193 of SEQ ID NO: 1244008
cauccuggccuggaaaguu

SEQ ID NO: 1458119 - RNA, 19 nt, Artificial Sequence
  Description of Artificial Sequence: Synthetic oligonucleotide
  Antisense strand to SEQ ID NO: 1458118
aacuuuccaggccaggaug

SEQ ID NO: 1458120 - RNA, 19 nt, Artificial Sequence
  Description of Artificial Sequence: Synthetic oligonucleotide
  Sense strand starting at position 201 of SEQ ID NO: 1244008
ccuggaaaguuuccaccau

SEQ ID NO: 1458121 - RNA, 19 nt, Artificial Sequence
  Description of Artificial Sequence: Synthetic oligonucleotide
  Antisense strand to SEQ ID NO: 1458120
augguggaaacuuuccagg

SEQ ID NO: 1458122 - RNA, 19 nt, Artificial Sequence
  Description of Artificial Sequence: Synthetic oligonucleotide
  Sense strand starting at position 251 of SEQ ID NO: 1244008
gugcaaucugcucccaguu

SEQ ID NO: 1458123 - RNA, 19 nt, Artificial Sequence
  Description of Artificial Sequence: Synthetic oligonucleotide
  Antisense strand to SEQ ID NO: 1458122
aacugggagcagauugcac

SEQ ID NO: 1458124 - RNA, 19 nt, Artificial Sequence
  Description of Artificial Sequence: Synthetic oligonucleotide
  Sense strand starting at position 284 of SEQ ID NO: 1244008
ggaaacaggcaguguugaa

SEQ ID NO: 1458125 - RNA, 19 nt, Artificial Sequence
  Description of Artificial Sequence: Synthetic oligonucleotide
  Antisense strand to SEQ ID NO: 1458124
uucaacacugccuguuucc

SEQ ID NO: 1458126 - RNA, 19 nt, Artificial Sequence
  Description of Artificial Sequence: Synthetic oligonucleotide
  Sense strand starting at position 316 of SEQ ID NO: 1244008
gccagucucagauggacuu

SEQ ID NO: 1458127 - RNA, 19 nt, Artificial Sequence
  Description of Artificial Sequence: Synthetic oligonucleotide
  Antisense strand to SEQ ID NO: 1458126
aaguccaucugagacuggc

SEQ ID NO: 1458128 - RNA, 19 nt, Artificial Sequence
  Description of Artificial Sequence: Synthetic oligonucleotide
  Sense strand starting at position 379 of SEQ ID NO: 1244008
cagagagcucauggugugu

SEQ ID NO: 1458129 - RNA, 19 nt, Artificial Sequence
  Description of Artificial Sequence: Synthetic oligonucleotide
  Antisense strand to SEQ ID NO: 1458128
acacaccaugagcucucug

SEQ ID NO: 1458130 - RNA, 19 nt, Artificial Sequence
  Description of Artificial Sequence: Synthetic oligonucleotide
  Sense strand starting at position 1078 of SEQ ID NO: 1244008
ccucgauggucuccaggau

SEQ ID NO: 1458131 - RNA, 19 nt, Artificial Sequence
  Description of Artificial Sequence: Synthetic oligonucleotide
  Antisense strand to SEQ ID NO: 1458130
auccuggagaccaucgagg

SEQ ID NO: 1458132 - RNA, 19 nt, Artificial Sequence
  Description of Artificial Sequence: Synthetic oligonucleotide
  Sense strand starting at position 1117 of SEQ ID NO: 1244008
agaggaagucucggauguu

SEQ ID NO: 1458133 - RNA, 19 nt, Artificial Sequence
  Description of Artificial Sequence: Synthetic oligonucleotide
  Antisense strand to SEQ ID NO: 1458132
aacauccgagacuuccucu

SEQ ID NO: 1458134 - RNA, 19 nt, Artificial Sequence
  Description of Artificial Sequence: Synthetic oligonucleotide
  Sense strand starting at position 1141 of SEQ ID NO: 1244008
gcuugagcaccucguagaa

SEQ ID NO: 1458135 - RNA, 19 nt, Artificial Sequence
  Description of Artificial Sequence: Synthetic oligonucleotide
  Antisense strand to SEQ ID NO: 1458134
uucuacgaggugcucaagc

SEQ ID NO: 1458136 - RNA, 19 nt, Artificial Sequence
  Description of Artificial Sequence: Synthetic oligonucleotide
  Sense strand starting at position 1403 of SEQ ID NO: 1244008
cuucucugcccaugagcaa

SEQ ID NO: 1458137 - RNA, 19 nt, Artificial Sequence
  Description of Artificial Sequence: Synthetic oligonucleotide
  Antisense strand to SEQ ID NO: 1458136
uugcucaugggcagagaag

SEQ ID NO: 1458138 - RNA, 19 nt, Artificial Sequence
  Description of Artificial Sequence: Synthetic oligonucleotide
  Sense strand starting at position 1404 of SEQ ID NO: 1244008
uucucugcccaugagcaau

SEQ ID NO: 1458139 - RNA, 19 nt, Artificial Sequence
  Description of Artificial Sequence: Synthetic oligonucleotide
  Antisense strand to SEQ ID NO: 1458138
auugcucaugggcagagaa

SEQ ID NO: 1458140 - RNA, 19 nt, Artificial Sequence
  Description of Artificial Sequence: Synthetic oligonucleotide
  Sense strand starting at position 1414 of SEQ ID NO: 1244008
augagcaaucugcgggaaa

SEQ ID NO: 1458141 - RNA, 19 nt, Artificial Sequence
  Description of Artificial Sequence: Synthetic oligonucleotide
  Antisense strand to SEQ ID NO: 1458140
uuucccgcagauugcucau

SEQ ID NO: 1458142 - RNA, 19 nt, Artificial Sequence
  Description of Artificial Sequence: Synthetic oligonucleotide
  Sense strand starting at position 1416 of SEQ ID NO: 1244008
gagcaaucugcgggaaaga

SEQ ID NO: 1458143 - RNA, 19 nt, Artificial Sequence
  Description of Artificial Sequence: Synthetic oligonucleotide
  Antisense strand to SEQ ID NO: 1458142
ucuuucccgcagauugcuc

SEQ ID NO: 1458144 - RNA, 19 nt, Artificial Sequence
  Description of Artificial Sequence: Synthetic oligonucleotide
  Sense strand starting at position 1695 of SEQ ID NO: 1244008
gcaacuucugagggaaacu

SEQ ID NO: 1458145 - RNA, 19 nt, Artificial Sequence
  Description of Artificial Sequence: Synthetic oligonucleotide
  Antisense strand to SEQ ID NO: 1458144
aguuucccucagaaguugc

SEQ ID NO: 1458146 - RNA, 19 nt, Artificial Sequence
  Description of Artificial Sequence: Synthetic oligonucleotide
  Sense strand starting at position 1732 of SEQ ID NO: 1244008
cccaguagcuucuuagagu

SEQ ID NO: 1458147 - RNA, 19 nt, Artificial Sequence
  Description of Artificial Sequence: Synthetic oligonucleotide
  Antisense strand to SEQ ID NO: 1458146
acucuaagaagcuacuggg

SEQ ID NO: 1458148 - RNA, 19 nt, Artificial Sequence
  Description of Artificial Sequence: Synthetic oligonucleotide
  Sense strand starting at position 2235 of SEQ ID NO: 1244008
gggacaguguucucccuga

SEQ ID NO: 1458149 - RNA, 19 nt, Artificial Sequence
  Description of Artificial Sequence: Synthetic oligonucleotide
  Antisense strand to SEQ ID NO: 1458148
ucagggagaacacuguccc

SEQ ID NO: 1458150 - RNA, 19 nt, Artificial Sequence
  Description of Artificial Sequence: Synthetic oligonucleotide
  Sense strand starting at position 2239 of SEQ ID NO: 1244008
caguguucucccugagguc

SEQ ID NO: 1458151 - RNA, 19 nt, Artificial Sequence
  Description of Artificial Sequence: Synthetic oligonucleotide
  Antisense strand to SEQ ID NO: 1458150
gaccucagggagaacacug

SEQ ID NO: 1458152 - RNA, 19 nt, Artificial Sequence
  Description of Artificial Sequence: Synthetic oligonucleotide
  Sense strand starting at position 2240 of SEQ ID NO: 1244008
aguguucucccugagguca

SEQ ID NO: 1458153 - RNA, 19 nt, Artificial Sequence
  Description of Artificial Sequence: Synthetic oligonucleotide
  Antisense strand to SEQ ID NO: 1458152
ugaccucagggagaacacu

SEQ ID NO: 1458154 - RNA, 19 nt, Artificial Sequence
  Description of Artificial Sequence: Synthetic oligonucleotide
  Sense strand starting at position 2301 of SEQ ID NO: 1244008
gucuguuggugauccugga

SEQ ID NO: 1458155 - RNA, 19 nt, Artificial Sequence
  Description of Artificial Sequence: Synthetic oligonucleotide
  Antisense strand to SEQ ID NO: 1458154
uccaggaucaccaacagac

SEQ ID NO: 1458156 - RNA, 19 nt, Artificial Sequence
  Description of Artificial Sequence: Synthetic oligonucleotide
  Sense strand starting at position 2305 of SEQ ID NO: 1244008
guuggugauccuggaucaa

SEQ ID NO: 1458157 - RNA, 19 nt, Artificial Sequence
  Description of Artificial Sequence: Synthetic oligonucleotide
  Antisense strand to SEQ ID NO: 1458156
uugauccaggaucaccaac

SEQ ID NO: 1458158 - RNA, 19 nt, Artificial Sequence
  Description of Artificial Sequence: Synthetic oligonucleotide
  Sense strand starting at position 2362 of SEQ ID NO: 1244008
ccgugcggcuguauagaua

SEQ ID NO: 1458159 - RNA, 19 nt, Artificial Sequence
  Description of Artificial Sequence: Synthetic oligonucleotide
  Antisense strand to SEQ ID NO: 1458158
uaucuauacagccgcacgg

SEQ ID NO: 1458160 - RNA, 19 nt, Artificial Sequence
  Description of Artificial Sequence: Synthetic oligonucleotide
  Sense strand starting at position 2465 of SEQ ID NO: 1244008
cagggcuuuccugagcaga

SEQ ID NO: 1458161 - RNA, 19 nt, Artificial Sequence
  Description of Artificial Sequence: Synthetic oligonucleotide
  Antisense strand to SEQ ID NO: 1458160
ucugcucaggaaagcccug

SEQ ID NO: 1458162 - RNA, 19 nt, Artificial Sequence
  Description of Artificial Sequence: Synthetic oligonucleotide
  Sense strand starting at position 2467 of SEQ ID NO: 1244008
gggcuuuccugagcagaua

SEQ ID NO: 1458163 - RNA, 19 nt, Artificial Sequence
  Description of Artificial Sequence: Synthetic oligonucleotide
  Antisense strand to SEQ ID NO: 1458162
uaucugcucaggaaagccc

SEQ ID NO: 1458164 - RNA, 19 nt, Artificial Sequence
  Description of Artificial Sequence: Synthetic oligonucleotide
  Sense strand starting at position 2832 of SEQ ID NO: 1244008
gcugguuugggucccguaa

SEQ ID NO: 1458165 - RNA, 19 nt, Artificial Sequence
  Description of Artificial Sequence: Synthetic oligonucleotide
  Antisense strand to SEQ ID NO: 1458164
uuacgggacccaaaccagc

SEQ ID NO: 1458166 - RNA, 19 nt, Artificial Sequence
  Description of Artificial Sequence: Synthetic oligonucleotide
  Sense strand starting at position 3037 of SEQ ID NO: 1244008
aguccuacacucugccaua

SEQ ID NO: 1458167 - RNA, 19 nt, Artificial Sequence
  Description of Artificial Sequence: Synthetic oligonucleotide
  Antisense strand to SEQ ID NO: 1458166
uauggcagaguguaggacu

SEQ ID NO: 1458168 - RNA, 19 nt, Artificial Sequence
  Description of Artificial Sequence: Synthetic oligonucleotide
  Sense strand starting at position 3038 of SEQ ID NO: 1244008
guccuacacucugccauau

SEQ ID NO: 1458169 - RNA, 19 nt, Artificial Sequence
  Description of Artificial Sequence: Synthetic oligonucleotide
  Antisense strand to SEQ ID NO: 1458168
auauggcagaguguaggac

SEQ ID NO: 1458170 - RNA, 19 nt, Artificial Sequence
  Description of Artificial Sequence: Synthetic oligonucleotide
  Sense strand starting at position 3259 of SEQ ID NO: 1244008
cucccuguguucuuaccaa

SEQ ID NO: 1458171 - RNA, 19 nt, Artificial Sequence
  Description of Artificial Sequence: Synthetic oligonucleotide
  Antisense strand to SEQ ID NO: 1458170
uugguaagaacacagggag

SEQ ID NO: 1458172 - RNA, 19 nt, Artificial Sequence
  Description of Artificial Sequence: Synthetic oligonucleotide
  Sense strand starting at position 3544 of SEQ ID NO: 1244008
guacaaucauugcucaaug

SEQ ID NO: 1458173 - RNA, 19 nt, Artificial Sequence
  Description of Artificial Sequence: Synthetic oligonucleotide
  Antisense strand to SEQ ID NO: 1458172
cauugagcaaugauuguac

SEQ ID NO: 1458174 - RNA, 19 nt, Artificial Sequence
  Description of Artificial Sequence: Synthetic oligonucleotide
  Sense strand starting at position 3811 of SEQ ID NO: 1244008
gcacucauuuauguguguu

SEQ ID NO: 1458175 - RNA, 19 nt, Artificial Sequence
  Description of Artificial Sequence: Synthetic oligonucleotide
  Antisense strand to SEQ ID NO: 1458174
aacacacauaaaugagugc

SEQ ID NO: 1458176 - RNA, 19 nt, Artificial Sequence
  Description of Artificial Sequence: Synthetic oligonucleotide
  Sense strand starting at position 3813 of SEQ ID NO: 1244008
acucauuuauguguguuau

SEQ ID NO: 1458177 - RNA, 19 nt, Artificial Sequence
  Description of Artificial Sequence: Synthetic oligonucleotide
  Antisense strand to SEQ ID NO: 1458176
auaacacacauaaaugagu

SEQ ID NO: 1458178 - RNA, 19 nt, Artificial Sequence
  Description of Artificial Sequence: Synthetic oligonucleotide
  Sense strand starting at position 3814 of SEQ ID NO: 1244008
cucauuuauguguguuaua

SEQ ID NO: 1458179 - RNA, 19 nt, Artificial Sequence
  Description of Artificial Sequence: Synthetic oligonucleotide
  Antisense strand to SEQ ID NO: 1458178
uauaacacacauaaaugag

SEQ ID NO: 1458180 - RNA, 19 nt, Artificial Sequence
  Description of Artificial Sequence: Synthetic oligonucleotide
  Sense strand starting at position 3815 of SEQ ID NO: 1244008
ucauuuauguguguuauac

SEQ ID NO: 1458181 - RNA, 19 nt, Artificial Sequence
  Description of Artificial Sequence: Synthetic oligonucleotide
  Antisense strand to SEQ ID NO: 1458180
guauaacacacauaaauga

SEQ ID NO: 1458182 - RNA, 19 nt, Artificial Sequence
  Description of Artificial Sequence: Synthetic oligonucleotide
  Sense strand starting at position 3835 of SEQ ID NO: 1244008
accuuauuauguguauaga

SEQ ID NO: 1458183 - RNA, 19 nt, Artificial Sequence
  Description of Artificial Sequence: Synthetic oligonucleotide
  Antisense strand to SEQ ID NO: 1458182
ucuauacacauaauaaggu

SEQ ID NO: 1458184 - RNA, 19 nt, Artificial Sequence
  Description of Artificial Sequence: Synthetic oligonucleotide
  Sense strand starting at position 3836 of SEQ ID NO: 1244008
ccuuauuauguguauagau

SEQ ID NO: 1458185 - RNA, 19 nt, Artificial Sequence
  Description of Artificial Sequence: Synthetic oligonucleotide
  Antisense strand to SEQ ID NO: 1458184
aucuauacacauaauaagg

SEQ ID NO: 1458186 - RNA, 19 nt, Artificial Sequence
  Description of Artificial Sequence: Synthetic oligonucleotide
  Sense strand starting at position 3844 of SEQ ID NO: 1244008
uguguauagauuuguguaa

SEQ ID NO: 1458187 - RNA, 19 nt, Artificial Sequence
  Description of Artificial Sequence: Synthetic oligonucleotide
  Antisense strand to SEQ ID NO: 1458186
uuacacaaaucuauacaca

SEQ ID NO: 1458188 - RNA, 19 nt, Artificial Sequence
  Description of Artificial Sequence: Synthetic oligonucleotide
  Sense strand starting at position 3845 of SEQ ID NO: 1244008
guguauagauuuguguaac

SEQ ID NO: 1458189 - RNA, 19 nt, Artificial Sequence
  Description of Artificial Sequence: Synthetic oligonucleotide
  Antisense strand to SEQ ID NO: 1458188
guuacacaaaucuauacac

SEQ ID NO: 1458190 - RNA, 19 nt, Artificial Sequence
  Description of Artificial Sequence: Synthetic oligonucleotide
  Sense strand starting at position 3855 of SEQ ID NO: 1244008
uuguguaaccaccauuaca

SEQ ID NO: 1458191 - RNA, 19 nt, Artificial Sequence
  Description of Artificial Sequence: Synthetic oligonucleotide
  Antisense strand to SEQ ID NO: 1458190
uguaauggugguuacacaa

SEQ ID NO: 1458192 - RNA, 19 nt, Artificial Sequence
  Description of Artificial Sequence: Synthetic oligonucleotide
  Sense strand starting at position 104 of SEQ ID NO: 1244009
ggucaucguccgugaccau

SEQ ID NO: 1458193 - RNA, 19 nt, Artificial Sequence
  Description of Artificial Sequence: Synthetic oligonucleotide
  Antisense strand to SEQ ID NO: 1458192
auggucacggacgaugacc

SEQ ID NO: 1458194 - RNA, 19 nt, Artificial Sequence
  Description of Artificial Sequence: Synthetic oligonucleotide
  Sense strand starting at position 134 of SEQ ID NO: 1244009
cgaugagguugucccagaa

SEQ ID NO: 1458195 - RNA, 19 nt, Artificial Sequence
  Description of Artificial Sequence: Synthetic oligonucleotide
  Antisense strand to SEQ ID NO: 1458194
uucugggacaaccucaucg

SEQ ID NO: 1458196 - RNA, 19 nt, Artificial Sequence
  Description of Artificial Sequence: Synthetic oligonucleotide
  Sense strand starting at position 3087 of SEQ ID NO: 1244009
ccgagugauuccucgaauc

SEQ ID NO: 1458197 - RNA, 19 nt, Artificial Sequence
  Description of Artificial Sequence: Synthetic oligonucleotide
  Antisense strand to SEQ ID NO: 1458196
gauucgaggaaucacucgg

SEQ ID NO: 1458198 - RNA, 19 nt, Artificial Sequence
  Description of Artificial Sequence: Synthetic oligonucleotide
  Sense strand starting at position 3089 of SEQ ID NO: 1244009
gagugauuccucgaaucgu

SEQ ID NO: 1458199 - RNA, 19 nt, Artificial Sequence
  Description of Artificial Sequence: Synthetic oligonucleotide
  Antisense strand to SEQ ID NO: 1458198
acgauucgaggaaucacuc

SEQ ID NO: 1458200 - RNA, 19 nt, Artificial Sequence
  Description of Artificial Sequence: Synthetic oligonucleotide
  Sense strand starting at position 3669 of SEQ ID NO: 1244009
guuggagacucguccagca

SEQ ID NO: 1458201 - RNA, 19 nt, Artificial Sequence
  Description of Artificial Sequence: Synthetic oligonucleotide
  Antisense strand to SEQ ID NO: 1458200
ugcuggacgagucuccaac

SEQ ID NO: 1458202 - RNA, 19 nt, Artificial Sequence
  Description of Artificial Sequence: Synthetic oligonucleotide
  Sense strand starting at position 3787 of SEQ ID NO: 1244009
ggucaagaguuguagacaa

SEQ ID NO: 1458203 - RNA, 19 nt, Artificial Sequence
  Description of Artificial Sequence: Synthetic oligonucleotide
  Antisense strand to SEQ ID NO: 1458202
uugucuacaacucuugacc

SEQ ID NO: 1458204 - RNA, 19 nt, Artificial Sequence
  Description of Artificial Sequence: Synthetic oligonucleotide
  Sense strand starting at position 277 of SEQ ID NO: 1244010
aaacgugcucuggauaacu

SEQ ID NO: 1458205 - RNA, 19 nt, Artificial Sequence
  Description of Artificial Sequence: Synthetic oligonucleotide
  Antisense strand to SEQ ID NO: 1458204
aguuauccagagcacguuu

SEQ ID NO: 1458206 - RNA, 19 nt, Artificial Sequence
  Description of Artificial Sequence: Synthetic oligonucleotide
  Sense strand starting at position 279 of SEQ ID NO: 1244010
acgugcucuggauaacuua

SEQ ID NO: 1458207 - RNA, 19 nt, Artificial Sequence
  Description of Artificial Sequence: Synthetic oligonucleotide
  Antisense strand to SEQ ID NO: 1458206
uaaguuauccagagcacgu

SEQ ID NO: 1458208 - RNA, 19 nt, Artificial Sequence
  Description of Artificial Sequence: Synthetic oligonucleotide
  Sense strand starting at position 559 of SEQ ID NO: 1244010
uguuacucagguugguauu

SEQ ID NO: 1458209 - RNA, 19 nt, Artificial Sequence
  Description of Artificial Sequence: Synthetic oligonucleotide
  Antisense strand to SEQ ID NO: 1458208
aauaccaaccugaguaaca

SEQ ID NO: 1458210 - RNA, 19 nt, Artificial Sequence
  Description of Artificial Sequence: Synthetic oligonucleotide
  Sense strand starting at position 562 of SEQ ID NO: 1244010
uacucagguugguauugaa

SEQ ID NO: 1458211 - RNA, 19 nt, Artificial Sequence
  Description of Artificial Sequence: Synthetic oligonucleotide
  Antisense strand to SEQ ID NO: 1458210
uucaauaccaaccugagua

SEQ ID NO: 1458212 - RNA, 19 nt, Artificial Sequence
  Description of Artificial Sequence: Synthetic oligonucleotide
  Sense strand starting at position 603 of SEQ ID NO: 1244010
cugcguuggucuuccaaag

SEQ ID NO: 1458213 - RNA, 19 nt, Artificial Sequence
  Description of Artificial Sequence: Synthetic oligonucleotide
  Antisense strand to SEQ ID NO: 1458212
cuuuggaagaccaacgcag

SEQ ID NO: 1458214 - RNA, 19 nt, Artificial Sequence
  Description of Artificial Sequence: Synthetic oligonucleotide
  Sense strand starting at position 604 of SEQ ID NO: 1244010
ugcguuggucuuccaaagu

SEQ ID NO: 1458215 - RNA, 19 nt, Artificial Sequence
  Description of Artificial Sequence: Synthetic oligonucleotide
  Antisense strand to SEQ ID NO: 1458214
acuuuggaagaccaacgca

SEQ ID NO: 1458216 - RNA, 19 nt, Artificial Sequence
  Description of Artificial Sequence: Synthetic oligonucleotide
  Sense strand starting at position 709 of SEQ ID NO: 1244010
cugacccauugagaacauu

SEQ ID NO: 1458217 - RNA, 19 nt, Artificial Sequence
  Description of Artificial Sequence: Synthetic oligonucleotide
  Antisense strand to SEQ ID NO: 1458216
aauguucucaaugggucag

SEQ ID NO: 1458218 - RNA, 19 nt, Artificial Sequence
  Description of Artificial Sequence: Synthetic oligonucleotide
  Sense strand starting at position 839 of SEQ ID NO: 1244010
ccuguccuguuauuggaau

SEQ ID NO: 1458219 - RNA, 19 nt, Artificial Sequence
  Description of Artificial Sequence: Synthetic oligonucleotide
  Antisense strand to SEQ ID NO: 1458218
auuccaauaacaggacagg

SEQ ID NO: 1458220 - RNA, 19 nt, Artificial Sequence
  Description of Artificial Sequence: Synthetic oligonucleotide
  Sense strand starting at position 850 of SEQ ID NO: 1244010
auuggaaugcaaggguuau

SEQ ID NO: 1458221 - RNA, 19 nt, Artificial Sequence
  Description of Artificial Sequence: Synthetic oligonucleotide
  Antisense strand to SEQ ID NO: 1458220
auaacccuugcauuccaau

SEQ ID NO: 1458222 - RNA, 19 nt, Artificial Sequence
  Description of Artificial Sequence: Synthetic oligonucleotide
  Sense strand starting at position 1366 of SEQ ID NO: 1244010
caccaugugcggcaaauuu

SEQ ID NO: 1458223 - RNA, 19 nt, Artificial Sequence
  Description of Artificial Sequence: Synthetic oligonucleotide
  Antisense strand to SEQ ID NO: 1458222
aaauuugccgcacauggug

SEQ ID NO: 1458224 - RNA, 19 nt, Artificial Sequence
  Description of Artificial Sequence: Synthetic oligonucleotide
  Sense strand starting at position 1559 of SEQ ID NO: 1244010
guccaaaugugucccauaa

SEQ ID NO: 1458225 - RNA, 19 nt, Artificial Sequence
  Description of Artificial Sequence: Synthetic oligonucleotide
  Antisense strand to SEQ ID NO: 1458224
uuaugggacacauuuggac

SEQ ID NO: 1458226 - RNA, 19 nt, Artificial Sequence
  Description of Artificial Sequence: Synthetic oligonucleotide
  Sense strand starting at position 1561 of SEQ ID NO: 1244010
ccaaaugugucccauaaca

SEQ ID NO: 1458227 - RNA, 19 nt, Artificial Sequence
  Description of Artificial Sequence: Synthetic oligonucleotide
  Antisense strand to SEQ ID NO: 1458226
uguuaugggacacauuugg

SEQ ID NO: 1458228 - RNA, 19 nt, Artificial Sequence
  Description of Artificial Sequence: Synthetic oligonucleotide
  Sense strand starting at position 1649 of SEQ ID NO: 1244010
uugguuugccaaggccaaa

SEQ ID NO: 1458229 - RNA, 19 nt, Artificial Sequence
  Description of Artificial Sequence: Synthetic oligonucleotide
  Antisense strand to SEQ ID NO: 1458228
uuuggccuuggcaaaccaa

SEQ ID NO: 1458230 - RNA, 19 nt, Artificial Sequence
  Description of Artificial Sequence: Synthetic oligonucleotide
  Sense strand starting at position 2288 of SEQ ID NO: 1244010
acgcggaggcgugagaaau

SEQ ID NO: 1458231 - RNA, 19 nt, Artificial Sequence
  Description of Artificial Sequence: Synthetic oligonucleotide
  Antisense strand to SEQ ID NO: 1458230
auuucucacgccuccgcgu

SEQ ID NO: 1458232 - RNA, 19 nt, Artificial Sequence
  Description of Artificial Sequence: Synthetic oligonucleotide
  Sense strand starting at position 2289 of SEQ ID NO: 1244010
cgcggaggcgugagaaaug

SEQ ID NO: 1458233 - RNA, 19 nt, Artificial Sequence
  Description of Artificial Sequence: Synthetic oligonucleotide
  Antisense strand to SEQ ID NO: 1458232
cauuucucacgccuccgcg

SEQ ID NO: 1458234 - RNA, 19 nt, Artificial Sequence
  Description of Artificial Sequence: Synthetic oligonucleotide
  Sense strand starting at position 2296 of SEQ ID NO: 1244010
gcgugagaaauguguugau

SEQ ID NO: 1458235 - RNA, 19 nt, Artificial Sequence
  Description of Artificial Sequence: Synthetic oligonucleotide
  Antisense strand to SEQ ID NO: 1458234
aucaacacauuucucacgc

SEQ ID NO: 1458236 - RNA, 19 nt, Artificial Sequence
  Description of Artificial Sequence: Synthetic oligonucleotide
  Sense strand starting at position 2379 of SEQ ID NO: 1244010
ggaagugacugaccuguuu

SEQ ID NO: 1458237 - RNA, 19 nt, Artificial Sequence
  Description of Artificial Sequence: Synthetic oligonucleotide
  Antisense strand to SEQ ID NO: 1458236
aaacaggucagucacuucc

SEQ ID NO: 1458238 - RNA, 19 nt, Artificial Sequence
  Description of Artificial Sequence: Synthetic oligonucleotide
  Sense strand starting at position 2410 of SEQ ID NO: 1244010
aaagcuguauagccagaau

SEQ ID NO: 1458239 - RNA, 19 nt, Artificial Sequence
  Description of Artificial Sequence: Synthetic oligonucleotide
  Antisense strand to SEQ ID NO: 1458238
auucuggcuauacagcuuu

SEQ ID NO: 1458240 - RNA, 19 nt, Artificial Sequence
  Description of Artificial Sequence: Synthetic oligonucleotide
  Sense strand starting at position 2413 of SEQ ID NO: 1244010
gcuguauagccagaaugaa

SEQ ID NO: 1458241 - RNA, 19 nt, Artificial Sequence
  Description of Artificial Sequence: Synthetic oligonucleotide
  Antisense strand to SEQ ID NO: 1458240
uucauucuggcuauacagc

SEQ ID NO: 1458242 - RNA, 19 nt, Artificial Sequence
  Description of Artificial Sequence: Synthetic oligonucleotide
  Sense strand starting at position 2472 of SEQ ID NO: 1244010
uuucuaguaugugcuaauu

SEQ ID NO: 1458243 - RNA, 19 nt, Artificial Sequence
  Description of Artificial Sequence: Synthetic oligonucleotide
  Antisense strand to SEQ ID NO: 1458242
aauuagcacauacuagaaa

SEQ ID NO: 1458244 - RNA, 19 nt, Artificial Sequence
  Description of Artificial Sequence: Synthetic oligonucleotide
  Sense strand starting at position 2526 of SEQ ID NO: 1244010
gaaagaacgguuuguaguu

SEQ ID NO: 1458245 - RNA, 19 nt, Artificial Sequence
  Description of Artificial Sequence: Synthetic oligonucleotide
  Antisense strand to SEQ ID NO: 1458244
aacuacaaaccguucuuuc

SEQ ID NO: 1458246 - RNA, 19 nt, Artificial Sequence
  Description of Artificial Sequence: Synthetic oligonucleotide
  Sense strand starting at position 2746 of SEQ ID NO: 1244010
guaauuaugugcucccaag

SEQ ID NO: 1458247 - RNA, 19 nt, Artificial Sequence
  Description of Artificial Sequence: Synthetic oligonucleotide
  Antisense strand to SEQ ID NO: 1458246
cuugggagcacauaauuac

SEQ ID NO: 1458248 - RNA, 19 nt, Artificial Sequence
  Description of Artificial Sequence: Synthetic oligonucleotide
  Sense strand starting at position 2765 of SEQ ID NO: 1244010
gcagucauuuaguugaauc

SEQ ID NO: 1458249 - RNA, 19 nt, Artificial Sequence
  Description of Artificial Sequence: Synthetic oligonucleotide
  Antisense strand to SEQ ID NO: 1458248
gauucaacuaaaugacugc

SEQ ID NO: 1458250 - RNA, 19 nt, Artificial Sequence
  Description of Artificial Sequence: Synthetic oligonucleotide
  Sense strand starting at position 2803 of SEQ ID NO: 1244010
gcauuuaugaaguguaguc

SEQ ID NO: 1458251 - RNA, 19 nt, Artificial Sequence
  Description of Artificial Sequence: Synthetic oligonucleotide
  Antisense strand to SEQ ID NO: 1458250
gacuacacuucauaaaugc

SEQ ID NO: 1458252 - RNA, 19 nt, Artificial Sequence
  Description of Artificial Sequence: Synthetic oligonucleotide
  Sense strand starting at position 2813 of SEQ ID NO: 1244010
aguguaguccgcagucuga

SEQ ID NO: 1458253 - RNA, 19 nt, Artificial Sequence
  Description of Artificial Sequence: Synthetic oligonucleotide
  Antisense strand to SEQ ID NO: 1458252
ucagacugcggacuacacu

SEQ ID NO: 1458254 - RNA, 19 nt, Artificial Sequence
  Description of Artificial Sequence: Synthetic oligonucleotide
  Sense strand starting at position 2840 of SEQ ID NO: 1244010
gguggaagaucacacauuu

SEQ ID NO: 1458255 - RNA, 19 nt, Artificial Sequence
  Description of Artificial Sequence: Synthetic oligonucleotide
  Antisense strand to SEQ ID NO: 1458254
aaaugugugaucuuccacc

SEQ ID NO: 1458256 - RNA, 19 nt, Artificial Sequence
  Description of Artificial Sequence: Synthetic oligonucleotide
  Sense strand starting at position 2968 of SEQ ID NO: 1244010
ccuugaaucuaggaaugug

SEQ ID NO: 1458257 - RNA, 19 nt, Artificial Sequence
  Description of Artificial Sequence: Synthetic oligonucleotide
  Antisense strand to SEQ ID NO: 1458256
cacauuccuagauucaagg

SEQ ID NO: 1458258 - RNA, 19 nt, Artificial Sequence
  Description of Artificial Sequence: Synthetic oligonucleotide
  Sense strand starting at position 3028 of SEQ ID NO: 1244010
ccuuauauguuucuguguu

SEQ ID NO: 1458259 - RNA, 19 nt, Artificial Sequence
  Description of Artificial Sequence: Synthetic oligonucleotide
  Antisense strand to SEQ ID NO: 1458258
aacacagaaacauauaagg

SEQ ID NO: 1458260 - RNA, 19 nt, Artificial Sequence
  Description of Artificial Sequence: Synthetic oligonucleotide
  Sense strand starting at position 3032 of SEQ ID NO: 1244010
auauguuucuguguuuacu

SEQ ID NO: 1458261 - RNA, 19 nt, Artificial Sequence
  Description of Artificial Sequence: Synthetic oligonucleotide
  Antisense strand to SEQ ID NO: 1458260
aguaaacacagaaacauau

SEQ ID NO: 1458262 - RNA, 19 nt, Artificial Sequence
  Description of Artificial Sequence: Synthetic oligonucleotide
  Sense strand starting at position 3034 of SEQ ID NO: 1244010
auguuucuguguuuacuau

SEQ ID NO: 1458263 - RNA, 19 nt, Artificial Sequence
  Description of Artificial Sequence: Synthetic oligonucleotide
  Antisense strand to SEQ ID NO: 1458262
auaguaaacacagaaacau

SEQ ID NO: 1458264 - RNA, 19 nt, Artificial Sequence
  Description of Artificial Sequence: Synthetic oligonucleotide
  Sense strand starting at position 3083 of SEQ ID NO: 1244010
uuaguaaguguggacaguu

SEQ ID NO: 1458265 - RNA, 19 nt, Artificial Sequence
  Description of Artificial Sequence: Synthetic oligonucleotide
  Antisense strand to SEQ ID NO: 1458264
aacuguccacacuuacuaa

SEQ ID NO: 1458266 - RNA, 19 nt, Artificial Sequence
  Description of Artificial Sequence: Synthetic oligonucleotide
  Sense strand starting at position 3456 of SEQ ID NO: 1244010
agucaauuacagugugacu

SEQ ID NO: 1458267 - RNA, 19 nt, Artificial Sequence
  Description of Artificial Sequence: Synthetic oligonucleotide
  Antisense strand to SEQ ID NO: 1458266
agucacacuguaauugacu

SEQ ID NO: 1458268 - RNA, 19 nt, Artificial Sequence
  Description of Artificial Sequence: Synthetic oligonucleotide
  Sense strand starting at position 3465 of SEQ ID NO: 1244010
cagugugacuuguucuaau

SEQ ID NO: 1458269 - RNA, 19 nt, Artificial Sequence
  Description of Artificial Sequence: Synthetic oligonucleotide
  Antisense strand to SEQ ID NO: 1458268
auuagaacaagucacacug

SEQ ID NO: 1458270 - RNA, 19 nt, Artificial Sequence
  Description of Artificial Sequence: Synthetic oligonucleotide
  Sense strand starting at position 3514 of SEQ ID NO: 1244010
agaaaugacuucccugcau

SEQ ID NO: 1458271 - RNA, 19 nt, Artificial Sequence
  Description of Artificial Sequence: Synthetic oligonucleotide
  Antisense strand to SEQ ID NO: 1458270
augcagggaagucauuucu

SEQ ID NO: 1458272 - RNA, 19 nt, Artificial Sequence
  Description of Artificial Sequence: Synthetic oligonucleotide
  Sense strand starting at position 3589 of SEQ ID NO: 1244010
ggucucaggucaucaguuu

SEQ ID NO: 1458273 - RNA, 19 nt, Artificial Sequence
  Description of Artificial Sequence: Synthetic oligonucleotide
  Antisense strand to SEQ ID NO: 1458272
aaacugaugaccugagacc

SEQ ID NO: 1458274 - RNA, 19 nt, Artificial Sequence
  Description of Artificial Sequence: Synthetic oligonucleotide
  Sense strand starting at position 3638 of SEQ ID NO: 1244010
agcagcuacugcuugaaga

SEQ ID NO: 1458275 - RNA, 19 nt, Artificial Sequence
  Description of Artificial Sequence: Synthetic oligonucleotide
  Antisense strand to SEQ ID NO: 1458274
ucuucaagcaguagcugcu

SEQ ID NO: 1458276 - RNA, 19 nt, Artificial Sequence
  Description of Artificial Sequence: Synthetic oligonucleotide
  Sense strand starting at position 3738 of SEQ ID NO: 1244010
ccuuucuaauaagauggau

SEQ ID NO: 1458277 - RNA, 19 nt, Artificial Sequence
  Description of Artificial Sequence: Synthetic oligonucleotide
  Antisense strand to SEQ ID NO: 1458276
auccaucuuauuagaaagg

SEQ ID NO: 1458278 - RNA, 19 nt, Artificial Sequence
  Description of Artificial Sequence: Synthetic oligonucleotide
  Sense strand starting at position 3791 of SEQ ID NO: 1244010
agccgcaguugucuaaaga

SEQ ID NO: 1458279 - RNA, 19 nt, Artificial Sequence
  Description of Artificial Sequence: Synthetic oligonucleotide
  Antisense strand to SEQ ID NO: 1458278
ucuuuagacaacugcggcu

SEQ ID NO: 1458280 - RNA, 19 nt, Artificial Sequence
  Description of Artificial Sequence: Synthetic oligonucleotide
  Sense strand starting at position 3792 of SEQ ID NO: 1244010
gccgcaguugucuaaagaa

SEQ ID NO: 1458281 - RNA, 19 nt, Artificial Sequence
  Description of Artificial Sequence: Synthetic oligonucleotide
  Antisense strand to SEQ ID NO: 1458280
uucuuuagacaacugcggc

SEQ ID NO: 1458282 - RNA, 19 nt, Artificial Sequence
  Description of Artificial Sequence: Synthetic oligonucleotide
  Sense strand starting at position 3835 of SEQ ID NO: 1244010
gaucaugcauuugaagagu

SEQ ID NO: 1458283 - RNA, 19 nt, Artificial Sequence
  Description of Artificial Sequence: Synthetic oligonucleotide
  Antisense strand to SEQ ID NO: 1458282
acucuucaaaugcaugauc

SEQ ID NO: 1458284 - RNA, 19 nt, Artificial Sequence
  Description of Artificial Sequence: Synthetic oligonucleotide
  Sense strand starting at position 2 of SEQ ID NO: 1244011
aagauuucguugccagcua

SEQ ID NO: 1458285 - RNA, 19 nt, Artificial Sequence
  Description of Artificial Sequence: Synthetic oligonucleotide
  Antisense strand to SEQ ID NO: 1458284
uagcuggcaacgaaaucuu

SEQ ID NO: 1458286 - RNA, 19 nt, Artificial Sequence
  Description of Artificial Sequence: Synthetic oligonucleotide
  Sense strand starting at position 95 of SEQ ID NO: 1244011
cccuacagagauuguaaau

SEQ ID NO: 1458287 - RNA, 19 nt, Artificial Sequence
  Description of Artificial Sequence: Synthetic oligonucleotide
  Antisense strand to SEQ ID NO: 1458286
auuuacaaucucuguaggg

SEQ ID NO: 1458288 - RNA, 19 nt, Artificial Sequence
  Description of Artificial Sequence: Synthetic oligonucleotide
  Sense strand starting at position 398 of SEQ ID NO: 1244011
guacauuagggccauccaa

SEQ ID NO: 1458289 - RNA, 19 nt, Artificial Sequence
  Description of Artificial Sequence: Synthetic oligonucleotide
  Antisense strand to SEQ ID NO: 1458288
uuggauggcccuaauguac

SEQ ID NO: 1458290 - RNA, 19 nt, Artificial Sequence
  Description of Artificial Sequence: Synthetic oligonucleotide
  Sense strand starting at position 455 of SEQ ID NO: 1244011
uucuucuagugaucaaguu

SEQ ID NO: 1458291 - RNA, 19 nt, Artificial Sequence
  Description of Artificial Sequence: Synthetic oligonucleotide
  Antisense strand to SEQ ID NO: 1458290
aacuugaucacuagaagaa

SEQ ID NO: 1458292 - RNA, 19 nt, Artificial Sequence
  Description of Artificial Sequence: Synthetic oligonucleotide
  Sense strand starting at position 456 of SEQ ID NO: 1244011
ucuucuagugaucaaguua

SEQ ID NO: 1458293 - RNA, 19 nt, Artificial Sequence
  Description of Artificial Sequence: Synthetic oligonucleotide
  Antisense strand to SEQ ID NO: 1458292
uaacuugaucacuagaaga

SEQ ID NO: 1458294 - RNA, 19 nt, Artificial Sequence
  Description of Artificial Sequence: Synthetic oligonucleotide
  Sense strand starting at position 576 of SEQ ID NO: 1244011
cuaucuugaucuucgugga

SEQ ID NO: 1458295 - RNA, 19 nt, Artificial Sequence
  Description of Artificial Sequence: Synthetic oligonucleotide
  Antisense strand to SEQ ID NO: 1458294
uccacgaagaucaagauag

SEQ ID NO: 1458296 - RNA, 19 nt, Artificial Sequence
  Description of Artificial Sequence: Synthetic oligonucleotide
  Sense strand starting at position 577 of SEQ ID NO: 1244011
uaucuugaucuucguggau

SEQ ID NO: 1458297 - RNA, 19 nt, Artificial Sequence
  Description of Artificial Sequence: Synthetic oligonucleotide
  Antisense strand to SEQ ID NO: 1458296
auccacgaagaucaagaua

SEQ ID NO: 1458298 - RNA, 19 nt, Artificial Sequence
  Description of Artificial Sequence: Synthetic oligonucleotide
  Sense strand starting at position 580 of SEQ ID NO: 1244011
cuugaucuucguggaucaa

SEQ ID NO: 1458299 - RNA, 19 nt, Artificial Sequence
  Description of Artificial Sequence: Synthetic oligonucleotide
  Antisense strand to SEQ ID NO: 1458298
uugauccacgaagaucaag

SEQ ID NO: 1458300 - RNA, 19 nt, Artificial Sequence
  Description of Artificial Sequence: Synthetic oligonucleotide
  Sense strand starting at position 581 of SEQ ID NO: 1244011
uugaucuucguggaucaau

SEQ ID NO: 1458301 - RNA, 19 nt, Artificial Sequence
  Description of Artificial Sequence: Synthetic oligonucleotide
  Antisense strand to SEQ ID NO: 1458300
auugauccacgaagaucaa

SEQ ID NO: 1458302 - RNA, 19 nt, Artificial Sequence
  Description of Artificial Sequence: Synthetic oligonucleotide
  Sense strand starting at position 705 of SEQ ID NO: 1244011
uuugucucgccgucuuaca

SEQ ID NO: 1458303 - RNA, 19 nt, Artificial Sequence
  Description of Artificial Sequence: Synthetic oligonucleotide
  Antisense strand to SEQ ID NO: 1458302
uguaagacggcgagacaaa

SEQ ID NO: 1458304 - RNA, 19 nt, Artificial Sequence
  Description of Artificial Sequence: Synthetic oligonucleotide
  Sense strand starting at position 706 of SEQ ID NO: 1244011
uugucucgccgucuuacaa

SEQ ID NO: 1458305 - RNA, 19 nt, Artificial Sequence
  Description of Artificial Sequence: Synthetic oligonucleotide
  Antisense strand to SEQ ID NO: 1458304
uuguaagacggcgagacaa

SEQ ID NO: 1458306 - RNA, 19 nt, Artificial Sequence
  Description of Artificial Sequence: Synthetic oligonucleotide
  Sense strand starting at position 707 of SEQ ID NO: 1244011
ugucucgccgucuuacaau

SEQ ID NO: 1458307 - RNA, 19 nt, Artificial Sequence
  Description of Artificial Sequence: Synthetic oligonucleotide
  Antisense strand to SEQ ID NO: 1458306
auuguaagacggcgagaca

SEQ ID NO: 1458308 - RNA, 19 nt, Artificial Sequence
  Description of Artificial Sequence: Synthetic oligonucleotide
  Sense strand starting at position 759 of SEQ ID NO: 1244011
gagugagauuguccacuga

SEQ ID NO: 1458309 - RNA, 19 nt, Artificial Sequence
  Description of Artificial Sequence: Synthetic oligonucleotide
  Antisense strand to SEQ ID NO: 1458308
ucaguggacaaucucacuc

SEQ ID NO: 1458310 - RNA, 19 nt, Artificial Sequence
  Description of Artificial Sequence: Synthetic oligonucleotide
  Sense strand starting at position 763 of SEQ ID NO: 1244011
gagauuguccacugagcug

SEQ ID NO: 1458311 - RNA, 19 nt, Artificial Sequence
  Description of Artificial Sequence: Synthetic oligonucleotide
  Antisense strand to SEQ ID NO: 1458310
cagcucaguggacaaucuc

SEQ ID NO: 1458312 - RNA, 19 nt, Artificial Sequence
  Description of Artificial Sequence: Synthetic oligonucleotide
  Sense strand starting at position 833 of SEQ ID NO: 1244011
uuacucuuccuguagaagu

SEQ ID NO: 1458313 - RNA, 19 nt, Artificial Sequence
  Description of Artificial Sequence: Synthetic oligonucleotide
  Antisense strand to SEQ ID NO: 1458312
acuucuacaggaagaguaa

SEQ ID NO: 1458314 - RNA, 19 nt, Artificial Sequence
  Description of Artificial Sequence: Synthetic oligonucleotide
  Sense strand starting at position 843 of SEQ ID NO: 1244011
uguagaaguuucuuucucu

SEQ ID NO: 1458315 - RNA, 19 nt, Artificial Sequence
  Description of Artificial Sequence: Synthetic oligonucleotide
  Antisense strand to SEQ ID NO: 1458314
agagaaagaaacuucuaca

SEQ ID NO: 1458316 - RNA, 19 nt, Artificial Sequence
  Description of Artificial Sequence: Synthetic oligonucleotide
  Sense strand starting at position 844 of SEQ ID NO: 1244011
guagaaguuucuuucucuu

SEQ ID NO: 1458317 - RNA, 19 nt, Artificial Sequence
  Description of Artificial Sequence: Synthetic oligonucleotide
  Antisense strand to SEQ ID NO: 1458316
aagagaaagaaacuucuac

SEQ ID NO: 1458318 - RNA, 19 nt, Artificial Sequence
  Description of Artificial Sequence: Synthetic oligonucleotide
  Sense strand starting at position 846 of SEQ ID NO: 1244011
agaaguuucuuucucuuga

SEQ ID NO: 1458319 - RNA, 19 nt, Artificial Sequence
  Description of Artificial Sequence: Synthetic oligonucleotide
  Antisense strand to SEQ ID NO: 1458318
ucaagagaaagaaacuucu

SEQ ID NO: 1458320 - RNA, 19 nt, Artificial Sequence
  Description of Artificial Sequence: Synthetic oligonucleotide
  Sense strand starting at position 879 of SEQ ID NO: 1244011
uccaguauauuguuauacu

SEQ ID NO: 1458321 - RNA, 19 nt, Artificial Sequence
  Description of Artificial Sequence: Synthetic oligonucleotide
  Antisense strand to SEQ ID NO: 1458320
aguauaacaauauacugga

SEQ ID NO: 1458322 - RNA, 19 nt, Artificial Sequence
  Description of Artificial Sequence: Synthetic oligonucleotide
  Sense strand starting at position 937 of SEQ ID NO: 1244011
aggaaucucuuccuugcaa

SEQ ID NO: 1458323 - RNA, 19 nt, Artificial Sequence
  Description of Artificial Sequence: Synthetic oligonucleotide
  Antisense strand to SEQ ID NO: 1458322
uugcaaggaagagauuccu

SEQ ID NO: 1458324 - RNA, 19 nt, Artificial Sequence
  Description of Artificial Sequence: Synthetic oligonucleotide
  Sense strand starting at position 938 of SEQ ID NO: 1244011
ggaaucucuuccuugcaag

SEQ ID NO: 1458325 - RNA, 19 nt, Artificial Sequence
  Description of Artificial Sequence: Synthetic oligonucleotide
  Antisense strand to SEQ ID NO: 1458324
cuugcaaggaagagauucc

SEQ ID NO: 1458326 - RNA, 19 nt, Artificial Sequence
  Description of Artificial Sequence: Synthetic oligonucleotide
  Sense strand starting at position 944 of SEQ ID NO: 1244011
ucuuccuugcaagaugacu

SEQ ID NO: 1458327 - RNA, 19 nt, Artificial Sequence
  Description of Artificial Sequence: Synthetic oligonucleotide
  Antisense strand to SEQ ID NO: 1458326
agucaucuugcaaggaaga

SEQ ID NO: 1458328 - RNA, 19 nt, Artificial Sequence
  Description of Artificial Sequence: Synthetic oligonucleotide
  Sense strand starting at position 994 of SEQ ID NO: 1244011
uccucaauuccaggacagu

SEQ ID NO: 1458329 - RNA, 19 nt, Artificial Sequence
  Description of Artificial Sequence: Synthetic oligonucleotide
  Antisense strand to SEQ ID NO: 1458328
acuguccuggaauugagga

SEQ ID NO: 1458330 - RNA, 19 nt, Artificial Sequence
  Description of Artificial Sequence: Synthetic oligonucleotide
  Sense strand starting at position 1160 of SEQ ID NO: 1244011
gaggaaguaucagaacaau

SEQ ID NO: 1458331 - RNA, 19 nt, Artificial Sequence
  Description of Artificial Sequence: Synthetic oligonucleotide
  Antisense strand to SEQ ID NO: 1458330
auuguucugauacuuccuc

SEQ ID NO: 1458332 - RNA, 19 nt, Artificial Sequence
  Description of Artificial Sequence: Synthetic oligonucleotide
  Sense strand starting at position 1260 of SEQ ID NO: 1244011
aggucucaaacucggagaa

SEQ ID NO: 1458333 - RNA, 19 nt, Artificial Sequence
  Description of Artificial Sequence: Synthetic oligonucleotide
  Antisense strand to SEQ ID NO: 1458332
uucuccgaguuugagaccu

SEQ ID NO: 1458334 - RNA, 19 nt, Artificial Sequence
  Description of Artificial Sequence: Synthetic oligonucleotide
  Sense strand starting at position 1261 of SEQ ID NO: 1244011
ggucucaaacucggagaaa

SEQ ID NO: 1458335 - RNA, 19 nt, Artificial Sequence
  Description of Artificial Sequence: Synthetic oligonucleotide
  Antisense strand to SEQ ID NO: 1458334
uuucuccgaguuugagacc

SEQ ID NO: 1458336 - RNA, 19 nt, Artificial Sequence
  Description of Artificial Sequence: Synthetic oligonucleotide
  Sense strand starting at position 2237 of SEQ ID NO: 1244011
gugccugugcguguggaaa

SEQ ID NO: 1458337 - RNA, 19 nt, Artificial Sequence
  Description of Artificial Sequence: Synthetic oligonucleotide
  Antisense strand to SEQ ID NO: 1458336
uuuccacacgcacaggcac

SEQ ID NO: 1458338 - RNA, 19 nt, Artificial Sequence
  Description of Artificial Sequence: Synthetic oligonucleotide
  Sense strand starting at position 2576 of SEQ ID NO: 1244011
ucuggaugugucuagauug

SEQ ID NO: 1458339 - RNA, 19 nt, Artificial Sequence
  Description of Artificial Sequence: Synthetic oligonucleotide
  Antisense strand to SEQ ID NO: 1458338
caaucuagacacauccaga

SEQ ID NO: 1458340 - RNA, 19 nt, Artificial Sequence
  Description of Artificial Sequence: Synthetic oligonucleotide
  Sense strand starting at position 2989 of SEQ ID NO: 1244011
cgcuguuuggugagagcuu

SEQ ID NO: 1458341 - RNA, 19 nt, Artificial Sequence
  Description of Artificial Sequence: Synthetic oligonucleotide
  Antisense strand to SEQ ID NO: 1458340
aagcucucaccaaacagcg

SEQ ID NO: 1458342 - RNA, 19 nt, Artificial Sequence
  Description of Artificial Sequence: Synthetic oligonucleotide
  Sense strand starting at position 3017 of SEQ ID NO: 1244011
gucacuuuggcgggagaaa

SEQ ID NO: 1458343 - RNA, 19 nt, Artificial Sequence
  Description of Artificial Sequence: Synthetic oligonucleotide
  Antisense strand to SEQ ID NO: 1458342
uuucucccgccaaagugac

SEQ ID NO: 1458344 - RNA, 19 nt, Artificial Sequence
  Description of Artificial Sequence: Synthetic oligonucleotide
  Sense strand starting at position 3108 of SEQ ID NO: 1244011
uauagaagcugaucugugu

SEQ ID NO: 1458345 - RNA, 19 nt, Artificial Sequence
  Description of Artificial Sequence: Synthetic oligonucleotide
  Antisense strand to SEQ ID NO: 1458344
acacagaucagcuucuaua

SEQ ID NO: 1458346 - RNA, 19 nt, Artificial Sequence
  Description of Artificial Sequence: Synthetic oligonucleotide
  Sense strand starting at position 3111 of SEQ ID NO: 1244011
agaagcugaucugugucau

SEQ ID NO: 1458347 - RNA, 19 nt, Artificial Sequence
  Description of Artificial Sequence: Synthetic oligonucleotide
  Antisense strand to SEQ ID NO: 1458346
augacacagaucagcuucu

SEQ ID NO: 1458348 - RNA, 19 nt, Artificial Sequence
  Description of Artificial Sequence: Synthetic oligonucleotide
  Sense strand starting at position 3117 of SEQ ID NO: 1244011
ugaucugugucaucauauu

SEQ ID NO: 1458349 - RNA, 19 nt, Artificial Sequence
  Description of Artificial Sequence: Synthetic oligonucleotide
  Antisense strand to SEQ ID NO: 1458348
aauaugaugacacagauca

SEQ ID NO: 1458350 - RNA, 19 nt, Artificial Sequence
  Description of Artificial Sequence: Synthetic oligonucleotide
  Sense strand starting at position 3169 of SEQ ID NO: 1244011
cucagaauuuaugaccgaa

SEQ ID NO: 1458351 - RNA, 19 nt, Artificial Sequence
  Description of Artificial Sequence: Synthetic oligonucleotide
  Antisense strand to SEQ ID NO: 1458350
uucggucauaaauucugag

SEQ ID NO: 1458352 - RNA, 19 nt, Artificial Sequence
  Description of Artificial Sequence: Synthetic oligonucleotide
  Sense strand starting at position 3258 of SEQ ID NO: 1244011
auguccuaagagugaacua

SEQ ID NO: 1458353 - RNA, 19 nt, Artificial Sequence
  Description of Artificial Sequence: Synthetic oligonucleotide
  Antisense strand to SEQ ID NO: 1458352
uaguucacucuuaggacau

SEQ ID NO: 1458354 - RNA, 19 nt, Artificial Sequence
  Description of Artificial Sequence: Synthetic oligonucleotide
  Sense strand starting at position 3404 of SEQ ID NO: 1244011
uuguuaugcgucuaagaaa

SEQ ID NO: 1458355 - RNA, 19 nt, Artificial Sequence
  Description of Artificial Sequence: Synthetic oligonucleotide
  Antisense strand to SEQ ID NO: 1458354
uuucuuagacgcauaacaa

SEQ ID NO: 1458356 - RNA, 19 nt, Artificial Sequence
  Description of Artificial Sequence: Synthetic oligonucleotide
  Sense strand starting at position 3440 of SEQ ID NO: 1244011
ugcggcagaucuuuaagaa

SEQ ID NO: 1458357 - RNA, 19 nt, Artificial Sequence
  Description of Artificial Sequence: Synthetic oligonucleotide
  Antisense strand to SEQ ID NO: 1458356
uucuuaaagaucugccgca

SEQ ID NO: 1458358 - RNA, 19 nt, Artificial Sequence
  Description of Artificial Sequence: Synthetic oligonucleotide
  Sense strand starting at position 3441 of SEQ ID NO: 1244011
gcggcagaucuuuaagaac

SEQ ID NO: 1458359 - RNA, 19 nt, Artificial Sequence
  Description of Artificial Sequence: Synthetic oligonucleotide
  Antisense strand to SEQ ID NO: 1458358
guucuuaaagaucugccgc

SEQ ID NO: 1458360 - RNA, 19 nt, Artificial Sequence
  Description of Artificial Sequence: Synthetic oligonucleotide
  Sense strand starting at position 3752 of SEQ ID NO: 1244011
cccagagugcugggaucuu

SEQ ID NO: 1458361 - RNA, 19 nt, Artificial Sequence
  Description of Artificial Sequence: Synthetic oligonucleotide
  Antisense strand to SEQ ID NO: 1458360
aagaucccagcacucuggg

SEQ ID NO: 1458362 - RNA, 19 nt, Artificial Sequence
  Description of Artificial Sequence: Synthetic oligonucleotide
  Sense strand starting at position 3805 of SEQ ID NO: 1244011
cccagacuagucugcaauu

SEQ ID NO: 1458363 - RNA, 19 nt, Artificial Sequence
  Description of Artificial Sequence: Synthetic oligonucleotide
  Antisense strand to SEQ ID NO: 1458362
aauugcagacuagucuggg

SEQ ID NO: 1458364 - RNA, 19 nt, Artificial Sequence
  Description of Artificial Sequence: Synthetic oligonucleotide
  Sense strand starting at position 11 of SEQ ID NO: 1244012
cuguaugugugcuugccaa

SEQ ID NO: 1458365 - RNA, 19 nt, Artificial Sequence
  Description of Artificial Sequence: Synthetic oligonucleotide
  Antisense strand to SEQ ID NO: 1458364
uuggcaagcacacauacag

SEQ ID NO: 1458366 - RNA, 19 nt, Artificial Sequence
  Description of Artificial Sequence: Synthetic oligonucleotide
  Sense strand starting at position 13 of SEQ ID NO: 1244012
guaugugugcuugccaaau

SEQ ID NO: 1458367 - RNA, 19 nt, Artificial Sequence
  Description of Artificial Sequence: Synthetic oligonucleotide
  Antisense strand to SEQ ID NO: 1458366
auuuggcaagcacacauac

SEQ ID NO: 1458368 - RNA, 19 nt, Artificial Sequence
  Description of Artificial Sequence: Synthetic oligonucleotide
  Sense strand starting at position 26 of SEQ ID NO: 1244012
ccaaauguguacuuacugu

SEQ ID NO: 1458369 - RNA, 19 nt, Artificial Sequence
  Description of Artificial Sequence: Synthetic oligonucleotide
  Antisense strand to SEQ ID NO: 1458368
acaguaaguacacauuugg

SEQ ID NO: 1458370 - RNA, 19 nt, Artificial Sequence
  Description of Artificial Sequence: Synthetic oligonucleotide
  Sense strand starting at position 34 of SEQ ID NO: 1244012
guacuuacuguuugucgga

SEQ ID NO: 1458371 - RNA, 19 nt, Artificial Sequence
  Description of Artificial Sequence: Synthetic oligonucleotide
  Antisense strand to SEQ ID NO: 1458370
uccgacaaacaguaaguac

SEQ ID NO: 1458372 - RNA, 19 nt, Artificial Sequence
  Description of Artificial Sequence: Synthetic oligonucleotide
  Sense strand starting at position 51 of SEQ ID NO: 1244012
gacuuauuccuguggcucu

SEQ ID NO: 1458373 - RNA, 19 nt, Artificial Sequence
  Description of Artificial Sequence: Synthetic oligonucleotide
  Antisense strand to SEQ ID NO: 1458372
agagccacaggaauaaguc

SEQ ID NO: 1458374 - RNA, 19 nt, Artificial Sequence
  Description of Artificial Sequence: Synthetic oligonucleotide
  Sense strand starting at position 87 of SEQ ID NO: 1244012
ugcgucuagcagcugaaua

SEQ ID NO: 1458375 - RNA, 19 nt, Artificial Sequence
  Description of Artificial Sequence: Synthetic oligonucleotide
  Antisense strand to SEQ ID NO: 1458374
uauucagcugcuagacgca

SEQ ID NO: 1458376 - RNA, 19 nt, Artificial Sequence
  Description of Artificial Sequence: Synthetic oligonucleotide
  Sense strand starting at position 138 of SEQ ID NO: 1244012
uccucuuuccuuugaugga

SEQ ID NO: 1458377 - RNA, 19 nt, Artificial Sequence
  Description of Artificial Sequence: Synthetic oligonucleotide
  Antisense strand to SEQ ID NO: 1458376
uccaucaaaggaaagagga

SEQ ID NO: 1458378 - RNA, 19 nt, Artificial Sequence
  Description of Artificial Sequence: Synthetic oligonucleotide
  Sense strand starting at position 195 of SEQ ID NO: 1244012
cagugagcauccucaagua

SEQ ID NO: 1458379 - RNA, 19 nt, Artificial Sequence
  Description of Artificial Sequence: Synthetic oligonucleotide
  Antisense strand to SEQ ID NO: 1458378
uacuugaggaugcucacug

SEQ ID NO: 1458380 - RNA, 19 nt, Artificial Sequence
  Description of Artificial Sequence: Synthetic oligonucleotide
  Sense strand starting at position 338 of SEQ ID NO: 1244012
cgaacagacuuccguaaag

SEQ ID NO: 1458381 - RNA, 19 nt, Artificial Sequence
  Description of Artificial Sequence: Synthetic oligonucleotide
  Antisense strand to SEQ ID NO: 1458380
cuuuacggaagucuguucg

SEQ ID NO: 1458382 - RNA, 19 nt, Artificial Sequence
  Description of Artificial Sequence: Synthetic oligonucleotide
  Sense strand starting at position 410 of SEQ ID NO: 1244012
auggcuguguccguauuua

SEQ ID NO: 1458383 - RNA, 19 nt, Artificial Sequence
  Description of Artificial Sequence: Synthetic oligonucleotide
  Antisense strand to SEQ ID NO: 1458382
uaaauacggacacagccau

SEQ ID NO: 1458384 - RNA, 19 nt, Artificial Sequence
  Description of Artificial Sequence: Synthetic oligonucleotide
  Sense strand starting at position 467 of SEQ ID NO: 1244012
uuguauaaucuguguccuu

SEQ ID NO: 1458385 - RNA, 19 nt, Artificial Sequence
  Description of Artificial Sequence: Synthetic oligonucleotide
  Antisense strand to SEQ ID NO: 1458384
aaggacacagauuauacaa

SEQ ID NO: 1458386 - RNA, 19 nt, Artificial Sequence
  Description of Artificial Sequence: Synthetic oligonucleotide
  Sense strand starting at position 486 of SEQ ID NO: 1244012
gccuuucucucccaaggga

SEQ ID NO: 1458387 - RNA, 19 nt, Artificial Sequence
  Description of Artificial Sequence: Synthetic oligonucleotide
  Antisense strand to SEQ ID NO: 1458386
ucccuugggagagaaaggc

SEQ ID NO: 1458388 - RNA, 19 nt, Artificial Sequence
  Description of Artificial Sequence: Synthetic oligonucleotide
  Sense strand starting at position 608 of SEQ ID NO: 1244012
uagggaucuccacagcacu

SEQ ID NO: 1458389 - RNA, 19 nt, Artificial Sequence
  Description of Artificial Sequence: Synthetic oligonucleotide
  Antisense strand to SEQ ID NO: 1458388
agugcuguggagaucccua

SEQ ID NO: 1458390 - RNA, 19 nt, Artificial Sequence
  Description of Artificial Sequence: Synthetic oligonucleotide
  Sense strand starting at position 1226 of SEQ ID NO: 1244012
guuggaagaauaugugugu

SEQ ID NO: 1458391 - RNA, 19 nt, Artificial Sequence
  Description of Artificial Sequence: Synthetic oligonucleotide
  Antisense strand to SEQ ID NO: 1458390
acacacauauucuuccaac

SEQ ID NO: 1458392 - RNA, 19 nt, Artificial Sequence
  Description of Artificial Sequence: Synthetic oligonucleotide
  Sense strand starting at position 1231 of SEQ ID NO: 1244012
aagaauaugugugucugga

SEQ ID NO: 1458393 - RNA, 19 nt, Artificial Sequence
  Description of Artificial Sequence: Synthetic oligonucleotide
  Antisense strand to SEQ ID NO: 1458392
uccagacacacauauucuu

SEQ ID NO: 1458394 - RNA, 19 nt, Artificial Sequence
  Description of Artificial Sequence: Synthetic oligonucleotide
  Sense strand starting at position 1233 of SEQ ID NO: 1244012
gaauaugugugucuggaag

SEQ ID NO: 1458395 - RNA, 19 nt, Artificial Sequence
  Description of Artificial Sequence: Synthetic oligonucleotide
  Antisense strand to SEQ ID NO: 1458394
cuuccagacacacauauuc

SEQ ID NO: 1458396 - RNA, 19 nt, Artificial Sequence
  Description of Artificial Sequence: Synthetic oligonucleotide
  Sense strand starting at position 1235 of SEQ ID NO: 1244012
auaugugugucuggaagag

SEQ ID NO: 1458397 - RNA, 19 nt, Artificial Sequence
  Description of Artificial Sequence: Synthetic oligonucleotide
  Antisense strand to SEQ ID NO: 1458396
cucuuccagacacacauau

SEQ ID NO: 1458398 - RNA, 19 nt, Artificial Sequence
  Description of Artificial Sequence: Synthetic oligonucleotide
  Sense strand starting at position 1237 of SEQ ID NO: 1244012
augugugucuggaagaguu

SEQ ID NO: 1458399 - RNA, 19 nt, Artificial Sequence
  Description of Artificial Sequence: Synthetic oligonucleotide
  Antisense strand to SEQ ID NO: 1458398
aacucuuccagacacacau

SEQ ID NO: 1458400 - RNA, 19 nt, Artificial Sequence
  Description of Artificial Sequence: Synthetic oligonucleotide
  Sense strand starting at position 1359 of SEQ ID NO: 1244012
gcccauuacagucggauga

SEQ ID NO: 1458401 - RNA, 19 nt, Artificial Sequence
  Description of Artificial Sequence: Synthetic oligonucleotide
  Antisense strand to SEQ ID NO: 1458400
ucauccgacuguaaugggc

SEQ ID NO: 1458402 - RNA, 19 nt, Artificial Sequence
  Description of Artificial Sequence: Synthetic oligonucleotide
  Sense strand starting at position 1369 of SEQ ID NO: 1244012
gucggaugaccuuaggcaa

SEQ ID NO: 1458403 - RNA, 19 nt, Artificial Sequence
  Description of Artificial Sequence: Synthetic oligonucleotide
  Antisense strand to SEQ ID NO: 1458402
uugccuaaggucauccgac

SEQ ID NO: 1458404 - RNA, 19 nt, Artificial Sequence
  Description of Artificial Sequence: Synthetic oligonucleotide
  Sense strand starting at position 1389 of SEQ ID NO: 1244012
ucaauuucuuuauguguga

SEQ ID NO: 1458405 - RNA, 19 nt, Artificial Sequence
  Description of Artificial Sequence: Synthetic oligonucleotide
  Antisense strand to SEQ ID NO: 1458404
ucacacauaaagaaauuga

SEQ ID NO: 1458406 - RNA, 19 nt, Artificial Sequence
  Description of Artificial Sequence: Synthetic oligonucleotide
  Sense strand starting at position 1394 of SEQ ID NO: 1244012
uucuuuaugugugaauccu

SEQ ID NO: 1458407 - RNA, 19 nt, Artificial Sequence
  Description of Artificial Sequence: Synthetic oligonucleotide
  Antisense strand to SEQ ID NO: 1458406
aggauucacacauaaagaa

SEQ ID NO: 1458408 - RNA, 19 nt, Artificial Sequence
  Description of Artificial Sequence: Synthetic oligonucleotide
  Sense strand starting at position 1400 of SEQ ID NO: 1244012
augugugaauccucacauc

SEQ ID NO: 1458409 - RNA, 19 nt, Artificial Sequence
  Description of Artificial Sequence: Synthetic oligonucleotide
  Antisense strand to SEQ ID NO: 1458408
gaugugaggauucacacau

SEQ ID NO: 1458410 - RNA, 19 nt, Artificial Sequence
  Description of Artificial Sequence: Synthetic oligonucleotide
  Sense strand starting at position 1403 of SEQ ID NO: 1244012
ugugaauccucacaucugu

SEQ ID NO: 1458411 - RNA, 19 nt, Artificial Sequence
  Description of Artificial Sequence: Synthetic oligonucleotide
  Antisense strand to SEQ ID NO: 1458410
acagaugugaggauucaca

SEQ ID NO: 1458412 - RNA, 19 nt, Artificial Sequence
  Description of Artificial Sequence: Synthetic oligonucleotide
  Sense strand starting at position 1445 of SEQ ID NO: 1244012
ucucuuaguguugggagga

SEQ ID NO: 1458413 - RNA, 19 nt, Artificial Sequence
  Description of Artificial Sequence: Synthetic oligonucleotide
  Antisense strand to SEQ ID NO: 1458412
uccucccaacacuaagaga

SEQ ID NO: 1458414 - RNA, 19 nt, Artificial Sequence
  Description of Artificial Sequence: Synthetic oligonucleotide
  Sense strand starting at position 1468 of SEQ ID NO: 1244012
gugagcugauaccuggaaa

SEQ ID NO: 1458415 - RNA, 19 nt, Artificial Sequence
  Description of Artificial Sequence: Synthetic oligonucleotide
  Antisense strand to SEQ ID NO: 1458414
uuuccagguaucagcucac

SEQ ID NO: 1458416 - RNA, 19 nt, Artificial Sequence
  Description of Artificial Sequence: Synthetic oligonucleotide
  Sense strand starting at position 1469 of SEQ ID NO: 1244012
ugagcugauaccuggaaag

SEQ ID NO: 1458417 - RNA, 19 nt, Artificial Sequence
  Description of Artificial Sequence: Synthetic oligonucleotide
  Antisense strand to SEQ ID NO: 1458416
cuuuccagguaucagcuca

SEQ ID NO: 1458418 - RNA, 19 nt, Artificial Sequence
  Description of Artificial Sequence: Synthetic oligonucleotide
  Sense strand starting at position 1503 of SEQ ID NO: 1244012
gugccugccacguaguaaa

SEQ ID NO: 1458419 - RNA, 19 nt, Artificial Sequence
  Description of Artificial Sequence: Synthetic oligonucleotide
  Antisense strand to SEQ ID NO: 1458418
uuuacuacguggcaggcac

SEQ ID NO: 1458420 - RNA, 19 nt, Artificial Sequence
  Description of Artificial Sequence: Synthetic oligonucleotide
  Sense strand starting at position 1510 of SEQ ID NO: 1244012
ccacguaguaaacgcuaua

SEQ ID NO: 1458421 - RNA, 19 nt, Artificial Sequence
  Description of Artificial Sequence: Synthetic oligonucleotide
  Antisense strand to SEQ ID NO: 1458420
uauagcguuuacuacgugg

SEQ ID NO: 1458422 - RNA, 19 nt, Artificial Sequence
  Description of Artificial Sequence: Synthetic oligonucleotide
  Sense strand starting at position 1513 of SEQ ID NO: 1244012
cguaguaaacgcuauacaa

SEQ ID NO: 1458423 - RNA, 19 nt, Artificial Sequence
  Description of Artificial Sequence: Synthetic oligonucleotide
  Antisense strand to SEQ ID NO: 1458422
uuguauagcguuuacuacg

SEQ ID NO: 1458424 - RNA, 19 nt, Artificial Sequence
  Description of Artificial Sequence: Synthetic oligonucleotide
  Sense strand starting at position 1515 of SEQ ID NO: 1244012
uaguaaacgcuauacaaga

SEQ ID NO: 1458425 - RNA, 19 nt, Artificial Sequence
  Description of Artificial Sequence: Synthetic oligonucleotide
  Antisense strand to SEQ ID NO: 1458424
ucuuguauagcguuuacua

SEQ ID NO: 1458426 - RNA, 19 nt, Artificial Sequence
  Description of Artificial Sequence: Synthetic oligonucleotide
  Sense strand starting at position 1534 of SEQ ID NO: 1244012
gcuggcugccauuaauaag

SEQ ID NO: 1458427 - RNA, 19 nt, Artificial Sequence
  Description of Artificial Sequence: Synthetic oligonucleotide
  Antisense strand to SEQ ID NO: 1458426
cuuauuaauggcagccagc

SEQ ID NO: 1458428 - RNA, 19 nt, Artificial Sequence
  Description of Artificial Sequence: Synthetic oligonucleotide
  Sense strand starting at position 1537 of SEQ ID NO: 1244012
ggcugccauuaauaagaaa

SEQ ID NO: 1458429 - RNA, 19 nt, Artificial Sequence
  Description of Artificial Sequence: Synthetic oligonucleotide
  Antisense strand to SEQ ID NO: 1458428
uuucuuauuaauggcagcc

SEQ ID NO: 1458430 - RNA, 19 nt, Artificial Sequence
  Description of Artificial Sequence: Synthetic oligonucleotide
  Sense strand starting at position 1540 of SEQ ID NO: 1244012
ugccauuaauaagaaaguu

SEQ ID NO: 1458431 - RNA, 19 nt, Artificial Sequence
  Description of Artificial Sequence: Synthetic oligonucleotide
  Antisense strand to SEQ ID NO: 1458430
aacuuucuuauuaauggca

SEQ ID NO: 1458432 - RNA, 19 nt, Artificial Sequence
  Description of Artificial Sequence: Synthetic oligonucleotide
  Sense strand starting at position 1564 of SEQ ID NO: 1244012
cgagguacuucugcaacgu

SEQ ID NO: 1458433 - RNA, 19 nt, Artificial Sequence
  Description of Artificial Sequence: Synthetic oligonucleotide
  Antisense strand to SEQ ID NO: 1458432
acguugcagaaguaccucg

SEQ ID NO: 1458434 - RNA, 19 nt, Artificial Sequence
  Description of Artificial Sequence: Synthetic oligonucleotide
  Sense strand starting at position 1638 of SEQ ID NO: 1244012
gguguuggaaggugaauaa

SEQ ID NO: 1458435 - RNA, 19 nt, Artificial Sequence
  Description of Artificial Sequence: Synthetic oligonucleotide
  Antisense strand to SEQ ID NO: 1458434
uuauucaccuuccaacacc

SEQ ID NO: 1458436 - RNA, 19 nt, Artificial Sequence
  Description of Artificial Sequence: Synthetic oligonucleotide
  Sense strand starting at position 1666 of SEQ ID NO: 1244012
gggagaacguguaguaagu

SEQ ID NO: 1458437 - RNA, 19 nt, Artificial Sequence
  Description of Artificial Sequence: Synthetic oligonucleotide
  Antisense strand to SEQ ID NO: 1458436
acuuacuacacguucuccc

SEQ ID NO: 1458438 - RNA, 19 nt, Artificial Sequence
  Description of Artificial Sequence: Synthetic oligonucleotide
  Sense strand starting at position 1709 of SEQ ID NO: 1244012
guugguccaccauaucaca

SEQ ID NO: 1458439 - RNA, 19 nt, Artificial Sequence
  Description of Artificial Sequence: Synthetic oligonucleotide
  Antisense strand to SEQ ID NO: 1458438
ugugauaugguggaccaac

SEQ ID NO: 1458440 - RNA, 19 nt, Artificial Sequence
  Description of Artificial Sequence: Synthetic oligonucleotide
  Sense strand starting at position 1780 of SEQ ID NO: 1244012
gggaguuggccuggcaacu

SEQ ID NO: 1458441 - RNA, 19 nt, Artificial Sequence
  Description of Artificial Sequence: Synthetic oligonucleotide
  Antisense strand to SEQ ID NO: 1458440
aguugccaggccaacuccc

SEQ ID NO: 1458442 - RNA, 19 nt, Artificial Sequence
  Description of Artificial Sequence: Synthetic oligonucleotide
  Sense strand starting at position 2348 of SEQ ID NO: 1244012
cuggauagguugcauuacu

SEQ ID NO: 1458443 - RNA, 19 nt, Artificial Sequence
  Description of Artificial Sequence: Synthetic oligonucleotide
  Antisense strand to SEQ ID NO: 1458442
aguaaugcaaccuauccag

SEQ ID NO: 1458444 - RNA, 19 nt, Artificial Sequence
  Description of Artificial Sequence: Synthetic oligonucleotide
  Sense strand starting at position 141 of SEQ ID NO: 1244013
acacuuaaauuaggaggua

SEQ ID NO: 1458445 - RNA, 19 nt, Artificial Sequence
  Description of Artificial Sequence: Synthetic oligonucleotide
  Antisense strand to SEQ ID NO: 1458444
uaccuccuaauuuaagugu

SEQ ID NO: 1458446 - RNA, 19 nt, Artificial Sequence
  Description of Artificial Sequence: Synthetic oligonucleotide
  Sense strand starting at position 142 of SEQ ID NO: 1244013
cacuuaaauuaggagguau

SEQ ID NO: 1458447 - RNA, 19 nt, Artificial Sequence
  Description of Artificial Sequence: Synthetic oligonucleotide
  Antisense strand to SEQ ID NO: 1458446
auaccuccuaauuuaagug

SEQ ID NO: 1458448 - RNA, 19 nt, Artificial Sequence
  Description of Artificial Sequence: Synthetic oligonucleotide
  Sense strand starting at position 722 of SEQ ID NO: 1244013
gugucauuccaccaaguaa

SEQ ID NO: 1458449 - RNA, 19 nt, Artificial Sequence
  Description of Artificial Sequence: Synthetic oligonucleotide
  Antisense strand to SEQ ID NO: 1458448
uuacuugguggaaugacac

SEQ ID NO: 1458450 - RNA, 19 nt, Artificial Sequence
  Description of Artificial Sequence: Synthetic oligonucleotide
  Sense strand starting at position 753 of SEQ ID NO: 1244013
uuguuuaauccauaaggcu

SEQ ID NO: 1458451 - RNA, 19 nt, Artificial Sequence
  Description of Artificial Sequence: Synthetic oligonucleotide
  Antisense strand to SEQ ID NO: 1458450
agccuuauggauuaaacaa

SEQ ID NO: 1458452 - RNA, 19 nt, Artificial Sequence
  Description of Artificial Sequence: Synthetic oligonucleotide
  Sense strand starting at position 762 of SEQ ID NO: 1244013
ccauaaggcuguuuguaac

SEQ ID NO: 1458453 - RNA, 19 nt, Artificial Sequence
  Description of Artificial Sequence: Synthetic oligonucleotide
  Antisense strand to SEQ ID NO: 1458452
guuacaaacagccuuaugg

SEQ ID NO: 1458454 - RNA, 19 nt, Artificial Sequence
  Description of Artificial Sequence: Synthetic oligonucleotide
  Sense strand starting at position 768 of SEQ ID NO: 1244013
ggcuguuuguaaccuuaac

SEQ ID NO: 1458455 - RNA, 19 nt, Artificial Sequence
  Description of Artificial Sequence: Synthetic oligonucleotide
  Antisense strand to SEQ ID NO: 1458454
guuaagguuacaaacagcc

SEQ ID NO: 1458456 - RNA, 19 nt, Artificial Sequence
  Description of Artificial Sequence: Synthetic oligonucleotide
  Sense strand starting at position 810 of SEQ ID NO: 1244013
guuuguuugcgauggaguu

SEQ ID NO: 1458457 - RNA, 19 nt, Artificial Sequence
  Description of Artificial Sequence: Synthetic oligonucleotide
  Antisense strand to SEQ ID NO: 1458456
aacuccaucgcaaacaaac

SEQ ID NO: 1458458 - RNA, 19 nt, Artificial Sequence
  Description of Artificial Sequence: Synthetic oligonucleotide
  Sense strand starting at position 1156 of SEQ ID NO: 1244013
ucuuccuguuucucugaga

SEQ ID NO: 1458459 - RNA, 19 nt, Artificial Sequence
  Description of Artificial Sequence: Synthetic oligonucleotide
  Antisense strand to SEQ ID NO: 1458458
ucucagagaaacaggaaga

SEQ ID NO: 1458460 - RNA, 19 nt, Artificial Sequence
  Description of Artificial Sequence: Synthetic oligonucleotide
  Sense strand starting at position 1157 of SEQ ID NO: 1244013
cuuccuguuucucugagaa

SEQ ID NO: 1458461 - RNA, 19 nt, Artificial Sequence
  Description of Artificial Sequence: Synthetic oligonucleotide
  Antisense strand to SEQ ID NO: 1458460
uucucagagaaacaggaag

SEQ ID NO: 1458462 - RNA, 19 nt, Artificial Sequence
  Description of Artificial Sequence: Synthetic oligonucleotide
  Sense strand starting at position 1242 of SEQ ID NO: 1244013
cugugucaacugugaacua

SEQ ID NO: 1458463 - RNA, 19 nt, Artificial Sequence
  Description of Artificial Sequence: Synthetic oligonucleotide
  Antisense strand to SEQ ID NO: 1458462
uaguucacaguugacacag

SEQ ID NO: 1458464 - RNA, 19 nt, Artificial Sequence
  Description of Artificial Sequence: Synthetic oligonucleotide
  Sense strand starting at position 1447 of SEQ ID NO: 1244013
cccucuagcgaauaagaau

SEQ ID NO: 1458465 - RNA, 19 nt, Artificial Sequence
  Description of Artificial Sequence: Synthetic oligonucleotide
  Antisense strand to SEQ ID NO: 1458464
auucuuauucgcuagaggg

SEQ ID NO: 1458466 - RNA, 19 nt, Artificial Sequence
  Description of Artificial Sequence: Synthetic oligonucleotide
  Sense strand starting at position 1850 of SEQ ID NO: 1244013
gcuacagagucacaggaaa

SEQ ID NO: 1458467 - RNA, 19 nt, Artificial Sequence
  Description of Artificial Sequence: Synthetic oligonucleotide
  Antisense strand to SEQ ID NO: 1458466
uuuccugugacucuguagc

SEQ ID NO: 1458468 - RNA, 19 nt, Artificial Sequence
  Description of Artificial Sequence: Synthetic oligonucleotide
  Sense strand starting at position 1897 of SEQ ID NO: 1244013
ccucaaauuucuuaguguu

SEQ ID NO: 1458469 - RNA, 19 nt, Artificial Sequence
  Description of Artificial Sequence: Synthetic oligonucleotide
  Antisense strand to SEQ ID NO: 1458468
aacacuaagaaauuugagg

SEQ ID NO: 1458470 - RNA, 19 nt, Artificial Sequence
  Description of Artificial Sequence: Synthetic oligonucleotide
  Sense strand starting at position 2016 of SEQ ID NO: 1244013
cggccucuagaauauugua

SEQ ID NO: 1458471 - RNA, 19 nt, Artificial Sequence
  Description of Artificial Sequence: Synthetic oligonucleotide
  Antisense strand to SEQ ID NO: 1458470
uacaauauucuagaggccg

SEQ ID NO: 1458472 - RNA, 19 nt, Artificial Sequence
  Description of Artificial Sequence: Synthetic oligonucleotide
  Sense strand starting at position 2019 of SEQ ID NO: 1244013
ccucuagaauauuguagaa

SEQ ID NO: 1458473 - RNA, 19 nt, Artificial Sequence
  Description of Artificial Sequence: Synthetic oligonucleotide
  Antisense strand to SEQ ID NO: 1458472
uucuacaauauucuagagg

SEQ ID NO: 1458474 - RNA, 19 nt, Artificial Sequence
  Description of Artificial Sequence: Synthetic oligonucleotide
  Sense strand starting at position 2021 of SEQ ID NO: 1244013
ucuagaauauuguagaauc

SEQ ID NO: 1458475 - RNA, 19 nt, Artificial Sequence
  Description of Artificial Sequence: Synthetic oligonucleotide
  Antisense strand to SEQ ID NO: 1458474
gauucuacaauauucuaga

SEQ ID NO: 1458476 - RNA, 19 nt, Artificial Sequence
  Description of Artificial Sequence: Synthetic oligonucleotide
  Sense strand starting at position 2029 of SEQ ID NO: 1244013
auuguagaaucuucccaag

SEQ ID NO: 1458477 - RNA, 19 nt, Artificial Sequence
  Description of Artificial Sequence: Synthetic oligonucleotide
  Antisense strand to SEQ ID NO: 1458476
cuugggaagauucuacaau

SEQ ID NO: 1458478 - RNA, 19 nt, Artificial Sequence
  Description of Artificial Sequence: Synthetic oligonucleotide
  Sense strand starting at position 2031 of SEQ ID NO: 1244013
uguagaaucuucccaagag

SEQ ID NO: 1458479 - RNA, 19 nt, Artificial Sequence
  Description of Artificial Sequence: Synthetic oligonucleotide
  Antisense strand to SEQ ID NO: 1458478
cucuugggaagauucuaca

SEQ ID NO: 1458480 - RNA, 19 nt, Artificial Sequence
  Description of Artificial Sequence: Synthetic oligonucleotide
  Sense strand starting at position 2109 of SEQ ID NO: 1244013
gcccgccucccucaugaau

SEQ ID NO: 1458481 - RNA, 19 nt, Artificial Sequence
  Description of Artificial Sequence: Synthetic oligonucleotide
  Antisense strand to SEQ ID NO: 1458480
auucaugagggaggcgggc

SEQ ID NO: 1458482 - RNA, 19 nt, Artificial Sequence
  Description of Artificial Sequence: Synthetic oligonucleotide
  Sense strand starting at position 2120 of SEQ ID NO: 1244013
ucaugaauauuguagaucu

SEQ ID NO: 1458483 - RNA, 19 nt, Artificial Sequence
  Description of Artificial Sequence: Synthetic oligonucleotide
  Antisense strand to SEQ ID NO: 1458482
agaucuacaauauucauga

SEQ ID NO: 1458484 - RNA, 19 nt, Artificial Sequence
  Description of Artificial Sequence: Synthetic oligonucleotide
  Sense strand starting at position 2190 of SEQ ID NO: 1244013
cuuuaugaauagcaagaga

SEQ ID NO: 1458485 - RNA, 19 nt, Artificial Sequence
  Description of Artificial Sequence: Synthetic oligonucleotide
  Antisense strand to SEQ ID NO: 1458484
ucucuugcuauucauaaag

SEQ ID NO: 1458486 - RNA, 19 nt, Artificial Sequence
  Description of Artificial Sequence: Synthetic oligonucleotide
  Sense strand starting at position 2229 of SEQ ID NO: 1244013
ccgucucaugaauaacuaa

SEQ ID NO: 1458487 - RNA, 19 nt, Artificial Sequence
  Description of Artificial Sequence: Synthetic oligonucleotide
  Antisense strand to SEQ ID NO: 1458486
uuaguuauucaugagacgg

SEQ ID NO: 1458488 - RNA, 19 nt, Artificial Sequence
  Description of Artificial Sequence: Synthetic oligonucleotide
  Sense strand starting at position 2664 of SEQ ID NO: 1244013
cgcucccggucucuaaaua

SEQ ID NO: 1458489 - RNA, 19 nt, Artificial Sequence
  Description of Artificial Sequence: Synthetic oligonucleotide
  Antisense strand to SEQ ID NO: 1458488
uauuuagagaccgggagcg

SEQ ID NO: 1458490 - RNA, 19 nt, Artificial Sequence
  Description of Artificial Sequence: Synthetic oligonucleotide
  Sense strand starting at position 2665 of SEQ ID NO: 1244013
gcucccggucucuaaauaa

SEQ ID NO: 1458491 - RNA, 19 nt, Artificial Sequence
  Description of Artificial Sequence: Synthetic oligonucleotide
  Antisense strand to SEQ ID NO: 1458490
uuauuuagagaccgggagc

SEQ ID NO: 1458492 - RNA, 19 nt, Artificial Sequence
  Description of Artificial Sequence: Synthetic oligonucleotide
  Sense strand starting at position 2695 of SEQ ID NO: 1244013
auaaaucugucuggaauca

SEQ ID NO: 1458493 - RNA, 19 nt, Artificial Sequence
  Description of Artificial Sequence: Synthetic oligonucleotide
  Antisense strand to SEQ ID NO: 1458492
ugauuccagacagauuuau

SEQ ID NO: 1458494 - RNA, 19 nt, Artificial Sequence
  Description of Artificial Sequence: Synthetic oligonucleotide
  Sense strand starting at position 2717 of SEQ ID NO: 1244013
gaagaugugugucuccauc

SEQ ID NO: 1458495 - RNA, 19 nt, Artificial Sequence
  Description of Artificial Sequence: Synthetic oligonucleotide
  Antisense strand to SEQ ID NO: 1458494
gauggagacacacaucuuc

SEQ ID NO: 1458496 - RNA, 19 nt, Artificial Sequence
  Description of Artificial Sequence: Synthetic oligonucleotide
  Sense strand starting at position 2772 of SEQ ID NO: 1244013
ggccuuccuggcuagaaga

SEQ ID NO: 1458497 - RNA, 19 nt, Artificial Sequence
  Description of Artificial Sequence: Synthetic oligonucleotide
  Antisense strand to SEQ ID NO: 1458496
ucuucuagccaggaaggcc

SEQ ID NO: 1458498 - RNA, 19 nt, Artificial Sequence
  Description of Artificial Sequence: Synthetic oligonucleotide
  Sense strand starting at position 2774 of SEQ ID NO: 1244013
ccuuccuggcuagaagauu

SEQ ID NO: 1458499 - RNA, 19 nt, Artificial Sequence
  Description of Artificial Sequence: Synthetic oligonucleotide
  Antisense strand to SEQ ID NO: 1458498
aaucuucuagccaggaagg

SEQ ID NO: 1458500 - RNA, 19 nt, Artificial Sequence
  Description of Artificial Sequence: Synthetic oligonucleotide
  Sense strand starting at position 2901 of SEQ ID NO: 1244013
uacguuuccugcuuuaaug

SEQ ID NO: 1458501 - RNA, 19 nt, Artificial Sequence
  Description of Artificial Sequence: Synthetic oligonucleotide
  Antisense strand to SEQ ID NO: 1458500
cauuaaagcaggaaacgua

SEQ ID NO: 1458502 - RNA, 19 nt, Artificial Sequence
  Description of Artificial Sequence: Synthetic oligonucleotide
  Sense strand starting at position 2903 of SEQ ID NO: 1244013
cguuuccugcuuuaaugga

SEQ ID NO: 1458503 - RNA, 19 nt, Artificial Sequence
  Description of Artificial Sequence: Synthetic oligonucleotide
  Antisense strand to SEQ ID NO: 1458502
uccauuaaagcaggaaacg

SEQ ID NO: 1458504 - RNA, 19 nt, Artificial Sequence
  Description of Artificial Sequence: Synthetic oligonucleotide
  Sense strand starting at position 2918 of SEQ ID NO: 1244013
uggaguuuauuagccuaau

SEQ ID NO: 1458505 - RNA, 19 nt, Artificial Sequence
  Description of Artificial Sequence: Synthetic oligonucleotide
  Antisense strand to SEQ ID NO: 1458504
auuaggcuaauaaacucca

SEQ ID NO: 1458506 - RNA, 19 nt, Artificial Sequence
  Description of Artificial Sequence: Synthetic oligonucleotide
  Sense strand starting at position 2919 of SEQ ID NO: 1244013
ggaguuuauuagccuaaug

SEQ ID NO: 1458507 - RNA, 19 nt, Artificial Sequence
  Description of Artificial Sequence: Synthetic oligonucleotide
  Antisense strand to SEQ ID NO: 1458506
cauuaggcuaauaaacucc

SEQ ID NO: 1458508 - RNA, 19 nt, Artificial Sequence
  Description of Artificial Sequence: Synthetic oligonucleotide
  Sense strand starting at position 2997 of SEQ ID NO: 1244013
cagcgugacagaggaaaua

SEQ ID NO: 1458509 - RNA, 19 nt, Artificial Sequence
  Description of Artificial Sequence: Synthetic oligonucleotide
  Antisense strand to SEQ ID NO: 1458508
uauuuccucugucacgcug

SEQ ID NO: 1458510 - RNA, 19 nt, Artificial Sequence
  Description of Artificial Sequence: Synthetic oligonucleotide
  Sense strand starting at position 3037 of SEQ ID NO: 1244013
guguguuggcggagagcua

SEQ ID NO: 1458511 - RNA, 19 nt, Artificial Sequence
  Description of Artificial Sequence: Synthetic oligonucleotide
  Antisense strand to SEQ ID NO: 1458510
uagcucuccgccaacacac

SEQ ID NO: 1458512 - RNA, 19 nt, Artificial Sequence
  Description of Artificial Sequence: Synthetic oligonucleotide
  Sense strand starting at position 3075 of SEQ ID NO: 1244013
caaggucccuuugauauga

SEQ ID NO: 1458513 - RNA, 19 nt, Artificial Sequence
  Description of Artificial Sequence: Synthetic oligonucleotide
  Antisense strand to SEQ ID NO: 1458512
ucauaucaaagggaccuug

SEQ ID NO: 1458514 - RNA, 19 nt, Artificial Sequence
  Description of Artificial Sequence: Synthetic oligonucleotide
  Sense strand starting at position 3079 of SEQ ID NO: 1244013
gucccuuugauaugacgau

SEQ ID NO: 1458515 - RNA, 19 nt, Artificial Sequence
  Description of Artificial Sequence: Synthetic oligonucleotide
  Antisense strand to SEQ ID NO: 1458514
aucgucauaucaaagggac

SEQ ID NO: 1458516 - RNA, 19 nt, Artificial Sequence
  Description of Artificial Sequence: Synthetic oligonucleotide
  Sense strand starting at position 3235 of SEQ ID NO: 1244013
guggaaauuuaggauuagu

SEQ ID NO: 1458517 - RNA, 19 nt, Artificial Sequence
  Description of Artificial Sequence: Synthetic oligonucleotide
  Antisense strand to SEQ ID NO: 1458516
acuaauccuaaauuuccac

SEQ ID NO: 1458518 - RNA, 19 nt, Artificial Sequence
  Description of Artificial Sequence: Synthetic oligonucleotide
  Sense strand starting at position 3287 of SEQ ID NO: 1244013
ucauccauuuggcuuugua

SEQ ID NO: 1458519 - RNA, 19 nt, Artificial Sequence
  Description of Artificial Sequence: Synthetic oligonucleotide
  Antisense strand to SEQ ID NO: 1458518
uacaaagccaaauggauga

SEQ ID NO: 1458520 - RNA, 19 nt, Artificial Sequence
  Description of Artificial Sequence: Synthetic oligonucleotide
  Sense strand starting at position 3495 of SEQ ID NO: 1244013
ugaauugauuaucuugcuu

SEQ ID NO: 1458521 - RNA, 19 nt, Artificial Sequence
  Description of Artificial Sequence: Synthetic oligonucleotide
  Antisense strand to SEQ ID NO: 1458520
aagcaagauaaucaauuca

SEQ ID NO: 1458522 - RNA, 19 nt, Artificial Sequence
  Description of Artificial Sequence: Synthetic oligonucleotide
  Sense strand starting at position 3730 of SEQ ID NO: 1244013
gaugaagucugccucuguu

SEQ ID NO: 1458523 - RNA, 19 nt, Artificial Sequence
  Description of Artificial Sequence: Synthetic oligonucleotide
  Antisense strand to SEQ ID NO: 1458522
aacagaggcagacuucauc

SEQ ID NO: 1458524 - RNA, 19 nt, Artificial Sequence
  Description of Artificial Sequence: Synthetic oligonucleotide
  Sense strand starting at position 178 of SEQ ID NO: 1244014
ugaacuaucuggccaaaca

SEQ ID NO: 1458525 - RNA, 19 nt, Artificial Sequence
  Description of Artificial Sequence: Synthetic oligonucleotide
  Antisense strand to SEQ ID NO: 1458524
uguuuggccagauaguuca

SEQ ID NO: 1458526 - RNA, 19 nt, Artificial Sequence
  Description of Artificial Sequence: Synthetic oligonucleotide
  Sense strand starting at position 213 of SEQ ID NO: 1244014
acacccuaggccugugauu

SEQ ID NO: 1458527 - RNA, 19 nt, Artificial Sequence
  Description of Artificial Sequence: Synthetic oligonucleotide
  Antisense strand to SEQ ID NO: 1458526
aaucacaggccuagggugu

SEQ ID NO: 1458528 - RNA, 19 nt, Artificial Sequence
  Description of Artificial Sequence: Synthetic oligonucleotide
  Sense strand starting at position 222 of SEQ ID NO: 1244014
gccugugauucucaaagac

SEQ ID NO: 1458529 - RNA, 19 nt, Artificial Sequence
  Description of Artificial Sequence: Synthetic oligonucleotide
  Antisense strand to SEQ ID NO: 1458528
gucuuugagaaucacaggc

SEQ ID NO: 1458530 - RNA, 19 nt, Artificial Sequence
  Description of Artificial Sequence: Synthetic oligonucleotide
  Sense strand starting at position 1984 of SEQ ID NO: 1244014
gaaacauggcuuuaccgua

SEQ ID NO: 1458531 - RNA, 19 nt, Artificial Sequence
  Description of Artificial Sequence: Synthetic oligonucleotide
  Antisense strand to SEQ ID NO: 1458530
uacgguaaagccauguuuc

SEQ ID NO: 1458532 - RNA, 19 nt, Artificial Sequence
  Description of Artificial Sequence: Synthetic oligonucleotide
  Sense strand starting at position 1989 of SEQ ID NO: 1244014
auggcuuuaccguaaaucu

SEQ ID NO: 1458533 - RNA, 19 nt, Artificial Sequence
  Description of Artificial Sequence: Synthetic oligonucleotide
  Antisense strand to SEQ ID NO: 1458532
agauuuacgguaaagccau

SEQ ID NO: 1458534 - RNA, 19 nt, Artificial Sequence
  Description of Artificial Sequence: Synthetic oligonucleotide
  Sense strand starting at position 2023 of SEQ ID NO: 1244014
gcuuuauguggaggcaguu

SEQ ID NO: 1458535 - RNA, 19 nt, Artificial Sequence
  Description of Artificial Sequence: Synthetic oligonucleotide
  Antisense strand to SEQ ID NO: 1458534
aacugccuccacauaaagc

SEQ ID NO: 1458536 - RNA, 19 nt, Artificial Sequence
  Description of Artificial Sequence: Synthetic oligonucleotide
  Sense strand starting at position 2039 of SEQ ID NO: 1244014
guugcuguauauucugaaa

SEQ ID NO: 1458537 - RNA, 19 nt, Artificial Sequence
  Description of Artificial Sequence: Synthetic oligonucleotide
  Antisense strand to SEQ ID NO: 1458536
uuucagaauauacagcaac

SEQ ID NO: 1458538 - RNA, 19 nt, Artificial Sequence
  Description of Artificial Sequence: Synthetic oligonucleotide
  Sense strand starting at position 2042 of SEQ ID NO: 1244014
gcuguauauucugaaagag

SEQ ID NO: 1458539 - RNA, 19 nt, Artificial Sequence
  Description of Artificial Sequence: Synthetic oligonucleotide
  Antisense strand to SEQ ID NO: 1458538
cucuuucagaauauacagc

SEQ ID NO: 1458540 - RNA, 19 nt, Artificial Sequence
  Description of Artificial Sequence: Synthetic oligonucleotide
  Sense strand starting at position 2050 of SEQ ID NO: 1244014
uucugaaagagcuggucau

SEQ ID NO: 1458541 - RNA, 19 nt, Artificial Sequence
  Description of Artificial Sequence: Synthetic oligonucleotide
  Antisense strand to SEQ ID NO: 1458540
augaccagcucuuucagaa

SEQ ID NO: 1458542 - RNA, 19 nt, Artificial Sequence
  Description of Artificial Sequence: Synthetic oligonucleotide
  Sense strand starting at position 2054 of SEQ ID NO: 1244014
gaaagagcuggucaucuca

SEQ ID NO: 1458543 - RNA, 19 nt, Artificial Sequence
  Description of Artificial Sequence: Synthetic oligonucleotide
  Antisense strand to SEQ ID NO: 1458542
ugagaugaccagcucuuuc

SEQ ID NO: 1458544 - RNA, 19 nt, Artificial Sequence
  Description of Artificial Sequence: Synthetic oligonucleotide
  Sense strand starting at position 2056 of SEQ ID NO: 1244014
aagagcuggucaucucauu

SEQ ID NO: 1458545 - RNA, 19 nt, Artificial Sequence
  Description of Artificial Sequence: Synthetic oligonucleotide
  Antisense strand to SEQ ID NO: 1458544
aaugagaugaccagcucuu

SEQ ID NO: 1458546 - RNA, 19 nt, Artificial Sequence
  Description of Artificial Sequence: Synthetic oligonucleotide
  Sense strand starting at position 2087 of SEQ ID NO: 1244014
agaauacuguuagucaaau

SEQ ID NO: 1458547 - RNA, 19 nt, Artificial Sequence
  Description of Artificial Sequence: Synthetic oligonucleotide
  Antisense strand to SEQ ID NO: 1458546
auuugacuaacaguauucu

SEQ ID NO: 1458548 - RNA, 19 nt, Artificial Sequence
  Description of Artificial Sequence: Synthetic oligonucleotide
  Sense strand starting at position 2107 of SEQ ID NO: 1244014
uaaguaauauguggacuau

SEQ ID NO: 1458549 - RNA, 19 nt, Artificial Sequence
  Description of Artificial Sequence: Synthetic oligonucleotide
  Antisense strand to SEQ ID NO: 1458548
auaguccacauauuacuua

SEQ ID NO: 1458550 - RNA, 19 nt, Artificial Sequence
  Description of Artificial Sequence: Synthetic oligonucleotide
  Sense strand starting at position 2116 of SEQ ID NO: 1244014
uguggacuauuacugguau

SEQ ID NO: 1458551 - RNA, 19 nt, Artificial Sequence
  Description of Artificial Sequence: Synthetic oligonucleotide
  Antisense strand to SEQ ID NO: 1458550
auaccaguaauaguccaca

SEQ ID NO: 1458552 - RNA, 19 nt, Artificial Sequence
  Description of Artificial Sequence: Synthetic oligonucleotide
  Sense strand starting at position 2120 of SEQ ID NO: 1244014
gacuauuacugguauugca

SEQ ID NO: 1458553 - RNA, 19 nt, Artificial Sequence
  Description of Artificial Sequence: Synthetic oligonucleotide
  Antisense strand to SEQ ID NO: 1458552
ugcaauaccaguaauaguc

SEQ ID NO: 1458554 - RNA, 19 nt, Artificial Sequence
  Description of Artificial Sequence: Synthetic oligonucleotide
  Sense strand starting at position 2130 of SEQ ID NO: 1244014
gguauugcacuuuaauuau

SEQ ID NO: 1458555 - RNA, 19 nt, Artificial Sequence
  Description of Artificial Sequence: Synthetic oligonucleotide
  Antisense strand to SEQ ID NO: 1458554
auaauuaaagugcaauacc

SEQ ID NO: 1458556 - RNA, 19 nt, Artificial Sequence
  Description of Artificial Sequence: Synthetic oligonucleotide
  Sense strand starting at position 2152 of SEQ ID NO: 1244014
uguuauauauggcuucuga

SEQ ID NO: 1458557 - RNA, 19 nt, Artificial Sequence
  Description of Artificial Sequence: Synthetic oligonucleotide
  Antisense strand to SEQ ID NO: 1458556
ucagaagccauauauaaca

SEQ ID NO: 1458558 - RNA, 19 nt, Artificial Sequence
  Description of Artificial Sequence: Synthetic oligonucleotide
  Sense strand starting at position 2232 of SEQ ID NO: 1244014
uggcuaucccaaugaugcu

SEQ ID NO: 1458559 - RNA, 19 nt, Artificial Sequence
  Description of Artificial Sequence: Synthetic oligonucleotide
  Antisense strand to SEQ ID NO: 1458558
agcaucauugggauagcca

SEQ ID NO: 1458560 - RNA, 19 nt, Artificial Sequence
  Description of Artificial Sequence: Synthetic oligonucleotide
  Sense strand starting at position 2346 of SEQ ID NO: 1244014
ccagaaaucucacuguagu

SEQ ID NO: 1458561 - RNA, 19 nt, Artificial Sequence
  Description of Artificial Sequence: Synthetic oligonucleotide
  Antisense strand to SEQ ID NO: 1458560
acuacagugagauuucugg

SEQ ID NO: 1458562 - RNA, 19 nt, Artificial Sequence
  Description of Artificial Sequence: Synthetic oligonucleotide
  Sense strand starting at position 2413 of SEQ ID NO: 1244014
aagucaugcugagauaauu

SEQ ID NO: 1458563 - RNA, 19 nt, Artificial Sequence
  Description of Artificial Sequence: Synthetic oligonucleotide
  Antisense strand to SEQ ID NO: 1458562
aauuaucucagcaugacuu

SEQ ID NO: 1458564 - RNA, 19 nt, Artificial Sequence
  Description of Artificial Sequence: Synthetic oligonucleotide
  Sense strand starting at position 2422 of SEQ ID NO: 1244014
ugagauaauucuccuacug

SEQ ID NO: 1458565 - RNA, 19 nt, Artificial Sequence
  Description of Artificial Sequence: Synthetic oligonucleotide
  Antisense strand to SEQ ID NO: 1458564
caguaggagaauuaucuca

SEQ ID NO: 1458566 - RNA, 19 nt, Artificial Sequence
  Description of Artificial Sequence: Synthetic oligonucleotide
  Sense strand starting at position 2442 of SEQ ID NO: 1244014
agguaagacucgguucaaa

SEQ ID NO: 1458567 - RNA, 19 nt, Artificial Sequence
  Description of Artificial Sequence: Synthetic oligonucleotide
  Antisense strand to SEQ ID NO: 1458566
uuugaaccgagucuuaccu

SEQ ID NO: 1458568 - RNA, 19 nt, Artificial Sequence
  Description of Artificial Sequence: Synthetic oligonucleotide
  Sense strand starting at position 2479 of SEQ ID NO: 1244014
ggagcuauauggucucgag

SEQ ID NO: 1458569 - RNA, 19 nt, Artificial Sequence
  Description of Artificial Sequence: Synthetic oligonucleotide
  Antisense strand to SEQ ID NO: 1458568
cucgagaccauauagcucc

SEQ ID NO: 1458570 - RNA, 19 nt, Artificial Sequence
  Description of Artificial Sequence: Synthetic oligonucleotide
  Sense strand starting at position 2528 of SEQ ID NO: 1244014
ucuccauccuaguuaugag

SEQ ID NO: 1458571 - RNA, 19 nt, Artificial Sequence
  Description of Artificial Sequence: Synthetic oligonucleotide
  Antisense strand to SEQ ID NO: 1458570
cucauaacuaggauggaga

SEQ ID NO: 1458572 - RNA, 19 nt, Artificial Sequence
  Description of Artificial Sequence: Synthetic oligonucleotide
  Sense strand starting at position 2531 of SEQ ID NO: 1244014
ccauccuaguuaugaggau

SEQ ID NO: 1458573 - RNA, 19 nt, Artificial Sequence
  Description of Artificial Sequence: Synthetic oligonucleotide
  Antisense strand to SEQ ID NO: 1458572
auccucauaacuaggaugg

SEQ ID NO: 1458574 - RNA, 19 nt, Artificial Sequence
  Description of Artificial Sequence: Synthetic oligonucleotide
  Sense strand starting at position 2585 of SEQ ID NO: 1244014
accuucuaggauugcauua

SEQ ID NO: 1458575 - RNA, 19 nt, Artificial Sequence
  Description of Artificial Sequence: Synthetic oligonucleotide
  Antisense strand to SEQ ID NO: 1458574
uaaugcaauccuagaaggu

SEQ ID NO: 1458576 - RNA, 19 nt, Artificial Sequence
  Description of Artificial Sequence: Synthetic oligonucleotide
  Sense strand starting at position 2587 of SEQ ID NO: 1244014
cuucuaggauugcauuaaa

SEQ ID NO: 1458577 - RNA, 19 nt, Artificial Sequence
  Description of Artificial Sequence: Synthetic oligonucleotide
  Antisense strand to SEQ ID NO: 1458576
uuuaaugcaauccuagaag

SEQ ID NO: 1458578 - RNA, 19 nt, Artificial Sequence
  Description of Artificial Sequence: Synthetic oligonucleotide
  Sense strand starting at position 2631 of SEQ ID NO: 1244014
uuguuacuguuacuaagua

SEQ ID NO: 1458579 - RNA, 19 nt, Artificial Sequence
  Description of Artificial Sequence: Synthetic oligonucleotide
  Antisense strand to SEQ ID NO: 1458578
uacuuaguaacaguaacaa

SEQ ID NO: 1458580 - RNA, 19 nt, Artificial Sequence
  Description of Artificial Sequence: Synthetic oligonucleotide
  Sense strand starting at position 2678 of SEQ ID NO: 1244014
ugcaauauugugugccuuu

SEQ ID NO: 1458581 - RNA, 19 nt, Artificial Sequence
  Description of Artificial Sequence: Synthetic oligonucleotide
  Antisense strand to SEQ ID NO: 1458580
aaaggcacacaauauugca

SEQ ID NO: 1458582 - RNA, 19 nt, Artificial Sequence
  Description of Artificial Sequence: Synthetic oligonucleotide
  Sense strand starting at position 2695 of SEQ ID NO: 1244014
uucuaaugcccauguugaa

SEQ ID NO: 1458583 - RNA, 19 nt, Artificial Sequence
  Description of Artificial Sequence: Synthetic oligonucleotide
  Antisense strand to SEQ ID NO: 1458582
uucaacaugggcauuagaa

SEQ ID NO: 1458584 - RNA, 19 nt, Artificial Sequence
  Description of Artificial Sequence: Synthetic oligonucleotide
  Sense strand starting at position 2800 of SEQ ID NO: 1244014
gaauaagaaucagguuaag

SEQ ID NO: 1458585 - RNA, 19 nt, Artificial Sequence
  Description of Artificial Sequence: Synthetic oligonucleotide
  Antisense strand to SEQ ID NO: 1458584
cuuaaccugauucuuauuc

SEQ ID NO: 1458586 - RNA, 19 nt, Artificial Sequence
  Description of Artificial Sequence: Synthetic oligonucleotide
  Sense strand starting at position 2812 of SEQ ID NO: 1244014
gguuaagaaugagaucagu

SEQ ID NO: 1458587 - RNA, 19 nt, Artificial Sequence
  Description of Artificial Sequence: Synthetic oligonucleotide
  Antisense strand to SEQ ID NO: 1458586
acugaucucauucuuaacc

SEQ ID NO: 1458588 - RNA, 19 nt, Artificial Sequence
  Description of Artificial Sequence: Synthetic oligonucleotide
  Sense strand starting at position 2822 of SEQ ID NO: 1244014
gagaucaguucucacagcu

SEQ ID NO: 1458589 - RNA, 19 nt, Artificial Sequence
  Description of Artificial Sequence: Synthetic oligonucleotide
  Antisense strand to SEQ ID NO: 1458588
agcugugagaacugaucuc

SEQ ID NO: 1458590 - RNA, 19 nt, Artificial Sequence
  Description of Artificial Sequence: Synthetic oligonucleotide
  Sense strand starting at position 2843 of SEQ ID NO: 1244014
accucuucugucugaagag

SEQ ID NO: 1458591 - RNA, 19 nt, Artificial Sequence
  Description of Artificial Sequence: Synthetic oligonucleotide
  Antisense strand to SEQ ID NO: 1458590
cucuucagacagaagaggu

SEQ ID NO: 1458592 - RNA, 19 nt, Artificial Sequence
  Description of Artificial Sequence: Synthetic oligonucleotide
  Sense strand starting at position 2877 of SEQ ID NO: 1244014
gcaugaguagauuaauauu

SEQ ID NO: 1458593 - RNA, 19 nt, Artificial Sequence
  Description of Artificial Sequence: Synthetic oligonucleotide
  Antisense strand to SEQ ID NO: 1458592
aauauuaaucuacucaugc

SEQ ID NO: 1458594 - RNA, 19 nt, Artificial Sequence
  Description of Artificial Sequence: Synthetic oligonucleotide
  Sense strand starting at position 2948 of SEQ ID NO: 1244014
gaagcagacucuuuggauc

SEQ ID NO: 1458595 - RNA, 19 nt, Artificial Sequence
  Description of Artificial Sequence: Synthetic oligonucleotide
  Antisense strand to SEQ ID NO: 1458594
gauccaaagagucugcuuc

SEQ ID NO: 1458596 - RNA, 19 nt, Artificial Sequence
  Description of Artificial Sequence: Synthetic oligonucleotide
  Sense strand starting at position 2988 of SEQ ID NO: 1244014
uaagaagugcugcaagcua

SEQ ID NO: 1458597 - RNA, 19 nt, Artificial Sequence
  Description of Artificial Sequence: Synthetic oligonucleotide
  Antisense strand to SEQ ID NO: 1458596
uagcuugcagcacuucuua

SEQ ID NO: 1458598 - RNA, 19 nt, Artificial Sequence
  Description of Artificial Sequence: Synthetic oligonucleotide
  Sense strand starting at position 3620 of SEQ ID NO: 1244014
cagcuucuuugagaagaug

SEQ ID NO: 1458599 - RNA, 19 nt, Artificial Sequence
  Description of Artificial Sequence: Synthetic oligonucleotide
  Antisense strand to SEQ ID NO: 1458598
caucuucucaaagaagcug

SEQ ID NO: 1458600 - RNA, 19 nt, Artificial Sequence
  Description of Artificial Sequence: Synthetic oligonucleotide
  Sense strand starting at position 3789 of SEQ ID NO: 1244014
gaagccauuugggaucuga

SEQ ID NO: 1458601 - RNA, 19 nt, Artificial Sequence
  Description of Artificial Sequence: Synthetic oligonucleotide
  Antisense strand to SEQ ID NO: 1458600
ucagaucccaaauggcuuc

SEQ ID NO: 1458602 - RNA, 19 nt, Artificial Sequence
  Description of Artificial Sequence: Synthetic oligonucleotide
  Sense strand starting at position 3799 of SEQ ID NO: 1244014
gggaucugauguuacaguu

SEQ ID NO: 1458603 - RNA, 19 nt, Artificial Sequence
  Description of Artificial Sequence: Synthetic oligonucleotide
  Antisense strand to SEQ ID NO: 1458602
aacuguaacaucagauccc

SEQ ID NO: 1458604 - RNA, 19 nt, Artificial Sequence
  Description of Artificial Sequence: Synthetic oligonucleotide
  Sense strand starting at position 78 of SEQ ID NO: 1244015
gaaacaguuucugauugac

SEQ ID NO: 1458605 - RNA, 19 nt, Artificial Sequence
  Description of Artificial Sequence: Synthetic oligonucleotide
  Antisense strand to SEQ ID NO: 1458604
gucaaucagaaacuguuuc

SEQ ID NO: 1458606 - RNA, 19 nt, Artificial Sequence
  Description of Artificial Sequence: Synthetic oligonucleotide
  Sense strand starting at position 148 of SEQ ID NO: 1244015
ccguguugccugggaagca

SEQ ID NO: 1458607 - RNA, 19 nt, Artificial Sequence
  Description of Artificial Sequence: Synthetic oligonucleotide
  Antisense strand to SEQ ID NO: 1458606
ugcuucccaggcaacacgg

SEQ ID NO: 1458608 - RNA, 19 nt, Artificial Sequence
  Description of Artificial Sequence: Synthetic oligonucleotide
  Sense strand starting at position 261 of SEQ ID NO: 1244015
gccaguuggucacccuaca

SEQ ID NO: 1458609 - RNA, 19 nt, Artificial Sequence
  Description of Artificial Sequence: Synthetic oligonucleotide
  Antisense strand to SEQ ID NO: 1458608
uguagggugaccaacuggc

SEQ ID NO: 1458610 - RNA, 19 nt, Artificial Sequence
  Description of Artificial Sequence: Synthetic oligonucleotide
  Sense strand starting at position 630 of SEQ ID NO: 1244015
guggguagccucgagaugu

SEQ ID NO: 1458611 - RNA, 19 nt, Artificial Sequence
  Description of Artificial Sequence: Synthetic oligonucleotide
  Antisense strand to SEQ ID NO: 1458610
acaucucgaggcuacccac

SEQ ID NO: 1458612 - RNA, 19 nt, Artificial Sequence
  Description of Artificial Sequence: Synthetic oligonucleotide
  Sense strand starting at position 631 of SEQ ID NO: 1244015
uggguagccucgagaugua

SEQ ID NO: 1458613 - RNA, 19 nt, Artificial Sequence
  Description of Artificial Sequence: Synthetic oligonucleotide
  Antisense strand to SEQ ID NO: 1458612
uacaucucgaggcuaccca

SEQ ID NO: 1458614 - RNA, 19 nt, Artificial Sequence
  Description of Artificial Sequence: Synthetic oligonucleotide
  Sense strand starting at position 634 of SEQ ID NO: 1244015
guagccucgagauguagga

SEQ ID NO: 1458615 - RNA, 19 nt, Artificial Sequence
  Description of Artificial Sequence: Synthetic oligonucleotide
  Antisense strand to SEQ ID NO: 1458614
uccuacaucucgaggcuac

SEQ ID NO: 1458616 - RNA, 19 nt, Artificial Sequence
  Description of Artificial Sequence: Synthetic oligonucleotide
  Sense strand starting at position 638 of SEQ ID NO: 1244015
ccucgagauguaggauguu

SEQ ID NO: 1458617 - RNA, 19 nt, Artificial Sequence
  Description of Artificial Sequence: Synthetic oligonucleotide
  Antisense strand to SEQ ID NO: 1458616
aacauccuacaucucgagg

SEQ ID NO: 1458618 - RNA, 19 nt, Artificial Sequence
  Description of Artificial Sequence: Synthetic oligonucleotide
  Sense strand starting at position 644 of SEQ ID NO: 1244015
gauguaggauguuugggau

SEQ ID NO: 1458619 - RNA, 19 nt, Artificial Sequence
  Description of Artificial Sequence: Synthetic oligonucleotide
  Antisense strand to SEQ ID NO: 1458618
aucccaaacauccuacauc

SEQ ID NO: 1458620 - RNA, 19 nt, Artificial Sequence
  Description of Artificial Sequence: Synthetic oligonucleotide
  Sense strand starting at position 648 of SEQ ID NO: 1244015
uaggauguuugggauagag

SEQ ID NO: 1458621 - RNA, 19 nt, Artificial Sequence
  Description of Artificial Sequence: Synthetic oligonucleotide
  Antisense strand to SEQ ID NO: 1458620
cucuaucccaaacauccua

SEQ ID NO: 1458622 - RNA, 19 nt, Artificial Sequence
  Description of Artificial Sequence: Synthetic oligonucleotide
  Sense strand starting at position 945 of SEQ ID NO: 1244015
gaggcuugcccuuaggacu

SEQ ID NO: 1458623 - RNA, 19 nt, Artificial Sequence
  Description of Artificial Sequence: Synthetic oligonucleotide
  Antisense strand to SEQ ID NO: 1458622
aguccuaagggcaagccuc

SEQ ID NO: 1458624 - RNA, 19 nt, Artificial Sequence
  Description of Artificial Sequence: Synthetic oligonucleotide
  Sense strand starting at position 990 of SEQ ID NO: 1244015
gaguaaguggcuuaccuuu

SEQ ID NO: 1458625 - RNA, 19 nt, Artificial Sequence
  Description of Artificial Sequence: Synthetic oligonucleotide
  Antisense strand to SEQ ID NO: 1458624
aaagguaagccacuuacuc

SEQ ID NO: 1458626 - RNA, 19 nt, Artificial Sequence
  Description of Artificial Sequence: Synthetic oligonucleotide
  Sense strand starting at position 1013 of SEQ ID NO: 1244015
gguguugggccguguagaa

SEQ ID NO: 1458627 - RNA, 19 nt, Artificial Sequence
  Description of Artificial Sequence: Synthetic oligonucleotide
  Antisense strand to SEQ ID NO: 1458626
uucuacacggcccaacacc

SEQ ID NO: 1458628 - RNA, 19 nt, Artificial Sequence
  Description of Artificial Sequence: Synthetic oligonucleotide
  Sense strand starting at position 1068 of SEQ ID NO: 1244015
ggucuucuccuguguggag

SEQ ID NO: 1458629 - RNA, 19 nt, Artificial Sequence
  Description of Artificial Sequence: Synthetic oligonucleotide
  Antisense strand to SEQ ID NO: 1458628
cuccacacaggagaagacc

SEQ ID NO: 1458630 - RNA, 19 nt, Artificial Sequence
  Description of Artificial Sequence: Synthetic oligonucleotide
  Sense strand starting at position 1072 of SEQ ID NO: 1244015
uucuccuguguggagaaau

SEQ ID NO: 1458631 - RNA, 19 nt, Artificial Sequence
  Description of Artificial Sequence: Synthetic oligonucleotide
  Antisense strand to SEQ ID NO: 1458630
auuucuccacacaggagaa

SEQ ID NO: 1458632 - RNA, 19 nt, Artificial Sequence
  Description of Artificial Sequence: Synthetic oligonucleotide
  Sense strand starting at position 1082 of SEQ ID NO: 1244015
uggagaaaugguggcagaa

SEQ ID NO: 1458633 - RNA, 19 nt, Artificial Sequence
  Description of Artificial Sequence: Synthetic oligonucleotide
  Antisense strand to SEQ ID NO: 1458632
uucugccaccauuucucca

SEQ ID NO: 1458634 - RNA, 19 nt, Artificial Sequence
  Description of Artificial Sequence: Synthetic oligonucleotide
  Sense strand starting at position 1482 of SEQ ID NO: 1244015
acgcuauauugcccauaua

SEQ ID NO: 1458635 - RNA, 19 nt, Artificial Sequence
  Description of Artificial Sequence: Synthetic oligonucleotide
  Antisense strand to SEQ ID NO: 1458634
uauaugggcaauauagcgu

SEQ ID NO: 1458636 - RNA, 19 nt, Artificial Sequence
  Description of Artificial Sequence: Synthetic oligonucleotide
  Sense strand starting at position 1483 of SEQ ID NO: 1244015
cgcuauauugcccauauag

SEQ ID NO: 1458637 - RNA, 19 nt, Artificial Sequence
  Description of Artificial Sequence: Synthetic oligonucleotide
  Antisense strand to SEQ ID NO: 1458636
cuauaugggcaauauagcg

SEQ ID NO: 1458638 - RNA, 19 nt, Artificial Sequence
  Description of Artificial Sequence: Synthetic oligonucleotide
  Sense strand starting at position 1503 of SEQ ID NO: 1244015
cccgucuuauuccuacaga

SEQ ID NO: 1458639 - RNA, 19 nt, Artificial Sequence
  Description of Artificial Sequence: Synthetic oligonucleotide
  Antisense strand to SEQ ID NO: 1458638
ucuguaggaauaagacggg

SEQ ID NO: 1458640 - RNA, 19 nt, Artificial Sequence
  Description of Artificial Sequence: Synthetic oligonucleotide
  Sense strand starting at position 1506 of SEQ ID NO: 1244015
gucuuauuccuacagaucc

SEQ ID NO: 1458641 - RNA, 19 nt, Artificial Sequence
  Description of Artificial Sequence: Synthetic oligonucleotide
  Antisense strand to SEQ ID NO: 1458640
ggaucuguaggaauaagac

SEQ ID NO: 1458642 - RNA, 19 nt, Artificial Sequence
  Description of Artificial Sequence: Synthetic oligonucleotide
  Sense strand starting at position 1932 of SEQ ID NO: 1244015
gcaaguggaucuguuccua

SEQ ID NO: 1458643 - RNA, 19 nt, Artificial Sequence
  Description of Artificial Sequence: Synthetic oligonucleotide
  Antisense strand to SEQ ID NO: 1458642
uaggaacagauccacuugc

SEQ ID NO: 1458644 - RNA, 19 nt, Artificial Sequence
  Description of Artificial Sequence: Synthetic oligonucleotide
  Sense strand starting at position 1936 of SEQ ID NO: 1244015
guggaucuguuccuagcua

SEQ ID NO: 1458645 - RNA, 19 nt, Artificial Sequence
  Description of Artificial Sequence: Synthetic oligonucleotide
  Antisense strand to SEQ ID NO: 1458644
uagcuaggaacagauccac

SEQ ID NO: 1458646 - RNA, 19 nt, Artificial Sequence
  Description of Artificial Sequence: Synthetic oligonucleotide
  Sense strand starting at position 2346 of SEQ ID NO: 1244015
cuugccauuugauugcgaa

SEQ ID NO: 1458647 - RNA, 19 nt, Artificial Sequence
  Description of Artificial Sequence: Synthetic oligonucleotide
  Antisense strand to SEQ ID NO: 1458646
uucgcaaucaaauggcaag

SEQ ID NO: 1458648 - RNA, 19 nt, Artificial Sequence
  Description of Artificial Sequence: Synthetic oligonucleotide
  Sense strand starting at position 2347 of SEQ ID NO: 1244015
uugccauuugauugcgaau

SEQ ID NO: 1458649 - RNA, 19 nt, Artificial Sequence
  Description of Artificial Sequence: Synthetic oligonucleotide
  Antisense strand to SEQ ID NO: 1458648
auucgcaaucaaauggcaa

SEQ ID NO: 1458650 - RNA, 19 nt, Artificial Sequence
  Description of Artificial Sequence: Synthetic oligonucleotide
  Sense strand starting at position 2350 of SEQ ID NO: 1244015
ccauuugauugcgaauccu

SEQ ID NO: 1458651 - RNA, 19 nt, Artificial Sequence
  Description of Artificial Sequence: Synthetic oligonucleotide
  Antisense strand to SEQ ID NO: 1458650
aggauucgcaaucaaaugg

SEQ ID NO: 1458652 - RNA, 19 nt, Artificial Sequence
  Description of Artificial Sequence: Synthetic oligonucleotide
  Sense strand starting at position 2505 of SEQ ID NO: 1244015
ggguguugugccgauguaa

SEQ ID NO: 1458653 - RNA, 19 nt, Artificial Sequence
  Description of Artificial Sequence: Synthetic oligonucleotide
  Antisense strand to SEQ ID NO: 1458652
uuacaucggcacaacaccc

SEQ ID NO: 1458654 - RNA, 19 nt, Artificial Sequence
  Description of Artificial Sequence: Synthetic oligonucleotide
  Sense strand starting at position 2599 of SEQ ID NO: 1244015
cccauuacauaggugaaga

SEQ ID NO: 1458655 - RNA, 19 nt, Artificial Sequence
  Description of Artificial Sequence: Synthetic oligonucleotide
  Antisense strand to SEQ ID NO: 1458654
ucuucaccuauguaauggg

SEQ ID NO: 1458656 - RNA, 19 nt, Artificial Sequence
  Description of Artificial Sequence: Synthetic oligonucleotide
  Sense strand starting at position 2892 of SEQ ID NO: 1244015
ugggcccucuugucaaaua

SEQ ID NO: 1458657 - RNA, 19 nt, Artificial Sequence
  Description of Artificial Sequence: Synthetic oligonucleotide
  Antisense strand to SEQ ID NO: 1458656
uauuugacaagagggccca

SEQ ID NO: 1458658 - RNA, 19 nt, Artificial Sequence
  Description of Artificial Sequence: Synthetic oligonucleotide
  Sense strand starting at position 3216 of SEQ ID NO: 1244015
aguaaaugcugucugcuuu

SEQ ID NO: 1458659 - RNA, 19 nt, Artificial Sequence
  Description of Artificial Sequence: Synthetic oligonucleotide
  Antisense strand to SEQ ID NO: 1458658
aaagcagacagcauuuacu

SEQ ID NO: 1458660 - RNA, 19 nt, Artificial Sequence
  Description of Artificial Sequence: Synthetic oligonucleotide
  Sense strand starting at position 3223 of SEQ ID NO: 1244015
gcugucugcuuucuaauag

SEQ ID NO: 1458661 - RNA, 19 nt, Artificial Sequence
  Description of Artificial Sequence: Synthetic oligonucleotide
  Antisense strand to SEQ ID NO: 1458660
cuauuagaaagcagacagc

SEQ ID NO: 1458662 - RNA, 19 nt, Artificial Sequence
  Description of Artificial Sequence: Synthetic oligonucleotide
  Sense strand starting at position 3234 of SEQ ID NO: 1244015
ucuaauaggucacuguguu

SEQ ID NO: 1458663 - RNA, 19 nt, Artificial Sequence
  Description of Artificial Sequence: Synthetic oligonucleotide
  Antisense strand to SEQ ID NO: 1458662
aacacagugaccuauuaga

SEQ ID NO: 1458664 - RNA, 19 nt, Artificial Sequence
  Description of Artificial Sequence: Synthetic oligonucleotide
  Sense strand starting at position 3235 of SEQ ID NO: 1244015
cuaauaggucacuguguuu

SEQ ID NO: 1458665 - RNA, 19 nt, Artificial Sequence
  Description of Artificial Sequence: Synthetic oligonucleotide
  Antisense strand to SEQ ID NO: 1458664
aaacacagugaccuauuag

SEQ ID NO: 1458666 - RNA, 19 nt, Artificial Sequence
  Description of Artificial Sequence: Synthetic oligonucleotide
  Sense strand starting at position 3779 of SEQ ID NO: 1244015
ggaagacauccaugcuuac

SEQ ID NO: 1458667 - RNA, 19 nt, Artificial Sequence
  Description of Artificial Sequence: Synthetic oligonucleotide
  Antisense strand to SEQ ID NO: 1458666
guaagcauggaugucuucc

SEQ ID NO: 1458668 - RNA, 19 nt, Artificial Sequence
  Description of Artificial Sequence: Synthetic oligonucleotide
  Sense strand starting at position 3817 of SEQ ID NO: 1244015
ggcuauauuugugcuuuga

SEQ ID NO: 1458669 - RNA, 19 nt, Artificial Sequence
  Description of Artificial Sequence: Synthetic oligonucleotide
  Antisense strand to SEQ ID NO: 1458668
ucaaagcacaaauauagcc

SEQ ID NO: 1458670 - RNA, 19 nt, Artificial Sequence
  Description of Artificial Sequence: Synthetic oligonucleotide
  Sense strand starting at position 3819 of SEQ ID NO: 1244015
cuauauuugugcuuugaug

SEQ ID NO: 1458671 - RNA, 19 nt, Artificial Sequence
  Description of Artificial Sequence: Synthetic oligonucleotide
  Antisense strand to SEQ ID NO: 1458670
caucaaagcacaaauauag

SEQ ID NO: 1458672 - RNA, 19 nt, Artificial Sequence
  Description of Artificial Sequence: Synthetic oligonucleotide
  Sense strand starting at position 3837 of SEQ ID NO: 1244015
ggcacaauugaguaguugu

SEQ ID NO: 1458673 - RNA, 19 nt, Artificial Sequence
  Description of Artificial Sequence: Synthetic oligonucleotide
  Antisense strand to SEQ ID NO: 1458672
acaacuacucaauugugcc

SEQ ID NO: 1458674 - RNA, 19 nt, Artificial Sequence
  Description of Artificial Sequence: Synthetic oligonucleotide
  Sense strand starting at position 3840 of SEQ ID NO: 1244015
acaauugaguaguuguaac

SEQ ID NO: 1458675 - RNA, 19 nt, Artificial Sequence
  Description of Artificial Sequence: Synthetic oligonucleotide
  Antisense strand to SEQ ID NO: 1458674
guuacaacuacucaauugu

SEQ ID NO: 1458676 - RNA, 19 nt, Artificial Sequence
  Description of Artificial Sequence: Synthetic oligonucleotide
  Sense strand starting at position 3848 of SEQ ID NO: 1244015
guaguuguaacagagauca

SEQ ID NO: 1458677 - RNA, 19 nt, Artificial Sequence
  Description of Artificial Sequence: Synthetic oligonucleotide
  Antisense strand to SEQ ID NO: 1458676
ugaucucuguuacaacuac

SEQ ID NO: 1458678 - RNA, 19 nt, Artificial Sequence
  Description of Artificial Sequence: Synthetic oligonucleotide
  Sense strand starting at position 3860 of SEQ ID NO: 1244015
gagaucauaugguucgcaa

SEQ ID NO: 1458679 - RNA, 19 nt, Artificial Sequence
  Description of Artificial Sequence: Synthetic oligonucleotide
  Antisense strand to SEQ ID NO: 1458678
uugcgaaccauaugaucuc

SEQ ID NO: 1458680 - RNA, 19 nt, Artificial Sequence
  Description of Artificial Sequence: Synthetic oligonucleotide
  Sense strand starting at position 3862 of SEQ ID NO: 1244015
gaucauaugguucgcaaag

SEQ ID NO: 1458681 - RNA, 19 nt, Artificial Sequence
  Description of Artificial Sequence: Synthetic oligonucleotide
  Antisense strand to SEQ ID NO: 1458680
cuuugcgaaccauaugauc

SEQ ID NO: 1458682 - RNA, 19 nt, Artificial Sequence
  Description of Artificial Sequence: Synthetic oligonucleotide
  Sense strand starting at position 3935 of SEQ ID NO: 1244015
uuauaagcuccaugaggau

SEQ ID NO: 1458683 - RNA, 19 nt, Artificial Sequence
  Description of Artificial Sequence: Synthetic oligonucleotide
  Antisense strand to SEQ ID NO: 1458682
auccucauggagcuuauaa

SEQ ID NO: 1458684 - RNA, 19 nt, Artificial Sequence
  Description of Artificial Sequence: Synthetic oligonucleotide
  Sense strand starting at position 83 of SEQ ID NO: 1244016
acaggcuguuucucguaga

SEQ ID NO: 1458685 - RNA, 19 nt, Artificial Sequence
  Description of Artificial Sequence: Synthetic oligonucleotide
  Antisense strand to SEQ ID NO: 1458684
ucuacgagaaacagccugu

SEQ ID NO: 1458686 - RNA, 19 nt, Artificial Sequence
  Description of Artificial Sequence: Synthetic oligonucleotide
  Sense strand starting at position 610 of SEQ ID NO: 1244016
gagaaauguggccagcuga

SEQ ID NO: 1458687 - RNA, 19 nt, Artificial Sequence
  Description of Artificial Sequence: Synthetic oligonucleotide
  Antisense strand to SEQ ID NO: 1458686
ucagcuggccacauuucuc

SEQ ID NO: 1458688 - RNA, 19 nt, Artificial Sequence
  Description of Artificial Sequence: Synthetic oligonucleotide
  Sense strand starting at position 653 of SEQ ID NO: 1244016
gaauuauaucagggcggcu

SEQ ID NO: 1458689 - RNA, 19 nt, Artificial Sequence
  Description of Artificial Sequence: Synthetic oligonucleotide
  Antisense strand to SEQ ID NO: 1458688
agccgcccugauauaauuc

SEQ ID NO: 1458690 - RNA, 19 nt, Artificial Sequence
  Description of Artificial Sequence: Synthetic oligonucleotide
  Sense strand starting at position 672 of SEQ ID NO: 1244016
ucuuuaucuucucagguca

SEQ ID NO: 1458691 - RNA, 19 nt, Artificial Sequence
  Description of Artificial Sequence: Synthetic oligonucleotide
  Antisense strand to SEQ ID NO: 1458690
ugaccugagaagauaaaga

SEQ ID NO: 1458692 - RNA, 19 nt, Artificial Sequence
  Description of Artificial Sequence: Synthetic oligonucleotide
  Sense strand starting at position 1166 of SEQ ID NO: 1244016
gccgguuagcaguaaagca

SEQ ID NO: 1458693 - RNA, 19 nt, Artificial Sequence
  Description of Artificial Sequence: Synthetic oligonucleotide
  Antisense strand to SEQ ID NO: 1458692
ugcuuuacugcuaaccggc

SEQ ID NO: 1458694 - RNA, 19 nt, Artificial Sequence
  Description of Artificial Sequence: Synthetic oligonucleotide
  Sense strand starting at position 1462 of SEQ ID NO: 1244016
cgauguuguacccacaaag

SEQ ID NO: 1458695 - RNA, 19 nt, Artificial Sequence
  Description of Artificial Sequence: Synthetic oligonucleotide
  Antisense strand to SEQ ID NO: 1458694
cuuuguggguacaacaucg

SEQ ID NO: 1458696 - RNA, 19 nt, Artificial Sequence
  Description of Artificial Sequence: Synthetic oligonucleotide
  Sense strand starting at position 1556 of SEQ ID NO: 1244016
gggaaaguuucuucucugu

SEQ ID NO: 1458697 - RNA, 19 nt, Artificial Sequence
  Description of Artificial Sequence: Synthetic oligonucleotide
  Antisense strand to SEQ ID NO: 1458696
acagagaagaaacuuuccc

SEQ ID NO: 1458698 - RNA, 19 nt, Artificial Sequence
  Description of Artificial Sequence: Synthetic oligonucleotide
  Sense strand starting at position 1595 of SEQ ID NO: 1244016
uguccugcucaagguuaaa

SEQ ID NO: 1458699 - RNA, 19 nt, Artificial Sequence
  Description of Artificial Sequence: Synthetic oligonucleotide
  Antisense strand to SEQ ID NO: 1458698
uuuaaccuugagcaggaca

SEQ ID NO: 1458700 - RNA, 19 nt, Artificial Sequence
  Description of Artificial Sequence: Synthetic oligonucleotide
  Sense strand starting at position 1609 of SEQ ID NO: 1244016
uuaaaugaguaaucaggca

SEQ ID NO: 1458701 - RNA, 19 nt, Artificial Sequence
  Description of Artificial Sequence: Synthetic oligonucleotide
  Antisense strand to SEQ ID NO: 1458700
ugccugauuacucauuuaa

SEQ ID NO: 1458702 - RNA, 19 nt, Artificial Sequence
  Description of Artificial Sequence: Synthetic oligonucleotide
  Sense strand starting at position 1634 of SEQ ID NO: 1244016
ggugcaaccuacucugagu

SEQ ID NO: 1458703 - RNA, 19 nt, Artificial Sequence
  Description of Artificial Sequence: Synthetic oligonucleotide
  Antisense strand to SEQ ID NO: 1458702
acucagaguagguugcacc

SEQ ID NO: 1458704 - RNA, 19 nt, Artificial Sequence
  Description of Artificial Sequence: Synthetic oligonucleotide
  Sense strand starting at position 1810 of SEQ ID NO: 1244016
cauucuuuccugcgacaga

SEQ ID NO: 1458705 - RNA, 19 nt, Artificial Sequence
  Description of Artificial Sequence: Synthetic oligonucleotide
  Antisense strand to SEQ ID NO: 1458704
ucugucgcaggaaagaaug

SEQ ID NO: 1458706 - RNA, 19 nt, Artificial Sequence
  Description of Artificial Sequence: Synthetic oligonucleotide
  Sense strand starting at position 1811 of SEQ ID NO: 1244016
auucuuuccugcgacagau

SEQ ID NO: 1458707 - RNA, 19 nt, Artificial Sequence
  Description of Artificial Sequence: Synthetic oligonucleotide
  Antisense strand to SEQ ID NO: 1458706
aucugucgcaggaaagaau

SEQ ID NO: 1458708 - RNA, 19 nt, Artificial Sequence
  Description of Artificial Sequence: Synthetic oligonucleotide
  Sense strand starting at position 1988 of SEQ ID NO: 1244016
aaggacauucucugagguu

SEQ ID NO: 1458709 - RNA, 19 nt, Artificial Sequence
  Description of Artificial Sequence: Synthetic oligonucleotide
  Antisense strand to SEQ ID NO: 1458708
aaccucagagaauguccuu

SEQ ID NO: 1458710 - RNA, 19 nt, Artificial Sequence
  Description of Artificial Sequence: Synthetic oligonucleotide
  Sense strand starting at position 1997 of SEQ ID NO: 1244016
cucugagguucuuccgauu

SEQ ID NO: 1458711 - RNA, 19 nt, Artificial Sequence
  Description of Artificial Sequence: Synthetic oligonucleotide
  Antisense strand to SEQ ID NO: 1458710
aaucggaagaaccucagag

SEQ ID NO: 1458712 - RNA, 19 nt, Artificial Sequence
  Description of Artificial Sequence: Synthetic oligonucleotide
  Sense strand starting at position 2026 of SEQ ID NO: 1244016
ccuccucccugaggauuua

SEQ ID NO: 1458713 - RNA, 19 nt, Artificial Sequence
  Description of Artificial Sequence: Synthetic oligonucleotide
  Antisense strand to SEQ ID NO: 1458712
uaaauccucagggaggagg

SEQ ID NO: 1458714 - RNA, 19 nt, Artificial Sequence
  Description of Artificial Sequence: Synthetic oligonucleotide
  Sense strand starting at position 2136 of SEQ ID NO: 1244016
accugagacccuuggaugu

SEQ ID NO: 1458715 - RNA, 19 nt, Artificial Sequence
  Description of Artificial Sequence: Synthetic oligonucleotide
  Antisense strand to SEQ ID NO: 1458714
acauccaagggucucaggu

SEQ ID NO: 1458716 - RNA, 19 nt, Artificial Sequence
  Description of Artificial Sequence: Synthetic oligonucleotide
  Sense strand starting at position 2291 of SEQ ID NO: 1244016
ccgaccugaucccaucaau

SEQ ID NO: 1458717 - RNA, 19 nt, Artificial Sequence
  Description of Artificial Sequence: Synthetic oligonucleotide
  Antisense strand to SEQ ID NO: 1458716
auugaugggaucaggucgg

SEQ ID NO: 1458718 - RNA, 19 nt, Artificial Sequence
  Description of Artificial Sequence: Synthetic oligonucleotide
  Sense strand starting at position 2521 of SEQ ID NO: 1244016
cacagaguuugauuagguc

SEQ ID NO: 1458719 - RNA, 19 nt, Artificial Sequence
  Description of Artificial Sequence: Synthetic oligonucleotide
  Antisense strand to SEQ ID NO: 1458718
gaccuaaucaaacucugug

SEQ ID NO: 1458720 - RNA, 19 nt, Artificial Sequence
  Description of Artificial Sequence: Synthetic oligonucleotide
  Sense strand starting at position 2524 of SEQ ID NO: 1244016
agaguuugauuagguccaa

SEQ ID NO: 1458721 - RNA, 19 nt, Artificial Sequence
  Description of Artificial Sequence: Synthetic oligonucleotide
  Antisense strand to SEQ ID NO: 1458720
uuggaccuaaucaaacucu

SEQ ID NO: 1458722 - RNA, 19 nt, Artificial Sequence
  Description of Artificial Sequence: Synthetic oligonucleotide
  Sense strand starting at position 2528 of SEQ ID NO: 1244016
uuugauuagguccaaguua

SEQ ID NO: 1458723 - RNA, 19 nt, Artificial Sequence
  Description of Artificial Sequence: Synthetic oligonucleotide
  Antisense strand to SEQ ID NO: 1458722
uaacuuggaccuaaucaaa

SEQ ID NO: 1458724 - RNA, 19 nt, Artificial Sequence
  Description of Artificial Sequence: Synthetic oligonucleotide
  Sense strand starting at position 2539 of SEQ ID NO: 1244016
ccaaguuaggcccaggaau

SEQ ID NO: 1458725 - RNA, 19 nt, Artificial Sequence
  Description of Artificial Sequence: Synthetic oligonucleotide
  Antisense strand to SEQ ID NO: 1458724
auuccugggccuaacuugg

SEQ ID NO: 1458726 - RNA, 19 nt, Artificial Sequence
  Description of Artificial Sequence: Synthetic oligonucleotide
  Sense strand starting at position 2583 of SEQ ID NO: 1244016
agacucugaucagggaaga

SEQ ID NO: 1458727 - RNA, 19 nt, Artificial Sequence
  Description of Artificial Sequence: Synthetic oligonucleotide
  Antisense strand to SEQ ID NO: 1458726
ucuucccugaucagagucu

SEQ ID NO: 1458728 - RNA, 19 nt, Artificial Sequence
  Description of Artificial Sequence: Synthetic oligonucleotide
  Sense strand starting at position 2636 of SEQ ID NO: 1244016
ccuccagagccuggucaau

SEQ ID NO: 1458729 - RNA, 19 nt, Artificial Sequence
  Description of Artificial Sequence: Synthetic oligonucleotide
  Antisense strand to SEQ ID NO: 1458728
auugaccaggcucuggagg

SEQ ID NO: 1458730 - RNA, 19 nt, Artificial Sequence
  Description of Artificial Sequence: Synthetic oligonucleotide
  Sense strand starting at position 2794 of SEQ ID NO: 1244016
guucucugugccugggaca

SEQ ID NO: 1458731 - RNA, 19 nt, Artificial Sequence
  Description of Artificial Sequence: Synthetic oligonucleotide
  Antisense strand to SEQ ID NO: 1458730
ugucccaggcacagagaac

SEQ ID NO: 1458732 - RNA, 19 nt, Artificial Sequence
  Description of Artificial Sequence: Synthetic oligonucleotide
  Sense strand starting at position 2865 of SEQ ID NO: 1244016
ggacaucucucccuccaga

SEQ ID NO: 1458733 - RNA, 19 nt, Artificial Sequence
  Description of Artificial Sequence: Synthetic oligonucleotide
  Antisense strand to SEQ ID NO: 1458732
ucuggagggagagaugucc

SEQ ID NO: 1458734 - RNA, 19 nt, Artificial Sequence
  Description of Artificial Sequence: Synthetic oligonucleotide
  Sense strand starting at position 2909 of SEQ ID NO: 1244016
cccagucucugugcuuaua

SEQ ID NO: 1458735 - RNA, 19 nt, Artificial Sequence
  Description of Artificial Sequence: Synthetic oligonucleotide
  Antisense strand to SEQ ID NO: 1458734
uauaagcacagagacuggg

SEQ ID NO: 1458736 - RNA, 19 nt, Artificial Sequence
  Description of Artificial Sequence: Synthetic oligonucleotide
  Sense strand starting at position 2918 of SEQ ID NO: 1244016
ugugcuuauagccgucaga

SEQ ID NO: 1458737 - RNA, 19 nt, Artificial Sequence
  Description of Artificial Sequence: Synthetic oligonucleotide
  Antisense strand to SEQ ID NO: 1458736
ucugacggcuauaagcaca

SEQ ID NO: 1458738 - RNA, 19 nt, Artificial Sequence
  Description of Artificial Sequence: Synthetic oligonucleotide
  Sense strand starting at position 3058 of SEQ ID NO: 1244016
acauguuacguccaguaaa

SEQ ID NO: 1458739 - RNA, 19 nt, Artificial Sequence
  Description of Artificial Sequence: Synthetic oligonucleotide
  Antisense strand to SEQ ID NO: 1458738
uuuacuggacguaacaugu

SEQ ID NO: 1458740 - RNA, 19 nt, Artificial Sequence
  Description of Artificial Sequence: Synthetic oligonucleotide
  Sense strand starting at position 3061 of SEQ ID NO: 1244016
uguuacguccaguaaauga

SEQ ID NO: 1458741 - RNA, 19 nt, Artificial Sequence
  Description of Artificial Sequence: Synthetic oligonucleotide
  Antisense strand to SEQ ID NO: 1458740
ucauuuacuggacguaaca

SEQ ID NO: 1458742 - RNA, 19 nt, Artificial Sequence
  Description of Artificial Sequence: Synthetic oligonucleotide
  Sense strand starting at position 3068 of SEQ ID NO: 1244016
uccaguaaaugauuacuga

SEQ ID NO: 1458743 - RNA, 19 nt, Artificial Sequence
  Description of Artificial Sequence: Synthetic oligonucleotide
  Antisense strand to SEQ ID NO: 1458742
ucaguaaucauuuacugga

SEQ ID NO: 1458744 - RNA, 19 nt, Artificial Sequence
  Description of Artificial Sequence: Synthetic oligonucleotide
  Sense strand starting at position 3189 of SEQ ID NO: 1244016
auccuuaccugugaagcaa

SEQ ID NO: 1458745 - RNA, 19 nt, Artificial Sequence
  Description of Artificial Sequence: Synthetic oligonucleotide
  Antisense strand to SEQ ID NO: 1458744
uugcuucacagguaaggau

SEQ ID NO: 1458746 - RNA, 19 nt, Artificial Sequence
  Description of Artificial Sequence: Synthetic oligonucleotide
  Sense strand starting at position 3227 of SEQ ID NO: 1244016
gcagguugucaugaggaug

SEQ ID NO: 1458747 - RNA, 19 nt, Artificial Sequence
  Description of Artificial Sequence: Synthetic oligonucleotide
  Antisense strand to SEQ ID NO: 1458746
cauccucaugacaaccugc

SEQ ID NO: 1458748 - RNA, 19 nt, Artificial Sequence
  Description of Artificial Sequence: Synthetic oligonucleotide
  Sense strand starting at position 3230 of SEQ ID NO: 1244016
gguugucaugaggaugcua

SEQ ID NO: 1458749 - RNA, 19 nt, Artificial Sequence
  Description of Artificial Sequence: Synthetic oligonucleotide
  Antisense strand to SEQ ID NO: 1458748
uagcauccucaugacaacc

SEQ ID NO: 1458750 - RNA, 19 nt, Artificial Sequence
  Description of Artificial Sequence: Synthetic oligonucleotide
  Sense strand starting at position 3248 of SEQ ID NO: 1244016
acgagaugcugugcucagu

SEQ ID NO: 1458751 - RNA, 19 nt, Artificial Sequence
  Description of Artificial Sequence: Synthetic oligonucleotide
  Antisense strand to SEQ ID NO: 1458750
acugagcacagcaucucgu

SEQ ID NO: 1458752 - RNA, 19 nt, Artificial Sequence
  Description of Artificial Sequence: Synthetic oligonucleotide
  Sense strand starting at position 3345 of SEQ ID NO: 1244016
gcucccugugggcaaagau

SEQ ID NO: 1458753 - RNA, 19 nt, Artificial Sequence
  Description of Artificial Sequence: Synthetic oligonucleotide
  Antisense strand to SEQ ID NO: 1458752
aucuuugcccacagggagc

SEQ ID NO: 1458754 - RNA, 19 nt, Artificial Sequence
  Description of Artificial Sequence: Synthetic oligonucleotide
  Sense strand starting at position 3439 of SEQ ID NO: 1244016
acgugucugccagcugaau

SEQ ID NO: 1458755 - RNA, 19 nt, Artificial Sequence
  Description of Artificial Sequence: Synthetic oligonucleotide
  Antisense strand to SEQ ID NO: 1458754
auucagcuggcagacacgu

SEQ ID NO: 1458756 - RNA, 19 nt, Artificial Sequence
  Description of Artificial Sequence: Synthetic oligonucleotide
  Sense strand starting at position 3440 of SEQ ID NO: 1244016
cgugucugccagcugaaua

SEQ ID NO: 1458757 - RNA, 19 nt, Artificial Sequence
  Description of Artificial Sequence: Synthetic oligonucleotide
  Antisense strand to SEQ ID NO: 1458756
uauucagcuggcagacacg

SEQ ID NO: 1458758 - RNA, 19 nt, Artificial Sequence
  Description of Artificial Sequence: Synthetic oligonucleotide
  Sense strand starting at position 3441 of SEQ ID NO: 1244016
gugucugccagcugaauac

SEQ ID NO: 1458759 - RNA, 19 nt, Artificial Sequence
  Description of Artificial Sequence: Synthetic oligonucleotide
  Antisense strand to SEQ ID NO: 1458758
guauucagcuggcagacac

SEQ ID NO: 1458760 - RNA, 19 nt, Artificial Sequence
  Description of Artificial Sequence: Synthetic oligonucleotide
  Sense strand starting at position 3451 of SEQ ID NO: 1244016
gcugaauacagucgugcua

SEQ ID NO: 1458761 - RNA, 19 nt, Artificial Sequence
  Description of Artificial Sequence: Synthetic oligonucleotide
  Antisense strand to SEQ ID NO: 1458760
uagcacgacuguauucagc

SEQ ID NO: 1458762 - RNA, 19 nt, Artificial Sequence
  Description of Artificial Sequence: Synthetic oligonucleotide
  Sense strand starting at position 3957 of SEQ ID NO: 1244016
cuugcauuccaggaugacu

SEQ ID NO: 1458763 - RNA, 19 nt, Artificial Sequence
  Description of Artificial Sequence: Synthetic oligonucleotide
  Antisense strand to SEQ ID NO: 1458762
agucauccuggaaugcaag

SEQ ID NO: 1458764 - RNA, 19 nt, Artificial Sequence
  Description of Artificial Sequence: Synthetic oligonucleotide
  Sense strand starting at position 485 of SEQ ID NO: 1244017
cccaguucucccugaggcu

SEQ ID NO: 1458765 - RNA, 19 nt, Artificial Sequence
  Description of Artificial Sequence: Synthetic oligonucleotide
  Antisense strand to SEQ ID NO: 1458764
agccucagggagaacuggg

SEQ ID NO: 1458766 - RNA, 19 nt, Artificial Sequence
  Description of Artificial Sequence: Synthetic oligonucleotide
  Sense strand starting at position 859 of SEQ ID NO: 1244017
gcccaucucuagccgugaa

SEQ ID NO: 1458767 - RNA, 19 nt, Artificial Sequence
  Description of Artificial Sequence: Synthetic oligonucleotide
  Antisense strand to SEQ ID NO: 1458766
uucacggcuagagaugggc

SEQ ID NO: 1458768 - RNA, 19 nt, Artificial Sequence
  Description of Artificial Sequence: Synthetic oligonucleotide
  Sense strand starting at position 869 of SEQ ID NO: 1244017
agccgugaacugugucuga

SEQ ID NO: 1458769 - RNA, 19 nt, Artificial Sequence
  Description of Artificial Sequence: Synthetic oligonucleotide
  Antisense strand to SEQ ID NO: 1458768
ucagacacaguucacggcu

SEQ ID NO: 1458770 - RNA, 19 nt, Artificial Sequence
  Description of Artificial Sequence: Synthetic oligonucleotide
  Sense strand starting at position 872 of SEQ ID NO: 1244017
cgugaacugugucugaguu

SEQ ID NO: 1458771 - RNA, 19 nt, Artificial Sequence
  Description of Artificial Sequence: Synthetic oligonucleotide
  Antisense strand to SEQ ID NO: 1458770
aacucagacacaguucacg

SEQ ID NO: 1458772 - RNA, 19 nt, Artificial Sequence
  Description of Artificial Sequence: Synthetic oligonucleotide
  Sense strand starting at position 873 of SEQ ID NO: 1244017
gugaacugugucugaguuc

SEQ ID NO: 1458773 - RNA, 19 nt, Artificial Sequence
  Description of Artificial Sequence: Synthetic oligonucleotide
  Antisense strand to SEQ ID NO: 1458772
gaacucagacacaguucac

SEQ ID NO: 1458774 - RNA, 19 nt, Artificial Sequence
  Description of Artificial Sequence: Synthetic oligonucleotide
  Sense strand starting at position 884 of SEQ ID NO: 1244017
cugaguuccugccagcgua

SEQ ID NO: 1458775 - RNA, 19 nt, Artificial Sequence
  Description of Artificial Sequence: Synthetic oligonucleotide
  Antisense strand to SEQ ID NO: 1458774
uacgcuggcaggaacucag

SEQ ID NO: 1458776 - RNA, 19 nt, Artificial Sequence
  Description of Artificial Sequence: Synthetic oligonucleotide
  Sense strand starting at position 1222 of SEQ ID NO: 1244017
gauugaaagaaucgcgaga

SEQ ID NO: 1458777 - RNA, 19 nt, Artificial Sequence
  Description of Artificial Sequence: Synthetic oligonucleotide
  Antisense strand to SEQ ID NO: 1458776
ucucgcgauucuuucaauc

SEQ ID NO: 1458778 - RNA, 19 nt, Artificial Sequence
  Description of Artificial Sequence: Synthetic oligonucleotide
  Sense strand starting at position 1224 of SEQ ID NO: 1244017
uugaaagaaucgcgagaac

SEQ ID NO: 1458779 - RNA, 19 nt, Artificial Sequence
  Description of Artificial Sequence: Synthetic oligonucleotide
  Antisense strand to SEQ ID NO: 1458778
guucucgcgauucuuucaa

SEQ ID NO: 1458780 - RNA, 19 nt, Artificial Sequence
  Description of Artificial Sequence: Synthetic oligonucleotide
  Sense strand starting at position 1365 of SEQ ID NO: 1244017
uaaggagacuccggguuau

SEQ ID NO: 1458781 - RNA, 19 nt, Artificial Sequence
  Description of Artificial Sequence: Synthetic oligonucleotide
  Antisense strand to SEQ ID NO: 1458780
auaacccggagucuccuua

SEQ ID NO: 1458782 - RNA, 19 nt, Artificial Sequence
  Description of Artificial Sequence: Synthetic oligonucleotide
  Sense strand starting at position 2095 of SEQ ID NO: 1244017
uuuccaagacgugguuuaa

SEQ ID NO: 1458783 - RNA, 19 nt, Artificial Sequence
  Description of Artificial Sequence: Synthetic oligonucleotide
  Antisense strand to SEQ ID NO: 1458782
uuaaaccacgucuuggaaa

SEQ ID NO: 1458784 - RNA, 19 nt, Artificial Sequence
  Description of Artificial Sequence: Synthetic oligonucleotide
  Sense strand starting at position 2099 of SEQ ID NO: 1244017
caagacgugguuuaaauau

SEQ ID NO: 1458785 - RNA, 19 nt, Artificial Sequence
  Description of Artificial Sequence: Synthetic oligonucleotide
  Antisense strand to SEQ ID NO: 1458784
auauuuaaaccacgucuug

SEQ ID NO: 1458786 - RNA, 19 nt, Artificial Sequence
  Description of Artificial Sequence: Synthetic oligonucleotide
  Sense strand starting at position 2124 of SEQ ID NO: 1244017
gcaccuuuccacuguauuu

SEQ ID NO: 1458787 - RNA, 19 nt, Artificial Sequence
  Description of Artificial Sequence: Synthetic oligonucleotide
  Antisense strand to SEQ ID NO: 1458786
aaauacaguggaaaggugc

SEQ ID NO: 1458788 - RNA, 19 nt, Artificial Sequence
  Description of Artificial Sequence: Synthetic oligonucleotide
  Sense strand starting at position 2189 of SEQ ID NO: 1244017
ggacuuuagcuuugggaau

SEQ ID NO: 1458789 - RNA, 19 nt, Artificial Sequence
  Description of Artificial Sequence: Synthetic oligonucleotide
  Antisense strand to SEQ ID NO: 1458788
auucccaaagcuaaagucc

SEQ ID NO: 1458790 - RNA, 19 nt, Artificial Sequence
  Description of Artificial Sequence: Synthetic oligonucleotide
  Sense strand starting at position 2190 of SEQ ID NO: 1244017
gacuuuagcuuugggaaua

SEQ ID NO: 1458791 - RNA, 19 nt, Artificial Sequence
  Description of Artificial Sequence: Synthetic oligonucleotide
  Antisense strand to SEQ ID NO: 1458790
uauucccaaagcuaaaguc

SEQ ID NO: 1458792 - RNA, 19 nt, Artificial Sequence
  Description of Artificial Sequence: Synthetic oligonucleotide
  Sense strand starting at position 2191 of SEQ ID NO: 1244017
acuuuagcuuugggaauau

SEQ ID NO: 1458793 - RNA, 19 nt, Artificial Sequence
  Description of Artificial Sequence: Synthetic oligonucleotide
  Antisense strand to SEQ ID NO: 1458792
auauucccaaagcuaaagu

SEQ ID NO: 1458794 - RNA, 19 nt, Artificial Sequence
  Description of Artificial Sequence: Synthetic oligonucleotide
  Sense strand starting at position 2200 of SEQ ID NO: 1244017
uugggaauauucgcucauc

SEQ ID NO: 1458795 - RNA, 19 nt, Artificial Sequence
  Description of Artificial Sequence: Synthetic oligonucleotide
  Antisense strand to SEQ ID NO: 1458794
gaugagcgaauauucccaa

SEQ ID NO: 1458796 - RNA, 19 nt, Artificial Sequence
  Description of Artificial Sequence: Synthetic oligonucleotide
  Sense strand starting at position 2203 of SEQ ID NO: 1244017
ggaauauucgcucauccca

SEQ ID NO: 1458797 - RNA, 19 nt, Artificial Sequence
  Description of Artificial Sequence: Synthetic oligonucleotide
  Antisense strand to SEQ ID NO: 1458796
ugggaugagcgaauauucc

SEQ ID NO: 1458798 - RNA, 19 nt, Artificial Sequence
  Description of Artificial Sequence: Synthetic oligonucleotide
  Sense strand starting at position 2385 of SEQ ID NO: 1244017
gacccucuggcuggauaau

SEQ ID NO: 1458799 - RNA, 19 nt, Artificial Sequence
  Description of Artificial Sequence: Synthetic oligonucleotide
  Antisense strand to SEQ ID NO: 1458798
auuauccagccagaggguc

SEQ ID NO: 1458800 - RNA, 19 nt, Artificial Sequence
  Description of Artificial Sequence: Synthetic oligonucleotide
  Sense strand starting at position 2386 of SEQ ID NO: 1244017
acccucuggcuggauaaua

SEQ ID NO: 1458801 - RNA, 19 nt, Artificial Sequence
  Description of Artificial Sequence: Synthetic oligonucleotide
  Antisense strand to SEQ ID NO: 1458800
uauuauccagccagagggu

SEQ ID NO: 1458802 - RNA, 19 nt, Artificial Sequence
  Description of Artificial Sequence: Synthetic oligonucleotide
  Sense strand starting at position 2426 of SEQ ID NO: 1244017
caugucuaguagcauagaa

SEQ ID NO: 1458803 - RNA, 19 nt, Artificial Sequence
  Description of Artificial Sequence: Synthetic oligonucleotide
  Antisense strand to SEQ ID NO: 1458802
uucuaugcuacuagacaug

SEQ ID NO: 1458804 - RNA, 19 nt, Artificial Sequence
  Description of Artificial Sequence: Synthetic oligonucleotide
  Sense strand starting at position 2428 of SEQ ID NO: 1244017
ugucuaguagcauagaauu

SEQ ID NO: 1458805 - RNA, 19 nt, Artificial Sequence
  Description of Artificial Sequence: Synthetic oligonucleotide
  Antisense strand to SEQ ID NO: 1458804
aauucuaugcuacuagaca

SEQ ID NO: 1458806 - RNA, 19 nt, Artificial Sequence
  Description of Artificial Sequence: Synthetic oligonucleotide
  Sense strand starting at position 2439 of SEQ ID NO: 1244017
auagaauucuagcggccaa

SEQ ID NO: 1458807 - RNA, 19 nt, Artificial Sequence
  Description of Artificial Sequence: Synthetic oligonucleotide
  Antisense strand to SEQ ID NO: 1458806
uuggccgcuagaauucuau

SEQ ID NO: 1458808 - RNA, 19 nt, Artificial Sequence
  Description of Artificial Sequence: Synthetic oligonucleotide
  Sense strand starting at position 2572 of SEQ ID NO: 1244017
ggagcauccguguuuguuu

SEQ ID NO: 1458809 - RNA, 19 nt, Artificial Sequence
  Description of Artificial Sequence: Synthetic oligonucleotide
  Antisense strand to SEQ ID NO: 1458808
aaacaaacacggaugcucc

SEQ ID NO: 1458810 - RNA, 19 nt, Artificial Sequence
  Description of Artificial Sequence: Synthetic oligonucleotide
  Sense strand starting at position 3208 of SEQ ID NO: 1244017
ugcggacugugucuuacaa

SEQ ID NO: 1458811 - RNA, 19 nt, Artificial Sequence
  Description of Artificial Sequence: Synthetic oligonucleotide
  Antisense strand to SEQ ID NO: 1458810
uuguaagacacaguccgca

SEQ ID NO: 1458812 - RNA, 19 nt, Artificial Sequence
  Description of Artificial Sequence: Synthetic oligonucleotide
  Sense strand starting at position 3378 of SEQ ID NO: 1244017
gccgggauguuagugaaga

SEQ ID NO: 1458813 - RNA, 19 nt, Artificial Sequence
  Description of Artificial Sequence: Synthetic oligonucleotide
  Antisense strand to SEQ ID NO: 1458812
ucuucacuaacaucccggc

SEQ ID NO: 1458814 - RNA, 19 nt, Artificial Sequence
  Description of Artificial Sequence: Synthetic oligonucleotide
  Sense strand starting at position 3379 of SEQ ID NO: 1244017
ccgggauguuagugaagaa

SEQ ID NO: 1458815 - RNA, 19 nt, Artificial Sequence
  Description of Artificial Sequence: Synthetic oligonucleotide
  Antisense strand to SEQ ID NO: 1458814
uucuucacuaacaucccgg

SEQ ID NO: 1458816 - RNA, 19 nt, Artificial Sequence
  Description of Artificial Sequence: Synthetic oligonucleotide
  Sense strand starting at position 3395 of SEQ ID NO: 1244017
gaaagaaccgcacgaguaa

SEQ ID NO: 1458817 - RNA, 19 nt, Artificial Sequence
  Description of Artificial Sequence: Synthetic oligonucleotide
  Antisense strand to SEQ ID NO: 1458816
uuacucgugcgguucuuuc

SEQ ID NO: 1458818 - RNA, 19 nt, Artificial Sequence
  Description of Artificial Sequence: Synthetic oligonucleotide
  Sense strand starting at position 3496 of SEQ ID NO: 1244017
gccguugugugagccaaau

SEQ ID NO: 1458819 - RNA, 19 nt, Artificial Sequence
  Description of Artificial Sequence: Synthetic oligonucleotide
  Antisense strand to SEQ ID NO: 1458818
auuuggcucacacaacggc

SEQ ID NO: 1458820 - RNA, 19 nt, Artificial Sequence
  Description of Artificial Sequence: Synthetic oligonucleotide
  Sense strand starting at position 3498 of SEQ ID NO: 1244017
cguugugugagccaaauug

SEQ ID NO: 1458821 - RNA, 19 nt, Artificial Sequence
  Description of Artificial Sequence: Synthetic oligonucleotide
  Antisense strand to SEQ ID NO: 1458820
caauuuggcucacacaacg

SEQ ID NO: 1458822 - RNA, 19 nt, Artificial Sequence
  Description of Artificial Sequence: Synthetic oligonucleotide
  Sense strand starting at position 3546 of SEQ ID NO: 1244017
cgcguuuggucagcaaaua

SEQ ID NO: 1458823 - RNA, 19 nt, Artificial Sequence
  Description of Artificial Sequence: Synthetic oligonucleotide
  Antisense strand to SEQ ID NO: 1458822
uauuugcugaccaaacgcg

SEQ ID NO: 1458824 - RNA, 19 nt, Artificial Sequence
  Description of Artificial Sequence: Synthetic oligonucleotide
  Sense strand starting at position 3547 of SEQ ID NO: 1244017
gcguuuggucagcaaauau

SEQ ID NO: 1458825 - RNA, 19 nt, Artificial Sequence
  Description of Artificial Sequence: Synthetic oligonucleotide
  Antisense strand to SEQ ID NO: 1458824
auauuugcugaccaaacgc

SEQ ID NO: 1458826 - RNA, 19 nt, Artificial Sequence
  Description of Artificial Sequence: Synthetic oligonucleotide
  Sense strand starting at position 3578 of SEQ ID NO: 1244017
ucuauuggcccuuaagaga

SEQ ID NO: 1458827 - RNA, 19 nt, Artificial Sequence
  Description of Artificial Sequence: Synthetic oligonucleotide
  Antisense strand to SEQ ID NO: 1458826
ucucuuaagggccaauaga

SEQ ID NO: 1458828 - RNA, 19 nt, Artificial Sequence
  Description of Artificial Sequence: Synthetic oligonucleotide
  Sense strand starting at position 3646 of SEQ ID NO: 1244017
cggagugcuggccacagau

SEQ ID NO: 1458829 - RNA, 19 nt, Artificial Sequence
  Description of Artificial Sequence: Synthetic oligonucleotide
  Antisense strand to SEQ ID NO: 1458828
aucuguggccagcacuccg

SEQ ID NO: 1458830 - RNA, 19 nt, Artificial Sequence
  Description of Artificial Sequence: Synthetic oligonucleotide
  Sense strand starting at position 3655 of SEQ ID NO: 1244017
ggccacagauguggagaau

SEQ ID NO: 1458831 - RNA, 19 nt, Artificial Sequence
  Description of Artificial Sequence: Synthetic oligonucleotide
  Antisense strand to SEQ ID NO: 1458830
auucuccacaucuguggcc

SEQ ID NO: 1458832 - RNA, 19 nt, Artificial Sequence
  Description of Artificial Sequence: Synthetic oligonucleotide
  Sense strand starting at position 141 of SEQ ID NO: 1244018
uuuccuucucaguguuguu

SEQ ID NO: 1458833 - RNA, 19 nt, Artificial Sequence
  Description of Artificial Sequence: Synthetic oligonucleotide
  Antisense strand to SEQ ID NO: 1458832
aacaacacugagaaggaaa

SEQ ID NO: 1458834 - RNA, 19 nt, Artificial Sequence
  Description of Artificial Sequence: Synthetic oligonucleotide
  Sense strand starting at position 146 of SEQ ID NO: 1244018
uucucaguguuguuaugaa

SEQ ID NO: 1458835 - RNA, 19 nt, Artificial Sequence
  Description of Artificial Sequence: Synthetic oligonucleotide
  Antisense strand to SEQ ID NO: 1458834
uucauaacaacacugagaa

SEQ ID NO: 1458836 - RNA, 19 nt, Artificial Sequence
  Description of Artificial Sequence: Synthetic oligonucleotide
  Sense strand starting at position 153 of SEQ ID NO: 1244018
uguuguuaugaaggcuuaa

SEQ ID NO: 1458837 - RNA, 19 nt, Artificial Sequence
  Description of Artificial Sequence: Synthetic oligonucleotide
  Antisense strand to SEQ ID NO: 1458836
uuaagccuucauaacaaca

SEQ ID NO: 1458838 - RNA, 19 nt, Artificial Sequence
  Description of Artificial Sequence: Synthetic oligonucleotide
  Sense strand starting at position 165 of SEQ ID NO: 1244018
ggcuuaagcucugcauuaa

SEQ ID NO: 1458839 - RNA, 19 nt, Artificial Sequence
  Description of Artificial Sequence: Synthetic oligonucleotide
  Antisense strand to SEQ ID NO: 1458838
uuaaugcagagcuuaagcc

SEQ ID NO: 1458840 - RNA, 19 nt, Artificial Sequence
  Description of Artificial Sequence: Synthetic oligonucleotide
  Sense strand starting at position 166 of SEQ ID NO: 1244018
gcuuaagcucugcauuaag

SEQ ID NO: 1458841 - RNA, 19 nt, Artificial Sequence
  Description of Artificial Sequence: Synthetic oligonucleotide
  Antisense strand to SEQ ID NO: 1458840
cuuaaugcagagcuuaagc

SEQ ID NO: 1458842 - RNA, 19 nt, Artificial Sequence
  Description of Artificial Sequence: Synthetic oligonucleotide
  Sense strand starting at position 176 of SEQ ID NO: 1244018
ugcauuaaguuucuacaag

SEQ ID NO: 1458843 - RNA, 19 nt, Artificial Sequence
  Description of Artificial Sequence: Synthetic oligonucleotide
  Antisense strand to SEQ ID NO: 1458842
cuuguagaaacuuaaugca

SEQ ID NO: 1458844 - RNA, 19 nt, Artificial Sequence
  Description of Artificial Sequence: Synthetic oligonucleotide
  Sense strand starting at position 177 of SEQ ID NO: 1244018
gcauuaaguuucuacaagu

SEQ ID NO: 1458845 - RNA, 19 nt, Artificial Sequence
  Description of Artificial Sequence: Synthetic oligonucleotide
  Antisense strand to SEQ ID NO: 1458844
acuuguagaaacuuaaugc

SEQ ID NO: 1458846 - RNA, 19 nt, Artificial Sequence
  Description of Artificial Sequence: Synthetic oligonucleotide
  Sense strand starting at position 231 of SEQ ID NO: 1244018
caauguuaaugugugcuga

SEQ ID NO: 1458847 - RNA, 19 nt, Artificial Sequence
  Description of Artificial Sequence: Synthetic oligonucleotide
  Antisense strand to SEQ ID NO: 1458846
ucagcacacauuaacauug

SEQ ID NO: 1458848 - RNA, 19 nt, Artificial Sequence
  Description of Artificial Sequence: Synthetic oligonucleotide
  Sense strand starting at position 232 of SEQ ID NO: 1244018
aauguuaaugugugcugaa

SEQ ID NO: 1458849 - RNA, 19 nt, Artificial Sequence
  Description of Artificial Sequence: Synthetic oligonucleotide
  Antisense strand to SEQ ID NO: 1458848
uucagcacacauuaacauu

SEQ ID NO: 1458850 - RNA, 19 nt, Artificial Sequence
  Description of Artificial Sequence: Synthetic oligonucleotide
  Sense strand starting at position 233 of SEQ ID NO: 1244018
auguuaaugugugcugaac

SEQ ID NO: 1458851 - RNA, 19 nt, Artificial Sequence
  Description of Artificial Sequence: Synthetic oligonucleotide
  Antisense strand to SEQ ID NO: 1458850
guucagcacacauuaacau

SEQ ID NO: 1458852 - RNA, 19 nt, Artificial Sequence
  Description of Artificial Sequence: Synthetic oligonucleotide
  Sense strand starting at position 275 of SEQ ID NO: 1244018
gugagaagccuacguucau

SEQ ID NO: 1458853 - RNA, 19 nt, Artificial Sequence
  Description of Artificial Sequence: Synthetic oligonucleotide
  Antisense strand to SEQ ID NO: 1458852
augaacguaggcuucucac

SEQ ID NO: 1458854 - RNA, 19 nt, Artificial Sequence
  Description of Artificial Sequence: Synthetic oligonucleotide
  Sense strand starting at position 364 of SEQ ID NO: 1244018
uaaggaaagugaugccuaa

SEQ ID NO: 1458855 - RNA, 19 nt, Artificial Sequence
  Description of Artificial Sequence: Synthetic oligonucleotide
  Antisense strand to SEQ ID NO: 1458854
uuaggcaucacuuuccuua

SEQ ID NO: 1458856 - RNA, 19 nt, Artificial Sequence
  Description of Artificial Sequence: Synthetic oligonucleotide
  Sense strand starting at position 393 of SEQ ID NO: 1244018
uucucuguccauggucaua

SEQ ID NO: 1458857 - RNA, 19 nt, Artificial Sequence
  Description of Artificial Sequence: Synthetic oligonucleotide
  Antisense strand to SEQ ID NO: 1458856
uaugaccauggacagagaa

SEQ ID NO: 1458858 - RNA, 19 nt, Artificial Sequence
  Description of Artificial Sequence: Synthetic oligonucleotide
  Sense strand starting at position 494 of SEQ ID NO: 1244018
cuaauuuccugugggcuga

SEQ ID NO: 1458859 - RNA, 19 nt, Artificial Sequence
  Description of Artificial Sequence: Synthetic oligonucleotide
  Antisense strand to SEQ ID NO: 1458858
ucagcccacaggaaauuag

SEQ ID NO: 1458860 - RNA, 19 nt, Artificial Sequence
  Description of Artificial Sequence: Synthetic oligonucleotide
  Sense strand starting at position 507 of SEQ ID NO: 1244018
ggcugaguuguguguuuca

SEQ ID NO: 1458861 - RNA, 19 nt, Artificial Sequence
  Description of Artificial Sequence: Synthetic oligonucleotide
  Antisense strand to SEQ ID NO: 1458860
ugaaacacacaacucagcc

SEQ ID NO: 1458862 - RNA, 19 nt, Artificial Sequence
  Description of Artificial Sequence: Synthetic oligonucleotide
  Sense strand starting at position 510 of SEQ ID NO: 1244018
ugaguuguguguuucagag

SEQ ID NO: 1458863 - RNA, 19 nt, Artificial Sequence
  Description of Artificial Sequence: Synthetic oligonucleotide
  Antisense strand to SEQ ID NO: 1458862
cucugaaacacacaacuca

SEQ ID NO: 1458864 - RNA, 19 nt, Artificial Sequence
  Description of Artificial Sequence: Synthetic oligonucleotide
  Sense strand starting at position 512 of SEQ ID NO: 1244018
aguuguguguuucagagga

SEQ ID NO: 1458865 - RNA, 19 nt, Artificial Sequence
  Description of Artificial Sequence: Synthetic oligonucleotide
  Antisense strand to SEQ ID NO: 1458864
uccucugaaacacacaacu

SEQ ID NO: 1458866 - RNA, 19 nt, Artificial Sequence
  Description of Artificial Sequence: Synthetic oligonucleotide
  Sense strand starting at position 516 of SEQ ID NO: 1244018
guguguuucagaggagggu

SEQ ID NO: 1458867 - RNA, 19 nt, Artificial Sequence
  Description of Artificial Sequence: Synthetic oligonucleotide
  Antisense strand to SEQ ID NO: 1458866
acccuccucugaaacacac

SEQ ID NO: 1458868 - RNA, 19 nt, Artificial Sequence
  Description of Artificial Sequence: Synthetic oligonucleotide
  Sense strand starting at position 762 of SEQ ID NO: 1244018
agaugaggguuccaggaga

SEQ ID NO: 1458869 - RNA, 19 nt, Artificial Sequence
  Description of Artificial Sequence: Synthetic oligonucleotide
  Antisense strand to SEQ ID NO: 1458868
ucuccuggaacccucaucu

SEQ ID NO: 1458870 - RNA, 19 nt, Artificial Sequence
  Description of Artificial Sequence: Synthetic oligonucleotide
  Sense strand starting at position 890 of SEQ ID NO: 1244018
gccggcugucuucuuauaa

SEQ ID NO: 1458871 - RNA, 19 nt, Artificial Sequence
  Description of Artificial Sequence: Synthetic oligonucleotide
  Antisense strand to SEQ ID NO: 1458870
uuauaagaagacagccggc

SEQ ID NO: 1458872 - RNA, 19 nt, Artificial Sequence
  Description of Artificial Sequence: Synthetic oligonucleotide
  Sense strand starting at position 891 of SEQ ID NO: 1244018
ccggcugucuucuuauaau

SEQ ID NO: 1458873 - RNA, 19 nt, Artificial Sequence
  Description of Artificial Sequence: Synthetic oligonucleotide
  Antisense strand to SEQ ID NO: 1458872
auuauaagaagacagccgg

SEQ ID NO: 1458874 - RNA, 19 nt, Artificial Sequence
  Description of Artificial Sequence: Synthetic oligonucleotide
  Sense strand starting at position 1138 of SEQ ID NO: 1244018
uccaucaggucauuacaua

SEQ ID NO: 1458875 - RNA, 19 nt, Artificial Sequence
  Description of Artificial Sequence: Synthetic oligonucleotide
  Antisense strand to SEQ ID NO: 1458874
uauguaaugaccugaugga

SEQ ID NO: 1458876 - RNA, 19 nt, Artificial Sequence
  Description of Artificial Sequence: Synthetic oligonucleotide
  Sense strand starting at position 1214 of SEQ ID NO: 1244018
uggagagcuugugagaaag

SEQ ID NO: 1458877 - RNA, 19 nt, Artificial Sequence
  Description of Artificial Sequence: Synthetic oligonucleotide
  Antisense strand to SEQ ID NO: 1458876
cuuucucacaagcucucca

SEQ ID NO: 1458878 - RNA, 19 nt, Artificial Sequence
  Description of Artificial Sequence: Synthetic oligonucleotide
  Sense strand starting at position 1216 of SEQ ID NO: 1244018
gagagcuugugagaaagaa

SEQ ID NO: 1458879 - RNA, 19 nt, Artificial Sequence
  Description of Artificial Sequence: Synthetic oligonucleotide
  Antisense strand to SEQ ID NO: 1458878
uucuuucucacaagcucuc

SEQ ID NO: 1458880 - RNA, 19 nt, Artificial Sequence
  Description of Artificial Sequence: Synthetic oligonucleotide
  Sense strand starting at position 1235 of SEQ ID NO: 1244018
augggauccuuugagaagu

SEQ ID NO: 1458881 - RNA, 19 nt, Artificial Sequence
  Description of Artificial Sequence: Synthetic oligonucleotide
  Antisense strand to SEQ ID NO: 1458880
acuucucaaaggaucccau

SEQ ID NO: 1458882 - RNA, 19 nt, Artificial Sequence
  Description of Artificial Sequence: Synthetic oligonucleotide
  Sense strand starting at position 1237 of SEQ ID NO: 1244018
gggauccuuugagaaguga

SEQ ID NO: 1458883 - RNA, 19 nt, Artificial Sequence
  Description of Artificial Sequence: Synthetic oligonucleotide
  Antisense strand to SEQ ID NO: 1458882
ucacuucucaaaggauccc

SEQ ID NO: 1458884 - RNA, 19 nt, Artificial Sequence
  Description of Artificial Sequence: Synthetic oligonucleotide
  Sense strand starting at position 1320 of SEQ ID NO: 1244018
gcugucuaggguuagagua

SEQ ID NO: 1458885 - RNA, 19 nt, Artificial Sequence
  Description of Artificial Sequence: Synthetic oligonucleotide
  Antisense strand to SEQ ID NO: 1458884
uacucuaacccuagacagc

SEQ ID NO: 1458886 - RNA, 19 nt, Artificial Sequence
  Description of Artificial Sequence: Synthetic oligonucleotide
  Sense strand starting at position 1322 of SEQ ID NO: 1244018
ugucuaggguuagaguauu

SEQ ID NO: 1458887 - RNA, 19 nt, Artificial Sequence
  Description of Artificial Sequence: Synthetic oligonucleotide
  Antisense strand to SEQ ID NO: 1458886
aauacucuaacccuagaca

SEQ ID NO: 1458888 - RNA, 19 nt, Artificial Sequence
  Description of Artificial Sequence: Synthetic oligonucleotide
  Sense strand starting at position 1328 of SEQ ID NO: 1244018
ggguuagaguauugggaug

SEQ ID NO: 1458889 - RNA, 19 nt, Artificial Sequence
  Description of Artificial Sequence: Synthetic oligonucleotide
  Antisense strand to SEQ ID NO: 1458888
caucccaauacucuaaccc

SEQ ID NO: 1458890 - RNA, 19 nt, Artificial Sequence
  Description of Artificial Sequence: Synthetic oligonucleotide
  Sense strand starting at position 1330 of SEQ ID NO: 1244018
guuagaguauugggaugca

SEQ ID NO: 1458891 - RNA, 19 nt, Artificial Sequence
  Description of Artificial Sequence: Synthetic oligonucleotide
  Antisense strand to SEQ ID NO: 1458890
ugcaucccaauacucuaac

SEQ ID NO: 1458892 - RNA, 19 nt, Artificial Sequence
  Description of Artificial Sequence: Synthetic oligonucleotide
  Sense strand starting at position 1333 of SEQ ID NO: 1244018
agaguauugggaugcagag

SEQ ID NO: 1458893 - RNA, 19 nt, Artificial Sequence
  Description of Artificial Sequence: Synthetic oligonucleotide
  Antisense strand to SEQ ID NO: 1458892
cucugcaucccaauacucu

SEQ ID NO: 1458894 - RNA, 19 nt, Artificial Sequence
  Description of Artificial Sequence: Synthetic oligonucleotide
  Sense strand starting at position 2092 of SEQ ID NO: 1244018
ggagaugaaccuugcuucu

SEQ ID NO: 1458895 - RNA, 19 nt, Artificial Sequence
  Description of Artificial Sequence: Synthetic oligonucleotide
  Antisense strand to SEQ ID NO: 1458894
agaagcaagguucaucucc

SEQ ID NO: 1458896 - RNA, 19 nt, Artificial Sequence
  Description of Artificial Sequence: Synthetic oligonucleotide
  Sense strand starting at position 2094 of SEQ ID NO: 1244018
agaugaaccuugcuucuuu

SEQ ID NO: 1458897 - RNA, 19 nt, Artificial Sequence
  Description of Artificial Sequence: Synthetic oligonucleotide
  Antisense strand to SEQ ID NO: 1458896
aaagaagcaagguucaucu

SEQ ID NO: 1458898 - RNA, 19 nt, Artificial Sequence
  Description of Artificial Sequence: Synthetic oligonucleotide
  Sense strand starting at position 2170 of SEQ ID NO: 1244018
gaggcaucuccgugcucau

SEQ ID NO: 1458899 - RNA, 19 nt, Artificial Sequence
  Description of Artificial Sequence: Synthetic oligonucleotide
  Antisense strand to SEQ ID NO: 1458898
augagcacggagaugccuc

SEQ ID NO: 1458900 - RNA, 19 nt, Artificial Sequence
  Description of Artificial Sequence: Synthetic oligonucleotide
  Sense strand starting at position 2267 of SEQ ID NO: 1244018
aggacuuugugacuuggga

SEQ ID NO: 1458901 - RNA, 19 nt, Artificial Sequence
  Description of Artificial Sequence: Synthetic oligonucleotide
  Antisense strand to SEQ ID NO: 1458900
ucccaagucacaaaguccu

SEQ ID NO: 1458902 - RNA, 19 nt, Artificial Sequence
  Description of Artificial Sequence: Synthetic oligonucleotide
  Sense strand starting at position 2269 of SEQ ID NO: 1244018
gacuuugugacuugggaug

SEQ ID NO: 1458903 - RNA, 19 nt, Artificial Sequence
  Description of Artificial Sequence: Synthetic oligonucleotide
  Antisense strand to SEQ ID NO: 1458902
caucccaagucacaaaguc

SEQ ID NO: 1458904 - RNA, 19 nt, Artificial Sequence
  Description of Artificial Sequence: Synthetic oligonucleotide
  Sense strand starting at position 2845 of SEQ ID NO: 1244018
gggcgcaguacgagaagua

SEQ ID NO: 1458905 - RNA, 19 nt, Artificial Sequence
  Description of Artificial Sequence: Synthetic oligonucleotide
  Antisense strand to SEQ ID NO: 1458904
uacuucucguacugcgccc

SEQ ID NO: 1458906 - RNA, 19 nt, Artificial Sequence
  Description of Artificial Sequence: Synthetic oligonucleotide
  Sense strand starting at position 3826 of SEQ ID NO: 1244018
ggacuucuacccggccaua

SEQ ID NO: 1458907 - RNA, 19 nt, Artificial Sequence
  Description of Artificial Sequence: Synthetic oligonucleotide
  Antisense strand to SEQ ID NO: 1458906
uauggccggguagaagucc

SEQ ID NO: 1458908 - RNA, 19 nt, Artificial Sequence
  Description of Artificial Sequence: Synthetic oligonucleotide
  Sense strand starting at position 3957 of SEQ ID NO: 1244018
ggaggaaggccuugucugu

SEQ ID NO: 1458909 - RNA, 19 nt, Artificial Sequence
  Description of Artificial Sequence: Synthetic oligonucleotide
  Antisense strand to SEQ ID NO: 1458908
acagacaaggccuuccucc

SEQ ID NO: 1458910 - RNA, 19 nt, Artificial Sequence
  Description of Artificial Sequence: Synthetic oligonucleotide
  Sense strand starting at position 3962 of SEQ ID NO: 1244018
aaggccuugucuguugaga

SEQ ID NO: 1458911 - RNA, 19 nt, Artificial Sequence
  Description of Artificial Sequence: Synthetic oligonucleotide
  Antisense strand to SEQ ID NO: 1458910
ucucaacagacaaggccuu

SEQ ID NO: 1458912 - RNA, 19 nt, Artificial Sequence
  Description of Artificial Sequence: Synthetic oligonucleotide
  Sense strand starting at position 304 of SEQ ID NO: 1244019
agacgagagcucugacucu

SEQ ID NO: 1458913 - RNA, 19 nt, Artificial Sequence
  Description of Artificial Sequence: Synthetic oligonucleotide
  Antisense strand to SEQ ID NO: 1458912
agagucagagcucucgucu

SEQ ID NO: 1458914 - RNA, 19 nt, Artificial Sequence
  Description of Artificial Sequence: Synthetic oligonucleotide
  Sense strand starting at position 319 of SEQ ID NO: 1244019
cucugacuccauggaucau

SEQ ID NO: 1458915 - RNA, 19 nt, Artificial Sequence
  Description of Artificial Sequence: Synthetic oligonucleotide
  Antisense strand to SEQ ID NO: 1458914
augauccauggagucagag

SEQ ID NO: 1458916 - RNA, 19 nt, Artificial Sequence
  Description of Artificial Sequence: Synthetic oligonucleotide
  Sense strand starting at position 431 of SEQ ID NO: 1244019
ggugacaccaaguguuacu

SEQ ID NO: 1458917 - RNA, 19 nt, Artificial Sequence
  Description of Artificial Sequence: Synthetic oligonucleotide
  Antisense strand to SEQ ID NO: 1458916
aguaacacuuggugucacc

SEQ ID NO: 1458918 - RNA, 19 nt, Artificial Sequence
  Description of Artificial Sequence: Synthetic oligonucleotide
  Sense strand starting at position 502 of SEQ ID NO: 1244019
cgcauuacacauggaauca

SEQ ID NO: 1458919 - RNA, 19 nt, Artificial Sequence
  Description of Artificial Sequence: Synthetic oligonucleotide
  Antisense strand to SEQ ID NO: 1458918
ugauuccauguguaaugcg

SEQ ID NO: 1458920 - RNA, 19 nt, Artificial Sequence
  Description of Artificial Sequence: Synthetic oligonucleotide
  Sense strand starting at position 572 of SEQ ID NO: 1244019
cuaccagguguuugcugaa

SEQ ID NO: 1458921 - RNA, 19 nt, Artificial Sequence
  Description of Artificial Sequence: Synthetic oligonucleotide
  Antisense strand to SEQ ID NO: 1458920
uucagcaaacaccugguag

SEQ ID NO: 1458922 - RNA, 19 nt, Artificial Sequence
  Description of Artificial Sequence: Synthetic oligonucleotide
  Sense strand starting at position 611 of SEQ ID NO: 1244019
gugucucacgagucuguuu

SEQ ID NO: 1458923 - RNA, 19 nt, Artificial Sequence
  Description of Artificial Sequence: Synthetic oligonucleotide
  Antisense strand to SEQ ID NO: 1458922
aaacagacucgugagacac

SEQ ID NO: 1458924 - RNA, 19 nt, Artificial Sequence
  Description of Artificial Sequence: Synthetic oligonucleotide
  Sense strand starting at position 616 of SEQ ID NO: 1244019
ucacgagucuguuuccaac

SEQ ID NO: 1458925 - RNA, 19 nt, Artificial Sequence
  Description of Artificial Sequence: Synthetic oligonucleotide
  Antisense strand to SEQ ID NO: 1458924
guuggaaacagacucguga

SEQ ID NO: 1458926 - RNA, 19 nt, Artificial Sequence
  Description of Artificial Sequence: Synthetic oligonucleotide
  Sense strand starting at position 618 of SEQ ID NO: 1244019
acgagucuguuuccaacaa

SEQ ID NO: 1458927 - RNA, 19 nt, Artificial Sequence
  Description of Artificial Sequence: Synthetic oligonucleotide
  Antisense strand to SEQ ID NO: 1458926
uuguuggaaacagacucgu

SEQ ID NO: 1458928 - RNA, 19 nt, Artificial Sequence
  Description of Artificial Sequence: Synthetic oligonucleotide
  Sense strand starting at position 719 of SEQ ID NO: 1244019
cccugaugugguagagugu

SEQ ID NO: 1458929 - RNA, 19 nt, Artificial Sequence
  Description of Artificial Sequence: Synthetic oligonucleotide
  Antisense strand to SEQ ID NO: 1458928
acacucuaccacaucaggg

SEQ ID NO: 1458930 - RNA, 19 nt, Artificial Sequence
  Description of Artificial Sequence: Synthetic oligonucleotide
  Sense strand starting at position 728 of SEQ ID NO: 1244019
gguagagugucuguucaug

SEQ ID NO: 1458931 - RNA, 19 nt, Artificial Sequence
  Description of Artificial Sequence: Synthetic oligonucleotide
  Antisense strand to SEQ ID NO: 1458930
caugaacagacacucuacc

SEQ ID NO: 1458932 - RNA, 19 nt, Artificial Sequence
  Description of Artificial Sequence: Synthetic oligonucleotide
  Sense strand starting at position 833 of SEQ ID NO: 1244019
uuccuaugguguucucaua

SEQ ID NO: 1458933 - RNA, 19 nt, Artificial Sequence
  Description of Artificial Sequence: Synthetic oligonucleotide
  Antisense strand to SEQ ID NO: 1458932
uaugagaacaccauaggaa

SEQ ID NO: 1458934 - RNA, 19 nt, Artificial Sequence
  Description of Artificial Sequence: Synthetic oligonucleotide
  Sense strand starting at position 846 of SEQ ID NO: 1244019
cucauagcaccguggagaa

SEQ ID NO: 1458935 - RNA, 19 nt, Artificial Sequence
  Description of Artificial Sequence: Synthetic oligonucleotide
  Antisense strand to SEQ ID NO: 1458934
uucuccacggugcuaugag

SEQ ID NO: 1458936 - RNA, 19 nt, Artificial Sequence
  Description of Artificial Sequence: Synthetic oligonucleotide
  Sense strand starting at position 848 of SEQ ID NO: 1244019
cauagcaccguggagaauu

SEQ ID NO: 1458937 - RNA, 19 nt, Artificial Sequence
  Description of Artificial Sequence: Synthetic oligonucleotide
  Antisense strand to SEQ ID NO: 1458936
aauucuccacggugcuaug

SEQ ID NO: 1458938 - RNA, 19 nt, Artificial Sequence
  Description of Artificial Sequence: Synthetic oligonucleotide
  Sense strand starting at position 916 of SEQ ID NO: 1244019
gaucuuaaccagcagugga

SEQ ID NO: 1458939 - RNA, 19 nt, Artificial Sequence
  Description of Artificial Sequence: Synthetic oligonucleotide
  Antisense strand to SEQ ID NO: 1458938
uccacugcugguuaagauc

SEQ ID NO: 1458940 - RNA, 19 nt, Artificial Sequence
  Description of Artificial Sequence: Synthetic oligonucleotide
  Sense strand starting at position 1160 of SEQ ID NO: 1244019
acuugaugaccacggugau

SEQ ID NO: 1458941 - RNA, 19 nt, Artificial Sequence
  Description of Artificial Sequence: Synthetic oligonucleotide
  Antisense strand to SEQ ID NO: 1458940
aucaccguggucaucaagu

SEQ ID NO: 1458942 - RNA, 19 nt, Artificial Sequence
  Description of Artificial Sequence: Synthetic oligonucleotide
  Sense strand starting at position 1161 of SEQ ID NO: 1244019
cuugaugaccacggugaua

SEQ ID NO: 1458943 - RNA, 19 nt, Artificial Sequence
  Description of Artificial Sequence: Synthetic oligonucleotide
  Antisense strand to SEQ ID NO: 1458942
uaucaccguggucaucaag

SEQ ID NO: 1458944 - RNA, 19 nt, Artificial Sequence
  Description of Artificial Sequence: Synthetic oligonucleotide
  Sense strand starting at position 1163 of SEQ ID NO: 1244019
ugaugaccacggugauaau

SEQ ID NO: 1458945 - RNA, 19 nt, Artificial Sequence
  Description of Artificial Sequence: Synthetic oligonucleotide
  Antisense strand to SEQ ID NO: 1458944
auuaucaccguggucauca

SEQ ID NO: 1458946 - RNA, 19 nt, Artificial Sequence
  Description of Artificial Sequence: Synthetic oligonucleotide
  Sense strand starting at position 1313 of SEQ ID NO: 1244019
ccauucuuuccaggagaca

SEQ ID NO: 1458947 - RNA, 19 nt, Artificial Sequence
  Description of Artificial Sequence: Synthetic oligonucleotide
  Antisense strand to SEQ ID NO: 1458946
ugucuccuggaaagaaugg

SEQ ID NO: 1458948 - RNA, 19 nt, Artificial Sequence
  Description of Artificial Sequence: Synthetic oligonucleotide
  Sense strand starting at position 1347 of SEQ ID NO: 1244019
guacucucaacuggagaga

SEQ ID NO: 1458949 - RNA, 19 nt, Artificial Sequence
  Description of Artificial Sequence: Synthetic oligonucleotide
  Antisense strand to SEQ ID NO: 1458948
ucucuccaguugagaguac

SEQ ID NO: 1458950 - RNA, 19 nt, Artificial Sequence
  Description of Artificial Sequence: Synthetic oligonucleotide
  Sense strand starting at position 1403 of SEQ ID NO: 1244019
acccuauuagcgcaucaga

SEQ ID NO: 1458951 - RNA, 19 nt, Artificial Sequence
  Description of Artificial Sequence: Synthetic oligonucleotide
  Antisense strand to SEQ ID NO: 1458950
ucugaugcgcuaauagggu

SEQ ID NO: 1458952 - RNA, 19 nt, Artificial Sequence
  Description of Artificial Sequence: Synthetic oligonucleotide
  Sense strand starting at position 1561 of SEQ ID NO: 1244019
cccauagacuugguuaaug

SEQ ID NO: 1458953 - RNA, 19 nt, Artificial Sequence
  Description of Artificial Sequence: Synthetic oligonucleotide
  Antisense strand to SEQ ID NO: 1458952
cauuaaccaagucuauggg

SEQ ID NO: 1458954 - RNA, 19 nt, Artificial Sequence
  Description of Artificial Sequence: Synthetic oligonucleotide
  Sense strand starting at position 2209 of SEQ ID NO: 1244019
ggaaguuccgaaugguuca

SEQ ID NO: 1458955 - RNA, 19 nt, Artificial Sequence
  Description of Artificial Sequence: Synthetic oligonucleotide
  Antisense strand to SEQ ID NO: 1458954
ugaaccauucggaacuucc

SEQ ID NO: 1458956 - RNA, 19 nt, Artificial Sequence
  Description of Artificial Sequence: Synthetic oligonucleotide
  Sense strand starting at position 2338 of SEQ ID NO: 1244019
aggcuuccuguccacauaa

SEQ ID NO: 1458957 - RNA, 19 nt, Artificial Sequence
  Description of Artificial Sequence: Synthetic oligonucleotide
  Antisense strand to SEQ ID NO: 1458956
uuauguggacaggaagccu

SEQ ID NO: 1458958 - RNA, 19 nt, Artificial Sequence
  Description of Artificial Sequence: Synthetic oligonucleotide
  Sense strand starting at position 3000 of SEQ ID NO: 1244019
aagccauuaguuugugaug

SEQ ID NO: 1458959 - RNA, 19 nt, Artificial Sequence
  Description of Artificial Sequence: Synthetic oligonucleotide
  Antisense strand to SEQ ID NO: 1458958
caucacaaacuaauggcuu

SEQ ID NO: 1458960 - RNA, 19 nt, Artificial Sequence
  Description of Artificial Sequence: Synthetic oligonucleotide
  Sense strand starting at position 3001 of SEQ ID NO: 1244019
agccauuaguuugugaugu

SEQ ID NO: 1458961 - RNA, 19 nt, Artificial Sequence
  Description of Artificial Sequence: Synthetic oligonucleotide
  Antisense strand to SEQ ID NO: 1458960
acaucacaaacuaauggcu

SEQ ID NO: 1458962 - RNA, 19 nt, Artificial Sequence
  Description of Artificial Sequence: Synthetic oligonucleotide
  Sense strand starting at position 3025 of SEQ ID NO: 1244019
ggguccuuccagugaagac

SEQ ID NO: 1458963 - RNA, 19 nt, Artificial Sequence
  Description of Artificial Sequence: Synthetic oligonucleotide
  Antisense strand to SEQ ID NO: 1458962
gucuucacuggaaggaccc

SEQ ID NO: 1458964 - RNA, 19 nt, Artificial Sequence
  Description of Artificial Sequence: Synthetic oligonucleotide
  Sense strand starting at position 3159 of SEQ ID NO: 1244019
gccgcagagucuccagaau

SEQ ID NO: 1458965 - RNA, 19 nt, Artificial Sequence
  Description of Artificial Sequence: Synthetic oligonucleotide
  Antisense strand to SEQ ID NO: 1458964
auucuggagacucugcggc

SEQ ID NO: 1458966 - RNA, 19 nt, Artificial Sequence
  Description of Artificial Sequence: Synthetic oligonucleotide
  Sense strand starting at position 3174 of SEQ ID NO: 1244019
gaaugugcucaccaggaau

SEQ ID NO: 1458967 - RNA, 19 nt, Artificial Sequence
  Description of Artificial Sequence: Synthetic oligonucleotide
  Antisense strand to SEQ ID NO: 1458966
auuccuggugagcacauuc

SEQ ID NO: 1458968 - RNA, 19 nt, Artificial Sequence
  Description of Artificial Sequence: Synthetic oligonucleotide
  Sense strand starting at position 3177 of SEQ ID NO: 1244019
ugugcucaccaggaauaga

SEQ ID NO: 1458969 - RNA, 19 nt, Artificial Sequence
  Description of Artificial Sequence: Synthetic oligonucleotide
  Antisense strand to SEQ ID NO: 1458968
ucuauuccuggugagcaca

SEQ ID NO: 1458970 - RNA, 19 nt, Artificial Sequence
  Description of Artificial Sequence: Synthetic oligonucleotide
  Sense strand starting at position 3324 of SEQ ID NO: 1244019
ggcggauuacgagguaaag

SEQ ID NO: 1458971 - RNA, 19 nt, Artificial Sequence
  Description of Artificial Sequence: Synthetic oligonucleotide
  Antisense strand to SEQ ID NO: 1458970
cuuuaccucguaauccgcc

SEQ ID NO: 1458972 - RNA, 19 nt, Artificial Sequence
  Description of Artificial Sequence: Synthetic oligonucleotide
  Sense strand starting at position 3563 of SEQ ID NO: 1244019
aaauccauggucuguugaa

SEQ ID NO: 1458973 - RNA, 19 nt, Artificial Sequence
  Description of Artificial Sequence: Synthetic oligonucleotide
  Antisense strand to SEQ ID NO: 1458972
uucaacagaccauggauuu

SEQ ID NO: 1458974 - RNA, 19 nt, Artificial Sequence
  Description of Artificial Sequence: Synthetic oligonucleotide
  Sense strand starting at position 3564 of SEQ ID NO: 1244019
aauccauggucuguugaaa

SEQ ID NO: 1458975 - RNA, 19 nt, Artificial Sequence
  Description of Artificial Sequence: Synthetic oligonucleotide
  Antisense strand to SEQ ID NO: 1458974
uuucaacagaccauggauu

SEQ ID NO: 1458976 - RNA, 19 nt, Artificial Sequence
  Description of Artificial Sequence: Synthetic oligonucleotide
  Sense strand starting at position 3630 of SEQ ID NO: 1244019
cuuauaguggcuugguaaa

SEQ ID NO: 1458977 - RNA, 19 nt, Artificial Sequence
  Description of Artificial Sequence: Synthetic oligonucleotide
  Antisense strand to SEQ ID NO: 1458976
uuuaccaagccacuauaag

SEQ ID NO: 1458978 - RNA, 19 nt, Artificial Sequence
  Description of Artificial Sequence: Synthetic oligonucleotide
  Sense strand starting at position 3632 of SEQ ID NO: 1244019
uauaguggcuugguaaaga

SEQ ID NO: 1458979 - RNA, 19 nt, Artificial Sequence
  Description of Artificial Sequence: Synthetic oligonucleotide
  Antisense strand to SEQ ID NO: 1458978
ucuuuaccaagccacuaua

SEQ ID NO: 1458980 - RNA, 19 nt, Artificial Sequence
  Description of Artificial Sequence: Synthetic oligonucleotide
  Sense strand starting at position 3688 of SEQ ID NO: 1244019
gccuuuauguguuuaauua

SEQ ID NO: 1458981 - RNA, 19 nt, Artificial Sequence
  Description of Artificial Sequence: Synthetic oligonucleotide
  Antisense strand to SEQ ID NO: 1458980
uaauuaaacacauaaaggc

SEQ ID NO: 1458982 - RNA, 19 nt, Artificial Sequence
  Description of Artificial Sequence: Synthetic oligonucleotide
  Sense strand starting at position 3716 of SEQ ID NO: 1244019
agcgaauuccucuugcugu

SEQ ID NO: 1458983 - RNA, 19 nt, Artificial Sequence
  Description of Artificial Sequence: Synthetic oligonucleotide
  Antisense strand to SEQ ID NO: 1458982
acagcaagaggaauucgcu

SEQ ID NO: 1458984 - RNA, 19 nt, Artificial Sequence
  Description of Artificial Sequence: Synthetic oligonucleotide
  Sense strand starting at position 3741 of SEQ ID NO: 1244019
gcgcaaacuuaauuucuga

SEQ ID NO: 1458985 - RNA, 19 nt, Artificial Sequence
  Description of Artificial Sequence: Synthetic oligonucleotide
  Antisense strand to SEQ ID NO: 1458984
ucagaaauuaaguuugcgc

SEQ ID NO: 1458986 - RNA, 19 nt, Artificial Sequence
  Description of Artificial Sequence: Synthetic oligonucleotide
  Sense strand starting at position 3748 of SEQ ID NO: 1244019
cuuaauuucugaggaggua

SEQ ID NO: 1458987 - RNA, 19 nt, Artificial Sequence
  Description of Artificial Sequence: Synthetic oligonucleotide
  Antisense strand to SEQ ID NO: 1458986
uaccuccucagaaauuaag

SEQ ID NO: 1458988 - RNA, 19 nt, Artificial Sequence
  Description of Artificial Sequence: Synthetic oligonucleotide
  Sense strand starting at position 3764 of SEQ ID NO: 1244019
guaguaaguuacaggguga

SEQ ID NO: 1458989 - RNA, 19 nt, Artificial Sequence
  Description of Artificial Sequence: Synthetic oligonucleotide
  Antisense strand to SEQ ID NO: 1458988
ucacccuguaacuuacuac

SEQ ID NO: 1458990 - RNA, 19 nt, Artificial Sequence
  Description of Artificial Sequence: Synthetic oligonucleotide
  Sense strand starting at position 3765 of SEQ ID NO: 1244019
uaguaaguuacagggugau

SEQ ID NO: 1458991 - RNA, 19 nt, Artificial Sequence
  Description of Artificial Sequence: Synthetic oligonucleotide
  Antisense strand to SEQ ID NO: 1458990
aucacccuguaacuuacua

SEQ ID NO: 1458992 - RNA, 19 nt, Artificial Sequence
  Description of Artificial Sequence: Synthetic oligonucleotide
  Sense strand starting at position 17 of SEQ ID NO: 1244020
uguuguggcucacagacaa

SEQ ID NO: 1458993 - RNA, 19 nt, Artificial Sequence
  Description of Artificial Sequence: Synthetic oligonucleotide
  Antisense strand to SEQ ID NO: 1458992
uugucugugagccacaaca

SEQ ID NO: 1458994 - RNA, 19 nt, Artificial Sequence
  Description of Artificial Sequence: Synthetic oligonucleotide
  Sense strand starting at position 34 of SEQ ID NO: 1244020
aaguguuccugggccggaa

SEQ ID NO: 1458995 - RNA, 19 nt, Artificial Sequence
  Description of Artificial Sequence: Synthetic oligonucleotide
  Antisense strand to SEQ ID NO: 1458994
uuccggcccaggaacacuu

SEQ ID NO: 1458996 - RNA, 19 nt, Artificial Sequence
  Description of Artificial Sequence: Synthetic oligonucleotide
  Sense strand starting at position 268 of SEQ ID NO: 1244020
uggagaaguugucugccuu

SEQ ID NO: 1458997 - RNA, 19 nt, Artificial Sequence
  Description of Artificial Sequence: Synthetic oligonucleotide
  Antisense strand to SEQ ID NO: 1458996
aaggcagacaacuucucca

SEQ ID NO: 1458998 - RNA, 19 nt, Artificial Sequence
  Description of Artificial Sequence: Synthetic oligonucleotide
  Sense strand starting at position 269 of SEQ ID NO: 1244020
ggagaaguugucugccuuc

SEQ ID NO: 1458999 - RNA, 19 nt, Artificial Sequence
  Description of Artificial Sequence: Synthetic oligonucleotide
  Antisense strand to SEQ ID NO: 1458998
gaaggcagacaacuucucc

SEQ ID NO: 1459000 - RNA, 19 nt, Artificial Sequence
  Description of Artificial Sequence: Synthetic oligonucleotide
  Sense strand starting at position 427 of SEQ ID NO: 1244020
uggucauggccuugacauu

SEQ ID NO: 1459001 - RNA, 19 nt, Artificial Sequence
  Description of Artificial Sequence: Synthetic oligonucleotide
  Antisense strand to SEQ ID NO: 1459000
aaugucaaggccaugacca

SEQ ID NO: 1459002 - RNA, 19 nt, Artificial Sequence
  Description of Artificial Sequence: Synthetic oligonucleotide
  Sense strand starting at position 436 of SEQ ID NO: 1244020
ccuugacauucucagggaa

SEQ ID NO: 1459003 - RNA, 19 nt, Artificial Sequence
  Description of Artificial Sequence: Synthetic oligonucleotide
  Antisense strand to SEQ ID NO: 1459002
uucccugagaaugucaagg

SEQ ID NO: 1459004 - RNA, 19 nt, Artificial Sequence
  Description of Artificial Sequence: Synthetic oligonucleotide
  Sense strand starting at position 438 of SEQ ID NO: 1244020
uugacauucucagggaagu

SEQ ID NO: 1459005 - RNA, 19 nt, Artificial Sequence
  Description of Artificial Sequence: Synthetic oligonucleotide
  Antisense strand to SEQ ID NO: 1459004
acuucccugagaaugucaa

SEQ ID NO: 1459006 - RNA, 19 nt, Artificial Sequence
  Description of Artificial Sequence: Synthetic oligonucleotide
  Sense strand starting at position 439 of SEQ ID NO: 1244020
ugacauucucagggaagua

SEQ ID NO: 1459007 - RNA, 19 nt, Artificial Sequence
  Description of Artificial Sequence: Synthetic oligonucleotide
  Antisense strand to SEQ ID NO: 1459006
uacuucccugagaauguca

SEQ ID NO: 1459008 - RNA, 19 nt, Artificial Sequence
  Description of Artificial Sequence: Synthetic oligonucleotide
  Sense strand starting at position 561 of SEQ ID NO: 1244020
cucucaccaucugugagaa

SEQ ID NO: 1459009 - RNA, 19 nt, Artificial Sequence
  Description of Artificial Sequence: Synthetic oligonucleotide
  Antisense strand to SEQ ID NO: 1459008
uucucacagauggugagag

SEQ ID NO: 1459010 - RNA, 19 nt, Artificial Sequence
  Description of Artificial Sequence: Synthetic oligonucleotide
  Sense strand starting at position 563 of SEQ ID NO: 1244020
cucaccaucugugagaaca

SEQ ID NO: 1459011 - RNA, 19 nt, Artificial Sequence
  Description of Artificial Sequence: Synthetic oligonucleotide
  Antisense strand to SEQ ID NO: 1459010
uguucucacagauggugag

SEQ ID NO: 1459012 - RNA, 19 nt, Artificial Sequence
  Description of Artificial Sequence: Synthetic oligonucleotide
  Sense strand starting at position 720 of SEQ ID NO: 1244020
uggcuuguuucaggugaaa

SEQ ID NO: 1459013 - RNA, 19 nt, Artificial Sequence
  Description of Artificial Sequence: Synthetic oligonucleotide
  Antisense strand to SEQ ID NO: 1459012
uuucaccugaaacaagcca

SEQ ID NO: 1459014 - RNA, 19 nt, Artificial Sequence
  Description of Artificial Sequence: Synthetic oligonucleotide
  Sense strand starting at position 755 of SEQ ID NO: 1244020
ugugguuagcucggcucaa

SEQ ID NO: 1459015 - RNA, 19 nt, Artificial Sequence
  Description of Artificial Sequence: Synthetic oligonucleotide
  Antisense strand to SEQ ID NO: 1459014
uugagccgagcuaaccaca

SEQ ID NO: 1459016 - RNA, 19 nt, Artificial Sequence
  Description of Artificial Sequence: Synthetic oligonucleotide
  Sense strand starting at position 756 of SEQ ID NO: 1244020
gugguuagcucggcucaaa

SEQ ID NO: 1459017 - RNA, 19 nt, Artificial Sequence
  Description of Artificial Sequence: Synthetic oligonucleotide
  Antisense strand to SEQ ID NO: 1459016
uuugagccgagcuaaccac

SEQ ID NO: 1459018 - RNA, 19 nt, Artificial Sequence
  Description of Artificial Sequence: Synthetic oligonucleotide
  Sense strand starting at position 1039 of SEQ ID NO: 1244020
agugccugcggcugauauu

SEQ ID NO: 1459019 - RNA, 19 nt, Artificial Sequence
  Description of Artificial Sequence: Synthetic oligonucleotide
  Antisense strand to SEQ ID NO: 1459018
aauaucagccgcaggcacu

SEQ ID NO: 1459020 - RNA, 19 nt, Artificial Sequence
  Description of Artificial Sequence: Synthetic oligonucleotide
  Sense strand starting at position 1167 of SEQ ID NO: 1244020
gguguagccacuuguacuu

SEQ ID NO: 1459021 - RNA, 19 nt, Artificial Sequence
  Description of Artificial Sequence: Synthetic oligonucleotide
  Antisense strand to SEQ ID NO: 1459020
aaguacaaguggcuacacc

SEQ ID NO: 1459022 - RNA, 19 nt, Artificial Sequence
  Description of Artificial Sequence: Synthetic oligonucleotide
  Sense strand starting at position 1188 of SEQ ID NO: 1244020
ggucaaagguguguacaca

SEQ ID NO: 1459023 - RNA, 19 nt, Artificial Sequence
  Description of Artificial Sequence: Synthetic oligonucleotide
  Antisense strand to SEQ ID NO: 1459022
uguguacacaccuuugacc

SEQ ID NO: 1459024 - RNA, 19 nt, Artificial Sequence
  Description of Artificial Sequence: Synthetic oligonucleotide
  Sense strand starting at position 1359 of SEQ ID NO: 1244020
augccugucucauucuuga

SEQ ID NO: 1459025 - RNA, 19 nt, Artificial Sequence
  Description of Artificial Sequence: Synthetic oligonucleotide
  Antisense strand to SEQ ID NO: 1459024
ucaagaaugagacaggcau

SEQ ID NO: 1459026 - RNA, 19 nt, Artificial Sequence
  Description of Artificial Sequence: Synthetic oligonucleotide
  Sense strand starting at position 1696 of SEQ ID NO: 1244020
ggcagccaucccugaguca

SEQ ID NO: 1459027 - RNA, 19 nt, Artificial Sequence
  Description of Artificial Sequence: Synthetic oligonucleotide
  Antisense strand to SEQ ID NO: 1459026
ugacucagggauggcugcc

SEQ ID NO: 1459028 - RNA, 19 nt, Artificial Sequence
  Description of Artificial Sequence: Synthetic oligonucleotide
  Sense strand starting at position 2369 of SEQ ID NO: 1244020
ccacgaucuccaggcuuaa

SEQ ID NO: 1459029 - RNA, 19 nt, Artificial Sequence
  Description of Artificial Sequence: Synthetic oligonucleotide
  Antisense strand to SEQ ID NO: 1459028
uuaagccuggagaucgugg

SEQ ID NO: 1459030 - RNA, 19 nt, Artificial Sequence
  Description of Artificial Sequence: Synthetic oligonucleotide
  Sense strand starting at position 2516 of SEQ ID NO: 1244020
ccaggaagugccuguacuu

SEQ ID NO: 1459031 - RNA, 19 nt, Artificial Sequence
  Description of Artificial Sequence: Synthetic oligonucleotide
  Antisense strand to SEQ ID NO: 1459030
aaguacaggcacuuccugg

SEQ ID NO: 1459032 - RNA, 19 nt, Artificial Sequence
  Description of Artificial Sequence: Synthetic oligonucleotide
  Sense strand starting at position 2591 of SEQ ID NO: 1244020
ggacuuaguuuccucaugu

SEQ ID NO: 1459033 - RNA, 19 nt, Artificial Sequence
  Description of Artificial Sequence: Synthetic oligonucleotide
  Antisense strand to SEQ ID NO: 1459032
acaugaggaaacuaagucc

SEQ ID NO: 1459034 - RNA, 19 nt, Artificial Sequence
  Description of Artificial Sequence: Synthetic oligonucleotide
  Sense strand starting at position 2592 of SEQ ID NO: 1244020
gacuuaguuuccucaugug

SEQ ID NO: 1459035 - RNA, 19 nt, Artificial Sequence
  Description of Artificial Sequence: Synthetic oligonucleotide
  Antisense strand to SEQ ID NO: 1459034
cacaugaggaaacuaaguc

SEQ ID NO: 1459036 - RNA, 19 nt, Artificial Sequence
  Description of Artificial Sequence: Synthetic oligonucleotide
  Sense strand starting at position 2595 of SEQ ID NO: 1244020
uuaguuuccucauguguug

SEQ ID NO: 1459037 - RNA, 19 nt, Artificial Sequence
  Description of Artificial Sequence: Synthetic oligonucleotide
  Antisense strand to SEQ ID NO: 1459036
caacacaugaggaaacuaa

SEQ ID NO: 1459038 - RNA, 19 nt, Artificial Sequence
  Description of Artificial Sequence: Synthetic oligonucleotide
  Sense strand starting at position 2716 of SEQ ID NO: 1244020
cccgacuaccugggauuau

SEQ ID NO: 1459039 - RNA, 19 nt, Artificial Sequence
  Description of Artificial Sequence: Synthetic oligonucleotide
  Antisense strand to SEQ ID NO: 1459038
auaaucccagguagucggg

SEQ ID NO: 1459040 - RNA, 19 nt, Artificial Sequence
  Description of Artificial Sequence: Synthetic oligonucleotide
  Sense strand starting at position 2717 of SEQ ID NO: 1244020
ccgacuaccugggauuaua

SEQ ID NO: 1459041 - RNA, 19 nt, Artificial Sequence
  Description of Artificial Sequence: Synthetic oligonucleotide
  Antisense strand to SEQ ID NO: 1459040
uauaaucccagguagucgg

SEQ ID NO: 1459042 - RNA, 19 nt, Artificial Sequence
  Description of Artificial Sequence: Synthetic oligonucleotide
  Sense strand starting at position 3170 of SEQ ID NO: 1244020
gguaucagcuucucagagu

SEQ ID NO: 1459043 - RNA, 19 nt, Artificial Sequence
  Description of Artificial Sequence: Synthetic oligonucleotide
  Antisense strand to SEQ ID NO: 1459042
acucugagaagcugauacc

SEQ ID NO: 1459044 - RNA, 19 nt, Artificial Sequence
  Description of Artificial Sequence: Synthetic oligonucleotide
  Sense strand starting at position 3173 of SEQ ID NO: 1244020
aucagcuucucagaguguu

SEQ ID NO: 1459045 - RNA, 19 nt, Artificial Sequence
  Description of Artificial Sequence: Synthetic oligonucleotide
  Antisense strand to SEQ ID NO: 1459044
aacacucugagaagcugau

SEQ ID NO: 1459046 - RNA, 19 nt, Artificial Sequence
  Description of Artificial Sequence: Synthetic oligonucleotide
  Sense strand starting at position 3247 of SEQ ID NO: 1244020
uuucuaagguugucaccau

SEQ ID NO: 1459047 - RNA, 19 nt, Artificial Sequence
  Description of Artificial Sequence: Synthetic oligonucleotide
  Antisense strand to SEQ ID NO: 1459046
auggugacaaccuuagaaa

SEQ ID NO: 1459048 - RNA, 19 nt, Artificial Sequence
  Description of Artificial Sequence: Synthetic oligonucleotide
  Sense strand starting at position 3254 of SEQ ID NO: 1244020
gguugucaccaugagcaaa

SEQ ID NO: 1459049 - RNA, 19 nt, Artificial Sequence
  Description of Artificial Sequence: Synthetic oligonucleotide
  Antisense strand to SEQ ID NO: 1459048
uuugcucauggugacaacc

SEQ ID NO: 1459050 - RNA, 19 nt, Artificial Sequence
  Description of Artificial Sequence: Synthetic oligonucleotide
  Sense strand starting at position 3265 of SEQ ID NO: 1244020
ugagcaaauuaacaaagaa

SEQ ID NO: 1459051 - RNA, 19 nt, Artificial Sequence
  Description of Artificial Sequence: Synthetic oligonucleotide
  Antisense strand to SEQ ID NO: 1459050
uucuuuguuaauuugcuca

SEQ ID NO: 1459052 - RNA, 19 nt, Artificial Sequence
  Description of Artificial Sequence: Synthetic oligonucleotide
  Sense strand starting at position 3287 of SEQ ID NO: 1244020
acguguagcucgcagcaua

SEQ ID NO: 1459053 - RNA, 19 nt, Artificial Sequence
  Description of Artificial Sequence: Synthetic oligonucleotide
  Antisense strand to SEQ ID NO: 1459052
uaugcugcgagcuacacgu

SEQ ID NO: 1459054 - RNA, 19 nt, Artificial Sequence
  Description of Artificial Sequence: Synthetic oligonucleotide
  Sense strand starting at position 3317 of SEQ ID NO: 1244020
cagugaguggcagguuauu

SEQ ID NO: 1459055 - RNA, 19 nt, Artificial Sequence
  Description of Artificial Sequence: Synthetic oligonucleotide
  Antisense strand to SEQ ID NO: 1459054
aauaaccugccacucacug

SEQ ID NO: 1459056 - RNA, 19 nt, Artificial Sequence
  Description of Artificial Sequence: Synthetic oligonucleotide
  Sense strand starting at position 3326 of SEQ ID NO: 1244020
gcagguuauuauuccguuu

SEQ ID NO: 1459057 - RNA, 19 nt, Artificial Sequence
  Description of Artificial Sequence: Synthetic oligonucleotide
  Antisense strand to SEQ ID NO: 1459056
aaacggaauaauaaccugc

SEQ ID NO: 1459058 - RNA, 19 nt, Artificial Sequence
  Description of Artificial Sequence: Synthetic oligonucleotide
  Sense strand starting at position 3354 of SEQ ID NO: 1244020
uugugcgccagguuauuau

SEQ ID NO: 1459059 - RNA, 19 nt, Artificial Sequence
  Description of Artificial Sequence: Synthetic oligonucleotide
  Antisense strand to SEQ ID NO: 1459058
auaauaaccuggcgcacaa

SEQ ID NO: 1459060 - RNA, 19 nt, Artificial Sequence
  Description of Artificial Sequence: Synthetic oligonucleotide
  Sense strand starting at position 3361 of SEQ ID NO: 1244020
ccagguuauuauucccacu

SEQ ID NO: 1459061 - RNA, 19 nt, Artificial Sequence
  Description of Artificial Sequence: Synthetic oligonucleotide
  Antisense strand to SEQ ID NO: 1459060
agugggaauaauaaccugg

SEQ ID NO: 1459062 - RNA, 19 nt, Artificial Sequence
  Description of Artificial Sequence: Synthetic oligonucleotide
  Sense strand starting at position 3363 of SEQ ID NO: 1244020
agguuauuauucccacuua

SEQ ID NO: 1459063 - RNA, 19 nt, Artificial Sequence
  Description of Artificial Sequence: Synthetic oligonucleotide
  Antisense strand to SEQ ID NO: 1459062
uaagugggaauaauaaccu

SEQ ID NO: 1459064 - RNA, 19 nt, Artificial Sequence
  Description of Artificial Sequence: Synthetic oligonucleotide
  Sense strand starting at position 3364 of SEQ ID NO: 1244020
gguuauuauucccacuuag

SEQ ID NO: 1459065 - RNA, 19 nt, Artificial Sequence
  Description of Artificial Sequence: Synthetic oligonucleotide
  Antisense strand to SEQ ID NO: 1459064
cuaagugggaauaauaacc

SEQ ID NO: 1459066 - RNA, 19 nt, Artificial Sequence
  Description of Artificial Sequence: Synthetic oligonucleotide
  Sense strand starting at position 3513 of SEQ ID NO: 1244020
gcuguuauaugcccaacca

SEQ ID NO: 1459067 - RNA, 19 nt, Artificial Sequence
  Description of Artificial Sequence: Synthetic oligonucleotide
  Antisense strand to SEQ ID NO: 1459066
ugguugggcauauaacagc

SEQ ID NO: 1459068 - RNA, 19 nt, Artificial Sequence
  Description of Artificial Sequence: Synthetic oligonucleotide
  Sense strand starting at position 3704 of SEQ ID NO: 1244020
gaccuaagagguuggaugu

SEQ ID NO: 1459069 - RNA, 19 nt, Artificial Sequence
  Description of Artificial Sequence: Synthetic oligonucleotide
  Antisense strand to SEQ ID NO: 1459068
acauccaaccucuuagguc

SEQ ID NO: 1459070 - RNA, 19 nt, Artificial Sequence
  Description of Artificial Sequence: Synthetic oligonucleotide
  Sense strand starting at position 3964 of SEQ ID NO: 1244020
ggcugaaccgcgcaguauu

SEQ ID NO: 1459071 - RNA, 19 nt, Artificial Sequence
  Description of Artificial Sequence: Synthetic oligonucleotide
  Antisense strand to SEQ ID NO: 1459070
aauacugcgcgguucagcc

SEQ ID NO: 1459072 - RNA, 19 nt, Artificial Sequence
  Description of Artificial Sequence: Synthetic oligonucleotide
  Sense strand starting at position 67 of SEQ ID NO: 1244021
uggucauggccuugacauu

SEQ ID NO: 1459073 - RNA, 19 nt, Artificial Sequence
  Description of Artificial Sequence: Synthetic oligonucleotide
  Antisense strand to SEQ ID NO: 1459072
aaugucaaggccaugacca

SEQ ID NO: 1459074 - RNA, 19 nt, Artificial Sequence
  Description of Artificial Sequence: Synthetic oligonucleotide
  Sense strand starting at position 76 of SEQ ID NO: 1244021
ccuugacauucucagggaa

SEQ ID NO: 1459075 - RNA, 19 nt, Artificial Sequence
  Description of Artificial Sequence: Synthetic oligonucleotide
  Antisense strand to SEQ ID NO: 1459074
uucccugagaaugucaagg

SEQ ID NO: 1459076 - RNA, 19 nt, Artificial Sequence
  Description of Artificial Sequence: Synthetic oligonucleotide
  Sense strand starting at position 78 of SEQ ID NO: 1244021
uugacauucucagggaagu

SEQ ID NO: 1459077 - RNA, 19 nt, Artificial Sequence
  Description of Artificial Sequence: Synthetic oligonucleotide
  Antisense strand to SEQ ID NO: 1459076
acuucccugagaaugucaa

SEQ ID NO: 1459078 - RNA, 19 nt, Artificial Sequence
  Description of Artificial Sequence: Synthetic oligonucleotide
  Sense strand starting at position 79 of SEQ ID NO: 1244021
ugacauucucagggaagua

SEQ ID NO: 1459079 - RNA, 19 nt, Artificial Sequence
  Description of Artificial Sequence: Synthetic oligonucleotide
  Antisense strand to SEQ ID NO: 1459078
uacuucccugagaauguca

SEQ ID NO: 1459080 - RNA, 19 nt, Artificial Sequence
  Description of Artificial Sequence: Synthetic oligonucleotide
  Sense strand starting at position 201 of SEQ ID NO: 1244021
cucucaccaucugugagaa

SEQ ID NO: 1459081 - RNA, 19 nt, Artificial Sequence
  Description of Artificial Sequence: Synthetic oligonucleotide
  Antisense strand to SEQ ID NO: 1459080
uucucacagauggugagag

SEQ ID NO: 1459082 - RNA, 19 nt, Artificial Sequence
  Description of Artificial Sequence: Synthetic oligonucleotide
  Sense strand starting at position 203 of SEQ ID NO: 1244021
cucaccaucugugagaaca

SEQ ID NO: 1459083 - RNA, 19 nt, Artificial Sequence
  Description of Artificial Sequence: Synthetic oligonucleotide
  Antisense strand to SEQ ID NO: 1459082
uguucucacagauggugag

SEQ ID NO: 1459084 - RNA, 19 nt, Artificial Sequence
  Description of Artificial Sequence: Synthetic oligonucleotide
  Sense strand starting at position 360 of SEQ ID NO: 1244021
uggcuuguuucaggugaaa

SEQ ID NO: 1459085 - RNA, 19 nt, Artificial Sequence
  Description of Artificial Sequence: Synthetic oligonucleotide
  Antisense strand to SEQ ID NO: 1459084
uuucaccugaaacaagcca

SEQ ID NO: 1459086 - RNA, 19 nt, Artificial Sequence
  Description of Artificial Sequence: Synthetic oligonucleotide
  Sense strand starting at position 395 of SEQ ID NO: 1244021
ugugguuagcucggcucaa

SEQ ID NO: 1459087 - RNA, 19 nt, Artificial Sequence
  Description of Artificial Sequence: Synthetic oligonucleotide
  Antisense strand to SEQ ID NO: 1459086
uugagccgagcuaaccaca

SEQ ID NO: 1459088 - RNA, 19 nt, Artificial Sequence
  Description of Artificial Sequence: Synthetic oligonucleotide
  Sense strand starting at position 396 of SEQ ID NO: 1244021
gugguuagcucggcucaaa

SEQ ID NO: 1459089 - RNA, 19 nt, Artificial Sequence
  Description of Artificial Sequence: Synthetic oligonucleotide
  Antisense strand to SEQ ID NO: 1459088
uuugagccgagcuaaccac

SEQ ID NO: 1459090 - RNA, 19 nt, Artificial Sequence
  Description of Artificial Sequence: Synthetic oligonucleotide
  Sense strand starting at position 679 of SEQ ID NO: 1244021
agugccugcggcugauauu

SEQ ID NO: 1459091 - RNA, 19 nt, Artificial Sequence
  Description of Artificial Sequence: Synthetic oligonucleotide
  Antisense strand to SEQ ID NO: 1459090
aauaucagccgcaggcacu

SEQ ID NO: 1459092 - RNA, 19 nt, Artificial Sequence
  Description of Artificial Sequence: Synthetic oligonucleotide
  Sense strand starting at position 807 of SEQ ID NO: 1244021
gguguagccacuuguacuu

SEQ ID NO: 1459093 - RNA, 19 nt, Artificial Sequence
  Description of Artificial Sequence: Synthetic oligonucleotide
  Antisense strand to SEQ ID NO: 1459092
aaguacaaguggcuacacc

SEQ ID NO: 1459094 - RNA, 19 nt, Artificial Sequence
  Description of Artificial Sequence: Synthetic oligonucleotide
  Sense strand starting at position 828 of SEQ ID NO: 1244021
ggucaaagguguguacaca

SEQ ID NO: 1459095 - RNA, 19 nt, Artificial Sequence
  Description of Artificial Sequence: Synthetic oligonucleotide
  Antisense strand to SEQ ID NO: 1459094
uguguacacaccuuugacc

SEQ ID NO: 1459096 - RNA, 19 nt, Artificial Sequence
  Description of Artificial Sequence: Synthetic oligonucleotide
  Sense strand starting at position 999 of SEQ ID NO: 1244021
augccugucucauucuuga

SEQ ID NO: 1459097 - RNA, 19 nt, Artificial Sequence
  Description of Artificial Sequence: Synthetic oligonucleotide
  Antisense strand to SEQ ID NO: 1459096
ucaagaaugagacaggcau

SEQ ID NO: 1459098 - RNA, 19 nt, Artificial Sequence
  Description of Artificial Sequence: Synthetic oligonucleotide
  Sense strand starting at position 1336 of SEQ ID NO: 1244021
ggcagccaucccugaguca

SEQ ID NO: 1459099 - RNA, 19 nt, Artificial Sequence
  Description of Artificial Sequence: Synthetic oligonucleotide
  Antisense strand to SEQ ID NO: 1459098
ugacucagggauggcugcc

SEQ ID NO: 1459100 - RNA, 19 nt, Artificial Sequence
  Description of Artificial Sequence: Synthetic oligonucleotide
  Sense strand starting at position 2009 of SEQ ID NO: 1244021
ccacgaucuccaggcuuaa

SEQ ID NO: 1459101 - RNA, 19 nt, Artificial Sequence
  Description of Artificial Sequence: Synthetic oligonucleotide
  Antisense strand to SEQ ID NO: 1459100
uuaagccuggagaucgugg

SEQ ID NO: 1459102 - RNA, 19 nt, Artificial Sequence
  Description of Artificial Sequence: Synthetic oligonucleotide
  Sense strand starting at position 2156 of SEQ ID NO: 1244021
ccaggaagugccuguacuu

SEQ ID NO: 1459103 - RNA, 19 nt, Artificial Sequence
  Description of Artificial Sequence: Synthetic oligonucleotide
  Antisense strand to SEQ ID NO: 1459102
aaguacaggcacuuccugg

SEQ ID NO: 1459104 - RNA, 19 nt, Artificial Sequence
  Description of Artificial Sequence: Synthetic oligonucleotide
  Sense strand starting at position 2231 of SEQ ID NO: 1244021
ggacuuaguuuccucaugu

SEQ ID NO: 1459105 - RNA, 19 nt, Artificial Sequence
  Description of Artificial Sequence: Synthetic oligonucleotide
  Antisense strand to SEQ ID NO: 1459104
acaugaggaaacuaagucc

SEQ ID NO: 1459106 - RNA, 19 nt, Artificial Sequence
  Description of Artificial Sequence: Synthetic oligonucleotide
  Sense strand starting at position 2232 of SEQ ID NO: 1244021
gacuuaguuuccucaugug

SEQ ID NO: 1459107 - RNA, 19 nt, Artificial Sequence
  Description of Artificial Sequence: Synthetic oligonucleotide
  Antisense strand to SEQ ID NO: 1459106
cacaugaggaaacuaaguc

SEQ ID NO: 1459108 - RNA, 19 nt, Artificial Sequence
  Description of Artificial Sequence: Synthetic oligonucleotide
  Sense strand starting at position 2235 of SEQ ID NO: 1244021
uuaguuuccucauguguug

SEQ ID NO: 1459109 - RNA, 19 nt, Artificial Sequence
  Description of Artificial Sequence: Synthetic oligonucleotide
  Antisense strand to SEQ ID NO: 1459108
caacacaugaggaaacuaa

SEQ ID NO: 1459110 - RNA, 19 nt, Artificial Sequence
  Description of Artificial Sequence: Synthetic oligonucleotide
  Sense strand starting at position 2356 of SEQ ID NO: 1244021
cccgacuaccugggauuau

SEQ ID NO: 1459111 - RNA, 19 nt, Artificial Sequence
  Description of Artificial Sequence: Synthetic oligonucleotide
  Antisense strand to SEQ ID NO: 1459110
auaaucccagguagucggg

SEQ ID NO: 1459112 - RNA, 19 nt, Artificial Sequence
  Description of Artificial Sequence: Synthetic oligonucleotide
  Sense strand starting at position 2357 of SEQ ID NO: 1244021
ccgacuaccugggauuaua

SEQ ID NO: 1459113 - RNA, 19 nt, Artificial Sequence
  Description of Artificial Sequence: Synthetic oligonucleotide
  Antisense strand to SEQ ID NO: 1459112
uauaaucccagguagucgg

SEQ ID NO: 1459114 - RNA, 19 nt, Artificial Sequence
  Description of Artificial Sequence: Synthetic oligonucleotide
  Sense strand starting at position 2810 of SEQ ID NO: 1244021
gguaucagcuucucagagu

SEQ ID NO: 1459115 - RNA, 19 nt, Artificial Sequence
  Description of Artificial Sequence: Synthetic oligonucleotide
  Antisense strand to SEQ ID NO: 1459114
acucugagaagcugauacc

SEQ ID NO: 1459116 - RNA, 19 nt, Artificial Sequence
  Description of Artificial Sequence: Synthetic oligonucleotide
  Sense strand starting at position 2813 of SEQ ID NO: 1244021
aucagcuucucagaguguu

SEQ ID NO: 1459117 - RNA, 19 nt, Artificial Sequence
  Description of Artificial Sequence: Synthetic oligonucleotide
  Antisense strand to SEQ ID NO: 1459116
aacacucugagaagcugau

SEQ ID NO: 1459118 - RNA, 19 nt, Artificial Sequence
  Description of Artificial Sequence: Synthetic oligonucleotide
  Sense strand starting at position 2887 of SEQ ID NO: 1244021
uuucuaagguugucaccau

SEQ ID NO: 1459119 - RNA, 19 nt, Artificial Sequence
  Description of Artificial Sequence: Synthetic oligonucleotide
  Antisense strand to SEQ ID NO: 1459118
auggugacaaccuuagaaa

SEQ ID NO: 1459120 - RNA, 19 nt, Artificial Sequence
  Description of Artificial Sequence: Synthetic oligonucleotide
  Sense strand starting at position 2894 of SEQ ID NO: 1244021
gguugucaccaugagcaaa

SEQ ID NO: 1459121 - RNA, 19 nt, Artificial Sequence
  Description of Artificial Sequence: Synthetic oligonucleotide
  Antisense strand to SEQ ID NO: 1459120
uuugcucauggugacaacc

SEQ ID NO: 1459122 - RNA, 19 nt, Artificial Sequence
  Description of Artificial Sequence: Synthetic oligonucleotide
  Sense strand starting at position 2905 of SEQ ID NO: 1244021
ugagcaaauuaacaaagaa

SEQ ID NO: 1459123 - RNA, 19 nt, Artificial Sequence
  Description of Artificial Sequence: Synthetic oligonucleotide
  Antisense strand to SEQ ID NO: 1459122
uucuuuguuaauuugcuca

SEQ ID NO: 1459124 - RNA, 19 nt, Artificial Sequence
  Description of Artificial Sequence: Synthetic oligonucleotide
  Sense strand starting at position 2927 of SEQ ID NO: 1244021
acguguagcucgcagcaua

SEQ ID NO: 1459125 - RNA, 19 nt, Artificial Sequence
  Description of Artificial Sequence: Synthetic oligonucleotide
  Antisense strand to SEQ ID NO: 1459124
uaugcugcgagcuacacgu

SEQ ID NO: 1459126 - RNA, 19 nt, Artificial Sequence
  Description of Artificial Sequence: Synthetic oligonucleotide
  Sense strand starting at position 2957 of SEQ ID NO: 1244021
cagugaguggcagguuauu

SEQ ID NO: 1459127 - RNA, 19 nt, Artificial Sequence
  Description of Artificial Sequence: Synthetic oligonucleotide
  Antisense strand to SEQ ID NO: 1459126
aauaaccugccacucacug

SEQ ID NO: 1459128 - RNA, 19 nt, Artificial Sequence
  Description of Artificial Sequence: Synthetic oligonucleotide
  Sense strand starting at position 2966 of SEQ ID NO: 1244021
gcagguuauuauuccguuu

SEQ ID NO: 1459129 - RNA, 19 nt, Artificial Sequence
  Description of Artificial Sequence: Synthetic oligonucleotide
  Antisense strand to SEQ ID NO: 1459128
aaacggaauaauaaccugc

SEQ ID NO: 1459130 - RNA, 19 nt, Artificial Sequence
  Description of Artificial Sequence: Synthetic oligonucleotide
  Sense strand starting at position 2994 of SEQ ID NO: 1244021
uugugcgccagguuauuau

SEQ ID NO: 1459131 - RNA, 19 nt, Artificial Sequence
  Description of Artificial Sequence: Synthetic oligonucleotide
  Antisense strand to SEQ ID NO: 1459130
auaauaaccuggcgcacaa

SEQ ID NO: 1459132 - RNA, 19 nt, Artificial Sequence
  Description of Artificial Sequence: Synthetic oligonucleotide
  Sense strand starting at position 3001 of SEQ ID NO: 1244021
ccagguuauuauucccacu

SEQ ID NO: 1459133 - RNA, 19 nt, Artificial Sequence
  Description of Artificial Sequence: Synthetic oligonucleotide
  Antisense strand to SEQ ID NO: 1459132
agugggaauaauaaccugg

SEQ ID NO: 1459134 - RNA, 19 nt, Artificial Sequence
  Description of Artificial Sequence: Synthetic oligonucleotide
  Sense strand starting at position 3003 of SEQ ID NO: 1244021
agguuauuauucccacuua

SEQ ID NO: 1459135 - RNA, 19 nt, Artificial Sequence
  Description of Artificial Sequence: Synthetic oligonucleotide
  Antisense strand to SEQ ID NO: 1459134
uaagugggaauaauaaccu

SEQ ID NO: 1459136 - RNA, 19 nt, Artificial Sequence
  Description of Artificial Sequence: Synthetic oligonucleotide
  Sense strand starting at position 3004 of SEQ ID NO: 1244021
gguuauuauucccacuuag

SEQ ID NO: 1459137 - RNA, 19 nt, Artificial Sequence
  Description of Artificial Sequence: Synthetic oligonucleotide
  Antisense strand to SEQ ID NO: 1459136
cuaagugggaauaauaacc

SEQ ID NO: 1459138 - RNA, 19 nt, Artificial Sequence
  Description of Artificial Sequence: Synthetic oligonucleotide
  Sense strand starting at position 3153 of SEQ ID NO: 1244021
gcuguuauaugcccaacca

SEQ ID NO: 1459139 - RNA, 19 nt, Artificial Sequence
  Description of Artificial Sequence: Synthetic oligonucleotide
  Antisense strand to SEQ ID NO: 1459138
ugguugggcauauaacagc

SEQ ID NO: 1459140 - RNA, 19 nt, Artificial Sequence
  Description of Artificial Sequence: Synthetic oligonucleotide
  Sense strand starting at position 3344 of SEQ ID NO: 1244021
gaccuaagagguuggaugu

SEQ ID NO: 1459141 - RNA, 19 nt, Artificial Sequence
  Description of Artificial Sequence: Synthetic oligonucleotide
  Antisense strand to SEQ ID NO: 1459140
acauccaaccucuuagguc

SEQ ID NO: 1459142 - RNA, 19 nt, Artificial Sequence
  Description of Artificial Sequence: Synthetic oligonucleotide
  Sense strand starting at position 3604 of SEQ ID NO: 1244021
ggcugaaccgcgcaguauu

SEQ ID NO: 1459143 - RNA, 19 nt, Artificial Sequence
  Description of Artificial Sequence: Synthetic oligonucleotide
  Antisense strand to SEQ ID NO: 1459142
aauacugcgcgguucagcc

SEQ ID NO: 1459144 - RNA, 19 nt, Artificial Sequence
  Description of Artificial Sequence: Synthetic oligonucleotide
  Sense strand starting at position 1245 of SEQ ID NO: 1244022
aauacagggcuuggaauau

SEQ ID NO: 1459145 - RNA, 19 nt, Artificial Sequence
  Description of Artificial Sequence: Synthetic oligonucleotide
  Antisense strand to SEQ ID NO: 1459144
auauuccaagcccuguauu

SEQ ID NO: 1459146 - RNA, 19 nt, Artificial Sequence
  Description of Artificial Sequence: Synthetic oligonucleotide
  Sense strand starting at position 1296 of SEQ ID NO: 1244022
uuacaaaugcugugggaug

SEQ ID NO: 1459147 - RNA, 19 nt, Artificial Sequence
  Description of Artificial Sequence: Synthetic oligonucleotide
  Antisense strand to SEQ ID NO: 1459146
caucccacagcauuuguaa

SEQ ID NO: 1459148 - RNA, 19 nt, Artificial Sequence
  Description of Artificial Sequence: Synthetic oligonucleotide
  Sense strand starting at position 1310 of SEQ ID NO: 1244022
ggaugcuaagcauaacaua

SEQ ID NO: 1459149 - RNA, 19 nt, Artificial Sequence
  Description of Artificial Sequence: Synthetic oligonucleotide
  Antisense strand to SEQ ID NO: 1459148
uauguuaugcuuagcaucc

SEQ ID NO: 1459150 - RNA, 19 nt, Artificial Sequence
  Description of Artificial Sequence: Synthetic oligonucleotide
  Sense strand starting at position 1651 of SEQ ID NO: 1244022
gcaugaucgcaucacuuac

SEQ ID NO: 1459151 - RNA, 19 nt, Artificial Sequence
  Description of Artificial Sequence: Synthetic oligonucleotide
  Antisense strand to SEQ ID NO: 1459150
guaagugaugcgaucaugc

SEQ ID NO: 1459152 - RNA, 19 nt, Artificial Sequence
  Description of Artificial Sequence: Synthetic oligonucleotide
  Sense strand starting at position 1760 of SEQ ID NO: 1244022
aggaguccugucggaguga

SEQ ID NO: 1459153 - RNA, 19 nt, Artificial Sequence
  Description of Artificial Sequence: Synthetic oligonucleotide
  Antisense strand to SEQ ID NO: 1459152
ucacuccgacaggacuccu

SEQ ID NO: 1459154 - RNA, 19 nt, Artificial Sequence
  Description of Artificial Sequence: Synthetic oligonucleotide
  Sense strand starting at position 1833 of SEQ ID NO: 1244022
ggagaaaggucaguccuau

SEQ ID NO: 1459155 - RNA, 19 nt, Artificial Sequence
  Description of Artificial Sequence: Synthetic oligonucleotide
  Antisense strand to SEQ ID NO: 1459154
auaggacugaccuuucucc

SEQ ID NO: 1459156 - RNA, 19 nt, Artificial Sequence
  Description of Artificial Sequence: Synthetic oligonucleotide
  Sense strand starting at position 1837 of SEQ ID NO: 1244022
aaaggucaguccuauugaa

SEQ ID NO: 1459157 - RNA, 19 nt, Artificial Sequence
  Description of Artificial Sequence: Synthetic oligonucleotide
  Antisense strand to SEQ ID NO: 1459156
uucaauaggacugaccuuu

SEQ ID NO: 1459158 - RNA, 19 nt, Artificial Sequence
  Description of Artificial Sequence: Synthetic oligonucleotide
  Sense strand starting at position 1986 of SEQ ID NO: 1244022
gugacuccagcucaagaua

SEQ ID NO: 1459159 - RNA, 19 nt, Artificial Sequence
  Description of Artificial Sequence: Synthetic oligonucleotide
  Antisense strand to SEQ ID NO: 1459158
uaucuugagcuggagucac

SEQ ID NO: 1459160 - RNA, 19 nt, Artificial Sequence
  Description of Artificial Sequence: Synthetic oligonucleotide
  Sense strand starting at position 2049 of SEQ ID NO: 1244022
augggaagugagugaauua

SEQ ID NO: 1459161 - RNA, 19 nt, Artificial Sequence
  Description of Artificial Sequence: Synthetic oligonucleotide
  Antisense strand to SEQ ID NO: 1459160
uaauucacucacuucccau

SEQ ID NO: 1459162 - RNA, 19 nt, Artificial Sequence
  Description of Artificial Sequence: Synthetic oligonucleotide
  Sense strand starting at position 2059 of SEQ ID NO: 1244022
agugaauuaguccaaggcu

SEQ ID NO: 1459163 - RNA, 19 nt, Artificial Sequence
  Description of Artificial Sequence: Synthetic oligonucleotide
  Antisense strand to SEQ ID NO: 1459162
agccuuggacuaauucacu

SEQ ID NO: 1459164 - RNA, 19 nt, Artificial Sequence
  Description of Artificial Sequence: Synthetic oligonucleotide
  Sense strand starting at position 2062 of SEQ ID NO: 1244022
gaauuaguccaaggcuuag

SEQ ID NO: 1459165 - RNA, 19 nt, Artificial Sequence
  Description of Artificial Sequence: Synthetic oligonucleotide
  Antisense strand to SEQ ID NO: 1459164
cuaagccuuggacuaauuc

SEQ ID NO: 1459166 - RNA, 19 nt, Artificial Sequence
  Description of Artificial Sequence: Synthetic oligonucleotide
  Sense strand starting at position 2138 of SEQ ID NO: 1244022
ggguuuaugucgucccuag

SEQ ID NO: 1459167 - RNA, 19 nt, Artificial Sequence
  Description of Artificial Sequence: Synthetic oligonucleotide
  Antisense strand to SEQ ID NO: 1459166
cuagggacgacauaaaccc

SEQ ID NO: 1459168 - RNA, 19 nt, Artificial Sequence
  Description of Artificial Sequence: Synthetic oligonucleotide
  Sense strand starting at position 2274 of SEQ ID NO: 1244022
uagggcucuguuugucuau

SEQ ID NO: 1459169 - RNA, 19 nt, Artificial Sequence
  Description of Artificial Sequence: Synthetic oligonucleotide
  Antisense strand to SEQ ID NO: 1459168
auagacaaacagagcccua

SEQ ID NO: 1459170 - RNA, 19 nt, Artificial Sequence
  Description of Artificial Sequence: Synthetic oligonucleotide
  Sense strand starting at position 2283 of SEQ ID NO: 1244022
guuugucuaucuuuagcuu

SEQ ID NO: 1459171 - RNA, 19 nt, Artificial Sequence
  Description of Artificial Sequence: Synthetic oligonucleotide
  Antisense strand to SEQ ID NO: 1459170
aagcuaaagauagacaaac

SEQ ID NO: 1459172 - RNA, 19 nt, Artificial Sequence
  Description of Artificial Sequence: Synthetic oligonucleotide
  Sense strand starting at position 2291 of SEQ ID NO: 1244022
aucuuuagcuuuccuggaa

SEQ ID NO: 1459173 - RNA, 19 nt, Artificial Sequence
  Description of Artificial Sequence: Synthetic oligonucleotide
  Antisense strand to SEQ ID NO: 1459172
uuccaggaaagcuaaagau

SEQ ID NO: 1459174 - RNA, 19 nt, Artificial Sequence
  Description of Artificial Sequence: Synthetic oligonucleotide
  Sense strand starting at position 2292 of SEQ ID NO: 1244022
ucuuuagcuuuccuggaaa

SEQ ID NO: 1459175 - RNA, 19 nt, Artificial Sequence
  Description of Artificial Sequence: Synthetic oligonucleotide
  Antisense strand to SEQ ID NO: 1459174
uuuccaggaaagcuaaaga

SEQ ID NO: 1459176 - RNA, 19 nt, Artificial Sequence
  Description of Artificial Sequence: Synthetic oligonucleotide
  Sense strand starting at position 2336 of SEQ ID NO: 1244022
uucccagacucucagagaa

SEQ ID NO: 1459177 - RNA, 19 nt, Artificial Sequence
  Description of Artificial Sequence: Synthetic oligonucleotide
  Antisense strand to SEQ ID NO: 1459176
uucucugagagucugggaa

SEQ ID NO: 1459178 - RNA, 19 nt, Artificial Sequence
  Description of Artificial Sequence: Synthetic oligonucleotide
  Sense strand starting at position 2338 of SEQ ID NO: 1244022
cccagacucucagagaaag

SEQ ID NO: 1459179 - RNA, 19 nt, Artificial Sequence
  Description of Artificial Sequence: Synthetic oligonucleotide
  Antisense strand to SEQ ID NO: 1459178
cuuucucugagagucuggg

SEQ ID NO: 1459180 - RNA, 19 nt, Artificial Sequence
  Description of Artificial Sequence: Synthetic oligonucleotide
  Sense strand starting at position 2612 of SEQ ID NO: 1244022
acaguccuugguugaggau

SEQ ID NO: 1459181 - RNA, 19 nt, Artificial Sequence
  Description of Artificial Sequence: Synthetic oligonucleotide
  Antisense strand to SEQ ID NO: 1459180
auccucaaccaaggacugu

SEQ ID NO: 1459182 - RNA, 19 nt, Artificial Sequence
  Description of Artificial Sequence: Synthetic oligonucleotide
  Sense strand starting at position 2651 of SEQ ID NO: 1244022
aaugucuuugcccagggua

SEQ ID NO: 1459183 - RNA, 19 nt, Artificial Sequence
  Description of Artificial Sequence: Synthetic oligonucleotide
  Antisense strand to SEQ ID NO: 1459182
uacccugggcaaagacauu

SEQ ID NO: 1459184 - RNA, 19 nt, Artificial Sequence
  Description of Artificial Sequence: Synthetic oligonucleotide
  Sense strand starting at position 2653 of SEQ ID NO: 1244022
ugucuuugcccaggguaau

SEQ ID NO: 1459185 - RNA, 19 nt, Artificial Sequence
  Description of Artificial Sequence: Synthetic oligonucleotide
  Antisense strand to SEQ ID NO: 1459184
auuacccugggcaaagaca

SEQ ID NO: 1459186 - RNA, 19 nt, Artificial Sequence
  Description of Artificial Sequence: Synthetic oligonucleotide
  Sense strand starting at position 2654 of SEQ ID NO: 1244022
gucuuugcccaggguaaua

SEQ ID NO: 1459187 - RNA, 19 nt, Artificial Sequence
  Description of Artificial Sequence: Synthetic oligonucleotide
  Antisense strand to SEQ ID NO: 1459186
uauuacccugggcaaagac

SEQ ID NO: 1459188 - RNA, 19 nt, Artificial Sequence
  Description of Artificial Sequence: Synthetic oligonucleotide
  Sense strand starting at position 2848 of SEQ ID NO: 1244022
cucaucuauguuggagaca

SEQ ID NO: 1459189 - RNA, 19 nt, Artificial Sequence
  Description of Artificial Sequence: Synthetic oligonucleotide
  Antisense strand to SEQ ID NO: 1459188
ugucuccaacauagaugag

SEQ ID NO: 1459190 - RNA, 19 nt, Artificial Sequence
  Description of Artificial Sequence: Synthetic oligonucleotide
  Sense strand starting at position 2859 of SEQ ID NO: 1244022
uggagacacuucccaugau

SEQ ID NO: 1459191 - RNA, 19 nt, Artificial Sequence
  Description of Artificial Sequence: Synthetic oligonucleotide
  Antisense strand to SEQ ID NO: 1459190
aucaugggaagugucucca

SEQ ID NO: 1459192 - RNA, 19 nt, Artificial Sequence
  Description of Artificial Sequence: Synthetic oligonucleotide
  Sense strand starting at position 2860 of SEQ ID NO: 1244022
ggagacacuucccaugaua

SEQ ID NO: 1459193 - RNA, 19 nt, Artificial Sequence
  Description of Artificial Sequence: Synthetic oligonucleotide
  Antisense strand to SEQ ID NO: 1459192
uaucaugggaagugucucc

SEQ ID NO: 1459194 - RNA, 19 nt, Artificial Sequence
  Description of Artificial Sequence: Synthetic oligonucleotide
  Sense strand starting at position 2884 of SEQ ID NO: 1244022
gaaccaguacugugaaguc

SEQ ID NO: 1459195 - RNA, 19 nt, Artificial Sequence
  Description of Artificial Sequence: Synthetic oligonucleotide
  Antisense strand to SEQ ID NO: 1459194
gacuucacaguacugguuc

SEQ ID NO: 1459196 - RNA, 19 nt, Artificial Sequence
  Description of Artificial Sequence: Synthetic oligonucleotide
  Sense strand starting at position 2897 of SEQ ID NO: 1244022
gaagucagacuuugaaucu

SEQ ID NO: 1459197 - RNA, 19 nt, Artificial Sequence
  Description of Artificial Sequence: Synthetic oligonucleotide
  Antisense strand to SEQ ID NO: 1459196
agauucaaagucugacuuc

SEQ ID NO: 1459198 - RNA, 19 nt, Artificial Sequence
  Description of Artificial Sequence: Synthetic oligonucleotide
  Sense strand starting at position 3003 of SEQ ID NO: 1244022
gggaaaucauaguuucuac

SEQ ID NO: 1459199 - RNA, 19 nt, Artificial Sequence
  Description of Artificial Sequence: Synthetic oligonucleotide
  Antisense strand to SEQ ID NO: 1459198
guagaaacuaugauuuccc

SEQ ID NO: 1459200 - RNA, 19 nt, Artificial Sequence
  Description of Artificial Sequence: Synthetic oligonucleotide
  Sense strand starting at position 3013 of SEQ ID NO: 1244022
aguuucuacuaguuauggu

SEQ ID NO: 1459201 - RNA, 19 nt, Artificial Sequence
  Description of Artificial Sequence: Synthetic oligonucleotide
  Antisense strand to SEQ ID NO: 1459200
accauaacuaguagaaacu

SEQ ID NO: 1459202 - RNA, 19 nt, Artificial Sequence
  Description of Artificial Sequence: Synthetic oligonucleotide
  Sense strand starting at position 3022 of SEQ ID NO: 1244022
uaguuauggugguugugaa

SEQ ID NO: 1459203 - RNA, 19 nt, Artificial Sequence
  Description of Artificial Sequence: Synthetic oligonucleotide
  Antisense strand to SEQ ID NO: 1459202
uucacaaccaccauaacua

SEQ ID NO: 1459204 - RNA, 19 nt, Artificial Sequence
  Description of Artificial Sequence: Synthetic oligonucleotide
  Sense strand starting at position 3023 of SEQ ID NO: 1244022
aguuauggugguugugaag

SEQ ID NO: 1459205 - RNA, 19 nt, Artificial Sequence
  Description of Artificial Sequence: Synthetic oligonucleotide
  Antisense strand to SEQ ID NO: 1459204
cuucacaaccaccauaacu

SEQ ID NO: 1459206 - RNA, 19 nt, Artificial Sequence
  Description of Artificial Sequence: Synthetic oligonucleotide
  Sense strand starting at position 3047 of SEQ ID NO: 1244022
augagauuaugacugcagu

SEQ ID NO: 1459207 - RNA, 19 nt, Artificial Sequence
  Description of Artificial Sequence: Synthetic oligonucleotide
  Antisense strand to SEQ ID NO: 1459206
acugcagucauaaucucau

SEQ ID NO: 1459208 - RNA, 19 nt, Artificial Sequence
  Description of Artificial Sequence: Synthetic oligonucleotide
  Sense strand starting at position 3050 of SEQ ID NO: 1244022
agauuaugacugcaguguu

SEQ ID NO: 1459209 - RNA, 19 nt, Artificial Sequence
  Description of Artificial Sequence: Synthetic oligonucleotide
  Antisense strand to SEQ ID NO: 1459208
aacacugcagucauaaucu

SEQ ID NO: 1459210 - RNA, 19 nt, Artificial Sequence
  Description of Artificial Sequence: Synthetic oligonucleotide
  Sense strand starting at position 3517 of SEQ ID NO: 1244022
uuuggugagguuuaaauua

SEQ ID NO: 1459211 - RNA, 19 nt, Artificial Sequence
  Description of Artificial Sequence: Synthetic oligonucleotide
  Antisense strand to SEQ ID NO: 1459210
uaauuuaaaccucaccaaa

SEQ ID NO: 1459212 - RNA, 19 nt, Artificial Sequence
  Description of Artificial Sequence: Synthetic oligonucleotide
  Sense strand starting at position 3525 of SEQ ID NO: 1244022
gguuuaaauuaguuacuag

SEQ ID NO: 1459213 - RNA, 19 nt, Artificial Sequence
  Description of Artificial Sequence: Synthetic oligonucleotide
  Antisense strand to SEQ ID NO: 1459212
cuaguaacuaauuuaaacc

SEQ ID NO: 1459214 - RNA, 19 nt, Artificial Sequence
  Description of Artificial Sequence: Synthetic oligonucleotide
  Sense strand starting at position 3542 of SEQ ID NO: 1244022
agaucaacgugcucagaac

SEQ ID NO: 1459215 - RNA, 19 nt, Artificial Sequence
  Description of Artificial Sequence: Synthetic oligonucleotide
  Antisense strand to SEQ ID NO: 1459214
guucugagcacguugaucu

SEQ ID NO: 1459216 - RNA, 19 nt, Artificial Sequence
  Description of Artificial Sequence: Synthetic oligonucleotide
  Sense strand starting at position 3543 of SEQ ID NO: 1244022
gaucaacgugcucagaaca

SEQ ID NO: 1459217 - RNA, 19 nt, Artificial Sequence
  Description of Artificial Sequence: Synthetic oligonucleotide
  Antisense strand to SEQ ID NO: 1459216
uguucugagcacguugauc

SEQ ID NO: 1459218 - RNA, 19 nt, Artificial Sequence
  Description of Artificial Sequence: Synthetic oligonucleotide
  Sense strand starting at position 3567 of SEQ ID NO: 1244022
ggugaaauguuagcuauua

SEQ ID NO: 1459219 - RNA, 19 nt, Artificial Sequence
  Description of Artificial Sequence: Synthetic oligonucleotide
  Antisense strand to SEQ ID NO: 1459218
uaauagcuaacauuucacc

SEQ ID NO: 1459220 - RNA, 19 nt, Artificial Sequence
  Description of Artificial Sequence: Synthetic oligonucleotide
  Sense strand starting at position 3664 of SEQ ID NO: 1244022
gcugucacuccugagauug

SEQ ID NO: 1459221 - RNA, 19 nt, Artificial Sequence
  Description of Artificial Sequence: Synthetic oligonucleotide
  Antisense strand to SEQ ID NO: 1459220
caaucucaggagugacagc

SEQ ID NO: 1459222 - RNA, 19 nt, Artificial Sequence
  Description of Artificial Sequence: Synthetic oligonucleotide
  Sense strand starting at position 3841 of SEQ ID NO: 1244022
gugggaggugagugacaau

SEQ ID NO: 1459223 - RNA, 19 nt, Artificial Sequence
  Description of Artificial Sequence: Synthetic oligonucleotide
  Antisense strand to SEQ ID NO: 1459222
auugucacucaccucccac

SEQ ID NO: 1459224 - RNA, 19 nt, Artificial Sequence
  Description of Artificial Sequence: Synthetic oligonucleotide
  Sense strand starting at position 117 of SEQ ID NO: 1244023
guuagauaauaagaaagga

SEQ ID NO: 1459225 - RNA, 19 nt, Artificial Sequence
  Description of Artificial Sequence: Synthetic oligonucleotide
  Antisense strand to SEQ ID NO: 1459224
uccuuucuuauuaucuaac

SEQ ID NO: 1459226 - RNA, 19 nt, Artificial Sequence
  Description of Artificial Sequence: Synthetic oligonucleotide
  Sense strand starting at position 299 of SEQ ID NO: 1244023
uggaucucagcuugaucau

SEQ ID NO: 1459227 - RNA, 19 nt, Artificial Sequence
  Description of Artificial Sequence: Synthetic oligonucleotide
  Antisense strand to SEQ ID NO: 1459226
augaucaagcugagaucca

SEQ ID NO: 1459228 - RNA, 19 nt, Artificial Sequence
  Description of Artificial Sequence: Synthetic oligonucleotide
  Sense strand starting at position 300 of SEQ ID NO: 1244023
ggaucucagcuugaucauc

SEQ ID NO: 1459229 - RNA, 19 nt, Artificial Sequence
  Description of Artificial Sequence: Synthetic oligonucleotide
  Antisense strand to SEQ ID NO: 1459228
gaugaucaagcugagaucc

SEQ ID NO: 1459230 - RNA, 19 nt, Artificial Sequence
  Description of Artificial Sequence: Synthetic oligonucleotide
  Sense strand starting at position 397 of SEQ ID NO: 1244023
cucaguucucagcaagauc

SEQ ID NO: 1459231 - RNA, 19 nt, Artificial Sequence
  Description of Artificial Sequence: Synthetic oligonucleotide
  Antisense strand to SEQ ID NO: 1459230
gaucuugcugagaacugag

SEQ ID NO: 1459232 - RNA, 19 nt, Artificial Sequence
  Description of Artificial Sequence: Synthetic oligonucleotide
  Sense strand starting at position 457 of SEQ ID NO: 1244023
auugacuucuguucugaag

SEQ ID NO: 1459233 - RNA, 19 nt, Artificial Sequence
  Description of Artificial Sequence: Synthetic oligonucleotide
  Antisense strand to SEQ ID NO: 1459232
cuucagaacagaagucaau

SEQ ID NO: 1459234 - RNA, 19 nt, Artificial Sequence
  Description of Artificial Sequence: Synthetic oligonucleotide
  Sense strand starting at position 473 of SEQ ID NO: 1244023
aagaccagguucucaguaa

SEQ ID NO: 1459235 - RNA, 19 nt, Artificial Sequence
  Description of Artificial Sequence: Synthetic oligonucleotide
  Antisense strand to SEQ ID NO: 1459234
uuacugagaaccuggucuu

SEQ ID NO: 1459236 - RNA, 19 nt, Artificial Sequence
  Description of Artificial Sequence: Synthetic oligonucleotide
  Sense strand starting at position 574 of SEQ ID NO: 1244023
uuugucuucucagcucaga

SEQ ID NO: 1459237 - RNA, 19 nt, Artificial Sequence
  Description of Artificial Sequence: Synthetic oligonucleotide
  Antisense strand to SEQ ID NO: 1459236
ucugagcugagaagacaaa

SEQ ID NO: 1459238 - RNA, 19 nt, Artificial Sequence
  Description of Artificial Sequence: Synthetic oligonucleotide
  Sense strand starting at position 597 of SEQ ID NO: 1244023
gggcuuccugaaggaaauu

SEQ ID NO: 1459239 - RNA, 19 nt, Artificial Sequence
  Description of Artificial Sequence: Synthetic oligonucleotide
  Antisense strand to SEQ ID NO: 1459238
aauuuccuucaggaagccc

SEQ ID NO: 1459240 - RNA, 19 nt, Artificial Sequence
  Description of Artificial Sequence: Synthetic oligonucleotide
  Sense strand starting at position 638 of SEQ ID NO: 1244023
ugcagauucuggucucuaa

SEQ ID NO: 1459241 - RNA, 19 nt, Artificial Sequence
  Description of Artificial Sequence: Synthetic oligonucleotide
  Antisense strand to SEQ ID NO: 1459240
uuagagaccagaaucugca

SEQ ID NO: 1459242 - RNA, 19 nt, Artificial Sequence
  Description of Artificial Sequence: Synthetic oligonucleotide
  Sense strand starting at position 694 of SEQ ID NO: 1244023
aggucuuauggaggagcaa

SEQ ID NO: 1459243 - RNA, 19 nt, Artificial Sequence
  Description of Artificial Sequence: Synthetic oligonucleotide
  Antisense strand to SEQ ID NO: 1459242
uugcuccuccauaagaccu

SEQ ID NO: 1459244 - RNA, 19 nt, Artificial Sequence
  Description of Artificial Sequence: Synthetic oligonucleotide
  Sense strand starting at position 806 of SEQ ID NO: 1244023
ggaugucccaguggagaga

SEQ ID NO: 1459245 - RNA, 19 nt, Artificial Sequence
  Description of Artificial Sequence: Synthetic oligonucleotide
  Antisense strand to SEQ ID NO: 1459244
ucucuccacugggacaucc

SEQ ID NO: 1459246 - RNA, 19 nt, Artificial Sequence
  Description of Artificial Sequence: Synthetic oligonucleotide
  Sense strand starting at position 1000 of SEQ ID NO: 1244023
cacugauagugggaagaua

SEQ ID NO: 1459247 - RNA, 19 nt, Artificial Sequence
  Description of Artificial Sequence: Synthetic oligonucleotide
  Antisense strand to SEQ ID NO: 1459246
uaucuucccacuaucagug

SEQ ID NO: 1459248 - RNA, 19 nt, Artificial Sequence
  Description of Artificial Sequence: Synthetic oligonucleotide
  Sense strand starting at position 1124 of SEQ ID NO: 1244023
ggugucagccgcuucucaa

SEQ ID NO: 1459249 - RNA, 19 nt, Artificial Sequence
  Description of Artificial Sequence: Synthetic oligonucleotide
  Antisense strand to SEQ ID NO: 1459248
uugagaagcggcugacacc

SEQ ID NO: 1459250 - RNA, 19 nt, Artificial Sequence
  Description of Artificial Sequence: Synthetic oligonucleotide
  Sense strand starting at position 1125 of SEQ ID NO: 1244023
gugucagccgcuucucaaa

SEQ ID NO: 1459251 - RNA, 19 nt, Artificial Sequence
  Description of Artificial Sequence: Synthetic oligonucleotide
  Antisense strand to SEQ ID NO: 1459250
uuugagaagcggcugacac

SEQ ID NO: 1459252 - RNA, 19 nt, Artificial Sequence
  Description of Artificial Sequence: Synthetic oligonucleotide
  Sense strand starting at position 1348 of SEQ ID NO: 1244023
uuggaauuaacgggucuga

SEQ ID NO: 1459253 - RNA, 19 nt, Artificial Sequence
  Description of Artificial Sequence: Synthetic oligonucleotide
  Antisense strand to SEQ ID NO: 1459252
ucagacccguuaauuccaa

SEQ ID NO: 1459254 - RNA, 19 nt, Artificial Sequence
  Description of Artificial Sequence: Synthetic oligonucleotide
  Sense strand starting at position 2088 of SEQ ID NO: 1244023
gcggucaacgcgcuuuauu

SEQ ID NO: 1459255 - RNA, 19 nt, Artificial Sequence
  Description of Artificial Sequence: Synthetic oligonucleotide
  Antisense strand to SEQ ID NO: 1459254
aauaaagcgcguugaccgc

SEQ ID NO: 1459256 - RNA, 19 nt, Artificial Sequence
  Description of Artificial Sequence: Synthetic oligonucleotide
  Sense strand starting at position 2277 of SEQ ID NO: 1244023
ccuccuacucacugugaga

SEQ ID NO: 1459257 - RNA, 19 nt, Artificial Sequence
  Description of Artificial Sequence: Synthetic oligonucleotide
  Antisense strand to SEQ ID NO: 1459256
ucucacagugaguaggagg

SEQ ID NO: 1459258 - RNA, 19 nt, Artificial Sequence
  Description of Artificial Sequence: Synthetic oligonucleotide
  Sense strand starting at position 2596 of SEQ ID NO: 1244023
aagagauguccagggcaca

SEQ ID NO: 1459259 - RNA, 19 nt, Artificial Sequence
  Description of Artificial Sequence: Synthetic oligonucleotide
  Antisense strand to SEQ ID NO: 1459258
ugugcccuggacaucucuu

SEQ ID NO: 1459260 - RNA, 19 nt, Artificial Sequence
  Description of Artificial Sequence: Synthetic oligonucleotide
  Sense strand starting at position 2755 of SEQ ID NO: 1244023
ggaucucaggcucaacuuu

SEQ ID NO: 1459261 - RNA, 19 nt, Artificial Sequence
  Description of Artificial Sequence: Synthetic oligonucleotide
  Antisense strand to SEQ ID NO: 1459260
aaaguugagccugagaucc

SEQ ID NO: 1459262 - RNA, 19 nt, Artificial Sequence
  Description of Artificial Sequence: Synthetic oligonucleotide
  Sense strand starting at position 2764 of SEQ ID NO: 1244023
gcucaacuuuagccugaau

SEQ ID NO: 1459263 - RNA, 19 nt, Artificial Sequence
  Description of Artificial Sequence: Synthetic oligonucleotide
  Antisense strand to SEQ ID NO: 1459262
auucaggcuaaaguugagc

SEQ ID NO: 1459264 - RNA, 19 nt, Artificial Sequence
  Description of Artificial Sequence: Synthetic oligonucleotide
  Sense strand starting at position 2776 of SEQ ID NO: 1244023
ccugaauucggugcgucau

SEQ ID NO: 1459265 - RNA, 19 nt, Artificial Sequence
  Description of Artificial Sequence: Synthetic oligonucleotide
  Antisense strand to SEQ ID NO: 1459264
augacgcaccgaauucagg

SEQ ID NO: 1459266 - RNA, 19 nt, Artificial Sequence
  Description of Artificial Sequence: Synthetic oligonucleotide
  Sense strand starting at position 2779 of SEQ ID NO: 1244023
gaauucggugcgucaucuu

SEQ ID NO: 1459267 - RNA, 19 nt, Artificial Sequence
  Description of Artificial Sequence: Synthetic oligonucleotide
  Antisense strand to SEQ ID NO: 1459266
aagaugacgcaccgaauuc

SEQ ID NO: 1459268 - RNA, 19 nt, Artificial Sequence
  Description of Artificial Sequence: Synthetic oligonucleotide
  Sense strand starting at position 2799 of SEQ ID NO: 1244023
gacaaaucuggugagcucu

SEQ ID NO: 1459269 - RNA, 19 nt, Artificial Sequence
  Description of Artificial Sequence: Synthetic oligonucleotide
  Antisense strand to SEQ ID NO: 1459268
agagcucaccagauuuguc

SEQ ID NO: 1459270 - RNA, 19 nt, Artificial Sequence
  Description of Artificial Sequence: Synthetic oligonucleotide
  Sense strand starting at position 3003 of SEQ ID NO: 1244023
ggaggcaccucuuccacau

SEQ ID NO: 1459271 - RNA, 19 nt, Artificial Sequence
  Description of Artificial Sequence: Synthetic oligonucleotide
  Antisense strand to SEQ ID NO: 1459270
auguggaagaggugccucc

SEQ ID NO: 1459272 - RNA, 19 nt, Artificial Sequence
  Description of Artificial Sequence: Synthetic oligonucleotide
  Sense strand starting at position 3061 of SEQ ID NO: 1244023
ccucuuguagagcacaaua

SEQ ID NO: 1459273 - RNA, 19 nt, Artificial Sequence
  Description of Artificial Sequence: Synthetic oligonucleotide
  Antisense strand to SEQ ID NO: 1459272
uauugugcucuacaagagg

SEQ ID NO: 1459274 - RNA, 19 nt, Artificial Sequence
  Description of Artificial Sequence: Synthetic oligonucleotide
  Sense strand starting at position 3229 of SEQ ID NO: 1244023
ggcacagugguguguauuu

SEQ ID NO: 1459275 - RNA, 19 nt, Artificial Sequence
  Description of Artificial Sequence: Synthetic oligonucleotide
  Antisense strand to SEQ ID NO: 1459274
aaauacacaccacugugcc

SEQ ID NO: 1459276 - RNA, 19 nt, Artificial Sequence
  Description of Artificial Sequence: Synthetic oligonucleotide
  Sense strand starting at position 3234 of SEQ ID NO: 1244023
agugguguguauuuacagu

SEQ ID NO: 1459277 - RNA, 19 nt, Artificial Sequence
  Description of Artificial Sequence: Synthetic oligonucleotide
  Antisense strand to SEQ ID NO: 1459276
acuguaaauacacaccacu

SEQ ID NO: 1459278 - RNA, 19 nt, Artificial Sequence
  Description of Artificial Sequence: Synthetic oligonucleotide
  Sense strand starting at position 3418 of SEQ ID NO: 1244023
gauaguauuuaccaggcau

SEQ ID NO: 1459279 - RNA, 19 nt, Artificial Sequence
  Description of Artificial Sequence: Synthetic oligonucleotide
  Antisense strand to SEQ ID NO: 1459278
augccugguaaauacuauc

SEQ ID NO: 1459280 - RNA, 19 nt, Artificial Sequence
  Description of Artificial Sequence: Synthetic oligonucleotide
  Sense strand starting at position 3472 of SEQ ID NO: 1244023
gcaugaagccucuucgcuu

SEQ ID NO: 1459281 - RNA, 19 nt, Artificial Sequence
  Description of Artificial Sequence: Synthetic oligonucleotide
  Antisense strand to SEQ ID NO: 1459280
aagcgaagaggcuucaugc

SEQ ID NO: 1459282 - RNA, 19 nt, Artificial Sequence
  Description of Artificial Sequence: Synthetic oligonucleotide
  Sense strand starting at position 3655 of SEQ ID NO: 1244023
acauuagugauauggagug

SEQ ID NO: 1459283 - RNA, 19 nt, Artificial Sequence
  Description of Artificial Sequence: Synthetic oligonucleotide
  Antisense strand to SEQ ID NO: 1459282
cacuccauaucacuaaugu

SEQ ID NO: 1459284 - RNA, 19 nt, Artificial Sequence
  Description of Artificial Sequence: Synthetic oligonucleotide
  Sense strand starting at position 3657 of SEQ ID NO: 1244023
auuagugauauggagugua

SEQ ID NO: 1459285 - RNA, 19 nt, Artificial Sequence
  Description of Artificial Sequence: Synthetic oligonucleotide
  Antisense strand to SEQ ID NO: 1459284
uacacuccauaucacuaau

SEQ ID NO: 1459286 - RNA, 19 nt, Artificial Sequence
  Description of Artificial Sequence: Synthetic oligonucleotide
  Sense strand starting at position 3660 of SEQ ID NO: 1244023
agugauauggaguguaaua

SEQ ID NO: 1459287 - RNA, 19 nt, Artificial Sequence
  Description of Artificial Sequence: Synthetic oligonucleotide
  Antisense strand to SEQ ID NO: 1459286
uauuacacuccauaucacu

SEQ ID NO: 1459288 - RNA, 19 nt, Artificial Sequence
  Description of Artificial Sequence: Synthetic oligonucleotide
  Sense strand starting at position 3696 of SEQ ID NO: 1244023
aauugugaucaucgcuauu

SEQ ID NO: 1459289 - RNA, 19 nt, Artificial Sequence
  Description of Artificial Sequence: Synthetic oligonucleotide
  Antisense strand to SEQ ID NO: 1459288
aauagcgaugaucacaauu

SEQ ID NO: 1459290 - RNA, 19 nt, Artificial Sequence
  Description of Artificial Sequence: Synthetic oligonucleotide
  Sense strand starting at position 3699 of SEQ ID NO: 1244023
ugugaucaucgcuauuaua

SEQ ID NO: 1459291 - RNA, 19 nt, Artificial Sequence
  Description of Artificial Sequence: Synthetic oligonucleotide
  Antisense strand to SEQ ID NO: 1459290
uauaauagcgaugaucaca

SEQ ID NO: 1459292 - RNA, 19 nt, Artificial Sequence
  Description of Artificial Sequence: Synthetic oligonucleotide
  Sense strand starting at position 3728 of SEQ ID NO: 1244023
agccuuaggcagugacuau

SEQ ID NO: 1459293 - RNA, 19 nt, Artificial Sequence
  Description of Artificial Sequence: Synthetic oligonucleotide
  Antisense strand to SEQ ID NO: 1459292
auagucacugccuaaggcu

SEQ ID NO: 1459294 - RNA, 19 nt, Artificial Sequence
  Description of Artificial Sequence: Synthetic oligonucleotide
  Sense strand starting at position 3732 of SEQ ID NO: 1244023
uuaggcagugacuaucuaa

SEQ ID NO: 1459295 - RNA, 19 nt, Artificial Sequence
  Description of Artificial Sequence: Synthetic oligonucleotide
  Antisense strand to SEQ ID NO: 1459294
uuagauagucacugccuaa

SEQ ID NO: 1459296 - RNA, 19 nt, Artificial Sequence
  Description of Artificial Sequence: Synthetic oligonucleotide
  Sense strand starting at position 3765 of SEQ ID NO: 1244023
auaugaauaugacagaucu

SEQ ID NO: 1459297 - RNA, 19 nt, Artificial Sequence
  Description of Artificial Sequence: Synthetic oligonucleotide
  Antisense strand to SEQ ID NO: 1459296
agaucugucauauucauau

SEQ ID NO: 1459298 - RNA, 19 nt, Artificial Sequence
  Description of Artificial Sequence: Synthetic oligonucleotide
  Sense strand starting at position 3778 of SEQ ID NO: 1244023
agaucuuguuauccuggua

SEQ ID NO: 1459299 - RNA, 19 nt, Artificial Sequence
  Description of Artificial Sequence: Synthetic oligonucleotide
  Antisense strand to SEQ ID NO: 1459298
uaccaggauaacaagaucu

SEQ ID NO: 1459300 - RNA, 19 nt, Artificial Sequence
  Description of Artificial Sequence: Synthetic oligonucleotide
  Sense strand starting at position 3781 of SEQ ID NO: 1244023
ucuuguuauccugguauaa

SEQ ID NO: 1459301 - RNA, 19 nt, Artificial Sequence
  Description of Artificial Sequence: Synthetic oligonucleotide
  Antisense strand to SEQ ID NO: 1459300
uuauaccaggauaacaaga

SEQ ID NO: 1459302 - RNA, 19 nt, Artificial Sequence
  Description of Artificial Sequence: Synthetic oligonucleotide
  Sense strand starting at position 3859 of SEQ ID NO: 1244023
ccagaaugccuauagugaa

SEQ ID NO: 1459303 - RNA, 19 nt, Artificial Sequence
  Description of Artificial Sequence: Synthetic oligonucleotide
  Antisense strand to SEQ ID NO: 1459302
uucacuauaggcauucugg

SEQ ID NO: 1459304 - RNA, 19 nt, Artificial Sequence
  Description of Artificial Sequence: Synthetic oligonucleotide
  Sense strand starting at position 24 of SEQ ID NO: 1244024
ccauuugacuuguggauuu

SEQ ID NO: 1459305 - RNA, 19 nt, Artificial Sequence
  Description of Artificial Sequence: Synthetic oligonucleotide
  Antisense strand to SEQ ID NO: 1459304
aaauccacaagucaaaugg

SEQ ID NO: 1459306 - RNA, 19 nt, Artificial Sequence
  Description of Artificial Sequence: Synthetic oligonucleotide
  Sense strand starting at position 82 of SEQ ID NO: 1244024
gcgugcuaaacagaagauu

SEQ ID NO: 1459307 - RNA, 19 nt, Artificial Sequence
  Description of Artificial Sequence: Synthetic oligonucleotide
  Antisense strand to SEQ ID NO: 1459306
aaucuucuguuuagcacgc

SEQ ID NO: 1459308 - RNA, 19 nt, Artificial Sequence
  Description of Artificial Sequence: Synthetic oligonucleotide
  Sense strand starting at position 241 of SEQ ID NO: 1244024
gagacugugucuccucauu

SEQ ID NO: 1459309 - RNA, 19 nt, Artificial Sequence
  Description of Artificial Sequence: Synthetic oligonucleotide
  Antisense strand to SEQ ID NO: 1459308
aaugaggagacacagucuc

SEQ ID NO: 1459310 - RNA, 19 nt, Artificial Sequence
  Description of Artificial Sequence: Synthetic oligonucleotide
  Sense strand starting at position 286 of SEQ ID NO: 1244024
cagcucagcuuugugaagu

SEQ ID NO: 1459311 - RNA, 19 nt, Artificial Sequence
  Description of Artificial Sequence: Synthetic oligonucleotide
  Antisense strand to SEQ ID NO: 1459310
acuucacaaagcugagcug

SEQ ID NO: 1459312 - RNA, 19 nt, Artificial Sequence
  Description of Artificial Sequence: Synthetic oligonucleotide
  Sense strand starting at position 287 of SEQ ID NO: 1244024
agcucagcuuugugaaguc

SEQ ID NO: 1459313 - RNA, 19 nt, Artificial Sequence
  Description of Artificial Sequence: Synthetic oligonucleotide
  Antisense strand to SEQ ID NO: 1459312
gacuucacaaagcugagcu

SEQ ID NO: 1459314 - RNA, 19 nt, Artificial Sequence
  Description of Artificial Sequence: Synthetic oligonucleotide
  Sense strand starting at position 413 of SEQ ID NO: 1244024
gugucuucacaaggaugga

SEQ ID NO: 1459315 - RNA, 19 nt, Artificial Sequence
  Description of Artificial Sequence: Synthetic oligonucleotide
  Antisense strand to SEQ ID NO: 1459314
uccauccuugugaagacac

SEQ ID NO: 1459316 - RNA, 19 nt, Artificial Sequence
  Description of Artificial Sequence: Synthetic oligonucleotide
  Sense strand starting at position 466 of SEQ ID NO: 1244024
ccagccuucucuugggaga

SEQ ID NO: 1459317 - RNA, 19 nt, Artificial Sequence
  Description of Artificial Sequence: Synthetic oligonucleotide
  Antisense strand to SEQ ID NO: 1459316
ucucccaagagaaggcugg

SEQ ID NO: 1459318 - RNA, 19 nt, Artificial Sequence
  Description of Artificial Sequence: Synthetic oligonucleotide
  Sense strand starting at position 469 of SEQ ID NO: 1244024
gccuucucuugggagagga

SEQ ID NO: 1459319 - RNA, 19 nt, Artificial Sequence
  Description of Artificial Sequence: Synthetic oligonucleotide
  Antisense strand to SEQ ID NO: 1459318
uccucucccaagagaaggc

SEQ ID NO: 1459320 - RNA, 19 nt, Artificial Sequence
  Description of Artificial Sequence: Synthetic oligonucleotide
  Sense strand starting at position 531 of SEQ ID NO: 1244024
gagccaugcugaggaucua

SEQ ID NO: 1459321 - RNA, 19 nt, Artificial Sequence
  Description of Artificial Sequence: Synthetic oligonucleotide
  Antisense strand to SEQ ID NO: 1459320
uagauccucagcauggcuc

SEQ ID NO: 1459322 - RNA, 19 nt, Artificial Sequence
  Description of Artificial Sequence: Synthetic oligonucleotide
  Sense strand starting at position 550 of SEQ ID NO: 1244024
gcacguauggccuaaugac

SEQ ID NO: 1459323 - RNA, 19 nt, Artificial Sequence
  Description of Artificial Sequence: Synthetic oligonucleotide
  Antisense strand to SEQ ID NO: 1459322
gucauuaggccauacgugc

SEQ ID NO: 1459324 - RNA, 19 nt, Artificial Sequence
  Description of Artificial Sequence: Synthetic oligonucleotide
  Sense strand starting at position 581 of SEQ ID NO: 1244024
gggaaaugaugucaaggag

SEQ ID NO: 1459325 - RNA, 19 nt, Artificial Sequence
  Description of Artificial Sequence: Synthetic oligonucleotide
  Antisense strand to SEQ ID NO: 1459324
cuccuugacaucauuuccc

SEQ ID NO: 1459326 - RNA, 19 nt, Artificial Sequence
  Description of Artificial Sequence: Synthetic oligonucleotide
  Sense strand starting at position 680 of SEQ ID NO: 1244024
ggaaaugcaucugggagaa

SEQ ID NO: 1459327 - RNA, 19 nt, Artificial Sequence
  Description of Artificial Sequence: Synthetic oligonucleotide
  Antisense strand to SEQ ID NO: 1459326
uucucccagaugcauuucc

SEQ ID NO: 1459328 - RNA, 19 nt, Artificial Sequence
  Description of Artificial Sequence: Synthetic oligonucleotide
  Sense strand starting at position 1084 of SEQ ID NO: 1244024
ccuucaguggcuuggaaag

SEQ ID NO: 1459329 - RNA, 19 nt, Artificial Sequence
  Description of Artificial Sequence: Synthetic oligonucleotide
  Antisense strand to SEQ ID NO: 1459328
cuuuccaagccacugaagg

SEQ ID NO: 1459330 - RNA, 19 nt, Artificial Sequence
  Description of Artificial Sequence: Synthetic oligonucleotide
  Sense strand starting at position 1128 of SEQ ID NO: 1244024
gcacccuggcucugacaua

SEQ ID NO: 1459331 - RNA, 19 nt, Artificial Sequence
  Description of Artificial Sequence: Synthetic oligonucleotide
  Antisense strand to SEQ ID NO: 1459330
uaugucagagccagggugc

SEQ ID NO: 1459332 - RNA, 19 nt, Artificial Sequence
  Description of Artificial Sequence: Synthetic oligonucleotide
  Sense strand starting at position 1162 of SEQ ID NO: 1244024
acagauaccuccuggccau

SEQ ID NO: 1459333 - RNA, 19 nt, Artificial Sequence
  Description of Artificial Sequence: Synthetic oligonucleotide
  Antisense strand to SEQ ID NO: 1459332
auggccaggagguaucugu

SEQ ID NO: 1459334 - RNA, 19 nt, Artificial Sequence
  Description of Artificial Sequence: Synthetic oligonucleotide
  Sense strand starting at position 1401 of SEQ ID NO: 1244024
aggacauacuuguuuagac

SEQ ID NO: 1459335 - RNA, 19 nt, Artificial Sequence
  Description of Artificial Sequence: Synthetic oligonucleotide
  Antisense strand to SEQ ID NO: 1459334
gucuaaacaaguauguccu

SEQ ID NO: 1459336 - RNA, 19 nt, Artificial Sequence
  Description of Artificial Sequence: Synthetic oligonucleotide
  Sense strand starting at position 1465 of SEQ ID NO: 1244024
gcgauaacugaagaaaguu

SEQ ID NO: 1459337 - RNA, 19 nt, Artificial Sequence
  Description of Artificial Sequence: Synthetic oligonucleotide
  Antisense strand to SEQ ID NO: 1459336
aacuuucuucaguuaucgc

SEQ ID NO: 1459338 - RNA, 19 nt, Artificial Sequence
  Description of Artificial Sequence: Synthetic oligonucleotide
  Sense strand starting at position 2964 of SEQ ID NO: 1244024
ggccucuuaccuuggagaa

SEQ ID NO: 1459339 - RNA, 19 nt, Artificial Sequence
  Description of Artificial Sequence: Synthetic oligonucleotide
  Antisense strand to SEQ ID NO: 1459338
uucuccaagguaagaggcc

SEQ ID NO: 1459340 - RNA, 19 nt, Artificial Sequence
  Description of Artificial Sequence: Synthetic oligonucleotide
  Sense strand starting at position 2965 of SEQ ID NO: 1244024
gccucuuaccuuggagaau

SEQ ID NO: 1459341 - RNA, 19 nt, Artificial Sequence
  Description of Artificial Sequence: Synthetic oligonucleotide
  Antisense strand to SEQ ID NO: 1459340
auucuccaagguaagaggc

SEQ ID NO: 1459342 - RNA, 19 nt, Artificial Sequence
  Description of Artificial Sequence: Synthetic oligonucleotide
  Sense strand starting at position 2966 of SEQ ID NO: 1244024
ccucuuaccuuggagaaua

SEQ ID NO: 1459343 - RNA, 19 nt, Artificial Sequence
  Description of Artificial Sequence: Synthetic oligonucleotide
  Antisense strand to SEQ ID NO: 1459342
uauucuccaagguaagagg

SEQ ID NO: 1459344 - RNA, 19 nt, Artificial Sequence
  Description of Artificial Sequence: Synthetic oligonucleotide
  Sense strand starting at position 2988 of SEQ ID NO: 1244024
aucucugaugucugcuaau

SEQ ID NO: 1459345 - RNA, 19 nt, Artificial Sequence
  Description of Artificial Sequence: Synthetic oligonucleotide
  Antisense strand to SEQ ID NO: 1459344
auuagcagacaucagagau

SEQ ID NO: 1459346 - RNA, 19 nt, Artificial Sequence
  Description of Artificial Sequence: Synthetic oligonucleotide
  Sense strand starting at position 2991 of SEQ ID NO: 1244024
ucugaugucugcuaauuac

SEQ ID NO: 1459347 - RNA, 19 nt, Artificial Sequence
  Description of Artificial Sequence: Synthetic oligonucleotide
  Antisense strand to SEQ ID NO: 1459346
guaauuagcagacaucaga

SEQ ID NO: 1459348 - RNA, 19 nt, Artificial Sequence
  Description of Artificial Sequence: Synthetic oligonucleotide
  Sense strand starting at position 2994 of SEQ ID NO: 1244024
gaugucugcuaauuacaga

SEQ ID NO: 1459349 - RNA, 19 nt, Artificial Sequence
  Description of Artificial Sequence: Synthetic oligonucleotide
  Antisense strand to SEQ ID NO: 1459348
ucuguaauuagcagacauc

SEQ ID NO: 1459350 - RNA, 19 nt, Artificial Sequence
  Description of Artificial Sequence: Synthetic oligonucleotide
  Sense strand starting at position 2997 of SEQ ID NO: 1244024
gucugcuaauuacagaaau

SEQ ID NO: 1459351 - RNA, 19 nt, Artificial Sequence
  Description of Artificial Sequence: Synthetic oligonucleotide
  Antisense strand to SEQ ID NO: 1459350
auuucuguaauuagcagac

SEQ ID NO: 1459352 - RNA, 19 nt, Artificial Sequence
  Description of Artificial Sequence: Synthetic oligonucleotide
  Sense strand starting at position 3061 of SEQ ID NO: 1244024
agguauugguagccuuauu

SEQ ID NO: 1459353 - RNA, 19 nt, Artificial Sequence
  Description of Artificial Sequence: Synthetic oligonucleotide
  Antisense strand to SEQ ID NO: 1459352
aauaaggcuaccaauaccu

SEQ ID NO: 1459354 - RNA, 19 nt, Artificial Sequence
  Description of Artificial Sequence: Synthetic oligonucleotide
  Sense strand starting at position 3099 of SEQ ID NO: 1244024
ggcugagaguagguaagua

SEQ ID NO: 1459355 - RNA, 19 nt, Artificial Sequence
  Description of Artificial Sequence: Synthetic oligonucleotide
  Antisense strand to SEQ ID NO: 1459354
uacuuaccuacucucagcc

SEQ ID NO: 1459356 - RNA, 19 nt, Artificial Sequence
  Description of Artificial Sequence: Synthetic oligonucleotide
  Sense strand starting at position 3109 of SEQ ID NO: 1244024
agguaaguaagcuguccaa

SEQ ID NO: 1459357 - RNA, 19 nt, Artificial Sequence
  Description of Artificial Sequence: Synthetic oligonucleotide
  Antisense strand to SEQ ID NO: 1459356
uuggacagcuuacuuaccu

SEQ ID NO: 1459358 - RNA, 19 nt, Artificial Sequence
  Description of Artificial Sequence: Synthetic oligonucleotide
  Sense strand starting at position 3272 of SEQ ID NO: 1244024
gccugaauuugagacuuuc

SEQ ID NO: 1459359 - RNA, 19 nt, Artificial Sequence
  Description of Artificial Sequence: Synthetic oligonucleotide
  Antisense strand to SEQ ID NO: 1459358
gaaagucucaaauucaggc

SEQ ID NO: 1459360 - RNA, 19 nt, Artificial Sequence
  Description of Artificial Sequence: Synthetic oligonucleotide
  Sense strand starting at position 3390 of SEQ ID NO: 1244024
ccgaauuaucucuaggcca

SEQ ID NO: 1459361 - RNA, 19 nt, Artificial Sequence
  Description of Artificial Sequence: Synthetic oligonucleotide
  Antisense strand to SEQ ID NO: 1459360
uggccuagagauaauucgg

SEQ ID NO: 1459362 - RNA, 19 nt, Artificial Sequence
  Description of Artificial Sequence: Synthetic oligonucleotide
  Sense strand starting at position 3555 of SEQ ID NO: 1244024
ccaggcugaccugguuuaa

SEQ ID NO: 1459363 - RNA, 19 nt, Artificial Sequence
  Description of Artificial Sequence: Synthetic oligonucleotide
  Antisense strand to SEQ ID NO: 1459362
uuaaaccaggucagccugg

SEQ ID NO: 1459364 - RNA, 19 nt, Artificial Sequence
  Description of Artificial Sequence: Synthetic oligonucleotide
  Sense strand starting at position 3609 of SEQ ID NO: 1244024
gggugagagaugugaucac

SEQ ID NO: 1459365 - RNA, 19 nt, Artificial Sequence
  Description of Artificial Sequence: Synthetic oligonucleotide
  Antisense strand to SEQ ID NO: 1459364
gugaucacaucucucaccc

SEQ ID NO: 1459366 - RNA, 19 nt, Artificial Sequence
  Description of Artificial Sequence: Synthetic oligonucleotide
  Sense strand starting at position 3616 of SEQ ID NO: 1244024
agaugugaucacugguuuc

SEQ ID NO: 1459367 - RNA, 19 nt, Artificial Sequence
  Description of Artificial Sequence: Synthetic oligonucleotide
  Antisense strand to SEQ ID NO: 1459366
gaaaccagugaucacaucu

SEQ ID NO: 1459368 - RNA, 19 nt, Artificial Sequence
  Description of Artificial Sequence: Synthetic oligonucleotide
  Sense strand starting at position 3629 of SEQ ID NO: 1244024
gguuucguggccugaccaa

SEQ ID NO: 1459369 - RNA, 19 nt, Artificial Sequence
  Description of Artificial Sequence: Synthetic oligonucleotide
  Antisense strand to SEQ ID NO: 1459368
uuggucaggccacgaaacc

SEQ ID NO: 1459370 - RNA, 19 nt, Artificial Sequence
  Description of Artificial Sequence: Synthetic oligonucleotide
  Sense strand starting at position 3669 of SEQ ID NO: 1244024
gcagaauucuccuugggca

SEQ ID NO: 1459371 - RNA, 19 nt, Artificial Sequence
  Description of Artificial Sequence: Synthetic oligonucleotide
  Antisense strand to SEQ ID NO: 1459370
ugcccaaggagaauucugc

SEQ ID NO: 1459372 - RNA, 19 nt, Artificial Sequence
  Description of Artificial Sequence: Synthetic oligonucleotide
  Sense strand starting at position 3760 of SEQ ID NO: 1244024
gguccuugcccuugagauu

SEQ ID NO: 1459373 - RNA, 19 nt, Artificial Sequence
  Description of Artificial Sequence: Synthetic oligonucleotide
  Antisense strand to SEQ ID NO: 1459372
aaucucaagggcaaggacc

SEQ ID NO: 1459374 - RNA, 19 nt, Artificial Sequence
  Description of Artificial Sequence: Synthetic oligonucleotide
  Sense strand starting at position 3761 of SEQ ID NO: 1244024
guccuugcccuugagauua

SEQ ID NO: 1459375 - RNA, 19 nt, Artificial Sequence
  Description of Artificial Sequence: Synthetic oligonucleotide
  Antisense strand to SEQ ID NO: 1459374
uaaucucaagggcaaggac

SEQ ID NO: 1459376 - RNA, 19 nt, Artificial Sequence
  Description of Artificial Sequence: Synthetic oligonucleotide
  Sense strand starting at position 3831 of SEQ ID NO: 1244024
uaagauaacugucguggaa

SEQ ID NO: 1459377 - RNA, 19 nt, Artificial Sequence
  Description of Artificial Sequence: Synthetic oligonucleotide
  Antisense strand to SEQ ID NO: 1459376
uuccacgacaguuaucuua

SEQ ID NO: 1459378 - RNA, 19 nt, Artificial Sequence
  Description of Artificial Sequence: Synthetic oligonucleotide
  Sense strand starting at position 3833 of SEQ ID NO: 1244024
agauaacugucguggaaga

SEQ ID NO: 1459379 - RNA, 19 nt, Artificial Sequence
  Description of Artificial Sequence: Synthetic oligonucleotide
  Antisense strand to SEQ ID NO: 1459378
ucuuccacgacaguuaucu

SEQ ID NO: 1459380 - RNA, 19 nt, Artificial Sequence
  Description of Artificial Sequence: Synthetic oligonucleotide
  Sense strand starting at position 3834 of SEQ ID NO: 1244024
gauaacugucguggaagac

SEQ ID NO: 1459381 - RNA, 19 nt, Artificial Sequence
  Description of Artificial Sequence: Synthetic oligonucleotide
  Antisense strand to SEQ ID NO: 1459380
gucuuccacgacaguuauc

SEQ ID NO: 1459382 - RNA, 19 nt, Artificial Sequence
  Description of Artificial Sequence: Synthetic oligonucleotide
  Sense strand starting at position 3835 of SEQ ID NO: 1244024
auaacugucguggaagacu

SEQ ID NO: 1459383 - RNA, 19 nt, Artificial Sequence
  Description of Artificial Sequence: Synthetic oligonucleotide
  Antisense strand to SEQ ID NO: 1459382
agucuuccacgacaguuau

SEQ ID NO: 1459384 - RNA, 19 nt, Artificial Sequence
  Description of Artificial Sequence: Synthetic oligonucleotide
  Sense strand starting at position 341 of SEQ ID NO: 1244025
ccucaugaaugagaccaaa

SEQ ID NO: 1459385 - RNA, 19 nt, Artificial Sequence
  Description of Artificial Sequence: Synthetic oligonucleotide
  Antisense strand to SEQ ID NO: 1459384
uuuggucucauucaugagg

SEQ ID NO: 1459386 - RNA, 19 nt, Artificial Sequence
  Description of Artificial Sequence: Synthetic oligonucleotide
  Sense strand starting at position 471 of SEQ ID NO: 1244025
gugugaguguccacaggug

SEQ ID NO: 1459387 - RNA, 19 nt, Artificial Sequence
  Description of Artificial Sequence: Synthetic oligonucleotide
  Antisense strand to SEQ ID NO: 1459386
caccuguggacacucacac

SEQ ID NO: 1459388 - RNA, 19 nt, Artificial Sequence
  Description of Artificial Sequence: Synthetic oligonucleotide
  Sense strand starting at position 599 of SEQ ID NO: 1244025
gcucuuaugcauggacuga

SEQ ID NO: 1459389 - RNA, 19 nt, Artificial Sequence
  Description of Artificial Sequence: Synthetic oligonucleotide
  Antisense strand to SEQ ID NO: 1459388
ucaguccaugcauaagagc

SEQ ID NO: 1459390 - RNA, 19 nt, Artificial Sequence
  Description of Artificial Sequence: Synthetic oligonucleotide
  Sense strand starting at position 736 of SEQ ID NO: 1244025
acugcuucccugugaguag

SEQ ID NO: 1459391 - RNA, 19 nt, Artificial Sequence
  Description of Artificial Sequence: Synthetic oligonucleotide
  Antisense strand to SEQ ID NO: 1459390
cuacucacagggaagcagu

SEQ ID NO: 1459392 - RNA, 19 nt, Artificial Sequence
  Description of Artificial Sequence: Synthetic oligonucleotide
  Sense strand starting at position 1539 of SEQ ID NO: 1244025
acgcuugcuggauaggaaa

SEQ ID NO: 1459393 - RNA, 19 nt, Artificial Sequence
  Description of Artificial Sequence: Synthetic oligonucleotide
  Antisense strand to SEQ ID NO: 1459392
uuuccuauccagcaagcgu

SEQ ID NO: 1459394 - RNA, 19 nt, Artificial Sequence
  Description of Artificial Sequence: Synthetic oligonucleotide
  Sense strand starting at position 2408 of SEQ ID NO: 1244025
ccaggauguccugggaaag

SEQ ID NO: 1459395 - RNA, 19 nt, Artificial Sequence
  Description of Artificial Sequence: Synthetic oligonucleotide
  Antisense strand to SEQ ID NO: 1459394
cuuucccaggacauccugg

SEQ ID NO: 1459396 - RNA, 19 nt, Artificial Sequence
  Description of Artificial Sequence: Synthetic oligonucleotide
  Sense strand starting at position 2521 of SEQ ID NO: 1244025
ccgugcugaagucauuuga

SEQ ID NO: 1459397 - RNA, 19 nt, Artificial Sequence
  Description of Artificial Sequence: Synthetic oligonucleotide
  Antisense strand to SEQ ID NO: 1459396
ucaaaugacuucagcacgg

SEQ ID NO: 1459398 - RNA, 19 nt, Artificial Sequence
  Description of Artificial Sequence: Synthetic oligonucleotide
  Sense strand starting at position 2525 of SEQ ID NO: 1244025
gcugaagucauuugacgug

SEQ ID NO: 1459399 - RNA, 19 nt, Artificial Sequence
  Description of Artificial Sequence: Synthetic oligonucleotide
  Antisense strand to SEQ ID NO: 1459398
cacgucaaaugacuucagc

SEQ ID NO: 1459400 - RNA, 19 nt, Artificial Sequence
  Description of Artificial Sequence: Synthetic oligonucleotide
  Sense strand starting at position 2530 of SEQ ID NO: 1244025
agucauuugacgugagguu

SEQ ID NO: 1459401 - RNA, 19 nt, Artificial Sequence
  Description of Artificial Sequence: Synthetic oligonucleotide
  Antisense strand to SEQ ID NO: 1459400
aaccucacgucaaaugacu

SEQ ID NO: 1459402 - RNA, 19 nt, Artificial Sequence
  Description of Artificial Sequence: Synthetic oligonucleotide
  Sense strand starting at position 3235 of SEQ ID NO: 1244025
gccugagcuucccugaaca

SEQ ID NO: 1459403 - RNA, 19 nt, Artificial Sequence
  Description of Artificial Sequence: Synthetic oligonucleotide
  Antisense strand to SEQ ID NO: 1459402
uguucagggaagcucaggc

SEQ ID NO: 1459404 - RNA, 19 nt, Artificial Sequence
  Description of Artificial Sequence: Synthetic oligonucleotide
  Sense strand starting at position 3762 of SEQ ID NO: 1244025
gacuguggugucugcagaa

SEQ ID NO: 1459405 - RNA, 19 nt, Artificial Sequence
  Description of Artificial Sequence: Synthetic oligonucleotide
  Antisense strand to SEQ ID NO: 1459404
uucugcagacaccacaguc

SEQ ID NO: 1459406 - RNA, 19 nt, Artificial Sequence
  Description of Artificial Sequence: Synthetic oligonucleotide
  Sense strand starting at position 3827 of SEQ ID NO: 1244025
gcuaucgcaucuugacaga

SEQ ID NO: 1459407 - RNA, 19 nt, Artificial Sequence
  Description of Artificial Sequence: Synthetic oligonucleotide
  Antisense strand to SEQ ID NO: 1459406
ucugucaagaugcgauagc

SEQ ID NO: 1459408 - RNA, 19 nt, Artificial Sequence
  Description of Artificial Sequence: Synthetic oligonucleotide
  Sense strand starting at position 3832 of SEQ ID NO: 1244025
cgcaucuugacagaagguu

SEQ ID NO: 1459409 - RNA, 19 nt, Artificial Sequence
  Description of Artificial Sequence: Synthetic oligonucleotide
  Antisense strand to SEQ ID NO: 1459408
aaccuucugucaagaugcg

SEQ ID NO: 1459410 - RNA, 19 nt, Artificial Sequence
  Description of Artificial Sequence: Synthetic oligonucleotide
  Sense strand starting at position 3859 of SEQ ID NO: 1244025
gccagugugagcucucgua

SEQ ID NO: 1459411 - RNA, 19 nt, Artificial Sequence
  Description of Artificial Sequence: Synthetic oligonucleotide
  Antisense strand to SEQ ID NO: 1459410
uacgagagcucacacuggc

SEQ ID NO: 1459412 - RNA, 19 nt, Artificial Sequence
  Description of Artificial Sequence: Synthetic oligonucleotide
  Sense strand starting at position 3862 of SEQ ID NO: 1244025
agugugagcucucguacgu

SEQ ID NO: 1459413 - RNA, 19 nt, Artificial Sequence
  Description of Artificial Sequence: Synthetic oligonucleotide
  Antisense strand to SEQ ID NO: 1459412
acguacgagagcucacacu

SEQ ID NO: 1459414 - RNA, 19 nt, Artificial Sequence
  Description of Artificial Sequence: Synthetic oligonucleotide
  Sense strand starting at position 3868 of SEQ ID NO: 1244025
agcucucguacgucuguaa

SEQ ID NO: 1459415 - RNA, 19 nt, Artificial Sequence
  Description of Artificial Sequence: Synthetic oligonucleotide
  Antisense strand to SEQ ID NO: 1459414
uuacagacguacgagagcu

SEQ ID NO: 1459416 - RNA, 19 nt, Artificial Sequence
  Description of Artificial Sequence: Synthetic oligonucleotide
  Sense strand starting at position 3869 of SEQ ID NO: 1244025
gcucucguacgucuguaaa

SEQ ID NO: 1459417 - RNA, 19 nt, Artificial Sequence
  Description of Artificial Sequence: Synthetic oligonucleotide
  Antisense strand to SEQ ID NO: 1459416
uuuacagacguacgagagc

SEQ ID NO: 1459418 - RNA, 19 nt, Artificial Sequence
  Description of Artificial Sequence: Synthetic oligonucleotide
  Sense strand starting at position 3871 of SEQ ID NO: 1244025
ucucguacgucuguaaauu

SEQ ID NO: 1459419 - RNA, 19 nt, Artificial Sequence
  Description of Artificial Sequence: Synthetic oligonucleotide
  Antisense strand to SEQ ID NO: 1459418
aauuuacagacguacgaga

SEQ ID NO: 1459420 - RNA, 19 nt, Artificial Sequence
  Description of Artificial Sequence: Synthetic oligonucleotide
  Sense strand starting at position 3872 of SEQ ID NO: 1244025
cucguacgucuguaaauuu

SEQ ID NO: 1459421 - RNA, 19 nt, Artificial Sequence
  Description of Artificial Sequence: Synthetic oligonucleotide
  Antisense strand to SEQ ID NO: 1459420
aaauuuacagacguacgag

SEQ ID NO: 1459422 - RNA, 19 nt, Artificial Sequence
  Description of Artificial Sequence: Synthetic oligonucleotide
  Sense strand starting at position 3879 of SEQ ID NO: 1244025
gucuguaaauuucuuucuu

SEQ ID NO: 1459423 - RNA, 19 nt, Artificial Sequence
  Description of Artificial Sequence: Synthetic oligonucleotide
  Antisense strand to SEQ ID NO: 1459422
aagaaagaaauuuacagac

SEQ ID NO: 1459424 - RNA, 19 nt, Artificial Sequence
  Description of Artificial Sequence: Synthetic oligonucleotide
  Sense strand starting at position 3907 of SEQ ID NO: 1244025
caguuuggcuggguaucaa

SEQ ID NO: 1459425 - RNA, 19 nt, Artificial Sequence
  Description of Artificial Sequence: Synthetic oligonucleotide
  Antisense strand to SEQ ID NO: 1459424
uugauacccagccaaacug

SEQ ID NO: 1459426 - RNA, 19 nt, Artificial Sequence
  Description of Artificial Sequence: Synthetic oligonucleotide
  Sense strand starting at position 3937 of SEQ ID NO: 1244025
gagaucagaccauguucuu

SEQ ID NO: 1459427 - RNA, 19 nt, Artificial Sequence
  Description of Artificial Sequence: Synthetic oligonucleotide
  Antisense strand to SEQ ID NO: 1459426
aagaacauggucugaucuc

SEQ ID NO: 1459428 - RNA, 19 nt, Artificial Sequence
  Description of Artificial Sequence: Synthetic oligonucleotide
  Sense strand starting at position 3942 of SEQ ID NO: 1244025
cagaccauguucuuuagga

SEQ ID NO: 1459429 - RNA, 19 nt, Artificial Sequence
  Description of Artificial Sequence: Synthetic oligonucleotide
  Antisense strand to SEQ ID NO: 1459428
uccuaaagaacauggucug

SEQ ID NO: 1459430 - RNA, 19 nt, Artificial Sequence
  Description of Artificial Sequence: Synthetic oligonucleotide
  Sense strand starting at position 3943 of SEQ ID NO: 1244025
agaccauguucuuuaggaa

SEQ ID NO: 1459431 - RNA, 19 nt, Artificial Sequence
  Description of Artificial Sequence: Synthetic oligonucleotide
  Antisense strand to SEQ ID NO: 1459430
uuccuaaagaacauggucu

SEQ ID NO: 1459432 - RNA, 19 nt, Artificial Sequence
  Description of Artificial Sequence: Synthetic oligonucleotide
  Sense strand starting at position 3946 of SEQ ID NO: 1244025
ccauguucuuuaggaacca

SEQ ID NO: 1459433 - RNA, 19 nt, Artificial Sequence
  Description of Artificial Sequence: Synthetic oligonucleotide
  Antisense strand to SEQ ID NO: 1459432
ugguuccuaaagaacaugg

SEQ ID NO: 1459434 - RNA, 19 nt, Artificial Sequence
  Description of Artificial Sequence: Synthetic oligonucleotide
  Sense strand starting at position 4 of SEQ ID NO: 1244026
gcuugagcuuuccaguguu

SEQ ID NO: 1459435 - RNA, 19 nt, Artificial Sequence
  Description of Artificial Sequence: Synthetic oligonucleotide
  Antisense strand to SEQ ID NO: 1459434
aacacuggaaagcucaagc

SEQ ID NO: 1459436 - RNA, 19 nt, Artificial Sequence
  Description of Artificial Sequence: Synthetic oligonucleotide
  Sense strand starting at position 7 of SEQ ID NO: 1244026
ugagcuuuccaguguugga

SEQ ID NO: 1459437 - RNA, 19 nt, Artificial Sequence
  Description of Artificial Sequence: Synthetic oligonucleotide
  Antisense strand to SEQ ID NO: 1459436
uccaacacuggaaagcuca

SEQ ID NO: 1459438 - RNA, 19 nt, Artificial Sequence
  Description of Artificial Sequence: Synthetic oligonucleotide
  Sense strand starting at position 10 of SEQ ID NO: 1244026
gcuuuccaguguuggacua

SEQ ID NO: 1459439 - RNA, 19 nt, Artificial Sequence
  Description of Artificial Sequence: Synthetic oligonucleotide
  Antisense strand to SEQ ID NO: 1459438
uaguccaacacuggaaagc

SEQ ID NO: 1459440 - RNA, 19 nt, Artificial Sequence
  Description of Artificial Sequence: Synthetic oligonucleotide
  Sense strand starting at position 30 of SEQ ID NO: 1244026
acuugugugcugugguuga

SEQ ID NO: 1459441 - RNA, 19 nt, Artificial Sequence
  Description of Artificial Sequence: Synthetic oligonucleotide
  Antisense strand to SEQ ID NO: 1459440
ucaaccacagcacacaagu

SEQ ID NO: 1459442 - RNA, 19 nt, Artificial Sequence
  Description of Artificial Sequence: Synthetic oligonucleotide
  Sense strand starting at position 32 of SEQ ID NO: 1244026
uugugugcugugguugaau

SEQ ID NO: 1459443 - RNA, 19 nt, Artificial Sequence
  Description of Artificial Sequence: Synthetic oligonucleotide
  Antisense strand to SEQ ID NO: 1459442
auucaaccacagcacacaa

SEQ ID NO: 1459444 - RNA, 19 nt, Artificial Sequence
  Description of Artificial Sequence: Synthetic oligonucleotide
  Sense strand starting at position 50 of SEQ ID NO: 1244026
uugggagguucucuggaga

SEQ ID NO: 1459445 - RNA, 19 nt, Artificial Sequence
  Description of Artificial Sequence: Synthetic oligonucleotide
  Antisense strand to SEQ ID NO: 1459444
ucuccagagaaccucccaa

SEQ ID NO: 1459446 - RNA, 19 nt, Artificial Sequence
  Description of Artificial Sequence: Synthetic oligonucleotide
  Sense strand starting at position 395 of SEQ ID NO: 1244026
agcagugaucccuagagua

SEQ ID NO: 1459447 - RNA, 19 nt, Artificial Sequence
  Description of Artificial Sequence: Synthetic oligonucleotide
  Antisense strand to SEQ ID NO: 1459446
uacucuagggaucacugcu

SEQ ID NO: 1459448 - RNA, 19 nt, Artificial Sequence
  Description of Artificial Sequence: Synthetic oligonucleotide
  Sense strand starting at position 1273 of SEQ ID NO: 1244026
gaaugagucuaacagaagg

SEQ ID NO: 1459449 - RNA, 19 nt, Artificial Sequence
  Description of Artificial Sequence: Synthetic oligonucleotide
  Antisense strand to SEQ ID NO: 1459448
ccuucuguuagacucauuc

SEQ ID NO: 1459450 - RNA, 19 nt, Artificial Sequence
  Description of Artificial Sequence: Synthetic oligonucleotide
  Sense strand starting at position 1757 of SEQ ID NO: 1244026
cgacccucuccggaaagaa

SEQ ID NO: 1459451 - RNA, 19 nt, Artificial Sequence
  Description of Artificial Sequence: Synthetic oligonucleotide
  Antisense strand to SEQ ID NO: 1459450
uucuuuccggagagggucg

SEQ ID NO: 1459452 - RNA, 19 nt, Artificial Sequence
  Description of Artificial Sequence: Synthetic oligonucleotide
  Sense strand starting at position 2023 of SEQ ID NO: 1244026
augaguccgcgcgaggauu

SEQ ID NO: 1459453 - RNA, 19 nt, Artificial Sequence
  Description of Artificial Sequence: Synthetic oligonucleotide
  Antisense strand to SEQ ID NO: 1459452
aauccucgcgcggacucau

SEQ ID NO: 1459454 - RNA, 19 nt, Artificial Sequence
  Description of Artificial Sequence: Synthetic oligonucleotide
  Sense strand starting at position 2076 of SEQ ID NO: 1244026
agagacaagcgcuaggauu

SEQ ID NO: 1459455 - RNA, 19 nt, Artificial Sequence
  Description of Artificial Sequence: Synthetic oligonucleotide
  Antisense strand to SEQ ID NO: 1459454
aauccuagcgcuugucucu

SEQ ID NO: 1459456 - RNA, 19 nt, Artificial Sequence
  Description of Artificial Sequence: Synthetic oligonucleotide
  Sense strand starting at position 2124 of SEQ ID NO: 1244026
agagaugagcgcugggauu

SEQ ID NO: 1459457 - RNA, 19 nt, Artificial Sequence
  Description of Artificial Sequence: Synthetic oligonucleotide
  Antisense strand to SEQ ID NO: 1459456
aaucccagcgcucaucucu

SEQ ID NO: 1459458 - RNA, 19 nt, Artificial Sequence
  Description of Artificial Sequence: Synthetic oligonucleotide
  Sense strand starting at position 2277 of SEQ ID NO: 1244026
uggaaaugcugauggaaau

SEQ ID NO: 1459459 - RNA, 19 nt, Artificial Sequence
  Description of Artificial Sequence: Synthetic oligonucleotide
  Antisense strand to SEQ ID NO: 1459458
auuuccaucagcauuucca

SEQ ID NO: 1459460 - RNA, 19 nt, Artificial Sequence
  Description of Artificial Sequence: Synthetic oligonucleotide
  Sense strand starting at position 2365 of SEQ ID NO: 1244026
agcccagaauguuaagauu

SEQ ID NO: 1459461 - RNA, 19 nt, Artificial Sequence
  Description of Artificial Sequence: Synthetic oligonucleotide
  Antisense strand to SEQ ID NO: 1459460
aaucuuaacauucugggcu

SEQ ID NO: 1459462 - RNA, 19 nt, Artificial Sequence
  Description of Artificial Sequence: Synthetic oligonucleotide
  Sense strand starting at position 2371 of SEQ ID NO: 1244026
gaauguuaagauugcuuuc

SEQ ID NO: 1459463 - RNA, 19 nt, Artificial Sequence
  Description of Artificial Sequence: Synthetic oligonucleotide
  Antisense strand to SEQ ID NO: 1459462
gaaagcaaucuuaacauuc

SEQ ID NO: 1459464 - RNA, 19 nt, Artificial Sequence
  Description of Artificial Sequence: Synthetic oligonucleotide
  Sense strand starting at position 2704 of SEQ ID NO: 1244026
cggccuccguaauugcaaa

SEQ ID NO: 1459465 - RNA, 19 nt, Artificial Sequence
  Description of Artificial Sequence: Synthetic oligonucleotide
  Antisense strand to SEQ ID NO: 1459464
uuugcaauuacggaggccg

SEQ ID NO: 1459466 - RNA, 19 nt, Artificial Sequence
  Description of Artificial Sequence: Synthetic oligonucleotide
  Sense strand starting at position 2759 of SEQ ID NO: 1244026
acgucuauauccuacugga

SEQ ID NO: 1459467 - RNA, 19 nt, Artificial Sequence
  Description of Artificial Sequence: Synthetic oligonucleotide
  Antisense strand to SEQ ID NO: 1459466
uccaguaggauauagacgu

SEQ ID NO: 1459468 - RNA, 19 nt, Artificial Sequence
  Description of Artificial Sequence: Synthetic oligonucleotide
  Sense strand starting at position 2775 of SEQ ID NO: 1244026
ggauccgucucucuggaga

SEQ ID NO: 1459469 - RNA, 19 nt, Artificial Sequence
  Description of Artificial Sequence: Synthetic oligonucleotide
  Antisense strand to SEQ ID NO: 1459468
ucuccagagagacggaucc

SEQ ID NO: 1459470 - RNA, 19 nt, Artificial Sequence
  Description of Artificial Sequence: Synthetic oligonucleotide
  Sense strand starting at position 2943 of SEQ ID NO: 1244026
aguuaauauuaccuacagu

SEQ ID NO: 1459471 - RNA, 19 nt, Artificial Sequence
  Description of Artificial Sequence: Synthetic oligonucleotide
  Antisense strand to SEQ ID NO: 1459470
acuguagguaauauuaacu

SEQ ID NO: 1459472 - RNA, 19 nt, Artificial Sequence
  Description of Artificial Sequence: Synthetic oligonucleotide
  Sense strand starting at position 3001 of SEQ ID NO: 1244026
uaggaaaugucgcuucccu

SEQ ID NO: 1459473 - RNA, 19 nt, Artificial Sequence
  Description of Artificial Sequence: Synthetic oligonucleotide
  Antisense strand to SEQ ID NO: 1459472
agggaagcgacauuuccua

SEQ ID NO: 1459474 - RNA, 19 nt, Artificial Sequence
  Description of Artificial Sequence: Synthetic oligonucleotide
  Sense strand starting at position 3171 of SEQ ID NO: 1244026
guguguauaccgcauuuca

SEQ ID NO: 1459475 - RNA, 19 nt, Artificial Sequence
  Description of Artificial Sequence: Synthetic oligonucleotide
  Antisense strand to SEQ ID NO: 1459474
ugaaaugcgguauacacac

SEQ ID NO: 1459476 - RNA, 19 nt, Artificial Sequence
  Description of Artificial Sequence: Synthetic oligonucleotide
  Sense strand starting at position 3398 of SEQ ID NO: 1244026
cgcagaugguaauagauaa

SEQ ID NO: 1459477 - RNA, 19 nt, Artificial Sequence
  Description of Artificial Sequence: Synthetic oligonucleotide
  Antisense strand to SEQ ID NO: 1459476
uuaucuauuaccaucugcg

SEQ ID NO: 1459478 - RNA, 19 nt, Artificial Sequence
  Description of Artificial Sequence: Synthetic oligonucleotide
  Sense strand starting at position 3432 of SEQ ID NO: 1244026
agagaagagugagagaauu

SEQ ID NO: 1459479 - RNA, 19 nt, Artificial Sequence
  Description of Artificial Sequence: Synthetic oligonucleotide
  Antisense strand to SEQ ID NO: 1459478
aauucucucacucuucucu

SEQ ID NO: 1459480 - RNA, 19 nt, Artificial Sequence
  Description of Artificial Sequence: Synthetic oligonucleotide
  Sense strand starting at position 3547 of SEQ ID NO: 1244026
ccuugaccguuuggacauu

SEQ ID NO: 1459481 - RNA, 19 nt, Artificial Sequence
  Description of Artificial Sequence: Synthetic oligonucleotide
  Antisense strand to SEQ ID NO: 1459480
aauguccaaacggucaagg

SEQ ID NO: 1459482 - RNA, 19 nt, Artificial Sequence
  Description of Artificial Sequence: Synthetic oligonucleotide
  Sense strand starting at position 3601 of SEQ ID NO: 1244026
gaacuaugccaccguuaag

SEQ ID NO: 1459483 - RNA, 19 nt, Artificial Sequence
  Description of Artificial Sequence: Synthetic oligonucleotide
  Antisense strand to SEQ ID NO: 1459482
cuuaacgguggcauaguuc

SEQ ID NO: 1459484 - RNA, 19 nt, Artificial Sequence
  Description of Artificial Sequence: Synthetic oligonucleotide
  Sense strand starting at position 3604 of SEQ ID NO: 1244026
cuaugccaccguuaaguuu

SEQ ID NO: 1459485 - RNA, 19 nt, Artificial Sequence
  Description of Artificial Sequence: Synthetic oligonucleotide
  Antisense strand to SEQ ID NO: 1459484
aaacuuaacgguggcauag

SEQ ID NO: 1459486 - RNA, 19 nt, Artificial Sequence
  Description of Artificial Sequence: Synthetic oligonucleotide
  Sense strand starting at position 157 of SEQ ID NO: 1244027
cuccgaucuuaauuaaguu

SEQ ID NO: 1459487 - RNA, 19 nt, Artificial Sequence
  Description of Artificial Sequence: Synthetic oligonucleotide
  Antisense strand to SEQ ID NO: 1459486
aacuuaauuaagaucggag

SEQ ID NO: 1459488 - RNA, 19 nt, Artificial Sequence
  Description of Artificial Sequence: Synthetic oligonucleotide
  Sense strand starting at position 173 of SEQ ID NO: 1244027
guugucuaagaccauaaau

SEQ ID NO: 1459489 - RNA, 19 nt, Artificial Sequence
  Description of Artificial Sequence: Synthetic oligonucleotide
  Antisense strand to SEQ ID NO: 1459488
auuuauggucuuagacaac

SEQ ID NO: 1459490 - RNA, 19 nt, Artificial Sequence
  Description of Artificial Sequence: Synthetic oligonucleotide
  Sense strand starting at position 203 of SEQ ID NO: 1244027
agaacuuggaucugaguuu

SEQ ID NO: 1459491 - RNA, 19 nt, Artificial Sequence
  Description of Artificial Sequence: Synthetic oligonucleotide
  Antisense strand to SEQ ID NO: 1459490
aaacucagauccaaguucu

SEQ ID NO: 1459492 - RNA, 19 nt, Artificial Sequence
  Description of Artificial Sequence: Synthetic oligonucleotide
  Sense strand starting at position 220 of SEQ ID NO: 1244027
uugggcuucuaguccaaga

SEQ ID NO: 1459493 - RNA, 19 nt, Artificial Sequence
  Description of Artificial Sequence: Synthetic oligonucleotide
  Antisense strand to SEQ ID NO: 1459492
ucuuggacuagaagcccaa

SEQ ID NO: 1459494 - RNA, 19 nt, Artificial Sequence
  Description of Artificial Sequence: Synthetic oligonucleotide
  Sense strand starting at position 222 of SEQ ID NO: 1244027
gggcuucuaguccaagauu

SEQ ID NO: 1459495 - RNA, 19 nt, Artificial Sequence
  Description of Artificial Sequence: Synthetic oligonucleotide
  Antisense strand to SEQ ID NO: 1459494
aaucuuggacuagaagccc

SEQ ID NO: 1459496 - RNA, 19 nt, Artificial Sequence
  Description of Artificial Sequence: Synthetic oligonucleotide
  Sense strand starting at position 230 of SEQ ID NO: 1244027
aguccaagauucccaguau

SEQ ID NO: 1459497 - RNA, 19 nt, Artificial Sequence
  Description of Artificial Sequence: Synthetic oligonucleotide
  Antisense strand to SEQ ID NO: 1459496
auacugggaaucuuggacu

SEQ ID NO: 1459498 - RNA, 19 nt, Artificial Sequence
  Description of Artificial Sequence: Synthetic oligonucleotide
  Sense strand starting at position 241 of SEQ ID NO: 1244027
cccaguauaccaugaaguu

SEQ ID NO: 1459499 - RNA, 19 nt, Artificial Sequence
  Description of Artificial Sequence: Synthetic oligonucleotide
  Antisense strand to SEQ ID NO: 1459498
aacuucaugguauacuggg

SEQ ID NO: 1459500 - RNA, 19 nt, Artificial Sequence
  Description of Artificial Sequence: Synthetic oligonucleotide
  Sense strand starting at position 242 of SEQ ID NO: 1244027
ccaguauaccaugaaguuu

SEQ ID NO: 1459501 - RNA, 19 nt, Artificial Sequence
  Description of Artificial Sequence: Synthetic oligonucleotide
  Antisense strand to SEQ ID NO: 1459500
aaacuucaugguauacugg

SEQ ID NO: 1459502 - RNA, 19 nt, Artificial Sequence
  Description of Artificial Sequence: Synthetic oligonucleotide
  Sense strand starting at position 264 of SEQ ID NO: 1244027
acgagcauccaucacuuua

SEQ ID NO: 1459503 - RNA, 19 nt, Artificial Sequence
  Description of Artificial Sequence: Synthetic oligonucleotide
  Antisense strand to SEQ ID NO: 1459502
uaaagugauggaugcucgu

SEQ ID NO: 1459504 - RNA, 19 nt, Artificial Sequence
  Description of Artificial Sequence: Synthetic oligonucleotide
  Sense strand starting at position 416 of SEQ ID NO: 1244027
auuugaagauaguaacaga

SEQ ID NO: 1459505 - RNA, 19 nt, Artificial Sequence
  Description of Artificial Sequence: Synthetic oligonucleotide
  Antisense strand to SEQ ID NO: 1459504
ucuguuacuaucuucaaau

SEQ ID NO: 1459506 - RNA, 19 nt, Artificial Sequence
  Description of Artificial Sequence: Synthetic oligonucleotide
  Sense strand starting at position 473 of SEQ ID NO: 1244027
ggcuauuugugacugcaca

SEQ ID NO: 1459507 - RNA, 19 nt, Artificial Sequence
  Description of Artificial Sequence: Synthetic oligonucleotide
  Antisense strand to SEQ ID NO: 1459506
ugugcagucacaaauagcc

SEQ ID NO: 1459508 - RNA, 19 nt, Artificial Sequence
  Description of Artificial Sequence: Synthetic oligonucleotide
  Sense strand starting at position 509 of SEQ ID NO: 1244027
gugggugaccugcaaguaa

SEQ ID NO: 1459509 - RNA, 19 nt, Artificial Sequence
  Description of Artificial Sequence: Synthetic oligonucleotide
  Antisense strand to SEQ ID NO: 1459508
uuacuugcaggucacccac

SEQ ID NO: 1459510 - RNA, 19 nt, Artificial Sequence
  Description of Artificial Sequence: Synthetic oligonucleotide
  Sense strand starting at position 576 of SEQ ID NO: 1244027
uccuuuccuuccuuggaga

SEQ ID NO: 1459511 - RNA, 19 nt, Artificial Sequence
  Description of Artificial Sequence: Synthetic oligonucleotide
  Antisense strand to SEQ ID NO: 1459510
ucuccaaggaaggaaagga

SEQ ID NO: 1459512 - RNA, 19 nt, Artificial Sequence
  Description of Artificial Sequence: Synthetic oligonucleotide
  Sense strand starting at position 587 of SEQ ID NO: 1244027
cuuggagacucagcucaaa

SEQ ID NO: 1459513 - RNA, 19 nt, Artificial Sequence
  Description of Artificial Sequence: Synthetic oligonucleotide
  Antisense strand to SEQ ID NO: 1459512
uuugagcugagucuccaag

SEQ ID NO: 1459514 - RNA, 19 nt, Artificial Sequence
  Description of Artificial Sequence: Synthetic oligonucleotide
  Sense strand starting at position 945 of SEQ ID NO: 1244027
ggagcagucagguagauga

SEQ ID NO: 1459515 - RNA, 19 nt, Artificial Sequence
  Description of Artificial Sequence: Synthetic oligonucleotide
  Antisense strand to SEQ ID NO: 1459514
ucaucuaccugacugcucc

SEQ ID NO: 1459516 - RNA, 19 nt, Artificial Sequence
  Description of Artificial Sequence: Synthetic oligonucleotide
  Sense strand starting at position 1108 of SEQ ID NO: 1244027
uccauaugccuccaagaag

SEQ ID NO: 1459517 - RNA, 19 nt, Artificial Sequence
  Description of Artificial Sequence: Synthetic oligonucleotide
  Antisense strand to SEQ ID NO: 1459516
cuucuuggaggcauaugga

SEQ ID NO: 1459518 - RNA, 19 nt, Artificial Sequence
  Description of Artificial Sequence: Synthetic oligonucleotide
  Sense strand starting at position 1111 of SEQ ID NO: 1244027
auaugccuccaagaaguga

SEQ ID NO: 1459519 - RNA, 19 nt, Artificial Sequence
  Description of Artificial Sequence: Synthetic oligonucleotide
  Antisense strand to SEQ ID NO: 1459518
ucacuucuuggaggcauau

SEQ ID NO: 1459520 - RNA, 19 nt, Artificial Sequence
  Description of Artificial Sequence: Synthetic oligonucleotide
  Sense strand starting at position 1203 of SEQ ID NO: 1244027
gugacaagucagggaagua

SEQ ID NO: 1459521 - RNA, 19 nt, Artificial Sequence
  Description of Artificial Sequence: Synthetic oligonucleotide
  Antisense strand to SEQ ID NO: 1459520
uacuucccugacuugucac

SEQ ID NO: 1459522 - RNA, 19 nt, Artificial Sequence
  Description of Artificial Sequence: Synthetic oligonucleotide
  Sense strand starting at position 1472 of SEQ ID NO: 1244027
uggugguggcgcgucaaua

SEQ ID NO: 1459523 - RNA, 19 nt, Artificial Sequence
  Description of Artificial Sequence: Synthetic oligonucleotide
  Antisense strand to SEQ ID NO: 1459522
uauugacgcgccaccacca

SEQ ID NO: 1459524 - RNA, 19 nt, Artificial Sequence
  Description of Artificial Sequence: Synthetic oligonucleotide
  Sense strand starting at position 1482 of SEQ ID NO: 1244027
gcgucaauagucccagcua

SEQ ID NO: 1459525 - RNA, 19 nt, Artificial Sequence
  Description of Artificial Sequence: Synthetic oligonucleotide
  Antisense strand to SEQ ID NO: 1459524
uagcugggacuauugacgc

SEQ ID NO: 1459526 - RNA, 19 nt, Artificial Sequence
  Description of Artificial Sequence: Synthetic oligonucleotide
  Sense strand starting at position 2221 of SEQ ID NO: 1244027
ucuaauacuccauggugau

SEQ ID NO: 1459527 - RNA, 19 nt, Artificial Sequence
  Description of Artificial Sequence: Synthetic oligonucleotide
  Antisense strand to SEQ ID NO: 1459526
aucaccauggaguauuaga

SEQ ID NO: 1459528 - RNA, 19 nt, Artificial Sequence
  Description of Artificial Sequence: Synthetic oligonucleotide
  Sense strand starting at position 2222 of SEQ ID NO: 1244027
cuaauacuccauggugaug

SEQ ID NO: 1459529 - RNA, 19 nt, Artificial Sequence
  Description of Artificial Sequence: Synthetic oligonucleotide
  Antisense strand to SEQ ID NO: 1459528
caucaccauggaguauuag

SEQ ID NO: 1459530 - RNA, 19 nt, Artificial Sequence
  Description of Artificial Sequence: Synthetic oligonucleotide
  Sense strand starting at position 2354 of SEQ ID NO: 1244027
ugguguggcccugagagau

SEQ ID NO: 1459531 - RNA, 19 nt, Artificial Sequence
  Description of Artificial Sequence: Synthetic oligonucleotide
  Antisense strand to SEQ ID NO: 1459530
aucucucagggccacacca

SEQ ID NO: 1459532 - RNA, 19 nt, Artificial Sequence
  Description of Artificial Sequence: Synthetic oligonucleotide
  Sense strand starting at position 2400 of SEQ ID NO: 1244027
gagggaaacuuuguccgua

SEQ ID NO: 1459533 - RNA, 19 nt, Artificial Sequence
  Description of Artificial Sequence: Synthetic oligonucleotide
  Antisense strand to SEQ ID NO: 1459532
uacggacaaaguuucccuc

SEQ ID NO: 1459534 - RNA, 19 nt, Artificial Sequence
  Description of Artificial Sequence: Synthetic oligonucleotide
  Sense strand starting at position 2402 of SEQ ID NO: 1244027
gggaaacuuuguccguaga

SEQ ID NO: 1459535 - RNA, 19 nt, Artificial Sequence
  Description of Artificial Sequence: Synthetic oligonucleotide
  Antisense strand to SEQ ID NO: 1459534
ucuacggacaaaguuuccc

SEQ ID NO: 1459536 - RNA, 19 nt, Artificial Sequence
  Description of Artificial Sequence: Synthetic oligonucleotide
  Sense strand starting at position 2403 of SEQ ID NO: 1244027
ggaaacuuuguccguagaa

SEQ ID NO: 1459537 - RNA, 19 nt, Artificial Sequence
  Description of Artificial Sequence: Synthetic oligonucleotide
  Antisense strand to SEQ ID NO: 1459536
uucuacggacaaaguuucc

SEQ ID NO: 1459538 - RNA, 19 nt, Artificial Sequence
  Description of Artificial Sequence: Synthetic oligonucleotide
  Sense strand starting at position 2404 of SEQ ID NO: 1244027
gaaacuuuguccguagaag

SEQ ID NO: 1459539 - RNA, 19 nt, Artificial Sequence
  Description of Artificial Sequence: Synthetic oligonucleotide
  Antisense strand to SEQ ID NO: 1459538
cuucuacggacaaaguuuc

SEQ ID NO: 1459540 - RNA, 19 nt, Artificial Sequence
  Description of Artificial Sequence: Synthetic oligonucleotide
  Sense strand starting at position 2405 of SEQ ID NO: 1244027
aaacuuuguccguagaagc

SEQ ID NO: 1459541 - RNA, 19 nt, Artificial Sequence
  Description of Artificial Sequence: Synthetic oligonucleotide
  Antisense strand to SEQ ID NO: 1459540
gcuucuacggacaaaguuu

SEQ ID NO: 1459542 - RNA, 19 nt, Artificial Sequence
  Description of Artificial Sequence: Synthetic oligonucleotide
  Sense strand starting at position 2465 of SEQ ID NO: 1244027
gugcccagucgguuaguga

SEQ ID NO: 1459543 - RNA, 19 nt, Artificial Sequence
  Description of Artificial Sequence: Synthetic oligonucleotide
  Antisense strand to SEQ ID NO: 1459542
ucacuaaccgacugggcac

SEQ ID NO: 1459544 - RNA, 19 nt, Artificial Sequence
  Description of Artificial Sequence: Synthetic oligonucleotide
  Sense strand starting at position 2472 of SEQ ID NO: 1244027
gucgguuagugaaagggaa

SEQ ID NO: 1459545 - RNA, 19 nt, Artificial Sequence
  Description of Artificial Sequence: Synthetic oligonucleotide
  Antisense strand to SEQ ID NO: 1459544
uucccuuucacuaaccgac

SEQ ID NO: 1459546 - RNA, 19 nt, Artificial Sequence
  Description of Artificial Sequence: Synthetic oligonucleotide
  Sense strand starting at position 2518 of SEQ ID NO: 1244027
gcucacauaugaucagacu

SEQ ID NO: 1459547 - RNA, 19 nt, Artificial Sequence
  Description of Artificial Sequence: Synthetic oligonucleotide
  Antisense strand to SEQ ID NO: 1459546
agucugaucauaugugagc

SEQ ID NO: 1459548 - RNA, 19 nt, Artificial Sequence
  Description of Artificial Sequence: Synthetic oligonucleotide
  Sense strand starting at position 2584 of SEQ ID NO: 1244027
uccuguguggagugacaau

SEQ ID NO: 1459549 - RNA, 19 nt, Artificial Sequence
  Description of Artificial Sequence: Synthetic oligonucleotide
  Antisense strand to SEQ ID NO: 1459548
auugucacuccacacagga

SEQ ID NO: 1459550 - RNA, 19 nt, Artificial Sequence
  Description of Artificial Sequence: Synthetic oligonucleotide
  Sense strand starting at position 2733 of SEQ ID NO: 1244027
ugcagagucagauguggau

SEQ ID NO: 1459551 - RNA, 19 nt, Artificial Sequence
  Description of Artificial Sequence: Synthetic oligonucleotide
  Antisense strand to SEQ ID NO: 1459550
auccacaucugacucugca

SEQ ID NO: 1459552 - RNA, 19 nt, Artificial Sequence
  Description of Artificial Sequence: Synthetic oligonucleotide
  Sense strand starting at position 2737 of SEQ ID NO: 1244027
gagucagauguggauguga

SEQ ID NO: 1459553 - RNA, 19 nt, Artificial Sequence
  Description of Artificial Sequence: Synthetic oligonucleotide
  Antisense strand to SEQ ID NO: 1459552
ucacauccacaucugacuc

SEQ ID NO: 1459554 - RNA, 19 nt, Artificial Sequence
  Description of Artificial Sequence: Synthetic oligonucleotide
  Sense strand starting at position 2739 of SEQ ID NO: 1244027
gucagauguggaugugaag

SEQ ID NO: 1459555 - RNA, 19 nt, Artificial Sequence
  Description of Artificial Sequence: Synthetic oligonucleotide
  Antisense strand to SEQ ID NO: 1459554
cuucacauccacaucugac

SEQ ID NO: 1459556 - RNA, 19 nt, Artificial Sequence
  Description of Artificial Sequence: Synthetic oligonucleotide
  Sense strand starting at position 2864 of SEQ ID NO: 1244027
acagauuugugaugagaua

SEQ ID NO: 1459557 - RNA, 19 nt, Artificial Sequence
  Description of Artificial Sequence: Synthetic oligonucleotide
  Antisense strand to SEQ ID NO: 1459556
uaucucaucacaaaucugu

SEQ ID NO: 1459558 - RNA, 19 nt, Artificial Sequence
  Description of Artificial Sequence: Synthetic oligonucleotide
  Sense strand starting at position 3484 of SEQ ID NO: 1244027
ggucgucuugugucgcauu

SEQ ID NO: 1459559 - RNA, 19 nt, Artificial Sequence
  Description of Artificial Sequence: Synthetic oligonucleotide
  Antisense strand to SEQ ID NO: 1459558
aaugcgacacaagacgacc

SEQ ID NO: 1459560 - RNA, 19 nt, Artificial Sequence
  Description of Artificial Sequence: Synthetic oligonucleotide
  Sense strand starting at position 3511 of SEQ ID NO: 1244027
agcggagauccguuccguu

SEQ ID NO: 1459561 - RNA, 19 nt, Artificial Sequence
  Description of Artificial Sequence: Synthetic oligonucleotide
  Antisense strand to SEQ ID NO: 1459560
aacggaacggaucuccgcu

SEQ ID NO: 1459562 - RNA, 19 nt, Artificial Sequence
  Description of Artificial Sequence: Synthetic oligonucleotide
  Sense strand starting at position 3512 of SEQ ID NO: 1244027
gcggagauccguuccguuu

SEQ ID NO: 1459563 - RNA, 19 nt, Artificial Sequence
  Description of Artificial Sequence: Synthetic oligonucleotide
  Antisense strand to SEQ ID NO: 1459562
aaacggaacggaucuccgc

SEQ ID NO: 1459564 - RNA, 19 nt, Artificial Sequence
  Description of Artificial Sequence: Synthetic oligonucleotide
  Sense strand starting at position 3548 of SEQ ID NO: 1244027
acagaaggcucuuuagaag

SEQ ID NO: 1459565 - RNA, 19 nt, Artificial Sequence
  Description of Artificial Sequence: Synthetic oligonucleotide
  Antisense strand to SEQ ID NO: 1459564
cuucuaaagagccuucugu

SEQ ID NO: 1459566 - RNA, 19 nt, Artificial Sequence
  Description of Artificial Sequence: Synthetic oligonucleotide
  Sense strand starting at position 210 of SEQ ID NO: 1244028
cagggcagugucuaggaau

SEQ ID NO: 1459567 - RNA, 19 nt, Artificial Sequence
  Description of Artificial Sequence: Synthetic oligonucleotide
  Antisense strand to SEQ ID NO: 1459566
auuccuagacacugcccug

SEQ ID NO: 1459568 - RNA, 19 nt, Artificial Sequence
  Description of Artificial Sequence: Synthetic oligonucleotide
  Sense strand starting at position 276 of SEQ ID NO: 1244028
aggagauucuguccacgca

SEQ ID NO: 1459569 - RNA, 19 nt, Artificial Sequence
  Description of Artificial Sequence: Synthetic oligonucleotide
  Antisense strand to SEQ ID NO: 1459568
ugcguggacagaaucuccu

SEQ ID NO: 1459570 - RNA, 19 nt, Artificial Sequence
  Description of Artificial Sequence: Synthetic oligonucleotide
  Sense strand starting at position 328 of SEQ ID NO: 1244028
ggaugaauggcagguuauu

SEQ ID NO: 1459571 - RNA, 19 nt, Artificial Sequence
  Description of Artificial Sequence: Synthetic oligonucleotide
  Antisense strand to SEQ ID NO: 1459570
aauaaccugccauucaucc

SEQ ID NO: 1459572 - RNA, 19 nt, Artificial Sequence
  Description of Artificial Sequence: Synthetic oligonucleotide
  Sense strand starting at position 502 of SEQ ID NO: 1244028
gccuacuuggccugcagau

SEQ ID NO: 1459573 - RNA, 19 nt, Artificial Sequence
  Description of Artificial Sequence: Synthetic oligonucleotide
  Antisense strand to SEQ ID NO: 1459572
aucugcaggccaaguaggc

SEQ ID NO: 1459574 - RNA, 19 nt, Artificial Sequence
  Description of Artificial Sequence: Synthetic oligonucleotide
  Sense strand starting at position 628 of SEQ ID NO: 1244028
agcagaaguuguccgugau

SEQ ID NO: 1459575 - RNA, 19 nt, Artificial Sequence
  Description of Artificial Sequence: Synthetic oligonucleotide
  Antisense strand to SEQ ID NO: 1459574
aucacggacaacuucugcu

SEQ ID NO: 1459576 - RNA, 19 nt, Artificial Sequence
  Description of Artificial Sequence: Synthetic oligonucleotide
  Sense strand starting at position 631 of SEQ ID NO: 1244028
agaaguuguccgugaucca

SEQ ID NO: 1459577 - RNA, 19 nt, Artificial Sequence
  Description of Artificial Sequence: Synthetic oligonucleotide
  Antisense strand to SEQ ID NO: 1459576
uggaucacggacaacuucu

SEQ ID NO: 1459578 - RNA, 19 nt, Artificial Sequence
  Description of Artificial Sequence: Synthetic oligonucleotide
  Sense strand starting at position 632 of SEQ ID NO: 1244028
gaaguuguccgugauccac

SEQ ID NO: 1459579 - RNA, 19 nt, Artificial Sequence
  Description of Artificial Sequence: Synthetic oligonucleotide
  Antisense strand to SEQ ID NO: 1459578
guggaucacggacaacuuc

SEQ ID NO: 1459580 - RNA, 19 nt, Artificial Sequence
  Description of Artificial Sequence: Synthetic oligonucleotide
  Sense strand starting at position 634 of SEQ ID NO: 1244028
aguuguccgugauccacuu

SEQ ID NO: 1459581 - RNA, 19 nt, Artificial Sequence
  Description of Artificial Sequence: Synthetic oligonucleotide
  Antisense strand to SEQ ID NO: 1459580
aaguggaucacggacaacu

SEQ ID NO: 1459582 - RNA, 19 nt, Artificial Sequence
  Description of Artificial Sequence: Synthetic oligonucleotide
  Sense strand starting at position 640 of SEQ ID NO: 1244028
ccgugauccacuuguagau

SEQ ID NO: 1459583 - RNA, 19 nt, Artificial Sequence
  Description of Artificial Sequence: Synthetic oligonucleotide
  Antisense strand to SEQ ID NO: 1459582
aucuacaaguggaucacgg

SEQ ID NO: 1459584 - RNA, 19 nt, Artificial Sequence
  Description of Artificial Sequence: Synthetic oligonucleotide
  Sense strand starting at position 949 of SEQ ID NO: 1244028
gggccuuggcguugagaau

SEQ ID NO: 1459585 - RNA, 19 nt, Artificial Sequence
  Description of Artificial Sequence: Synthetic oligonucleotide
  Antisense strand to SEQ ID NO: 1459584
auucucaacgccaaggccc

SEQ ID NO: 1459586 - RNA, 19 nt, Artificial Sequence
  Description of Artificial Sequence: Synthetic oligonucleotide
  Sense strand starting at position 950 of SEQ ID NO: 1244028
ggccuuggcguugagaaug

SEQ ID NO: 1459587 - RNA, 19 nt, Artificial Sequence
  Description of Artificial Sequence: Synthetic oligonucleotide
  Antisense strand to SEQ ID NO: 1459586
cauucucaacgccaaggcc

SEQ ID NO: 1459588 - RNA, 19 nt, Artificial Sequence
  Description of Artificial Sequence: Synthetic oligonucleotide
  Sense strand starting at position 955 of SEQ ID NO: 1244028
uggcguugagaauggagaa

SEQ ID NO: 1459589 - RNA, 19 nt, Artificial Sequence
  Description of Artificial Sequence: Synthetic oligonucleotide
  Antisense strand to SEQ ID NO: 1459588
uucuccauucucaacgcca

SEQ ID NO: 1459590 - RNA, 19 nt, Artificial Sequence
  Description of Artificial Sequence: Synthetic oligonucleotide
  Sense strand starting at position 956 of SEQ ID NO: 1244028
ggcguugagaauggagaau

SEQ ID NO: 1459591 - RNA, 19 nt, Artificial Sequence
  Description of Artificial Sequence: Synthetic oligonucleotide
  Antisense strand to SEQ ID NO: 1459590
auucuccauucucaacgcc

SEQ ID NO: 1459592 - RNA, 19 nt, Artificial Sequence
  Description of Artificial Sequence: Synthetic oligonucleotide
  Sense strand starting at position 968 of SEQ ID NO: 1244028
ggagaauuccugcagccac

SEQ ID NO: 1459593 - RNA, 19 nt, Artificial Sequence
  Description of Artificial Sequence: Synthetic oligonucleotide
  Antisense strand to SEQ ID NO: 1459592
guggcugcaggaauucucc

SEQ ID NO: 1459594 - RNA, 19 nt, Artificial Sequence
  Description of Artificial Sequence: Synthetic oligonucleotide
  Sense strand starting at position 1240 of SEQ ID NO: 1244028
gccuccuccgaauaaguau

SEQ ID NO: 1459595 - RNA, 19 nt, Artificial Sequence
  Description of Artificial Sequence: Synthetic oligonucleotide
  Antisense strand to SEQ ID NO: 1459594
auacuuauucggaggaggc

SEQ ID NO: 1459596 - RNA, 19 nt, Artificial Sequence
  Description of Artificial Sequence: Synthetic oligonucleotide
  Sense strand starting at position 1700 of SEQ ID NO: 1244028
agacuucuccgaugucagu

SEQ ID NO: 1459597 - RNA, 19 nt, Artificial Sequence
  Description of Artificial Sequence: Synthetic oligonucleotide
  Antisense strand to SEQ ID NO: 1459596
acugacaucggagaagucu

SEQ ID NO: 1459598 - RNA, 19 nt, Artificial Sequence
  Description of Artificial Sequence: Synthetic oligonucleotide
  Sense strand starting at position 1734 of SEQ ID NO: 1244028
uuccguuaaggacgaauga

SEQ ID NO: 1459599 - RNA, 19 nt, Artificial Sequence
  Description of Artificial Sequence: Synthetic oligonucleotide
  Antisense strand to SEQ ID NO: 1459598
ucauucguccuuaacggaa

SEQ ID NO: 1459600 - RNA, 19 nt, Artificial Sequence
  Description of Artificial Sequence: Synthetic oligonucleotide
  Sense strand starting at position 1839 of SEQ ID NO: 1244028
agaggaagguucuggaaga

SEQ ID NO: 1459601 - RNA, 19 nt, Artificial Sequence
  Description of Artificial Sequence: Synthetic oligonucleotide
  Antisense strand to SEQ ID NO: 1459600
ucuuccagaaccuuccucu

SEQ ID NO: 1459602 - RNA, 19 nt, Artificial Sequence
  Description of Artificial Sequence: Synthetic oligonucleotide
  Sense strand starting at position 2097 of SEQ ID NO: 1244028
ggcggcaacucucuucgaa

SEQ ID NO: 1459603 - RNA, 19 nt, Artificial Sequence
  Description of Artificial Sequence: Synthetic oligonucleotide
  Antisense strand to SEQ ID NO: 1459602
uucgaagagaguugccgcc

SEQ ID NO: 1459604 - RNA, 19 nt, Artificial Sequence
  Description of Artificial Sequence: Synthetic oligonucleotide
  Sense strand starting at position 2099 of SEQ ID NO: 1244028
cggcaacucucuucgaacu

SEQ ID NO: 1459605 - RNA, 19 nt, Artificial Sequence
  Description of Artificial Sequence: Synthetic oligonucleotide
  Antisense strand to SEQ ID NO: 1459604
aguucgaagagaguugccg

SEQ ID NO: 1459606 - RNA, 19 nt, Artificial Sequence
  Description of Artificial Sequence: Synthetic oligonucleotide
  Sense strand starting at position 2386 of SEQ ID NO: 1244028
aaccguauccuugagguuu

SEQ ID NO: 1459607 - RNA, 19 nt, Artificial Sequence
  Description of Artificial Sequence: Synthetic oligonucleotide
  Antisense strand to SEQ ID NO: 1459606
aaaccucaaggauacgguu

SEQ ID NO: 1459608 - RNA, 19 nt, Artificial Sequence
  Description of Artificial Sequence: Synthetic oligonucleotide
  Sense strand starting at position 2616 of SEQ ID NO: 1244028
guuccaggaagcugacauu

SEQ ID NO: 1459609 - RNA, 19 nt, Artificial Sequence
  Description of Artificial Sequence: Synthetic oligonucleotide
  Antisense strand to SEQ ID NO: 1459608
aaugucagcuuccuggaac

SEQ ID NO: 1459610 - RNA, 19 nt, Artificial Sequence
  Description of Artificial Sequence: Synthetic oligonucleotide
  Sense strand starting at position 2626 of SEQ ID NO: 1244028
gcugacauuccagaggcuu

SEQ ID NO: 1459611 - RNA, 19 nt, Artificial Sequence
  Description of Artificial Sequence: Synthetic oligonucleotide
  Antisense strand to SEQ ID NO: 1459610
aagccucuggaaugucagc

SEQ ID NO: 1459612 - RNA, 19 nt, Artificial Sequence
  Description of Artificial Sequence: Synthetic oligonucleotide
  Sense strand starting at position 2766 of SEQ ID NO: 1244028
accuuuaagucacagggau

SEQ ID NO: 1459613 - RNA, 19 nt, Artificial Sequence
  Description of Artificial Sequence: Synthetic oligonucleotide
  Antisense strand to SEQ ID NO: 1459612
aucccugugacuuaaaggu

SEQ ID NO: 1459614 - RNA, 19 nt, Artificial Sequence
  Description of Artificial Sequence: Synthetic oligonucleotide
  Sense strand starting at position 2862 of SEQ ID NO: 1244028
gcucuuuaauuauugagga

SEQ ID NO: 1459615 - RNA, 19 nt, Artificial Sequence
  Description of Artificial Sequence: Synthetic oligonucleotide
  Antisense strand to SEQ ID NO: 1459614
uccucaauaauuaaagagc

SEQ ID NO: 1459616 - RNA, 19 nt, Artificial Sequence
  Description of Artificial Sequence: Synthetic oligonucleotide
  Sense strand starting at position 3444 of SEQ ID NO: 1244028
guggucugugcccaggaga

SEQ ID NO: 1459617 - RNA, 19 nt, Artificial Sequence
  Description of Artificial Sequence: Synthetic oligonucleotide
  Antisense strand to SEQ ID NO: 1459616
ucuccugggcacagaccac

SEQ ID NO: 1459618 - RNA, 19 nt, Artificial Sequence
  Description of Artificial Sequence: Synthetic oligonucleotide
  Sense strand starting at position 3642 of SEQ ID NO: 1244028
accucuucucuuuggguga

SEQ ID NO: 1459619 - RNA, 19 nt, Artificial Sequence
  Description of Artificial Sequence: Synthetic oligonucleotide
  Antisense strand to SEQ ID NO: 1459618
ucacccaaagagaagaggu

SEQ ID NO: 1459620 - RNA, 19 nt, Artificial Sequence
  Description of Artificial Sequence: Synthetic oligonucleotide
  Sense strand starting at position 3663 of SEQ ID NO: 1244028
uguugacgugacuauguga

SEQ ID NO: 1459621 - RNA, 19 nt, Artificial Sequence
  Description of Artificial Sequence: Synthetic oligonucleotide
  Antisense strand to SEQ ID NO: 1459620
ucacauagucacgucaaca

SEQ ID NO: 1459622 - RNA, 19 nt, Artificial Sequence
  Description of Artificial Sequence: Synthetic oligonucleotide
  Sense strand starting at position 3674 of SEQ ID NO: 1244028
cuaugugacugucuccaga

SEQ ID NO: 1459623 - RNA, 19 nt, Artificial Sequence
  Description of Artificial Sequence: Synthetic oligonucleotide
  Antisense strand to SEQ ID NO: 1459622
ucuggagacagucacauag

SEQ ID NO: 1459624 - RNA, 19 nt, Artificial Sequence
  Description of Artificial Sequence: Synthetic oligonucleotide
  Sense strand starting at position 3676 of SEQ ID NO: 1244028
augugacugucuccagaug

SEQ ID NO: 1459625 - RNA, 19 nt, Artificial Sequence
  Description of Artificial Sequence: Synthetic oligonucleotide
  Antisense strand to SEQ ID NO: 1459624
caucuggagacagucacau

SEQ ID NO: 1459626 - RNA, 19 nt, Artificial Sequence
  Description of Artificial Sequence: Synthetic oligonucleotide
  Sense strand starting at position 3677 of SEQ ID NO: 1244028
ugugacugucuccagauga

SEQ ID NO: 1459627 - RNA, 19 nt, Artificial Sequence
  Description of Artificial Sequence: Synthetic oligonucleotide
  Antisense strand to SEQ ID NO: 1459626
ucaucuggagacagucaca

SEQ ID NO: 1459628 - RNA, 19 nt, Artificial Sequence
  Description of Artificial Sequence: Synthetic oligonucleotide
  Sense strand starting at position 3681 of SEQ ID NO: 1244028
acugucuccagaugaagga

SEQ ID NO: 1459629 - RNA, 19 nt, Artificial Sequence
  Description of Artificial Sequence: Synthetic oligonucleotide
  Antisense strand to SEQ ID NO: 1459628
uccuucaucuggagacagu

SEQ ID NO: 1459630 - RNA, 19 nt, Artificial Sequence
  Description of Artificial Sequence: Synthetic oligonucleotide
  Sense strand starting at position 3754 of SEQ ID NO: 1244028
gcuccuuggauggaguauu

SEQ ID NO: 1459631 - RNA, 19 nt, Artificial Sequence
  Description of Artificial Sequence: Synthetic oligonucleotide
  Antisense strand to SEQ ID NO: 1459630
aauacuccauccaaggagc

SEQ ID NO: 1459632 - RNA, 19 nt, Artificial Sequence
  Description of Artificial Sequence: Synthetic oligonucleotide
  Sense strand starting at position 3765 of SEQ ID NO: 1244028
ggaguauuucugugggcca

SEQ ID NO: 1459633 - RNA, 19 nt, Artificial Sequence
  Description of Artificial Sequence: Synthetic oligonucleotide
  Antisense strand to SEQ ID NO: 1459632
uggcccacagaaauacucc

SEQ ID NO: 1459634 - RNA, 19 nt, Artificial Sequence
  Description of Artificial Sequence: Synthetic oligonucleotide
  Sense strand starting at position 3767 of SEQ ID NO: 1244028
aguauuucugugggccaga

SEQ ID NO: 1459635 - RNA, 19 nt, Artificial Sequence
  Description of Artificial Sequence: Synthetic oligonucleotide
  Antisense strand to SEQ ID NO: 1459634
ucuggcccacagaaauacu

SEQ ID NO: 1459636 - RNA, 19 nt, Artificial Sequence
  Description of Artificial Sequence: Synthetic oligonucleotide
  Sense strand starting at position 3871 of SEQ ID NO: 1244028
cuagguaugccuuggacau

SEQ ID NO: 1459637 - RNA, 19 nt, Artificial Sequence
  Description of Artificial Sequence: Synthetic oligonucleotide
  Antisense strand to SEQ ID NO: 1459636
auguccaaggcauaccuag

SEQ ID NO: 1459638 - RNA, 19 nt, Artificial Sequence
  Description of Artificial Sequence: Synthetic oligonucleotide
  Sense strand starting at position 3872 of SEQ ID NO: 1244028
uagguaugccuuggacaug

SEQ ID NO: 1459639 - RNA, 19 nt, Artificial Sequence
  Description of Artificial Sequence: Synthetic oligonucleotide
  Antisense strand to SEQ ID NO: 1459638
cauguccaaggcauaccua

SEQ ID NO: 1459640 - RNA, 19 nt, Artificial Sequence
  Description of Artificial Sequence: Synthetic oligonucleotide
  Sense strand starting at position 3903 of SEQ ID NO: 1244028
ugaggaaucuuuccgugcu

SEQ ID NO: 1459641 - RNA, 19 nt, Artificial Sequence
  Description of Artificial Sequence: Synthetic oligonucleotide
  Antisense strand to SEQ ID NO: 1459640
agcacggaaagauuccuca

SEQ ID NO: 1459642 - RNA, 19 nt, Artificial Sequence
  Description of Artificial Sequence: Synthetic oligonucleotide
  Sense strand starting at position 3906 of SEQ ID NO: 1244028
ggaaucuuuccgugcuucu

SEQ ID NO: 1459643 - RNA, 19 nt, Artificial Sequence
  Description of Artificial Sequence: Synthetic oligonucleotide
  Antisense strand to SEQ ID NO: 1459642
agaagcacggaaagauucc

SEQ ID NO: 1459644 - RNA, 19 nt, Artificial Sequence
  Description of Artificial Sequence: Synthetic oligonucleotide
  Sense strand starting at position 3916 of SEQ ID NO: 1244028
cgugcuucucccuaggaga

SEQ ID NO: 1459645 - RNA, 19 nt, Artificial Sequence
  Description of Artificial Sequence: Synthetic oligonucleotide
  Antisense strand to SEQ ID NO: 1459644
ucuccuagggagaagcacg

SEQ ID NO: 1459646 - RNA, 19 nt, Artificial Sequence
  Description of Artificial Sequence: Synthetic oligonucleotide
  Sense strand starting at position 98 of SEQ ID NO: 1244029
accaaaguuuaaggaauau

SEQ ID NO: 1459647 - RNA, 19 nt, Artificial Sequence
  Description of Artificial Sequence: Synthetic oligonucleotide
  Antisense strand to SEQ ID NO: 1459646
auauuccuuaaacuuuggu

SEQ ID NO: 1459648 - RNA, 19 nt, Artificial Sequence
  Description of Artificial Sequence: Synthetic oligonucleotide
  Sense strand starting at position 551 of SEQ ID NO: 1244029
uccaguuuguguggacaaa

SEQ ID NO: 1459649 - RNA, 19 nt, Artificial Sequence
  Description of Artificial Sequence: Synthetic oligonucleotide
  Antisense strand to SEQ ID NO: 1459648
uuuguccacacaaacugga

SEQ ID NO: 1459650 - RNA, 19 nt, Artificial Sequence
  Description of Artificial Sequence: Synthetic oligonucleotide
  Sense strand starting at position 552 of SEQ ID NO: 1244029
ccaguuuguguggacaaag

SEQ ID NO: 1459651 - RNA, 19 nt, Artificial Sequence
  Description of Artificial Sequence: Synthetic oligonucleotide
  Antisense strand to SEQ ID NO: 1459650
cuuuguccacacaaacugg

SEQ ID NO: 1459652 - RNA, 19 nt, Artificial Sequence
  Description of Artificial Sequence: Synthetic oligonucleotide
  Sense strand starting at position 572 of SEQ ID NO: 1244029
cuguacuugcaaugaucua

SEQ ID NO: 1459653 - RNA, 19 nt, Artificial Sequence
  Description of Artificial Sequence: Synthetic oligonucleotide
  Antisense strand to SEQ ID NO: 1459652
uagaucauugcaaguacag

SEQ ID NO: 1459654 - RNA, 19 nt, Artificial Sequence
  Description of Artificial Sequence: Synthetic oligonucleotide
  Sense strand starting at position 646 of SEQ ID NO: 1244029
agcagaguaaacgauaacu

SEQ ID NO: 1459655 - RNA, 19 nt, Artificial Sequence
  Description of Artificial Sequence: Synthetic oligonucleotide
  Antisense strand to SEQ ID NO: 1459654
aguuaucguuuacucugcu

SEQ ID NO: 1459656 - RNA, 19 nt, Artificial Sequence
  Description of Artificial Sequence: Synthetic oligonucleotide
  Sense strand starting at position 715 of SEQ ID NO: 1244029
ucccuaucaggcugacuua

SEQ ID NO: 1459657 - RNA, 19 nt, Artificial Sequence
  Description of Artificial Sequence: Synthetic oligonucleotide
  Antisense strand to SEQ ID NO: 1459656
uaagucagccugauaggga

SEQ ID NO: 1459658 - RNA, 19 nt, Artificial Sequence
  Description of Artificial Sequence: Synthetic oligonucleotide
  Sense strand starting at position 716 of SEQ ID NO: 1244029
cccuaucaggcugacuuaa

SEQ ID NO: 1459659 - RNA, 19 nt, Artificial Sequence
  Description of Artificial Sequence: Synthetic oligonucleotide
  Antisense strand to SEQ ID NO: 1459658
uuaagucagccugauaggg

SEQ ID NO: 1459660 - RNA, 19 nt, Artificial Sequence
  Description of Artificial Sequence: Synthetic oligonucleotide
  Sense strand starting at position 718 of SEQ ID NO: 1244029
cuaucaggcugacuuaaca

SEQ ID NO: 1459661 - RNA, 19 nt, Artificial Sequence
  Description of Artificial Sequence: Synthetic oligonucleotide
  Antisense strand to SEQ ID NO: 1459660
uguuaagucagccugauag

SEQ ID NO: 1459662 - RNA, 19 nt, Artificial Sequence
  Description of Artificial Sequence: Synthetic oligonucleotide
  Sense strand starting at position 853 of SEQ ID NO: 1244029
cuugaagcgucuuccaauu

SEQ ID NO: 1459663 - RNA, 19 nt, Artificial Sequence
  Description of Artificial Sequence: Synthetic oligonucleotide
  Antisense strand to SEQ ID NO: 1459662
aauuggaagacgcuucaag

SEQ ID NO: 1459664 - RNA, 19 nt, Artificial Sequence
  Description of Artificial Sequence: Synthetic oligonucleotide
  Sense strand starting at position 900 of SEQ ID NO: 1244029
aggaguccuuccugcuuaa

SEQ ID NO: 1459665 - RNA, 19 nt, Artificial Sequence
  Description of Artificial Sequence: Synthetic oligonucleotide
  Antisense strand to SEQ ID NO: 1459664
uuaagcaggaaggacuccu

SEQ ID NO: 1459666 - RNA, 19 nt, Artificial Sequence
  Description of Artificial Sequence: Synthetic oligonucleotide
  Sense strand starting at position 1071 of SEQ ID NO: 1244029
gcgaccucgcugcagaaua

SEQ ID NO: 1459667 - RNA, 19 nt, Artificial Sequence
  Description of Artificial Sequence: Synthetic oligonucleotide
  Antisense strand to SEQ ID NO: 1459666
uauucugcagcgaggucgc

SEQ ID NO: 1459668 - RNA, 19 nt, Artificial Sequence
  Description of Artificial Sequence: Synthetic oligonucleotide
  Sense strand starting at position 2518 of SEQ ID NO: 1244029
acuggaugucguuaucuuu

SEQ ID NO: 1459669 - RNA, 19 nt, Artificial Sequence
  Description of Artificial Sequence: Synthetic oligonucleotide
  Antisense strand to SEQ ID NO: 1459668
aaagauaacgacauccagu

SEQ ID NO: 1459670 - RNA, 19 nt, Artificial Sequence
  Description of Artificial Sequence: Synthetic oligonucleotide
  Sense strand starting at position 2526 of SEQ ID NO: 1244029
ucguuaucuuuccuggcua

SEQ ID NO: 1459671 - RNA, 19 nt, Artificial Sequence
  Description of Artificial Sequence: Synthetic oligonucleotide
  Antisense strand to SEQ ID NO: 1459670
uagccaggaaagauaacga

SEQ ID NO: 1459672 - RNA, 19 nt, Artificial Sequence
  Description of Artificial Sequence: Synthetic oligonucleotide
  Sense strand starting at position 2530 of SEQ ID NO: 1244029
uaucuuuccuggcuagcga

SEQ ID NO: 1459673 - RNA, 19 nt, Artificial Sequence
  Description of Artificial Sequence: Synthetic oligonucleotide
  Antisense strand to SEQ ID NO: 1459672
ucgcuagccaggaaagaua

SEQ ID NO: 1459674 - RNA, 19 nt, Artificial Sequence
  Description of Artificial Sequence: Synthetic oligonucleotide
  Sense strand starting at position 2541 of SEQ ID NO: 1244029
gcuagcgagucaugucauu

SEQ ID NO: 1459675 - RNA, 19 nt, Artificial Sequence
  Description of Artificial Sequence: Synthetic oligonucleotide
  Antisense strand to SEQ ID NO: 1459674
aaugacaugacucgcuagc

SEQ ID NO: 1459676 - RNA, 19 nt, Artificial Sequence
  Description of Artificial Sequence: Synthetic oligonucleotide
  Sense strand starting at position 2547 of SEQ ID NO: 1244029
gagucaugucauuguguca

SEQ ID NO: 1459677 - RNA, 19 nt, Artificial Sequence
  Description of Artificial Sequence: Synthetic oligonucleotide
  Antisense strand to SEQ ID NO: 1459676
ugacacaaugacaugacuc

SEQ ID NO: 1459678 - RNA, 19 nt, Artificial Sequence
  Description of Artificial Sequence: Synthetic oligonucleotide
  Sense strand starting at position 2584 of SEQ ID NO: 1244029
cgcagaaguucugaaucac

SEQ ID NO: 1459679 - RNA, 19 nt, Artificial Sequence
  Description of Artificial Sequence: Synthetic oligonucleotide
  Antisense strand to SEQ ID NO: 1459678
gugauucagaacuucugcg

SEQ ID NO: 1459680 - RNA, 19 nt, Artificial Sequence
  Description of Artificial Sequence: Synthetic oligonucleotide
  Sense strand starting at position 2960 of SEQ ID NO: 1244029
gaaacuacgucucauaugu

SEQ ID NO: 1459681 - RNA, 19 nt, Artificial Sequence
  Description of Artificial Sequence: Synthetic oligonucleotide
  Antisense strand to SEQ ID NO: 1459680
acauaugagacguaguuuc

SEQ ID NO: 1459682 - RNA, 19 nt, Artificial Sequence
  Description of Artificial Sequence: Synthetic oligonucleotide
  Sense strand starting at position 3171 of SEQ ID NO: 1244029
gaauuucgccaccguuuaa

SEQ ID NO: 1459683 - RNA, 19 nt, Artificial Sequence
  Description of Artificial Sequence: Synthetic oligonucleotide
  Antisense strand to SEQ ID NO: 1459682
uuaaacgguggcgaaauuc

SEQ ID NO: 1459684 - RNA, 19 nt, Artificial Sequence
  Description of Artificial Sequence: Synthetic oligonucleotide
  Sense strand starting at position 3217 of SEQ ID NO: 1244029
gaugaucaauaguccagau

SEQ ID NO: 1459685 - RNA, 19 nt, Artificial Sequence
  Description of Artificial Sequence: Synthetic oligonucleotide
  Antisense strand to SEQ ID NO: 1459684
aucuggacuauugaucauc

SEQ ID NO: 1459686 - RNA, 19 nt, Artificial Sequence
  Description of Artificial Sequence: Synthetic oligonucleotide
  Sense strand starting at position 3219 of SEQ ID NO: 1244029
ugaucaauaguccagaugu

SEQ ID NO: 1459687 - RNA, 19 nt, Artificial Sequence
  Description of Artificial Sequence: Synthetic oligonucleotide
  Antisense strand to SEQ ID NO: 1459686
acaucuggacuauugauca

SEQ ID NO: 1459688 - RNA, 19 nt, Artificial Sequence
  Description of Artificial Sequence: Synthetic oligonucleotide
  Sense strand starting at position 3612 of SEQ ID NO: 1244029
aauguaucucacggguacu

SEQ ID NO: 1459689 - RNA, 19 nt, Artificial Sequence
  Description of Artificial Sequence: Synthetic oligonucleotide
  Antisense strand to SEQ ID NO: 1459688
aguacccgugagauacauu

SEQ ID NO: 1459690 - RNA, 19 nt, Artificial Sequence
  Description of Artificial Sequence: Synthetic oligonucleotide
  Sense strand starting at position 3613 of SEQ ID NO: 1244029
auguaucucacggguacuu

SEQ ID NO: 1459691 - RNA, 19 nt, Artificial Sequence
  Description of Artificial Sequence: Synthetic oligonucleotide
  Antisense strand to SEQ ID NO: 1459690
aaguacccgugagauacau

SEQ ID NO: 1459692 - RNA, 19 nt, Artificial Sequence
  Description of Artificial Sequence: Synthetic oligonucleotide
  Sense strand starting at position 3615 of SEQ ID NO: 1244029
guaucucacggguacuuaa

SEQ ID NO: 1459693 - RNA, 19 nt, Artificial Sequence
  Description of Artificial Sequence: Synthetic oligonucleotide
  Antisense strand to SEQ ID NO: 1459692
uuaaguacccgugagauac

SEQ ID NO: 1459694 - RNA, 19 nt, Artificial Sequence
  Description of Artificial Sequence: Synthetic oligonucleotide
  Sense strand starting at position 3639 of SEQ ID NO: 1244029
uguggagacguucaagguu

SEQ ID NO: 1459695 - RNA, 19 nt, Artificial Sequence
  Description of Artificial Sequence: Synthetic oligonucleotide
  Antisense strand to SEQ ID NO: 1459694
aaccuugaacgucuccaca

SEQ ID NO: 1459696 - RNA, 19 nt, Artificial Sequence
  Description of Artificial Sequence: Synthetic oligonucleotide
  Sense strand starting at position 3691 of SEQ ID NO: 1244029
ggaagaauuccgugggaag

SEQ ID NO: 1459697 - RNA, 19 nt, Artificial Sequence
  Description of Artificial Sequence: Synthetic oligonucleotide
  Antisense strand to SEQ ID NO: 1459696
cuucccacggaauucuucc

SEQ ID NO: 1459698 - RNA, 19 nt, Artificial Sequence
  Description of Artificial Sequence: Synthetic oligonucleotide
  Sense strand starting at position 3692 of SEQ ID NO: 1244029
gaagaauuccgugggaagu

SEQ ID NO: 1459699 - RNA, 19 nt, Artificial Sequence
  Description of Artificial Sequence: Synthetic oligonucleotide
  Antisense strand to SEQ ID NO: 1459698
acuucccacggaauucuuc

SEQ ID NO: 1459700 - RNA, 19 nt, Artificial Sequence
  Description of Artificial Sequence: Synthetic oligonucleotide
  Sense strand starting at position 3693 of SEQ ID NO: 1244029
aagaauuccgugggaaguc

SEQ ID NO: 1459701 - RNA, 19 nt, Artificial Sequence
  Description of Artificial Sequence: Synthetic oligonucleotide
  Antisense strand to SEQ ID NO: 1459700
gacuucccacggaauucuu

SEQ ID NO: 1459702 - RNA, 19 nt, Artificial Sequence
  Description of Artificial Sequence: Synthetic oligonucleotide
  Sense strand starting at position 3694 of SEQ ID NO: 1244029
agaauuccgugggaaguca

SEQ ID NO: 1459703 - RNA, 19 nt, Artificial Sequence
  Description of Artificial Sequence: Synthetic oligonucleotide
  Antisense strand to SEQ ID NO: 1459702
ugacuucccacggaauucu

SEQ ID NO: 1459704 - RNA, 19 nt, Artificial Sequence
  Description of Artificial Sequence: Synthetic oligonucleotide
  Sense strand starting at position 3711 of SEQ ID NO: 1244029
cagugucagcccuagaaac

SEQ ID NO: 1459705 - RNA, 19 nt, Artificial Sequence
  Description of Artificial Sequence: Synthetic oligonucleotide
  Antisense strand to SEQ ID NO: 1459704
guuucuagggcugacacug

SEQ ID NO: 1459706 - RNA, 19 nt, Artificial Sequence
  Description of Artificial Sequence: Synthetic oligonucleotide
  Sense strand starting at position 3867 of SEQ ID NO: 1244029
aggagaagauccuauuaua

SEQ ID NO: 1459707 - RNA, 19 nt, Artificial Sequence
  Description of Artificial Sequence: Synthetic oligonucleotide
  Antisense strand to SEQ ID NO: 1459706
uauaauaggaucuucuccu

SEQ ID NO: 1459708 - RNA, 19 nt, Artificial Sequence
  Description of Artificial Sequence: Synthetic oligonucleotide
  Sense strand starting at position 3925 of SEQ ID NO: 1244029
ucuauuugcugcuuguuaa

SEQ ID NO: 1459709 - RNA, 19 nt, Artificial Sequence
  Description of Artificial Sequence: Synthetic oligonucleotide
  Antisense strand to SEQ ID NO: 1459708
uuaacaagcagcaaauaga

SEQ ID NO: 1459710 - RNA, 19 nt, Artificial Sequence
  Description of Artificial Sequence: Synthetic oligonucleotide
  Sense strand starting at position 3926 of SEQ ID NO: 1244029
cuauuugcugcuuguuaaa

SEQ ID NO: 1459711 - RNA, 19 nt, Artificial Sequence
  Description of Artificial Sequence: Synthetic oligonucleotide
  Antisense strand to SEQ ID NO: 1459710
uuuaacaagcagcaaauag

SEQ ID NO: 1459712 - RNA, 19 nt, Artificial Sequence
  Description of Artificial Sequence: Synthetic oligonucleotide
  Sense strand starting at position 3928 of SEQ ID NO: 1244029
auuugcugcuuguuaaaua

SEQ ID NO: 1459713 - RNA, 19 nt, Artificial Sequence
  Description of Artificial Sequence: Synthetic oligonucleotide
  Antisense strand to SEQ ID NO: 1459712
uauuuaacaagcagcaaau

SEQ ID NO: 1459714 - RNA, 19 nt, Artificial Sequence
  Description of Artificial Sequence: Synthetic oligonucleotide
  Sense strand starting at position 3936 of SEQ ID NO: 1244029
cuuguuaaauagcaaagaa

SEQ ID NO: 1459715 - RNA, 19 nt, Artificial Sequence
  Description of Artificial Sequence: Synthetic oligonucleotide
  Antisense strand to SEQ ID NO: 1459714
uucuuugcuauuuaacaag

SEQ ID NO: 1459716 - RNA, 19 nt, Artificial Sequence
  Description of Artificial Sequence: Synthetic oligonucleotide
  Sense strand starting at position 48 of SEQ ID NO: 1244030
guaggcuguggucauguuu

SEQ ID NO: 1459717 - RNA, 19 nt, Artificial Sequence
  Description of Artificial Sequence: Synthetic oligonucleotide
  Antisense strand to SEQ ID NO: 1459716
aaacaugaccacagccuac

SEQ ID NO: 1459718 - RNA, 19 nt, Artificial Sequence
  Description of Artificial Sequence: Synthetic oligonucleotide
  Sense strand starting at position 200 of SEQ ID NO: 1244030
guuugaaagcaagagguga

SEQ ID NO: 1459719 - RNA, 19 nt, Artificial Sequence
  Description of Artificial Sequence: Synthetic oligonucleotide
  Antisense strand to SEQ ID NO: 1459718
ucaccucuugcuuucaaac

SEQ ID NO: 1459720 - RNA, 19 nt, Artificial Sequence
  Description of Artificial Sequence: Synthetic oligonucleotide
  Sense strand starting at position 345 of SEQ ID NO: 1244030
gcaacaaucccaugagaca

SEQ ID NO: 1459721 - RNA, 19 nt, Artificial Sequence
  Description of Artificial Sequence: Synthetic oligonucleotide
  Antisense strand to SEQ ID NO: 1459720
ugucucaugggauuguugc

SEQ ID NO: 1459722 - RNA, 19 nt, Artificial Sequence
  Description of Artificial Sequence: Synthetic oligonucleotide
  Sense strand starting at position 361 of SEQ ID NO: 1244030
acagguaauguugaccuua

SEQ ID NO: 1459723 - RNA, 19 nt, Artificial Sequence
  Description of Artificial Sequence: Synthetic oligonucleotide
  Antisense strand to SEQ ID NO: 1459722
uaaggucaacauuaccugu

SEQ ID NO: 1459724 - RNA, 19 nt, Artificial Sequence
  Description of Artificial Sequence: Synthetic oligonucleotide
  Sense strand starting at position 363 of SEQ ID NO: 1244030
agguaauguugaccuuacu

SEQ ID NO: 1459725 - RNA, 19 nt, Artificial Sequence
  Description of Artificial Sequence: Synthetic oligonucleotide
  Antisense strand to SEQ ID NO: 1459724
aguaaggucaacauuaccu

SEQ ID NO: 1459726 - RNA, 19 nt, Artificial Sequence
  Description of Artificial Sequence: Synthetic oligonucleotide
  Sense strand starting at position 400 of SEQ ID NO: 1244030
gacguuaagacuuguccag

SEQ ID NO: 1459727 - RNA, 19 nt, Artificial Sequence
  Description of Artificial Sequence: Synthetic oligonucleotide
  Antisense strand to SEQ ID NO: 1459726
cuggacaagucuuaacguc

SEQ ID NO: 1459728 - RNA, 19 nt, Artificial Sequence
  Description of Artificial Sequence: Synthetic oligonucleotide
  Sense strand starting at position 456 of SEQ ID NO: 1244030
auguuaaccuuccaaggua

SEQ ID NO: 1459729 - RNA, 19 nt, Artificial Sequence
  Description of Artificial Sequence: Synthetic oligonucleotide
  Antisense strand to SEQ ID NO: 1459728
uaccuuggaagguuaacau

SEQ ID NO: 1459730 - RNA, 19 nt, Artificial Sequence
  Description of Artificial Sequence: Synthetic oligonucleotide
  Sense strand starting at position 667 of SEQ ID NO: 1244030
guaggucuggcuggaguuu

SEQ ID NO: 1459731 - RNA, 19 nt, Artificial Sequence
  Description of Artificial Sequence: Synthetic oligonucleotide
  Antisense strand to SEQ ID NO: 1459730
aaacuccagccagaccuac

SEQ ID NO: 1459732 - RNA, 19 nt, Artificial Sequence
  Description of Artificial Sequence: Synthetic oligonucleotide
  Sense strand starting at position 676 of SEQ ID NO: 1244030
gcuggaguuucuggacauu

SEQ ID NO: 1459733 - RNA, 19 nt, Artificial Sequence
  Description of Artificial Sequence: Synthetic oligonucleotide
  Antisense strand to SEQ ID NO: 1459732
aauguccagaaacuccagc

SEQ ID NO: 1459734 - RNA, 19 nt, Artificial Sequence
  Description of Artificial Sequence: Synthetic oligonucleotide
  Sense strand starting at position 859 of SEQ ID NO: 1244030
guggcaaggucugcaaaga

SEQ ID NO: 1459735 - RNA, 19 nt, Artificial Sequence
  Description of Artificial Sequence: Synthetic oligonucleotide
  Antisense strand to SEQ ID NO: 1459734
ucuuugcagaccuugccac

SEQ ID NO: 1459736 - RNA, 19 nt, Artificial Sequence
  Description of Artificial Sequence: Synthetic oligonucleotide
  Sense strand starting at position 882 of SEQ ID NO: 1244030
gugggacuuuggucucaga

SEQ ID NO: 1459737 - RNA, 19 nt, Artificial Sequence
  Description of Artificial Sequence: Synthetic oligonucleotide
  Antisense strand to SEQ ID NO: 1459736
ucugagaccaaagucccac

SEQ ID NO: 1459738 - RNA, 19 nt, Artificial Sequence
  Description of Artificial Sequence: Synthetic oligonucleotide
  Sense strand starting at position 885 of SEQ ID NO: 1244030
ggacuuuggucucagaggu

SEQ ID NO: 1459739 - RNA, 19 nt, Artificial Sequence
  Description of Artificial Sequence: Synthetic oligonucleotide
  Antisense strand to SEQ ID NO: 1459738
accucugagaccaaagucc

SEQ ID NO: 1459740 - RNA, 19 nt, Artificial Sequence
  Description of Artificial Sequence: Synthetic oligonucleotide
  Sense strand starting at position 893 of SEQ ID NO: 1244030
gucucagaggucugacucu

SEQ ID NO: 1459741 - RNA, 19 nt, Artificial Sequence
  Description of Artificial Sequence: Synthetic oligonucleotide
  Antisense strand to SEQ ID NO: 1459740
agagucagaccucugagac

SEQ ID NO: 1459742 - RNA, 19 nt, Artificial Sequence
  Description of Artificial Sequence: Synthetic oligonucleotide
  Sense strand starting at position 906 of SEQ ID NO: 1244030
gacucuuucuaggcugcua

SEQ ID NO: 1459743 - RNA, 19 nt, Artificial Sequence
  Description of Artificial Sequence: Synthetic oligonucleotide
  Antisense strand to SEQ ID NO: 1459742
uagcagccuagaaagaguc

SEQ ID NO: 1459744 - RNA, 19 nt, Artificial Sequence
  Description of Artificial Sequence: Synthetic oligonucleotide
  Sense strand starting at position 1432 of SEQ ID NO: 1244030
gcaugcuucuggguagaca

SEQ ID NO: 1459745 - RNA, 19 nt, Artificial Sequence
  Description of Artificial Sequence: Synthetic oligonucleotide
  Antisense strand to SEQ ID NO: 1459744
ugucuacccagaagcaugc

SEQ ID NO: 1459746 - RNA, 19 nt, Artificial Sequence
  Description of Artificial Sequence: Synthetic oligonucleotide
  Sense strand starting at position 1553 of SEQ ID NO: 1244030
gacccuaaaugguggagaa

SEQ ID NO: 1459747 - RNA, 19 nt, Artificial Sequence
  Description of Artificial Sequence: Synthetic oligonucleotide
  Antisense strand to SEQ ID NO: 1459746
uucuccaccauuuaggguc

SEQ ID NO: 1459748 - RNA, 19 nt, Artificial Sequence
  Description of Artificial Sequence: Synthetic oligonucleotide
  Sense strand starting at position 1773 of SEQ ID NO: 1244030
uaaggugacuggucuucuu

SEQ ID NO: 1459749 - RNA, 19 nt, Artificial Sequence
  Description of Artificial Sequence: Synthetic oligonucleotide
  Antisense strand to SEQ ID NO: 1459748
aagaagaccagucaccuua

SEQ ID NO: 1459750 - RNA, 19 nt, Artificial Sequence
  Description of Artificial Sequence: Synthetic oligonucleotide
  Sense strand starting at position 1776 of SEQ ID NO: 1244030
ggugacuggucuucuuguu

SEQ ID NO: 1459751 - RNA, 19 nt, Artificial Sequence
  Description of Artificial Sequence: Synthetic oligonucleotide
  Antisense strand to SEQ ID NO: 1459750
aacaagaagaccagucacc

SEQ ID NO: 1459752 - RNA, 19 nt, Artificial Sequence
  Description of Artificial Sequence: Synthetic oligonucleotide
  Sense strand starting at position 1996 of SEQ ID NO: 1244030
agccgucugccaugagagu

SEQ ID NO: 1459753 - RNA, 19 nt, Artificial Sequence
  Description of Artificial Sequence: Synthetic oligonucleotide
  Antisense strand to SEQ ID NO: 1459752
acucucauggcagacggcu

SEQ ID NO: 1459754 - RNA, 19 nt, Artificial Sequence
  Description of Artificial Sequence: Synthetic oligonucleotide
  Sense strand starting at position 2097 of SEQ ID NO: 1244030
ucagccaucugaugagaga

SEQ ID NO: 1459755 - RNA, 19 nt, Artificial Sequence
  Description of Artificial Sequence: Synthetic oligonucleotide
  Antisense strand to SEQ ID NO: 1459754
ucucucaucagauggcuga

SEQ ID NO: 1459756 - RNA, 19 nt, Artificial Sequence
  Description of Artificial Sequence: Synthetic oligonucleotide
  Sense strand starting at position 2332 of SEQ ID NO: 1244030
gccucuggcuccucaagau

SEQ ID NO: 1459757 - RNA, 19 nt, Artificial Sequence
  Description of Artificial Sequence: Synthetic oligonucleotide
  Antisense strand to SEQ ID NO: 1459756
aucuugaggagccagaggc

SEQ ID NO: 1459758 - RNA, 19 nt, Artificial Sequence
  Description of Artificial Sequence: Synthetic oligonucleotide
  Sense strand starting at position 2352 of SEQ ID NO: 1244030
ggucuccugugucuacaga

SEQ ID NO: 1459759 - RNA, 19 nt, Artificial Sequence
  Description of Artificial Sequence: Synthetic oligonucleotide
  Antisense strand to SEQ ID NO: 1459758
ucuguagacacaggagacc

SEQ ID NO: 1459760 - RNA, 19 nt, Artificial Sequence
  Description of Artificial Sequence: Synthetic oligonucleotide
  Sense strand starting at position 2458 of SEQ ID NO: 1244030
gugggucagacucaugcuu

SEQ ID NO: 1459761 - RNA, 19 nt, Artificial Sequence
  Description of Artificial Sequence: Synthetic oligonucleotide
  Antisense strand to SEQ ID NO: 1459760
aagcaugagucugacccac

SEQ ID NO: 1459762 - RNA, 19 nt, Artificial Sequence
  Description of Artificial Sequence: Synthetic oligonucleotide
  Sense strand starting at position 2561 of SEQ ID NO: 1244030
augugaccacaguguguaa

SEQ ID NO: 1459763 - RNA, 19 nt, Artificial Sequence
  Description of Artificial Sequence: Synthetic oligonucleotide
  Antisense strand to SEQ ID NO: 1459762
uuacacacuguggucacau

SEQ ID NO: 1459764 - RNA, 19 nt, Artificial Sequence
  Description of Artificial Sequence: Synthetic oligonucleotide
  Sense strand starting at position 2758 of SEQ ID NO: 1244030
ccuagagccuuggguacau

SEQ ID NO: 1459765 - RNA, 19 nt, Artificial Sequence
  Description of Artificial Sequence: Synthetic oligonucleotide
  Antisense strand to SEQ ID NO: 1459764
auguacccaaggcucuagg

SEQ ID NO: 1459766 - RNA, 19 nt, Artificial Sequence
  Description of Artificial Sequence: Synthetic oligonucleotide
  Sense strand starting at position 2762 of SEQ ID NO: 1244030
gagccuuggguacaugaua

SEQ ID NO: 1459767 - RNA, 19 nt, Artificial Sequence
  Description of Artificial Sequence: Synthetic oligonucleotide
  Antisense strand to SEQ ID NO: 1459766
uaucauguacccaaggcuc

SEQ ID NO: 1459768 - RNA, 19 nt, Artificial Sequence
  Description of Artificial Sequence: Synthetic oligonucleotide
  Sense strand starting at position 2774 of SEQ ID NO: 1244030
caugauaucggagggcuuu

SEQ ID NO: 1459769 - RNA, 19 nt, Artificial Sequence
  Description of Artificial Sequence: Synthetic oligonucleotide
  Antisense strand to SEQ ID NO: 1459768
aaagcccuccgauaucaug

SEQ ID NO: 1459770 - RNA, 19 nt, Artificial Sequence
  Description of Artificial Sequence: Synthetic oligonucleotide
  Sense strand starting at position 2904 of SEQ ID NO: 1244030
agcaaagcucucugaacuu

SEQ ID NO: 1459771 - RNA, 19 nt, Artificial Sequence
  Description of Artificial Sequence: Synthetic oligonucleotide
  Antisense strand to SEQ ID NO: 1459770
aaguucagagagcuuugcu

SEQ ID NO: 1459772 - RNA, 19 nt, Artificial Sequence
  Description of Artificial Sequence: Synthetic oligonucleotide
  Sense strand starting at position 2968 of SEQ ID NO: 1244030
agauguugugagugucaaa

SEQ ID NO: 1459773 - RNA, 19 nt, Artificial Sequence
  Description of Artificial Sequence: Synthetic oligonucleotide
  Antisense strand to SEQ ID NO: 1459772
uuugacacucacaacaucu

SEQ ID NO: 1459774 - RNA, 19 nt, Artificial Sequence
  Description of Artificial Sequence: Synthetic oligonucleotide
  Sense strand starting at position 2971 of SEQ ID NO: 1244030
uguugugagugucaaacaa

SEQ ID NO: 1459775 - RNA, 19 nt, Artificial Sequence
  Description of Artificial Sequence: Synthetic oligonucleotide
  Antisense strand to SEQ ID NO: 1459774
uuguuugacacucacaaca

SEQ ID NO: 1459776 - RNA, 19 nt, Artificial Sequence
  Description of Artificial Sequence: Synthetic oligonucleotide
  Sense strand starting at position 3048 of SEQ ID NO: 1244030
gccaguucucauuaugaau

SEQ ID NO: 1459777 - RNA, 19 nt, Artificial Sequence
  Description of Artificial Sequence: Synthetic oligonucleotide
  Antisense strand to SEQ ID NO: 1459776
auucauaaugagaacuggc

SEQ ID NO: 1459778 - RNA, 19 nt, Artificial Sequence
  Description of Artificial Sequence: Synthetic oligonucleotide
  Sense strand starting at position 3062 of SEQ ID NO: 1244030
ugaauauuauugugagugu

SEQ ID NO: 1459779 - RNA, 19 nt, Artificial Sequence
  Description of Artificial Sequence: Synthetic oligonucleotide
  Antisense strand to SEQ ID NO: 1459778
acacucacaauaauauuca

SEQ ID NO: 1459780 - RNA, 19 nt, Artificial Sequence
  Description of Artificial Sequence: Synthetic oligonucleotide
  Sense strand starting at position 3063 of SEQ ID NO: 1244030
gaauauuauugugagugug

SEQ ID NO: 1459781 - RNA, 19 nt, Artificial Sequence
  Description of Artificial Sequence: Synthetic oligonucleotide
  Antisense strand to SEQ ID NO: 1459780
cacacucacaauaauauuc

SEQ ID NO: 1459782 - RNA, 19 nt, Artificial Sequence
  Description of Artificial Sequence: Synthetic oligonucleotide
  Sense strand starting at position 3065 of SEQ ID NO: 1244030
auauuauugugaguguggu

SEQ ID NO: 1459783 - RNA, 19 nt, Artificial Sequence
  Description of Artificial Sequence: Synthetic oligonucleotide
  Antisense strand to SEQ ID NO: 1459782
accacacucacaauaauau

SEQ ID NO: 1459784 - RNA, 19 nt, Artificial Sequence
  Description of Artificial Sequence: Synthetic oligonucleotide
  Sense strand starting at position 3066 of SEQ ID NO: 1244030
uauuauugugagugugguu

SEQ ID NO: 1459785 - RNA, 19 nt, Artificial Sequence
  Description of Artificial Sequence: Synthetic oligonucleotide
  Antisense strand to SEQ ID NO: 1459784
aaccacacucacaauaaua

SEQ ID NO: 1459786 - RNA, 19 nt, Artificial Sequence
  Description of Artificial Sequence: Synthetic oligonucleotide
  Sense strand starting at position 3656 of SEQ ID NO: 1244030
ccaaguggccucugauaaa

SEQ ID NO: 1459787 - RNA, 19 nt, Artificial Sequence
  Description of Artificial Sequence: Synthetic oligonucleotide
  Antisense strand to SEQ ID NO: 1459786
uuuaucagaggccacuugg

SEQ ID NO: 1459788 - RNA, 19 nt, Artificial Sequence
  Description of Artificial Sequence: Synthetic oligonucleotide
  Sense strand starting at position 3666 of SEQ ID NO: 1244030
ucugauaaaugcuacaguu

SEQ ID NO: 1459789 - RNA, 19 nt, Artificial Sequence
  Description of Artificial Sequence: Synthetic oligonucleotide
  Antisense strand to SEQ ID NO: 1459788
aacuguagcauuuaucaga

SEQ ID NO: 1459790 - RNA, 19 nt, Artificial Sequence
  Description of Artificial Sequence: Synthetic oligonucleotide
  Sense strand starting at position 3706 of SEQ ID NO: 1244030
uggccacugugugaacaau

SEQ ID NO: 1459791 - RNA, 19 nt, Artificial Sequence
  Description of Artificial Sequence: Synthetic oligonucleotide
  Antisense strand to SEQ ID NO: 1459790
auuguucacacaguggcca

SEQ ID NO: 1459792 - RNA, 19 nt, Artificial Sequence
  Description of Artificial Sequence: Synthetic oligonucleotide
  Sense strand starting at position 3818 of SEQ ID NO: 1244030
uuaugugacuugcccaagu

SEQ ID NO: 1459793 - RNA, 19 nt, Artificial Sequence
  Description of Artificial Sequence: Synthetic oligonucleotide
  Antisense strand to SEQ ID NO: 1459792
acuugggcaagucacauaa

SEQ ID NO: 1459794 - RNA, 19 nt, Artificial Sequence
  Description of Artificial Sequence: Synthetic oligonucleotide
  Sense strand starting at position 3902 of SEQ ID NO: 1244030
uugggugggugucaaaguu

SEQ ID NO: 1459795 - RNA, 19 nt, Artificial Sequence
  Description of Artificial Sequence: Synthetic oligonucleotide
  Antisense strand to SEQ ID NO: 1459794
aacuuugacacccacccaa

SEQ ID NO: 1459796 - RNA, 19 nt, Artificial Sequence
  Description of Artificial Sequence: Synthetic oligonucleotide
  Sense strand starting at position 752 of SEQ ID NO: 1244031
cagggcuuggcugagacau

SEQ ID NO: 1459797 - RNA, 19 nt, Artificial Sequence
  Description of Artificial Sequence: Synthetic oligonucleotide
  Antisense strand to SEQ ID NO: 1459796
augucucagccaagcccug

SEQ ID NO: 1459798 - RNA, 19 nt, Artificial Sequence
  Description of Artificial Sequence: Synthetic oligonucleotide
  Sense strand starting at position 762 of SEQ ID NO: 1244031
cugagacauucuccagcua

SEQ ID NO: 1459799 - RNA, 19 nt, Artificial Sequence
  Description of Artificial Sequence: Synthetic oligonucleotide
  Antisense strand to SEQ ID NO: 1459798
uagcuggagaaugucucag

SEQ ID NO: 1459800 - RNA, 19 nt, Artificial Sequence
  Description of Artificial Sequence: Synthetic oligonucleotide
  Sense strand starting at position 763 of SEQ ID NO: 1244031
ugagacauucuccagcuau

SEQ ID NO: 1459801 - RNA, 19 nt, Artificial Sequence
  Description of Artificial Sequence: Synthetic oligonucleotide
  Antisense strand to SEQ ID NO: 1459800
auagcuggagaaugucuca

SEQ ID NO: 1459802 - RNA, 19 nt, Artificial Sequence
  Description of Artificial Sequence: Synthetic oligonucleotide
  Sense strand starting at position 2330 of SEQ ID NO: 1244031
agcccuuccggauguagaa

SEQ ID NO: 1459803 - RNA, 19 nt, Artificial Sequence
  Description of Artificial Sequence: Synthetic oligonucleotide
  Antisense strand to SEQ ID NO: 1459802
uucuacauccggaagggcu

SEQ ID NO: 1459804 - RNA, 19 nt, Artificial Sequence
  Description of Artificial Sequence: Synthetic oligonucleotide
  Sense strand starting at position 2433 of SEQ ID NO: 1244031
aguuacugcuucucugauu

SEQ ID NO: 1459805 - RNA, 19 nt, Artificial Sequence
  Description of Artificial Sequence: Synthetic oligonucleotide
  Antisense strand to SEQ ID NO: 1459804
aaucagagaagcaguaacu

SEQ ID NO: 1459806 - RNA, 19 nt, Artificial Sequence
  Description of Artificial Sequence: Synthetic oligonucleotide
  Sense strand starting at position 2445 of SEQ ID NO: 1244031
ucugauuccugcugccaga

SEQ ID NO: 1459807 - RNA, 19 nt, Artificial Sequence
  Description of Artificial Sequence: Synthetic oligonucleotide
  Antisense strand to SEQ ID NO: 1459806
ucuggcagcaggaaucaga

SEQ ID NO: 1459808 - RNA, 19 nt, Artificial Sequence
  Description of Artificial Sequence: Synthetic oligonucleotide
  Sense strand starting at position 2664 of SEQ ID NO: 1244031
uccugugcgcucugagcaa

SEQ ID NO: 1459809 - RNA, 19 nt, Artificial Sequence
  Description of Artificial Sequence: Synthetic oligonucleotide
  Antisense strand to SEQ ID NO: 1459808
uugcucagagcgcacagga

SEQ ID NO: 1459810 - RNA, 19 nt, Artificial Sequence
  Description of Artificial Sequence: Synthetic oligonucleotide
  Sense strand starting at position 2713 of SEQ ID NO: 1244031
ugcugugagcuggagugaa

SEQ ID NO: 1459811 - RNA, 19 nt, Artificial Sequence
  Description of Artificial Sequence: Synthetic oligonucleotide
  Antisense strand to SEQ ID NO: 1459810
uucacuccagcucacagca

SEQ ID NO: 1459812 - RNA, 19 nt, Artificial Sequence
  Description of Artificial Sequence: Synthetic oligonucleotide
  Sense strand starting at position 2753 of SEQ ID NO: 1244031
agucuuuacggauguggau

SEQ ID NO: 1459813 - RNA, 19 nt, Artificial Sequence
  Description of Artificial Sequence: Synthetic oligonucleotide
  Antisense strand to SEQ ID NO: 1459812
auccacauccguaaagacu

SEQ ID NO: 1459814 - RNA, 19 nt, Artificial Sequence
  Description of Artificial Sequence: Synthetic oligonucleotide
  Sense strand starting at position 2820 of SEQ ID NO: 1244031
cuuggaaucugggagagga

SEQ ID NO: 1459815 - RNA, 19 nt, Artificial Sequence
  Description of Artificial Sequence: Synthetic oligonucleotide
  Antisense strand to SEQ ID NO: 1459814
uccucucccagauuccaag

SEQ ID NO: 1459816 - RNA, 19 nt, Artificial Sequence
  Description of Artificial Sequence: Synthetic oligonucleotide
  Sense strand starting at position 3495 of SEQ ID NO: 1244031
cucauccgccucuaugauu

SEQ ID NO: 1459817 - RNA, 19 nt, Artificial Sequence
  Description of Artificial Sequence: Synthetic oligonucleotide
  Antisense strand to SEQ ID NO: 1459816
aaucauagaggcggaugag

SEQ ID NO: 1459818 - RNA, 19 nt, Artificial Sequence
  Description of Artificial Sequence: Synthetic oligonucleotide
  Sense strand starting at position 3530 of SEQ ID NO: 1244031
gcaccaacugugugcgaaa

SEQ ID NO: 1459819 - RNA, 19 nt, Artificial Sequence
  Description of Artificial Sequence: Synthetic oligonucleotide
  Antisense strand to SEQ ID NO: 1459818
uuucgcacacaguuggugc

SEQ ID NO: 1459820 - RNA, 19 nt, Artificial Sequence
  Description of Artificial Sequence: Synthetic oligonucleotide
  Sense strand starting at position 3679 of SEQ ID NO: 1244031
agggaacugucucugguuu

SEQ ID NO: 1459821 - RNA, 19 nt, Artificial Sequence
  Description of Artificial Sequence: Synthetic oligonucleotide
  Antisense strand to SEQ ID NO: 1459820
aaaccagagacaguucccu

SEQ ID NO: 1459822 - RNA, 19 nt, Artificial Sequence
  Description of Artificial Sequence: Synthetic oligonucleotide
  Sense strand starting at position 3680 of SEQ ID NO: 1244031
gggaacugucucugguuua

SEQ ID NO: 1459823 - RNA, 19 nt, Artificial Sequence
  Description of Artificial Sequence: Synthetic oligonucleotide
  Antisense strand to SEQ ID NO: 1459822
uaaaccagagacaguuccc

SEQ ID NO: 1459824 - RNA, 19 nt, Artificial Sequence
  Description of Artificial Sequence: Synthetic oligonucleotide
  Sense strand starting at position 3681 of SEQ ID NO: 1244031
ggaacugucucugguuuag

SEQ ID NO: 1459825 - RNA, 19 nt, Artificial Sequence
  Description of Artificial Sequence: Synthetic oligonucleotide
  Antisense strand to SEQ ID NO: 1459824
cuaaaccagagacaguucc

SEQ ID NO: 1459826 - RNA, 19 nt, Artificial Sequence
  Description of Artificial Sequence: Synthetic oligonucleotide
  Sense strand starting at position 3685 of SEQ ID NO: 1244031
cugucucugguuuagggau

SEQ ID NO: 1459827 - RNA, 19 nt, Artificial Sequence
  Description of Artificial Sequence: Synthetic oligonucleotide
  Antisense strand to SEQ ID NO: 1459826
aucccuaaaccagagacag

SEQ ID NO: 1459828 - RNA, 19 nt, Artificial Sequence
  Description of Artificial Sequence: Synthetic oligonucleotide
  Sense strand starting at position 17 of SEQ ID NO: 1244032
ucagccauuuguccaucua

SEQ ID NO: 1459829 - RNA, 19 nt, Artificial Sequence
  Description of Artificial Sequence: Synthetic oligonucleotide
  Antisense strand to SEQ ID NO: 1459828
uagauggacaaauggcuga

SEQ ID NO: 1459830 - RNA, 19 nt, Artificial Sequence
  Description of Artificial Sequence: Synthetic oligonucleotide
  Sense strand starting at position 127 of SEQ ID NO: 1244032
gagauuacagucugacacu

SEQ ID NO: 1459831 - RNA, 19 nt, Artificial Sequence
  Description of Artificial Sequence: Synthetic oligonucleotide
  Antisense strand to SEQ ID NO: 1459830
agugucagacuguaaucuc

SEQ ID NO: 1459832 - RNA, 19 nt, Artificial Sequence
  Description of Artificial Sequence: Synthetic oligonucleotide
  Sense strand starting at position 235 of SEQ ID NO: 1244032
ggacacuacgaaugccaua

SEQ ID NO: 1459833 - RNA, 19 nt, Artificial Sequence
  Description of Artificial Sequence: Synthetic oligonucleotide
  Antisense strand to SEQ ID NO: 1459832
uauggcauucguagugucc

SEQ ID NO: 1459834 - RNA, 19 nt, Artificial Sequence
  Description of Artificial Sequence: Synthetic oligonucleotide
  Sense strand starting at position 240 of SEQ ID NO: 1244032
cuacgaaugccauaggucu

SEQ ID NO: 1459835 - RNA, 19 nt, Artificial Sequence
  Description of Artificial Sequence: Synthetic oligonucleotide
  Antisense strand to SEQ ID NO: 1459834
agaccuauggcauucguag

SEQ ID NO: 1459836 - RNA, 19 nt, Artificial Sequence
  Description of Artificial Sequence: Synthetic oligonucleotide
  Sense strand starting at position 256 of SEQ ID NO: 1244032
ucuugucguacagauguca

SEQ ID NO: 1459837 - RNA, 19 nt, Artificial Sequence
  Description of Artificial Sequence: Synthetic oligonucleotide
  Antisense strand to SEQ ID NO: 1459836
ugacaucuguacgacaaga

SEQ ID NO: 1459838 - RNA, 19 nt, Artificial Sequence
  Description of Artificial Sequence: Synthetic oligonucleotide
  Sense strand starting at position 414 of SEQ ID NO: 1244032
gcuggagagucaccacauu

SEQ ID NO: 1459839 - RNA, 19 nt, Artificial Sequence
  Description of Artificial Sequence: Synthetic oligonucleotide
  Antisense strand to SEQ ID NO: 1459838
aauguggugacucuccagc

SEQ ID NO: 1459840 - RNA, 19 nt, Artificial Sequence
  Description of Artificial Sequence: Synthetic oligonucleotide
  Sense strand starting at position 455 of SEQ ID NO: 1244032
agguccacuccuggaagaa

SEQ ID NO: 1459841 - RNA, 19 nt, Artificial Sequence
  Description of Artificial Sequence: Synthetic oligonucleotide
  Antisense strand to SEQ ID NO: 1459840
uucuuccaggaguggaccu

SEQ ID NO: 1459842 - RNA, 19 nt, Artificial Sequence
  Description of Artificial Sequence: Synthetic oligonucleotide
  Sense strand starting at position 720 of SEQ ID NO: 1244032
cuggccaaagcauaucaua

SEQ ID NO: 1459843 - RNA, 19 nt, Artificial Sequence
  Description of Artificial Sequence: Synthetic oligonucleotide
  Antisense strand to SEQ ID NO: 1459842
uaugauaugcuuuggccag

SEQ ID NO: 1459844 - RNA, 19 nt, Artificial Sequence
  Description of Artificial Sequence: Synthetic oligonucleotide
  Sense strand starting at position 729 of SEQ ID NO: 1244032
gcauaucauaggcacguau

SEQ ID NO: 1459845 - RNA, 19 nt, Artificial Sequence
  Description of Artificial Sequence: Synthetic oligonucleotide
  Antisense strand to SEQ ID NO: 1459844
auacgugccuaugauaugc

SEQ ID NO: 1459846 - RNA, 19 nt, Artificial Sequence
  Description of Artificial Sequence: Synthetic oligonucleotide
  Sense strand starting at position 1085 of SEQ ID NO: 1244032
gguacauaauggucgcaaa

SEQ ID NO: 1459847 - RNA, 19 nt, Artificial Sequence
  Description of Artificial Sequence: Synthetic oligonucleotide
  Antisense strand to SEQ ID NO: 1459846
uuugcgaccauuauguacc

SEQ ID NO: 1459848 - RNA, 19 nt, Artificial Sequence
  Description of Artificial Sequence: Synthetic oligonucleotide
  Sense strand starting at position 1498 of SEQ ID NO: 1244032
ggcccuagauuguucucaa

SEQ ID NO: 1459849 - RNA, 19 nt, Artificial Sequence
  Description of Artificial Sequence: Synthetic oligonucleotide
  Antisense strand to SEQ ID NO: 1459848
uugagaacaaucuagggcc

SEQ ID NO: 1459850 - RNA, 19 nt, Artificial Sequence
  Description of Artificial Sequence: Synthetic oligonucleotide
  Sense strand starting at position 1499 of SEQ ID NO: 1244032
gcccuagauuguucucaau

SEQ ID NO: 1459851 - RNA, 19 nt, Artificial Sequence
  Description of Artificial Sequence: Synthetic oligonucleotide
  Antisense strand to SEQ ID NO: 1459850
auugagaacaaucuagggc

SEQ ID NO: 1459852 - RNA, 19 nt, Artificial Sequence
  Description of Artificial Sequence: Synthetic oligonucleotide
  Sense strand starting at position 1896 of SEQ ID NO: 1244032
agcgugaucugaguggaga

SEQ ID NO: 1459853 - RNA, 19 nt, Artificial Sequence
  Description of Artificial Sequence: Synthetic oligonucleotide
  Antisense strand to SEQ ID NO: 1459852
ucuccacucagaucacgcu

SEQ ID NO: 1459854 - RNA, 19 nt, Artificial Sequence
  Description of Artificial Sequence: Synthetic oligonucleotide
  Sense strand starting at position 1897 of SEQ ID NO: 1244032
gcgugaucugaguggagag

SEQ ID NO: 1459855 - RNA, 19 nt, Artificial Sequence
  Description of Artificial Sequence: Synthetic oligonucleotide
  Antisense strand to SEQ ID NO: 1459854
cucuccacucagaucacgc

SEQ ID NO: 1459856 - RNA, 19 nt, Artificial Sequence
  Description of Artificial Sequence: Synthetic oligonucleotide
  Sense strand starting at position 2432 of SEQ ID NO: 1244032
uaaccugucguuuaagacu

SEQ ID NO: 1459857 - RNA, 19 nt, Artificial Sequence
  Description of Artificial Sequence: Synthetic oligonucleotide
  Antisense strand to SEQ ID NO: 1459856
agucuuaaacgacagguua

SEQ ID NO: 1459858 - RNA, 19 nt, Artificial Sequence
  Description of Artificial Sequence: Synthetic oligonucleotide
  Sense strand starting at position 2606 of SEQ ID NO: 1244032
ccaucuaauuccuuuggga

SEQ ID NO: 1459859 - RNA, 19 nt, Artificial Sequence
  Description of Artificial Sequence: Synthetic oligonucleotide
  Antisense strand to SEQ ID NO: 1459858
ucccaaaggaauuagaugg

SEQ ID NO: 1459860 - RNA, 19 nt, Artificial Sequence
  Description of Artificial Sequence: Synthetic oligonucleotide
  Sense strand starting at position 2608 of SEQ ID NO: 1244032
aucuaauuccuuugggagu

SEQ ID NO: 1459861 - RNA, 19 nt, Artificial Sequence
  Description of Artificial Sequence: Synthetic oligonucleotide
  Antisense strand to SEQ ID NO: 1459860
acucccaaaggaauuagau

SEQ ID NO: 1459862 - RNA, 19 nt, Artificial Sequence
  Description of Artificial Sequence: Synthetic oligonucleotide
  Sense strand starting at position 2724 of SEQ ID NO: 1244032
caucucuuugagggucuua

SEQ ID NO: 1459863 - RNA, 19 nt, Artificial Sequence
  Description of Artificial Sequence: Synthetic oligonucleotide
  Antisense strand to SEQ ID NO: 1459862
uaagacccucaaagagaug

SEQ ID NO: 1459864 - RNA, 19 nt, Artificial Sequence
  Description of Artificial Sequence: Synthetic oligonucleotide
  Sense strand starting at position 2872 of SEQ ID NO: 1244032
guugaaauuuaucaccaag

SEQ ID NO: 1459865 - RNA, 19 nt, Artificial Sequence
  Description of Artificial Sequence: Synthetic oligonucleotide
  Antisense strand to SEQ ID NO: 1459864
cuuggugauaaauuucaac

SEQ ID NO: 1459866 - RNA, 19 nt, Artificial Sequence
  Description of Artificial Sequence: Synthetic oligonucleotide
  Sense strand starting at position 2938 of SEQ ID NO: 1244032
ggaucuggacaaugcuaau

SEQ ID NO: 1459867 - RNA, 19 nt, Artificial Sequence
  Description of Artificial Sequence: Synthetic oligonucleotide
  Antisense strand to SEQ ID NO: 1459866
auuagcauuguccagaucc

SEQ ID NO: 1459868 - RNA, 19 nt, Artificial Sequence
  Description of Artificial Sequence: Synthetic oligonucleotide
  Sense strand starting at position 2944 of SEQ ID NO: 1244032
ggacaaugcuaauuccaua

SEQ ID NO: 1459869 - RNA, 19 nt, Artificial Sequence
  Description of Artificial Sequence: Synthetic oligonucleotide
  Antisense strand to SEQ ID NO: 1459868
uauggaauuagcauugucc

SEQ ID NO: 1459870 - RNA, 19 nt, Artificial Sequence
  Description of Artificial Sequence: Synthetic oligonucleotide
  Sense strand starting at position 3054 of SEQ ID NO: 1244032
uuguguuaccaguaaggcu

SEQ ID NO: 1459871 - RNA, 19 nt, Artificial Sequence
  Description of Artificial Sequence: Synthetic oligonucleotide
  Antisense strand to SEQ ID NO: 1459870
agccuuacugguaacacaa

SEQ ID NO: 1459872 - RNA, 19 nt, Artificial Sequence
  Description of Artificial Sequence: Synthetic oligonucleotide
  Sense strand starting at position 3069 of SEQ ID NO: 1244032
ggcuuccagcaguaaggua

SEQ ID NO: 1459873 - RNA, 19 nt, Artificial Sequence
  Description of Artificial Sequence: Synthetic oligonucleotide
  Antisense strand to SEQ ID NO: 1459872
uaccuuacugcuggaagcc

SEQ ID NO: 1459874 - RNA, 19 nt, Artificial Sequence
  Description of Artificial Sequence: Synthetic oligonucleotide
  Sense strand starting at position 3086 of SEQ ID NO: 1244032
uauggcuuccaguaguaag

SEQ ID NO: 1459875 - RNA, 19 nt, Artificial Sequence
  Description of Artificial Sequence: Synthetic oligonucleotide
  Antisense strand to SEQ ID NO: 1459874
cuuacuacuggaagccaua

SEQ ID NO: 1459876 - RNA, 19 nt, Artificial Sequence
  Description of Artificial Sequence: Synthetic oligonucleotide
  Sense strand starting at position 3096 of SEQ ID NO: 1244032
aguaguaagccuuacagac

SEQ ID NO: 1459877 - RNA, 19 nt, Artificial Sequence
  Description of Artificial Sequence: Synthetic oligonucleotide
  Antisense strand to SEQ ID NO: 1459876
gucuguaaggcuuacuacu

SEQ ID NO: 1459878 - RNA, 19 nt, Artificial Sequence
  Description of Artificial Sequence: Synthetic oligonucleotide
  Sense strand starting at position 3162 of SEQ ID NO: 1244032
cuguuaguaguuuaacuuu

SEQ ID NO: 1459879 - RNA, 19 nt, Artificial Sequence
  Description of Artificial Sequence: Synthetic oligonucleotide
  Antisense strand to SEQ ID NO: 1459878
aaaguuaaacuacuaacag

SEQ ID NO: 1459880 - RNA, 19 nt, Artificial Sequence
  Description of Artificial Sequence: Synthetic oligonucleotide
  Sense strand starting at position 3290 of SEQ ID NO: 1244032
agugcauuugcagguauua

SEQ ID NO: 1459881 - RNA, 19 nt, Artificial Sequence
  Description of Artificial Sequence: Synthetic oligonucleotide
  Antisense strand to SEQ ID NO: 1459880
uaauaccugcaaaugcacu

SEQ ID NO: 1459882 - RNA, 19 nt, Artificial Sequence
  Description of Artificial Sequence: Synthetic oligonucleotide
  Sense strand starting at position 3356 of SEQ ID NO: 1244032
ucaccuuaguagucuugaa

SEQ ID NO: 1459883 - RNA, 19 nt, Artificial Sequence
  Description of Artificial Sequence: Synthetic oligonucleotide
  Antisense strand to SEQ ID NO: 1459882
uucaagacuacuaagguga

SEQ ID NO: 1459884 - RNA, 19 nt, Artificial Sequence
  Description of Artificial Sequence: Synthetic oligonucleotide
  Sense strand starting at position 3364 of SEQ ID NO: 1244032
guagucuugaagcagggua

SEQ ID NO: 1459885 - RNA, 19 nt, Artificial Sequence
  Description of Artificial Sequence: Synthetic oligonucleotide
  Antisense strand to SEQ ID NO: 1459884
uacccugcuucaagacuac

SEQ ID NO: 1459886 - RNA, 19 nt, Artificial Sequence
  Description of Artificial Sequence: Synthetic oligonucleotide
  Sense strand starting at position 3394 of SEQ ID NO: 1244032
acccaugugccguuuggua

SEQ ID NO: 1459887 - RNA, 19 nt, Artificial Sequence
  Description of Artificial Sequence: Synthetic oligonucleotide
  Antisense strand to SEQ ID NO: 1459886
uaccaaacggcacaugggu

SEQ ID NO: 1459888 - RNA, 19 nt, Artificial Sequence
  Description of Artificial Sequence: Synthetic oligonucleotide
  Sense strand starting at position 3519 of SEQ ID NO: 1244032
uguuguugccuuccugcaa

SEQ ID NO: 1459889 - RNA, 19 nt, Artificial Sequence
  Description of Artificial Sequence: Synthetic oligonucleotide
  Antisense strand to SEQ ID NO: 1459888
uugcaggaaggcaacaaca

SEQ ID NO: 1459890 - RNA, 19 nt, Artificial Sequence
  Description of Artificial Sequence: Synthetic oligonucleotide
  Sense strand starting at position 3523 of SEQ ID NO: 1244032
guugccuuccugcaagaaa

SEQ ID NO: 1459891 - RNA, 19 nt, Artificial Sequence
  Description of Artificial Sequence: Synthetic oligonucleotide
  Antisense strand to SEQ ID NO: 1459890
uuucuugcaggaaggcaac

SEQ ID NO: 1459892 - RNA, 19 nt, Artificial Sequence
  Description of Artificial Sequence: Synthetic oligonucleotide
  Sense strand starting at position 3538 of SEQ ID NO: 1244032
gaaauuugguguuacauga

SEQ ID NO: 1459893 - RNA, 19 nt, Artificial Sequence
  Description of Artificial Sequence: Synthetic oligonucleotide
  Antisense strand to SEQ ID NO: 1459892
ucauguaacaccaaauuuc

SEQ ID NO: 1459894 - RNA, 19 nt, Artificial Sequence
  Description of Artificial Sequence: Synthetic oligonucleotide
  Sense strand starting at position 3575 of SEQ ID NO: 1244032
ccauuagauucuguuacuc

SEQ ID NO: 1459895 - RNA, 19 nt, Artificial Sequence
  Description of Artificial Sequence: Synthetic oligonucleotide
  Antisense strand to SEQ ID NO: 1459894
gaguaacagaaucuaaugg

SEQ ID NO: 1459896 - RNA, 19 nt, Artificial Sequence
  Description of Artificial Sequence: Synthetic oligonucleotide
  Sense strand starting at position 3585 of SEQ ID NO: 1244032
cuguuacuccuggaccagu

SEQ ID NO: 1459897 - RNA, 19 nt, Artificial Sequence
  Description of Artificial Sequence: Synthetic oligonucleotide
  Antisense strand to SEQ ID NO: 1459896
acugguccaggaguaacag

SEQ ID NO: 1459898 - RNA, 19 nt, Artificial Sequence
  Description of Artificial Sequence: Synthetic oligonucleotide
  Sense strand starting at position 3663 of SEQ ID NO: 1244032
agggcagggucauuaggau

SEQ ID NO: 1459899 - RNA, 19 nt, Artificial Sequence
  Description of Artificial Sequence: Synthetic oligonucleotide
  Antisense strand to SEQ ID NO: 1459898
auccuaaugacccugcccu

SEQ ID NO: 1459900 - RNA, 19 nt, Artificial Sequence
  Description of Artificial Sequence: Synthetic oligonucleotide
  Sense strand starting at position 3685 of SEQ ID NO: 1244032
acuggagaaucugaaacaa

SEQ ID NO: 1459901 - RNA, 19 nt, Artificial Sequence
  Description of Artificial Sequence: Synthetic oligonucleotide
  Antisense strand to SEQ ID NO: 1459900
uuguuucagauucuccagu

SEQ ID NO: 1459902 - RNA, 19 nt, Artificial Sequence
  Description of Artificial Sequence: Synthetic oligonucleotide
  Sense strand starting at position 3747 of SEQ ID NO: 1244032
ugaggucuuggccaagauc

SEQ ID NO: 1459903 - RNA, 19 nt, Artificial Sequence
  Description of Artificial Sequence: Synthetic oligonucleotide
  Antisense strand to SEQ ID NO: 1459902
gaucuuggccaagaccuca

SEQ ID NO: 1459904 - RNA, 19 nt, Artificial Sequence
  Description of Artificial Sequence: Synthetic oligonucleotide
  Sense strand starting at position 3750 of SEQ ID NO: 1244032
ggucuuggccaagauccua

SEQ ID NO: 1459905 - RNA, 19 nt, Artificial Sequence
  Description of Artificial Sequence: Synthetic oligonucleotide
  Antisense strand to SEQ ID NO: 1459904
uaggaucuuggccaagacc

SEQ ID NO: 1459906 - RNA, 19 nt, Artificial Sequence
  Description of Artificial Sequence: Synthetic oligonucleotide
  Sense strand starting at position 3797 of SEQ ID NO: 1244032
uggaauuugucucuugucu

SEQ ID NO: 1459907 - RNA, 19 nt, Artificial Sequence
  Description of Artificial Sequence: Synthetic oligonucleotide
  Antisense strand to SEQ ID NO: 1459906
agacaagagacaaauucca

SEQ ID NO: 1459908 - RNA, 19 nt, Artificial Sequence
  Description of Artificial Sequence: Synthetic oligonucleotide
  Sense strand starting at position 239 of SEQ ID NO: 1244033
uuuccaagggcaugagaaa

SEQ ID NO: 1459909 - RNA, 19 nt, Artificial Sequence
  Description of Artificial Sequence: Synthetic oligonucleotide
  Antisense strand to SEQ ID NO: 1459908
uuucucaugcccuuggaaa

SEQ ID NO: 1459910 - RNA, 19 nt, Artificial Sequence
  Description of Artificial Sequence: Synthetic oligonucleotide
  Sense strand starting at position 317 of SEQ ID NO: 1244033
gggauccacucuuaacaag

SEQ ID NO: 1459911 - RNA, 19 nt, Artificial Sequence
  Description of Artificial Sequence: Synthetic oligonucleotide
  Antisense strand to SEQ ID NO: 1459910
cuuguuaagaguggauccc

SEQ ID NO: 1459912 - RNA, 19 nt, Artificial Sequence
  Description of Artificial Sequence: Synthetic oligonucleotide
  Sense strand starting at position 404 of SEQ ID NO: 1244033
gagagucucuaggacaauu

SEQ ID NO: 1459913 - RNA, 19 nt, Artificial Sequence
  Description of Artificial Sequence: Synthetic oligonucleotide
  Antisense strand to SEQ ID NO: 1459912
aauuguccuagagacucuc

SEQ ID NO: 1459914 - RNA, 19 nt, Artificial Sequence
  Description of Artificial Sequence: Synthetic oligonucleotide
  Sense strand starting at position 414 of SEQ ID NO: 1244033
aggacaauuccaggcauca

SEQ ID NO: 1459915 - RNA, 19 nt, Artificial Sequence
  Description of Artificial Sequence: Synthetic oligonucleotide
  Antisense strand to SEQ ID NO: 1459914
ugaugccuggaauuguccu

SEQ ID NO: 1459916 - RNA, 19 nt, Artificial Sequence
  Description of Artificial Sequence: Synthetic oligonucleotide
  Sense strand starting at position 552 of SEQ ID NO: 1244033
agauaaggaaggugguauu

SEQ ID NO: 1459917 - RNA, 19 nt, Artificial Sequence
  Description of Artificial Sequence: Synthetic oligonucleotide
  Antisense strand to SEQ ID NO: 1459916
aauaccaccuuccuuaucu

SEQ ID NO: 1459918 - RNA, 19 nt, Artificial Sequence
  Description of Artificial Sequence: Synthetic oligonucleotide
  Sense strand starting at position 555 of SEQ ID NO: 1244033
uaaggaaggugguauuaua

SEQ ID NO: 1459919 - RNA, 19 nt, Artificial Sequence
  Description of Artificial Sequence: Synthetic oligonucleotide
  Antisense strand to SEQ ID NO: 1459918
uauaauaccaccuuccuua

SEQ ID NO: 1459920 - RNA, 19 nt, Artificial Sequence
  Description of Artificial Sequence: Synthetic oligonucleotide
  Sense strand starting at position 564 of SEQ ID NO: 1244033
ugguauuauaaggaguucu

SEQ ID NO: 1459921 - RNA, 19 nt, Artificial Sequence
  Description of Artificial Sequence: Synthetic oligonucleotide
  Antisense strand to SEQ ID NO: 1459920
agaacuccuuauaauacca

SEQ ID NO: 1459922 - RNA, 19 nt, Artificial Sequence
  Description of Artificial Sequence: Synthetic oligonucleotide
  Sense strand starting at position 677 of SEQ ID NO: 1244033
cugggauaguuggccaaga

SEQ ID NO: 1459923 - RNA, 19 nt, Artificial Sequence
  Description of Artificial Sequence: Synthetic oligonucleotide
  Antisense strand to SEQ ID NO: 1459922
ucuuggccaacuaucccag

SEQ ID NO: 1459924 - RNA, 19 nt, Artificial Sequence
  Description of Artificial Sequence: Synthetic oligonucleotide
  Sense strand starting at position 679 of SEQ ID NO: 1244033
gggauaguuggccaagagu

SEQ ID NO: 1459925 - RNA, 19 nt, Artificial Sequence
  Description of Artificial Sequence: Synthetic oligonucleotide
  Antisense strand to SEQ ID NO: 1459924
acucuuggccaacuauccc

SEQ ID NO: 1459926 - RNA, 19 nt, Artificial Sequence
  Description of Artificial Sequence: Synthetic oligonucleotide
  Sense strand starting at position 682 of SEQ ID NO: 1244033
auaguuggccaagagucuu

SEQ ID NO: 1459927 - RNA, 19 nt, Artificial Sequence
  Description of Artificial Sequence: Synthetic oligonucleotide
  Antisense strand to SEQ ID NO: 1459926
aagacucuuggccaacuau

SEQ ID NO: 1459928 - RNA, 19 nt, Artificial Sequence
  Description of Artificial Sequence: Synthetic oligonucleotide
  Sense strand starting at position 708 of SEQ ID NO: 1244033
uggaaaucuuaagauaaac

SEQ ID NO: 1459929 - RNA, 19 nt, Artificial Sequence
  Description of Artificial Sequence: Synthetic oligonucleotide
  Antisense strand to SEQ ID NO: 1459928
guuuaucuuaagauuucca

SEQ ID NO: 1459930 - RNA, 19 nt, Artificial Sequence
  Description of Artificial Sequence: Synthetic oligonucleotide
  Sense strand starting at position 763 of SEQ ID NO: 1244033
uuuagagauuaugacuaug

SEQ ID NO: 1459931 - RNA, 19 nt, Artificial Sequence
  Description of Artificial Sequence: Synthetic oligonucleotide
  Antisense strand to SEQ ID NO: 1459930
cauagucauaaucucuaaa

SEQ ID NO: 1459932 - RNA, 19 nt, Artificial Sequence
  Description of Artificial Sequence: Synthetic oligonucleotide
  Sense strand starting at position 768 of SEQ ID NO: 1244033
agauuaugacuaugaagcu

SEQ ID NO: 1459933 - RNA, 19 nt, Artificial Sequence
  Description of Artificial Sequence: Synthetic oligonucleotide
  Antisense strand to SEQ ID NO: 1459932
agcuucauagucauaaucu

SEQ ID NO: 1459934 - RNA, 19 nt, Artificial Sequence
  Description of Artificial Sequence: Synthetic oligonucleotide
  Sense strand starting at position 828 of SEQ ID NO: 1244033
guaucugaggucuaaguga

SEQ ID NO: 1459935 - RNA, 19 nt, Artificial Sequence
  Description of Artificial Sequence: Synthetic oligonucleotide
  Antisense strand to SEQ ID NO: 1459934
ucacuuagaccucagauac

SEQ ID NO: 1459936 - RNA, 19 nt, Artificial Sequence
  Description of Artificial Sequence: Synthetic oligonucleotide
  Sense strand starting at position 855 of SEQ ID NO: 1244033
auccauuccugaguagaau

SEQ ID NO: 1459937 - RNA, 19 nt, Artificial Sequence
  Description of Artificial Sequence: Synthetic oligonucleotide
  Antisense strand to SEQ ID NO: 1459936
auucuacucaggaauggau

SEQ ID NO: 1459938 - RNA, 19 nt, Artificial Sequence
  Description of Artificial Sequence: Synthetic oligonucleotide
  Sense strand starting at position 861 of SEQ ID NO: 1244033
uccugaguagaaugguaga

SEQ ID NO: 1459939 - RNA, 19 nt, Artificial Sequence
  Description of Artificial Sequence: Synthetic oligonucleotide
  Antisense strand to SEQ ID NO: 1459938
ucuaccauucuacucagga

SEQ ID NO: 1459940 - RNA, 19 nt, Artificial Sequence
  Description of Artificial Sequence: Synthetic oligonucleotide
  Sense strand starting at position 977 of SEQ ID NO: 1244033
gguuccugaggucaaagau

SEQ ID NO: 1459941 - RNA, 19 nt, Artificial Sequence
  Description of Artificial Sequence: Synthetic oligonucleotide
  Antisense strand to SEQ ID NO: 1459940
aucuuugaccucaggaacc

SEQ ID NO: 1459942 - RNA, 19 nt, Artificial Sequence
  Description of Artificial Sequence: Synthetic oligonucleotide
  Sense strand starting at position 993 of SEQ ID NO: 1244033
gaugccaaacgucguaaau

SEQ ID NO: 1459943 - RNA, 19 nt, Artificial Sequence
  Description of Artificial Sequence: Synthetic oligonucleotide
  Antisense strand to SEQ ID NO: 1459942
auuuacgacguuuggcauc

SEQ ID NO: 1459944 - RNA, 19 nt, Artificial Sequence
  Description of Artificial Sequence: Synthetic oligonucleotide
  Sense strand starting at position 1005 of SEQ ID NO: 1244033
cguaaauggaucugaccau

SEQ ID NO: 1459945 - RNA, 19 nt, Artificial Sequence
  Description of Artificial Sequence: Synthetic oligonucleotide
  Antisense strand to SEQ ID NO: 1459944
auggucagauccauuuacg

SEQ ID NO: 1459946 - RNA, 19 nt, Artificial Sequence
  Description of Artificial Sequence: Synthetic oligonucleotide
  Sense strand starting at position 1006 of SEQ ID NO: 1244033
guaaauggaucugaccauu

SEQ ID NO: 1459947 - RNA, 19 nt, Artificial Sequence
  Description of Artificial Sequence: Synthetic oligonucleotide
  Antisense strand to SEQ ID NO: 1459946
aauggucagauccauuuac

SEQ ID NO: 1459948 - RNA, 19 nt, Artificial Sequence
  Description of Artificial Sequence: Synthetic oligonucleotide
  Sense strand starting at position 1041 of SEQ ID NO: 1244033
accggaauauaagaugaaa

SEQ ID NO: 1459949 - RNA, 19 nt, Artificial Sequence
  Description of Artificial Sequence: Synthetic oligonucleotide
  Antisense strand to SEQ ID NO: 1459948
uuucaucuuauauuccggu

SEQ ID NO: 1459950 - RNA, 19 nt, Artificial Sequence
  Description of Artificial Sequence: Synthetic oligonucleotide
  Sense strand starting at position 1065 of SEQ ID NO: 1244033
gugaguguuccagagccag

SEQ ID NO: 1459951 - RNA, 19 nt, Artificial Sequence
  Description of Artificial Sequence: Synthetic oligonucleotide
  Antisense strand to SEQ ID NO: 1459950
cuggcucuggaacacucac

SEQ ID NO: 1459952 - RNA, 19 nt, Artificial Sequence
  Description of Artificial Sequence: Synthetic oligonucleotide
  Sense strand starting at position 1091 of SEQ ID NO: 1244033
aggccucucugaggaagau

SEQ ID NO: 1459953 - RNA, 19 nt, Artificial Sequence
  Description of Artificial Sequence: Synthetic oligonucleotide
  Antisense strand to SEQ ID NO: 1459952
aucuuccucagagaggccu

SEQ ID NO: 1459954 - RNA, 19 nt, Artificial Sequence
  Description of Artificial Sequence: Synthetic oligonucleotide
  Sense strand starting at position 1199 of SEQ ID NO: 1244033
gugauuaaggucuaaggua

SEQ ID NO: 1459955 - RNA, 19 nt, Artificial Sequence
  Description of Artificial Sequence: Synthetic oligonucleotide
  Antisense strand to SEQ ID NO: 1459954
uaccuuagaccuuaaucac

SEQ ID NO: 1459956 - RNA, 19 nt, Artificial Sequence
  Description of Artificial Sequence: Synthetic oligonucleotide
  Sense strand starting at position 1244 of SEQ ID NO: 1244033
ucaauuagaagcuggguaa

SEQ ID NO: 1459957 - RNA, 19 nt, Artificial Sequence
  Description of Artificial Sequence: Synthetic oligonucleotide
  Antisense strand to SEQ ID NO: 1459956
uuacccagcuucuaauuga

SEQ ID NO: 1459958 - RNA, 19 nt, Artificial Sequence
  Description of Artificial Sequence: Synthetic oligonucleotide
  Sense strand starting at position 1245 of SEQ ID NO: 1244033
caauuagaagcuggguaaa

SEQ ID NO: 1459959 - RNA, 19 nt, Artificial Sequence
  Description of Artificial Sequence: Synthetic oligonucleotide
  Antisense strand to SEQ ID NO: 1459958
uuuacccagcuucuaauug

SEQ ID NO: 1459960 - RNA, 19 nt, Artificial Sequence
  Description of Artificial Sequence: Synthetic oligonucleotide
  Sense strand starting at position 1302 of SEQ ID NO: 1244033
acaauaauggccugaaguu

SEQ ID NO: 1459961 - RNA, 19 nt, Artificial Sequence
  Description of Artificial Sequence: Synthetic oligonucleotide
  Antisense strand to SEQ ID NO: 1459960
aacuucaggccauuauugu

SEQ ID NO: 1459962 - RNA, 19 nt, Artificial Sequence
  Description of Artificial Sequence: Synthetic oligonucleotide
  Sense strand starting at position 1318 of SEQ ID NO: 1244033
guucauucucccggagaug

SEQ ID NO: 1459963 - RNA, 19 nt, Artificial Sequence
  Description of Artificial Sequence: Synthetic oligonucleotide
  Antisense strand to SEQ ID NO: 1459962
caucuccgggagaaugaac

SEQ ID NO: 1459964 - RNA, 19 nt, Artificial Sequence
  Description of Artificial Sequence: Synthetic oligonucleotide
  Sense strand starting at position 1544 of SEQ ID NO: 1244033
cgccgucucaccuuguaga

SEQ ID NO: 1459965 - RNA, 19 nt, Artificial Sequence
  Description of Artificial Sequence: Synthetic oligonucleotide
  Antisense strand to SEQ ID NO: 1459964
ucuacaaggugagacggcg

SEQ ID NO: 1459966 - RNA, 19 nt, Artificial Sequence
  Description of Artificial Sequence: Synthetic oligonucleotide
  Sense strand starting at position 1545 of SEQ ID NO: 1244033
gccgucucaccuuguagaa

SEQ ID NO: 1459967 - RNA, 19 nt, Artificial Sequence
  Description of Artificial Sequence: Synthetic oligonucleotide
  Antisense strand to SEQ ID NO: 1459966
uucuacaaggugagacggc

SEQ ID NO: 1459968 - RNA, 19 nt, Artificial Sequence
  Description of Artificial Sequence: Synthetic oligonucleotide
  Sense strand starting at position 2510 of SEQ ID NO: 1244033
acccucuucgcguaugcau

SEQ ID NO: 1459969 - RNA, 19 nt, Artificial Sequence
  Description of Artificial Sequence: Synthetic oligonucleotide
  Antisense strand to SEQ ID NO: 1459968
augcauacgcgaagagggu

SEQ ID NO: 1459970 - RNA, 19 nt, Artificial Sequence
  Description of Artificial Sequence: Synthetic oligonucleotide
  Sense strand starting at position 2518 of SEQ ID NO: 1244033
cgcguaugcaucgccgaua

SEQ ID NO: 1459971 - RNA, 19 nt, Artificial Sequence
  Description of Artificial Sequence: Synthetic oligonucleotide
  Antisense strand to SEQ ID NO: 1459970
uaucggcgaugcauacgcg

SEQ ID NO: 1459972 - RNA, 19 nt, Artificial Sequence
  Description of Artificial Sequence: Synthetic oligonucleotide
  Sense strand starting at position 2521 of SEQ ID NO: 1244033
guaugcaucgccgauauuu

SEQ ID NO: 1459973 - RNA, 19 nt, Artificial Sequence
  Description of Artificial Sequence: Synthetic oligonucleotide
  Antisense strand to SEQ ID NO: 1459972
aaauaucggcgaugcauac

SEQ ID NO: 1459974 - RNA, 19 nt, Artificial Sequence
  Description of Artificial Sequence: Synthetic oligonucleotide
  Sense strand starting at position 2546 of SEQ ID NO: 1244033
ucuguaacucucuacugua

SEQ ID NO: 1459975 - RNA, 19 nt, Artificial Sequence
  Description of Artificial Sequence: Synthetic oligonucleotide
  Antisense strand to SEQ ID NO: 1459974
uacaguagagaguuacaga

SEQ ID NO: 1459976 - RNA, 19 nt, Artificial Sequence
  Description of Artificial Sequence: Synthetic oligonucleotide
  Sense strand starting at position 2554 of SEQ ID NO: 1244033
ucucuacuguaguagauuu

SEQ ID NO: 1459977 - RNA, 19 nt, Artificial Sequence
  Description of Artificial Sequence: Synthetic oligonucleotide
  Antisense strand to SEQ ID NO: 1459976
aaaucuacuacaguagaga

SEQ ID NO: 1459978 - RNA, 19 nt, Artificial Sequence
  Description of Artificial Sequence: Synthetic oligonucleotide
  Sense strand starting at position 2581 of SEQ ID NO: 1244033
uggcucuuaccuugaagag

SEQ ID NO: 1459979 - RNA, 19 nt, Artificial Sequence
  Description of Artificial Sequence: Synthetic oligonucleotide
  Antisense strand to SEQ ID NO: 1459978
cucuucaagguaagagcca

SEQ ID NO: 1459980 - RNA, 19 nt, Artificial Sequence
  Description of Artificial Sequence: Synthetic oligonucleotide
  Sense strand starting at position 2590 of SEQ ID NO: 1244033
ccuugaagagauugugaua

SEQ ID NO: 1459981 - RNA, 19 nt, Artificial Sequence
  Description of Artificial Sequence: Synthetic oligonucleotide
  Antisense strand to SEQ ID NO: 1459980
uaucacaaucucuucaagg

SEQ ID NO: 1459982 - RNA, 19 nt, Artificial Sequence
  Description of Artificial Sequence: Synthetic oligonucleotide
  Sense strand starting at position 2593 of SEQ ID NO: 1244033
ugaagagauugugauacaa

SEQ ID NO: 1459983 - RNA, 19 nt, Artificial Sequence
  Description of Artificial Sequence: Synthetic oligonucleotide
  Antisense strand to SEQ ID NO: 1459982
uuguaucacaaucucuuca

SEQ ID NO: 1459984 - RNA, 19 nt, Artificial Sequence
  Description of Artificial Sequence: Synthetic oligonucleotide
  Sense strand starting at position 2595 of SEQ ID NO: 1244033
aagagauugugauacaaug

SEQ ID NO: 1459985 - RNA, 19 nt, Artificial Sequence
  Description of Artificial Sequence: Synthetic oligonucleotide
  Antisense strand to SEQ ID NO: 1459984
cauuguaucacaaucucuu

SEQ ID NO: 1459986 - RNA, 19 nt, Artificial Sequence
  Description of Artificial Sequence: Synthetic oligonucleotide
  Sense strand starting at position 3361 of SEQ ID NO: 1244033
uggauaucaugccaccaca

SEQ ID NO: 1459987 - RNA, 19 nt, Artificial Sequence
  Description of Artificial Sequence: Synthetic oligonucleotide
  Antisense strand to SEQ ID NO: 1459986
ugugguggcaugauaucca

SEQ ID NO: 1459988 - RNA, 19 nt, Artificial Sequence
  Description of Artificial Sequence: Synthetic oligonucleotide
  Sense strand starting at position 2209 of SEQ ID NO: 1244034
aaaugugcucucggccaau

SEQ ID NO: 1459989 - RNA, 19 nt, Artificial Sequence
  Description of Artificial Sequence: Synthetic oligonucleotide
  Antisense strand to SEQ ID NO: 1459988
auuggccgagagcacauuu

SEQ ID NO: 1459990 - RNA, 19 nt, Artificial Sequence
  Description of Artificial Sequence: Synthetic oligonucleotide
  Sense strand starting at position 2218 of SEQ ID NO: 1244034
cucggccaaucagauuuaa

SEQ ID NO: 1459991 - RNA, 19 nt, Artificial Sequence
  Description of Artificial Sequence: Synthetic oligonucleotide
  Antisense strand to SEQ ID NO: 1459990
uuaaaucugauuggccgag

SEQ ID NO: 1459992 - RNA, 19 nt, Artificial Sequence
  Description of Artificial Sequence: Synthetic oligonucleotide
  Sense strand starting at position 2258 of SEQ ID NO: 1244034
gcuggauuggucgaccaca

SEQ ID NO: 1459993 - RNA, 19 nt, Artificial Sequence
  Description of Artificial Sequence: Synthetic oligonucleotide
  Antisense strand to SEQ ID NO: 1459992
uguggucgaccaauccagc

SEQ ID NO: 1459994 - RNA, 19 nt, Artificial Sequence
  Description of Artificial Sequence: Synthetic oligonucleotide
  Sense strand starting at position 2263 of SEQ ID NO: 1244034
auuggucgaccacaacaua

SEQ ID NO: 1459995 - RNA, 19 nt, Artificial Sequence
  Description of Artificial Sequence: Synthetic oligonucleotide
  Antisense strand to SEQ ID NO: 1459994
uauguuguggucgaccaau

SEQ ID NO: 1459996 - RNA, 19 nt, Artificial Sequence
  Description of Artificial Sequence: Synthetic oligonucleotide
  Sense strand starting at position 2375 of SEQ ID NO: 1244034
ccgggauuucuccggaguu

SEQ ID NO: 1459997 - RNA, 19 nt, Artificial Sequence
  Description of Artificial Sequence: Synthetic oligonucleotide
  Antisense strand to SEQ ID NO: 1459996
aacuccggagaaaucccgg

SEQ ID NO: 1459998 - RNA, 19 nt, Artificial Sequence
  Description of Artificial Sequence: Synthetic oligonucleotide
  Sense strand starting at position 2376 of SEQ ID NO: 1244034
cgggauuucuccggaguug

SEQ ID NO: 1459999 - RNA, 19 nt, Artificial Sequence
  Description of Artificial Sequence: Synthetic oligonucleotide
  Antisense strand to SEQ ID NO: 1459998
caacuccggagaaaucccg

SEQ ID NO: 1460000 - RNA, 19 nt, Artificial Sequence
  Description of Artificial Sequence: Synthetic oligonucleotide
  Sense strand starting at position 2388 of SEQ ID NO: 1244034
ggaguugccgcggcgagau

SEQ ID NO: 1460001 - RNA, 19 nt, Artificial Sequence
  Description of Artificial Sequence: Synthetic oligonucleotide
  Antisense strand to SEQ ID NO: 1460000
aucucgccgcggcaacucc

SEQ ID NO: 1460002 - RNA, 19 nt, Artificial Sequence
  Description of Artificial Sequence: Synthetic oligonucleotide
  Sense strand starting at position 2709 of SEQ ID NO: 1244034
augggauccugucucuuua

SEQ ID NO: 1460003 - RNA, 19 nt, Artificial Sequence
  Description of Artificial Sequence: Synthetic oligonucleotide
  Antisense strand to SEQ ID NO: 1460002
uaaagagacaggaucccau

SEQ ID NO: 1460004 - RNA, 19 nt, Artificial Sequence
  Description of Artificial Sequence: Synthetic oligonucleotide
  Sense strand starting at position 2711 of SEQ ID NO: 1244034
gggauccugucucuuuaag

SEQ ID NO: 1460005 - RNA, 19 nt, Artificial Sequence
  Description of Artificial Sequence: Synthetic oligonucleotide
  Antisense strand to SEQ ID NO: 1460004
cuuaaagagacaggauccc

SEQ ID NO: 1460006 - RNA, 19 nt, Artificial Sequence
  Description of Artificial Sequence: Synthetic oligonucleotide
  Sense strand starting at position 2713 of SEQ ID NO: 1244034
gauccugucucuuuaagag

SEQ ID NO: 1460007 - RNA, 19 nt, Artificial Sequence
  Description of Artificial Sequence: Synthetic oligonucleotide
  Antisense strand to SEQ ID NO: 1460006
cucuuaaagagacaggauc

SEQ ID NO: 1460008 - RNA, 19 nt, Artificial Sequence
  Description of Artificial Sequence: Synthetic oligonucleotide
  Sense strand starting at position 2747 of SEQ ID NO: 1244034
aggacuccgaggcguaauu

SEQ ID NO: 1460009 - RNA, 19 nt, Artificial Sequence
  Description of Artificial Sequence: Synthetic oligonucleotide
  Antisense strand to SEQ ID NO: 1460008
aauuacgccucggaguccu

SEQ ID NO: 1460010 - RNA, 19 nt, Artificial Sequence
  Description of Artificial Sequence: Synthetic oligonucleotide
  Sense strand starting at position 2782 of SEQ ID NO: 1244034
aaaggagcccauuaugguu

SEQ ID NO: 1460011 - RNA, 19 nt, Artificial Sequence
  Description of Artificial Sequence: Synthetic oligonucleotide
  Antisense strand to SEQ ID NO: 1460010
aaccauaaugggcuccuuu

SEQ ID NO: 1460012 - RNA, 19 nt, Artificial Sequence
  Description of Artificial Sequence: Synthetic oligonucleotide
  Sense strand starting at position 2790 of SEQ ID NO: 1244034
ccauuaugguucuuugugu

SEQ ID NO: 1460013 - RNA, 19 nt, Artificial Sequence
  Description of Artificial Sequence: Synthetic oligonucleotide
  Antisense strand to SEQ ID NO: 1460012
acacaaagaaccauaaugg

SEQ ID NO: 1460014 - RNA, 19 nt, Artificial Sequence
  Description of Artificial Sequence: Synthetic oligonucleotide
  Sense strand starting at position 2791 of SEQ ID NO: 1244034
cauuaugguucuuuguguu

SEQ ID NO: 1460015 - RNA, 19 nt, Artificial Sequence
  Description of Artificial Sequence: Synthetic oligonucleotide
  Antisense strand to SEQ ID NO: 1460014
aacacaaagaaccauaaug

SEQ ID NO: 1460016 - RNA, 19 nt, Artificial Sequence
  Description of Artificial Sequence: Synthetic oligonucleotide
  Sense strand starting at position 2814 of SEQ ID NO: 1244034
ggcaccucaaagugagaaa

SEQ ID NO: 1460017 - RNA, 19 nt, Artificial Sequence
  Description of Artificial Sequence: Synthetic oligonucleotide
  Antisense strand to SEQ ID NO: 1460016
uuucucacuuugaggugcc

SEQ ID NO: 1460018 - RNA, 19 nt, Artificial Sequence
  Description of Artificial Sequence: Synthetic oligonucleotide
  Sense strand starting at position 2930 of SEQ ID NO: 1244034
ccgcuucuucugcggcaaa

SEQ ID NO: 1460019 - RNA, 19 nt, Artificial Sequence
  Description of Artificial Sequence: Synthetic oligonucleotide
  Antisense strand to SEQ ID NO: 1460018
uuugccgcagaagaagcgg

SEQ ID NO: 1460020 - RNA, 19 nt, Artificial Sequence
  Description of Artificial Sequence: Synthetic oligonucleotide
  Sense strand starting at position 2931 of SEQ ID NO: 1244034
cgcuucuucugcggcaaau

SEQ ID NO: 1460021 - RNA, 19 nt, Artificial Sequence
  Description of Artificial Sequence: Synthetic oligonucleotide
  Antisense strand to SEQ ID NO: 1460020
auuugccgcagaagaagcg

SEQ ID NO: 1460022 - RNA, 19 nt, Artificial Sequence
  Description of Artificial Sequence: Synthetic oligonucleotide
  Sense strand starting at position 2932 of SEQ ID NO: 1244034
gcuucuucugcggcaaauc

SEQ ID NO: 1460023 - RNA, 19 nt, Artificial Sequence
  Description of Artificial Sequence: Synthetic oligonucleotide
  Antisense strand to SEQ ID NO: 1460022
gauuugccgcagaagaagc

SEQ ID NO: 1460024 - RNA, 19 nt, Artificial Sequence
  Description of Artificial Sequence: Synthetic oligonucleotide
  Sense strand starting at position 2943 of SEQ ID NO: 1244034
ggcaaaucuuaauugugca

SEQ ID NO: 1460025 - RNA, 19 nt, Artificial Sequence
  Description of Artificial Sequence: Synthetic oligonucleotide
  Antisense strand to SEQ ID NO: 1460024
ugcacaauuaagauuugcc

SEQ ID NO: 1460026 - RNA, 19 nt, Artificial Sequence
  Description of Artificial Sequence: Synthetic oligonucleotide
  Sense strand starting at position 2948 of SEQ ID NO: 1244034
aucuuaauugugcaaagua

SEQ ID NO: 1460027 - RNA, 19 nt, Artificial Sequence
  Description of Artificial Sequence: Synthetic oligonucleotide
  Antisense strand to SEQ ID NO: 1460026
uacuuugcacaauuaagau

SEQ ID NO: 1460028 - RNA, 19 nt, Artificial Sequence
  Description of Artificial Sequence: Synthetic oligonucleotide
  Sense strand starting at position 2987 of SEQ ID NO: 1244034
ggaggucuuaaucgaaagu

SEQ ID NO: 1460029 - RNA, 19 nt, Artificial Sequence
  Description of Artificial Sequence: Synthetic oligonucleotide
  Antisense strand to SEQ ID NO: 1460028
acuuucgauuaagaccucc

SEQ ID NO: 1460030 - RNA, 19 nt, Artificial Sequence
  Description of Artificial Sequence: Synthetic oligonucleotide
  Sense strand starting at position 3054 of SEQ ID NO: 1244034
cucucuuaggccugacgaa

SEQ ID NO: 1460031 - RNA, 19 nt, Artificial Sequence
  Description of Artificial Sequence: Synthetic oligonucleotide
  Antisense strand to SEQ ID NO: 1460030
uucgucaggccuaagagag

SEQ ID NO: 1460032 - RNA, 19 nt, Artificial Sequence
  Description of Artificial Sequence: Synthetic oligonucleotide
  Sense strand starting at position 3066 of SEQ ID NO: 1244034
ugacgaacguuugagggaa

SEQ ID NO: 1460033 - RNA, 19 nt, Artificial Sequence
  Description of Artificial Sequence: Synthetic oligonucleotide
  Antisense strand to SEQ ID NO: 1460032
uucccucaaacguucguca

SEQ ID NO: 1460034 - RNA, 19 nt, Artificial Sequence
  Description of Artificial Sequence: Synthetic oligonucleotide
  Sense strand starting at position 3068 of SEQ ID NO: 1244034
acgaacguuugagggaauu

SEQ ID NO: 1460035 - RNA, 19 nt, Artificial Sequence
  Description of Artificial Sequence: Synthetic oligonucleotide
  Antisense strand to SEQ ID NO: 1460034
aauucccucaaacguucgu

SEQ ID NO: 1460036 - RNA, 19 nt, Artificial Sequence
  Description of Artificial Sequence: Synthetic oligonucleotide
  Sense strand starting at position 3369 of SEQ ID NO: 1244034
guaaaucuccugggccuga

SEQ ID NO: 1460037 - RNA, 19 nt, Artificial Sequence
  Description of Artificial Sequence: Synthetic oligonucleotide
  Antisense strand to SEQ ID NO: 1460036
ucaggcccaggagauuuac

SEQ ID NO: 1460038 - RNA, 19 nt, Artificial Sequence
  Description of Artificial Sequence: Synthetic oligonucleotide
  Sense strand starting at position 3380 of SEQ ID NO: 1244034
gggccugauacuggaugau

SEQ ID NO: 1460039 - RNA, 19 nt, Artificial Sequence
  Description of Artificial Sequence: Synthetic oligonucleotide
  Antisense strand to SEQ ID NO: 1460038
aucauccaguaucaggccc

SEQ ID NO: 1460040 - RNA, 19 nt, Artificial Sequence
  Description of Artificial Sequence: Synthetic oligonucleotide
  Sense strand starting at position 3414 of SEQ ID NO: 1244034
uguugucucucccgaggga

SEQ ID NO: 1460041 - RNA, 19 nt, Artificial Sequence
  Description of Artificial Sequence: Synthetic oligonucleotide
  Antisense strand to SEQ ID NO: 1460040
ucccucgggagagacaaca

SEQ ID NO: 1460042 - RNA, 19 nt, Artificial Sequence
  Description of Artificial Sequence: Synthetic oligonucleotide
  Sense strand starting at position 3510 of SEQ ID NO: 1244034
uccucacagucuggugaaa

SEQ ID NO: 1460043 - RNA, 19 nt, Artificial Sequence
  Description of Artificial Sequence: Synthetic oligonucleotide
  Antisense strand to SEQ ID NO: 1460042
uuucaccagacugugagga

SEQ ID NO: 1460044 - RNA, 19 nt, Artificial Sequence
  Description of Artificial Sequence: Synthetic oligonucleotide
  Sense strand starting at position 3512 of SEQ ID NO: 1244034
cucacagucuggugaaaug

SEQ ID NO: 1460045 - RNA, 19 nt, Artificial Sequence
  Description of Artificial Sequence: Synthetic oligonucleotide
  Antisense strand to SEQ ID NO: 1460044
cauuucaccagacugugag

SEQ ID NO: 1460046 - RNA, 19 nt, Artificial Sequence
  Description of Artificial Sequence: Synthetic oligonucleotide
  Sense strand starting at position 3522 of SEQ ID NO: 1244034
ggugaaauguuucuugcuc

SEQ ID NO: 1460047 - RNA, 19 nt, Artificial Sequence
  Description of Artificial Sequence: Synthetic oligonucleotide
  Antisense strand to SEQ ID NO: 1460046
gagcaagaaacauuucacc

SEQ ID NO: 1460048 - RNA, 19 nt, Artificial Sequence
  Description of Artificial Sequence: Synthetic oligonucleotide
  Sense strand starting at position 3524 of SEQ ID NO: 1244034
ugaaauguuucuugcucca

SEQ ID NO: 1460049 - RNA, 19 nt, Artificial Sequence
  Description of Artificial Sequence: Synthetic oligonucleotide
  Antisense strand to SEQ ID NO: 1460048
uggagcaagaaacauuuca

SEQ ID NO: 1460050 - RNA, 19 nt, Artificial Sequence
  Description of Artificial Sequence: Synthetic oligonucleotide
  Sense strand starting at position 3695 of SEQ ID NO: 1244034
ucgaaugaaugauauaaag

SEQ ID NO: 1460051 - RNA, 19 nt, Artificial Sequence
  Description of Artificial Sequence: Synthetic oligonucleotide
  Antisense strand to SEQ ID NO: 1460050
cuuuauaucauucauucga

SEQ ID NO: 1460052 - RNA, 19 nt, Artificial Sequence
  Description of Artificial Sequence: Synthetic oligonucleotide
  Sense strand starting at position 3706 of SEQ ID NO: 1244034
auauaaagauguuccgguu

SEQ ID NO: 1460053 - RNA, 19 nt, Artificial Sequence
  Description of Artificial Sequence: Synthetic oligonucleotide
  Antisense strand to SEQ ID NO: 1460052
aaccggaacaucuuuauau

SEQ ID NO: 1460054 - RNA, 19 nt, Artificial Sequence
  Description of Artificial Sequence: Synthetic oligonucleotide
  Sense strand starting at position 3709 of SEQ ID NO: 1244034
uaaagauguuccgguuucu

SEQ ID NO: 1460055 - RNA, 19 nt, Artificial Sequence
  Description of Artificial Sequence: Synthetic oligonucleotide
  Antisense strand to SEQ ID NO: 1460054
agaaaccggaacaucuuua

SEQ ID NO: 1460056 - RNA, 19 nt, Artificial Sequence
  Description of Artificial Sequence: Synthetic oligonucleotide
  Sense strand starting at position 3902 of SEQ ID NO: 1244034
cucagagcagucuaaggau

SEQ ID NO: 1460057 - RNA, 19 nt, Artificial Sequence
  Description of Artificial Sequence: Synthetic oligonucleotide
  Antisense strand to SEQ ID NO: 1460056
auccuuagacugcucugag

SEQ ID NO: 1460058 - RNA, 19 nt, Artificial Sequence
  Description of Artificial Sequence: Synthetic oligonucleotide
  Sense strand starting at position 3908 of SEQ ID NO: 1244034
gcagucuaaggaugggaau

SEQ ID NO: 1460059 - RNA, 19 nt, Artificial Sequence
  Description of Artificial Sequence: Synthetic oligonucleotide
  Antisense strand to SEQ ID NO: 1460058
auucccauccuuagacugc

SEQ ID NO: 1460060 - RNA, 19 nt, Artificial Sequence
  Description of Artificial Sequence: Synthetic oligonucleotide
  Sense strand starting at position 3911 of SEQ ID NO: 1244034
gucuaaggaugggaauguu

SEQ ID NO: 1460061 - RNA, 19 nt, Artificial Sequence
  Description of Artificial Sequence: Synthetic oligonucleotide
  Antisense strand to SEQ ID NO: 1460060
aacauucccauccuuagac

SEQ ID NO: 1460062 - RNA, 19 nt, Artificial Sequence
  Description of Artificial Sequence: Synthetic oligonucleotide
  Sense strand starting at position 3943 of SEQ ID NO: 1244034
uccauuugagccugagcuu

SEQ ID NO: 1460063 - RNA, 19 nt, Artificial Sequence
  Description of Artificial Sequence: Synthetic oligonucleotide
  Antisense strand to SEQ ID NO: 1460062
aagcucaggcucaaaugga

SEQ ID NO: 1460064 - RNA, 19 nt, Artificial Sequence
  Description of Artificial Sequence: Synthetic oligonucleotide
  Sense strand starting at position 62 of SEQ ID NO: 1244035
uguggaaauaggugucaac

SEQ ID NO: 1460065 - RNA, 19 nt, Artificial Sequence
  Description of Artificial Sequence: Synthetic oligonucleotide
  Antisense strand to SEQ ID NO: 1460064
guugacaccuauuuccaca

SEQ ID NO: 1460066 - RNA, 19 nt, Artificial Sequence
  Description of Artificial Sequence: Synthetic oligonucleotide
  Sense strand starting at position 104 of SEQ ID NO: 1244035
ccgugaugguggaauagug

SEQ ID NO: 1460067 - RNA, 19 nt, Artificial Sequence
  Description of Artificial Sequence: Synthetic oligonucleotide
  Antisense strand to SEQ ID NO: 1460066
cacuauuccaccaucacgg

SEQ ID NO: 1460068 - RNA, 19 nt, Artificial Sequence
  Description of Artificial Sequence: Synthetic oligonucleotide
  Sense strand starting at position 174 of SEQ ID NO: 1244035
gagagauugcaugguucuu

SEQ ID NO: 1460069 - RNA, 19 nt, Artificial Sequence
  Description of Artificial Sequence: Synthetic oligonucleotide
  Antisense strand to SEQ ID NO: 1460068
aagaaccaugcaaucucuc

SEQ ID NO: 1460070 - RNA, 19 nt, Artificial Sequence
  Description of Artificial Sequence: Synthetic oligonucleotide
  Sense strand starting at position 201 of SEQ ID NO: 1244035
aucagauguuuggaauaac

SEQ ID NO: 1460071 - RNA, 19 nt, Artificial Sequence
  Description of Artificial Sequence: Synthetic oligonucleotide
  Antisense strand to SEQ ID NO: 1460070
guuauuccaaacaucugau

SEQ ID NO: 1460072 - RNA, 19 nt, Artificial Sequence
  Description of Artificial Sequence: Synthetic oligonucleotide
  Sense strand starting at position 568 of SEQ ID NO: 1244035
ccagaaugggaauguuuac

SEQ ID NO: 1460073 - RNA, 19 nt, Artificial Sequence
  Description of Artificial Sequence: Synthetic oligonucleotide
  Antisense strand to SEQ ID NO: 1460072
guaaacauucccauucugg

SEQ ID NO: 1460074 - RNA, 19 nt, Artificial Sequence
  Description of Artificial Sequence: Synthetic oligonucleotide
  Sense strand starting at position 575 of SEQ ID NO: 1244035
gggaauguuuacgugauag

SEQ ID NO: 1460075 - RNA, 19 nt, Artificial Sequence
  Description of Artificial Sequence: Synthetic oligonucleotide
  Antisense strand to SEQ ID NO: 1460074
cuaucacguaaacauuccc

SEQ ID NO: 1460076 - RNA, 19 nt, Artificial Sequence
  Description of Artificial Sequence: Synthetic oligonucleotide
  Sense strand starting at position 577 of SEQ ID NO: 1244035
gaauguuuacgugauagaa

SEQ ID NO: 1460077 - RNA, 19 nt, Artificial Sequence
  Description of Artificial Sequence: Synthetic oligonucleotide
  Antisense strand to SEQ ID NO: 1460076
uucuaucacguaaacauuc

SEQ ID NO: 1460078 - RNA, 19 nt, Artificial Sequence
  Description of Artificial Sequence: Synthetic oligonucleotide
  Sense strand starting at position 581 of SEQ ID NO: 1244035
guuuacgugauagaaauug

SEQ ID NO: 1460079 - RNA, 19 nt, Artificial Sequence
  Description of Artificial Sequence: Synthetic oligonucleotide
  Antisense strand to SEQ ID NO: 1460078
caauuucuaucacguaaac

SEQ ID NO: 1460080 - RNA, 19 nt, Artificial Sequence
  Description of Artificial Sequence: Synthetic oligonucleotide
  Sense strand starting at position 586 of SEQ ID NO: 1244035
cgugauagaaauuggcaaa

SEQ ID NO: 1460081 - RNA, 19 nt, Artificial Sequence
  Description of Artificial Sequence: Synthetic oligonucleotide
  Antisense strand to SEQ ID NO: 1460080
uuugccaauuucuaucacg

SEQ ID NO: 1460082 - RNA, 19 nt, Artificial Sequence
  Description of Artificial Sequence: Synthetic oligonucleotide
  Sense strand starting at position 632 of SEQ ID NO: 1244035
cccagagagucaguuuauc

SEQ ID NO: 1460083 - RNA, 19 nt, Artificial Sequence
  Description of Artificial Sequence: Synthetic oligonucleotide
  Antisense strand to SEQ ID NO: 1460082
gauaaacugacucucuggg

SEQ ID NO: 1460084 - RNA, 19 nt, Artificial Sequence
  Description of Artificial Sequence: Synthetic oligonucleotide
  Sense strand starting at position 641 of SEQ ID NO: 1244035
ucaguuuaucagcacugga

SEQ ID NO: 1460085 - RNA, 19 nt, Artificial Sequence
  Description of Artificial Sequence: Synthetic oligonucleotide
  Antisense strand to SEQ ID NO: 1460084
uccagugcugauaaacuga

SEQ ID NO: 1460086 - RNA, 19 nt, Artificial Sequence
  Description of Artificial Sequence: Synthetic oligonucleotide
  Sense strand starting at position 782 of SEQ ID NO: 1244035
ucuacuguuucuguaaaua

SEQ ID NO: 1460087 - RNA, 19 nt, Artificial Sequence
  Description of Artificial Sequence: Synthetic oligonucleotide
  Antisense strand to SEQ ID NO: 1460086
uauuuacagaaacaguaga

SEQ ID NO: 1460088 - RNA, 19 nt, Artificial Sequence
  Description of Artificial Sequence: Synthetic oligonucleotide
  Sense strand starting at position 924 of SEQ ID NO: 1244035
ucagauaauugauaugacu

SEQ ID NO: 1460089 - RNA, 19 nt, Artificial Sequence
  Description of Artificial Sequence: Synthetic oligonucleotide
  Antisense strand to SEQ ID NO: 1460088
agucauaucaauuaucuga

SEQ ID NO: 1460090 - RNA, 19 nt, Artificial Sequence
  Description of Artificial Sequence: Synthetic oligonucleotide
  Sense strand starting at position 933 of SEQ ID NO: 1244035
ugauaugacuugccaagga

SEQ ID NO: 1460091 - RNA, 19 nt, Artificial Sequence
  Description of Artificial Sequence: Synthetic oligonucleotide
  Antisense strand to SEQ ID NO: 1460090
uccuuggcaagucauauca

SEQ ID NO: 1460092 - RNA, 19 nt, Artificial Sequence
  Description of Artificial Sequence: Synthetic oligonucleotide
  Sense strand starting at position 1027 of SEQ ID NO: 1244035
gcuguugaaucaucugugu

SEQ ID NO: 1460093 - RNA, 19 nt, Artificial Sequence
  Description of Artificial Sequence: Synthetic oligonucleotide
  Antisense strand to SEQ ID NO: 1460092
acacagaugauucaacagc

SEQ ID NO: 1460094 - RNA, 19 nt, Artificial Sequence
  Description of Artificial Sequence: Synthetic oligonucleotide
  Sense strand starting at position 1029 of SEQ ID NO: 1244035
uguugaaucaucugugugu

SEQ ID NO: 1460095 - RNA, 19 nt, Artificial Sequence
  Description of Artificial Sequence: Synthetic oligonucleotide
  Antisense strand to SEQ ID NO: 1460094
acacacagaugauucaaca

SEQ ID NO: 1460096 - RNA, 19 nt, Artificial Sequence
  Description of Artificial Sequence: Synthetic oligonucleotide
  Sense strand starting at position 1030 of SEQ ID NO: 1244035
guugaaucaucuguguguu

SEQ ID NO: 1460097 - RNA, 19 nt, Artificial Sequence
  Description of Artificial Sequence: Synthetic oligonucleotide
  Antisense strand to SEQ ID NO: 1460096
aacacacagaugauucaac

SEQ ID NO: 1460098 - RNA, 19 nt, Artificial Sequence
  Description of Artificial Sequence: Synthetic oligonucleotide
  Sense strand starting at position 1031 of SEQ ID NO: 1244035
uugaaucaucuguguguuu

SEQ ID NO: 1460099 - RNA, 19 nt, Artificial Sequence
  Description of Artificial Sequence: Synthetic oligonucleotide
  Antisense strand to SEQ ID NO: 1460098
aaacacacagaugauucaa

SEQ ID NO: 1460100 - RNA, 19 nt, Artificial Sequence
  Description of Artificial Sequence: Synthetic oligonucleotide
  Sense strand starting at position 1284 of SEQ ID NO: 1244035
ugaguucacccaggaguga

SEQ ID NO: 1460101 - RNA, 19 nt, Artificial Sequence
  Description of Artificial Sequence: Synthetic oligonucleotide
  Antisense strand to SEQ ID NO: 1460100
ucacuccugggugaacuca

SEQ ID NO: 1460102 - RNA, 19 nt, Artificial Sequence
  Description of Artificial Sequence: Synthetic oligonucleotide
  Sense strand starting at position 1613 of SEQ ID NO: 1244035
gcaacuucugauggacaga

SEQ ID NO: 1460103 - RNA, 19 nt, Artificial Sequence
  Description of Artificial Sequence: Synthetic oligonucleotide
  Antisense strand to SEQ ID NO: 1460102
ucuguccaucagaaguugc

SEQ ID NO: 1460104 - RNA, 19 nt, Artificial Sequence
  Description of Artificial Sequence: Synthetic oligonucleotide
  Sense strand starting at position 1628 of SEQ ID NO: 1244035
cagacauugcgagagcgaa

SEQ ID NO: 1460105 - RNA, 19 nt, Artificial Sequence
  Description of Artificial Sequence: Synthetic oligonucleotide
  Antisense strand to SEQ ID NO: 1460104
uucgcucucgcaaugucug

SEQ ID NO: 1460106 - RNA, 19 nt, Artificial Sequence
  Description of Artificial Sequence: Synthetic oligonucleotide
  Sense strand starting at position 1984 of SEQ ID NO: 1244035
uggugauugcucugcuaug

SEQ ID NO: 1460107 - RNA, 19 nt, Artificial Sequence
  Description of Artificial Sequence: Synthetic oligonucleotide
  Antisense strand to SEQ ID NO: 1460106
cauagcagagcaaucacca

SEQ ID NO: 1460108 - RNA, 19 nt, Artificial Sequence
  Description of Artificial Sequence: Synthetic oligonucleotide
  Sense strand starting at position 1985 of SEQ ID NO: 1244035
ggugauugcucugcuauga

SEQ ID NO: 1460109 - RNA, 19 nt, Artificial Sequence
  Description of Artificial Sequence: Synthetic oligonucleotide
  Antisense strand to SEQ ID NO: 1460108
ucauagcagagcaaucacc

SEQ ID NO: 1460110 - RNA, 19 nt, Artificial Sequence
  Description of Artificial Sequence: Synthetic oligonucleotide
  Sense strand starting at position 2060 of SEQ ID NO: 1244035
cccugaucuuuggacucaa

SEQ ID NO: 1460111 - RNA, 19 nt, Artificial Sequence
  Description of Artificial Sequence: Synthetic oligonucleotide
  Antisense strand to SEQ ID NO: 1460110
uugaguccaaagaucaggg

SEQ ID NO: 1460112 - RNA, 19 nt, Artificial Sequence
  Description of Artificial Sequence: Synthetic oligonucleotide
  Sense strand starting at position 2299 of SEQ ID NO: 1244035
gucuacauccacgaugauu

SEQ ID NO: 1460113 - RNA, 19 nt, Artificial Sequence
  Description of Artificial Sequence: Synthetic oligonucleotide
  Antisense strand to SEQ ID NO: 1460112
aaucaucguggauguagac

SEQ ID NO: 1460114 - RNA, 19 nt, Artificial Sequence
  Description of Artificial Sequence: Synthetic oligonucleotide
  Sense strand starting at position 2307 of SEQ ID NO: 1244035
ccacgaugauucuugcaaa

SEQ ID NO: 1460115 - RNA, 19 nt, Artificial Sequence
  Description of Artificial Sequence: Synthetic oligonucleotide
  Antisense strand to SEQ ID NO: 1460114
uuugcaagaaucaucgugg

SEQ ID NO: 1460116 - RNA, 19 nt, Artificial Sequence
  Description of Artificial Sequence: Synthetic oligonucleotide
  Sense strand starting at position 2816 of SEQ ID NO: 1244035
cuggucuuuccuuaacugu

SEQ ID NO: 1460117 - RNA, 19 nt, Artificial Sequence
  Description of Artificial Sequence: Synthetic oligonucleotide
  Antisense strand to SEQ ID NO: 1460116
acaguuaaggaaagaccag

SEQ ID NO: 1460118 - RNA, 19 nt, Artificial Sequence
  Description of Artificial Sequence: Synthetic oligonucleotide
  Sense strand starting at position 2819 of SEQ ID NO: 1244035
gucuuuccuuaacuguauu

SEQ ID NO: 1460119 - RNA, 19 nt, Artificial Sequence
  Description of Artificial Sequence: Synthetic oligonucleotide
  Antisense strand to SEQ ID NO: 1460118
aauacaguuaaggaaagac

SEQ ID NO: 1460120 - RNA, 19 nt, Artificial Sequence
  Description of Artificial Sequence: Synthetic oligonucleotide
  Sense strand starting at position 2899 of SEQ ID NO: 1244035
cucuuagggccagaaagua

SEQ ID NO: 1460121 - RNA, 19 nt, Artificial Sequence
  Description of Artificial Sequence: Synthetic oligonucleotide
  Antisense strand to SEQ ID NO: 1460120
uacuuucuggcccuaagag

SEQ ID NO: 1460122 - RNA, 19 nt, Artificial Sequence
  Description of Artificial Sequence: Synthetic oligonucleotide
  Sense strand starting at position 3225 of SEQ ID NO: 1244035
gcucaagagaucugccagu

SEQ ID NO: 1460123 - RNA, 19 nt, Artificial Sequence
  Description of Artificial Sequence: Synthetic oligonucleotide
  Antisense strand to SEQ ID NO: 1460122
acuggcagaucucuugagc

SEQ ID NO: 1460124 - RNA, 19 nt, Artificial Sequence
  Description of Artificial Sequence: Synthetic oligonucleotide
  Sense strand starting at position 3327 of SEQ ID NO: 1244035
augaauguauagucuuacu

SEQ ID NO: 1460125 - RNA, 19 nt, Artificial Sequence
  Description of Artificial Sequence: Synthetic oligonucleotide
  Antisense strand to SEQ ID NO: 1460124
aguaagacuauacauucau

SEQ ID NO: 1460126 - RNA, 19 nt, Artificial Sequence
  Description of Artificial Sequence: Synthetic oligonucleotide
  Sense strand starting at position 3332 of SEQ ID NO: 1244035
uguauagucuuacugugca

SEQ ID NO: 1460127 - RNA, 19 nt, Artificial Sequence
  Description of Artificial Sequence: Synthetic oligonucleotide
  Antisense strand to SEQ ID NO: 1460126
ugcacaguaagacuauaca

SEQ ID NO: 1460128 - RNA, 19 nt, Artificial Sequence
  Description of Artificial Sequence: Synthetic oligonucleotide
  Sense strand starting at position 3335 of SEQ ID NO: 1244035
auagucuuacugugcaaca

SEQ ID NO: 1460129 - RNA, 19 nt, Artificial Sequence
  Description of Artificial Sequence: Synthetic oligonucleotide
  Antisense strand to SEQ ID NO: 1460128
uguugcacaguaagacuau

SEQ ID NO: 1460130 - RNA, 19 nt, Artificial Sequence
  Description of Artificial Sequence: Synthetic oligonucleotide
  Sense strand starting at position 3337 of SEQ ID NO: 1244035
agucuuacugugcaacaau

SEQ ID NO: 1460131 - RNA, 19 nt, Artificial Sequence
  Description of Artificial Sequence: Synthetic oligonucleotide
  Antisense strand to SEQ ID NO: 1460130
auuguugcacaguaagacu

SEQ ID NO: 1460132 - RNA, 19 nt, Artificial Sequence
  Description of Artificial Sequence: Synthetic oligonucleotide
  Sense strand starting at position 3346 of SEQ ID NO: 1244035
gugcaacaauaugaugaau

SEQ ID NO: 1460133 - RNA, 19 nt, Artificial Sequence
  Description of Artificial Sequence: Synthetic oligonucleotide
  Antisense strand to SEQ ID NO: 1460132
auucaucauauuguugcac

SEQ ID NO: 1460134 - RNA, 19 nt, Artificial Sequence
  Description of Artificial Sequence: Synthetic oligonucleotide
  Sense strand starting at position 3359 of SEQ ID NO: 1244035
augaauguaugguuccaaa

SEQ ID NO: 1460135 - RNA, 19 nt, Artificial Sequence
  Description of Artificial Sequence: Synthetic oligonucleotide
  Antisense strand to SEQ ID NO: 1460134
uuuggaaccauacauucau

SEQ ID NO: 1460136 - RNA, 19 nt, Artificial Sequence
  Description of Artificial Sequence: Synthetic oligonucleotide
  Sense strand starting at position 3408 of SEQ ID NO: 1244035
cuuaaagaguuugaaacuu

SEQ ID NO: 1460137 - RNA, 19 nt, Artificial Sequence
  Description of Artificial Sequence: Synthetic oligonucleotide
  Antisense strand to SEQ ID NO: 1460136
aaguuucaaacucuuuaag

SEQ ID NO: 1460138 - RNA, 19 nt, Artificial Sequence
  Description of Artificial Sequence: Synthetic oligonucleotide
  Sense strand starting at position 3466 of SEQ ID NO: 1244035
ucuuauacauaugugugua

SEQ ID NO: 1460139 - RNA, 19 nt, Artificial Sequence
  Description of Artificial Sequence: Synthetic oligonucleotide
  Antisense strand to SEQ ID NO: 1460138
uacacacauauguauaaga

SEQ ID NO: 1460140 - RNA, 19 nt, Artificial Sequence
  Description of Artificial Sequence: Synthetic oligonucleotide
  Sense strand starting at position 3542 of SEQ ID NO: 1244035
guguguauacuauauauca

SEQ ID NO: 1460141 - RNA, 19 nt, Artificial Sequence
  Description of Artificial Sequence: Synthetic oligonucleotide
  Antisense strand to SEQ ID NO: 1460140
ugauauauaguauacacac

SEQ ID NO: 1460142 - RNA, 19 nt, Artificial Sequence
  Description of Artificial Sequence: Synthetic oligonucleotide
  Sense strand starting at position 3797 of SEQ ID NO: 1244035
cuagcaaagcauugggauu

SEQ ID NO: 1460143 - RNA, 19 nt, Artificial Sequence
  Description of Artificial Sequence: Synthetic oligonucleotide
  Antisense strand to SEQ ID NO: 1460142
aaucccaaugcuuugcuag

SEQ ID NO: 1460144 - RNA, 19 nt, Artificial Sequence
  Description of Artificial Sequence: Synthetic oligonucleotide
  Sense strand starting at position 447 of SEQ ID NO: 1244036
auuaauagugucugaagga

SEQ ID NO: 1460145 - RNA, 19 nt, Artificial Sequence
  Description of Artificial Sequence: Synthetic oligonucleotide
  Antisense strand to SEQ ID NO: 1460144
uccuucagacacuauuaau

SEQ ID NO: 1460146 - RNA, 19 nt, Artificial Sequence
  Description of Artificial Sequence: Synthetic oligonucleotide
  Sense strand starting at position 460 of SEQ ID NO: 1244036
gaaggagauugugaucuuu

SEQ ID NO: 1460147 - RNA, 19 nt, Artificial Sequence
  Description of Artificial Sequence: Synthetic oligonucleotide
  Antisense strand to SEQ ID NO: 1460146
aaagaucacaaucuccuuc

SEQ ID NO: 1460148 - RNA, 19 nt, Artificial Sequence
  Description of Artificial Sequence: Synthetic oligonucleotide
  Sense strand starting at position 563 of SEQ ID NO: 1244036
ugaacagaucacugugguu

SEQ ID NO: 1460149 - RNA, 19 nt, Artificial Sequence
  Description of Artificial Sequence: Synthetic oligonucleotide
  Antisense strand to SEQ ID NO: 1460148
aaccacagugaucuguuca

SEQ ID NO: 1460150 - RNA, 19 nt, Artificial Sequence
  Description of Artificial Sequence: Synthetic oligonucleotide
  Sense strand starting at position 575 of SEQ ID NO: 1244036
ugugguucccuuuacauaa

SEQ ID NO: 1460151 - RNA, 19 nt, Artificial Sequence
  Description of Artificial Sequence: Synthetic oligonucleotide
  Antisense strand to SEQ ID NO: 1460150
uuauguaaagggaaccaca

SEQ ID NO: 1460152 - RNA, 19 nt, Artificial Sequence
  Description of Artificial Sequence: Synthetic oligonucleotide
  Sense strand starting at position 594 of SEQ ID NO: 1244036
ggaugaggcccucguggaa

SEQ ID NO: 1460153 - RNA, 19 nt, Artificial Sequence
  Description of Artificial Sequence: Synthetic oligonucleotide
  Antisense strand to SEQ ID NO: 1460152
uuccacgagggccucaucc

SEQ ID NO: 1460154 - RNA, 19 nt, Artificial Sequence
  Description of Artificial Sequence: Synthetic oligonucleotide
  Sense strand starting at position 654 of SEQ ID NO: 1244036
gucauuccagcucauugaa

SEQ ID NO: 1460155 - RNA, 19 nt, Artificial Sequence
  Description of Artificial Sequence: Synthetic oligonucleotide
  Antisense strand to SEQ ID NO: 1460154
uucaaugagcuggaaugac

SEQ ID NO: 1460156 - RNA, 19 nt, Artificial Sequence
  Description of Artificial Sequence: Synthetic oligonucleotide
  Sense strand starting at position 782 of SEQ ID NO: 1244036
cacccaugucccugggauu

SEQ ID NO: 1460157 - RNA, 19 nt, Artificial Sequence
  Description of Artificial Sequence: Synthetic oligonucleotide
  Antisense strand to SEQ ID NO: 1460156
aaucccagggacaugggug

SEQ ID NO: 1460158 - RNA, 19 nt, Artificial Sequence
  Description of Artificial Sequence: Synthetic oligonucleotide
  Sense strand starting at position 794 of SEQ ID NO: 1244036
ugggauuccuggcuucuaa

SEQ ID NO: 1460159 - RNA, 19 nt, Artificial Sequence
  Description of Artificial Sequence: Synthetic oligonucleotide
  Antisense strand to SEQ ID NO: 1460158
uuagaagccaggaauccca

SEQ ID NO: 1460160 - RNA, 19 nt, Artificial Sequence
  Description of Artificial Sequence: Synthetic oligonucleotide
  Sense strand starting at position 807 of SEQ ID NO: 1244036
uucuaagucucagugugaa

SEQ ID NO: 1460161 - RNA, 19 nt, Artificial Sequence
  Description of Artificial Sequence: Synthetic oligonucleotide
  Antisense strand to SEQ ID NO: 1460160
uucacacugagacuuagaa

SEQ ID NO: 1460162 - RNA, 19 nt, Artificial Sequence
  Description of Artificial Sequence: Synthetic oligonucleotide
  Sense strand starting at position 819 of SEQ ID NO: 1244036
gugugaagagucuacuggu

SEQ ID NO: 1460163 - RNA, 19 nt, Artificial Sequence
  Description of Artificial Sequence: Synthetic oligonucleotide
  Antisense strand to SEQ ID NO: 1460162
accaguagacucuucacac

SEQ ID NO: 1460164 - RNA, 19 nt, Artificial Sequence
  Description of Artificial Sequence: Synthetic oligonucleotide
  Sense strand starting at position 855 of SEQ ID NO: 1244036
gagaaaguguucccuggaa

SEQ ID NO: 1460165 - RNA, 19 nt, Artificial Sequence
  Description of Artificial Sequence: Synthetic oligonucleotide
  Antisense strand to SEQ ID NO: 1460164
uuccagggaacacuuucuc

SEQ ID NO: 1460166 - RNA, 19 nt, Artificial Sequence
  Description of Artificial Sequence: Synthetic oligonucleotide
  Sense strand starting at position 857 of SEQ ID NO: 1244036
gaaaguguucccuggaaag

SEQ ID NO: 1460167 - RNA, 19 nt, Artificial Sequence
  Description of Artificial Sequence: Synthetic oligonucleotide
  Antisense strand to SEQ ID NO: 1460166
cuuuccagggaacacuuuc

SEQ ID NO: 1460168 - RNA, 19 nt, Artificial Sequence
  Description of Artificial Sequence: Synthetic oligonucleotide
  Sense strand starting at position 859 of SEQ ID NO: 1244036
aaguguucccuggaaagca

SEQ ID NO: 1460169 - RNA, 19 nt, Artificial Sequence
  Description of Artificial Sequence: Synthetic oligonucleotide
  Antisense strand to SEQ ID NO: 1460168
ugcuuuccagggaacacuu

SEQ ID NO: 1460170 - RNA, 19 nt, Artificial Sequence
  Description of Artificial Sequence: Synthetic oligonucleotide
  Sense strand starting at position 867 of SEQ ID NO: 1244036
ccuggaaagcagugcuuua

SEQ ID NO: 1460171 - RNA, 19 nt, Artificial Sequence
  Description of Artificial Sequence: Synthetic oligonucleotide
  Antisense strand to SEQ ID NO: 1460170
uaaagcacugcuuuccagg

SEQ ID NO: 1460172 - RNA, 19 nt, Artificial Sequence
  Description of Artificial Sequence: Synthetic oligonucleotide
  Sense strand starting at position 874 of SEQ ID NO: 1244036
agcagugcuuuagcccaaa

SEQ ID NO: 1460173 - RNA, 19 nt, Artificial Sequence
  Description of Artificial Sequence: Synthetic oligonucleotide
  Antisense strand to SEQ ID NO: 1460172
uuugggcuaaagcacugcu

SEQ ID NO: 1460174 - RNA, 19 nt, Artificial Sequence
  Description of Artificial Sequence: Synthetic oligonucleotide
  Sense strand starting at position 877 of SEQ ID NO: 1244036
agugcuuuagcccaaacuu

SEQ ID NO: 1460175 - RNA, 19 nt, Artificial Sequence
  Description of Artificial Sequence: Synthetic oligonucleotide
  Antisense strand to SEQ ID NO: 1460174
aaguuugggcuaaagcacu

SEQ ID NO: 1460176 - RNA, 19 nt, Artificial Sequence
  Description of Artificial Sequence: Synthetic oligonucleotide
  Sense strand starting at position 1266 of SEQ ID NO: 1244036
guaagugugagaugaggau

SEQ ID NO: 1460177 - RNA, 19 nt, Artificial Sequence
  Description of Artificial Sequence: Synthetic oligonucleotide
  Antisense strand to SEQ ID NO: 1460176
auccucaucucacacuuac

SEQ ID NO: 1460178 - RNA, 19 nt, Artificial Sequence
  Description of Artificial Sequence: Synthetic oligonucleotide
  Sense strand starting at position 1337 of SEQ ID NO: 1244036
uuugaagaacacuggucua

SEQ ID NO: 1460179 - RNA, 19 nt, Artificial Sequence
  Description of Artificial Sequence: Synthetic oligonucleotide
  Antisense strand to SEQ ID NO: 1460178
uagaccaguguucuucaaa

SEQ ID NO: 1460180 - RNA, 19 nt, Artificial Sequence
  Description of Artificial Sequence: Synthetic oligonucleotide
  Sense strand starting at position 1454 of SEQ ID NO: 1244036
ccuugagacaguugcugaa

SEQ ID NO: 1460181 - RNA, 19 nt, Artificial Sequence
  Description of Artificial Sequence: Synthetic oligonucleotide
  Antisense strand to SEQ ID NO: 1460180
uucagcaacugucucaagg

SEQ ID NO: 1460182 - RNA, 19 nt, Artificial Sequence
  Description of Artificial Sequence: Synthetic oligonucleotide
  Sense strand starting at position 2164 of SEQ ID NO: 1244036
ugcgaaggcggauauauaa

SEQ ID NO: 1460183 - RNA, 19 nt, Artificial Sequence
  Description of Artificial Sequence: Synthetic oligonucleotide
  Antisense strand to SEQ ID NO: 1460182
uuauauauccgccuucgca

SEQ ID NO: 1460184 - RNA, 19 nt, Artificial Sequence
  Description of Artificial Sequence: Synthetic oligonucleotide
  Sense strand starting at position 2428 of SEQ ID NO: 1244036
ucuggaggcugacagauaa

SEQ ID NO: 1460185 - RNA, 19 nt, Artificial Sequence
  Description of Artificial Sequence: Synthetic oligonucleotide
  Antisense strand to SEQ ID NO: 1460184
uuaucugucagccuccaga

SEQ ID NO: 1460186 - RNA, 19 nt, Artificial Sequence
  Description of Artificial Sequence: Synthetic oligonucleotide
  Sense strand starting at position 2439 of SEQ ID NO: 1244036
acagauaagucucuugauu

SEQ ID NO: 1460187 - RNA, 19 nt, Artificial Sequence
  Description of Artificial Sequence: Synthetic oligonucleotide
  Antisense strand to SEQ ID NO: 1460186
aaucaagagacuuaucugu

SEQ ID NO: 1460188 - RNA, 19 nt, Artificial Sequence
  Description of Artificial Sequence: Synthetic oligonucleotide
  Sense strand starting at position 2566 of SEQ ID NO: 1244036
ccugcuuaggcagaugaaa

SEQ ID NO: 1460189 - RNA, 19 nt, Artificial Sequence
  Description of Artificial Sequence: Synthetic oligonucleotide
  Antisense strand to SEQ ID NO: 1460188
uuucaucugccuaagcagg

SEQ ID NO: 1460190 - RNA, 19 nt, Artificial Sequence
  Description of Artificial Sequence: Synthetic oligonucleotide
  Sense strand starting at position 2633 of SEQ ID NO: 1244036
cgcgacagaguuugaaaca

SEQ ID NO: 1460191 - RNA, 19 nt, Artificial Sequence
  Description of Artificial Sequence: Synthetic oligonucleotide
  Antisense strand to SEQ ID NO: 1460190
uguuucaaacucugucgcg

SEQ ID NO: 1460192 - RNA, 19 nt, Artificial Sequence
  Description of Artificial Sequence: Synthetic oligonucleotide
  Sense strand starting at position 2701 of SEQ ID NO: 1244036
cgagguccugccuagaaua

SEQ ID NO: 1460193 - RNA, 19 nt, Artificial Sequence
  Description of Artificial Sequence: Synthetic oligonucleotide
  Antisense strand to SEQ ID NO: 1460192
uauucuaggcaggaccucg

SEQ ID NO: 1460194 - RNA, 19 nt, Artificial Sequence
  Description of Artificial Sequence: Synthetic oligonucleotide
  Sense strand starting at position 2703 of SEQ ID NO: 1244036
agguccugccuagaauacu

SEQ ID NO: 1460195 - RNA, 19 nt, Artificial Sequence
  Description of Artificial Sequence: Synthetic oligonucleotide
  Antisense strand to SEQ ID NO: 1460194
aguauucuaggcaggaccu

SEQ ID NO: 1460196 - RNA, 19 nt, Artificial Sequence
  Description of Artificial Sequence: Synthetic oligonucleotide
  Sense strand starting at position 2722 of SEQ ID NO: 1244036
guugaacagugucuccuua

SEQ ID NO: 1460197 - RNA, 19 nt, Artificial Sequence
  Description of Artificial Sequence: Synthetic oligonucleotide
  Antisense strand to SEQ ID NO: 1460196
uaaggagacacuguucaac

SEQ ID NO: 1460198 - RNA, 19 nt, Artificial Sequence
  Description of Artificial Sequence: Synthetic oligonucleotide
  Sense strand starting at position 2724 of SEQ ID NO: 1244036
ugaacagugucuccuuagu

SEQ ID NO: 1460199 - RNA, 19 nt, Artificial Sequence
  Description of Artificial Sequence: Synthetic oligonucleotide
  Antisense strand to SEQ ID NO: 1460198
acuaaggagacacuguuca

SEQ ID NO: 1460200 - RNA, 19 nt, Artificial Sequence
  Description of Artificial Sequence: Synthetic oligonucleotide
  Sense strand starting at position 3189 of SEQ ID NO: 1244036
uggagacuagucugaccaa

SEQ ID NO: 1460201 - RNA, 19 nt, Artificial Sequence
  Description of Artificial Sequence: Synthetic oligonucleotide
  Antisense strand to SEQ ID NO: 1460200
uuggucagacuagucucca

SEQ ID NO: 1460202 - RNA, 19 nt, Artificial Sequence
  Description of Artificial Sequence: Synthetic oligonucleotide
  Sense strand starting at position 3190 of SEQ ID NO: 1244036
ggagacuagucugaccaac

SEQ ID NO: 1460203 - RNA, 19 nt, Artificial Sequence
  Description of Artificial Sequence: Synthetic oligonucleotide
  Antisense strand to SEQ ID NO: 1460202
guuggucagacuagucucc

SEQ ID NO: 1460204 - RNA, 19 nt, Artificial Sequence
  Description of Artificial Sequence: Synthetic oligonucleotide
  Sense strand starting at position 3381 of SEQ ID NO: 1244036
gacagaaauuccgucucca

SEQ ID NO: 1460205 - RNA, 19 nt, Artificial Sequence
  Description of Artificial Sequence: Synthetic oligonucleotide
  Antisense strand to SEQ ID NO: 1460204
uggagacggaauuucuguc

SEQ ID NO: 1460206 - RNA, 19 nt, Artificial Sequence
  Description of Artificial Sequence: Synthetic oligonucleotide
  Sense strand starting at position 3431 of SEQ ID NO: 1244036
ggauauaaaucuucguuua

SEQ ID NO: 1460207 - RNA, 19 nt, Artificial Sequence
  Description of Artificial Sequence: Synthetic oligonucleotide
  Antisense strand to SEQ ID NO: 1460206
uaaacgaagauuuauaucc

SEQ ID NO: 1460208 - RNA, 19 nt, Artificial Sequence
  Description of Artificial Sequence: Synthetic oligonucleotide
  Sense strand starting at position 3444 of SEQ ID NO: 1244036
cguuuauugccuuuguagu

SEQ ID NO: 1460209 - RNA, 19 nt, Artificial Sequence
  Description of Artificial Sequence: Synthetic oligonucleotide
  Antisense strand to SEQ ID NO: 1460208
acuacaaaggcaauaaacg

SEQ ID NO: 1460210 - RNA, 19 nt, Artificial Sequence
  Description of Artificial Sequence: Synthetic oligonucleotide
  Sense strand starting at position 3451 of SEQ ID NO: 1244036
ugccuuuguagugaacaga

SEQ ID NO: 1460211 - RNA, 19 nt, Artificial Sequence
  Description of Artificial Sequence: Synthetic oligonucleotide
  Antisense strand to SEQ ID NO: 1460210
ucuguucacuacaaaggca

SEQ ID NO: 1460212 - RNA, 19 nt, Artificial Sequence
  Description of Artificial Sequence: Synthetic oligonucleotide
  Sense strand starting at position 3454 of SEQ ID NO: 1244036
cuuuguagugaacagaauu

SEQ ID NO: 1460213 - RNA, 19 nt, Artificial Sequence
  Description of Artificial Sequence: Synthetic oligonucleotide
  Antisense strand to SEQ ID NO: 1460212
aauucuguucacuacaaag

SEQ ID NO: 1460214 - RNA, 19 nt, Artificial Sequence
  Description of Artificial Sequence: Synthetic oligonucleotide
  Sense strand starting at position 3809 of SEQ ID NO: 1244036
cggacaauaccaggaaguu

SEQ ID NO: 1460215 - RNA, 19 nt, Artificial Sequence
  Description of Artificial Sequence: Synthetic oligonucleotide
  Antisense strand to SEQ ID NO: 1460214
aacuuccugguauuguccg

SEQ ID NO: 1460216 - RNA, 19 nt, Artificial Sequence
  Description of Artificial Sequence: Synthetic oligonucleotide
  Sense strand starting at position 3840 of SEQ ID NO: 1244036
agagaaagccuacauuguu

SEQ ID NO: 1460217 - RNA, 19 nt, Artificial Sequence
  Description of Artificial Sequence: Synthetic oligonucleotide
  Antisense strand to SEQ ID NO: 1460216
aacaauguaggcuuucucu

SEQ ID NO: 1460218 - RNA, 19 nt, Artificial Sequence
  Description of Artificial Sequence: Synthetic oligonucleotide
  Sense strand starting at position 3867 of SEQ ID NO: 1244036
cuuugagguuugcccucaa

SEQ ID NO: 1460219 - RNA, 19 nt, Artificial Sequence
  Description of Artificial Sequence: Synthetic oligonucleotide
  Antisense strand to SEQ ID NO: 1460218
uugagggcaaaccucaaag

SEQ ID NO: 1460220 - RNA, 19 nt, Artificial Sequence
  Description of Artificial Sequence: Synthetic oligonucleotide
  Sense strand starting at position 3871 of SEQ ID NO: 1244036
gagguuugcccucaaccuu

SEQ ID NO: 1460221 - RNA, 19 nt, Artificial Sequence
  Description of Artificial Sequence: Synthetic oligonucleotide
  Antisense strand to SEQ ID NO: 1460220
aagguugagggcaaaccuc

SEQ ID NO: 1460222 - RNA, 19 nt, Artificial Sequence
  Description of Artificial Sequence: Synthetic oligonucleotide
  Sense strand starting at position 3905 of SEQ ID NO: 1244036
acacuccgcuuuguaauau

SEQ ID NO: 1460223 - RNA, 19 nt, Artificial Sequence
  Description of Artificial Sequence: Synthetic oligonucleotide
  Antisense strand to SEQ ID NO: 1460222
auauuacaaagcggagugu

SEQ ID NO: 1460224 - RNA, 19 nt, Artificial Sequence
  Description of Artificial Sequence: Synthetic oligonucleotide
  Sense strand starting at position 179 of SEQ ID NO: 1244037
ggaggaagaagguguccua

SEQ ID NO: 1460225 - RNA, 19 nt, Artificial Sequence
  Description of Artificial Sequence: Synthetic oligonucleotide
  Antisense strand to SEQ ID NO: 1460224
uaggacaccuucuuccucc

SEQ ID NO: 1460226 - RNA, 19 nt, Artificial Sequence
  Description of Artificial Sequence: Synthetic oligonucleotide
  Sense strand starting at position 182 of SEQ ID NO: 1244037
ggaagaagguguccuagga

SEQ ID NO: 1460227 - RNA, 19 nt, Artificial Sequence
  Description of Artificial Sequence: Synthetic oligonucleotide
  Antisense strand to SEQ ID NO: 1460226
uccuaggacaccuucuucc

SEQ ID NO: 1460228 - RNA, 19 nt, Artificial Sequence
  Description of Artificial Sequence: Synthetic oligonucleotide
  Sense strand starting at position 186 of SEQ ID NO: 1244037
gaagguguccuaggagcaa

SEQ ID NO: 1460229 - RNA, 19 nt, Artificial Sequence
  Description of Artificial Sequence: Synthetic oligonucleotide
  Antisense strand to SEQ ID NO: 1460228
uugcuccuaggacaccuuc

SEQ ID NO: 1460230 - RNA, 19 nt, Artificial Sequence
  Description of Artificial Sequence: Synthetic oligonucleotide
  Sense strand starting at position 353 of SEQ ID NO: 1244037
ugugcaaccuucucuggua

SEQ ID NO: 1460231 - RNA, 19 nt, Artificial Sequence
  Description of Artificial Sequence: Synthetic oligonucleotide
  Antisense strand to SEQ ID NO: 1460230
uaccagagaagguugcaca

SEQ ID NO: 1460232 - RNA, 19 nt, Artificial Sequence
  Description of Artificial Sequence: Synthetic oligonucleotide
  Sense strand starting at position 415 of SEQ ID NO: 1244037
gagggagucugaccuguca

SEQ ID NO: 1460233 - RNA, 19 nt, Artificial Sequence
  Description of Artificial Sequence: Synthetic oligonucleotide
  Antisense strand to SEQ ID NO: 1460232
ugacaggucagacucccuc

SEQ ID NO: 1460234 - RNA, 19 nt, Artificial Sequence
  Description of Artificial Sequence: Synthetic oligonucleotide
  Sense strand starting at position 417 of SEQ ID NO: 1244037
gggagucugaccugucaug

SEQ ID NO: 1460235 - RNA, 19 nt, Artificial Sequence
  Description of Artificial Sequence: Synthetic oligonucleotide
  Antisense strand to SEQ ID NO: 1460234
caugacaggucagacuccc

SEQ ID NO: 1460236 - RNA, 19 nt, Artificial Sequence
  Description of Artificial Sequence: Synthetic oligonucleotide
  Sense strand starting at position 427 of SEQ ID NO: 1244037
ccugucaugucauguuaca

SEQ ID NO: 1460237 - RNA, 19 nt, Artificial Sequence
  Description of Artificial Sequence: Synthetic oligonucleotide
  Antisense strand to SEQ ID NO: 1460236
uguaacaugacaugacagg

SEQ ID NO: 1460238 - RNA, 19 nt, Artificial Sequence
  Description of Artificial Sequence: Synthetic oligonucleotide
  Sense strand starting at position 496 of SEQ ID NO: 1244037
gugggccacugguaaauua

SEQ ID NO: 1460239 - RNA, 19 nt, Artificial Sequence
  Description of Artificial Sequence: Synthetic oligonucleotide
  Antisense strand to SEQ ID NO: 1460238
uaauuuaccaguggcccac

SEQ ID NO: 1460240 - RNA, 19 nt, Artificial Sequence
  Description of Artificial Sequence: Synthetic oligonucleotide
  Sense strand starting at position 559 of SEQ ID NO: 1244037
acauuaaauguguaggguu

SEQ ID NO: 1460241 - RNA, 19 nt, Artificial Sequence
  Description of Artificial Sequence: Synthetic oligonucleotide
  Antisense strand to SEQ ID NO: 1460240
aacccuacacauuuaaugu

SEQ ID NO: 1460242 - RNA, 19 nt, Artificial Sequence
  Description of Artificial Sequence: Synthetic oligonucleotide
  Sense strand starting at position 738 of SEQ ID NO: 1244037
ugucacuuguacuuucgau

SEQ ID NO: 1460243 - RNA, 19 nt, Artificial Sequence
  Description of Artificial Sequence: Synthetic oligonucleotide
  Antisense strand to SEQ ID NO: 1460242
aucgaaaguacaagugaca

SEQ ID NO: 1460244 - RNA, 19 nt, Artificial Sequence
  Description of Artificial Sequence: Synthetic oligonucleotide
  Sense strand starting at position 742 of SEQ ID NO: 1244037
acuuguacuuucgaucaac

SEQ ID NO: 1460245 - RNA, 19 nt, Artificial Sequence
  Description of Artificial Sequence: Synthetic oligonucleotide
  Antisense strand to SEQ ID NO: 1460244
guugaucgaaaguacaagu

SEQ ID NO: 1460246 - RNA, 19 nt, Artificial Sequence
  Description of Artificial Sequence: Synthetic oligonucleotide
  Sense strand starting at position 752 of SEQ ID NO: 1244037
ucgaucaacuaguuauaaa

SEQ ID NO: 1460247 - RNA, 19 nt, Artificial Sequence
  Description of Artificial Sequence: Synthetic oligonucleotide
  Antisense strand to SEQ ID NO: 1460246
uuuauaacuaguugaucga

SEQ ID NO: 1460248 - RNA, 19 nt, Artificial Sequence
  Description of Artificial Sequence: Synthetic oligonucleotide
  Sense strand starting at position 811 of SEQ ID NO: 1244037
ucaggaaagugcguuucuu

SEQ ID NO: 1460249 - RNA, 19 nt, Artificial Sequence
  Description of Artificial Sequence: Synthetic oligonucleotide
  Antisense strand to SEQ ID NO: 1460248
aagaaacgcacuuuccuga

SEQ ID NO: 1460250 - RNA, 19 nt, Artificial Sequence
  Description of Artificial Sequence: Synthetic oligonucleotide
  Sense strand starting at position 817 of SEQ ID NO: 1244037
aagugcguuucuuacaguu

SEQ ID NO: 1460251 - RNA, 19 nt, Artificial Sequence
  Description of Artificial Sequence: Synthetic oligonucleotide
  Antisense strand to SEQ ID NO: 1460250
aacuguaagaaacgcacuu

SEQ ID NO: 1460252 - RNA, 19 nt, Artificial Sequence
  Description of Artificial Sequence: Synthetic oligonucleotide
  Sense strand starting at position 827 of SEQ ID NO: 1244037
cuuacaguugcugguuuau

SEQ ID NO: 1460253 - RNA, 19 nt, Artificial Sequence
  Description of Artificial Sequence: Synthetic oligonucleotide
  Antisense strand to SEQ ID NO: 1460252
auaaaccagcaacuguaag

SEQ ID NO: 1460254 - RNA, 19 nt, Artificial Sequence
  Description of Artificial Sequence: Synthetic oligonucleotide
  Sense strand starting at position 829 of SEQ ID NO: 1244037
uacaguugcugguuuauua

SEQ ID NO: 1460255 - RNA, 19 nt, Artificial Sequence
  Description of Artificial Sequence: Synthetic oligonucleotide
  Antisense strand to SEQ ID NO: 1460254
uaauaaaccagcaacugua

SEQ ID NO: 1460256 - RNA, 19 nt, Artificial Sequence
  Description of Artificial Sequence: Synthetic oligonucleotide
  Sense strand starting at position 833 of SEQ ID NO: 1244037
guugcugguuuauuacaaa

SEQ ID NO: 1460257 - RNA, 19 nt, Artificial Sequence
  Description of Artificial Sequence: Synthetic oligonucleotide
  Antisense strand to SEQ ID NO: 1460256
uuuguaauaaaccagcaac

SEQ ID NO: 1460258 - RNA, 19 nt, Artificial Sequence
  Description of Artificial Sequence: Synthetic oligonucleotide
  Sense strand starting at position 860 of SEQ ID NO: 1244037
cucagacagccguauggaa

SEQ ID NO: 1460259 - RNA, 19 nt, Artificial Sequence
  Description of Artificial Sequence: Synthetic oligonucleotide
  Antisense strand to SEQ ID NO: 1460258
uuccauacggcugucugag

SEQ ID NO: 1460260 - RNA, 19 nt, Artificial Sequence
  Description of Artificial Sequence: Synthetic oligonucleotide
  Sense strand starting at position 1028 of SEQ ID NO: 1244037
ugacuaagccacuggugau

SEQ ID NO: 1460261 - RNA, 19 nt, Artificial Sequence
  Description of Artificial Sequence: Synthetic oligonucleotide
  Antisense strand to SEQ ID NO: 1460260
aucaccaguggcuuaguca

SEQ ID NO: 1460262 - RNA, 19 nt, Artificial Sequence
  Description of Artificial Sequence: Synthetic oligonucleotide
  Sense strand starting at position 1154 of SEQ ID NO: 1244037
ucagucaccucaugagcaa

SEQ ID NO: 1460263 - RNA, 19 nt, Artificial Sequence
  Description of Artificial Sequence: Synthetic oligonucleotide
  Antisense strand to SEQ ID NO: 1460262
uugcucaugaggugacuga

SEQ ID NO: 1460264 - RNA, 19 nt, Artificial Sequence
  Description of Artificial Sequence: Synthetic oligonucleotide
  Sense strand starting at position 1271 of SEQ ID NO: 1244037
gggucuuugugauugagac

SEQ ID NO: 1460265 - RNA, 19 nt, Artificial Sequence
  Description of Artificial Sequence: Synthetic oligonucleotide
  Antisense strand to SEQ ID NO: 1460264
gucucaaucacaaagaccc

SEQ ID NO: 1460266 - RNA, 19 nt, Artificial Sequence
  Description of Artificial Sequence: Synthetic oligonucleotide
  Sense strand starting at position 1272 of SEQ ID NO: 1244037
ggucuuugugauugagaca

SEQ ID NO: 1460267 - RNA, 19 nt, Artificial Sequence
  Description of Artificial Sequence: Synthetic oligonucleotide
  Antisense strand to SEQ ID NO: 1460266
ugucucaaucacaaagacc

SEQ ID NO: 1460268 - RNA, 19 nt, Artificial Sequence
  Description of Artificial Sequence: Synthetic oligonucleotide
  Sense strand starting at position 1273 of SEQ ID NO: 1244037
gucuuugugauugagacau

SEQ ID NO: 1460269 - RNA, 19 nt, Artificial Sequence
  Description of Artificial Sequence: Synthetic oligonucleotide
  Antisense strand to SEQ ID NO: 1460268
augucucaaucacaaagac

SEQ ID NO: 1460270 - RNA, 19 nt, Artificial Sequence
  Description of Artificial Sequence: Synthetic oligonucleotide
  Sense strand starting at position 1275 of SEQ ID NO: 1244037
cuuugugauugagacauuc

SEQ ID NO: 1460271 - RNA, 19 nt, Artificial Sequence
  Description of Artificial Sequence: Synthetic oligonucleotide
  Antisense strand to SEQ ID NO: 1460270
gaaugucucaaucacaaag

SEQ ID NO: 1460272 - RNA, 19 nt, Artificial Sequence
  Description of Artificial Sequence: Synthetic oligonucleotide
  Sense strand starting at position 1415 of SEQ ID NO: 1244037
ugagcacugcgucgaucaa

SEQ ID NO: 1460273 - RNA, 19 nt, Artificial Sequence
  Description of Artificial Sequence: Synthetic oligonucleotide
  Antisense strand to SEQ ID NO: 1460272
uugaucgacgcagugcuca

SEQ ID NO: 1460274 - RNA, 19 nt, Artificial Sequence
  Description of Artificial Sequence: Synthetic oligonucleotide
  Sense strand starting at position 1416 of SEQ ID NO: 1244037
gagcacugcgucgaucaaa

SEQ ID NO: 1460275 - RNA, 19 nt, Artificial Sequence
  Description of Artificial Sequence: Synthetic oligonucleotide
  Antisense strand to SEQ ID NO: 1460274
uuugaucgacgcagugcuc

SEQ ID NO: 1460276 - RNA, 19 nt, Artificial Sequence
  Description of Artificial Sequence: Synthetic oligonucleotide
  Sense strand starting at position 1612 of SEQ ID NO: 1244037
acccgcuucugggauguua

SEQ ID NO: 1460277 - RNA, 19 nt, Artificial Sequence
  Description of Artificial Sequence: Synthetic oligonucleotide
  Antisense strand to SEQ ID NO: 1460276
uaacaucccagaagcgggu

SEQ ID NO: 1460278 - RNA, 19 nt, Artificial Sequence
  Description of Artificial Sequence: Synthetic oligonucleotide
  Sense strand starting at position 2390 of SEQ ID NO: 1244037
agggauuccuccugccaac

SEQ ID NO: 1460279 - RNA, 19 nt, Artificial Sequence
  Description of Artificial Sequence: Synthetic oligonucleotide
  Antisense strand to SEQ ID NO: 1460278
guuggcaggaggaaucccu

SEQ ID NO: 1460280 - RNA, 19 nt, Artificial Sequence
  Description of Artificial Sequence: Synthetic oligonucleotide
  Sense strand starting at position 2475 of SEQ ID NO: 1244037
uuuggaaaguccuuaagug

SEQ ID NO: 1460281 - RNA, 19 nt, Artificial Sequence
  Description of Artificial Sequence: Synthetic oligonucleotide
  Antisense strand to SEQ ID NO: 1460280
cacuuaaggacuuuccaaa

SEQ ID NO: 1460282 - RNA, 19 nt, Artificial Sequence
  Description of Artificial Sequence: Synthetic oligonucleotide
  Sense strand starting at position 2476 of SEQ ID NO: 1244037
uuggaaaguccuuaagugu

SEQ ID NO: 1460283 - RNA, 19 nt, Artificial Sequence
  Description of Artificial Sequence: Synthetic oligonucleotide
  Antisense strand to SEQ ID NO: 1460282
acacuuaaggacuuuccaa

SEQ ID NO: 1460284 - RNA, 19 nt, Artificial Sequence
  Description of Artificial Sequence: Synthetic oligonucleotide
  Sense strand starting at position 2483 of SEQ ID NO: 1244037
guccuuaagugugcuccau

SEQ ID NO: 1460285 - RNA, 19 nt, Artificial Sequence
  Description of Artificial Sequence: Synthetic oligonucleotide
  Antisense strand to SEQ ID NO: 1460284
auggagcacacuuaaggac

SEQ ID NO: 1460286 - RNA, 19 nt, Artificial Sequence
  Description of Artificial Sequence: Synthetic oligonucleotide
  Sense strand starting at position 2485 of SEQ ID NO: 1244037
ccuuaagugugcuccauaa

SEQ ID NO: 1460287 - RNA, 19 nt, Artificial Sequence
  Description of Artificial Sequence: Synthetic oligonucleotide
  Antisense strand to SEQ ID NO: 1460286
uuauggagcacacuuaagg

SEQ ID NO: 1460288 - RNA, 19 nt, Artificial Sequence
  Description of Artificial Sequence: Synthetic oligonucleotide
  Sense strand starting at position 2487 of SEQ ID NO: 1244037
uuaagugugcuccauaacu

SEQ ID NO: 1460289 - RNA, 19 nt, Artificial Sequence
  Description of Artificial Sequence: Synthetic oligonucleotide
  Antisense strand to SEQ ID NO: 1460288
aguuauggagcacacuuaa

SEQ ID NO: 1460290 - RNA, 19 nt, Artificial Sequence
  Description of Artificial Sequence: Synthetic oligonucleotide
  Sense strand starting at position 2885 of SEQ ID NO: 1244037
uguugugguuucuguauuu

SEQ ID NO: 1460291 - RNA, 19 nt, Artificial Sequence
  Description of Artificial Sequence: Synthetic oligonucleotide
  Antisense strand to SEQ ID NO: 1460290
aaauacagaaaccacaaca

SEQ ID NO: 1460292 - RNA, 19 nt, Artificial Sequence
  Description of Artificial Sequence: Synthetic oligonucleotide
  Sense strand starting at position 2890 of SEQ ID NO: 1244037
ugguuucuguauuucuaca

SEQ ID NO: 1460293 - RNA, 19 nt, Artificial Sequence
  Description of Artificial Sequence: Synthetic oligonucleotide
  Antisense strand to SEQ ID NO: 1460292
uguagaaauacagaaacca

SEQ ID NO: 1460294 - RNA, 19 nt, Artificial Sequence
  Description of Artificial Sequence: Synthetic oligonucleotide
  Sense strand starting at position 2921 of SEQ ID NO: 1244037
aaguaaggcugacucagaa

SEQ ID NO: 1460295 - RNA, 19 nt, Artificial Sequence
  Description of Artificial Sequence: Synthetic oligonucleotide
  Antisense strand to SEQ ID NO: 1460294
uucugagucagccuuacuu

SEQ ID NO: 1460296 - RNA, 19 nt, Artificial Sequence
  Description of Artificial Sequence: Synthetic oligonucleotide
  Sense strand starting at position 225 of SEQ ID NO: 1244038
aaaggagaguuacaagaug

SEQ ID NO: 1460297 - RNA, 19 nt, Artificial Sequence
  Description of Artificial Sequence: Synthetic oligonucleotide
  Antisense strand to SEQ ID NO: 1460296
caucuuguaacucuccuuu

SEQ ID NO: 1460298 - RNA, 19 nt, Artificial Sequence
  Description of Artificial Sequence: Synthetic oligonucleotide
  Sense strand starting at position 324 of SEQ ID NO: 1244038
ggugguguuugagcuugaa

SEQ ID NO: 1460299 - RNA, 19 nt, Artificial Sequence
  Description of Artificial Sequence: Synthetic oligonucleotide
  Antisense strand to SEQ ID NO: 1460298
uucaagcucaaacaccacc

SEQ ID NO: 1460300 - RNA, 19 nt, Artificial Sequence
  Description of Artificial Sequence: Synthetic oligonucleotide
  Sense strand starting at position 327 of SEQ ID NO: 1244038
gguguuugagcuugaagga

SEQ ID NO: 1460301 - RNA, 19 nt, Artificial Sequence
  Description of Artificial Sequence: Synthetic oligonucleotide
  Antisense strand to SEQ ID NO: 1460300
uccuucaagcucaaacacc

SEQ ID NO: 1460302 - RNA, 19 nt, Artificial Sequence
  Description of Artificial Sequence: Synthetic oligonucleotide
  Sense strand starting at position 431 of SEQ ID NO: 1244038
agacacuuucgucacugua

SEQ ID NO: 1460303 - RNA, 19 nt, Artificial Sequence
  Description of Artificial Sequence: Synthetic oligonucleotide
  Antisense strand to SEQ ID NO: 1460302
uacagugacgaaagugucu

SEQ ID NO: 1460304 - RNA, 19 nt, Artificial Sequence
  Description of Artificial Sequence: Synthetic oligonucleotide
  Sense strand starting at position 476 of SEQ ID NO: 1244038
caugguguuccugggauga

SEQ ID NO: 1460305 - RNA, 19 nt, Artificial Sequence
  Description of Artificial Sequence: Synthetic oligonucleotide
  Antisense strand to SEQ ID NO: 1460304
ucaucccaggaacaccaug

SEQ ID NO: 1460306 - RNA, 19 nt, Artificial Sequence
  Description of Artificial Sequence: Synthetic oligonucleotide
  Sense strand starting at position 547 of SEQ ID NO: 1244038
ccagacacguucuucuaga

SEQ ID NO: 1460307 - RNA, 19 nt, Artificial Sequence
  Description of Artificial Sequence: Synthetic oligonucleotide
  Antisense strand to SEQ ID NO: 1460306
ucuagaagaacgugucugg

SEQ ID NO: 1460308 - RNA, 19 nt, Artificial Sequence
  Description of Artificial Sequence: Synthetic oligonucleotide
  Sense strand starting at position 548 of SEQ ID NO: 1244038
cagacacguucuucuagaa

SEQ ID NO: 1460309 - RNA, 19 nt, Artificial Sequence
  Description of Artificial Sequence: Synthetic oligonucleotide
  Antisense strand to SEQ ID NO: 1460308
uucuagaagaacgugucug

SEQ ID NO: 1460310 - RNA, 19 nt, Artificial Sequence
  Description of Artificial Sequence: Synthetic oligonucleotide
  Sense strand starting at position 620 of SEQ ID NO: 1244038
guauaaucucugcaguccu

SEQ ID NO: 1460311 - RNA, 19 nt, Artificial Sequence
  Description of Artificial Sequence: Synthetic oligonucleotide
  Antisense strand to SEQ ID NO: 1460310
aggacugcagagauuauac

SEQ ID NO: 1460312 - RNA, 19 nt, Artificial Sequence
  Description of Artificial Sequence: Synthetic oligonucleotide
  Sense strand starting at position 706 of SEQ ID NO: 1244038
acagauaguuucucuagcu

SEQ ID NO: 1460313 - RNA, 19 nt, Artificial Sequence
  Description of Artificial Sequence: Synthetic oligonucleotide
  Antisense strand to SEQ ID NO: 1460312
agcuagagaaacuaucugu

SEQ ID NO: 1460314 - RNA, 19 nt, Artificial Sequence
  Description of Artificial Sequence: Synthetic oligonucleotide
  Sense strand starting at position 750 of SEQ ID NO: 1244038
uccuacuguucuguccaaa

SEQ ID NO: 1460315 - RNA, 19 nt, Artificial Sequence
  Description of Artificial Sequence: Synthetic oligonucleotide
  Antisense strand to SEQ ID NO: 1460314
uuuggacagaacaguagga

SEQ ID NO: 1460316 - RNA, 19 nt, Artificial Sequence
  Description of Artificial Sequence: Synthetic oligonucleotide
  Sense strand starting at position 940 of SEQ ID NO: 1244038
guggaaugacauuguugac

SEQ ID NO: 1460317 - RNA, 19 nt, Artificial Sequence
  Description of Artificial Sequence: Synthetic oligonucleotide
  Antisense strand to SEQ ID NO: 1460316
gucaacaaugucauuccac

SEQ ID NO: 1460318 - RNA, 19 nt, Artificial Sequence
  Description of Artificial Sequence: Synthetic oligonucleotide
  Sense strand starting at position 946 of SEQ ID NO: 1244038
ugacauuguugacaaagaa

SEQ ID NO: 1460319 - RNA, 19 nt, Artificial Sequence
  Description of Artificial Sequence: Synthetic oligonucleotide
  Antisense strand to SEQ ID NO: 1460318
uucuuugucaacaauguca

SEQ ID NO: 1460320 - RNA, 19 nt, Artificial Sequence
  Description of Artificial Sequence: Synthetic oligonucleotide
  Sense strand starting at position 1133 of SEQ ID NO: 1244038
ggaagcaagccugagucuu

SEQ ID NO: 1460321 - RNA, 19 nt, Artificial Sequence
  Description of Artificial Sequence: Synthetic oligonucleotide
  Antisense strand to SEQ ID NO: 1460320
aagacucaggcuugcuucc

SEQ ID NO: 1460322 - RNA, 19 nt, Artificial Sequence
  Description of Artificial Sequence: Synthetic oligonucleotide
  Sense strand starting at position 1446 of SEQ ID NO: 1244038
ccaauagggcgucaccaua

SEQ ID NO: 1460323 - RNA, 19 nt, Artificial Sequence
  Description of Artificial Sequence: Synthetic oligonucleotide
  Antisense strand to SEQ ID NO: 1460322
uauggugacgcccuauugg

SEQ ID NO: 1460324 - RNA, 19 nt, Artificial Sequence
  Description of Artificial Sequence: Synthetic oligonucleotide
  Sense strand starting at position 1472 of SEQ ID NO: 1244038
aucuuaaucagacggaggu

SEQ ID NO: 1460325 - RNA, 19 nt, Artificial Sequence
  Description of Artificial Sequence: Synthetic oligonucleotide
  Antisense strand to SEQ ID NO: 1460324
accuccgucugauuaagau

SEQ ID NO: 1460326 - RNA, 19 nt, Artificial Sequence
  Description of Artificial Sequence: Synthetic oligonucleotide
  Sense strand starting at position 1485 of SEQ ID NO: 1244038
ggaggugacuuguuugggu

SEQ ID NO: 1460327 - RNA, 19 nt, Artificial Sequence
  Description of Artificial Sequence: Synthetic oligonucleotide
  Antisense strand to SEQ ID NO: 1460326
acccaaacaagucaccucc

SEQ ID NO: 1460328 - RNA, 19 nt, Artificial Sequence
  Description of Artificial Sequence: Synthetic oligonucleotide
  Sense strand starting at position 1490 of SEQ ID NO: 1244038
ugacuuguuugggucgacu

SEQ ID NO: 1460329 - RNA, 19 nt, Artificial Sequence
  Description of Artificial Sequence: Synthetic oligonucleotide
  Antisense strand to SEQ ID NO: 1460328
agucgacccaaacaaguca

SEQ ID NO: 1460330 - RNA, 19 nt, Artificial Sequence
  Description of Artificial Sequence: Synthetic oligonucleotide
  Sense strand starting at position 1493 of SEQ ID NO: 1244038
cuuguuugggucgacuagu

SEQ ID NO: 1460331 - RNA, 19 nt, Artificial Sequence
  Description of Artificial Sequence: Synthetic oligonucleotide
  Antisense strand to SEQ ID NO: 1460330
acuagucgacccaaacaag

SEQ ID NO: 1460332 - RNA, 19 nt, Artificial Sequence
  Description of Artificial Sequence: Synthetic oligonucleotide
  Sense strand starting at position 1818 of SEQ ID NO: 1244038
ccggguauuucuuucggau

SEQ ID NO: 1460333 - RNA, 19 nt, Artificial Sequence
  Description of Artificial Sequence: Synthetic oligonucleotide
  Antisense strand to SEQ ID NO: 1460332
auccgaaagaaauacccgg

SEQ ID NO: 1460334 - RNA, 19 nt, Artificial Sequence
  Description of Artificial Sequence: Synthetic oligonucleotide
  Sense strand starting at position 1993 of SEQ ID NO: 1244038
agcggagcgauccacgaau

SEQ ID NO: 1460335 - RNA, 19 nt, Artificial Sequence
  Description of Artificial Sequence: Synthetic oligonucleotide
  Antisense strand to SEQ ID NO: 1460334
auucguggaucgcuccgcu

SEQ ID NO: 1460336 - RNA, 19 nt, Artificial Sequence
  Description of Artificial Sequence: Synthetic oligonucleotide
  Sense strand starting at position 1995 of SEQ ID NO: 1244038
cggagcgauccacgaauuu

SEQ ID NO: 1460337 - RNA, 19 nt, Artificial Sequence
  Description of Artificial Sequence: Synthetic oligonucleotide
  Antisense strand to SEQ ID NO: 1460336
aaauucguggaucgcuccg

SEQ ID NO: 1460338 - RNA, 19 nt, Artificial Sequence
  Description of Artificial Sequence: Synthetic oligonucleotide
  Sense strand starting at position 2161 of SEQ ID NO: 1244038
ggaaucaauuugugggcua

SEQ ID NO: 1460339 - RNA, 19 nt, Artificial Sequence
  Description of Artificial Sequence: Synthetic oligonucleotide
  Antisense strand to SEQ ID NO: 1460338
uagcccacaaauugauucc

SEQ ID NO: 1460340 - RNA, 19 nt, Artificial Sequence
  Description of Artificial Sequence: Synthetic oligonucleotide
  Sense strand starting at position 2302 of SEQ ID NO: 1244038
gagacuugguucuccaagu

SEQ ID NO: 1460341 - RNA, 19 nt, Artificial Sequence
  Description of Artificial Sequence: Synthetic oligonucleotide
  Antisense strand to SEQ ID NO: 1460340
acuuggagaaccaagucuc

SEQ ID NO: 1460342 - RNA, 19 nt, Artificial Sequence
  Description of Artificial Sequence: Synthetic oligonucleotide
  Sense strand starting at position 2303 of SEQ ID NO: 1244038
agacuugguucuccaaguu

SEQ ID NO: 1460343 - RNA, 19 nt, Artificial Sequence
  Description of Artificial Sequence: Synthetic oligonucleotide
  Antisense strand to SEQ ID NO: 1460342
aacuuggagaaccaagucu

SEQ ID NO: 1460344 - RNA, 19 nt, Artificial Sequence
  Description of Artificial Sequence: Synthetic oligonucleotide
  Sense strand starting at position 2318 of SEQ ID NO: 1244038
aguuccuuucguuaacaac

SEQ ID NO: 1460345 - RNA, 19 nt, Artificial Sequence
  Description of Artificial Sequence: Synthetic oligonucleotide
  Antisense strand to SEQ ID NO: 1460344
guuguuaacgaaaggaacu

SEQ ID NO: 1460346 - RNA, 19 nt, Artificial Sequence
  Description of Artificial Sequence: Synthetic oligonucleotide
  Sense strand starting at position 2474 of SEQ ID NO: 1244038
aacagauguuuggagagau

SEQ ID NO: 1460347 - RNA, 19 nt, Artificial Sequence
  Description of Artificial Sequence: Synthetic oligonucleotide
  Antisense strand to SEQ ID NO: 1460346
aucucuccaaacaucuguu

SEQ ID NO: 1460348 - RNA, 19 nt, Artificial Sequence
  Description of Artificial Sequence: Synthetic oligonucleotide
  Sense strand starting at position 2967 of SEQ ID NO: 1244038
uggugucagcauuauugua

SEQ ID NO: 1460349 - RNA, 19 nt, Artificial Sequence
  Description of Artificial Sequence: Synthetic oligonucleotide
  Antisense strand to SEQ ID NO: 1460348
uacaauaaugcugacacca

SEQ ID NO: 1460350 - RNA, 19 nt, Artificial Sequence
  Description of Artificial Sequence: Synthetic oligonucleotide
  Sense strand starting at position 2997 of SEQ ID NO: 1244038
ugguguccgcauuauucua

SEQ ID NO: 1460351 - RNA, 19 nt, Artificial Sequence
  Description of Artificial Sequence: Synthetic oligonucleotide
  Antisense strand to SEQ ID NO: 1460350
uagaauaaugcggacacca

SEQ ID NO: 1460352 - RNA, 19 nt, Artificial Sequence
  Description of Artificial Sequence: Synthetic oligonucleotide
  Sense strand starting at position 3152 of SEQ ID NO: 1244038
gccgcuuugguuucaaagu

SEQ ID NO: 1460353 - RNA, 19 nt, Artificial Sequence
  Description of Artificial Sequence: Synthetic oligonucleotide
  Antisense strand to SEQ ID NO: 1460352
acuuugaaaccaaagcggc

SEQ ID NO: 1460354 - RNA, 19 nt, Artificial Sequence
  Description of Artificial Sequence: Synthetic oligonucleotide
  Sense strand starting at position 3168 of SEQ ID NO: 1244038
aguuauaaugcaugguuua

SEQ ID NO: 1460355 - RNA, 19 nt, Artificial Sequence
  Description of Artificial Sequence: Synthetic oligonucleotide
  Antisense strand to SEQ ID NO: 1460354
uaaaccaugcauuauaacu

SEQ ID NO: 1460356 - RNA, 19 nt, Artificial Sequence
  Description of Artificial Sequence: Synthetic oligonucleotide
  Sense strand starting at position 3169 of SEQ ID NO: 1244038
guuauaaugcaugguuuaa

SEQ ID NO: 1460357 - RNA, 19 nt, Artificial Sequence
  Description of Artificial Sequence: Synthetic oligonucleotide
  Antisense strand to SEQ ID NO: 1460356
uuaaaccaugcauuauaac

SEQ ID NO: 1460358 - RNA, 19 nt, Artificial Sequence
  Description of Artificial Sequence: Synthetic oligonucleotide
  Sense strand starting at position 3405 of SEQ ID NO: 1244038
ugacuuggcuucucuuuga

SEQ ID NO: 1460359 - RNA, 19 nt, Artificial Sequence
  Description of Artificial Sequence: Synthetic oligonucleotide
  Antisense strand to SEQ ID NO: 1460358
ucaaagagaagccaaguca

SEQ ID NO: 1460360 - RNA, 19 nt, Artificial Sequence
  Description of Artificial Sequence: Synthetic oligonucleotide
  Sense strand starting at position 3521 of SEQ ID NO: 1244038
ggguuuccauggaguguga

SEQ ID NO: 1460361 - RNA, 19 nt, Artificial Sequence
  Description of Artificial Sequence: Synthetic oligonucleotide
  Antisense strand to SEQ ID NO: 1460360
ucacacuccauggaaaccc

SEQ ID NO: 1460362 - RNA, 19 nt, Artificial Sequence
  Description of Artificial Sequence: Synthetic oligonucleotide
  Sense strand starting at position 3532 of SEQ ID NO: 1244038
gagugugaacacgaaguua

SEQ ID NO: 1460363 - RNA, 19 nt, Artificial Sequence
  Description of Artificial Sequence: Synthetic oligonucleotide
  Antisense strand to SEQ ID NO: 1460362
uaacuucguguucacacuc

SEQ ID NO: 1460364 - RNA, 19 nt, Artificial Sequence
  Description of Artificial Sequence: Synthetic oligonucleotide
  Sense strand starting at position 3759 of SEQ ID NO: 1244038
gccgauguuggugaagguu

SEQ ID NO: 1460365 - RNA, 19 nt, Artificial Sequence
  Description of Artificial Sequence: Synthetic oligonucleotide
  Antisense strand to SEQ ID NO: 1460364
aaccuucaccaacaucggc

SEQ ID NO: 1460366 - RNA, 19 nt, Artificial Sequence
  Description of Artificial Sequence: Synthetic oligonucleotide
  Sense strand starting at position 3822 of SEQ ID NO: 1244038
aauaacuugcauugguaga

SEQ ID NO: 1460367 - RNA, 19 nt, Artificial Sequence
  Description of Artificial Sequence: Synthetic oligonucleotide
  Antisense strand to SEQ ID NO: 1460366
ucuaccaaugcaaguuauu

SEQ ID NO: 1460368 - RNA, 19 nt, Artificial Sequence
  Description of Artificial Sequence: Synthetic oligonucleotide
  Sense strand starting at position 3824 of SEQ ID NO: 1244038
uaacuugcauugguagagu

SEQ ID NO: 1460369 - RNA, 19 nt, Artificial Sequence
  Description of Artificial Sequence: Synthetic oligonucleotide
  Antisense strand to SEQ ID NO: 1460368
acucuaccaaugcaaguua

SEQ ID NO: 1460370 - RNA, 19 nt, Artificial Sequence
  Description of Artificial Sequence: Synthetic oligonucleotide
  Sense strand starting at position 3835 of SEQ ID NO: 1244038
gguagaguaccuuauaguu

SEQ ID NO: 1460371 - RNA, 19 nt, Artificial Sequence
  Description of Artificial Sequence: Synthetic oligonucleotide
  Antisense strand to SEQ ID NO: 1460370
aacuauaagguacucuacc

SEQ ID NO: 1460372 - RNA, 19 nt, Artificial Sequence
  Description of Artificial Sequence: Synthetic oligonucleotide
  Sense strand starting at position 3879 of SEQ ID NO: 1244038
gcagcaucacuggagaugu

SEQ ID NO: 1460373 - RNA, 19 nt, Artificial Sequence
  Description of Artificial Sequence: Synthetic oligonucleotide
  Antisense strand to SEQ ID NO: 1460372
acaucuccagugaugcugc

SEQ ID NO: 1460374 - RNA, 19 nt, Artificial Sequence
  Description of Artificial Sequence: Synthetic oligonucleotide
  Sense strand starting at position 3963 of SEQ ID NO: 1244038
agugaugagcuuugaagua

SEQ ID NO: 1460375 - RNA, 19 nt, Artificial Sequence
  Description of Artificial Sequence: Synthetic oligonucleotide
  Antisense strand to SEQ ID NO: 1460374
uacuucaaagcucaucacu

SEQ ID NO: 1460376 - RNA, 19 nt, Artificial Sequence
  Description of Artificial Sequence: Synthetic oligonucleotide
  Sense strand starting at position 38 of SEQ ID NO: 1244039
cuccauaaggcauaguaga

SEQ ID NO: 1460377 - RNA, 19 nt, Artificial Sequence
  Description of Artificial Sequence: Synthetic oligonucleotide
  Antisense strand to SEQ ID NO: 1460376
ucuacuaugccuuauggag

SEQ ID NO: 1460378 - RNA, 19 nt, Artificial Sequence
  Description of Artificial Sequence: Synthetic oligonucleotide
  Sense strand starting at position 353 of SEQ ID NO: 1244039
gugugucucaauugucaga

SEQ ID NO: 1460379 - RNA, 19 nt, Artificial Sequence
  Description of Artificial Sequence: Synthetic oligonucleotide
  Antisense strand to SEQ ID NO: 1460378
ucugacaauugagacacac

SEQ ID NO: 1460380 - RNA, 19 nt, Artificial Sequence
  Description of Artificial Sequence: Synthetic oligonucleotide
  Sense strand starting at position 355 of SEQ ID NO: 1244039
gugucucaauugucagaag

SEQ ID NO: 1460381 - RNA, 19 nt, Artificial Sequence
  Description of Artificial Sequence: Synthetic oligonucleotide
  Antisense strand to SEQ ID NO: 1460380
cuucugacaauugagacac

SEQ ID NO: 1460382 - RNA, 19 nt, Artificial Sequence
  Description of Artificial Sequence: Synthetic oligonucleotide
  Sense strand starting at position 358 of SEQ ID NO: 1244039
ucucaauugucagaagcca

SEQ ID NO: 1460383 - RNA, 19 nt, Artificial Sequence
  Description of Artificial Sequence: Synthetic oligonucleotide
  Antisense strand to SEQ ID NO: 1460382
uggcuucugacaauugaga

SEQ ID NO: 1460384 - RNA, 19 nt, Artificial Sequence
  Description of Artificial Sequence: Synthetic oligonucleotide
  Sense strand starting at position 433 of SEQ ID NO: 1244039
cugggacacuucuaauugu

SEQ ID NO: 1460385 - RNA, 19 nt, Artificial Sequence
  Description of Artificial Sequence: Synthetic oligonucleotide
  Antisense strand to SEQ ID NO: 1460384
acaauuagaagugucccag

SEQ ID NO: 1460386 - RNA, 19 nt, Artificial Sequence
  Description of Artificial Sequence: Synthetic oligonucleotide
  Sense strand starting at position 508 of SEQ ID NO: 1244039
ccaaucaggucacgggaaa

SEQ ID NO: 1460387 - RNA, 19 nt, Artificial Sequence
  Description of Artificial Sequence: Synthetic oligonucleotide
  Antisense strand to SEQ ID NO: 1460386
uuucccgugaccugauugg

SEQ ID NO: 1460388 - RNA, 19 nt, Artificial Sequence
  Description of Artificial Sequence: Synthetic oligonucleotide
  Sense strand starting at position 605 of SEQ ID NO: 1244039
cccacaguguaucagacaa

SEQ ID NO: 1460389 - RNA, 19 nt, Artificial Sequence
  Description of Artificial Sequence: Synthetic oligonucleotide
  Antisense strand to SEQ ID NO: 1460388
uugucugauacacuguggg

SEQ ID NO: 1460390 - RNA, 19 nt, Artificial Sequence
  Description of Artificial Sequence: Synthetic oligonucleotide
  Sense strand starting at position 649 of SEQ ID NO: 1244039
uggcacuccuaguaucagu

SEQ ID NO: 1460391 - RNA, 19 nt, Artificial Sequence
  Description of Artificial Sequence: Synthetic oligonucleotide
  Antisense strand to SEQ ID NO: 1460390
acugauacuaggagugcca

SEQ ID NO: 1460392 - RNA, 19 nt, Artificial Sequence
  Description of Artificial Sequence: Synthetic oligonucleotide
  Sense strand starting at position 656 of SEQ ID NO: 1244039
ccuaguaucagugaggacu

SEQ ID NO: 1460393 - RNA, 19 nt, Artificial Sequence
  Description of Artificial Sequence: Synthetic oligonucleotide
  Antisense strand to SEQ ID NO: 1460392
aguccucacugauacuagg

SEQ ID NO: 1460394 - RNA, 19 nt, Artificial Sequence
  Description of Artificial Sequence: Synthetic oligonucleotide
  Sense strand starting at position 930 of SEQ ID NO: 1244039
gaguaagccucuccaauga

SEQ ID NO: 1460395 - RNA, 19 nt, Artificial Sequence
  Description of Artificial Sequence: Synthetic oligonucleotide
  Antisense strand to SEQ ID NO: 1460394
ucauuggagaggcuuacuc

SEQ ID NO: 1460396 - RNA, 19 nt, Artificial Sequence
  Description of Artificial Sequence: Synthetic oligonucleotide
  Sense strand starting at position 1304 of SEQ ID NO: 1244039
ccaagaaccugcuguguga

SEQ ID NO: 1460397 - RNA, 19 nt, Artificial Sequence
  Description of Artificial Sequence: Synthetic oligonucleotide
  Antisense strand to SEQ ID NO: 1460396
ucacacagcagguucuugg

SEQ ID NO: 1460398 - RNA, 19 nt, Artificial Sequence
  Description of Artificial Sequence: Synthetic oligonucleotide
  Sense strand starting at position 1315 of SEQ ID NO: 1244039
cugugugaccuccagcagu

SEQ ID NO: 1460399 - RNA, 19 nt, Artificial Sequence
  Description of Artificial Sequence: Synthetic oligonucleotide
  Antisense strand to SEQ ID NO: 1460398
acugcuggaggucacacag

SEQ ID NO: 1460400 - RNA, 19 nt, Artificial Sequence
  Description of Artificial Sequence: Synthetic oligonucleotide
  Sense strand starting at position 1793 of SEQ ID NO: 1244039
gguuguaguccguguguuc

SEQ ID NO: 1460401 - RNA, 19 nt, Artificial Sequence
  Description of Artificial Sequence: Synthetic oligonucleotide
  Antisense strand to SEQ ID NO: 1460400
gaacacacggacuacaacc

SEQ ID NO: 1460402 - RNA, 19 nt, Artificial Sequence
  Description of Artificial Sequence: Synthetic oligonucleotide
  Sense strand starting at position 2092 of SEQ ID NO: 1244039
ccgcaacucccgugggaau

SEQ ID NO: 1460403 - RNA, 19 nt, Artificial Sequence
  Description of Artificial Sequence: Synthetic oligonucleotide
  Antisense strand to SEQ ID NO: 1460402
auucccacgggaguugcgg

SEQ ID NO: 1460404 - RNA, 19 nt, Artificial Sequence
  Description of Artificial Sequence: Synthetic oligonucleotide
  Sense strand starting at position 2211 of SEQ ID NO: 1244039
cacucacuagagugagaau

SEQ ID NO: 1460405 - RNA, 19 nt, Artificial Sequence
  Description of Artificial Sequence: Synthetic oligonucleotide
  Antisense strand to SEQ ID NO: 1460404
auucucacucuagugagug

SEQ ID NO: 1460406 - RNA, 19 nt, Artificial Sequence
  Description of Artificial Sequence: Synthetic oligonucleotide
  Sense strand starting at position 2257 of SEQ ID NO: 1244039
ggauuucugagcugcccuu

SEQ ID NO: 1460407 - RNA, 19 nt, Artificial Sequence
  Description of Artificial Sequence: Synthetic oligonucleotide
  Antisense strand to SEQ ID NO: 1460406
aagggcagcucagaaaucc

SEQ ID NO: 1460408 - RNA, 19 nt, Artificial Sequence
  Description of Artificial Sequence: Synthetic oligonucleotide
  Sense strand starting at position 2847 of SEQ ID NO: 1244039
agcuccuagcaauggagaa

SEQ ID NO: 1460409 - RNA, 19 nt, Artificial Sequence
  Description of Artificial Sequence: Synthetic oligonucleotide
  Antisense strand to SEQ ID NO: 1460408
uucuccauugcuaggagcu

SEQ ID NO: 1460410 - RNA, 19 nt, Artificial Sequence
  Description of Artificial Sequence: Synthetic oligonucleotide
  Sense strand starting at position 2973 of SEQ ID NO: 1244039
cccagaagcccuugucuca

SEQ ID NO: 1460411 - RNA, 19 nt, Artificial Sequence
  Description of Artificial Sequence: Synthetic oligonucleotide
  Antisense strand to SEQ ID NO: 1460410
ugagacaagggcuucuggg

SEQ ID NO: 1460412 - RNA, 19 nt, Artificial Sequence
  Description of Artificial Sequence: Synthetic oligonucleotide
  Sense strand starting at position 3061 of SEQ ID NO: 1244039
cccaacugcugccuugaua

SEQ ID NO: 1460413 - RNA, 19 nt, Artificial Sequence
  Description of Artificial Sequence: Synthetic oligonucleotide
  Antisense strand to SEQ ID NO: 1460412
uaucaaggcagcaguuggg

SEQ ID NO: 1460414 - RNA, 19 nt, Artificial Sequence
  Description of Artificial Sequence: Synthetic oligonucleotide
  Sense strand starting at position 3232 of SEQ ID NO: 1244039
acugcauuccaagggcaau

SEQ ID NO: 1460415 - RNA, 19 nt, Artificial Sequence
  Description of Artificial Sequence: Synthetic oligonucleotide
  Antisense strand to SEQ ID NO: 1460414
auugcccuuggaaugcagu

SEQ ID NO: 1460416 - RNA, 19 nt, Artificial Sequence
  Description of Artificial Sequence: Synthetic oligonucleotide
  Sense strand starting at position 3288 of SEQ ID NO: 1244039
uugugacauugguuaggaa

SEQ ID NO: 1460417 - RNA, 19 nt, Artificial Sequence
  Description of Artificial Sequence: Synthetic oligonucleotide
  Antisense strand to SEQ ID NO: 1460416
uuccuaaccaaugucacaa

SEQ ID NO: 1460418 - RNA, 19 nt, Artificial Sequence
  Description of Artificial Sequence: Synthetic oligonucleotide
  Sense strand starting at position 3291 of SEQ ID NO: 1244039
ugacauugguuaggaaaug

SEQ ID NO: 1460419 - RNA, 19 nt, Artificial Sequence
  Description of Artificial Sequence: Synthetic oligonucleotide
  Antisense strand to SEQ ID NO: 1460418
cauuuccuaaccaauguca

SEQ ID NO: 1460420 - RNA, 19 nt, Artificial Sequence
  Description of Artificial Sequence: Synthetic oligonucleotide
  Sense strand starting at position 3292 of SEQ ID NO: 1244039
gacauugguuaggaaaugu

SEQ ID NO: 1460421 - RNA, 19 nt, Artificial Sequence
  Description of Artificial Sequence: Synthetic oligonucleotide
  Antisense strand to SEQ ID NO: 1460420
acauuuccuaaccaauguc

SEQ ID NO: 1460422 - RNA, 19 nt, Artificial Sequence
  Description of Artificial Sequence: Synthetic oligonucleotide
  Sense strand starting at position 3296 of SEQ ID NO: 1244039
uugguuaggaaauguuuau

SEQ ID NO: 1460423 - RNA, 19 nt, Artificial Sequence
  Description of Artificial Sequence: Synthetic oligonucleotide
  Antisense strand to SEQ ID NO: 1460422
auaaacauuuccuaaccaa

SEQ ID NO: 1460424 - RNA, 19 nt, Artificial Sequence
  Description of Artificial Sequence: Synthetic oligonucleotide
  Sense strand starting at position 3657 of SEQ ID NO: 1244039
gacagaucuugcucuguua

SEQ ID NO: 1460425 - RNA, 19 nt, Artificial Sequence
  Description of Artificial Sequence: Synthetic oligonucleotide
  Antisense strand to SEQ ID NO: 1460424
uaacagagcaagaucuguc

SEQ ID NO: 1460426 - RNA, 19 nt, Artificial Sequence
  Description of Artificial Sequence: Synthetic oligonucleotide
  Sense strand starting at position 159 of SEQ ID NO: 1244040
ccagauaccugcggucaga

SEQ ID NO: 1460427 - RNA, 19 nt, Artificial Sequence
  Description of Artificial Sequence: Synthetic oligonucleotide
  Antisense strand to SEQ ID NO: 1460426
ucugaccgcagguaucugg

SEQ ID NO: 1460428 - RNA, 19 nt, Artificial Sequence
  Description of Artificial Sequence: Synthetic oligonucleotide
  Sense strand starting at position 247 of SEQ ID NO: 1244040
caaggcugcucucgaggaa

SEQ ID NO: 1460429 - RNA, 19 nt, Artificial Sequence
  Description of Artificial Sequence: Synthetic oligonucleotide
  Antisense strand to SEQ ID NO: 1460428
uuccucgagagcagccuug

SEQ ID NO: 1460430 - RNA, 19 nt, Artificial Sequence
  Description of Artificial Sequence: Synthetic oligonucleotide
  Sense strand starting at position 646 of SEQ ID NO: 1244040
gaaugcgagcuuuguggau

SEQ ID NO: 1460431 - RNA, 19 nt, Artificial Sequence
  Description of Artificial Sequence: Synthetic oligonucleotide
  Antisense strand to SEQ ID NO: 1460430
auccacaaagcucgcauuc

SEQ ID NO: 1460432 - RNA, 19 nt, Artificial Sequence
  Description of Artificial Sequence: Synthetic oligonucleotide
  Sense strand starting at position 1010 of SEQ ID NO: 1244040
cggaguggauccuugcaaa

SEQ ID NO: 1460433 - RNA, 19 nt, Artificial Sequence
  Description of Artificial Sequence: Synthetic oligonucleotide
  Antisense strand to SEQ ID NO: 1460432
uuugcaaggauccacuccg

SEQ ID NO: 1460434 - RNA, 19 nt, Artificial Sequence
  Description of Artificial Sequence: Synthetic oligonucleotide
  Sense strand starting at position 1013 of SEQ ID NO: 1244040
aguggauccuugcaaagga

SEQ ID NO: 1460435 - RNA, 19 nt, Artificial Sequence
  Description of Artificial Sequence: Synthetic oligonucleotide
  Antisense strand to SEQ ID NO: 1460434
uccuuugcaaggauccacu

SEQ ID NO: 1460436 - RNA, 19 nt, Artificial Sequence
  Description of Artificial Sequence: Synthetic oligonucleotide
  Sense strand starting at position 1165 of SEQ ID NO: 1244040
ggcgacucugagcgaguua

SEQ ID NO: 1460437 - RNA, 19 nt, Artificial Sequence
  Description of Artificial Sequence: Synthetic oligonucleotide
  Antisense strand to SEQ ID NO: 1460436
uaacucgcucagagucgcc

SEQ ID NO: 1460438 - RNA, 19 nt, Artificial Sequence
  Description of Artificial Sequence: Synthetic oligonucleotide
  Sense strand starting at position 1174 of SEQ ID NO: 1244040
gagcgaguuacuuaggaac

SEQ ID NO: 1460439 - RNA, 19 nt, Artificial Sequence
  Description of Artificial Sequence: Synthetic oligonucleotide
  Antisense strand to SEQ ID NO: 1460438
guuccuaaguaacucgcuc

SEQ ID NO: 1460440 - RNA, 19 nt, Artificial Sequence
  Description of Artificial Sequence: Synthetic oligonucleotide
  Sense strand starting at position 1176 of SEQ ID NO: 1244040
gcgaguuacuuaggaacuc

SEQ ID NO: 1460441 - RNA, 19 nt, Artificial Sequence
  Description of Artificial Sequence: Synthetic oligonucleotide
  Antisense strand to SEQ ID NO: 1460440
gaguuccuaaguaacucgc

SEQ ID NO: 1460442 - RNA, 19 nt, Artificial Sequence
  Description of Artificial Sequence: Synthetic oligonucleotide
  Sense strand starting at position 1177 of SEQ ID NO: 1244040
cgaguuacuuaggaacuca

SEQ ID NO: 1460443 - RNA, 19 nt, Artificial Sequence
  Description of Artificial Sequence: Synthetic oligonucleotide
  Antisense strand to SEQ ID NO: 1460442
ugaguuccuaaguaacucg

SEQ ID NO: 1460444 - RNA, 19 nt, Artificial Sequence
  Description of Artificial Sequence: Synthetic oligonucleotide
  Sense strand starting at position 1212 of SEQ ID NO: 1244040
ggcacuuuguccuauccca

SEQ ID NO: 1460445 - RNA, 19 nt, Artificial Sequence
  Description of Artificial Sequence: Synthetic oligonucleotide
  Antisense strand to SEQ ID NO: 1460444
ugggauaggacaaagugcc

SEQ ID NO: 1460446 - RNA, 19 nt, Artificial Sequence
  Description of Artificial Sequence: Synthetic oligonucleotide
  Sense strand starting at position 1241 of SEQ ID NO: 1244040
gggcauuaagcucaagcga

SEQ ID NO: 1460447 - RNA, 19 nt, Artificial Sequence
  Description of Artificial Sequence: Synthetic oligonucleotide
  Antisense strand to SEQ ID NO: 1460446
ucgcuugagcuuaaugccc

SEQ ID NO: 1460448 - RNA, 19 nt, Artificial Sequence
  Description of Artificial Sequence: Synthetic oligonucleotide
  Sense strand starting at position 2499 of SEQ ID NO: 1244040
ggcucuuucgcccaggcua

SEQ ID NO: 1460449 - RNA, 19 nt, Artificial Sequence
  Description of Artificial Sequence: Synthetic oligonucleotide
  Antisense strand to SEQ ID NO: 1460448
uagccugggcgaaagagcc

SEQ ID NO: 1460450 - RNA, 19 nt, Artificial Sequence
  Description of Artificial Sequence: Synthetic oligonucleotide
  Sense strand starting at position 2644 of SEQ ID NO: 1244040
auuuguauuuguugagaca

SEQ ID NO: 1460451 - RNA, 19 nt, Artificial Sequence
  Description of Artificial Sequence: Synthetic oligonucleotide
  Antisense strand to SEQ ID NO: 1460450
ugucucaacaaauacaaau

SEQ ID NO: 1460452 - RNA, 19 nt, Artificial Sequence
  Description of Artificial Sequence: Synthetic oligonucleotide
  Sense strand starting at position 2995 of SEQ ID NO: 1244040
cugagcaucuauuguguca

SEQ ID NO: 1460453 - RNA, 19 nt, Artificial Sequence
  Description of Artificial Sequence: Synthetic oligonucleotide
  Antisense strand to SEQ ID NO: 1460452
ugacacaauagaugcucag

SEQ ID NO: 1460454 - RNA, 19 nt, Artificial Sequence
  Description of Artificial Sequence: Synthetic oligonucleotide
  Sense strand starting at position 3065 of SEQ ID NO: 1244040
gguaacacuuccuucuaag

SEQ ID NO: 1460455 - RNA, 19 nt, Artificial Sequence
  Description of Artificial Sequence: Synthetic oligonucleotide
  Antisense strand to SEQ ID NO: 1460454
cuuagaaggaaguguuacc

SEQ ID NO: 1460456 - RNA, 19 nt, Artificial Sequence
  Description of Artificial Sequence: Synthetic oligonucleotide
  Sense strand starting at position 3071 of SEQ ID NO: 1244040
acuuccuucuaagagggau

SEQ ID NO: 1460457 - RNA, 19 nt, Artificial Sequence
  Description of Artificial Sequence: Synthetic oligonucleotide
  Antisense strand to SEQ ID NO: 1460456
aucccucuuagaaggaagu

SEQ ID NO: 1460458 - RNA, 19 nt, Artificial Sequence
  Description of Artificial Sequence: Synthetic oligonucleotide
  Sense strand starting at position 3085 of SEQ ID NO: 1244040
gggaucugcugagaaagga

SEQ ID NO: 1460459 - RNA, 19 nt, Artificial Sequence
  Description of Artificial Sequence: Synthetic oligonucleotide
  Antisense strand to SEQ ID NO: 1460458
uccuuucucagcagauccc

SEQ ID NO: 1460460 - RNA, 19 nt, Artificial Sequence
  Description of Artificial Sequence: Synthetic oligonucleotide
  Sense strand starting at position 3104 of SEQ ID NO: 1244040
augagauguaugggagagu

SEQ ID NO: 1460461 - RNA, 19 nt, Artificial Sequence
  Description of Artificial Sequence: Synthetic oligonucleotide
  Antisense strand to SEQ ID NO: 1460460
acucucccauacaucucau

SEQ ID NO: 1460462 - RNA, 19 nt, Artificial Sequence
  Description of Artificial Sequence: Synthetic oligonucleotide
  Sense strand starting at position 3105 of SEQ ID NO: 1244040
ugagauguaugggagaguu

SEQ ID NO: 1460463 - RNA, 19 nt, Artificial Sequence
  Description of Artificial Sequence: Synthetic oligonucleotide
  Antisense strand to SEQ ID NO: 1460462
aacucucccauacaucuca

SEQ ID NO: 1460464 - RNA, 19 nt, Artificial Sequence
  Description of Artificial Sequence: Synthetic oligonucleotide
  Sense strand starting at position 3113 of SEQ ID NO: 1244040
augggagaguuaguuaaau

SEQ ID NO: 1460465 - RNA, 19 nt, Artificial Sequence
  Description of Artificial Sequence: Synthetic oligonucleotide
  Antisense strand to SEQ ID NO: 1460464
auuuaacuaacucucccau

SEQ ID NO: 1460466 - RNA, 19 nt, Artificial Sequence
  Description of Artificial Sequence: Synthetic oligonucleotide
  Sense strand starting at position 3122 of SEQ ID NO: 1244040
uuaguuaaaucugaaugca

SEQ ID NO: 1460467 - RNA, 19 nt, Artificial Sequence
  Description of Artificial Sequence: Synthetic oligonucleotide
  Antisense strand to SEQ ID NO: 1460466
ugcauucagauuuaacuaa

SEQ ID NO: 1460468 - RNA, 19 nt, Artificial Sequence
  Description of Artificial Sequence: Synthetic oligonucleotide
  Sense strand starting at position 3125 of SEQ ID NO: 1244040
guuaaaucugaaugcauca

SEQ ID NO: 1460469 - RNA, 19 nt, Artificial Sequence
  Description of Artificial Sequence: Synthetic oligonucleotide
  Antisense strand to SEQ ID NO: 1460468
ugaugcauucagauuuaac

SEQ ID NO: 1460470 - RNA, 19 nt, Artificial Sequence
  Description of Artificial Sequence: Synthetic oligonucleotide
  Sense strand starting at position 3172 of SEQ ID NO: 1244040
uuccguauaccuugaggaa

SEQ ID NO: 1460471 - RNA, 19 nt, Artificial Sequence
  Description of Artificial Sequence: Synthetic oligonucleotide
  Antisense strand to SEQ ID NO: 1460470
uuccucaagguauacggaa

SEQ ID NO: 1460472 - RNA, 19 nt, Artificial Sequence
  Description of Artificial Sequence: Synthetic oligonucleotide
  Sense strand starting at position 3173 of SEQ ID NO: 1244040
uccguauaccuugaggaaa

SEQ ID NO: 1460473 - RNA, 19 nt, Artificial Sequence
  Description of Artificial Sequence: Synthetic oligonucleotide
  Antisense strand to SEQ ID NO: 1460472
uuuccucaagguauacgga

SEQ ID NO: 1460474 - RNA, 19 nt, Artificial Sequence
  Description of Artificial Sequence: Synthetic oligonucleotide
  Sense strand starting at position 3175 of SEQ ID NO: 1244040
cguauaccuugaggaaauu

SEQ ID NO: 1460475 - RNA, 19 nt, Artificial Sequence
  Description of Artificial Sequence: Synthetic oligonucleotide
  Antisense strand to SEQ ID NO: 1460474
aauuuccucaagguauacg

SEQ ID NO: 1460476 - RNA, 19 nt, Artificial Sequence
  Description of Artificial Sequence: Synthetic oligonucleotide
  Sense strand starting at position 3585 of SEQ ID NO: 1244040
uaaguuacgugcccaacau

SEQ ID NO: 1460477 - RNA, 19 nt, Artificial Sequence
  Description of Artificial Sequence: Synthetic oligonucleotide
  Antisense strand to SEQ ID NO: 1460476
auguugggcacguaacuua

SEQ ID NO: 1460478 - RNA, 19 nt, Artificial Sequence
  Description of Artificial Sequence: Synthetic oligonucleotide
  Sense strand starting at position 3631 of SEQ ID NO: 1244040
auuggaaucccaggucuca

SEQ ID NO: 1460479 - RNA, 19 nt, Artificial Sequence
  Description of Artificial Sequence: Synthetic oligonucleotide
  Antisense strand to SEQ ID NO: 1460478
ugagaccugggauuccaau

SEQ ID NO: 1460480 - RNA, 19 nt, Artificial Sequence
  Description of Artificial Sequence: Synthetic oligonucleotide
  Sense strand starting at position 3932 of SEQ ID NO: 1244040
cccgaaauccaguaucuuu

SEQ ID NO: 1460481 - RNA, 19 nt, Artificial Sequence
  Description of Artificial Sequence: Synthetic oligonucleotide
  Antisense strand to SEQ ID NO: 1460480
aaagauacuggauuucggg

SEQ ID NO: 1460482 - RNA, 19 nt, Artificial Sequence
  Description of Artificial Sequence: Synthetic oligonucleotide
  Sense strand starting at position 35 of SEQ ID NO: 1244041
uguugugaagauuggauau

SEQ ID NO: 1460483 - RNA, 19 nt, Artificial Sequence
  Description of Artificial Sequence: Synthetic oligonucleotide
  Antisense strand to SEQ ID NO: 1460482
auauccaaucuucacaaca

SEQ ID NO: 1460484 - RNA, 19 nt, Artificial Sequence
  Description of Artificial Sequence: Synthetic oligonucleotide
  Sense strand starting at position 45 of SEQ ID NO: 1244041
auuggauaugcucauaguu

SEQ ID NO: 1460485 - RNA, 19 nt, Artificial Sequence
  Description of Artificial Sequence: Synthetic oligonucleotide
  Antisense strand to SEQ ID NO: 1460484
aacuaugagcauauccaau

SEQ ID NO: 1460486 - RNA, 19 nt, Artificial Sequence
  Description of Artificial Sequence: Synthetic oligonucleotide
  Sense strand starting at position 91 of SEQ ID NO: 1244041
gcaagcauuccuuaaagca

SEQ ID NO: 1460487 - RNA, 19 nt, Artificial Sequence
  Description of Artificial Sequence: Synthetic oligonucleotide
  Antisense strand to SEQ ID NO: 1460486
ugcuuuaaggaaugcuugc

SEQ ID NO: 1460488 - RNA, 19 nt, Artificial Sequence
  Description of Artificial Sequence: Synthetic oligonucleotide
  Sense strand starting at position 200 of SEQ ID NO: 1244041
ccaccuuuggccuggagaa

SEQ ID NO: 1460489 - RNA, 19 nt, Artificial Sequence
  Description of Artificial Sequence: Synthetic oligonucleotide
  Antisense strand to SEQ ID NO: 1460488
uucuccaggccaaaggugg

SEQ ID NO: 1460490 - RNA, 19 nt, Artificial Sequence
  Description of Artificial Sequence: Synthetic oligonucleotide
  Sense strand starting at position 201 of SEQ ID NO: 1244041
caccuuuggccuggagaau

SEQ ID NO: 1460491 - RNA, 19 nt, Artificial Sequence
  Description of Artificial Sequence: Synthetic oligonucleotide
  Antisense strand to SEQ ID NO: 1460490
auucuccaggccaaaggug

SEQ ID NO: 1460492 - RNA, 19 nt, Artificial Sequence
  Description of Artificial Sequence: Synthetic oligonucleotide
  Sense strand starting at position 202 of SEQ ID NO: 1244041
accuuuggccuggagaaug

SEQ ID NO: 1460493 - RNA, 19 nt, Artificial Sequence
  Description of Artificial Sequence: Synthetic oligonucleotide
  Antisense strand to SEQ ID NO: 1460492
cauucuccaggccaaaggu

SEQ ID NO: 1460494 - RNA, 19 nt, Artificial Sequence
  Description of Artificial Sequence: Synthetic oligonucleotide
  Sense strand starting at position 392 of SEQ ID NO: 1244041
ccagccucucccuagucau

SEQ ID NO: 1460495 - RNA, 19 nt, Artificial Sequence
  Description of Artificial Sequence: Synthetic oligonucleotide
  Antisense strand to SEQ ID NO: 1460494
augacuagggagaggcugg

SEQ ID NO: 1460496 - RNA, 19 nt, Artificial Sequence
  Description of Artificial Sequence: Synthetic oligonucleotide
  Sense strand starting at position 856 of SEQ ID NO: 1244041
accuaaucaggcugcuauu

SEQ ID NO: 1460497 - RNA, 19 nt, Artificial Sequence
  Description of Artificial Sequence: Synthetic oligonucleotide
  Antisense strand to SEQ ID NO: 1460496
aauagcagccugauuaggu

SEQ ID NO: 1460498 - RNA, 19 nt, Artificial Sequence
  Description of Artificial Sequence: Synthetic oligonucleotide
  Sense strand starting at position 892 of SEQ ID NO: 1244041
gcauuacaccucuagguca

SEQ ID NO: 1460499 - RNA, 19 nt, Artificial Sequence
  Description of Artificial Sequence: Synthetic oligonucleotide
  Antisense strand to SEQ ID NO: 1460498
ugaccuagagguguaaugc

SEQ ID NO: 1460500 - RNA, 19 nt, Artificial Sequence
  Description of Artificial Sequence: Synthetic oligonucleotide
  Sense strand starting at position 918 of SEQ ID NO: 1244041
gccacaguaggcuauaauu

SEQ ID NO: 1460501 - RNA, 19 nt, Artificial Sequence
  Description of Artificial Sequence: Synthetic oligonucleotide
  Antisense strand to SEQ ID NO: 1460500
aauuauagccuacuguggc

SEQ ID NO: 1460502 - RNA, 19 nt, Artificial Sequence
  Description of Artificial Sequence: Synthetic oligonucleotide
  Sense strand starting at position 1324 of SEQ ID NO: 1244041
caaagugcucagcacagaa

SEQ ID NO: 1460503 - RNA, 19 nt, Artificial Sequence
  Description of Artificial Sequence: Synthetic oligonucleotide
  Antisense strand to SEQ ID NO: 1460502
uucugugcugagcacuuug

SEQ ID NO: 1460504 - RNA, 19 nt, Artificial Sequence
  Description of Artificial Sequence: Synthetic oligonucleotide
  Sense strand starting at position 1339 of SEQ ID NO: 1244041
agaagaggugcuugauaua

SEQ ID NO: 1460505 - RNA, 19 nt, Artificial Sequence
  Description of Artificial Sequence: Synthetic oligonucleotide
  Antisense strand to SEQ ID NO: 1460504
uauaucaagcaccucuucu

SEQ ID NO: 1460506 - RNA, 19 nt, Artificial Sequence
  Description of Artificial Sequence: Synthetic oligonucleotide
  Sense strand starting at position 1344 of SEQ ID NO: 1244041
aggugcuugauauaugcuu

SEQ ID NO: 1460507 - RNA, 19 nt, Artificial Sequence
  Description of Artificial Sequence: Synthetic oligonucleotide
  Antisense strand to SEQ ID NO: 1460506
aagcauauaucaagcaccu

SEQ ID NO: 1460508 - RNA, 19 nt, Artificial Sequence
  Description of Artificial Sequence: Synthetic oligonucleotide
  Sense strand starting at position 1349 of SEQ ID NO: 1244041
cuugauauaugcuuauuga

SEQ ID NO: 1460509 - RNA, 19 nt, Artificial Sequence
  Description of Artificial Sequence: Synthetic oligonucleotide
  Antisense strand to SEQ ID NO: 1460508
ucaauaagcauauaucaag

SEQ ID NO: 1460510 - RNA, 19 nt, Artificial Sequence
  Description of Artificial Sequence: Synthetic oligonucleotide
  Sense strand starting at position 1352 of SEQ ID NO: 1244041
gauauaugcuuauugaagu

SEQ ID NO: 1460511 - RNA, 19 nt, Artificial Sequence
  Description of Artificial Sequence: Synthetic oligonucleotide
  Antisense strand to SEQ ID NO: 1460510
acuucaauaagcauauauc

SEQ ID NO: 1460512 - RNA, 19 nt, Artificial Sequence
  Description of Artificial Sequence: Synthetic oligonucleotide
  Sense strand starting at position 1505 of SEQ ID NO: 1244041
agagcuagccugugcauuu

SEQ ID NO: 1460513 - RNA, 19 nt, Artificial Sequence
  Description of Artificial Sequence: Synthetic oligonucleotide
  Antisense strand to SEQ ID NO: 1460512
aaaugcacaggcuagcucu

SEQ ID NO: 1460514 - RNA, 19 nt, Artificial Sequence
  Description of Artificial Sequence: Synthetic oligonucleotide
  Sense strand starting at position 1514 of SEQ ID NO: 1244041
cugugcauuugagaaagga

SEQ ID NO: 1460515 - RNA, 19 nt, Artificial Sequence
  Description of Artificial Sequence: Synthetic oligonucleotide
  Antisense strand to SEQ ID NO: 1460514
uccuuucucaaaugcacag

SEQ ID NO: 1460516 - RNA, 19 nt, Artificial Sequence
  Description of Artificial Sequence: Synthetic oligonucleotide
  Sense strand starting at position 1819 of SEQ ID NO: 1244041
cgucgauguccagcccaua

SEQ ID NO: 1460517 - RNA, 19 nt, Artificial Sequence
  Description of Artificial Sequence: Synthetic oligonucleotide
  Antisense strand to SEQ ID NO: 1460516
uaugggcuggacaucgacg

SEQ ID NO: 1460518 - RNA, 19 nt, Artificial Sequence
  Description of Artificial Sequence: Synthetic oligonucleotide
  Sense strand starting at position 2079 of SEQ ID NO: 1244041
ucccguguacucgcugaga

SEQ ID NO: 1460519 - RNA, 19 nt, Artificial Sequence
  Description of Artificial Sequence: Synthetic oligonucleotide
  Antisense strand to SEQ ID NO: 1460518
ucucagcgaguacacggga

SEQ ID NO: 1460520 - RNA, 19 nt, Artificial Sequence
  Description of Artificial Sequence: Synthetic oligonucleotide
  Sense strand starting at position 2274 of SEQ ID NO: 1244041
ugaggacacuccucucuuu

SEQ ID NO: 1460521 - RNA, 19 nt, Artificial Sequence
  Description of Artificial Sequence: Synthetic oligonucleotide
  Antisense strand to SEQ ID NO: 1460520
aaagagaggaguguccuca

SEQ ID NO: 1460522 - RNA, 19 nt, Artificial Sequence
  Description of Artificial Sequence: Synthetic oligonucleotide
  Sense strand starting at position 2450 of SEQ ID NO: 1244041
cgaggacugcccugcagaa

SEQ ID NO: 1460523 - RNA, 19 nt, Artificial Sequence
  Description of Artificial Sequence: Synthetic oligonucleotide
  Antisense strand to SEQ ID NO: 1460522
uucugcagggcaguccucg

SEQ ID NO: 1460524 - RNA, 19 nt, Artificial Sequence
  Description of Artificial Sequence: Synthetic oligonucleotide
  Sense strand starting at position 2584 of SEQ ID NO: 1244041
guguuuagugaguacagga

SEQ ID NO: 1460525 - RNA, 19 nt, Artificial Sequence
  Description of Artificial Sequence: Synthetic oligonucleotide
  Antisense strand to SEQ ID NO: 1460524
uccuguacucacuaaacac

SEQ ID NO: 1460526 - RNA, 19 nt, Artificial Sequence
  Description of Artificial Sequence: Synthetic oligonucleotide
  Sense strand starting at position 2642 of SEQ ID NO: 1244041
ucauaaguguagccuuaaa

SEQ ID NO: 1460527 - RNA, 19 nt, Artificial Sequence
  Description of Artificial Sequence: Synthetic oligonucleotide
  Antisense strand to SEQ ID NO: 1460526
uuuaaggcuacacuuauga

SEQ ID NO: 1460528 - RNA, 19 nt, Artificial Sequence
  Description of Artificial Sequence: Synthetic oligonucleotide
  Sense strand starting at position 2654 of SEQ ID NO: 1244041
ccuuaaauccugugugacc

SEQ ID NO: 1460529 - RNA, 19 nt, Artificial Sequence
  Description of Artificial Sequence: Synthetic oligonucleotide
  Antisense strand to SEQ ID NO: 1460528
ggucacacaggauuuaagg

SEQ ID NO: 1460530 - RNA, 19 nt, Artificial Sequence
  Description of Artificial Sequence: Synthetic oligonucleotide
  Sense strand starting at position 2655 of SEQ ID NO: 1244041
cuuaaauccugugugacca

SEQ ID NO: 1460531 - RNA, 19 nt, Artificial Sequence
  Description of Artificial Sequence: Synthetic oligonucleotide
  Antisense strand to SEQ ID NO: 1460530
uggucacacaggauuuaag

SEQ ID NO: 1460532 - RNA, 19 nt, Artificial Sequence
  Description of Artificial Sequence: Synthetic oligonucleotide
  Sense strand starting at position 2656 of SEQ ID NO: 1244041
uuaaauccugugugaccau

SEQ ID NO: 1460533 - RNA, 19 nt, Artificial Sequence
  Description of Artificial Sequence: Synthetic oligonucleotide
  Antisense strand to SEQ ID NO: 1460532
auggucacacaggauuuaa

SEQ ID NO: 1460534 - RNA, 19 nt, Artificial Sequence
  Description of Artificial Sequence: Synthetic oligonucleotide
  Sense strand starting at position 2663 of SEQ ID NO: 1244041
cugugugaccaucauauac

SEQ ID NO: 1460535 - RNA, 19 nt, Artificial Sequence
  Description of Artificial Sequence: Synthetic oligonucleotide
  Antisense strand to SEQ ID NO: 1460534
guauaugauggucacacag

SEQ ID NO: 1460536 - RNA, 19 nt, Artificial Sequence
  Description of Artificial Sequence: Synthetic oligonucleotide
  Sense strand starting at position 2724 of SEQ ID NO: 1244041
ggguaauaauguuuaccuu

SEQ ID NO: 1460537 - RNA, 19 nt, Artificial Sequence
  Description of Artificial Sequence: Synthetic oligonucleotide
  Antisense strand to SEQ ID NO: 1460536
aagguaaacauuauuaccc

SEQ ID NO: 1460538 - RNA, 19 nt, Artificial Sequence
  Description of Artificial Sequence: Synthetic oligonucleotide
  Sense strand starting at position 2725 of SEQ ID NO: 1244041
gguaauaauguuuaccuuu

SEQ ID NO: 1460539 - RNA, 19 nt, Artificial Sequence
  Description of Artificial Sequence: Synthetic oligonucleotide
  Antisense strand to SEQ ID NO: 1460538
aaagguaaacauuauuacc

SEQ ID NO: 1460540 - RNA, 19 nt, Artificial Sequence
  Description of Artificial Sequence: Synthetic oligonucleotide
  Sense strand starting at position 2747 of SEQ ID NO: 1244041
guguguugugagggauaaa

SEQ ID NO: 1460541 - RNA, 19 nt, Artificial Sequence
  Description of Artificial Sequence: Synthetic oligonucleotide
  Antisense strand to SEQ ID NO: 1460540
uuuaucccucacaacacac

SEQ ID NO: 1460542 - RNA, 19 nt, Artificial Sequence
  Description of Artificial Sequence: Synthetic oligonucleotide
  Sense strand starting at position 2748 of SEQ ID NO: 1244041
uguguugugagggauaaag

SEQ ID NO: 1460543 - RNA, 19 nt, Artificial Sequence
  Description of Artificial Sequence: Synthetic oligonucleotide
  Antisense strand to SEQ ID NO: 1460542
cuuuaucccucacaacaca

SEQ ID NO: 1460544 - RNA, 19 nt, Artificial Sequence
  Description of Artificial Sequence: Synthetic oligonucleotide
  Sense strand starting at position 3005 of SEQ ID NO: 1244041
gguguaagugcugccugua

SEQ ID NO: 1460545 - RNA, 19 nt, Artificial Sequence
  Description of Artificial Sequence: Synthetic oligonucleotide
  Antisense strand to SEQ ID NO: 1460544
uacaggcagcacuuacacc

SEQ ID NO: 1460546 - RNA, 19 nt, Artificial Sequence
  Description of Artificial Sequence: Synthetic oligonucleotide
  Sense strand starting at position 3006 of SEQ ID NO: 1244041
guguaagugcugccuguaa

SEQ ID NO: 1460547 - RNA, 19 nt, Artificial Sequence
  Description of Artificial Sequence: Synthetic oligonucleotide
  Antisense strand to SEQ ID NO: 1460546
uuacaggcagcacuuacac

SEQ ID NO: 1460548 - RNA, 19 nt, Artificial Sequence
  Description of Artificial Sequence: Synthetic oligonucleotide
  Sense strand starting at position 3278 of SEQ ID NO: 1244041
gacuaugugccaggcacaa

SEQ ID NO: 1460549 - RNA, 19 nt, Artificial Sequence
  Description of Artificial Sequence: Synthetic oligonucleotide
  Antisense strand to SEQ ID NO: 1460548
uugugccuggcacauaguc

SEQ ID NO: 1460550 - RNA, 19 nt, Artificial Sequence
  Description of Artificial Sequence: Synthetic oligonucleotide
  Sense strand starting at position 3363 of SEQ ID NO: 1244041
cauguuaccgaguggugaa

SEQ ID NO: 1460551 - RNA, 19 nt, Artificial Sequence
  Description of Artificial Sequence: Synthetic oligonucleotide
  Antisense strand to SEQ ID NO: 1460550
uucaccacucgguaacaug

SEQ ID NO: 1460552 - RNA, 19 nt, Artificial Sequence
  Description of Artificial Sequence: Synthetic oligonucleotide
  Sense strand starting at position 3370 of SEQ ID NO: 1244041
ccgaguggugaaugacaga

SEQ ID NO: 1460553 - RNA, 19 nt, Artificial Sequence
  Description of Artificial Sequence: Synthetic oligonucleotide
  Antisense strand to SEQ ID NO: 1460552
ucugucauucaccacucgg

SEQ ID NO: 1460554 - RNA, 19 nt, Artificial Sequence
  Description of Artificial Sequence: Synthetic oligonucleotide
  Sense strand starting at position 3726 of SEQ ID NO: 1244041
uagucagauggugauccau

SEQ ID NO: 1460555 - RNA, 19 nt, Artificial Sequence
  Description of Artificial Sequence: Synthetic oligonucleotide
  Antisense strand to SEQ ID NO: 1460554
auggaucaccaucugacua

SEQ ID NO: 1460556 - RNA, 19 nt, Artificial Sequence
  Description of Artificial Sequence: Synthetic oligonucleotide
  Sense strand starting at position 3728 of SEQ ID NO: 1244041
gucagauggugauccauuc

SEQ ID NO: 1460557 - RNA, 19 nt, Artificial Sequence
  Description of Artificial Sequence: Synthetic oligonucleotide
  Antisense strand to SEQ ID NO: 1460556
gaauggaucaccaucugac

SEQ ID NO: 1460558 - RNA, 19 nt, Artificial Sequence
  Description of Artificial Sequence: Synthetic oligonucleotide
  Sense strand starting at position 3776 of SEQ ID NO: 1244041
cgaggguauguguggaauu

SEQ ID NO: 1460559 - RNA, 19 nt, Artificial Sequence
  Description of Artificial Sequence: Synthetic oligonucleotide
  Antisense strand to SEQ ID NO: 1460558
aauuccacacauacccucg

SEQ ID NO: 1460560 - RNA, 19 nt, Artificial Sequence
  Description of Artificial Sequence: Synthetic oligonucleotide
  Sense strand starting at position 3806 of SEQ ID NO: 1244041
gguuaaaggccucagggau

SEQ ID NO: 1460561 - RNA, 19 nt, Artificial Sequence
  Description of Artificial Sequence: Synthetic oligonucleotide
  Antisense strand to SEQ ID NO: 1460560
aucccugaggccuuuaacc

SEQ ID NO: 1460562 - RNA, 19 nt, Artificial Sequence
  Description of Artificial Sequence: Synthetic oligonucleotide
  Sense strand starting at position 116 of SEQ ID NO: 1244042
agcacuuucccgugggaac

SEQ ID NO: 1460563 - RNA, 19 nt, Artificial Sequence
  Description of Artificial Sequence: Synthetic oligonucleotide
  Antisense strand to SEQ ID NO: 1460562
guucccacgggaaagugcu

SEQ ID NO: 1460564 - RNA, 19 nt, Artificial Sequence
  Description of Artificial Sequence: Synthetic oligonucleotide
  Sense strand starting at position 274 of SEQ ID NO: 1244042
cagggugucuuugugggaa

SEQ ID NO: 1460565 - RNA, 19 nt, Artificial Sequence
  Description of Artificial Sequence: Synthetic oligonucleotide
  Antisense strand to SEQ ID NO: 1460564
uucccacaaagacacccug

SEQ ID NO: 1460566 - RNA, 19 nt, Artificial Sequence
  Description of Artificial Sequence: Synthetic oligonucleotide
  Sense strand starting at position 277 of SEQ ID NO: 1244042
ggugucuuugugggaauaa

SEQ ID NO: 1460567 - RNA, 19 nt, Artificial Sequence
  Description of Artificial Sequence: Synthetic oligonucleotide
  Antisense strand to SEQ ID NO: 1460566
uuauucccacaaagacacc

SEQ ID NO: 1460568 - RNA, 19 nt, Artificial Sequence
  Description of Artificial Sequence: Synthetic oligonucleotide
  Sense strand starting at position 400 of SEQ ID NO: 1244042
aggcaaccugcucaaugau

SEQ ID NO: 1460569 - RNA, 19 nt, Artificial Sequence
  Description of Artificial Sequence: Synthetic oligonucleotide
  Antisense strand to SEQ ID NO: 1460568
aucauugagcagguugccu

SEQ ID NO: 1460570 - RNA, 19 nt, Artificial Sequence
  Description of Artificial Sequence: Synthetic oligonucleotide
  Sense strand starting at position 437 of SEQ ID NO: 1244042
cuuuaagaaucugaggaag

SEQ ID NO: 1460571 - RNA, 19 nt, Artificial Sequence
  Description of Artificial Sequence: Synthetic oligonucleotide
  Antisense strand to SEQ ID NO: 1460570
cuuccucagauucuuaaag

SEQ ID NO: 1460572 - RNA, 19 nt, Artificial Sequence
  Description of Artificial Sequence: Synthetic oligonucleotide
  Sense strand starting at position 514 of SEQ ID NO: 1244042
guaauaucaggagguuucu

SEQ ID NO: 1460573 - RNA, 19 nt, Artificial Sequence
  Description of Artificial Sequence: Synthetic oligonucleotide
  Antisense strand to SEQ ID NO: 1460572
agaaaccuccugauauuac

SEQ ID NO: 1460574 - RNA, 19 nt, Artificial Sequence
  Description of Artificial Sequence: Synthetic oligonucleotide
  Sense strand starting at position 590 of SEQ ID NO: 1244042
aucuguacccaucgauaau

SEQ ID NO: 1460575 - RNA, 19 nt, Artificial Sequence
  Description of Artificial Sequence: Synthetic oligonucleotide
  Antisense strand to SEQ ID NO: 1460574
auuaucgauggguacagau

SEQ ID NO: 1460576 - RNA, 19 nt, Artificial Sequence
  Description of Artificial Sequence: Synthetic oligonucleotide
  Sense strand starting at position 631 of SEQ ID NO: 1244042
aucuauaaugcaugccaga

SEQ ID NO: 1460577 - RNA, 19 nt, Artificial Sequence
  Description of Artificial Sequence: Synthetic oligonucleotide
  Antisense strand to SEQ ID NO: 1460576
ucuggcaugcauuauagau

SEQ ID NO: 1460578 - RNA, 19 nt, Artificial Sequence
  Description of Artificial Sequence: Synthetic oligonucleotide
  Sense strand starting at position 688 of SEQ ID NO: 1244042
acaagccugccucauagau

SEQ ID NO: 1460579 - RNA, 19 nt, Artificial Sequence
  Description of Artificial Sequence: Synthetic oligonucleotide
  Antisense strand to SEQ ID NO: 1460578
aucuaugaggcaggcuugu

SEQ ID NO: 1460580 - RNA, 19 nt, Artificial Sequence
  Description of Artificial Sequence: Synthetic oligonucleotide
  Sense strand starting at position 697 of SEQ ID NO: 1244042
ccucauagauggcauuuau

SEQ ID NO: 1460581 - RNA, 19 nt, Artificial Sequence
  Description of Artificial Sequence: Synthetic oligonucleotide
  Antisense strand to SEQ ID NO: 1460580
auaaaugccaucuaugagg

SEQ ID NO: 1460582 - RNA, 19 nt, Artificial Sequence
  Description of Artificial Sequence: Synthetic oligonucleotide
  Sense strand starting at position 816 of SEQ ID NO: 1244042
gcgagaugcagugacucau

SEQ ID NO: 1460583 - RNA, 19 nt, Artificial Sequence
  Description of Artificial Sequence: Synthetic oligonucleotide
  Antisense strand to SEQ ID NO: 1460582
augagucacugcaucucgc

SEQ ID NO: 1460584 - RNA, 19 nt, Artificial Sequence
  Description of Artificial Sequence: Synthetic oligonucleotide
  Sense strand starting at position 961 of SEQ ID NO: 1244042
auaauagcuuuguucuaga

SEQ ID NO: 1460585 - RNA, 19 nt, Artificial Sequence
  Description of Artificial Sequence: Synthetic oligonucleotide
  Antisense strand to SEQ ID NO: 1460584
ucuagaacaaagcuauuau

SEQ ID NO: 1460586 - RNA, 19 nt, Artificial Sequence
  Description of Artificial Sequence: Synthetic oligonucleotide
  Sense strand starting at position 966 of SEQ ID NO: 1244042
agcuuuguucuagagacuu

SEQ ID NO: 1460587 - RNA, 19 nt, Artificial Sequence
  Description of Artificial Sequence: Synthetic oligonucleotide
  Antisense strand to SEQ ID NO: 1460586
aagucucuagaacaaagcu

SEQ ID NO: 1460588 - RNA, 19 nt, Artificial Sequence
  Description of Artificial Sequence: Synthetic oligonucleotide
  Sense strand starting at position 977 of SEQ ID NO: 1244042
agagacuucuauccaguua

SEQ ID NO: 1460589 - RNA, 19 nt, Artificial Sequence
  Description of Artificial Sequence: Synthetic oligonucleotide
  Antisense strand to SEQ ID NO: 1460588
uaacuggauagaagucucu

SEQ ID NO: 1460590 - RNA, 19 nt, Artificial Sequence
  Description of Artificial Sequence: Synthetic oligonucleotide
  Sense strand starting at position 1452 of SEQ ID NO: 1244042
ggaggcugcauuugucaca

SEQ ID NO: 1460591 - RNA, 19 nt, Artificial Sequence
  Description of Artificial Sequence: Synthetic oligonucleotide
  Antisense strand to SEQ ID NO: 1460590
ugugacaaaugcagccucc

SEQ ID NO: 1460592 - RNA, 19 nt, Artificial Sequence
  Description of Artificial Sequence: Synthetic oligonucleotide
  Sense strand starting at position 1469 of SEQ ID NO: 1244042
cagugauccugggugaguc

SEQ ID NO: 1460593 - RNA, 19 nt, Artificial Sequence
  Description of Artificial Sequence: Synthetic oligonucleotide
  Antisense strand to SEQ ID NO: 1460592
gacucacccaggaucacug

SEQ ID NO: 1460594 - RNA, 19 nt, Artificial Sequence
  Description of Artificial Sequence: Synthetic oligonucleotide
  Sense strand starting at position 1482 of SEQ ID NO: 1244042
ugaguccugugcucuaaag

SEQ ID NO: 1460595 - RNA, 19 nt, Artificial Sequence
  Description of Artificial Sequence: Synthetic oligonucleotide
  Antisense strand to SEQ ID NO: 1460594
cuuuagagcacaggacuca

SEQ ID NO: 1460596 - RNA, 19 nt, Artificial Sequence
  Description of Artificial Sequence: Synthetic oligonucleotide
  Sense strand starting at position 1848 of SEQ ID NO: 1244042
uccuaaagccgugagcaaa

SEQ ID NO: 1460597 - RNA, 19 nt, Artificial Sequence
  Description of Artificial Sequence: Synthetic oligonucleotide
  Antisense strand to SEQ ID NO: 1460596
uuugcucacggcuuuagga

SEQ ID NO: 1460598 - RNA, 19 nt, Artificial Sequence
  Description of Artificial Sequence: Synthetic oligonucleotide
  Sense strand starting at position 1867 of SEQ ID NO: 1244042
cgcuacucgcugguguuaa

SEQ ID NO: 1460599 - RNA, 19 nt, Artificial Sequence
  Description of Artificial Sequence: Synthetic oligonucleotide
  Antisense strand to SEQ ID NO: 1460598
uuaacaccagcgaguagcg

SEQ ID NO: 1460600 - RNA, 19 nt, Artificial Sequence
  Description of Artificial Sequence: Synthetic oligonucleotide
  Sense strand starting at position 2046 of SEQ ID NO: 1244042
auauaacagcucugaaguu

SEQ ID NO: 1460601 - RNA, 19 nt, Artificial Sequence
  Description of Artificial Sequence: Synthetic oligonucleotide
  Antisense strand to SEQ ID NO: 1460600
aacuucagagcuguuauau

SEQ ID NO: 1460602 - RNA, 19 nt, Artificial Sequence
  Description of Artificial Sequence: Synthetic oligonucleotide
  Sense strand starting at position 2146 of SEQ ID NO: 1244042
cuugaaggcuccuccacaa

SEQ ID NO: 1460603 - RNA, 19 nt, Artificial Sequence
  Description of Artificial Sequence: Synthetic oligonucleotide
  Antisense strand to SEQ ID NO: 1460602
uuguggaggagccuucaag

SEQ ID NO: 1460604 - RNA, 19 nt, Artificial Sequence
  Description of Artificial Sequence: Synthetic oligonucleotide
  Sense strand starting at position 2254 of SEQ ID NO: 1244042
gguugagucccggaguagu

SEQ ID NO: 1460605 - RNA, 19 nt, Artificial Sequence
  Description of Artificial Sequence: Synthetic oligonucleotide
  Antisense strand to SEQ ID NO: 1460604
acuacuccgggacucaacc

SEQ ID NO: 1460606 - RNA, 19 nt, Artificial Sequence
  Description of Artificial Sequence: Synthetic oligonucleotide
  Sense strand starting at position 2264 of SEQ ID NO: 1244042
cggaguaguccuggacuca

SEQ ID NO: 1460607 - RNA, 19 nt, Artificial Sequence
  Description of Artificial Sequence: Synthetic oligonucleotide
  Antisense strand to SEQ ID NO: 1460606
ugaguccaggacuacuccg

SEQ ID NO: 1460608 - RNA, 19 nt, Artificial Sequence
  Description of Artificial Sequence: Synthetic oligonucleotide
  Sense strand starting at position 2265 of SEQ ID NO: 1244042
ggaguaguccuggacucag

SEQ ID NO: 1460609 - RNA, 19 nt, Artificial Sequence
  Description of Artificial Sequence: Synthetic oligonucleotide
  Antisense strand to SEQ ID NO: 1460608
cugaguccaggacuacucc

SEQ ID NO: 1460610 - RNA, 19 nt, Artificial Sequence
  Description of Artificial Sequence: Synthetic oligonucleotide
  Sense strand starting at position 2496 of SEQ ID NO: 1244042
ccagcucuggguuaagaca

SEQ ID NO: 1460611 - RNA, 19 nt, Artificial Sequence
  Description of Artificial Sequence: Synthetic oligonucleotide
  Antisense strand to SEQ ID NO: 1460610
ugucuuaacccagagcugg

SEQ ID NO: 1460612 - RNA, 19 nt, Artificial Sequence
  Description of Artificial Sequence: Synthetic oligonucleotide
  Sense strand starting at position 2543 of SEQ ID NO: 1244042
cccagagucugucucuaag

SEQ ID NO: 1460613 - RNA, 19 nt, Artificial Sequence
  Description of Artificial Sequence: Synthetic oligonucleotide
  Antisense strand to SEQ ID NO: 1460612
cuuagagacagacucuggg

SEQ ID NO: 1460614 - RNA, 19 nt, Artificial Sequence
  Description of Artificial Sequence: Synthetic oligonucleotide
  Sense strand starting at position 2545 of SEQ ID NO: 1244042
cagagucugucucuaagaa

SEQ ID NO: 1460615 - RNA, 19 nt, Artificial Sequence
  Description of Artificial Sequence: Synthetic oligonucleotide
  Antisense strand to SEQ ID NO: 1460614
uucuuagagacagacucug

SEQ ID NO: 1460616 - RNA, 19 nt, Artificial Sequence
  Description of Artificial Sequence: Synthetic oligonucleotide
  Sense strand starting at position 2546 of SEQ ID NO: 1244042
agagucugucucuaagaau

SEQ ID NO: 1460617 - RNA, 19 nt, Artificial Sequence
  Description of Artificial Sequence: Synthetic oligonucleotide
  Antisense strand to SEQ ID NO: 1460616
auucuuagagacagacucu

SEQ ID NO: 1460618 - RNA, 19 nt, Artificial Sequence
  Description of Artificial Sequence: Synthetic oligonucleotide
  Sense strand starting at position 2557 of SEQ ID NO: 1244042
cuaagaauacugggcgcau

SEQ ID NO: 1460619 - RNA, 19 nt, Artificial Sequence
  Description of Artificial Sequence: Synthetic oligonucleotide
  Antisense strand to SEQ ID NO: 1460618
augcgcccaguauucuuag

SEQ ID NO: 1460620 - RNA, 19 nt, Artificial Sequence
  Description of Artificial Sequence: Synthetic oligonucleotide
  Sense strand starting at position 2558 of SEQ ID NO: 1244042
uaagaauacugggcgcauu

SEQ ID NO: 1460621 - RNA, 19 nt, Artificial Sequence
  Description of Artificial Sequence: Synthetic oligonucleotide
  Antisense strand to SEQ ID NO: 1460620
aaugcgcccaguauucuua

SEQ ID NO: 1460622 - RNA, 19 nt, Artificial Sequence
  Description of Artificial Sequence: Synthetic oligonucleotide
  Sense strand starting at position 2579 of SEQ ID NO: 1244042
cugucucacaggugaaagu

SEQ ID NO: 1460623 - RNA, 19 nt, Artificial Sequence
  Description of Artificial Sequence: Synthetic oligonucleotide
  Antisense strand to SEQ ID NO: 1460622
acuuucaccugugagacag

SEQ ID NO: 1460624 - RNA, 19 nt, Artificial Sequence
  Description of Artificial Sequence: Synthetic oligonucleotide
  Sense strand starting at position 2714 of SEQ ID NO: 1244042
ccaguaguuaugcaggaga

SEQ ID NO: 1460625 - RNA, 19 nt, Artificial Sequence
  Description of Artificial Sequence: Synthetic oligonucleotide
  Antisense strand to SEQ ID NO: 1460624
ucuccugcauaacuacugg

SEQ ID NO: 1460626 - RNA, 19 nt, Artificial Sequence
  Description of Artificial Sequence: Synthetic oligonucleotide
  Sense strand starting at position 2716 of SEQ ID NO: 1244042
aguaguuaugcaggagaca

SEQ ID NO: 1460627 - RNA, 19 nt, Artificial Sequence
  Description of Artificial Sequence: Synthetic oligonucleotide
  Antisense strand to SEQ ID NO: 1460626
ugucuccugcauaacuacu

SEQ ID NO: 1460628 - RNA, 19 nt, Artificial Sequence
  Description of Artificial Sequence: Synthetic oligonucleotide
  Sense strand starting at position 2717 of SEQ ID NO: 1244042
guaguuaugcaggagacag

SEQ ID NO: 1460629 - RNA, 19 nt, Artificial Sequence
  Description of Artificial Sequence: Synthetic oligonucleotide
  Antisense strand to SEQ ID NO: 1460628
cugucuccugcauaacuac

SEQ ID NO: 1460630 - RNA, 19 nt, Artificial Sequence
  Description of Artificial Sequence: Synthetic oligonucleotide
  Sense strand starting at position 2784 of SEQ ID NO: 1244042
gagacuuggccuggaagga

SEQ ID NO: 1460631 - RNA, 19 nt, Artificial Sequence
  Description of Artificial Sequence: Synthetic oligonucleotide
  Antisense strand to SEQ ID NO: 1460630
uccuuccaggccaagucuc

SEQ ID NO: 1460632 - RNA, 19 nt, Artificial Sequence
  Description of Artificial Sequence: Synthetic oligonucleotide
  Sense strand starting at position 2966 of SEQ ID NO: 1244042
ugagaauuauaguaggaac

SEQ ID NO: 1460633 - RNA, 19 nt, Artificial Sequence
  Description of Artificial Sequence: Synthetic oligonucleotide
  Antisense strand to SEQ ID NO: 1460632
guuccuacuauaauucuca

SEQ ID NO: 1460634 - RNA, 19 nt, Artificial Sequence
  Description of Artificial Sequence: Synthetic oligonucleotide
  Sense strand starting at position 2969 of SEQ ID NO: 1244042
gaauuauaguaggaacuag

SEQ ID NO: 1460635 - RNA, 19 nt, Artificial Sequence
  Description of Artificial Sequence: Synthetic oligonucleotide
  Antisense strand to SEQ ID NO: 1460634
cuaguuccuacuauaauuc

SEQ ID NO: 1460636 - RNA, 19 nt, Artificial Sequence
  Description of Artificial Sequence: Synthetic oligonucleotide
  Sense strand starting at position 2993 of SEQ ID NO: 1244042
agaaauauuugaggaggcu

SEQ ID NO: 1460637 - RNA, 19 nt, Artificial Sequence
  Description of Artificial Sequence: Synthetic oligonucleotide
  Antisense strand to SEQ ID NO: 1460636
agccuccucaaauauuucu

SEQ ID NO: 1460638 - RNA, 19 nt, Artificial Sequence
  Description of Artificial Sequence: Synthetic oligonucleotide
  Sense strand starting at position 3158 of SEQ ID NO: 1244042
ggcaacaugguaggauuaa

SEQ ID NO: 1460639 - RNA, 19 nt, Artificial Sequence
  Description of Artificial Sequence: Synthetic oligonucleotide
  Antisense strand to SEQ ID NO: 1460638
uuaauccuaccauguugcc

SEQ ID NO: 1460640 - RNA, 19 nt, Artificial Sequence
  Description of Artificial Sequence: Synthetic oligonucleotide
  Sense strand starting at position 3436 of SEQ ID NO: 1244042
cuguucuugagcuaggcau

SEQ ID NO: 1460641 - RNA, 19 nt, Artificial Sequence
  Description of Artificial Sequence: Synthetic oligonucleotide
  Antisense strand to SEQ ID NO: 1460640
augccuagcucaagaacag

SEQ ID NO: 1460642 - RNA, 19 nt, Artificial Sequence
  Description of Artificial Sequence: Synthetic oligonucleotide
  Sense strand starting at position 233 of SEQ ID NO: 1244043
gacuguacccucuggaacu

SEQ ID NO: 1460643 - RNA, 19 nt, Artificial Sequence
  Description of Artificial Sequence: Synthetic oligonucleotide
  Antisense strand to SEQ ID NO: 1460642
aguuccagaggguacaguc

SEQ ID NO: 1460644 - RNA, 19 nt, Artificial Sequence
  Description of Artificial Sequence: Synthetic oligonucleotide
  Sense strand starting at position 543 of SEQ ID NO: 1244043
ggugaugagugugcacaga

SEQ ID NO: 1460645 - RNA, 19 nt, Artificial Sequence
  Description of Artificial Sequence: Synthetic oligonucleotide
  Antisense strand to SEQ ID NO: 1460644
ucugugcacacucaucacc

SEQ ID NO: 1460646 - RNA, 19 nt, Artificial Sequence
  Description of Artificial Sequence: Synthetic oligonucleotide
  Sense strand starting at position 572 of SEQ ID NO: 1244043
uaugcaggcucuguucuaa

SEQ ID NO: 1460647 - RNA, 19 nt, Artificial Sequence
  Description of Artificial Sequence: Synthetic oligonucleotide
  Antisense strand to SEQ ID NO: 1460646
uuagaacagagccugcaua

SEQ ID NO: 1460648 - RNA, 19 nt, Artificial Sequence
  Description of Artificial Sequence: Synthetic oligonucleotide
  Sense strand starting at position 590 of SEQ ID NO: 1244043
agugcuuuccauggaugga

SEQ ID NO: 1460649 - RNA, 19 nt, Artificial Sequence
  Description of Artificial Sequence: Synthetic oligonucleotide
  Antisense strand to SEQ ID NO: 1460648
uccauccauggaaagcacu

SEQ ID NO: 1460650 - RNA, 19 nt, Artificial Sequence
  Description of Artificial Sequence: Synthetic oligonucleotide
  Sense strand starting at position 672 of SEQ ID NO: 1244043
gacaguuauugacugagac

SEQ ID NO: 1460651 - RNA, 19 nt, Artificial Sequence
  Description of Artificial Sequence: Synthetic oligonucleotide
  Antisense strand to SEQ ID NO: 1460650
gucucagucaauaacuguc

SEQ ID NO: 1460652 - RNA, 19 nt, Artificial Sequence
  Description of Artificial Sequence: Synthetic oligonucleotide
  Sense strand starting at position 721 of SEQ ID NO: 1244043
guugcacugucauuaauau

SEQ ID NO: 1460653 - RNA, 19 nt, Artificial Sequence
  Description of Artificial Sequence: Synthetic oligonucleotide
  Antisense strand to SEQ ID NO: 1460652
auauuaaugacagugcaac

SEQ ID NO: 1460654 - RNA, 19 nt, Artificial Sequence
  Description of Artificial Sequence: Synthetic oligonucleotide
  Sense strand starting at position 786 of SEQ ID NO: 1244043
uauugauuccacgacugac

SEQ ID NO: 1460655 - RNA, 19 nt, Artificial Sequence
  Description of Artificial Sequence: Synthetic oligonucleotide
  Antisense strand to SEQ ID NO: 1460654
gucagucguggaaucaaua

SEQ ID NO: 1460656 - RNA, 19 nt, Artificial Sequence
  Description of Artificial Sequence: Synthetic oligonucleotide
  Sense strand starting at position 847 of SEQ ID NO: 1244043
acuacaugugcauaauaag

SEQ ID NO: 1460657 - RNA, 19 nt, Artificial Sequence
  Description of Artificial Sequence: Synthetic oligonucleotide
  Antisense strand to SEQ ID NO: 1460656
cuuauuaugcacauguagu

SEQ ID NO: 1460658 - RNA, 19 nt, Artificial Sequence
  Description of Artificial Sequence: Synthetic oligonucleotide
  Sense strand starting at position 1557 of SEQ ID NO: 1244043
augugaaauugacaggaga

SEQ ID NO: 1460659 - RNA, 19 nt, Artificial Sequence
  Description of Artificial Sequence: Synthetic oligonucleotide
  Antisense strand to SEQ ID NO: 1460658
ucuccugucaauuucacau

SEQ ID NO: 1460660 - RNA, 19 nt, Artificial Sequence
  Description of Artificial Sequence: Synthetic oligonucleotide
  Sense strand starting at position 1609 of SEQ ID NO: 1244043
uugagugaaauccgagcuu

SEQ ID NO: 1460661 - RNA, 19 nt, Artificial Sequence
  Description of Artificial Sequence: Synthetic oligonucleotide
  Antisense strand to SEQ ID NO: 1460660
aagcucggauuucacucaa

SEQ ID NO: 1460662 - RNA, 19 nt, Artificial Sequence
  Description of Artificial Sequence: Synthetic oligonucleotide
  Sense strand starting at position 1780 of SEQ ID NO: 1244043
uuugcuuggcgaugaggau

SEQ ID NO: 1460663 - RNA, 19 nt, Artificial Sequence
  Description of Artificial Sequence: Synthetic oligonucleotide
  Antisense strand to SEQ ID NO: 1460662
auccucaucgccaagcaaa

SEQ ID NO: 1460664 - RNA, 19 nt, Artificial Sequence
  Description of Artificial Sequence: Synthetic oligonucleotide
  Sense strand starting at position 1836 of SEQ ID NO: 1244043
agcuguucuccauauugga

SEQ ID NO: 1460665 - RNA, 19 nt, Artificial Sequence
  Description of Artificial Sequence: Synthetic oligonucleotide
  Antisense strand to SEQ ID NO: 1460664
uccaauauggagaacagcu

SEQ ID NO: 1460666 - RNA, 19 nt, Artificial Sequence
  Description of Artificial Sequence: Synthetic oligonucleotide
  Sense strand starting at position 1904 of SEQ ID NO: 1244043
cagggaugcucagucugaa

SEQ ID NO: 1460667 - RNA, 19 nt, Artificial Sequence
  Description of Artificial Sequence: Synthetic oligonucleotide
  Antisense strand to SEQ ID NO: 1460666
uucagacugagcaucccug

SEQ ID NO: 1460668 - RNA, 19 nt, Artificial Sequence
  Description of Artificial Sequence: Synthetic oligonucleotide
  Sense strand starting at position 2208 of SEQ ID NO: 1244043
ggaaucagcacacgacauu

SEQ ID NO: 1460669 - RNA, 19 nt, Artificial Sequence
  Description of Artificial Sequence: Synthetic oligonucleotide
  Antisense strand to SEQ ID NO: 1460668
aaugucgugugcugauucc

SEQ ID NO: 1460670 - RNA, 19 nt, Artificial Sequence
  Description of Artificial Sequence: Synthetic oligonucleotide
  Sense strand starting at position 2548 of SEQ ID NO: 1244043
uccaaagaauguuugauuc

SEQ ID NO: 1460671 - RNA, 19 nt, Artificial Sequence
  Description of Artificial Sequence: Synthetic oligonucleotide
  Antisense strand to SEQ ID NO: 1460670
gaaucaaacauucuuugga

SEQ ID NO: 1460672 - RNA, 19 nt, Artificial Sequence
  Description of Artificial Sequence: Synthetic oligonucleotide
  Sense strand starting at position 2576 of SEQ ID NO: 1244043
guuguucuauuagcaauua

SEQ ID NO: 1460673 - RNA, 19 nt, Artificial Sequence
  Description of Artificial Sequence: Synthetic oligonucleotide
  Antisense strand to SEQ ID NO: 1460672
uaauugcuaauagaacaac

SEQ ID NO: 1460674 - RNA, 19 nt, Artificial Sequence
  Description of Artificial Sequence: Synthetic oligonucleotide
  Sense strand starting at position 2721 of SEQ ID NO: 1244043
aggacuugugcaugaccuu

SEQ ID NO: 1460675 - RNA, 19 nt, Artificial Sequence
  Description of Artificial Sequence: Synthetic oligonucleotide
  Antisense strand to SEQ ID NO: 1460674
aaggucaugcacaaguccu

SEQ ID NO: 1460676 - RNA, 19 nt, Artificial Sequence
  Description of Artificial Sequence: Synthetic oligonucleotide
  Sense strand starting at position 2722 of SEQ ID NO: 1244043
ggacuugugcaugaccuua

SEQ ID NO: 1460677 - RNA, 19 nt, Artificial Sequence
  Description of Artificial Sequence: Synthetic oligonucleotide
  Antisense strand to SEQ ID NO: 1460676
uaaggucaugcacaagucc

SEQ ID NO: 1460678 - RNA, 19 nt, Artificial Sequence
  Description of Artificial Sequence: Synthetic oligonucleotide
  Sense strand starting at position 2727 of SEQ ID NO: 1244043
ugugcaugaccuuauucuu

SEQ ID NO: 1460679 - RNA, 19 nt, Artificial Sequence
  Description of Artificial Sequence: Synthetic oligonucleotide
  Antisense strand to SEQ ID NO: 1460678
aagaauaaggucaugcaca

SEQ ID NO: 1460680 - RNA, 19 nt, Artificial Sequence
  Description of Artificial Sequence: Synthetic oligonucleotide
  Sense strand starting at position 3043 of SEQ ID NO: 1244043
gccuuacucuuccuuggua

SEQ ID NO: 1460681 - RNA, 19 nt, Artificial Sequence
  Description of Artificial Sequence: Synthetic oligonucleotide
  Antisense strand to SEQ ID NO: 1460680
uaccaaggaagaguaaggc

SEQ ID NO: 1460682 - RNA, 19 nt, Artificial Sequence
  Description of Artificial Sequence: Synthetic oligonucleotide
  Sense strand starting at position 3045 of SEQ ID NO: 1244043
cuuacucuuccuugguaga

SEQ ID NO: 1460683 - RNA, 19 nt, Artificial Sequence
  Description of Artificial Sequence: Synthetic oligonucleotide
  Antisense strand to SEQ ID NO: 1460682
ucuaccaaggaagaguaag

SEQ ID NO: 1460684 - RNA, 19 nt, Artificial Sequence
  Description of Artificial Sequence: Synthetic oligonucleotide
  Sense strand starting at position 3046 of SEQ ID NO: 1244043
uuacucuuccuugguagaa

SEQ ID NO: 1460685 - RNA, 19 nt, Artificial Sequence
  Description of Artificial Sequence: Synthetic oligonucleotide
  Antisense strand to SEQ ID NO: 1460684
uucuaccaaggaagaguaa

SEQ ID NO: 1460686 - RNA, 19 nt, Artificial Sequence
  Description of Artificial Sequence: Synthetic oligonucleotide
  Sense strand starting at position 3050 of SEQ ID NO: 1244043
ucuuccuugguagaaugua

SEQ ID NO: 1460687 - RNA, 19 nt, Artificial Sequence
  Description of Artificial Sequence: Synthetic oligonucleotide
  Antisense strand to SEQ ID NO: 1460686
uacauucuaccaaggaaga

SEQ ID NO: 1460688 - RNA, 19 nt, Artificial Sequence
  Description of Artificial Sequence: Synthetic oligonucleotide
  Sense strand starting at position 3232 of SEQ ID NO: 1244043
ucagaaacccgucagcaaa

SEQ ID NO: 1460689 - RNA, 19 nt, Artificial Sequence
  Description of Artificial Sequence: Synthetic oligonucleotide
  Antisense strand to SEQ ID NO: 1460688
uuugcugacggguuucuga

SEQ ID NO: 1460690 - RNA, 19 nt, Artificial Sequence
  Description of Artificial Sequence: Synthetic oligonucleotide
  Sense strand starting at position 3235 of SEQ ID NO: 1244043
gaaacccgucagcaaauua

SEQ ID NO: 1460691 - RNA, 19 nt, Artificial Sequence
  Description of Artificial Sequence: Synthetic oligonucleotide
  Antisense strand to SEQ ID NO: 1460690
uaauuugcugacggguuuc

SEQ ID NO: 1460692 - RNA, 19 nt, Artificial Sequence
  Description of Artificial Sequence: Synthetic oligonucleotide
  Sense strand starting at position 3312 of SEQ ID NO: 1244043
agucuuacuuggguugcua

SEQ ID NO: 1460693 - RNA, 19 nt, Artificial Sequence
  Description of Artificial Sequence: Synthetic oligonucleotide
  Antisense strand to SEQ ID NO: 1460692
uagcaacccaaguaagacu

SEQ ID NO: 1460694 - RNA, 19 nt, Artificial Sequence
  Description of Artificial Sequence: Synthetic oligonucleotide
  Sense strand starting at position 3314 of SEQ ID NO: 1244043
ucuuacuuggguugcuaau

SEQ ID NO: 1460695 - RNA, 19 nt, Artificial Sequence
  Description of Artificial Sequence: Synthetic oligonucleotide
  Antisense strand to SEQ ID NO: 1460694
auuagcaacccaaguaaga

SEQ ID NO: 1460696 - RNA, 19 nt, Artificial Sequence
  Description of Artificial Sequence: Synthetic oligonucleotide
  Sense strand starting at position 3316 of SEQ ID NO: 1244043
uuacuuggguugcuaauua

SEQ ID NO: 1460697 - RNA, 19 nt, Artificial Sequence
  Description of Artificial Sequence: Synthetic oligonucleotide
  Antisense strand to SEQ ID NO: 1460696
uaauuagcaacccaaguaa

SEQ ID NO: 1460698 - RNA, 19 nt, Artificial Sequence
  Description of Artificial Sequence: Synthetic oligonucleotide
  Sense strand starting at position 3320 of SEQ ID NO: 1244043
uuggguugcuaauuaaagu

SEQ ID NO: 1460699 - RNA, 19 nt, Artificial Sequence
  Description of Artificial Sequence: Synthetic oligonucleotide
  Antisense strand to SEQ ID NO: 1460698
acuuuaauuagcaacccaa

SEQ ID NO: 1460700 - RNA, 19 nt, Artificial Sequence
  Description of Artificial Sequence: Synthetic oligonucleotide
  Sense strand starting at position 3358 of SEQ ID NO: 1244043
uccuuaaggugucuagcaa

SEQ ID NO: 1460701 - RNA, 19 nt, Artificial Sequence
  Description of Artificial Sequence: Synthetic oligonucleotide
  Antisense strand to SEQ ID NO: 1460700
uugcuagacaccuuaagga

SEQ ID NO: 1460702 - RNA, 19 nt, Artificial Sequence
  Description of Artificial Sequence: Synthetic oligonucleotide
  Sense strand starting at position 3359 of SEQ ID NO: 1244043
ccuuaaggugucuagcaaa

SEQ ID NO: 1460703 - RNA, 19 nt, Artificial Sequence
  Description of Artificial Sequence: Synthetic oligonucleotide
  Antisense strand to SEQ ID NO: 1460702
uuugcuagacaccuuaagg

SEQ ID NO: 1460704 - RNA, 19 nt, Artificial Sequence
  Description of Artificial Sequence: Synthetic oligonucleotide
  Sense strand starting at position 3418 of SEQ ID NO: 1244043
gauuacuagccuugagacc

SEQ ID NO: 1460705 - RNA, 19 nt, Artificial Sequence
  Description of Artificial Sequence: Synthetic oligonucleotide
  Antisense strand to SEQ ID NO: 1460704
ggucucaaggcuaguaauc

SEQ ID NO: 1460706 - RNA, 19 nt, Artificial Sequence
  Description of Artificial Sequence: Synthetic oligonucleotide
  Sense strand starting at position 3448 of SEQ ID NO: 1244043
aucugacuucuuugagccu

SEQ ID NO: 1460707 - RNA, 19 nt, Artificial Sequence
  Description of Artificial Sequence: Synthetic oligonucleotide
  Antisense strand to SEQ ID NO: 1460706
aggcucaaagaagucagau

SEQ ID NO: 1460708 - RNA, 19 nt, Artificial Sequence
  Description of Artificial Sequence: Synthetic oligonucleotide
  Sense strand starting at position 3451 of SEQ ID NO: 1244043
ugacuucuuugagccucaa

SEQ ID NO: 1460709 - RNA, 19 nt, Artificial Sequence
  Description of Artificial Sequence: Synthetic oligonucleotide
  Antisense strand to SEQ ID NO: 1460708
uugaggcucaaagaaguca

SEQ ID NO: 1460710 - RNA, 19 nt, Artificial Sequence
  Description of Artificial Sequence: Synthetic oligonucleotide
  Sense strand starting at position 3479 of SEQ ID NO: 1244043
cugucaaauggaugguuau

SEQ ID NO: 1460711 - RNA, 19 nt, Artificial Sequence
  Description of Artificial Sequence: Synthetic oligonucleotide
  Antisense strand to SEQ ID NO: 1460710
auaaccauccauuugacag

SEQ ID NO: 1460712 - RNA, 19 nt, Artificial Sequence
  Description of Artificial Sequence: Synthetic oligonucleotide
  Sense strand starting at position 3489 of SEQ ID NO: 1244043
gaugguuaucacugguccu

SEQ ID NO: 1460713 - RNA, 19 nt, Artificial Sequence
  Description of Artificial Sequence: Synthetic oligonucleotide
  Antisense strand to SEQ ID NO: 1460712
aggaccagugauaaccauc

SEQ ID NO: 1460714 - RNA, 19 nt, Artificial Sequence
  Description of Artificial Sequence: Synthetic oligonucleotide
  Sense strand starting at position 3492 of SEQ ID NO: 1244043
gguuaucacugguccucaa

SEQ ID NO: 1460715 - RNA, 19 nt, Artificial Sequence
  Description of Artificial Sequence: Synthetic oligonucleotide
  Antisense strand to SEQ ID NO: 1460714
uugaggaccagugauaacc

SEQ ID NO: 1460716 - RNA, 19 nt, Artificial Sequence
  Description of Artificial Sequence: Synthetic oligonucleotide
  Sense strand starting at position 3510 of SEQ ID NO: 1244043
agcuuugaggugcaucaga

SEQ ID NO: 1460717 - RNA, 19 nt, Artificial Sequence
  Description of Artificial Sequence: Synthetic oligonucleotide
  Antisense strand to SEQ ID NO: 1460716
ucugaugcaccucaaagcu

SEQ ID NO: 1460718 - RNA, 19 nt, Artificial Sequence
  Description of Artificial Sequence: Synthetic oligonucleotide
  Sense strand starting at position 3628 of SEQ ID NO: 1244043
gcagaaucuguggaccuca

SEQ ID NO: 1460719 - RNA, 19 nt, Artificial Sequence
  Description of Artificial Sequence: Synthetic oligonucleotide
  Antisense strand to SEQ ID NO: 1460718
ugagguccacagauucugc

SEQ ID NO: 1460720 - RNA, 19 nt, Artificial Sequence
  Description of Artificial Sequence: Synthetic oligonucleotide
  Sense strand starting at position 3639 of SEQ ID NO: 1244043
ggaccucacucagagauac

SEQ ID NO: 1460721 - RNA, 19 nt, Artificial Sequence
  Description of Artificial Sequence: Synthetic oligonucleotide
  Antisense strand to SEQ ID NO: 1460720
guaucucugagugaggucc

SEQ ID NO: 1460722 - RNA, 19 nt, Artificial Sequence
  Description of Artificial Sequence: Synthetic oligonucleotide
  Sense strand starting at position 127 of SEQ ID NO: 1244044
agcucuauuugccuagcaa

SEQ ID NO: 1460723 - RNA, 19 nt, Artificial Sequence
  Description of Artificial Sequence: Synthetic oligonucleotide
  Antisense strand to SEQ ID NO: 1460722
uugcuaggcaaauagagcu

SEQ ID NO: 1460724 - RNA, 19 nt, Artificial Sequence
  Description of Artificial Sequence: Synthetic oligonucleotide
  Sense strand starting at position 128 of SEQ ID NO: 1244044
gcucuauuugccuagcaac

SEQ ID NO: 1460725 - RNA, 19 nt, Artificial Sequence
  Description of Artificial Sequence: Synthetic oligonucleotide
  Antisense strand to SEQ ID NO: 1460724
guugcuaggcaaauagagc

SEQ ID NO: 1460726 - RNA, 19 nt, Artificial Sequence
  Description of Artificial Sequence: Synthetic oligonucleotide
  Sense strand starting at position 206 of SEQ ID NO: 1244044
gcggguuccaguggaauuu

SEQ ID NO: 1460727 - RNA, 19 nt, Artificial Sequence
  Description of Artificial Sequence: Synthetic oligonucleotide
  Antisense strand to SEQ ID NO: 1460726
aaauuccacuggaacccgc

SEQ ID NO: 1460728 - RNA, 19 nt, Artificial Sequence
  Description of Artificial Sequence: Synthetic oligonucleotide
  Sense strand starting at position 504 of SEQ ID NO: 1244044
uuggucagaacuugaguga

SEQ ID NO: 1460729 - RNA, 19 nt, Artificial Sequence
  Description of Artificial Sequence: Synthetic oligonucleotide
  Antisense strand to SEQ ID NO: 1460728
ucacucaaguucugaccaa

SEQ ID NO: 1460730 - RNA, 19 nt, Artificial Sequence
  Description of Artificial Sequence: Synthetic oligonucleotide
  Sense strand starting at position 505 of SEQ ID NO: 1244044
uggucagaacuugagugau

SEQ ID NO: 1460731 - RNA, 19 nt, Artificial Sequence
  Description of Artificial Sequence: Synthetic oligonucleotide
  Antisense strand to SEQ ID NO: 1460730
aucacucaaguucugacca

SEQ ID NO: 1460732 - RNA, 19 nt, Artificial Sequence
  Description of Artificial Sequence: Synthetic oligonucleotide
  Sense strand starting at position 511 of SEQ ID NO: 1244044
gaacuugagugauuggucu

SEQ ID NO: 1460733 - RNA, 19 nt, Artificial Sequence
  Description of Artificial Sequence: Synthetic oligonucleotide
  Antisense strand to SEQ ID NO: 1460732
agaccaaucacucaaguuc

SEQ ID NO: 1460734 - RNA, 19 nt, Artificial Sequence
  Description of Artificial Sequence: Synthetic oligonucleotide
  Sense strand starting at position 577 of SEQ ID NO: 1244044
gcaugaaguucucugggau

SEQ ID NO: 1460735 - RNA, 19 nt, Artificial Sequence
  Description of Artificial Sequence: Synthetic oligonucleotide
  Antisense strand to SEQ ID NO: 1460734
aucccagagaacuucaugc

SEQ ID NO: 1460736 - RNA, 19 nt, Artificial Sequence
  Description of Artificial Sequence: Synthetic oligonucleotide
  Sense strand starting at position 578 of SEQ ID NO: 1244044
caugaaguucucugggauc

SEQ ID NO: 1460737 - RNA, 19 nt, Artificial Sequence
  Description of Artificial Sequence: Synthetic oligonucleotide
  Antisense strand to SEQ ID NO: 1460736
gaucccagagaacuucaug

SEQ ID NO: 1460738 - RNA, 19 nt, Artificial Sequence
  Description of Artificial Sequence: Synthetic oligonucleotide
  Sense strand starting at position 580 of SEQ ID NO: 1244044
ugaaguucucugggaucug

SEQ ID NO: 1460739 - RNA, 19 nt, Artificial Sequence
  Description of Artificial Sequence: Synthetic oligonucleotide
  Antisense strand to SEQ ID NO: 1460738
cagaucccagagaacuuca

SEQ ID NO: 1460740 - RNA, 19 nt, Artificial Sequence
  Description of Artificial Sequence: Synthetic oligonucleotide
  Sense strand starting at position 589 of SEQ ID NO: 1244044
cugggaucuggcuaucaau

SEQ ID NO: 1460741 - RNA, 19 nt, Artificial Sequence
  Description of Artificial Sequence: Synthetic oligonucleotide
  Antisense strand to SEQ ID NO: 1460740
auugauagccagaucccag

SEQ ID NO: 1460742 - RNA, 19 nt, Artificial Sequence
  Description of Artificial Sequence: Synthetic oligonucleotide
  Sense strand starting at position 674 of SEQ ID NO: 1244044
cacguuaaccuuugagaag

SEQ ID NO: 1460743 - RNA, 19 nt, Artificial Sequence
  Description of Artificial Sequence: Synthetic oligonucleotide
  Antisense strand to SEQ ID NO: 1460742
cuucucaaagguuaacgug

SEQ ID NO: 1460744 - RNA, 19 nt, Artificial Sequence
  Description of Artificial Sequence: Synthetic oligonucleotide
  Sense strand starting at position 716 of SEQ ID NO: 1244044
caacuaacccguuagagau

SEQ ID NO: 1460745 - RNA, 19 nt, Artificial Sequence
  Description of Artificial Sequence: Synthetic oligonucleotide
  Antisense strand to SEQ ID NO: 1460744
aucucuaacggguuaguug

SEQ ID NO: 1460746 - RNA, 19 nt, Artificial Sequence
  Description of Artificial Sequence: Synthetic oligonucleotide
  Sense strand starting at position 729 of SEQ ID NO: 1244044
agagaugcuccuggauaac

SEQ ID NO: 1460747 - RNA, 19 nt, Artificial Sequence
  Description of Artificial Sequence: Synthetic oligonucleotide
  Antisense strand to SEQ ID NO: 1460746
guuauccaggagcaucucu

SEQ ID NO: 1460748 - RNA, 19 nt, Artificial Sequence
  Description of Artificial Sequence: Synthetic oligonucleotide
  Sense strand starting at position 793 of SEQ ID NO: 1244044
gccagaaucagagaugcug

SEQ ID NO: 1460749 - RNA, 19 nt, Artificial Sequence
  Description of Artificial Sequence: Synthetic oligonucleotide
  Antisense strand to SEQ ID NO: 1460748
cagcaucucugauucuggc

SEQ ID NO: 1460750 - RNA, 19 nt, Artificial Sequence
  Description of Artificial Sequence: Synthetic oligonucleotide
  Sense strand starting at position 831 of SEQ ID NO: 1244044
agagcauauccuggaggga

SEQ ID NO: 1460751 - RNA, 19 nt, Artificial Sequence
  Description of Artificial Sequence: Synthetic oligonucleotide
  Antisense strand to SEQ ID NO: 1460750
ucccuccaggauaugcucu

SEQ ID NO: 1460752 - RNA, 19 nt, Artificial Sequence
  Description of Artificial Sequence: Synthetic oligonucleotide
  Sense strand starting at position 959 of SEQ ID NO: 1244044
aaagaagauggaugcguaa

SEQ ID NO: 1460753 - RNA, 19 nt, Artificial Sequence
  Description of Artificial Sequence: Synthetic oligonucleotide
  Antisense strand to SEQ ID NO: 1460752
uuacgcauccaucuucuuu

SEQ ID NO: 1460754 - RNA, 19 nt, Artificial Sequence
  Description of Artificial Sequence: Synthetic oligonucleotide
  Sense strand starting at position 961 of SEQ ID NO: 1244044
agaagauggaugcguaacu

SEQ ID NO: 1460755 - RNA, 19 nt, Artificial Sequence
  Description of Artificial Sequence: Synthetic oligonucleotide
  Antisense strand to SEQ ID NO: 1460754
aguuacgcauccaucuucu

SEQ ID NO: 1460756 - RNA, 19 nt, Artificial Sequence
  Description of Artificial Sequence: Synthetic oligonucleotide
  Sense strand starting at position 962 of SEQ ID NO: 1244044
gaagauggaugcguaacuu

SEQ ID NO: 1460757 - RNA, 19 nt, Artificial Sequence
  Description of Artificial Sequence: Synthetic oligonucleotide
  Antisense strand to SEQ ID NO: 1460756
aaguuacgcauccaucuuc

SEQ ID NO: 1460758 - RNA, 19 nt, Artificial Sequence
  Description of Artificial Sequence: Synthetic oligonucleotide
  Sense strand starting at position 1008 of SEQ ID NO: 1244044
ggcuguuguacugcuaagu

SEQ ID NO: 1460759 - RNA, 19 nt, Artificial Sequence
  Description of Artificial Sequence: Synthetic oligonucleotide
  Antisense strand to SEQ ID NO: 1460758
acuuagcaguacaacagcc

SEQ ID NO: 1460760 - RNA, 19 nt, Artificial Sequence
  Description of Artificial Sequence: Synthetic oligonucleotide
  Sense strand starting at position 1009 of SEQ ID NO: 1244044
gcuguuguacugcuaagua

SEQ ID NO: 1460761 - RNA, 19 nt, Artificial Sequence
  Description of Artificial Sequence: Synthetic oligonucleotide
  Antisense strand to SEQ ID NO: 1460760
uacuuagcaguacaacagc

SEQ ID NO: 1460762 - RNA, 19 nt, Artificial Sequence
  Description of Artificial Sequence: Synthetic oligonucleotide
  Sense strand starting at position 1240 of SEQ ID NO: 1244044
gccagauagguggguagaa

SEQ ID NO: 1460763 - RNA, 19 nt, Artificial Sequence
  Description of Artificial Sequence: Synthetic oligonucleotide
  Antisense strand to SEQ ID NO: 1460762
uucuacccaccuaucuggc

SEQ ID NO: 1460764 - RNA, 19 nt, Artificial Sequence
  Description of Artificial Sequence: Synthetic oligonucleotide
  Sense strand starting at position 1241 of SEQ ID NO: 1244044
ccagauagguggguagaau

SEQ ID NO: 1460765 - RNA, 19 nt, Artificial Sequence
  Description of Artificial Sequence: Synthetic oligonucleotide
  Antisense strand to SEQ ID NO: 1460764
auucuacccaccuaucugg

SEQ ID NO: 1460766 - RNA, 19 nt, Artificial Sequence
  Description of Artificial Sequence: Synthetic oligonucleotide
  Sense strand starting at position 1249 of SEQ ID NO: 1244044
guggguagaauccaaguuu

SEQ ID NO: 1460767 - RNA, 19 nt, Artificial Sequence
  Description of Artificial Sequence: Synthetic oligonucleotide
  Antisense strand to SEQ ID NO: 1460766
aaacuuggauucuacccac

SEQ ID NO: 1460768 - RNA, 19 nt, Artificial Sequence
  Description of Artificial Sequence: Synthetic oligonucleotide
  Sense strand starting at position 1260 of SEQ ID NO: 1244044
ccaaguuucuuacuuggaa

SEQ ID NO: 1460769 - RNA, 19 nt, Artificial Sequence
  Description of Artificial Sequence: Synthetic oligonucleotide
  Antisense strand to SEQ ID NO: 1460768
uuccaaguaagaaacuugg

SEQ ID NO: 1460770 - RNA, 19 nt, Artificial Sequence
  Description of Artificial Sequence: Synthetic oligonucleotide
  Sense strand starting at position 1503 of SEQ ID NO: 1244044
augccuuggaucugugaaa

SEQ ID NO: 1460771 - RNA, 19 nt, Artificial Sequence
  Description of Artificial Sequence: Synthetic oligonucleotide
  Antisense strand to SEQ ID NO: 1460770
uuucacagauccaaggcau

SEQ ID NO: 1460772 - RNA, 19 nt, Artificial Sequence
  Description of Artificial Sequence: Synthetic oligonucleotide
  Sense strand starting at position 1975 of SEQ ID NO: 1244044
cuggacuuuccagaugcaa

SEQ ID NO: 1460773 - RNA, 19 nt, Artificial Sequence
  Description of Artificial Sequence: Synthetic oligonucleotide
  Antisense strand to SEQ ID NO: 1460772
uugcaucuggaaaguccag

SEQ ID NO: 1460774 - RNA, 19 nt, Artificial Sequence
  Description of Artificial Sequence: Synthetic oligonucleotide
  Sense strand starting at position 1977 of SEQ ID NO: 1244044
ggacuuuccagaugcaaug

SEQ ID NO: 1460775 - RNA, 19 nt, Artificial Sequence
  Description of Artificial Sequence: Synthetic oligonucleotide
  Antisense strand to SEQ ID NO: 1460774
cauugcaucuggaaagucc

SEQ ID NO: 1460776 - RNA, 19 nt, Artificial Sequence
  Description of Artificial Sequence: Synthetic oligonucleotide
  Sense strand starting at position 2139 of SEQ ID NO: 1244044
cagcuuuguccacuguguu

SEQ ID NO: 1460777 - RNA, 19 nt, Artificial Sequence
  Description of Artificial Sequence: Synthetic oligonucleotide
  Antisense strand to SEQ ID NO: 1460776
aacacaguggacaaagcug

SEQ ID NO: 1460778 - RNA, 19 nt, Artificial Sequence
  Description of Artificial Sequence: Synthetic oligonucleotide
  Sense strand starting at position 2439 of SEQ ID NO: 1244044
augugaggucuccacugaa

SEQ ID NO: 1460779 - RNA, 19 nt, Artificial Sequence
  Description of Artificial Sequence: Synthetic oligonucleotide
  Antisense strand to SEQ ID NO: 1460778
uucaguggagaccucacau

SEQ ID NO: 1460780 - RNA, 19 nt, Artificial Sequence
  Description of Artificial Sequence: Synthetic oligonucleotide
  Sense strand starting at position 2442 of SEQ ID NO: 1244044
ugaggucuccacugaaagg

SEQ ID NO: 1460781 - RNA, 19 nt, Artificial Sequence
  Description of Artificial Sequence: Synthetic oligonucleotide
  Antisense strand to SEQ ID NO: 1460780
ccuuucaguggagaccuca

SEQ ID NO: 1460782 - RNA, 19 nt, Artificial Sequence
  Description of Artificial Sequence: Synthetic oligonucleotide
  Sense strand starting at position 2470 of SEQ ID NO: 1244044
aucacaaagucauuaguua

SEQ ID NO: 1460783 - RNA, 19 nt, Artificial Sequence
  Description of Artificial Sequence: Synthetic oligonucleotide
  Antisense strand to SEQ ID NO: 1460782
uaacuaaugacuuugugau

SEQ ID NO: 1460784 - RNA, 19 nt, Artificial Sequence
  Description of Artificial Sequence: Synthetic oligonucleotide
  Sense strand starting at position 2481 of SEQ ID NO: 1244044
auuaguuacaaguggagaa

SEQ ID NO: 1460785 - RNA, 19 nt, Artificial Sequence
  Description of Artificial Sequence: Synthetic oligonucleotide
  Antisense strand to SEQ ID NO: 1460784
uucuccacuuguaacuaau

SEQ ID NO: 1460786 - RNA, 19 nt, Artificial Sequence
  Description of Artificial Sequence: Synthetic oligonucleotide
  Sense strand starting at position 2482 of SEQ ID NO: 1244044
uuaguuacaaguggagaaa

SEQ ID NO: 1460787 - RNA, 19 nt, Artificial Sequence
  Description of Artificial Sequence: Synthetic oligonucleotide
  Antisense strand to SEQ ID NO: 1460786
uuucuccacuuguaacuaa

SEQ ID NO: 1460788 - RNA, 19 nt, Artificial Sequence
  Description of Artificial Sequence: Synthetic oligonucleotide
  Sense strand starting at position 2639 of SEQ ID NO: 1244044
auauuucuguguuugcuuu

SEQ ID NO: 1460789 - RNA, 19 nt, Artificial Sequence
  Description of Artificial Sequence: Synthetic oligonucleotide
  Antisense strand to SEQ ID NO: 1460788
aaagcaaacacagaaauau

SEQ ID NO: 1460790 - RNA, 19 nt, Artificial Sequence
  Description of Artificial Sequence: Synthetic oligonucleotide
  Sense strand starting at position 2827 of SEQ ID NO: 1244044
aguacaaucgucuaaggau

SEQ ID NO: 1460791 - RNA, 19 nt, Artificial Sequence
  Description of Artificial Sequence: Synthetic oligonucleotide
  Antisense strand to SEQ ID NO: 1460790
auccuuagacgauuguacu

SEQ ID NO: 1460792 - RNA, 19 nt, Artificial Sequence
  Description of Artificial Sequence: Synthetic oligonucleotide
  Sense strand starting at position 3028 of SEQ ID NO: 1244044
ggacgaaguaaaugcucaa

SEQ ID NO: 1460793 - RNA, 19 nt, Artificial Sequence
  Description of Artificial Sequence: Synthetic oligonucleotide
  Antisense strand to SEQ ID NO: 1460792
uugagcauuuacuucgucc

SEQ ID NO: 1460794 - RNA, 19 nt, Artificial Sequence
  Description of Artificial Sequence: Synthetic oligonucleotide
  Sense strand starting at position 3031 of SEQ ID NO: 1244044
cgaaguaaaugcucaauga

SEQ ID NO: 1460795 - RNA, 19 nt, Artificial Sequence
  Description of Artificial Sequence: Synthetic oligonucleotide
  Antisense strand to SEQ ID NO: 1460794
ucauugagcauuuacuucg

SEQ ID NO: 1460796 - RNA, 19 nt, Artificial Sequence
  Description of Artificial Sequence: Synthetic oligonucleotide
  Sense strand starting at position 3272 of SEQ ID NO: 1244044
gugagauauuagcucacac

SEQ ID NO: 1460797 - RNA, 19 nt, Artificial Sequence
  Description of Artificial Sequence: Synthetic oligonucleotide
  Antisense strand to SEQ ID NO: 1460796
gugugagcuaauaucucac

SEQ ID NO: 1460798 - RNA, 19 nt, Artificial Sequence
  Description of Artificial Sequence: Synthetic oligonucleotide
  Sense strand starting at position 3466 of SEQ ID NO: 1244044
ccagucguggugguguaua

SEQ ID NO: 1460799 - RNA, 19 nt, Artificial Sequence
  Description of Artificial Sequence: Synthetic oligonucleotide
  Antisense strand to SEQ ID NO: 1460798
uauacaccaccacgacugg

SEQ ID NO: 1460800 - RNA, 19 nt, Artificial Sequence
  Description of Artificial Sequence: Synthetic oligonucleotide
  Sense strand starting at position 3757 of SEQ ID NO: 1244044
aaagaauugccauaugguc

SEQ ID NO: 1460801 - RNA, 19 nt, Artificial Sequence
  Description of Artificial Sequence: Synthetic oligonucleotide
  Antisense strand to SEQ ID NO: 1460800
gaccauauggcaauucuuu

SEQ ID NO: 1460802 - RNA, 19 nt, Artificial Sequence
  Description of Artificial Sequence: Synthetic oligonucleotide
  Sense strand starting at position 22 of SEQ ID NO: 1244045
cgucccuuucccggaagaa

SEQ ID NO: 1460803 - RNA, 19 nt, Artificial Sequence
  Description of Artificial Sequence: Synthetic oligonucleotide
  Antisense strand to SEQ ID NO: 1460802
uucuuccgggaaagggacg

SEQ ID NO: 1460804 - RNA, 19 nt, Artificial Sequence
  Description of Artificial Sequence: Synthetic oligonucleotide
  Sense strand starting at position 23 of SEQ ID NO: 1244045
gucccuuucccggaagaaa

SEQ ID NO: 1460805 - RNA, 19 nt, Artificial Sequence
  Description of Artificial Sequence: Synthetic oligonucleotide
  Antisense strand to SEQ ID NO: 1460804
uuucuuccgggaaagggac

SEQ ID NO: 1460806 - RNA, 19 nt, Artificial Sequence
  Description of Artificial Sequence: Synthetic oligonucleotide
  Sense strand starting at position 269 of SEQ ID NO: 1244045
gaagcaauacguucgcuuu

SEQ ID NO: 1460807 - RNA, 19 nt, Artificial Sequence
  Description of Artificial Sequence: Synthetic oligonucleotide
  Antisense strand to SEQ ID NO: 1460806
aaagcgaacguauugcuuc

SEQ ID NO: 1460808 - RNA, 19 nt, Artificial Sequence
  Description of Artificial Sequence: Synthetic oligonucleotide
  Sense strand starting at position 404 of SEQ ID NO: 1244045
gcaacauacucugcugaca

SEQ ID NO: 1460809 - RNA, 19 nt, Artificial Sequence
  Description of Artificial Sequence: Synthetic oligonucleotide
  Antisense strand to SEQ ID NO: 1460808
ugucagcagaguauguugc

SEQ ID NO: 1460810 - RNA, 19 nt, Artificial Sequence
  Description of Artificial Sequence: Synthetic oligonucleotide
  Sense strand starting at position 493 of SEQ ID NO: 1244045
uguuguucucuggaccuga

SEQ ID NO: 1460811 - RNA, 19 nt, Artificial Sequence
  Description of Artificial Sequence: Synthetic oligonucleotide
  Antisense strand to SEQ ID NO: 1460810
ucagguccagagaacaaca

SEQ ID NO: 1460812 - RNA, 19 nt, Artificial Sequence
  Description of Artificial Sequence: Synthetic oligonucleotide
  Sense strand starting at position 663 of SEQ ID NO: 1244045
uugcuacuuucucugugaa

SEQ ID NO: 1460813 - RNA, 19 nt, Artificial Sequence
  Description of Artificial Sequence: Synthetic oligonucleotide
  Antisense strand to SEQ ID NO: 1460812
uucacagagaaaguagcaa

SEQ ID NO: 1460814 - RNA, 19 nt, Artificial Sequence
  Description of Artificial Sequence: Synthetic oligonucleotide
  Sense strand starting at position 664 of SEQ ID NO: 1244045
ugcuacuuucucugugaag

SEQ ID NO: 1460815 - RNA, 19 nt, Artificial Sequence
  Description of Artificial Sequence: Synthetic oligonucleotide
  Antisense strand to SEQ ID NO: 1460814
cuucacagagaaaguagca

SEQ ID NO: 1460816 - RNA, 19 nt, Artificial Sequence
  Description of Artificial Sequence: Synthetic oligonucleotide
  Sense strand starting at position 665 of SEQ ID NO: 1244045
gcuacuuucucugugaagu

SEQ ID NO: 1460817 - RNA, 19 nt, Artificial Sequence
  Description of Artificial Sequence: Synthetic oligonucleotide
  Antisense strand to SEQ ID NO: 1460816
acuucacagagaaaguagc

SEQ ID NO: 1460818 - RNA, 19 nt, Artificial Sequence
  Description of Artificial Sequence: Synthetic oligonucleotide
  Sense strand starting at position 666 of SEQ ID NO: 1244045
cuacuuucucugugaagua

SEQ ID NO: 1460819 - RNA, 19 nt, Artificial Sequence
  Description of Artificial Sequence: Synthetic oligonucleotide
  Antisense strand to SEQ ID NO: 1460818
uacuucacagagaaaguag

SEQ ID NO: 1460820 - RNA, 19 nt, Artificial Sequence
  Description of Artificial Sequence: Synthetic oligonucleotide
  Sense strand starting at position 676 of SEQ ID NO: 1244045
ugugaaguaggucaagagu

SEQ ID NO: 1460821 - RNA, 19 nt, Artificial Sequence
  Description of Artificial Sequence: Synthetic oligonucleotide
  Antisense strand to SEQ ID NO: 1460820
acucuugaccuacuucaca

SEQ ID NO: 1460822 - RNA, 19 nt, Artificial Sequence
  Description of Artificial Sequence: Synthetic oligonucleotide
  Sense strand starting at position 722 of SEQ ID NO: 1244045
gauuucuuccggcaguguu

SEQ ID NO: 1460823 - RNA, 19 nt, Artificial Sequence
  Description of Artificial Sequence: Synthetic oligonucleotide
  Antisense strand to SEQ ID NO: 1460822
aacacugccggaagaaauc

SEQ ID NO: 1460824 - RNA, 19 nt, Artificial Sequence
  Description of Artificial Sequence: Synthetic oligonucleotide
  Sense strand starting at position 741 of SEQ ID NO: 1244045
uuaccagaauguuuaggaa

SEQ ID NO: 1460825 - RNA, 19 nt, Artificial Sequence
  Description of Artificial Sequence: Synthetic oligonucleotide
  Antisense strand to SEQ ID NO: 1460824
uuccuaaacauucugguaa

SEQ ID NO: 1460826 - RNA, 19 nt, Artificial Sequence
  Description of Artificial Sequence: Synthetic oligonucleotide
  Sense strand starting at position 745 of SEQ ID NO: 1244045
cagaauguuuaggaauacu

SEQ ID NO: 1460827 - RNA, 19 nt, Artificial Sequence
  Description of Artificial Sequence: Synthetic oligonucleotide
  Antisense strand to SEQ ID NO: 1460826
aguauuccuaaacauucug

SEQ ID NO: 1460828 - RNA, 19 nt, Artificial Sequence
  Description of Artificial Sequence: Synthetic oligonucleotide
  Sense strand starting at position 769 of SEQ ID NO: 1244045
cauugaagguaacuguuaa

SEQ ID NO: 1460829 - RNA, 19 nt, Artificial Sequence
  Description of Artificial Sequence: Synthetic oligonucleotide
  Antisense strand to SEQ ID NO: 1460828
uuaacaguuaccuucaaug

SEQ ID NO: 1460830 - RNA, 19 nt, Artificial Sequence
  Description of Artificial Sequence: Synthetic oligonucleotide
  Sense strand starting at position 773 of SEQ ID NO: 1244045
gaagguaacuguuaauuua

SEQ ID NO: 1460831 - RNA, 19 nt, Artificial Sequence
  Description of Artificial Sequence: Synthetic oligonucleotide
  Antisense strand to SEQ ID NO: 1460830
uaaauuaacaguuaccuuc

SEQ ID NO: 1460832 - RNA, 19 nt, Artificial Sequence
  Description of Artificial Sequence: Synthetic oligonucleotide
  Sense strand starting at position 2564 of SEQ ID NO: 1244045
gagggaucguuugugguug

SEQ ID NO: 1460833 - RNA, 19 nt, Artificial Sequence
  Description of Artificial Sequence: Synthetic oligonucleotide
  Antisense strand to SEQ ID NO: 1460832
caaccacaaacgaucccuc

SEQ ID NO: 1460834 - RNA, 19 nt, Artificial Sequence
  Description of Artificial Sequence: Synthetic oligonucleotide
  Sense strand starting at position 2581 of SEQ ID NO: 1244045
ugucauuguagugguugaa

SEQ ID NO: 1460835 - RNA, 19 nt, Artificial Sequence
  Description of Artificial Sequence: Synthetic oligonucleotide
  Antisense strand to SEQ ID NO: 1460834
uucaaccacuacaaugaca

SEQ ID NO: 1460836 - RNA, 19 nt, Artificial Sequence
  Description of Artificial Sequence: Synthetic oligonucleotide
  Sense strand starting at position 2609 of SEQ ID NO: 1244045
gaacuugucucaccggaaa

SEQ ID NO: 1460837 - RNA, 19 nt, Artificial Sequence
  Description of Artificial Sequence: Synthetic oligonucleotide
  Antisense strand to SEQ ID NO: 1460836
uuuccggugagacaaguuc

SEQ ID NO: 1460838 - RNA, 19 nt, Artificial Sequence
  Description of Artificial Sequence: Synthetic oligonucleotide
  Sense strand starting at position 2637 of SEQ ID NO: 1244045
gggugaaagacagguuuga

SEQ ID NO: 1460839 - RNA, 19 nt, Artificial Sequence
  Description of Artificial Sequence: Synthetic oligonucleotide
  Antisense strand to SEQ ID NO: 1460838
ucaaaccugucuuucaccc

SEQ ID NO: 1460840 - RNA, 19 nt, Artificial Sequence
  Description of Artificial Sequence: Synthetic oligonucleotide
  Sense strand starting at position 2730 of SEQ ID NO: 1244045
cggaguugauagaauugga

SEQ ID NO: 1460841 - RNA, 19 nt, Artificial Sequence
  Description of Artificial Sequence: Synthetic oligonucleotide
  Antisense strand to SEQ ID NO: 1460840
uccaauucuaucaacuccg

SEQ ID NO: 1460842 - RNA, 19 nt, Artificial Sequence
  Description of Artificial Sequence: Synthetic oligonucleotide
  Sense strand starting at position 2847 of SEQ ID NO: 1244045
ucccgaaaucgagaugggu

SEQ ID NO: 1460843 - RNA, 19 nt, Artificial Sequence
  Description of Artificial Sequence: Synthetic oligonucleotide
  Antisense strand to SEQ ID NO: 1460842
acccaucucgauuucggga

SEQ ID NO: 1460844 - RNA, 19 nt, Artificial Sequence
  Description of Artificial Sequence: Synthetic oligonucleotide
  Sense strand starting at position 2855 of SEQ ID NO: 1244045
ucgagauggguuggcuaaa

SEQ ID NO: 1460845 - RNA, 19 nt, Artificial Sequence
  Description of Artificial Sequence: Synthetic oligonucleotide
  Antisense strand to SEQ ID NO: 1460844
uuuagccaacccaucucga

SEQ ID NO: 1460846 - RNA, 19 nt, Artificial Sequence
  Description of Artificial Sequence: Synthetic oligonucleotide
  Sense strand starting at position 2888 of SEQ ID NO: 1244045
guagucagucaacaaacau

SEQ ID NO: 1460847 - RNA, 19 nt, Artificial Sequence
  Description of Artificial Sequence: Synthetic oligonucleotide
  Antisense strand to SEQ ID NO: 1460846
auguuuguugacugacuac

SEQ ID NO: 1460848 - RNA, 19 nt, Artificial Sequence
  Description of Artificial Sequence: Synthetic oligonucleotide
  Sense strand starting at position 2992 of SEQ ID NO: 1244045
accugagugcugcagaaug

SEQ ID NO: 1460849 - RNA, 19 nt, Artificial Sequence
  Description of Artificial Sequence: Synthetic oligonucleotide
  Antisense strand to SEQ ID NO: 1460848
cauucugcagcacucaggu

SEQ ID NO: 1460850 - RNA, 19 nt, Artificial Sequence
  Description of Artificial Sequence: Synthetic oligonucleotide
  Sense strand starting at position 2994 of SEQ ID NO: 1244045
cugagugcugcagaauguu

SEQ ID NO: 1460851 - RNA, 19 nt, Artificial Sequence
  Description of Artificial Sequence: Synthetic oligonucleotide
  Antisense strand to SEQ ID NO: 1460850
aacauucugcagcacucag

SEQ ID NO: 1460852 - RNA, 19 nt, Artificial Sequence
  Description of Artificial Sequence: Synthetic oligonucleotide
  Sense strand starting at position 3003 of SEQ ID NO: 1244045
gcagaauguugaccuugaa

SEQ ID NO: 1460853 - RNA, 19 nt, Artificial Sequence
  Description of Artificial Sequence: Synthetic oligonucleotide
  Antisense strand to SEQ ID NO: 1460852
uucaaggucaacauucugc

SEQ ID NO: 1460854 - RNA, 19 nt, Artificial Sequence
  Description of Artificial Sequence: Synthetic oligonucleotide
  Sense strand starting at position 3006 of SEQ ID NO: 1244045
gaauguugaccuugaacug

SEQ ID NO: 1460855 - RNA, 19 nt, Artificial Sequence
  Description of Artificial Sequence: Synthetic oligonucleotide
  Antisense strand to SEQ ID NO: 1460854
caguucaaggucaacauuc

SEQ ID NO: 1460856 - RNA, 19 nt, Artificial Sequence
  Description of Artificial Sequence: Synthetic oligonucleotide
  Sense strand starting at position 3040 of SEQ ID NO: 1244045
aagaaagcuugguuucuuu

SEQ ID NO: 1460857 - RNA, 19 nt, Artificial Sequence
  Description of Artificial Sequence: Synthetic oligonucleotide
  Antisense strand to SEQ ID NO: 1460856
aaagaaaccaagcuuucuu

SEQ ID NO: 1460858 - RNA, 19 nt, Artificial Sequence
  Description of Artificial Sequence: Synthetic oligonucleotide
  Sense strand starting at position 3181 of SEQ ID NO: 1244045
aggcgaauggcucacuuga

SEQ ID NO: 1460859 - RNA, 19 nt, Artificial Sequence
  Description of Artificial Sequence: Synthetic oligonucleotide
  Antisense strand to SEQ ID NO: 1460858
ucaagugagccauucgccu

SEQ ID NO: 1460860 - RNA, 19 nt, Artificial Sequence
  Description of Artificial Sequence: Synthetic oligonucleotide
  Sense strand starting at position 3436 of SEQ ID NO: 1244045
cuuuaauacgccuguauac

SEQ ID NO: 1460861 - RNA, 19 nt, Artificial Sequence
  Description of Artificial Sequence: Synthetic oligonucleotide
  Antisense strand to SEQ ID NO: 1460860
guauacaggcguauuaaag

SEQ ID NO: 1460862 - RNA, 19 nt, Artificial Sequence
  Description of Artificial Sequence: Synthetic oligonucleotide
  Sense strand starting at position 3446 of SEQ ID NO: 1244045
ccuguauaccucugucuac

SEQ ID NO: 1460863 - RNA, 19 nt, Artificial Sequence
  Description of Artificial Sequence: Synthetic oligonucleotide
  Antisense strand to SEQ ID NO: 1460862
guagacagagguauacagg

SEQ ID NO: 1460864 - RNA, 19 nt, Artificial Sequence
  Description of Artificial Sequence: Synthetic oligonucleotide
  Sense strand starting at position 3626 of SEQ ID NO: 1244045
gcuccaagagccugaagau

SEQ ID NO: 1460865 - RNA, 19 nt, Artificial Sequence
  Description of Artificial Sequence: Synthetic oligonucleotide
  Antisense strand to SEQ ID NO: 1460864
aucuucaggcucuuggagc

SEQ ID NO: 1460866 - RNA, 19 nt, Artificial Sequence
  Description of Artificial Sequence: Synthetic oligonucleotide
  Sense strand starting at position 3652 of SEQ ID NO: 1244045
accugucuaugcuuugaau

SEQ ID NO: 1460867 - RNA, 19 nt, Artificial Sequence
  Description of Artificial Sequence: Synthetic oligonucleotide
  Antisense strand to SEQ ID NO: 1460866
auucaaagcauagacaggu

SEQ ID NO: 1460868 - RNA, 19 nt, Artificial Sequence
  Description of Artificial Sequence: Synthetic oligonucleotide
  Sense strand starting at position 3725 of SEQ ID NO: 1244045
acauuacagucauuaugca

SEQ ID NO: 1460869 - RNA, 19 nt, Artificial Sequence
  Description of Artificial Sequence: Synthetic oligonucleotide
  Antisense strand to SEQ ID NO: 1460868
ugcauaaugacuguaaugu

SEQ ID NO: 1460870 - RNA, 19 nt, Artificial Sequence
  Description of Artificial Sequence: Synthetic oligonucleotide
  Sense strand starting at position 3828 of SEQ ID NO: 1244045
ccaucuguucucuggccau

SEQ ID NO: 1460871 - RNA, 19 nt, Artificial Sequence
  Description of Artificial Sequence: Synthetic oligonucleotide
  Antisense strand to SEQ ID NO: 1460870
auggccagagaacagaugg

SEQ ID NO: 1460872 - RNA, 19 nt, Artificial Sequence
  Description of Artificial Sequence: Synthetic oligonucleotide
  Sense strand starting at position 3854 of SEQ ID NO: 1244045
gugacacaagcagauuauu

SEQ ID NO: 1460873 - RNA, 19 nt, Artificial Sequence
  Description of Artificial Sequence: Synthetic oligonucleotide
  Antisense strand to SEQ ID NO: 1460872
aauaaucugcuugugucac

SEQ ID NO: 1460874 - RNA, 19 nt, Artificial Sequence
  Description of Artificial Sequence: Synthetic oligonucleotide
  Sense strand starting at position 3863 of SEQ ID NO: 1244045
gcagauuauuuguaauagu

SEQ ID NO: 1460875 - RNA, 19 nt, Artificial Sequence
  Description of Artificial Sequence: Synthetic oligonucleotide
  Antisense strand to SEQ ID NO: 1460874
acuauuacaaauaaucugc

SEQ ID NO: 1460876 - RNA, 19 nt, Artificial Sequence
  Description of Artificial Sequence: Synthetic oligonucleotide
  Sense strand starting at position 3871 of SEQ ID NO: 1244045
uuuguaauaguccaucaau

SEQ ID NO: 1460877 - RNA, 19 nt, Artificial Sequence
  Description of Artificial Sequence: Synthetic oligonucleotide
  Antisense strand to SEQ ID NO: 1460876
auugauggacuauuacaaa

SEQ ID NO: 1460878 - RNA, 19 nt, Artificial Sequence
  Description of Artificial Sequence: Synthetic oligonucleotide
  Sense strand starting at position 3889 of SEQ ID NO: 1244045
uugcaaagucuugaacauu

SEQ ID NO: 1460879 - RNA, 19 nt, Artificial Sequence
  Description of Artificial Sequence: Synthetic oligonucleotide
  Antisense strand to SEQ ID NO: 1460878
aauguucaagacuuugcaa

SEQ ID NO: 1460880 - RNA, 19 nt, Artificial Sequence
  Description of Artificial Sequence: Synthetic oligonucleotide
  Sense strand starting at position 3906 of SEQ ID NO: 1244045
uucgcuuggccggaaauau

SEQ ID NO: 1460881 - RNA, 19 nt, Artificial Sequence
  Description of Artificial Sequence: Synthetic oligonucleotide
  Antisense strand to SEQ ID NO: 1460880
auauuuccggccaagcgaa

SEQ ID NO: 1460882 - RNA, 19 nt, Artificial Sequence
  Description of Artificial Sequence: Synthetic oligonucleotide
  Sense strand starting at position 189 of SEQ ID NO: 1244046
uggacauccagcuguguua

SEQ ID NO: 1460883 - RNA, 19 nt, Artificial Sequence
  Description of Artificial Sequence: Synthetic oligonucleotide
  Antisense strand to SEQ ID NO: 1460882
uaacacagcuggaugucca

SEQ ID NO: 1460884 - RNA, 19 nt, Artificial Sequence
  Description of Artificial Sequence: Synthetic oligonucleotide
  Sense strand starting at position 191 of SEQ ID NO: 1244046
gacauccagcuguguuaca

SEQ ID NO: 1460885 - RNA, 19 nt, Artificial Sequence
  Description of Artificial Sequence: Synthetic oligonucleotide
  Antisense strand to SEQ ID NO: 1460884
uguaacacagcuggauguc

SEQ ID NO: 1460886 - RNA, 19 nt, Artificial Sequence
  Description of Artificial Sequence: Synthetic oligonucleotide
  Sense strand starting at position 210 of SEQ ID NO: 1244046
gaccgcauguuaucacuuu

SEQ ID NO: 1460887 - RNA, 19 nt, Artificial Sequence
  Description of Artificial Sequence: Synthetic oligonucleotide
  Antisense strand to SEQ ID NO: 1460886
aaagugauaacaugcgguc

SEQ ID NO: 1460888 - RNA, 19 nt, Artificial Sequence
  Description of Artificial Sequence: Synthetic oligonucleotide
  Sense strand starting at position 288 of SEQ ID NO: 1244046
aggaaagguucuccuguca

SEQ ID NO: 1460889 - RNA, 19 nt, Artificial Sequence
  Description of Artificial Sequence: Synthetic oligonucleotide
  Antisense strand to SEQ ID NO: 1460888
ugacaggagaaccuuuccu

SEQ ID NO: 1460890 - RNA, 19 nt, Artificial Sequence
  Description of Artificial Sequence: Synthetic oligonucleotide
  Sense strand starting at position 321 of SEQ ID NO: 1244046
aggaauauccugugauuau

SEQ ID NO: 1460891 - RNA, 19 nt, Artificial Sequence
  Description of Artificial Sequence: Synthetic oligonucleotide
  Antisense strand to SEQ ID NO: 1460890
auaaucacaggauauuccu

SEQ ID NO: 1460892 - RNA, 19 nt, Artificial Sequence
  Description of Artificial Sequence: Synthetic oligonucleotide
  Sense strand starting at position 364 of SEQ ID NO: 1244046
agcugucaccauuagcaau

SEQ ID NO: 1460893 - RNA, 19 nt, Artificial Sequence
  Description of Artificial Sequence: Synthetic oligonucleotide
  Antisense strand to SEQ ID NO: 1460892
auugcuaauggugacagcu

SEQ ID NO: 1460894 - RNA, 19 nt, Artificial Sequence
  Description of Artificial Sequence: Synthetic oligonucleotide
  Sense strand starting at position 383 of SEQ ID NO: 1244046
uauguaucagggugaauca

SEQ ID NO: 1460895 - RNA, 19 nt, Artificial Sequence
  Description of Artificial Sequence: Synthetic oligonucleotide
  Antisense strand to SEQ ID NO: 1460894
ugauucacccugauacaua

SEQ ID NO: 1460896 - RNA, 19 nt, Artificial Sequence
  Description of Artificial Sequence: Synthetic oligonucleotide
  Sense strand starting at position 502 of SEQ ID NO: 1244046
uggucucacuauucugauu

SEQ ID NO: 1460897 - RNA, 19 nt, Artificial Sequence
  Description of Artificial Sequence: Synthetic oligonucleotide
  Antisense strand to SEQ ID NO: 1460896
aaucagaauagugagacca

SEQ ID NO: 1460898 - RNA, 19 nt, Artificial Sequence
  Description of Artificial Sequence: Synthetic oligonucleotide
  Sense strand starting at position 507 of SEQ ID NO: 1244046
ucacuauucugauuggcuu

SEQ ID NO: 1460899 - RNA, 19 nt, Artificial Sequence
  Description of Artificial Sequence: Synthetic oligonucleotide
  Antisense strand to SEQ ID NO: 1460898
aagccaaucagaauaguga

SEQ ID NO: 1460900 - RNA, 19 nt, Artificial Sequence
  Description of Artificial Sequence: Synthetic oligonucleotide
  Sense strand starting at position 510 of SEQ ID NO: 1244046
cuauucugauuggcuuuau

SEQ ID NO: 1460901 - RNA, 19 nt, Artificial Sequence
  Description of Artificial Sequence: Synthetic oligonucleotide
  Antisense strand to SEQ ID NO: 1460900
auaaagccaaucagaauag

SEQ ID NO: 1460902 - RNA, 19 nt, Artificial Sequence
  Description of Artificial Sequence: Synthetic oligonucleotide
  Sense strand starting at position 514 of SEQ ID NO: 1244046
ucugauuggcuuuaucaua

SEQ ID NO: 1460903 - RNA, 19 nt, Artificial Sequence
  Description of Artificial Sequence: Synthetic oligonucleotide
  Antisense strand to SEQ ID NO: 1460902
uaugauaaagccaaucaga

SEQ ID NO: 1460904 - RNA, 19 nt, Artificial Sequence
  Description of Artificial Sequence: Synthetic oligonucleotide
  Sense strand starting at position 999 of SEQ ID NO: 1244046
aucagugaucuggagcugu

SEQ ID NO: 1460905 - RNA, 19 nt, Artificial Sequence
  Description of Artificial Sequence: Synthetic oligonucleotide
  Antisense strand to SEQ ID NO: 1460904
acagcuccagaucacugau

SEQ ID NO: 1460906 - RNA, 19 nt, Artificial Sequence
  Description of Artificial Sequence: Synthetic oligonucleotide
  Sense strand starting at position 1010 of SEQ ID NO: 1244046
ggagcuguauugucagaug

SEQ ID NO: 1460907 - RNA, 19 nt, Artificial Sequence
  Description of Artificial Sequence: Synthetic oligonucleotide
  Antisense strand to SEQ ID NO: 1460906
caucugacaauacagcucc

SEQ ID NO: 1460908 - RNA, 19 nt, Artificial Sequence
  Description of Artificial Sequence: Synthetic oligonucleotide
  Sense strand starting at position 1067 of SEQ ID NO: 1244046
acauguggcucuuuacauu

SEQ ID NO: 1460909 - RNA, 19 nt, Artificial Sequence
  Description of Artificial Sequence: Synthetic oligonucleotide
  Antisense strand to SEQ ID NO: 1460908
aauguaaagagccacaugu

SEQ ID NO: 1460910 - RNA, 19 nt, Artificial Sequence
  Description of Artificial Sequence: Synthetic oligonucleotide
  Sense strand starting at position 1576 of SEQ ID NO: 1244046
gccuaauaaucccugugac

SEQ ID NO: 1460911 - RNA, 19 nt, Artificial Sequence
  Description of Artificial Sequence: Synthetic oligonucleotide
  Antisense strand to SEQ ID NO: 1460910
gucacagggauuauuaggc

SEQ ID NO: 1460912 - RNA, 19 nt, Artificial Sequence
  Description of Artificial Sequence: Synthetic oligonucleotide
  Sense strand starting at position 1685 of SEQ ID NO: 1244046
ggaagagugugaagggaua

SEQ ID NO: 1460913 - RNA, 19 nt, Artificial Sequence
  Description of Artificial Sequence: Synthetic oligonucleotide
  Antisense strand to SEQ ID NO: 1460912
uaucccuucacacucuucc

SEQ ID NO: 1460914 - RNA, 19 nt, Artificial Sequence
  Description of Artificial Sequence: Synthetic oligonucleotide
  Sense strand starting at position 1789 of SEQ ID NO: 1244046
uaguuccauccugggauaa

SEQ ID NO: 1460915 - RNA, 19 nt, Artificial Sequence
  Description of Artificial Sequence: Synthetic oligonucleotide
  Antisense strand to SEQ ID NO: 1460914
uuaucccaggauggaacua

SEQ ID NO: 1460916 - RNA, 19 nt, Artificial Sequence
  Description of Artificial Sequence: Synthetic oligonucleotide
  Sense strand starting at position 1790 of SEQ ID NO: 1244046
aguuccauccugggauaaa

SEQ ID NO: 1460917 - RNA, 19 nt, Artificial Sequence
  Description of Artificial Sequence: Synthetic oligonucleotide
  Antisense strand to SEQ ID NO: 1460916
uuuaucccaggauggaacu

SEQ ID NO: 1460918 - RNA, 19 nt, Artificial Sequence
  Description of Artificial Sequence: Synthetic oligonucleotide
  Sense strand starting at position 2147 of SEQ ID NO: 1244046
uuuagugucagucagucau

SEQ ID NO: 1460919 - RNA, 19 nt, Artificial Sequence
  Description of Artificial Sequence: Synthetic oligonucleotide
  Antisense strand to SEQ ID NO: 1460918
augacugacugacacuaaa

SEQ ID NO: 1460920 - RNA, 19 nt, Artificial Sequence
  Description of Artificial Sequence: Synthetic oligonucleotide
  Sense strand starting at position 2153 of SEQ ID NO: 1244046
gucagucagucauccagga

SEQ ID NO: 1460921 - RNA, 19 nt, Artificial Sequence
  Description of Artificial Sequence: Synthetic oligonucleotide
  Antisense strand to SEQ ID NO: 1460920
uccuggaugacugacugac

SEQ ID NO: 1460922 - RNA, 19 nt, Artificial Sequence
  Description of Artificial Sequence: Synthetic oligonucleotide
  Sense strand starting at position 2157 of SEQ ID NO: 1244046
gucagucauccaggaugug

SEQ ID NO: 1460923 - RNA, 19 nt, Artificial Sequence
  Description of Artificial Sequence: Synthetic oligonucleotide
  Antisense strand to SEQ ID NO: 1460922
cacauccuggaugacugac

SEQ ID NO: 1460924 - RNA, 19 nt, Artificial Sequence
  Description of Artificial Sequence: Synthetic oligonucleotide
  Sense strand starting at position 2371 of SEQ ID NO: 1244046
gagugaacccgaugggcuu

SEQ ID NO: 1460925 - RNA, 19 nt, Artificial Sequence
  Description of Artificial Sequence: Synthetic oligonucleotide
  Antisense strand to SEQ ID NO: 1460924
aagcccaucggguucacuc

SEQ ID NO: 1460926 - RNA, 19 nt, Artificial Sequence
  Description of Artificial Sequence: Synthetic oligonucleotide
  Sense strand starting at position 2421 of SEQ ID NO: 1244046
ugauguuuggcaagcgugu

SEQ ID NO: 1460927 - RNA, 19 nt, Artificial Sequence
  Description of Artificial Sequence: Synthetic oligonucleotide
  Antisense strand to SEQ ID NO: 1460926
acacgcuugccaaacauca

SEQ ID NO: 1460928 - RNA, 19 nt, Artificial Sequence
  Description of Artificial Sequence: Synthetic oligonucleotide
  Sense strand starting at position 2495 of SEQ ID NO: 1244046
acguguuaccaggagcaau

SEQ ID NO: 1460929 - RNA, 19 nt, Artificial Sequence
  Description of Artificial Sequence: Synthetic oligonucleotide
  Antisense strand to SEQ ID NO: 1460928
auugcuccugguaacacgu

SEQ ID NO: 1460930 - RNA, 19 nt, Artificial Sequence
  Description of Artificial Sequence: Synthetic oligonucleotide
  Sense strand starting at position 2721 of SEQ ID NO: 1244046
gaaccaauuccuggagggu

SEQ ID NO: 1460931 - RNA, 19 nt, Artificial Sequence
  Description of Artificial Sequence: Synthetic oligonucleotide
  Antisense strand to SEQ ID NO: 1460930
acccuccaggaauugguuc

SEQ ID NO: 1460932 - RNA, 19 nt, Artificial Sequence
  Description of Artificial Sequence: Synthetic oligonucleotide
  Sense strand starting at position 2775 of SEQ ID NO: 1244046
gggagcuaguaaucugcau

SEQ ID NO: 1460933 - RNA, 19 nt, Artificial Sequence
  Description of Artificial Sequence: Synthetic oligonucleotide
  Antisense strand to SEQ ID NO: 1460932
augcagauuacuagcuccc

SEQ ID NO: 1460934 - RNA, 19 nt, Artificial Sequence
  Description of Artificial Sequence: Synthetic oligonucleotide
  Sense strand starting at position 2779 of SEQ ID NO: 1244046
gcuaguaaucugcauaaca

SEQ ID NO: 1460935 - RNA, 19 nt, Artificial Sequence
  Description of Artificial Sequence: Synthetic oligonucleotide
  Antisense strand to SEQ ID NO: 1460934
uguuaugcagauuacuagc

SEQ ID NO: 1460936 - RNA, 19 nt, Artificial Sequence
  Description of Artificial Sequence: Synthetic oligonucleotide
  Sense strand starting at position 3036 of SEQ ID NO: 1244046
ucaugaucggcccagcuua

SEQ ID NO: 1460937 - RNA, 19 nt, Artificial Sequence
  Description of Artificial Sequence: Synthetic oligonucleotide
  Antisense strand to SEQ ID NO: 1460936
uaagcugggccgaucauga

SEQ ID NO: 1460938 - RNA, 19 nt, Artificial Sequence
  Description of Artificial Sequence: Synthetic oligonucleotide
  Sense strand starting at position 3188 of SEQ ID NO: 1244046
guaccuuguugacuuauuu

SEQ ID NO: 1460939 - RNA, 19 nt, Artificial Sequence
  Description of Artificial Sequence: Synthetic oligonucleotide
  Antisense strand to SEQ ID NO: 1460938
aaauaagucaacaagguac

SEQ ID NO: 1460940 - RNA, 19 nt, Artificial Sequence
  Description of Artificial Sequence: Synthetic oligonucleotide
  Sense strand starting at position 3195 of SEQ ID NO: 1244046
guugacuuauuugauaaac

SEQ ID NO: 1460941 - RNA, 19 nt, Artificial Sequence
  Description of Artificial Sequence: Synthetic oligonucleotide
  Antisense strand to SEQ ID NO: 1460940
guuuaucaaauaagucaac

SEQ ID NO: 1460942 - RNA, 19 nt, Artificial Sequence
  Description of Artificial Sequence: Synthetic oligonucleotide
  Sense strand starting at position 3197 of SEQ ID NO: 1244046
ugacuuauuugauaaacug

SEQ ID NO: 1460943 - RNA, 19 nt, Artificial Sequence
  Description of Artificial Sequence: Synthetic oligonucleotide
  Antisense strand to SEQ ID NO: 1460942
caguuuaucaaauaaguca

SEQ ID NO: 1460944 - RNA, 19 nt, Artificial Sequence
  Description of Artificial Sequence: Synthetic oligonucleotide
  Sense strand starting at position 3386 of SEQ ID NO: 1244046
gccagccuugcugagaauu

SEQ ID NO: 1460945 - RNA, 19 nt, Artificial Sequence
  Description of Artificial Sequence: Synthetic oligonucleotide
  Antisense strand to SEQ ID NO: 1460944
aauucucagcaaggcuggc

SEQ ID NO: 1460946 - RNA, 19 nt, Artificial Sequence
  Description of Artificial Sequence: Synthetic oligonucleotide
  Sense strand starting at position 3443 of SEQ ID NO: 1244046
gcaacugacggcugaauaa

SEQ ID NO: 1460947 - RNA, 19 nt, Artificial Sequence
  Description of Artificial Sequence: Synthetic oligonucleotide
  Antisense strand to SEQ ID NO: 1460946
uuauucagccgucaguugc

SEQ ID NO: 1460948 - RNA, 19 nt, Artificial Sequence
  Description of Artificial Sequence: Synthetic oligonucleotide
  Sense strand starting at position 3454 of SEQ ID NO: 1244046
cugaauaaccguugugaau

SEQ ID NO: 1460949 - RNA, 19 nt, Artificial Sequence
  Description of Artificial Sequence: Synthetic oligonucleotide
  Antisense strand to SEQ ID NO: 1460948
auucacaacgguuauucag

SEQ ID NO: 1460950 - RNA, 19 nt, Artificial Sequence
  Description of Artificial Sequence: Synthetic oligonucleotide
  Sense strand starting at position 3501 of SEQ ID NO: 1244046
ugacucagcagauggaaua

SEQ ID NO: 1460951 - RNA, 19 nt, Artificial Sequence
  Description of Artificial Sequence: Synthetic oligonucleotide
  Antisense strand to SEQ ID NO: 1460950
uauuccaucugcugaguca

SEQ ID NO: 1460952 - RNA, 19 nt, Artificial Sequence
  Description of Artificial Sequence: Synthetic oligonucleotide
  Sense strand starting at position 3539 of SEQ ID NO: 1244046
agugcaggcauuggugaua

SEQ ID NO: 1460953 - RNA, 19 nt, Artificial Sequence
  Description of Artificial Sequence: Synthetic oligonucleotide
  Antisense strand to SEQ ID NO: 1460952
uaucaccaaugccugcacu

SEQ ID NO: 1460954 - RNA, 19 nt, Artificial Sequence
  Description of Artificial Sequence: Synthetic oligonucleotide
  Sense strand starting at position 3542 of SEQ ID NO: 1244046
gcaggcauuggugauaauu

SEQ ID NO: 1460955 - RNA, 19 nt, Artificial Sequence
  Description of Artificial Sequence: Synthetic oligonucleotide
  Antisense strand to SEQ ID NO: 1460954
aauuaucaccaaugccugc

SEQ ID NO: 1460956 - RNA, 19 nt, Artificial Sequence
  Description of Artificial Sequence: Synthetic oligonucleotide
  Sense strand starting at position 3551 of SEQ ID NO: 1244046
ggugauaauuaauugaauc

SEQ ID NO: 1460957 - RNA, 19 nt, Artificial Sequence
  Description of Artificial Sequence: Synthetic oligonucleotide
  Antisense strand to SEQ ID NO: 1460956
gauucaauuaauuaucacc

SEQ ID NO: 1460958 - RNA, 19 nt, Artificial Sequence
  Description of Artificial Sequence: Synthetic oligonucleotide
  Sense strand starting at position 3567 of SEQ ID NO: 1244046
aucacagaaucucagagau

SEQ ID NO: 1460959 - RNA, 19 nt, Artificial Sequence
  Description of Artificial Sequence: Synthetic oligonucleotide
  Antisense strand to SEQ ID NO: 1460958
aucucugagauucugugau

SEQ ID NO: 1460960 - RNA, 19 nt, Artificial Sequence
  Description of Artificial Sequence: Synthetic oligonucleotide
  Sense strand starting at position 3824 of SEQ ID NO: 1244046
auagaagcaugucuccuau

SEQ ID NO: 1460961 - RNA, 19 nt, Artificial Sequence
  Description of Artificial Sequence: Synthetic oligonucleotide
  Antisense strand to SEQ ID NO: 1460960
auaggagacaugcuucuau

SEQ ID NO: 1460962 - RNA, 19 nt, Artificial Sequence
  Description of Artificial Sequence: Synthetic oligonucleotide
  Sense strand starting at position 196 of SEQ ID NO: 1244047
cggucagcccaggaucaau

SEQ ID NO: 1460963 - RNA, 19 nt, Artificial Sequence
  Description of Artificial Sequence: Synthetic oligonucleotide
  Antisense strand to SEQ ID NO: 1460962
auugauccugggcugaccg

SEQ ID NO: 1460964 - RNA, 19 nt, Artificial Sequence
  Description of Artificial Sequence: Synthetic oligonucleotide
  Sense strand starting at position 205 of SEQ ID NO: 1244047
caggaucaauguuuguuga

SEQ ID NO: 1460965 - RNA, 19 nt, Artificial Sequence
  Description of Artificial Sequence: Synthetic oligonucleotide
  Antisense strand to SEQ ID NO: 1460964
ucaacaaacauugauccug

SEQ ID NO: 1460966 - RNA, 19 nt, Artificial Sequence
  Description of Artificial Sequence: Synthetic oligonucleotide
  Sense strand starting at position 207 of SEQ ID NO: 1244047
ggaucaauguuuguugacu

SEQ ID NO: 1460967 - RNA, 19 nt, Artificial Sequence
  Description of Artificial Sequence: Synthetic oligonucleotide
  Antisense strand to SEQ ID NO: 1460966
agucaacaaacauugaucc

SEQ ID NO: 1460968 - RNA, 19 nt, Artificial Sequence
  Description of Artificial Sequence: Synthetic oligonucleotide
  Sense strand starting at position 208 of SEQ ID NO: 1244047
gaucaauguuuguugacug

SEQ ID NO: 1460969 - RNA, 19 nt, Artificial Sequence
  Description of Artificial Sequence: Synthetic oligonucleotide
  Antisense strand to SEQ ID NO: 1460968
cagucaacaaacauugauc

SEQ ID NO: 1460970 - RNA, 19 nt, Artificial Sequence
  Description of Artificial Sequence: Synthetic oligonucleotide
  Sense strand starting at position 213 of SEQ ID NO: 1244047
auguuuguugacugaagga

SEQ ID NO: 1460971 - RNA, 19 nt, Artificial Sequence
  Description of Artificial Sequence: Synthetic oligonucleotide
  Antisense strand to SEQ ID NO: 1460970
uccuucagucaacaaacau

SEQ ID NO: 1460972 - RNA, 19 nt, Artificial Sequence
  Description of Artificial Sequence: Synthetic oligonucleotide
  Sense strand starting at position 279 of SEQ ID NO: 1244047
ggccacagugcuccguauu

SEQ ID NO: 1460973 - RNA, 19 nt, Artificial Sequence
  Description of Artificial Sequence: Synthetic oligonucleotide
  Antisense strand to SEQ ID NO: 1460972
aauacggagcacuguggcc

SEQ ID NO: 1460974 - RNA, 19 nt, Artificial Sequence
  Description of Artificial Sequence: Synthetic oligonucleotide
  Sense strand starting at position 280 of SEQ ID NO: 1244047
gccacagugcuccguauua

SEQ ID NO: 1460975 - RNA, 19 nt, Artificial Sequence
  Description of Artificial Sequence: Synthetic oligonucleotide
  Antisense strand to SEQ ID NO: 1460974
uaauacggagcacuguggc

SEQ ID NO: 1460976 - RNA, 19 nt, Artificial Sequence
  Description of Artificial Sequence: Synthetic oligonucleotide
  Sense strand starting at position 391 of SEQ ID NO: 1244047
cuuggagucagcugagaau

SEQ ID NO: 1460977 - RNA, 19 nt, Artificial Sequence
  Description of Artificial Sequence: Synthetic oligonucleotide
  Antisense strand to SEQ ID NO: 1460976
auucucagcugacuccaag

SEQ ID NO: 1460978 - RNA, 19 nt, Artificial Sequence
  Description of Artificial Sequence: Synthetic oligonucleotide
  Sense strand starting at position 394 of SEQ ID NO: 1244047
ggagucagcugagaauuag

SEQ ID NO: 1460979 - RNA, 19 nt, Artificial Sequence
  Description of Artificial Sequence: Synthetic oligonucleotide
  Antisense strand to SEQ ID NO: 1460978
cuaauucucagcugacucc

SEQ ID NO: 1460980 - RNA, 19 nt, Artificial Sequence
  Description of Artificial Sequence: Synthetic oligonucleotide
  Sense strand starting at position 804 of SEQ ID NO: 1244047
ccauguccucccuggcaga

SEQ ID NO: 1460981 - RNA, 19 nt, Artificial Sequence
  Description of Artificial Sequence: Synthetic oligonucleotide
  Antisense strand to SEQ ID NO: 1460980
ucugccagggaggacaugg

SEQ ID NO: 1460982 - RNA, 19 nt, Artificial Sequence
  Description of Artificial Sequence: Synthetic oligonucleotide
  Sense strand starting at position 817 of SEQ ID NO: 1244047
ggcagaacacgugacucuu

SEQ ID NO: 1460983 - RNA, 19 nt, Artificial Sequence
  Description of Artificial Sequence: Synthetic oligonucleotide
  Antisense strand to SEQ ID NO: 1460982
aagagucacguguucugcc

SEQ ID NO: 1460984 - RNA, 19 nt, Artificial Sequence
  Description of Artificial Sequence: Synthetic oligonucleotide
  Sense strand starting at position 1078 of SEQ ID NO: 1244047
gccacaggcuguugacaaa

SEQ ID NO: 1460985 - RNA, 19 nt, Artificial Sequence
  Description of Artificial Sequence: Synthetic oligonucleotide
  Antisense strand to SEQ ID NO: 1460984
uuugucaacagccuguggc

SEQ ID NO: 1460986 - RNA, 19 nt, Artificial Sequence
  Description of Artificial Sequence: Synthetic oligonucleotide
  Sense strand starting at position 1245 of SEQ ID NO: 1244047
gguucagagucggagcaua

SEQ ID NO: 1460987 - RNA, 19 nt, Artificial Sequence
  Description of Artificial Sequence: Synthetic oligonucleotide
  Antisense strand to SEQ ID NO: 1460986
uaugcuccgacucugaacc

SEQ ID NO: 1460988 - RNA, 19 nt, Artificial Sequence
  Description of Artificial Sequence: Synthetic oligonucleotide
  Sense strand starting at position 2457 of SEQ ID NO: 1244047
ccugaugccugccugauuu

SEQ ID NO: 1460989 - RNA, 19 nt, Artificial Sequence
  Description of Artificial Sequence: Synthetic oligonucleotide
  Antisense strand to SEQ ID NO: 1460988
aaaucaggcaggcaucagg

SEQ ID NO: 1460990 - RNA, 19 nt, Artificial Sequence
  Description of Artificial Sequence: Synthetic oligonucleotide
  Sense strand starting at position 2925 of SEQ ID NO: 1244047
cugcucugugcccagugau

SEQ ID NO: 1460991 - RNA, 19 nt, Artificial Sequence
  Description of Artificial Sequence: Synthetic oligonucleotide
  Antisense strand to SEQ ID NO: 1460990
aucacugggcacagagcag

SEQ ID NO: 1460992 - RNA, 19 nt, Artificial Sequence
  Description of Artificial Sequence: Synthetic oligonucleotide
  Sense strand starting at position 2928 of SEQ ID NO: 1244047
cucugugcccagugaucuu

SEQ ID NO: 1460993 - RNA, 19 nt, Artificial Sequence
  Description of Artificial Sequence: Synthetic oligonucleotide
  Antisense strand to SEQ ID NO: 1460992
aagaucacugggcacagag

SEQ ID NO: 1460994 - RNA, 19 nt, Artificial Sequence
  Description of Artificial Sequence: Synthetic oligonucleotide
  Sense strand starting at position 3022 of SEQ ID NO: 1244047
augccuuccuucuagaaag

SEQ ID NO: 1460995 - RNA, 19 nt, Artificial Sequence
  Description of Artificial Sequence: Synthetic oligonucleotide
  Antisense strand to SEQ ID NO: 1460994
cuuucuagaaggaaggcau

SEQ ID NO: 1460996 - RNA, 19 nt, Artificial Sequence
  Description of Artificial Sequence: Synthetic oligonucleotide
  Sense strand starting at position 3024 of SEQ ID NO: 1244047
gccuuccuucuagaaaguu

SEQ ID NO: 1460997 - RNA, 19 nt, Artificial Sequence
  Description of Artificial Sequence: Synthetic oligonucleotide
  Antisense strand to SEQ ID NO: 1460996
aacuuucuagaaggaaggc

SEQ ID NO: 1460998 - RNA, 19 nt, Artificial Sequence
  Description of Artificial Sequence: Synthetic oligonucleotide
  Sense strand starting at position 3032 of SEQ ID NO: 1244047
ucuagaaaguucucuccga

SEQ ID NO: 1460999 - RNA, 19 nt, Artificial Sequence
  Description of Artificial Sequence: Synthetic oligonucleotide
  Antisense strand to SEQ ID NO: 1460998
ucggagagaacuuucuaga

SEQ ID NO: 1461000 - RNA, 19 nt, Artificial Sequence
  Description of Artificial Sequence: Synthetic oligonucleotide
  Sense strand starting at position 3033 of SEQ ID NO: 1244047
cuagaaaguucucuccgag

SEQ ID NO: 1461001 - RNA, 19 nt, Artificial Sequence
  Description of Artificial Sequence: Synthetic oligonucleotide
  Antisense strand to SEQ ID NO: 1461000
cucggagagaacuuucuag

SEQ ID NO: 1461002 - RNA, 19 nt, Artificial Sequence
  Description of Artificial Sequence: Synthetic oligonucleotide
  Sense strand starting at position 3036 of SEQ ID NO: 1244047
gaaaguucucuccgaggcu

SEQ ID NO: 1461003 - RNA, 19 nt, Artificial Sequence
  Description of Artificial Sequence: Synthetic oligonucleotide
  Antisense strand to SEQ ID NO: 1461002
agccucggagagaacuuuc

SEQ ID NO: 1461004 - RNA, 19 nt, Artificial Sequence
  Description of Artificial Sequence: Synthetic oligonucleotide
  Sense strand starting at position 3323 of SEQ ID NO: 1244047
gagagcuccucugauaggu

SEQ ID NO: 1461005 - RNA, 19 nt, Artificial Sequence
  Description of Artificial Sequence: Synthetic oligonucleotide
  Antisense strand to SEQ ID NO: 1461004
accuaucagaggagcucuc

SEQ ID NO: 1461006 - RNA, 19 nt, Artificial Sequence
  Description of Artificial Sequence: Synthetic oligonucleotide
  Sense strand starting at position 3397 of SEQ ID NO: 1244047
gugggaacccagggucuua

SEQ ID NO: 1461007 - RNA, 19 nt, Artificial Sequence
  Description of Artificial Sequence: Synthetic oligonucleotide
  Antisense strand to SEQ ID NO: 1461006
uaagacccuggguucccac

SEQ ID NO: 1461008 - RNA, 19 nt, Artificial Sequence
  Description of Artificial Sequence: Synthetic oligonucleotide
  Sense strand starting at position 3617 of SEQ ID NO: 1244047
ucagaaggcaaaggucaua

SEQ ID NO: 1461009 - RNA, 19 nt, Artificial Sequence
  Description of Artificial Sequence: Synthetic oligonucleotide
  Antisense strand to SEQ ID NO: 1461008
uaugaccuuugccuucuga

SEQ ID NO: 1461010 - RNA, 19 nt, Artificial Sequence
  Description of Artificial Sequence: Synthetic oligonucleotide
  Sense strand starting at position 3746 of SEQ ID NO: 1244047
ggguucugaucuuggguca

SEQ ID NO: 1461011 - RNA, 19 nt, Artificial Sequence
  Description of Artificial Sequence: Synthetic oligonucleotide
  Antisense strand to SEQ ID NO: 1461010
ugacccaagaucagaaccc

SEQ ID NO: 1461012 - RNA, 19 nt, Artificial Sequence
  Description of Artificial Sequence: Synthetic oligonucleotide
  Sense strand starting at position 3747 of SEQ ID NO: 1244047
gguucugaucuugggucau

SEQ ID NO: 1461013 - RNA, 19 nt, Artificial Sequence
  Description of Artificial Sequence: Synthetic oligonucleotide
  Antisense strand to SEQ ID NO: 1461012
augacccaagaucagaacc

SEQ ID NO: 1461014 - RNA, 19 nt, Artificial Sequence
  Description of Artificial Sequence: Synthetic oligonucleotide
  Sense strand starting at position 3788 of SEQ ID NO: 1244047
guccgagaccucugugaau

SEQ ID NO: 1461015 - RNA, 19 nt, Artificial Sequence
  Description of Artificial Sequence: Synthetic oligonucleotide
  Antisense strand to SEQ ID NO: 1461014
auucacagaggucucggac

SEQ ID NO: 1461016 - RNA, 19 nt, Artificial Sequence
  Description of Artificial Sequence: Synthetic oligonucleotide
  Sense strand starting at position 3875 of SEQ ID NO: 1244047
guaggcucugccuaaguca

SEQ ID NO: 1461017 - RNA, 19 nt, Artificial Sequence
  Description of Artificial Sequence: Synthetic oligonucleotide
  Antisense strand to SEQ ID NO: 1461016
ugacuuaggcagagccuac

SEQ ID NO: 1461018 - RNA, 19 nt, Artificial Sequence
  Description of Artificial Sequence: Synthetic oligonucleotide
  Sense strand starting at position 3961 of SEQ ID NO: 1244047
ggccuuguuuccuggagga

SEQ ID NO: 1461019 - RNA, 19 nt, Artificial Sequence
  Description of Artificial Sequence: Synthetic oligonucleotide
  Antisense strand to SEQ ID NO: 1461018
uccuccaggaaacaaggcc

SEQ ID NO: 1461020 - RNA, 19 nt, Artificial Sequence
  Description of Artificial Sequence: Synthetic oligonucleotide
  Sense strand starting at position 3963 of SEQ ID NO: 1244047
ccuuguuuccuggaggaca

SEQ ID NO: 1461021 - RNA, 19 nt, Artificial Sequence
  Description of Artificial Sequence: Synthetic oligonucleotide
  Antisense strand to SEQ ID NO: 1461020
uguccuccaggaaacaagg

SEQ ID NO: 1461022 - RNA, 19 nt, Artificial Sequence
  Description of Artificial Sequence: Synthetic oligonucleotide
  Sense strand starting at position 337 of SEQ ID NO: 1244048
ccugguuccaaugguugaa

SEQ ID NO: 1461023 - RNA, 19 nt, Artificial Sequence
  Description of Artificial Sequence: Synthetic oligonucleotide
  Antisense strand to SEQ ID NO: 1461022
uucaaccauuggaaccagg

SEQ ID NO: 1461024 - RNA, 19 nt, Artificial Sequence
  Description of Artificial Sequence: Synthetic oligonucleotide
  Sense strand starting at position 353 of SEQ ID NO: 1244048
gaaggcaccuuaguaguua

SEQ ID NO: 1461025 - RNA, 19 nt, Artificial Sequence
  Description of Artificial Sequence: Synthetic oligonucleotide
  Antisense strand to SEQ ID NO: 1461024
uaacuacuaaggugccuuc

SEQ ID NO: 1461026 - RNA, 19 nt, Artificial Sequence
  Description of Artificial Sequence: Synthetic oligonucleotide
  Sense strand starting at position 357 of SEQ ID NO: 1244048
gcaccuuaguaguuaaaug

SEQ ID NO: 1461027 - RNA, 19 nt, Artificial Sequence
  Description of Artificial Sequence: Synthetic oligonucleotide
  Antisense strand to SEQ ID NO: 1461026
cauuuaacuacuaaggugc

SEQ ID NO: 1461028 - RNA, 19 nt, Artificial Sequence
  Description of Artificial Sequence: Synthetic oligonucleotide
  Sense strand starting at position 367 of SEQ ID NO: 1244048
aguuaaaugucauccuaca

SEQ ID NO: 1461029 - RNA, 19 nt, Artificial Sequence
  Description of Artificial Sequence: Synthetic oligonucleotide
  Antisense strand to SEQ ID NO: 1461028
uguaggaugacauuuaacu

SEQ ID NO: 1461030 - RNA, 19 nt, Artificial Sequence
  Description of Artificial Sequence: Synthetic oligonucleotide
  Sense strand starting at position 501 of SEQ ID NO: 1244048
ugaagucacucauuagaac

SEQ ID NO: 1461031 - RNA, 19 nt, Artificial Sequence
  Description of Artificial Sequence: Synthetic oligonucleotide
  Antisense strand to SEQ ID NO: 1461030
guucuaaugagugacuuca

SEQ ID NO: 1461032 - RNA, 19 nt, Artificial Sequence
  Description of Artificial Sequence: Synthetic oligonucleotide
  Sense strand starting at position 550 of SEQ ID NO: 1244048
augauaauguacuuccgua

SEQ ID NO: 1461033 - RNA, 19 nt, Artificial Sequence
  Description of Artificial Sequence: Synthetic oligonucleotide
  Antisense strand to SEQ ID NO: 1461032
uacggaaguacauuaucau

SEQ ID NO: 1461034 - RNA, 19 nt, Artificial Sequence
  Description of Artificial Sequence: Synthetic oligonucleotide
  Sense strand starting at position 558 of SEQ ID NO: 1244048
guacuuccguauuuauauu

SEQ ID NO: 1461035 - RNA, 19 nt, Artificial Sequence
  Description of Artificial Sequence: Synthetic oligonucleotide
  Antisense strand to SEQ ID NO: 1461034
aauauaaauacggaaguac

SEQ ID NO: 1461036 - RNA, 19 nt, Artificial Sequence
  Description of Artificial Sequence: Synthetic oligonucleotide
  Sense strand starting at position 594 of SEQ ID NO: 1244048
ggccaauacuuguuaguaa

SEQ ID NO: 1461037 - RNA, 19 nt, Artificial Sequence
  Description of Artificial Sequence: Synthetic oligonucleotide
  Antisense strand to SEQ ID NO: 1461036
uuacuaacaaguauuggcc

SEQ ID NO: 1461038 - RNA, 19 nt, Artificial Sequence
  Description of Artificial Sequence: Synthetic oligonucleotide
  Sense strand starting at position 606 of SEQ ID NO: 1244048
uuaguaaagugauuauggu

SEQ ID NO: 1461039 - RNA, 19 nt, Artificial Sequence
  Description of Artificial Sequence: Synthetic oligonucleotide
  Antisense strand to SEQ ID NO: 1461038
accauaaucacuuuacuaa

SEQ ID NO: 1461040 - RNA, 19 nt, Artificial Sequence
  Description of Artificial Sequence: Synthetic oligonucleotide
  Sense strand starting at position 607 of SEQ ID NO: 1244048
uaguaaagugauuauggua

SEQ ID NO: 1461041 - RNA, 19 nt, Artificial Sequence
  Description of Artificial Sequence: Synthetic oligonucleotide
  Antisense strand to SEQ ID NO: 1461040
uaccauaaucacuuuacua

SEQ ID NO: 1461042 - RNA, 19 nt, Artificial Sequence
  Description of Artificial Sequence: Synthetic oligonucleotide
  Sense strand starting at position 696 of SEQ ID NO: 1244048
uuuaaaccgguuuaagauu

SEQ ID NO: 1461043 - RNA, 19 nt, Artificial Sequence
  Description of Artificial Sequence: Synthetic oligonucleotide
  Antisense strand to SEQ ID NO: 1461042
aaucuuaaaccgguuuaaa

SEQ ID NO: 1461044 - RNA, 19 nt, Artificial Sequence
  Description of Artificial Sequence: Synthetic oligonucleotide
  Sense strand starting at position 832 of SEQ ID NO: 1244048
uggccuguuaucugggaaa

SEQ ID NO: 1461045 - RNA, 19 nt, Artificial Sequence
  Description of Artificial Sequence: Synthetic oligonucleotide
  Antisense strand to SEQ ID NO: 1461044
uuucccagauaacaggcca

SEQ ID NO: 1461046 - RNA, 19 nt, Artificial Sequence
  Description of Artificial Sequence: Synthetic oligonucleotide
  Sense strand starting at position 834 of SEQ ID NO: 1244048
gccuguuaucugggaaauu

SEQ ID NO: 1461047 - RNA, 19 nt, Artificial Sequence
  Description of Artificial Sequence: Synthetic oligonucleotide
  Antisense strand to SEQ ID NO: 1461046
aauuucccagauaacaggc

SEQ ID NO: 1461048 - RNA, 19 nt, Artificial Sequence
  Description of Artificial Sequence: Synthetic oligonucleotide
  Sense strand starting at position 976 of SEQ ID NO: 1244048
gugucuuugcguguuuauu

SEQ ID NO: 1461049 - RNA, 19 nt, Artificial Sequence
  Description of Artificial Sequence: Synthetic oligonucleotide
  Antisense strand to SEQ ID NO: 1461048
aauaaacacgcaaagacac

SEQ ID NO: 1461050 - RNA, 19 nt, Artificial Sequence
  Description of Artificial Sequence: Synthetic oligonucleotide
  Sense strand starting at position 978 of SEQ ID NO: 1244048
gucuuugcguguuuauuua

SEQ ID NO: 1461051 - RNA, 19 nt, Artificial Sequence
  Description of Artificial Sequence: Synthetic oligonucleotide
  Antisense strand to SEQ ID NO: 1461050
uaaauaaacacgcaaagac

SEQ ID NO: 1461052 - RNA, 19 nt, Artificial Sequence
  Description of Artificial Sequence: Synthetic oligonucleotide
  Sense strand starting at position 1115 of SEQ ID NO: 1244048
aauugugaccuugggaaau

SEQ ID NO: 1461053 - RNA, 19 nt, Artificial Sequence
  Description of Artificial Sequence: Synthetic oligonucleotide
  Antisense strand to SEQ ID NO: 1461052
auuucccaaggucacaauu

SEQ ID NO: 1461054 - RNA, 19 nt, Artificial Sequence
  Description of Artificial Sequence: Synthetic oligonucleotide
  Sense strand starting at position 1171 of SEQ ID NO: 1244048
aauuaugagugcucggaac

SEQ ID NO: 1461055 - RNA, 19 nt, Artificial Sequence
  Description of Artificial Sequence: Synthetic oligonucleotide
  Antisense strand to SEQ ID NO: 1461054
guuccgagcacucauaauu

SEQ ID NO: 1461056 - RNA, 19 nt, Artificial Sequence
  Description of Artificial Sequence: Synthetic oligonucleotide
  Sense strand starting at position 1399 of SEQ ID NO: 1244048
uugcgaucauccuuccauc

SEQ ID NO: 1461057 - RNA, 19 nt, Artificial Sequence
  Description of Artificial Sequence: Synthetic oligonucleotide
  Antisense strand to SEQ ID NO: 1461056
gauggaaggaugaucgcaa

SEQ ID NO: 1461058 - RNA, 19 nt, Artificial Sequence
  Description of Artificial Sequence: Synthetic oligonucleotide
  Sense strand starting at position 1409 of SEQ ID NO: 1244048
ccuuccauccgccgagaaa

SEQ ID NO: 1461059 - RNA, 19 nt, Artificial Sequence
  Description of Artificial Sequence: Synthetic oligonucleotide
  Antisense strand to SEQ ID NO: 1461058
uuucucggcggauggaagg

SEQ ID NO: 1461060 - RNA, 19 nt, Artificial Sequence
  Description of Artificial Sequence: Synthetic oligonucleotide
  Sense strand starting at position 1484 of SEQ ID NO: 1244048
cacugcugcccucgagaga

SEQ ID NO: 1461061 - RNA, 19 nt, Artificial Sequence
  Description of Artificial Sequence: Synthetic oligonucleotide
  Antisense strand to SEQ ID NO: 1461060
ucucucgagggcagcagug

SEQ ID NO: 1461062 - RNA, 19 nt, Artificial Sequence
  Description of Artificial Sequence: Synthetic oligonucleotide
  Sense strand starting at position 2090 of SEQ ID NO: 1244048
ugcagagauccuggacuga

SEQ ID NO: 1461063 - RNA, 19 nt, Artificial Sequence
  Description of Artificial Sequence: Synthetic oligonucleotide
  Antisense strand to SEQ ID NO: 1461062
ucaguccaggaucucugca

SEQ ID NO: 1461064 - RNA, 19 nt, Artificial Sequence
  Description of Artificial Sequence: Synthetic oligonucleotide
  Sense strand starting at position 2167 of SEQ ID NO: 1244048
caguguguuggccaucacu

SEQ ID NO: 1461065 - RNA, 19 nt, Artificial Sequence
  Description of Artificial Sequence: Synthetic oligonucleotide
  Antisense strand to SEQ ID NO: 1461064
agugauggccaacacacug

SEQ ID NO: 1461066 - RNA, 19 nt, Artificial Sequence
  Description of Artificial Sequence: Synthetic oligonucleotide
  Sense strand starting at position 2211 of SEQ ID NO: 1244048
agccuuuccuaauuggaaa

SEQ ID NO: 1461067 - RNA, 19 nt, Artificial Sequence
  Description of Artificial Sequence: Synthetic oligonucleotide
  Antisense strand to SEQ ID NO: 1461066
uuuccaauuaggaaaggcu

SEQ ID NO: 1461068 - RNA, 19 nt, Artificial Sequence
  Description of Artificial Sequence: Synthetic oligonucleotide
  Sense strand starting at position 2260 of SEQ ID NO: 1244048
gcgucuuaucccuugcucu

SEQ ID NO: 1461069 - RNA, 19 nt, Artificial Sequence
  Description of Artificial Sequence: Synthetic oligonucleotide
  Antisense strand to SEQ ID NO: 1461068
agagcaagggauaagacgc

SEQ ID NO: 1461070 - RNA, 19 nt, Artificial Sequence
  Description of Artificial Sequence: Synthetic oligonucleotide
  Sense strand starting at position 2308 of SEQ ID NO: 1244048
ggcgauaaagcuugcuaaa

SEQ ID NO: 1461071 - RNA, 19 nt, Artificial Sequence
  Description of Artificial Sequence: Synthetic oligonucleotide
  Antisense strand to SEQ ID NO: 1461070
uuuagcaagcuuuaucgcc

SEQ ID NO: 1461072 - RNA, 19 nt, Artificial Sequence
  Description of Artificial Sequence: Synthetic oligonucleotide
  Sense strand starting at position 2346 of SEQ ID NO: 1244048
guuuaucuagccuagagag

SEQ ID NO: 1461073 - RNA, 19 nt, Artificial Sequence
  Description of Artificial Sequence: Synthetic oligonucleotide
  Antisense strand to SEQ ID NO: 1461072
cucucuaggcuagauaaac

SEQ ID NO: 1461074 - RNA, 19 nt, Artificial Sequence
  Description of Artificial Sequence: Synthetic oligonucleotide
  Sense strand starting at position 2394 of SEQ ID NO: 1244048
aagguacugguuuaucagu

SEQ ID NO: 1461075 - RNA, 19 nt, Artificial Sequence
  Description of Artificial Sequence: Synthetic oligonucleotide
  Antisense strand to SEQ ID NO: 1461074
acugauaaaccaguaccuu

SEQ ID NO: 1461076 - RNA, 19 nt, Artificial Sequence
  Description of Artificial Sequence: Synthetic oligonucleotide
  Sense strand starting at position 2396 of SEQ ID NO: 1244048
gguacugguuuaucaguca

SEQ ID NO: 1461077 - RNA, 19 nt, Artificial Sequence
  Description of Artificial Sequence: Synthetic oligonucleotide
  Antisense strand to SEQ ID NO: 1461076
ugacugauaaaccaguacc

SEQ ID NO: 1461078 - RNA, 19 nt, Artificial Sequence
  Description of Artificial Sequence: Synthetic oligonucleotide
  Sense strand starting at position 2399 of SEQ ID NO: 1244048
acugguuuaucagucaaau

SEQ ID NO: 1461079 - RNA, 19 nt, Artificial Sequence
  Description of Artificial Sequence: Synthetic oligonucleotide
  Antisense strand to SEQ ID NO: 1461078
auuugacugauaaaccagu

SEQ ID NO: 1461080 - RNA, 19 nt, Artificial Sequence
  Description of Artificial Sequence: Synthetic oligonucleotide
  Sense strand starting at position 2410 of SEQ ID NO: 1244048
agucaaauaucugagagau

SEQ ID NO: 1461081 - RNA, 19 nt, Artificial Sequence
  Description of Artificial Sequence: Synthetic oligonucleotide
  Antisense strand to SEQ ID NO: 1461080
aucucucagauauuugacu

SEQ ID NO: 1461082 - RNA, 19 nt, Artificial Sequence
  Description of Artificial Sequence: Synthetic oligonucleotide
  Sense strand starting at position 2461 of SEQ ID NO: 1244048
gugcaauccucauucuuug

SEQ ID NO: 1461083 - RNA, 19 nt, Artificial Sequence
  Description of Artificial Sequence: Synthetic oligonucleotide
  Antisense strand to SEQ ID NO: 1461082
caaagaaugaggauugcac

SEQ ID NO: 1461084 - RNA, 19 nt, Artificial Sequence
  Description of Artificial Sequence: Synthetic oligonucleotide
  Sense strand starting at position 2497 of SEQ ID NO: 1244048
agaaguauuuguugacuua

SEQ ID NO: 1461085 - RNA, 19 nt, Artificial Sequence
  Description of Artificial Sequence: Synthetic oligonucleotide
  Antisense strand to SEQ ID NO: 1461084
uaagucaacaaauacuucu

SEQ ID NO: 1461086 - RNA, 19 nt, Artificial Sequence
  Description of Artificial Sequence: Synthetic oligonucleotide
  Sense strand starting at position 2510 of SEQ ID NO: 1244048
gacuuacaaguccguauaa

SEQ ID NO: 1461087 - RNA, 19 nt, Artificial Sequence
  Description of Artificial Sequence: Synthetic oligonucleotide
  Antisense strand to SEQ ID NO: 1461086
uuauacggacuuguaaguc

SEQ ID NO: 1461088 - RNA, 19 nt, Artificial Sequence
  Description of Artificial Sequence: Synthetic oligonucleotide
  Sense strand starting at position 2511 of SEQ ID NO: 1244048
acuuacaaguccguauaaa

SEQ ID NO: 1461089 - RNA, 19 nt, Artificial Sequence
  Description of Artificial Sequence: Synthetic oligonucleotide
  Antisense strand to SEQ ID NO: 1461088
uuuauacggacuuguaagu

SEQ ID NO: 1461090 - RNA, 19 nt, Artificial Sequence
  Description of Artificial Sequence: Synthetic oligonucleotide
  Sense strand starting at position 2532 of SEQ ID NO: 1244048
aaggaaacuuuguuaaggu

SEQ ID NO: 1461091 - RNA, 19 nt, Artificial Sequence
  Description of Artificial Sequence: Synthetic oligonucleotide
  Antisense strand to SEQ ID NO: 1461090
accuuaacaaaguuuccuu

SEQ ID NO: 1461092 - RNA, 19 nt, Artificial Sequence
  Description of Artificial Sequence: Synthetic oligonucleotide
  Sense strand starting at position 3410 of SEQ ID NO: 1244048
uccuuuagucgagguugaa

SEQ ID NO: 1461093 - RNA, 19 nt, Artificial Sequence
  Description of Artificial Sequence: Synthetic oligonucleotide
  Antisense strand to SEQ ID NO: 1461092
uucaaccucgacuaaagga

SEQ ID NO: 1461094 - RNA, 19 nt, Artificial Sequence
  Description of Artificial Sequence: Synthetic oligonucleotide
  Sense strand starting at position 3425 of SEQ ID NO: 1244048
ugaagugagccuugauggu

SEQ ID NO: 1461095 - RNA, 19 nt, Artificial Sequence
  Description of Artificial Sequence: Synthetic oligonucleotide
  Antisense strand to SEQ ID NO: 1461094
accaucaaggcucacuuca

SEQ ID NO: 1461096 - RNA, 19 nt, Artificial Sequence
  Description of Artificial Sequence: Synthetic oligonucleotide
  Sense strand starting at position 3470 of SEQ ID NO: 1244048
gagcaacauucugaggaaa

SEQ ID NO: 1461097 - RNA, 19 nt, Artificial Sequence
  Description of Artificial Sequence: Synthetic oligonucleotide
  Antisense strand to SEQ ID NO: 1461096
uuuccucagaauguugcuc

SEQ ID NO: 1461098 - RNA, 19 nt, Artificial Sequence
  Description of Artificial Sequence: Synthetic oligonucleotide
  Sense strand starting at position 3513 of SEQ ID NO: 1244048
ucuguuuagggcuguuaaa

SEQ ID NO: 1461099 - RNA, 19 nt, Artificial Sequence
  Description of Artificial Sequence: Synthetic oligonucleotide
  Antisense strand to SEQ ID NO: 1461098
uuuaacagcccuaaacaga

SEQ ID NO: 1461100 - RNA, 19 nt, Artificial Sequence
  Description of Artificial Sequence: Synthetic oligonucleotide
  Sense strand starting at position 3592 of SEQ ID NO: 1244048
uauggaagcgucuagaaua

SEQ ID NO: 1461101 - RNA, 19 nt, Artificial Sequence
  Description of Artificial Sequence: Synthetic oligonucleotide
  Antisense strand to SEQ ID NO: 1461100
uauucuagacgcuuccaua

SEQ ID NO: 1461102 - RNA, 19 nt, Artificial Sequence
  Description of Artificial Sequence: Synthetic oligonucleotide
  Sense strand starting at position 30 of SEQ ID NO: 1244049
gggaucaugugauauauac

SEQ ID NO: 1461103 - RNA, 19 nt, Artificial Sequence
  Description of Artificial Sequence: Synthetic oligonucleotide
  Antisense strand to SEQ ID NO: 1461102
guauauaucacaugauccc

SEQ ID NO: 1461104 - RNA, 19 nt, Artificial Sequence
  Description of Artificial Sequence: Synthetic oligonucleotide
  Sense strand starting at position 104 of SEQ ID NO: 1244049
ggacgcuaugauggauaaa

SEQ ID NO: 1461105 - RNA, 19 nt, Artificial Sequence
  Description of Artificial Sequence: Synthetic oligonucleotide
  Antisense strand to SEQ ID NO: 1461104
uuuauccaucauagcgucc

SEQ ID NO: 1461106 - RNA, 19 nt, Artificial Sequence
  Description of Artificial Sequence: Synthetic oligonucleotide
  Sense strand starting at position 155 of SEQ ID NO: 1244049
gagucuaauuaggugcuca

SEQ ID NO: 1461107 - RNA, 19 nt, Artificial Sequence
  Description of Artificial Sequence: Synthetic oligonucleotide
  Antisense strand to SEQ ID NO: 1461106
ugagcaccuaauuagacuc

SEQ ID NO: 1461108 - RNA, 19 nt, Artificial Sequence
  Description of Artificial Sequence: Synthetic oligonucleotide
  Sense strand starting at position 159 of SEQ ID NO: 1244049
cuaauuaggugcucaguaa

SEQ ID NO: 1461109 - RNA, 19 nt, Artificial Sequence
  Description of Artificial Sequence: Synthetic oligonucleotide
  Antisense strand to SEQ ID NO: 1461108
uuacugagcaccuaauuag

SEQ ID NO: 1461110 - RNA, 19 nt, Artificial Sequence
  Description of Artificial Sequence: Synthetic oligonucleotide
  Sense strand starting at position 160 of SEQ ID NO: 1244049
uaauuaggugcucaguaaa

SEQ ID NO: 1461111 - RNA, 19 nt, Artificial Sequence
  Description of Artificial Sequence: Synthetic oligonucleotide
  Antisense strand to SEQ ID NO: 1461110
uuuacugagcaccuaauua

SEQ ID NO: 1461112 - RNA, 19 nt, Artificial Sequence
  Description of Artificial Sequence: Synthetic oligonucleotide
  Sense strand starting at position 264 of SEQ ID NO: 1244049
ggauguaggucuuuaucag

SEQ ID NO: 1461113 - RNA, 19 nt, Artificial Sequence
  Description of Artificial Sequence: Synthetic oligonucleotide
  Antisense strand to SEQ ID NO: 1461112
cugauaaagaccuacaucc

SEQ ID NO: 1461114 - RNA, 19 nt, Artificial Sequence
  Description of Artificial Sequence: Synthetic oligonucleotide
  Sense strand starting at position 272 of SEQ ID NO: 1244049
gucuuuaucagguauguuu

SEQ ID NO: 1461115 - RNA, 19 nt, Artificial Sequence
  Description of Artificial Sequence: Synthetic oligonucleotide
  Antisense strand to SEQ ID NO: 1461114
aaacauaccugauaaagac

SEQ ID NO: 1461116 - RNA, 19 nt, Artificial Sequence
  Description of Artificial Sequence: Synthetic oligonucleotide
  Sense strand starting at position 290 of SEQ ID NO: 1244049
uccuuuggcccagaaacua

SEQ ID NO: 1461117 - RNA, 19 nt, Artificial Sequence
  Description of Artificial Sequence: Synthetic oligonucleotide
  Antisense strand to SEQ ID NO: 1461116
uaguuucugggccaaagga

SEQ ID NO: 1461118 - RNA, 19 nt, Artificial Sequence
  Description of Artificial Sequence: Synthetic oligonucleotide
  Sense strand starting at position 338 of SEQ ID NO: 1244049
ccucauuccugagucaucu

SEQ ID NO: 1461119 - RNA, 19 nt, Artificial Sequence
  Description of Artificial Sequence: Synthetic oligonucleotide
  Antisense strand to SEQ ID NO: 1461118
agaugacucaggaaugagg

SEQ ID NO: 1461120 - RNA, 19 nt, Artificial Sequence
  Description of Artificial Sequence: Synthetic oligonucleotide
  Sense strand starting at position 524 of SEQ ID NO: 1244049
agggcucagcacuauguaa

SEQ ID NO: 1461121 - RNA, 19 nt, Artificial Sequence
  Description of Artificial Sequence: Synthetic oligonucleotide
  Antisense strand to SEQ ID NO: 1461120
uuacauagugcugagcccu

SEQ ID NO: 1461122 - RNA, 19 nt, Artificial Sequence
  Description of Artificial Sequence: Synthetic oligonucleotide
  Sense strand starting at position 685 of SEQ ID NO: 1244049
cccuccugacgcuguaaau

SEQ ID NO: 1461123 - RNA, 19 nt, Artificial Sequence
  Description of Artificial Sequence: Synthetic oligonucleotide
  Antisense strand to SEQ ID NO: 1461122
auuuacagcgucaggaggg

SEQ ID NO: 1461124 - RNA, 19 nt, Artificial Sequence
  Description of Artificial Sequence: Synthetic oligonucleotide
  Sense strand starting at position 715 of SEQ ID NO: 1244049
gcauuauuggcuuaguuga

SEQ ID NO: 1461125 - RNA, 19 nt, Artificial Sequence
  Description of Artificial Sequence: Synthetic oligonucleotide
  Antisense strand to SEQ ID NO: 1461124
ucaacuaagccaauaaugc

SEQ ID NO: 1461126 - RNA, 19 nt, Artificial Sequence
  Description of Artificial Sequence: Synthetic oligonucleotide
  Sense strand starting at position 725 of SEQ ID NO: 1244049
cuuaguugagcagauguuu

SEQ ID NO: 1461127 - RNA, 19 nt, Artificial Sequence
  Description of Artificial Sequence: Synthetic oligonucleotide
  Antisense strand to SEQ ID NO: 1461126
aaacaucugcucaacuaag

SEQ ID NO: 1461128 - RNA, 19 nt, Artificial Sequence
  Description of Artificial Sequence: Synthetic oligonucleotide
  Sense strand starting at position 733 of SEQ ID NO: 1244049
agcagauguuuggcccuaa

SEQ ID NO: 1461129 - RNA, 19 nt, Artificial Sequence
  Description of Artificial Sequence: Synthetic oligonucleotide
  Antisense strand to SEQ ID NO: 1461128
uuagggccaaacaucugcu

SEQ ID NO: 1461130 - RNA, 19 nt, Artificial Sequence
  Description of Artificial Sequence: Synthetic oligonucleotide
  Sense strand starting at position 734 of SEQ ID NO: 1244049
gcagauguuuggcccuaaa

SEQ ID NO: 1461131 - RNA, 19 nt, Artificial Sequence
  Description of Artificial Sequence: Synthetic oligonucleotide
  Antisense strand to SEQ ID NO: 1461130
uuuagggccaaacaucugc

SEQ ID NO: 1461132 - RNA, 19 nt, Artificial Sequence
  Description of Artificial Sequence: Synthetic oligonucleotide
  Sense strand starting at position 737 of SEQ ID NO: 1244049
gauguuuggcccuaaacac

SEQ ID NO: 1461133 - RNA, 19 nt, Artificial Sequence
  Description of Artificial Sequence: Synthetic oligonucleotide
  Antisense strand to SEQ ID NO: 1461132
guguuuagggccaaacauc

SEQ ID NO: 1461134 - RNA, 19 nt, Artificial Sequence
  Description of Artificial Sequence: Synthetic oligonucleotide
  Sense strand starting at position 769 of SEQ ID NO: 1244049
gcauuaaguacgcacaguu

SEQ ID NO: 1461135 - RNA, 19 nt, Artificial Sequence
  Description of Artificial Sequence: Synthetic oligonucleotide
  Antisense strand to SEQ ID NO: 1461134
aacugugcguacuuaaugc

SEQ ID NO: 1461136 - RNA, 19 nt, Artificial Sequence
  Description of Artificial Sequence: Synthetic oligonucleotide
  Sense strand starting at position 776 of SEQ ID NO: 1244049
guacgcacaguuugaagua

SEQ ID NO: 1461137 - RNA, 19 nt, Artificial Sequence
  Description of Artificial Sequence: Synthetic oligonucleotide
  Antisense strand to SEQ ID NO: 1461136
uacuucaaacugugcguac

SEQ ID NO: 1461138 - RNA, 19 nt, Artificial Sequence
  Description of Artificial Sequence: Synthetic oligonucleotide
  Sense strand starting at position 806 of SEQ ID NO: 1244049
ggcgguuacuagcuggaaa

SEQ ID NO: 1461139 - RNA, 19 nt, Artificial Sequence
  Description of Artificial Sequence: Synthetic oligonucleotide
  Antisense strand to SEQ ID NO: 1461138
uuuccagcuaguaaccgcc

SEQ ID NO: 1461140 - RNA, 19 nt, Artificial Sequence
  Description of Artificial Sequence: Synthetic oligonucleotide
  Sense strand starting at position 836 of SEQ ID NO: 1244049
cucuaucauggaugguuaa

SEQ ID NO: 1461141 - RNA, 19 nt, Artificial Sequence
  Description of Artificial Sequence: Synthetic oligonucleotide
  Antisense strand to SEQ ID NO: 1461140
uuaaccauccaugauagag

SEQ ID NO: 1461142 - RNA, 19 nt, Artificial Sequence
  Description of Artificial Sequence: Synthetic oligonucleotide
  Sense strand starting at position 839 of SEQ ID NO: 1244049
uaucauggaugguuaacua

SEQ ID NO: 1461143 - RNA, 19 nt, Artificial Sequence
  Description of Artificial Sequence: Synthetic oligonucleotide
  Antisense strand to SEQ ID NO: 1461142
uaguuaaccauccaugaua

SEQ ID NO: 1461144 - RNA, 19 nt, Artificial Sequence
  Description of Artificial Sequence: Synthetic oligonucleotide
  Sense strand starting at position 851 of SEQ ID NO: 1244049
uuaacuagugcuugccaca

SEQ ID NO: 1461145 - RNA, 19 nt, Artificial Sequence
  Description of Artificial Sequence: Synthetic oligonucleotide
  Antisense strand to SEQ ID NO: 1461144
uguggcaagcacuaguuaa

SEQ ID NO: 1461146 - RNA, 19 nt, Artificial Sequence
  Description of Artificial Sequence: Synthetic oligonucleotide
  Sense strand starting at position 874 of SEQ ID NO: 1244049
gcuucuuagguuuauuaag

SEQ ID NO: 1461147 - RNA, 19 nt, Artificial Sequence
  Description of Artificial Sequence: Synthetic oligonucleotide
  Antisense strand to SEQ ID NO: 1461146
cuuaauaaaccuaagaagc

SEQ ID NO: 1461148 - RNA, 19 nt, Artificial Sequence
  Description of Artificial Sequence: Synthetic oligonucleotide
  Sense strand starting at position 876 of SEQ ID NO: 1244049
uucuuagguuuauuaagca

SEQ ID NO: 1461149 - RNA, 19 nt, Artificial Sequence
  Description of Artificial Sequence: Synthetic oligonucleotide
  Antisense strand to SEQ ID NO: 1461148
ugcuuaauaaaccuaagaa

SEQ ID NO: 1461150 - RNA, 19 nt, Artificial Sequence
  Description of Artificial Sequence: Synthetic oligonucleotide
  Sense strand starting at position 922 of SEQ ID NO: 1244049
gugguacacagguaagauc

SEQ ID NO: 1461151 - RNA, 19 nt, Artificial Sequence
  Description of Artificial Sequence: Synthetic oligonucleotide
  Antisense strand to SEQ ID NO: 1461150
gaucuuaccuguguaccac

SEQ ID NO: 1461152 - RNA, 19 nt, Artificial Sequence
  Description of Artificial Sequence: Synthetic oligonucleotide
  Sense strand starting at position 970 of SEQ ID NO: 1244049
uaguauuccugcucuagag

SEQ ID NO: 1461153 - RNA, 19 nt, Artificial Sequence
  Description of Artificial Sequence: Synthetic oligonucleotide
  Antisense strand to SEQ ID NO: 1461152
cucuagagcaggaauacua

SEQ ID NO: 1461154 - RNA, 19 nt, Artificial Sequence
  Description of Artificial Sequence: Synthetic oligonucleotide
  Sense strand starting at position 972 of SEQ ID NO: 1244049
guauuccugcucuagagau

SEQ ID NO: 1461155 - RNA, 19 nt, Artificial Sequence
  Description of Artificial Sequence: Synthetic oligonucleotide
  Antisense strand to SEQ ID NO: 1461154
aucucuagagcaggaauac

SEQ ID NO: 1461156 - RNA, 19 nt, Artificial Sequence
  Description of Artificial Sequence: Synthetic oligonucleotide
  Sense strand starting at position 974 of SEQ ID NO: 1244049
auuccugcucuagagauaa

SEQ ID NO: 1461157 - RNA, 19 nt, Artificial Sequence
  Description of Artificial Sequence: Synthetic oligonucleotide
  Antisense strand to SEQ ID NO: 1461156
uuaucucuagagcaggaau

SEQ ID NO: 1461158 - RNA, 19 nt, Artificial Sequence
  Description of Artificial Sequence: Synthetic oligonucleotide
  Sense strand starting at position 1082 of SEQ ID NO: 1244049
cccuuagagcucugccauu

SEQ ID NO: 1461159 - RNA, 19 nt, Artificial Sequence
  Description of Artificial Sequence: Synthetic oligonucleotide
  Antisense strand to SEQ ID NO: 1461158
aauggcagagcucuaaggg

SEQ ID NO: 1461160 - RNA, 19 nt, Artificial Sequence
  Description of Artificial Sequence: Synthetic oligonucleotide
  Sense strand starting at position 1241 of SEQ ID NO: 1244049
gggagcaucuaguuccuau

SEQ ID NO: 1461161 - RNA, 19 nt, Artificial Sequence
  Description of Artificial Sequence: Synthetic oligonucleotide
  Antisense strand to SEQ ID NO: 1461160
auaggaacuagaugcuccc

SEQ ID NO: 1461162 - RNA, 19 nt, Artificial Sequence
  Description of Artificial Sequence: Synthetic oligonucleotide
  Sense strand starting at position 1270 of SEQ ID NO: 1244049
ccagaccuugccuguaaga

SEQ ID NO: 1461163 - RNA, 19 nt, Artificial Sequence
  Description of Artificial Sequence: Synthetic oligonucleotide
  Antisense strand to SEQ ID NO: 1461162
ucuuacaggcaaggucugg

SEQ ID NO: 1461164 - RNA, 19 nt, Artificial Sequence
  Description of Artificial Sequence: Synthetic oligonucleotide
  Sense strand starting at position 1272 of SEQ ID NO: 1244049
agaccuugccuguaagauu

SEQ ID NO: 1461165 - RNA, 19 nt, Artificial Sequence
  Description of Artificial Sequence: Synthetic oligonucleotide
  Antisense strand to SEQ ID NO: 1461164
aaucuuacaggcaaggucu

SEQ ID NO: 1461166 - RNA, 19 nt, Artificial Sequence
  Description of Artificial Sequence: Synthetic oligonucleotide
  Sense strand starting at position 1392 of SEQ ID NO: 1244049
cggcgaucucaaugcaaag

SEQ ID NO: 1461167 - RNA, 19 nt, Artificial Sequence
  Description of Artificial Sequence: Synthetic oligonucleotide
  Antisense strand to SEQ ID NO: 1461166
cuuugcauugagaucgccg

SEQ ID NO: 1461168 - RNA, 19 nt, Artificial Sequence
  Description of Artificial Sequence: Synthetic oligonucleotide
  Sense strand starting at position 1450 of SEQ ID NO: 1244049
ccgcucugucgaugaggaa

SEQ ID NO: 1461169 - RNA, 19 nt, Artificial Sequence
  Description of Artificial Sequence: Synthetic oligonucleotide
  Antisense strand to SEQ ID NO: 1461168
uuccucaucgacagagcgg

SEQ ID NO: 1461170 - RNA, 19 nt, Artificial Sequence
  Description of Artificial Sequence: Synthetic oligonucleotide
  Sense strand starting at position 1451 of SEQ ID NO: 1244049
cgcucugucgaugaggaaa

SEQ ID NO: 1461171 - RNA, 19 nt, Artificial Sequence
  Description of Artificial Sequence: Synthetic oligonucleotide
  Antisense strand to SEQ ID NO: 1461170
uuuccucaucgacagagcg

SEQ ID NO: 1461172 - RNA, 19 nt, Artificial Sequence
  Description of Artificial Sequence: Synthetic oligonucleotide
  Sense strand starting at position 1464 of SEQ ID NO: 1244049
aggaaacgucaugagcgua

SEQ ID NO: 1461173 - RNA, 19 nt, Artificial Sequence
  Description of Artificial Sequence: Synthetic oligonucleotide
  Antisense strand to SEQ ID NO: 1461172
uacgcucaugacguuuccu

SEQ ID NO: 1461174 - RNA, 19 nt, Artificial Sequence
  Description of Artificial Sequence: Synthetic oligonucleotide
  Sense strand starting at position 1467 of SEQ ID NO: 1244049
aaacgucaugagcguaaga

SEQ ID NO: 1461175 - RNA, 19 nt, Artificial Sequence
  Description of Artificial Sequence: Synthetic oligonucleotide
  Antisense strand to SEQ ID NO: 1461174
ucuuacgcucaugacguuu

SEQ ID NO: 1461176 - RNA, 19 nt, Artificial Sequence
  Description of Artificial Sequence: Synthetic oligonucleotide
  Sense strand starting at position 1469 of SEQ ID NO: 1244049
acgucaugagcguaagaca

SEQ ID NO: 1461177 - RNA, 19 nt, Artificial Sequence
  Description of Artificial Sequence: Synthetic oligonucleotide
  Antisense strand to SEQ ID NO: 1461176
ugucuuacgcucaugacgu

SEQ ID NO: 1461178 - RNA, 19 nt, Artificial Sequence
  Description of Artificial Sequence: Synthetic oligonucleotide
  Sense strand starting at position 1497 of SEQ ID NO: 1244049
uuaagacacuugcucaaga

SEQ ID NO: 1461179 - RNA, 19 nt, Artificial Sequence
  Description of Artificial Sequence: Synthetic oligonucleotide
  Antisense strand to SEQ ID NO: 1461178
ucuugagcaagugucuuaa

SEQ ID NO: 1461180 - RNA, 19 nt, Artificial Sequence
  Description of Artificial Sequence: Synthetic oligonucleotide
  Sense strand starting at position 1989 of SEQ ID NO: 1244049
gcgcuuaggccugcucaca

SEQ ID NO: 1461181 - RNA, 19 nt, Artificial Sequence
  Description of Artificial Sequence: Synthetic oligonucleotide
  Antisense strand to SEQ ID NO: 1461180
ugugagcaggccuaagcgc

SEQ ID NO: 1461182 - RNA, 19 nt, Artificial Sequence
  Description of Artificial Sequence: Synthetic oligonucleotide
  Sense strand starting at position 9 of SEQ ID NO: 1244050
cccuuagugucuuucuguu

SEQ ID NO: 1461183 - RNA, 19 nt, Artificial Sequence
  Description of Artificial Sequence: Synthetic oligonucleotide
  Antisense strand to SEQ ID NO: 1461182
aacagaaagacacuaaggg

SEQ ID NO: 1461184 - RNA, 19 nt, Artificial Sequence
  Description of Artificial Sequence: Synthetic oligonucleotide
  Sense strand starting at position 130 of SEQ ID NO: 1244050
guugcaaucucuguguuga

SEQ ID NO: 1461185 - RNA, 19 nt, Artificial Sequence
  Description of Artificial Sequence: Synthetic oligonucleotide
  Antisense strand to SEQ ID NO: 1461184
ucaacacagagauugcaac

SEQ ID NO: 1461186 - RNA, 19 nt, Artificial Sequence
  Description of Artificial Sequence: Synthetic oligonucleotide
  Sense strand starting at position 131 of SEQ ID NO: 1244050
uugcaaucucuguguugag

SEQ ID NO: 1461187 - RNA, 19 nt, Artificial Sequence
  Description of Artificial Sequence: Synthetic oligonucleotide
  Antisense strand to SEQ ID NO: 1461186
cucaacacagagauugcaa

SEQ ID NO: 1461188 - RNA, 19 nt, Artificial Sequence
  Description of Artificial Sequence: Synthetic oligonucleotide
  Sense strand starting at position 181 of SEQ ID NO: 1244050
cguggaucuuccucaagaa

SEQ ID NO: 1461189 - RNA, 19 nt, Artificial Sequence
  Description of Artificial Sequence: Synthetic oligonucleotide
  Antisense strand to SEQ ID NO: 1461188
uucuugaggaagauccacg

SEQ ID NO: 1461190 - RNA, 19 nt, Artificial Sequence
  Description of Artificial Sequence: Synthetic oligonucleotide
  Sense strand starting at position 566 of SEQ ID NO: 1244050
aggcucuucugaggacacu

SEQ ID NO: 1461191 - RNA, 19 nt, Artificial Sequence
  Description of Artificial Sequence: Synthetic oligonucleotide
  Antisense strand to SEQ ID NO: 1461190
aguguccucagaagagccu

SEQ ID NO: 1461192 - RNA, 19 nt, Artificial Sequence
  Description of Artificial Sequence: Synthetic oligonucleotide
  Sense strand starting at position 567 of SEQ ID NO: 1244050
ggcucuucugaggacacuu

SEQ ID NO: 1461193 - RNA, 19 nt, Artificial Sequence
  Description of Artificial Sequence: Synthetic oligonucleotide
  Antisense strand to SEQ ID NO: 1461192
aaguguccucagaagagcc

SEQ ID NO: 1461194 - RNA, 19 nt, Artificial Sequence
  Description of Artificial Sequence: Synthetic oligonucleotide
  Sense strand starting at position 688 of SEQ ID NO: 1244050
gaggacuugucuggaggau

SEQ ID NO: 1461195 - RNA, 19 nt, Artificial Sequence
  Description of Artificial Sequence: Synthetic oligonucleotide
  Antisense strand to SEQ ID NO: 1461194
auccuccagacaaguccuc

SEQ ID NO: 1461196 - RNA, 19 nt, Artificial Sequence
  Description of Artificial Sequence: Synthetic oligonucleotide
  Sense strand starting at position 690 of SEQ ID NO: 1244050
ggacuugucuggaggauga

SEQ ID NO: 1461197 - RNA, 19 nt, Artificial Sequence
  Description of Artificial Sequence: Synthetic oligonucleotide
  Antisense strand to SEQ ID NO: 1461196
ucauccuccagacaagucc

SEQ ID NO: 1461198 - RNA, 19 nt, Artificial Sequence
  Description of Artificial Sequence: Synthetic oligonucleotide
  Sense strand starting at position 906 of SEQ ID NO: 1244050
uuccucugaucccagguaa

SEQ ID NO: 1461199 - RNA, 19 nt, Artificial Sequence
  Description of Artificial Sequence: Synthetic oligonucleotide
  Antisense strand to SEQ ID NO: 1461198
uuaccugggaucagaggaa

SEQ ID NO: 1461200 - RNA, 19 nt, Artificial Sequence
  Description of Artificial Sequence: Synthetic oligonucleotide
  Sense strand starting at position 965 of SEQ ID NO: 1244050
agcugugcaagucaaagua

SEQ ID NO: 1461201 - RNA, 19 nt, Artificial Sequence
  Description of Artificial Sequence: Synthetic oligonucleotide
  Antisense strand to SEQ ID NO: 1461200
uacuuugacuugcacagcu

SEQ ID NO: 1461202 - RNA, 19 nt, Artificial Sequence
  Description of Artificial Sequence: Synthetic oligonucleotide
  Sense strand starting at position 1393 of SEQ ID NO: 1244050
cccugagacuucucgggca

SEQ ID NO: 1461203 - RNA, 19 nt, Artificial Sequence
  Description of Artificial Sequence: Synthetic oligonucleotide
  Antisense strand to SEQ ID NO: 1461202
ugcccgagaagucucaggg

SEQ ID NO: 1461204 - RNA, 19 nt, Artificial Sequence
  Description of Artificial Sequence: Synthetic oligonucleotide
  Sense strand starting at position 1395 of SEQ ID NO: 1244050
cugagacuucucgggcacu

SEQ ID NO: 1461205 - RNA, 19 nt, Artificial Sequence
  Description of Artificial Sequence: Synthetic oligonucleotide
  Antisense strand to SEQ ID NO: 1461204
agugcccgagaagucucag

SEQ ID NO: 1461206 - RNA, 19 nt, Artificial Sequence
  Description of Artificial Sequence: Synthetic oligonucleotide
  Sense strand starting at position 1501 of SEQ ID NO: 1244050
gccagauugucccucucaa

SEQ ID NO: 1461207 - RNA, 19 nt, Artificial Sequence
  Description of Artificial Sequence: Synthetic oligonucleotide
  Antisense strand to SEQ ID NO: 1461206
uugagagggacaaucuggc

SEQ ID NO: 1461208 - RNA, 19 nt, Artificial Sequence
  Description of Artificial Sequence: Synthetic oligonucleotide
  Sense strand starting at position 1543 of SEQ ID NO: 1244050
gugaguugaucgagccgca

SEQ ID NO: 1461209 - RNA, 19 nt, Artificial Sequence
  Description of Artificial Sequence: Synthetic oligonucleotide
  Antisense strand to SEQ ID NO: 1461208
ugcggcucgaucaacucac

SEQ ID NO: 1461210 - RNA, 19 nt, Artificial Sequence
  Description of Artificial Sequence: Synthetic oligonucleotide
  Sense strand starting at position 1586 of SEQ ID NO: 1244050
gguagacgucugccagcuu

SEQ ID NO: 1461211 - RNA, 19 nt, Artificial Sequence
  Description of Artificial Sequence: Synthetic oligonucleotide
  Antisense strand to SEQ ID NO: 1461210
aagcuggcagacgucuacc

SEQ ID NO: 1461212 - RNA, 19 nt, Artificial Sequence
  Description of Artificial Sequence: Synthetic oligonucleotide
  Sense strand starting at position 1669 of SEQ ID NO: 1244050
aagcgaaccuucucgaugu

SEQ ID NO: 1461213 - RNA, 19 nt, Artificial Sequence
  Description of Artificial Sequence: Synthetic oligonucleotide
  Antisense strand to SEQ ID NO: 1461212
acaucgagaagguucgcuu

SEQ ID NO: 1461214 - RNA, 19 nt, Artificial Sequence
  Description of Artificial Sequence: Synthetic oligonucleotide
  Sense strand starting at position 1673 of SEQ ID NO: 1244050
gaaccuucucgauguagcu

SEQ ID NO: 1461215 - RNA, 19 nt, Artificial Sequence
  Description of Artificial Sequence: Synthetic oligonucleotide
  Antisense strand to SEQ ID NO: 1461214
agcuacaucgagaagguuc

SEQ ID NO: 1461216 - RNA, 19 nt, Artificial Sequence
  Description of Artificial Sequence: Synthetic oligonucleotide
  Sense strand starting at position 1679 of SEQ ID NO: 1244050
ucucgauguagcuggcaaa

SEQ ID NO: 1461217 - RNA, 19 nt, Artificial Sequence
  Description of Artificial Sequence: Synthetic oligonucleotide
  Antisense strand to SEQ ID NO: 1461216
uuugccagcuacaucgaga

SEQ ID NO: 1461218 - RNA, 19 nt, Artificial Sequence
  Description of Artificial Sequence: Synthetic oligonucleotide
  Sense strand starting at position 1701 of SEQ ID NO: 1244050
gucauugagcuccaucauc

SEQ ID NO: 1461219 - RNA, 19 nt, Artificial Sequence
  Description of Artificial Sequence: Synthetic oligonucleotide
  Antisense strand to SEQ ID NO: 1461218
gaugauggagcucaaugac

SEQ ID NO: 1461220 - RNA, 19 nt, Artificial Sequence
  Description of Artificial Sequence: Synthetic oligonucleotide
  Sense strand starting at position 1962 of SEQ ID NO: 1244050
augcgagggcuuuaugaag

SEQ ID NO: 1461221 - RNA, 19 nt, Artificial Sequence
  Description of Artificial Sequence: Synthetic oligonucleotide
  Antisense strand to SEQ ID NO: 1461220
cuucauaaagcccucgcau

SEQ ID NO: 1461222 - RNA, 19 nt, Artificial Sequence
  Description of Artificial Sequence: Synthetic oligonucleotide
  Sense strand starting at position 2239 of SEQ ID NO: 1244050
uugguuggaccaugaugaa

SEQ ID NO: 1461223 - RNA, 19 nt, Artificial Sequence
  Description of Artificial Sequence: Synthetic oligonucleotide
  Antisense strand to SEQ ID NO: 1461222
uucaucaugguccaaccaa

SEQ ID NO: 1461224 - RNA, 19 nt, Artificial Sequence
  Description of Artificial Sequence: Synthetic oligonucleotide
  Sense strand starting at position 2524 of SEQ ID NO: 1244050
ggcauuaucucacucagcu

SEQ ID NO: 1461225 - RNA, 19 nt, Artificial Sequence
  Description of Artificial Sequence: Synthetic oligonucleotide
  Antisense strand to SEQ ID NO: 1461224
agcugagugagauaaugcc

SEQ ID NO: 1461226 - RNA, 19 nt, Artificial Sequence
  Description of Artificial Sequence: Synthetic oligonucleotide
  Sense strand starting at position 2551 of SEQ ID NO: 1244050
cugcaaggugcugggaauu

SEQ ID NO: 1461227 - RNA, 19 nt, Artificial Sequence
  Description of Artificial Sequence: Synthetic oligonucleotide
  Antisense strand to SEQ ID NO: 1461226
aauucccagcaccuugcag

SEQ ID NO: 1461228 - RNA, 19 nt, Artificial Sequence
  Description of Artificial Sequence: Synthetic oligonucleotide
  Sense strand starting at position 2561 of SEQ ID NO: 1244050
cugggaauuuggcgaagaa

SEQ ID NO: 1461229 - RNA, 19 nt, Artificial Sequence
  Description of Artificial Sequence: Synthetic oligonucleotide
  Antisense strand to SEQ ID NO: 1461228
uucuucgccaaauucccag

SEQ ID NO: 1461230 - RNA, 19 nt, Artificial Sequence
  Description of Artificial Sequence: Synthetic oligonucleotide
  Sense strand starting at position 2577 of SEQ ID NO: 1244050
gaaugaaccuguucuguac

SEQ ID NO: 1461231 - RNA, 19 nt, Artificial Sequence
  Description of Artificial Sequence: Synthetic oligonucleotide
  Antisense strand to SEQ ID NO: 1461230
guacagaacagguucauuc

SEQ ID NO: 1461232 - RNA, 19 nt, Artificial Sequence
  Description of Artificial Sequence: Synthetic oligonucleotide
  Sense strand starting at position 2645 of SEQ ID NO: 1244050
uggaguccuucccuugaac

SEQ ID NO: 1461233 - RNA, 19 nt, Artificial Sequence
  Description of Artificial Sequence: Synthetic oligonucleotide
  Antisense strand to SEQ ID NO: 1461232
guucaagggaaggacucca

SEQ ID NO: 1461234 - RNA, 19 nt, Artificial Sequence
  Description of Artificial Sequence: Synthetic oligonucleotide
  Sense strand starting at position 2745 of SEQ ID NO: 1244050
uugucuaagggucaaucau

SEQ ID NO: 1461235 - RNA, 19 nt, Artificial Sequence
  Description of Artificial Sequence: Synthetic oligonucleotide
  Antisense strand to SEQ ID NO: 1461234
augauugacccuuagacaa

SEQ ID NO: 1461236 - RNA, 19 nt, Artificial Sequence
  Description of Artificial Sequence: Synthetic oligonucleotide
  Sense strand starting at position 2754 of SEQ ID NO: 1244050
ggucaaucauggccucuau

SEQ ID NO: 1461237 - RNA, 19 nt, Artificial Sequence
  Description of Artificial Sequence: Synthetic oligonucleotide
  Antisense strand to SEQ ID NO: 1461236
auagaggccaugauugacc

SEQ ID NO: 1461238 - RNA, 19 nt, Artificial Sequence
  Description of Artificial Sequence: Synthetic oligonucleotide
  Sense strand starting at position 2818 of SEQ ID NO: 1244050
uugccuuaucaggacuuua

SEQ ID NO: 1461239 - RNA, 19 nt, Artificial Sequence
  Description of Artificial Sequence: Synthetic oligonucleotide
  Antisense strand to SEQ ID NO: 1461238
uaaaguccugauaaggcaa

SEQ ID NO: 1461240 - RNA, 19 nt, Artificial Sequence
  Description of Artificial Sequence: Synthetic oligonucleotide
  Sense strand starting at position 2920 of SEQ ID NO: 1244050
ccacaaagccguuacacau

SEQ ID NO: 1461241 - RNA, 19 nt, Artificial Sequence
  Description of Artificial Sequence: Synthetic oligonucleotide
  Antisense strand to SEQ ID NO: 1461240
auguguaacggcuuugugg

SEQ ID NO: 1461242 - RNA, 19 nt, Artificial Sequence
  Description of Artificial Sequence: Synthetic oligonucleotide
  Sense strand starting at position 2947 of SEQ ID NO: 1244050
ugugcuggcucgucuuuau

SEQ ID NO: 1461243 - RNA, 19 nt, Artificial Sequence
  Description of Artificial Sequence: Synthetic oligonucleotide
  Antisense strand to SEQ ID NO: 1461242
auaaagacgagccagcaca

SEQ ID NO: 1461244 - RNA, 19 nt, Artificial Sequence
  Description of Artificial Sequence: Synthetic oligonucleotide
  Sense strand starting at position 2998 of SEQ ID NO: 1244050
ccgucucccacuggagauu

SEQ ID NO: 1461245 - RNA, 19 nt, Artificial Sequence
  Description of Artificial Sequence: Synthetic oligonucleotide
  Antisense strand to SEQ ID NO: 1461244
aaucuccagugggagacgg

SEQ ID NO: 1461246 - RNA, 19 nt, Artificial Sequence
  Description of Artificial Sequence: Synthetic oligonucleotide
  Sense strand starting at position 3034 of SEQ ID NO: 1244050
acacaucagccuggagaga

SEQ ID NO: 1461247 - RNA, 19 nt, Artificial Sequence
  Description of Artificial Sequence: Synthetic oligonucleotide
  Antisense strand to SEQ ID NO: 1461246
ucucuccaggcugaugugu

SEQ ID NO: 1461248 - RNA, 19 nt, Artificial Sequence
  Description of Artificial Sequence: Synthetic oligonucleotide
  Sense strand starting at position 3130 of SEQ ID NO: 1244050
ccuguugucccuggagacu

SEQ ID NO: 1461249 - RNA, 19 nt, Artificial Sequence
  Description of Artificial Sequence: Synthetic oligonucleotide
  Antisense strand to SEQ ID NO: 1461248
agucuccagggacaacagg

SEQ ID NO: 1461250 - RNA, 19 nt, Artificial Sequence
  Description of Artificial Sequence: Synthetic oligonucleotide
  Sense strand starting at position 3212 of SEQ ID NO: 1244050
ccauuuguguccuuggacu

SEQ ID NO: 1461251 - RNA, 19 nt, Artificial Sequence
  Description of Artificial Sequence: Synthetic oligonucleotide
  Antisense strand to SEQ ID NO: 1461250
aguccaaggacacaaaugg

SEQ ID NO: 1461252 - RNA, 19 nt, Artificial Sequence
  Description of Artificial Sequence: Synthetic oligonucleotide
  Sense strand starting at position 3223 of SEQ ID NO: 1244050
cuuggacuucugggaagca

SEQ ID NO: 1461253 - RNA, 19 nt, Artificial Sequence
  Description of Artificial Sequence: Synthetic oligonucleotide
  Antisense strand to SEQ ID NO: 1461252
ugcuucccagaaguccaag

SEQ ID NO: 1461254 - RNA, 19 nt, Artificial Sequence
  Description of Artificial Sequence: Synthetic oligonucleotide
  Sense strand starting at position 3318 of SEQ ID NO: 1244050
ugaauagagccuuguucuc

SEQ ID NO: 1461255 - RNA, 19 nt, Artificial Sequence
  Description of Artificial Sequence: Synthetic oligonucleotide
  Antisense strand to SEQ ID NO: 1461254
gagaacaaggcucuauuca

SEQ ID NO: 1461256 - RNA, 19 nt, Artificial Sequence
  Description of Artificial Sequence: Synthetic oligonucleotide
  Sense strand starting at position 3511 of SEQ ID NO: 1244050
gaacauugugucugugcca

SEQ ID NO: 1461257 - RNA, 19 nt, Artificial Sequence
  Description of Artificial Sequence: Synthetic oligonucleotide
  Antisense strand to SEQ ID NO: 1461256
uggcacagacacaauguuc

SEQ ID NO: 1461258 - RNA, 19 nt, Artificial Sequence
  Description of Artificial Sequence: Synthetic oligonucleotide
  Sense strand starting at position 3512 of SEQ ID NO: 1244050
aacauugugucugugccaa

SEQ ID NO: 1461259 - RNA, 19 nt, Artificial Sequence
  Description of Artificial Sequence: Synthetic oligonucleotide
  Antisense strand to SEQ ID NO: 1461258
uuggcacagacacaauguu

SEQ ID NO: 1461260 - RNA, 19 nt, Artificial Sequence
  Description of Artificial Sequence: Synthetic oligonucleotide
  Sense strand starting at position 3532 of SEQ ID NO: 1244050
gugagucauucacugggca

SEQ ID NO: 1461261 - RNA, 19 nt, Artificial Sequence
  Description of Artificial Sequence: Synthetic oligonucleotide
  Antisense strand to SEQ ID NO: 1461260
ugcccagugaaugacucac

SEQ ID NO: 1461262 - RNA, 19 nt, Artificial Sequence
  Description of Artificial Sequence: Synthetic oligonucleotide
  Sense strand starting at position 10 of SEQ ID NO: 1244051
cuuugagcuccuuggagaa

SEQ ID NO: 1461263 - RNA, 19 nt, Artificial Sequence
  Description of Artificial Sequence: Synthetic oligonucleotide
  Antisense strand to SEQ ID NO: 1461262
uucuccaaggagcucaaag

SEQ ID NO: 1461264 - RNA, 19 nt, Artificial Sequence
  Description of Artificial Sequence: Synthetic oligonucleotide
  Sense strand starting at position 23 of SEQ ID NO: 1244051
ggagaacacuuccauauau

SEQ ID NO: 1461265 - RNA, 19 nt, Artificial Sequence
  Description of Artificial Sequence: Synthetic oligonucleotide
  Antisense strand to SEQ ID NO: 1461264
auauauggaaguguucucc

SEQ ID NO: 1461266 - RNA, 19 nt, Artificial Sequence
  Description of Artificial Sequence: Synthetic oligonucleotide
  Sense strand starting at position 77 of SEQ ID NO: 1244051
uugcaaacgugaucuuacu

SEQ ID NO: 1461267 - RNA, 19 nt, Artificial Sequence
  Description of Artificial Sequence: Synthetic oligonucleotide
  Antisense strand to SEQ ID NO: 1461266
aguaagaucacguuugcaa

SEQ ID NO: 1461268 - RNA, 19 nt, Artificial Sequence
  Description of Artificial Sequence: Synthetic oligonucleotide
  Sense strand starting at position 380 of SEQ ID NO: 1244051
acacauuuccuucguagca

SEQ ID NO: 1461269 - RNA, 19 nt, Artificial Sequence
  Description of Artificial Sequence: Synthetic oligonucleotide
  Antisense strand to SEQ ID NO: 1461268
ugcuacgaaggaaaugugu

SEQ ID NO: 1461270 - RNA, 19 nt, Artificial Sequence
  Description of Artificial Sequence: Synthetic oligonucleotide
  Sense strand starting at position 473 of SEQ ID NO: 1244051
agaauaggcuaucaacacu

SEQ ID NO: 1461271 - RNA, 19 nt, Artificial Sequence
  Description of Artificial Sequence: Synthetic oligonucleotide
  Antisense strand to SEQ ID NO: 1461270
aguguugauagccuauucu

SEQ ID NO: 1461272 - RNA, 19 nt, Artificial Sequence
  Description of Artificial Sequence: Synthetic oligonucleotide
  Sense strand starting at position 486 of SEQ ID NO: 1244051
aacacugacucguuaggau

SEQ ID NO: 1461273 - RNA, 19 nt, Artificial Sequence
  Description of Artificial Sequence: Synthetic oligonucleotide
  Antisense strand to SEQ ID NO: 1461272
auccuaacgagucaguguu

SEQ ID NO: 1461274 - RNA, 19 nt, Artificial Sequence
  Description of Artificial Sequence: Synthetic oligonucleotide
  Sense strand starting at position 536 of SEQ ID NO: 1244051
gggaauucccgacaccgau

SEQ ID NO: 1461275 - RNA, 19 nt, Artificial Sequence
  Description of Artificial Sequence: Synthetic oligonucleotide
  Antisense strand to SEQ ID NO: 1461274
aucggugucgggaauuccc

SEQ ID NO: 1461276 - RNA, 19 nt, Artificial Sequence
  Description of Artificial Sequence: Synthetic oligonucleotide
  Sense strand starting at position 591 of SEQ ID NO: 1244051
agagcucucuguucucuau

SEQ ID NO: 1461277 - RNA, 19 nt, Artificial Sequence
  Description of Artificial Sequence: Synthetic oligonucleotide
  Antisense strand to SEQ ID NO: 1461276
auagagaacagagagcucu

SEQ ID NO: 1461278 - RNA, 19 nt, Artificial Sequence
  Description of Artificial Sequence: Synthetic oligonucleotide
  Sense strand starting at position 594 of SEQ ID NO: 1244051
gcucucuguucucuaucau

SEQ ID NO: 1461279 - RNA, 19 nt, Artificial Sequence
  Description of Artificial Sequence: Synthetic oligonucleotide
  Antisense strand to SEQ ID NO: 1461278
augauagagaacagagagc

SEQ ID NO: 1461280 - RNA, 19 nt, Artificial Sequence
  Description of Artificial Sequence: Synthetic oligonucleotide
  Sense strand starting at position 643 of SEQ ID NO: 1244051
agcauucugccugagcgaa

SEQ ID NO: 1461281 - RNA, 19 nt, Artificial Sequence
  Description of Artificial Sequence: Synthetic oligonucleotide
  Antisense strand to SEQ ID NO: 1461280
uucgcucaggcagaaugcu

SEQ ID NO: 1461282 - RNA, 19 nt, Artificial Sequence
  Description of Artificial Sequence: Synthetic oligonucleotide
  Sense strand starting at position 661 of SEQ ID NO: 1244051
agccgucacuucuccaaca

SEQ ID NO: 1461283 - RNA, 19 nt, Artificial Sequence
  Description of Artificial Sequence: Synthetic oligonucleotide
  Antisense strand to SEQ ID NO: 1461282
uguuggagaagugacggcu

SEQ ID NO: 1461284 - RNA, 19 nt, Artificial Sequence
  Description of Artificial Sequence: Synthetic oligonucleotide
  Sense strand starting at position 851 of SEQ ID NO: 1244051
gcaugucagcccgaagauc

SEQ ID NO: 1461285 - RNA, 19 nt, Artificial Sequence
  Description of Artificial Sequence: Synthetic oligonucleotide
  Antisense strand to SEQ ID NO: 1461284
gaucuucgggcugacaugc

SEQ ID NO: 1461286 - RNA, 19 nt, Artificial Sequence
  Description of Artificial Sequence: Synthetic oligonucleotide
  Sense strand starting at position 1578 of SEQ ID NO: 1244051
ugcagcuuccagggugaga

SEQ ID NO: 1461287 - RNA, 19 nt, Artificial Sequence
  Description of Artificial Sequence: Synthetic oligonucleotide
  Antisense strand to SEQ ID NO: 1461286
ucucacccuggaagcugca

SEQ ID NO: 1461288 - RNA, 19 nt, Artificial Sequence
  Description of Artificial Sequence: Synthetic oligonucleotide
  Sense strand starting at position 1740 of SEQ ID NO: 1244051
uccgaagguuuagugacua

SEQ ID NO: 1461289 - RNA, 19 nt, Artificial Sequence
  Description of Artificial Sequence: Synthetic oligonucleotide
  Antisense strand to SEQ ID NO: 1461288
uagucacuaaaccuucgga

SEQ ID NO: 1461290 - RNA, 19 nt, Artificial Sequence
  Description of Artificial Sequence: Synthetic oligonucleotide
  Sense strand starting at position 1768 of SEQ ID NO: 1244051
uaaggagucuggcugaucu

SEQ ID NO: 1461291 - RNA, 19 nt, Artificial Sequence
  Description of Artificial Sequence: Synthetic oligonucleotide
  Antisense strand to SEQ ID NO: 1461290
agaucagccagacuccuua

SEQ ID NO: 1461292 - RNA, 19 nt, Artificial Sequence
  Description of Artificial Sequence: Synthetic oligonucleotide
  Sense strand starting at position 1837 of SEQ ID NO: 1244051
ugggaucgccugugaauug

SEQ ID NO: 1461293 - RNA, 19 nt, Artificial Sequence
  Description of Artificial Sequence: Synthetic oligonucleotide
  Antisense strand to SEQ ID NO: 1461292
caauucacaggcgauccca

SEQ ID NO: 1461294 - RNA, 19 nt, Artificial Sequence
  Description of Artificial Sequence: Synthetic oligonucleotide
  Sense strand starting at position 1949 of SEQ ID NO: 1244051
ggacaagggccugaauugu

SEQ ID NO: 1461295 - RNA, 19 nt, Artificial Sequence
  Description of Artificial Sequence: Synthetic oligonucleotide
  Antisense strand to SEQ ID NO: 1461294
acaauucaggcccuugucc

SEQ ID NO: 1461296 - RNA, 19 nt, Artificial Sequence
  Description of Artificial Sequence: Synthetic oligonucleotide
  Sense strand starting at position 2022 of SEQ ID NO: 1244051
ggcagucaugccuauuguu

SEQ ID NO: 1461297 - RNA, 19 nt, Artificial Sequence
  Description of Artificial Sequence: Synthetic oligonucleotide
  Antisense strand to SEQ ID NO: 1461296
aacaauaggcaugacugcc

SEQ ID NO: 1461298 - RNA, 19 nt, Artificial Sequence
  Description of Artificial Sequence: Synthetic oligonucleotide
  Sense strand starting at position 2031 of SEQ ID NO: 1244051
gccuauuguuaagucaaac

SEQ ID NO: 1461299 - RNA, 19 nt, Artificial Sequence
  Description of Artificial Sequence: Synthetic oligonucleotide
  Antisense strand to SEQ ID NO: 1461298
guuugacuuaacaauaggc

SEQ ID NO: 1461300 - RNA, 19 nt, Artificial Sequence
  Description of Artificial Sequence: Synthetic oligonucleotide
  Sense strand starting at position 2281 of SEQ ID NO: 1244051
agacccagucaucagguua

SEQ ID NO: 1461301 - RNA, 19 nt, Artificial Sequence
  Description of Artificial Sequence: Synthetic oligonucleotide
  Antisense strand to SEQ ID NO: 1461300
uaaccugaugacugggucu

SEQ ID NO: 1461302 - RNA, 19 nt, Artificial Sequence
  Description of Artificial Sequence: Synthetic oligonucleotide
  Sense strand starting at position 2330 of SEQ ID NO: 1244051
ggacuaucccagggagggu

SEQ ID NO: 1461303 - RNA, 19 nt, Artificial Sequence
  Description of Artificial Sequence: Synthetic oligonucleotide
  Antisense strand to SEQ ID NO: 1461302
acccucccugggauagucc

SEQ ID NO: 1461304 - RNA, 19 nt, Artificial Sequence
  Description of Artificial Sequence: Synthetic oligonucleotide
  Sense strand starting at position 2344 of SEQ ID NO: 1244051
aggguuucuggugaggauu

SEQ ID NO: 1461305 - RNA, 19 nt, Artificial Sequence
  Description of Artificial Sequence: Synthetic oligonucleotide
  Antisense strand to SEQ ID NO: 1461304
aauccucaccagaaacccu

SEQ ID NO: 1461306 - RNA, 19 nt, Artificial Sequence
  Description of Artificial Sequence: Synthetic oligonucleotide
  Sense strand starting at position 2365 of SEQ ID NO: 1244051
gugauacagccuuggagag

SEQ ID NO: 1461307 - RNA, 19 nt, Artificial Sequence
  Description of Artificial Sequence: Synthetic oligonucleotide
  Antisense strand to SEQ ID NO: 1461306
cucuccaaggcuguaucac

SEQ ID NO: 1461308 - RNA, 19 nt, Artificial Sequence
  Description of Artificial Sequence: Synthetic oligonucleotide
  Sense strand starting at position 2381 of SEQ ID NO: 1244051
gagcuaaacguguugcuuu

SEQ ID NO: 1461309 - RNA, 19 nt, Artificial Sequence
  Description of Artificial Sequence: Synthetic oligonucleotide
  Antisense strand to SEQ ID NO: 1461308
aaagcaacacguuuagcuc

SEQ ID NO: 1461310 - RNA, 19 nt, Artificial Sequence
  Description of Artificial Sequence: Synthetic oligonucleotide
  Sense strand starting at position 2604 of SEQ ID NO: 1244051
guguacgggcuuuaaugaa

SEQ ID NO: 1461311 - RNA, 19 nt, Artificial Sequence
  Description of Artificial Sequence: Synthetic oligonucleotide
  Antisense strand to SEQ ID NO: 1461310
uucauuaaagcccguacac

SEQ ID NO: 1461312 - RNA, 19 nt, Artificial Sequence
  Description of Artificial Sequence: Synthetic oligonucleotide
  Sense strand starting at position 2617 of SEQ ID NO: 1244051
aaugaagcccuguaagagu

SEQ ID NO: 1461313 - RNA, 19 nt, Artificial Sequence
  Description of Artificial Sequence: Synthetic oligonucleotide
  Antisense strand to SEQ ID NO: 1461312
acucuuacagggcuucauu

SEQ ID NO: 1461314 - RNA, 19 nt, Artificial Sequence
  Description of Artificial Sequence: Synthetic oligonucleotide
  Sense strand starting at position 2647 of SEQ ID NO: 1244051
auuccuugguguuucggaa

SEQ ID NO: 1461315 - RNA, 19 nt, Artificial Sequence
  Description of Artificial Sequence: Synthetic oligonucleotide
  Antisense strand to SEQ ID NO: 1461314
uuccgaaacaccaaggaau

SEQ ID NO: 1461316 - RNA, 19 nt, Artificial Sequence
  Description of Artificial Sequence: Synthetic oligonucleotide
  Sense strand starting at position 2770 of SEQ ID NO: 1244051
ucuguccuagucuagcaaa

SEQ ID NO: 1461317 - RNA, 19 nt, Artificial Sequence
  Description of Artificial Sequence: Synthetic oligonucleotide
  Antisense strand to SEQ ID NO: 1461316
uuugcuagacuaggacaga

SEQ ID NO: 1461318 - RNA, 19 nt, Artificial Sequence
  Description of Artificial Sequence: Synthetic oligonucleotide
  Sense strand starting at position 2881 of SEQ ID NO: 1244051
acuagcuuggcuggguaaa

SEQ ID NO: 1461319 - RNA, 19 nt, Artificial Sequence
  Description of Artificial Sequence: Synthetic oligonucleotide
  Antisense strand to SEQ ID NO: 1461318
uuuacccagccaagcuagu

SEQ ID NO: 1461320 - RNA, 19 nt, Artificial Sequence
  Description of Artificial Sequence: Synthetic oligonucleotide
  Sense strand starting at position 3102 of SEQ ID NO: 1244051
ccguuucuaccaggugaau

SEQ ID NO: 1461321 - RNA, 19 nt, Artificial Sequence
  Description of Artificial Sequence: Synthetic oligonucleotide
  Antisense strand to SEQ ID NO: 1461320
auucaccugguagaaacgg

SEQ ID NO: 1461322 - RNA, 19 nt, Artificial Sequence
  Description of Artificial Sequence: Synthetic oligonucleotide
  Sense strand starting at position 3104 of SEQ ID NO: 1244051
guuucuaccaggugaauga

SEQ ID NO: 1461323 - RNA, 19 nt, Artificial Sequence
  Description of Artificial Sequence: Synthetic oligonucleotide
  Antisense strand to SEQ ID NO: 1461322
ucauucaccugguagaaac

SEQ ID NO: 1461324 - RNA, 19 nt, Artificial Sequence
  Description of Artificial Sequence: Synthetic oligonucleotide
  Sense strand starting at position 3143 of SEQ ID NO: 1244051
gggcccuccacaugugaaa

SEQ ID NO: 1461325 - RNA, 19 nt, Artificial Sequence
  Description of Artificial Sequence: Synthetic oligonucleotide
  Antisense strand to SEQ ID NO: 1461324
uuucacauguggagggccc

SEQ ID NO: 1461326 - RNA, 19 nt, Artificial Sequence
  Description of Artificial Sequence: Synthetic oligonucleotide
  Sense strand starting at position 3180 of SEQ ID NO: 1244051
ggaguugggucaagauuga

SEQ ID NO: 1461327 - RNA, 19 nt, Artificial Sequence
  Description of Artificial Sequence: Synthetic oligonucleotide
  Antisense strand to SEQ ID NO: 1461326
ucaaucuugacccaacucc

SEQ ID NO: 1461328 - RNA, 19 nt, Artificial Sequence
  Description of Artificial Sequence: Synthetic oligonucleotide
  Sense strand starting at position 3219 of SEQ ID NO: 1244051
ugggauugcaccuguaauc

SEQ ID NO: 1461329 - RNA, 19 nt, Artificial Sequence
  Description of Artificial Sequence: Synthetic oligonucleotide
  Antisense strand to SEQ ID NO: 1461328
gauuacaggugcaauccca

SEQ ID NO: 1461330 - RNA, 19 nt, Artificial Sequence
  Description of Artificial Sequence: Synthetic oligonucleotide
  Sense strand starting at position 3472 of SEQ ID NO: 1244051
agagaaaccuugucucaga

SEQ ID NO: 1461331 - RNA, 19 nt, Artificial Sequence
  Description of Artificial Sequence: Synthetic oligonucleotide
  Antisense strand to SEQ ID NO: 1461330
ucugagacaagguuucucu

SEQ ID NO: 1461332 - RNA, 19 nt, Artificial Sequence
  Description of Artificial Sequence: Synthetic oligonucleotide
  Sense strand starting at position 3473 of SEQ ID NO: 1244051
gagaaaccuugucucagaa

SEQ ID NO: 1461333 - RNA, 19 nt, Artificial Sequence
  Description of Artificial Sequence: Synthetic oligonucleotide
  Antisense strand to SEQ ID NO: 1461332
uucugagacaagguuucuc

SEQ ID NO: 1461334 - RNA, 19 nt, Artificial Sequence
  Description of Artificial Sequence: Synthetic oligonucleotide
  Sense strand starting at position 3824 of SEQ ID NO: 1244051
aucugaguccuguagcgua

SEQ ID NO: 1461335 - RNA, 19 nt, Artificial Sequence
  Description of Artificial Sequence: Synthetic oligonucleotide
  Antisense strand to SEQ ID NO: 1461334
uacgcuacaggacucagau

SEQ ID NO: 1461336 - RNA, 19 nt, Artificial Sequence
  Description of Artificial Sequence: Synthetic oligonucleotide
  Sense strand starting at position 3862 of SEQ ID NO: 1244051
ggaagagagugaagaagua

SEQ ID NO: 1461337 - RNA, 19 nt, Artificial Sequence
  Description of Artificial Sequence: Synthetic oligonucleotide
  Antisense strand to SEQ ID NO: 1461336
uacuucuucacucucuucc

SEQ ID NO: 1461338 - RNA, 19 nt, Artificial Sequence
  Description of Artificial Sequence: Synthetic oligonucleotide
  Sense strand starting at position 3874 of SEQ ID NO: 1244051
agaaguaucuaagugacau

SEQ ID NO: 1461339 - RNA, 19 nt, Artificial Sequence
  Description of Artificial Sequence: Synthetic oligonucleotide
  Antisense strand to SEQ ID NO: 1461338
augucacuuagauacuucu

SEQ ID NO: 1461340 - RNA, 19 nt, Artificial Sequence
  Description of Artificial Sequence: Synthetic oligonucleotide
  Sense strand starting at position 3912 of SEQ ID NO: 1244051
cgccuucuucugucaagca

SEQ ID NO: 1461341 - RNA, 19 nt, Artificial Sequence
  Description of Artificial Sequence: Synthetic oligonucleotide
  Antisense strand to SEQ ID NO: 1461340
ugcuugacagaagaaggcg

SEQ ID NO: 1461342 - RNA, 19 nt, Artificial Sequence
  Description of Artificial Sequence: Synthetic oligonucleotide
  Sense strand starting at position 116 of SEQ ID NO: 1244052
agucguaacaacugugaag

SEQ ID NO: 1461343 - RNA, 19 nt, Artificial Sequence
  Description of Artificial Sequence: Synthetic oligonucleotide
  Antisense strand to SEQ ID NO: 1461342
cuucacaguuguuacgacu

SEQ ID NO: 1461344 - RNA, 19 nt, Artificial Sequence
  Description of Artificial Sequence: Synthetic oligonucleotide
  Sense strand starting at position 128 of SEQ ID NO: 1244052
ugugaagcuuaugucucua

SEQ ID NO: 1461345 - RNA, 19 nt, Artificial Sequence
  Description of Artificial Sequence: Synthetic oligonucleotide
  Antisense strand to SEQ ID NO: 1461344
uagagacauaagcuucaca

SEQ ID NO: 1461346 - RNA, 19 nt, Artificial Sequence
  Description of Artificial Sequence: Synthetic oligonucleotide
  Sense strand starting at position 130 of SEQ ID NO: 1244052
ugaagcuuaugucucuaca

SEQ ID NO: 1461347 - RNA, 19 nt, Artificial Sequence
  Description of Artificial Sequence: Synthetic oligonucleotide
  Antisense strand to SEQ ID NO: 1461346
uguagagacauaagcuuca

SEQ ID NO: 1461348 - RNA, 19 nt, Artificial Sequence
  Description of Artificial Sequence: Synthetic oligonucleotide
  Sense strand starting at position 133 of SEQ ID NO: 1244052
agcuuaugucucuacagau

SEQ ID NO: 1461349 - RNA, 19 nt, Artificial Sequence
  Description of Artificial Sequence: Synthetic oligonucleotide
  Antisense strand to SEQ ID NO: 1461348
aucuguagagacauaagcu

SEQ ID NO: 1461350 - RNA, 19 nt, Artificial Sequence
  Description of Artificial Sequence: Synthetic oligonucleotide
  Sense strand starting at position 241 of SEQ ID NO: 1244052
cgcuuuguaagggaaaggu

SEQ ID NO: 1461351 - RNA, 19 nt, Artificial Sequence
  Description of Artificial Sequence: Synthetic oligonucleotide
  Antisense strand to SEQ ID NO: 1461350
accuuucccuuacaaagcg

SEQ ID NO: 1461352 - RNA, 19 nt, Artificial Sequence
  Description of Artificial Sequence: Synthetic oligonucleotide
  Sense strand starting at position 636 of SEQ ID NO: 1244052
agugguuugacuggaguca

SEQ ID NO: 1461353 - RNA, 19 nt, Artificial Sequence
  Description of Artificial Sequence: Synthetic oligonucleotide
  Antisense strand to SEQ ID NO: 1461352
ugacuccagucaaaccacu

SEQ ID NO: 1461354 - RNA, 19 nt, Artificial Sequence
  Description of Artificial Sequence: Synthetic oligonucleotide
  Sense strand starting at position 649 of SEQ ID NO: 1244052
gagucaggauguccucuuu

SEQ ID NO: 1461355 - RNA, 19 nt, Artificial Sequence
  Description of Artificial Sequence: Synthetic oligonucleotide
  Antisense strand to SEQ ID NO: 1461354
aaagaggacauccugacuc

SEQ ID NO: 1461356 - RNA, 19 nt, Artificial Sequence
  Description of Artificial Sequence: Synthetic oligonucleotide
  Sense strand starting at position 690 of SEQ ID NO: 1244052
ccugcuuugcuagaauacu

SEQ ID NO: 1461357 - RNA, 19 nt, Artificial Sequence
  Description of Artificial Sequence: Synthetic oligonucleotide
  Antisense strand to SEQ ID NO: 1461356
aguauucuagcaaagcagg

SEQ ID NO: 1461358 - RNA, 19 nt, Artificial Sequence
  Description of Artificial Sequence: Synthetic oligonucleotide
  Sense strand starting at position 696 of SEQ ID NO: 1244052
uugcuagaauacuugguaa

SEQ ID NO: 1461359 - RNA, 19 nt, Artificial Sequence
  Description of Artificial Sequence: Synthetic oligonucleotide
  Antisense strand to SEQ ID NO: 1461358
uuaccaaguauucuagcaa

SEQ ID NO: 1461360 - RNA, 19 nt, Artificial Sequence
  Description of Artificial Sequence: Synthetic oligonucleotide
  Sense strand starting at position 698 of SEQ ID NO: 1244052
gcuagaauacuugguaaac

SEQ ID NO: 1461361 - RNA, 19 nt, Artificial Sequence
  Description of Artificial Sequence: Synthetic oligonucleotide
  Antisense strand to SEQ ID NO: 1461360
guuuaccaaguauucuagc

SEQ ID NO: 1461362 - RNA, 19 nt, Artificial Sequence
  Description of Artificial Sequence: Synthetic oligonucleotide
  Sense strand starting at position 699 of SEQ ID NO: 1244052
cuagaauacuugguaaacu

SEQ ID NO: 1461363 - RNA, 19 nt, Artificial Sequence
  Description of Artificial Sequence: Synthetic oligonucleotide
  Antisense strand to SEQ ID NO: 1461362
aguuuaccaaguauucuag

SEQ ID NO: 1461364 - RNA, 19 nt, Artificial Sequence
  Description of Artificial Sequence: Synthetic oligonucleotide
  Sense strand starting at position 742 of SEQ ID NO: 1244052
cuuugagcuccuuggagaa

SEQ ID NO: 1461365 - RNA, 19 nt, Artificial Sequence
  Description of Artificial Sequence: Synthetic oligonucleotide
  Antisense strand to SEQ ID NO: 1461364
uucuccaaggagcucaaag

SEQ ID NO: 1461366 - RNA, 19 nt, Artificial Sequence
  Description of Artificial Sequence: Synthetic oligonucleotide
  Sense strand starting at position 809 of SEQ ID NO: 1244052
uugcaaacgugaucuuacu

SEQ ID NO: 1461367 - RNA, 19 nt, Artificial Sequence
  Description of Artificial Sequence: Synthetic oligonucleotide
  Antisense strand to SEQ ID NO: 1461366
aguaagaucacguuugcaa

SEQ ID NO: 1461368 - RNA, 19 nt, Artificial Sequence
  Description of Artificial Sequence: Synthetic oligonucleotide
  Sense strand starting at position 1112 of SEQ ID NO: 1244052
acacauuuccuucguagca

SEQ ID NO: 1461369 - RNA, 19 nt, Artificial Sequence
  Description of Artificial Sequence: Synthetic oligonucleotide
  Antisense strand to SEQ ID NO: 1461368
ugcuacgaaggaaaugugu

SEQ ID NO: 1461370 - RNA, 19 nt, Artificial Sequence
  Description of Artificial Sequence: Synthetic oligonucleotide
  Sense strand starting at position 1218 of SEQ ID NO: 1244052
aacacugacucguuaggau

SEQ ID NO: 1461371 - RNA, 19 nt, Artificial Sequence
  Description of Artificial Sequence: Synthetic oligonucleotide
  Antisense strand to SEQ ID NO: 1461370
auccuaacgagucaguguu

SEQ ID NO: 1461372 - RNA, 19 nt, Artificial Sequence
  Description of Artificial Sequence: Synthetic oligonucleotide
  Sense strand starting at position 1268 of SEQ ID NO: 1244052
gggaauucccgacaccgau

SEQ ID NO: 1461373 - RNA, 19 nt, Artificial Sequence
  Description of Artificial Sequence: Synthetic oligonucleotide
  Antisense strand to SEQ ID NO: 1461372
aucggugucgggaauuccc

SEQ ID NO: 1461374 - RNA, 19 nt, Artificial Sequence
  Description of Artificial Sequence: Synthetic oligonucleotide
  Sense strand starting at position 1323 of SEQ ID NO: 1244052
agagcucucuguucucuau

SEQ ID NO: 1461375 - RNA, 19 nt, Artificial Sequence
  Description of Artificial Sequence: Synthetic oligonucleotide
  Antisense strand to SEQ ID NO: 1461374
auagagaacagagagcucu

SEQ ID NO: 1461376 - RNA, 19 nt, Artificial Sequence
  Description of Artificial Sequence: Synthetic oligonucleotide
  Sense strand starting at position 1375 of SEQ ID NO: 1244052
agcauucugccugagcgaa

SEQ ID NO: 1461377 - RNA, 19 nt, Artificial Sequence
  Description of Artificial Sequence: Synthetic oligonucleotide
  Antisense strand to SEQ ID NO: 1461376
uucgcucaggcagaaugcu

SEQ ID NO: 1461378 - RNA, 19 nt, Artificial Sequence
  Description of Artificial Sequence: Synthetic oligonucleotide
  Sense strand starting at position 1583 of SEQ ID NO: 1244052
gcaugucagcccgaagauc

SEQ ID NO: 1461379 - RNA, 19 nt, Artificial Sequence
  Description of Artificial Sequence: Synthetic oligonucleotide
  Antisense strand to SEQ ID NO: 1461378
gaucuucgggcugacaugc

SEQ ID NO: 1461380 - RNA, 19 nt, Artificial Sequence
  Description of Artificial Sequence: Synthetic oligonucleotide
  Sense strand starting at position 2310 of SEQ ID NO: 1244052
ugcagcuuccagggugaga

SEQ ID NO: 1461381 - RNA, 19 nt, Artificial Sequence
  Description of Artificial Sequence: Synthetic oligonucleotide
  Antisense strand to SEQ ID NO: 1461380
ucucacccuggaagcugca

SEQ ID NO: 1461382 - RNA, 19 nt, Artificial Sequence
  Description of Artificial Sequence: Synthetic oligonucleotide
  Sense strand starting at position 2472 of SEQ ID NO: 1244052
uccgaagguuuagugacua

SEQ ID NO: 1461383 - RNA, 19 nt, Artificial Sequence
  Description of Artificial Sequence: Synthetic oligonucleotide
  Antisense strand to SEQ ID NO: 1461382
uagucacuaaaccuucgga

SEQ ID NO: 1461384 - RNA, 19 nt, Artificial Sequence
  Description of Artificial Sequence: Synthetic oligonucleotide
  Sense strand starting at position 2500 of SEQ ID NO: 1244052
uaaggagucuggcugaucu

SEQ ID NO: 1461385 - RNA, 19 nt, Artificial Sequence
  Description of Artificial Sequence: Synthetic oligonucleotide
  Antisense strand to SEQ ID NO: 1461384
agaucagccagacuccuua

SEQ ID NO: 1461386 - RNA, 19 nt, Artificial Sequence
  Description of Artificial Sequence: Synthetic oligonucleotide
  Sense strand starting at position 2569 of SEQ ID NO: 1244052
ugggaucgccugugaauug

SEQ ID NO: 1461387 - RNA, 19 nt, Artificial Sequence
  Description of Artificial Sequence: Synthetic oligonucleotide
  Antisense strand to SEQ ID NO: 1461386
caauucacaggcgauccca

SEQ ID NO: 1461388 - RNA, 19 nt, Artificial Sequence
  Description of Artificial Sequence: Synthetic oligonucleotide
  Sense strand starting at position 2681 of SEQ ID NO: 1244052
ggacaagggccugaauugu

SEQ ID NO: 1461389 - RNA, 19 nt, Artificial Sequence
  Description of Artificial Sequence: Synthetic oligonucleotide
  Antisense strand to SEQ ID NO: 1461388
acaauucaggcccuugucc

SEQ ID NO: 1461390 - RNA, 19 nt, Artificial Sequence
  Description of Artificial Sequence: Synthetic oligonucleotide
  Sense strand starting at position 2763 of SEQ ID NO: 1244052
gccuauuguuaagucaaac

SEQ ID NO: 1461391 - RNA, 19 nt, Artificial Sequence
  Description of Artificial Sequence: Synthetic oligonucleotide
  Antisense strand to SEQ ID NO: 1461390
guuugacuuaacaauaggc

SEQ ID NO: 1461392 - RNA, 19 nt, Artificial Sequence
  Description of Artificial Sequence: Synthetic oligonucleotide
  Sense strand starting at position 3013 of SEQ ID NO: 1244052
agacccagucaucagguua

SEQ ID NO: 1461393 - RNA, 19 nt, Artificial Sequence
  Description of Artificial Sequence: Synthetic oligonucleotide
  Antisense strand to SEQ ID NO: 1461392
uaaccugaugacugggucu

SEQ ID NO: 1461394 - RNA, 19 nt, Artificial Sequence
  Description of Artificial Sequence: Synthetic oligonucleotide
  Sense strand starting at position 3062 of SEQ ID NO: 1244052
ggacuaucccagggagggu

SEQ ID NO: 1461395 - RNA, 19 nt, Artificial Sequence
  Description of Artificial Sequence: Synthetic oligonucleotide
  Antisense strand to SEQ ID NO: 1461394
acccucccugggauagucc

SEQ ID NO: 1461396 - RNA, 19 nt, Artificial Sequence
  Description of Artificial Sequence: Synthetic oligonucleotide
  Sense strand starting at position 3076 of SEQ ID NO: 1244052
aggguuucuggugaggauu

SEQ ID NO: 1461397 - RNA, 19 nt, Artificial Sequence
  Description of Artificial Sequence: Synthetic oligonucleotide
  Antisense strand to SEQ ID NO: 1461396
aauccucaccagaaacccu

SEQ ID NO: 1461398 - RNA, 19 nt, Artificial Sequence
  Description of Artificial Sequence: Synthetic oligonucleotide
  Sense strand starting at position 3097 of SEQ ID NO: 1244052
gugauacagccuuggagag

SEQ ID NO: 1461399 - RNA, 19 nt, Artificial Sequence
  Description of Artificial Sequence: Synthetic oligonucleotide
  Antisense strand to SEQ ID NO: 1461398
cucuccaaggcuguaucac

SEQ ID NO: 1461400 - RNA, 19 nt, Artificial Sequence
  Description of Artificial Sequence: Synthetic oligonucleotide
  Sense strand starting at position 3113 of SEQ ID NO: 1244052
gagcuaaacguguugcuuu

SEQ ID NO: 1461401 - RNA, 19 nt, Artificial Sequence
  Description of Artificial Sequence: Synthetic oligonucleotide
  Antisense strand to SEQ ID NO: 1461400
aaagcaacacguuuagcuc

SEQ ID NO: 1461402 - RNA, 19 nt, Artificial Sequence
  Description of Artificial Sequence: Synthetic oligonucleotide
  Sense strand starting at position 3336 of SEQ ID NO: 1244052
guguacgggcuuuaaugaa

SEQ ID NO: 1461403 - RNA, 19 nt, Artificial Sequence
  Description of Artificial Sequence: Synthetic oligonucleotide
  Antisense strand to SEQ ID NO: 1461402
uucauuaaagcccguacac

SEQ ID NO: 1461404 - RNA, 19 nt, Artificial Sequence
  Description of Artificial Sequence: Synthetic oligonucleotide
  Sense strand starting at position 3349 of SEQ ID NO: 1244052
aaugaagcccuguaagagu

SEQ ID NO: 1461405 - RNA, 19 nt, Artificial Sequence
  Description of Artificial Sequence: Synthetic oligonucleotide
  Antisense strand to SEQ ID NO: 1461404
acucuuacagggcuucauu

SEQ ID NO: 1461406 - RNA, 19 nt, Artificial Sequence
  Description of Artificial Sequence: Synthetic oligonucleotide
  Sense strand starting at position 3379 of SEQ ID NO: 1244052
auuccuugguguuucggaa

SEQ ID NO: 1461407 - RNA, 19 nt, Artificial Sequence
  Description of Artificial Sequence: Synthetic oligonucleotide
  Antisense strand to SEQ ID NO: 1461406
uuccgaaacaccaaggaau

SEQ ID NO: 1461408 - RNA, 19 nt, Artificial Sequence
  Description of Artificial Sequence: Synthetic oligonucleotide
  Sense strand starting at position 3502 of SEQ ID NO: 1244052
ucuguccuagucuagcaaa

SEQ ID NO: 1461409 - RNA, 19 nt, Artificial Sequence
  Description of Artificial Sequence: Synthetic oligonucleotide
  Antisense strand to SEQ ID NO: 1461408
uuugcuagacuaggacaga

SEQ ID NO: 1461410 - RNA, 19 nt, Artificial Sequence
  Description of Artificial Sequence: Synthetic oligonucleotide
  Sense strand starting at position 3613 of SEQ ID NO: 1244052
acuagcuuggcuggguaaa

SEQ ID NO: 1461411 - RNA, 19 nt, Artificial Sequence
  Description of Artificial Sequence: Synthetic oligonucleotide
  Antisense strand to SEQ ID NO: 1461410
uuuacccagccaagcuagu

SEQ ID NO: 1461412 - RNA, 19 nt, Artificial Sequence
  Description of Artificial Sequence: Synthetic oligonucleotide
  Sense strand starting at position 3834 of SEQ ID NO: 1244052
ccguuucuaccaggugaau

SEQ ID NO: 1461413 - RNA, 19 nt, Artificial Sequence
  Description of Artificial Sequence: Synthetic oligonucleotide
  Antisense strand to SEQ ID NO: 1461412
auucaccugguagaaacgg

SEQ ID NO: 1461414 - RNA, 19 nt, Artificial Sequence
  Description of Artificial Sequence: Synthetic oligonucleotide
  Sense strand starting at position 3836 of SEQ ID NO: 1244052
guuucuaccaggugaauga

SEQ ID NO: 1461415 - RNA, 19 nt, Artificial Sequence
  Description of Artificial Sequence: Synthetic oligonucleotide
  Antisense strand to SEQ ID NO: 1461414
ucauucaccugguagaaac

SEQ ID NO: 1461416 - RNA, 19 nt, Artificial Sequence
  Description of Artificial Sequence: Synthetic oligonucleotide
  Sense strand starting at position 3875 of SEQ ID NO: 1244052
gggcccuccacaugugaaa

SEQ ID NO: 1461417 - RNA, 19 nt, Artificial Sequence
  Description of Artificial Sequence: Synthetic oligonucleotide
  Antisense strand to SEQ ID NO: 1461416
uuucacauguggagggccc

SEQ ID NO: 1461418 - RNA, 19 nt, Artificial Sequence
  Description of Artificial Sequence: Synthetic oligonucleotide
  Sense strand starting at position 3912 of SEQ ID NO: 1244052
ggaguugggucaagauuga

SEQ ID NO: 1461419 - RNA, 19 nt, Artificial Sequence
  Description of Artificial Sequence: Synthetic oligonucleotide
  Antisense strand to SEQ ID NO: 1461418
ucaaucuugacccaacucc

SEQ ID NO: 1461420 - RNA, 19 nt, Artificial Sequence
  Description of Artificial Sequence: Synthetic oligonucleotide
  Sense strand starting at position 3951 of SEQ ID NO: 1244052
ugggauugcaccuguaauc

SEQ ID NO: 1461421 - RNA, 19 nt, Artificial Sequence
  Description of Artificial Sequence: Synthetic oligonucleotide
  Antisense strand to SEQ ID NO: 1461420
gauuacaggugcaauccca

SEQ ID NO: 1461422 - RNA, 19 nt, Artificial Sequence
  Description of Artificial Sequence: Synthetic oligonucleotide
  Sense strand starting at position 111 of SEQ ID NO: 1244053
gagacuuaggugcaccuua

SEQ ID NO: 1461423 - RNA, 19 nt, Artificial Sequence
  Description of Artificial Sequence: Synthetic oligonucleotide
  Antisense strand to SEQ ID NO: 1461422
uaaggugcaccuaagucuc

SEQ ID NO: 1461424 - RNA, 19 nt, Artificial Sequence
  Description of Artificial Sequence: Synthetic oligonucleotide
  Sense strand starting at position 116 of SEQ ID NO: 1244053
uuaggugcaccuuaucgaa

SEQ ID NO: 1461425 - RNA, 19 nt, Artificial Sequence
  Description of Artificial Sequence: Synthetic oligonucleotide
  Antisense strand to SEQ ID NO: 1461424
uucgauaaggugcaccuaa

SEQ ID NO: 1461426 - RNA, 19 nt, Artificial Sequence
  Description of Artificial Sequence: Synthetic oligonucleotide
  Sense strand starting at position 118 of SEQ ID NO: 1244053
aggugcaccuuaucgaaau

SEQ ID NO: 1461427 - RNA, 19 nt, Artificial Sequence
  Description of Artificial Sequence: Synthetic oligonucleotide
  Antisense strand to SEQ ID NO: 1461426
auuucgauaaggugcaccu

SEQ ID NO: 1461428 - RNA, 19 nt, Artificial Sequence
  Description of Artificial Sequence: Synthetic oligonucleotide
  Sense strand starting at position 139 of SEQ ID NO: 1244053
gcaaauguauaauccaaag

SEQ ID NO: 1461429 - RNA, 19 nt, Artificial Sequence
  Description of Artificial Sequence: Synthetic oligonucleotide
  Antisense strand to SEQ ID NO: 1461428
cuuuggauuauacauuugc

SEQ ID NO: 1461430 - RNA, 19 nt, Artificial Sequence
  Description of Artificial Sequence: Synthetic oligonucleotide
  Sense strand starting at position 305 of SEQ ID NO: 1244053
agggcagagggucgauaau

SEQ ID NO: 1461431 - RNA, 19 nt, Artificial Sequence
  Description of Artificial Sequence: Synthetic oligonucleotide
  Antisense strand to SEQ ID NO: 1461430
auuaucgacccucugcccu

SEQ ID NO: 1461432 - RNA, 19 nt, Artificial Sequence
  Description of Artificial Sequence: Synthetic oligonucleotide
  Sense strand starting at position 528 of SEQ ID NO: 1244053
ugcauuaggcaauacgaga

SEQ ID NO: 1461433 - RNA, 19 nt, Artificial Sequence
  Description of Artificial Sequence: Synthetic oligonucleotide
  Antisense strand to SEQ ID NO: 1461432
ucucguauugccuaaugca

SEQ ID NO: 1461434 - RNA, 19 nt, Artificial Sequence
  Description of Artificial Sequence: Synthetic oligonucleotide
  Sense strand starting at position 533 of SEQ ID NO: 1244053
uaggcaauacgagacuauu

SEQ ID NO: 1461435 - RNA, 19 nt, Artificial Sequence
  Description of Artificial Sequence: Synthetic oligonucleotide
  Antisense strand to SEQ ID NO: 1461434
aauagucucguauugccua

SEQ ID NO: 1461436 - RNA, 19 nt, Artificial Sequence
  Description of Artificial Sequence: Synthetic oligonucleotide
  Sense strand starting at position 542 of SEQ ID NO: 1244053
cgagacuauuuacaacgaa

SEQ ID NO: 1461437 - RNA, 19 nt, Artificial Sequence
  Description of Artificial Sequence: Synthetic oligonucleotide
  Antisense strand to SEQ ID NO: 1461436
uucguuguaaauagucucg

SEQ ID NO: 1461438 - RNA, 19 nt, Artificial Sequence
  Description of Artificial Sequence: Synthetic oligonucleotide
  Sense strand starting at position 575 of SEQ ID NO: 1244053
guggaaucuugacugugca

SEQ ID NO: 1461439 - RNA, 19 nt, Artificial Sequence
  Description of Artificial Sequence: Synthetic oligonucleotide
  Antisense strand to SEQ ID NO: 1461438
ugcacagucaagauuccac

SEQ ID NO: 1461440 - RNA, 19 nt, Artificial Sequence
  Description of Artificial Sequence: Synthetic oligonucleotide
  Sense strand starting at position 578 of SEQ ID NO: 1244053
gaaucuugacugugcacga

SEQ ID NO: 1461441 - RNA, 19 nt, Artificial Sequence
  Description of Artificial Sequence: Synthetic oligonucleotide
  Antisense strand to SEQ ID NO: 1461440
ucgugcacagucaagauuc

SEQ ID NO: 1461442 - RNA, 19 nt, Artificial Sequence
  Description of Artificial Sequence: Synthetic oligonucleotide
  Sense strand starting at position 683 of SEQ ID NO: 1244053
gcgacauuaccagguaauu

SEQ ID NO: 1461443 - RNA, 19 nt, Artificial Sequence
  Description of Artificial Sequence: Synthetic oligonucleotide
  Antisense strand to SEQ ID NO: 1461442
aauuaccugguaaugucgc

SEQ ID NO: 1461444 - RNA, 19 nt, Artificial Sequence
  Description of Artificial Sequence: Synthetic oligonucleotide
  Sense strand starting at position 773 of SEQ ID NO: 1244053
ugagaugugugcuuugaca

SEQ ID NO: 1461445 - RNA, 19 nt, Artificial Sequence
  Description of Artificial Sequence: Synthetic oligonucleotide
  Antisense strand to SEQ ID NO: 1461444
ugucaaagcacacaucuca

SEQ ID NO: 1461446 - RNA, 19 nt, Artificial Sequence
  Description of Artificial Sequence: Synthetic oligonucleotide
  Sense strand starting at position 775 of SEQ ID NO: 1244053
agaugugugcuuugacaaa

SEQ ID NO: 1461447 - RNA, 19 nt, Artificial Sequence
  Description of Artificial Sequence: Synthetic oligonucleotide
  Antisense strand to SEQ ID NO: 1461446
uuugucaaagcacacaucu

SEQ ID NO: 1461448 - RNA, 19 nt, Artificial Sequence
  Description of Artificial Sequence: Synthetic oligonucleotide
  Sense strand starting at position 2394 of SEQ ID NO: 1244053
gcgagaagucgagaucaga

SEQ ID NO: 1461449 - RNA, 19 nt, Artificial Sequence
  Description of Artificial Sequence: Synthetic oligonucleotide
  Antisense strand to SEQ ID NO: 1461448
ucugaucucgacuucucgc

SEQ ID NO: 1461450 - RNA, 19 nt, Artificial Sequence
  Description of Artificial Sequence: Synthetic oligonucleotide
  Sense strand starting at position 2604 of SEQ ID NO: 1244053
uagugaagugcugauagcu

SEQ ID NO: 1461451 - RNA, 19 nt, Artificial Sequence
  Description of Artificial Sequence: Synthetic oligonucleotide
  Antisense strand to SEQ ID NO: 1461450
agcuaucagcacuucacua

SEQ ID NO: 1461452 - RNA, 19 nt, Artificial Sequence
  Description of Artificial Sequence: Synthetic oligonucleotide
  Sense strand starting at position 2629 of SEQ ID NO: 1244053
ugucguuacacuggaagga

SEQ ID NO: 1461453 - RNA, 19 nt, Artificial Sequence
  Description of Artificial Sequence: Synthetic oligonucleotide
  Antisense strand to SEQ ID NO: 1461452
uccuuccaguguaacgaca

SEQ ID NO: 1461454 - RNA, 19 nt, Artificial Sequence
  Description of Artificial Sequence: Synthetic oligonucleotide
  Sense strand starting at position 2630 of SEQ ID NO: 1244053
gucguuacacuggaaggaa

SEQ ID NO: 1461455 - RNA, 19 nt, Artificial Sequence
  Description of Artificial Sequence: Synthetic oligonucleotide
  Antisense strand to SEQ ID NO: 1461454
uuccuuccaguguaacgac

SEQ ID NO: 1461456 - RNA, 19 nt, Artificial Sequence
  Description of Artificial Sequence: Synthetic oligonucleotide
  Sense strand starting at position 2696 of SEQ ID NO: 1244053
acuucuugggcuggguuaa

SEQ ID NO: 1461457 - RNA, 19 nt, Artificial Sequence
  Description of Artificial Sequence: Synthetic oligonucleotide
  Antisense strand to SEQ ID NO: 1461456
uuaacccagcccaagaagu

SEQ ID NO: 1461458 - RNA, 19 nt, Artificial Sequence
  Description of Artificial Sequence: Synthetic oligonucleotide
  Sense strand starting at position 2697 of SEQ ID NO: 1244053
cuucuugggcuggguuaau

SEQ ID NO: 1461459 - RNA, 19 nt, Artificial Sequence
  Description of Artificial Sequence: Synthetic oligonucleotide
  Antisense strand to SEQ ID NO: 1461458
auuaacccagcccaagaag

SEQ ID NO: 1461460 - RNA, 19 nt, Artificial Sequence
  Description of Artificial Sequence: Synthetic oligonucleotide
  Sense strand starting at position 2708 of SEQ ID NO: 1244053
ggguuaaugugagcaggua

SEQ ID NO: 1461461 - RNA, 19 nt, Artificial Sequence
  Description of Artificial Sequence: Synthetic oligonucleotide
  Antisense strand to SEQ ID NO: 1461460
uaccugcucacauuaaccc

SEQ ID NO: 1461462 - RNA, 19 nt, Artificial Sequence
  Description of Artificial Sequence: Synthetic oligonucleotide
  Sense strand starting at position 2821 of SEQ ID NO: 1244053
ccguguguucaguucugac

SEQ ID NO: 1461463 - RNA, 19 nt, Artificial Sequence
  Description of Artificial Sequence: Synthetic oligonucleotide
  Antisense strand to SEQ ID NO: 1461462
gucagaacugaacacacgg

SEQ ID NO: 1461464 - RNA, 19 nt, Artificial Sequence
  Description of Artificial Sequence: Synthetic oligonucleotide
  Sense strand starting at position 2830 of SEQ ID NO: 1244053
caguucugaccuugaaggu

SEQ ID NO: 1461465 - RNA, 19 nt, Artificial Sequence
  Description of Artificial Sequence: Synthetic oligonucleotide
  Antisense strand to SEQ ID NO: 1461464
accuucaaggucagaacug

SEQ ID NO: 1461466 - RNA, 19 nt, Artificial Sequence
  Description of Artificial Sequence: Synthetic oligonucleotide
  Sense strand starting at position 2831 of SEQ ID NO: 1244053
aguucugaccuugaagguu

SEQ ID NO: 1461467 - RNA, 19 nt, Artificial Sequence
  Description of Artificial Sequence: Synthetic oligonucleotide
  Antisense strand to SEQ ID NO: 1461466
aaccuucaaggucagaacu

SEQ ID NO: 1461468 - RNA, 19 nt, Artificial Sequence
  Description of Artificial Sequence: Synthetic oligonucleotide
  Sense strand starting at position 2879 of SEQ ID NO: 1244053
uaugaaaguccuggugauc

SEQ ID NO: 1461469 - RNA, 19 nt, Artificial Sequence
  Description of Artificial Sequence: Synthetic oligonucleotide
  Antisense strand to SEQ ID NO: 1461468
gaucaccaggacuuucaua

SEQ ID NO: 1461470 - RNA, 19 nt, Artificial Sequence
  Description of Artificial Sequence: Synthetic oligonucleotide
  Sense strand starting at position 2882 of SEQ ID NO: 1244053
gaaaguccuggugaucuga

SEQ ID NO: 1461471 - RNA, 19 nt, Artificial Sequence
  Description of Artificial Sequence: Synthetic oligonucleotide
  Antisense strand to SEQ ID NO: 1461470
ucagaucaccaggacuuuc

SEQ ID NO: 1461472 - RNA, 19 nt, Artificial Sequence
  Description of Artificial Sequence: Synthetic oligonucleotide
  Sense strand starting at position 2919 of SEQ ID NO: 1244053
gcucuauuuccuggagcug

SEQ ID NO: 1461473 - RNA, 19 nt, Artificial Sequence
  Description of Artificial Sequence: Synthetic oligonucleotide
  Antisense strand to SEQ ID NO: 1461472
cagcuccaggaaauagagc

SEQ ID NO: 1461474 - RNA, 19 nt, Artificial Sequence
  Description of Artificial Sequence: Synthetic oligonucleotide
  Sense strand starting at position 3266 of SEQ ID NO: 1244053
uugguuaucacauggaguc

SEQ ID NO: 1461475 - RNA, 19 nt, Artificial Sequence
  Description of Artificial Sequence: Synthetic oligonucleotide
  Antisense strand to SEQ ID NO: 1461474
gacuccaugugauaaccaa

SEQ ID NO: 1461476 - RNA, 19 nt, Artificial Sequence
  Description of Artificial Sequence: Synthetic oligonucleotide
  Sense strand starting at position 3267 of SEQ ID NO: 1244053
ugguuaucacauggagucu

SEQ ID NO: 1461477 - RNA, 19 nt, Artificial Sequence
  Description of Artificial Sequence: Synthetic oligonucleotide
  Antisense strand to SEQ ID NO: 1461476
agacuccaugugauaacca

SEQ ID NO: 1461478 - RNA, 19 nt, Artificial Sequence
  Description of Artificial Sequence: Synthetic oligonucleotide
  Sense strand starting at position 3268 of SEQ ID NO: 1244053
gguuaucacauggagucuu

SEQ ID NO: 1461479 - RNA, 19 nt, Artificial Sequence
  Description of Artificial Sequence: Synthetic oligonucleotide
  Antisense strand to SEQ ID NO: 1461478
aagacuccaugugauaacc

SEQ ID NO: 1461480 - RNA, 19 nt, Artificial Sequence
  Description of Artificial Sequence: Synthetic oligonucleotide
  Sense strand starting at position 3406 of SEQ ID NO: 1244053
gucauuacccggcaaauau

SEQ ID NO: 1461481 - RNA, 19 nt, Artificial Sequence
  Description of Artificial Sequence: Synthetic oligonucleotide
  Antisense strand to SEQ ID NO: 1461480
auauuugccggguaaugac

SEQ ID NO: 1461482 - RNA, 19 nt, Artificial Sequence
  Description of Artificial Sequence: Synthetic oligonucleotide
  Sense strand starting at position 3732 of SEQ ID NO: 1244053
augucuucuggccauguua

SEQ ID NO: 1461483 - RNA, 19 nt, Artificial Sequence
  Description of Artificial Sequence: Synthetic oligonucleotide
  Antisense strand to SEQ ID NO: 1461482
uaacauggccagaagacau

SEQ ID NO: 1461484 - RNA, 19 nt, Artificial Sequence
  Description of Artificial Sequence: Synthetic oligonucleotide
  Sense strand starting at position 3753 of SEQ ID NO: 1244053
agaguagaagagugaguau

SEQ ID NO: 1461485 - RNA, 19 nt, Artificial Sequence
  Description of Artificial Sequence: Synthetic oligonucleotide
  Antisense strand to SEQ ID NO: 1461484
auacucacucuucuacucu

SEQ ID NO: 1461486 - RNA, 19 nt, Artificial Sequence
  Description of Artificial Sequence: Synthetic oligonucleotide
  Sense strand starting at position 3756 of SEQ ID NO: 1244053
guagaagagugaguauuag

SEQ ID NO: 1461487 - RNA, 19 nt, Artificial Sequence
  Description of Artificial Sequence: Synthetic oligonucleotide
  Antisense strand to SEQ ID NO: 1461486
cuaauacucacucuucuac

SEQ ID NO: 1461488 - RNA, 19 nt, Artificial Sequence
  Description of Artificial Sequence: Synthetic oligonucleotide
  Sense strand starting at position 3762 of SEQ ID NO: 1244053
gagugaguauuagcuugaa

SEQ ID NO: 1461489 - RNA, 19 nt, Artificial Sequence
  Description of Artificial Sequence: Synthetic oligonucleotide
  Antisense strand to SEQ ID NO: 1461488
uucaagcuaauacucacuc

SEQ ID NO: 1461490 - RNA, 19 nt, Artificial Sequence
  Description of Artificial Sequence: Synthetic oligonucleotide
  Sense strand starting at position 3765 of SEQ ID NO: 1244053
ugaguauuagcuugaaucu

SEQ ID NO: 1461491 - RNA, 19 nt, Artificial Sequence
  Description of Artificial Sequence: Synthetic oligonucleotide
  Antisense strand to SEQ ID NO: 1461490
agauucaagcuaauacuca

SEQ ID NO: 1461492 - RNA, 19 nt, Artificial Sequence
  Description of Artificial Sequence: Synthetic oligonucleotide
  Sense strand starting at position 3766 of SEQ ID NO: 1244053
gaguauuagcuugaaucua

SEQ ID NO: 1461493 - RNA, 19 nt, Artificial Sequence
  Description of Artificial Sequence: Synthetic oligonucleotide
  Antisense strand to SEQ ID NO: 1461492
uagauucaagcuaauacuc

SEQ ID NO: 1461494 - RNA, 19 nt, Artificial Sequence
  Description of Artificial Sequence: Synthetic oligonucleotide
  Sense strand starting at position 3777 of SEQ ID NO: 1244053
ugaaucuaauacguaugua

SEQ ID NO: 1461495 - RNA, 19 nt, Artificial Sequence
  Description of Artificial Sequence: Synthetic oligonucleotide
  Antisense strand to SEQ ID NO: 1461494
uacauacguauuagauuca

SEQ ID NO: 1461496 - RNA, 19 nt, Artificial Sequence
  Description of Artificial Sequence: Synthetic oligonucleotide
  Sense strand starting at position 3780 of SEQ ID NO: 1244053
aucuaauacguauguauga

SEQ ID NO: 1461497 - RNA, 19 nt, Artificial Sequence
  Description of Artificial Sequence: Synthetic oligonucleotide
  Antisense strand to SEQ ID NO: 1461496
ucauacauacguauuagau

SEQ ID NO: 1461498 - RNA, 19 nt, Artificial Sequence
  Description of Artificial Sequence: Synthetic oligonucleotide
  Sense strand starting at position 3781 of SEQ ID NO: 1244053
ucuaauacguauguaugau

SEQ ID NO: 1461499 - RNA, 19 nt, Artificial Sequence
  Description of Artificial Sequence: Synthetic oligonucleotide
  Antisense strand to SEQ ID NO: 1461498
aucauacauacguauuaga

SEQ ID NO: 1461500 - RNA, 19 nt, Artificial Sequence
  Description of Artificial Sequence: Synthetic oligonucleotide
  Sense strand starting at position 3782 of SEQ ID NO: 1244053
cuaauacguauguaugaug

SEQ ID NO: 1461501 - RNA, 19 nt, Artificial Sequence
  Description of Artificial Sequence: Synthetic oligonucleotide
  Antisense strand to SEQ ID NO: 1461500
caucauacauacguauuag

SEQ ID NO: 1461502 - RNA, 19 nt, Artificial Sequence
  Description of Artificial Sequence: Synthetic oligonucleotide
  Sense strand starting at position 1 of SEQ ID NO: 1244054
cugcucugcugguuccaaa

SEQ ID NO: 1461503 - RNA, 19 nt, Artificial Sequence
  Description of Artificial Sequence: Synthetic oligonucleotide
  Antisense strand to SEQ ID NO: 1461502
uuuggaaccagcagagcag

SEQ ID NO: 1461504 - RNA, 19 nt, Artificial Sequence
  Description of Artificial Sequence: Synthetic oligonucleotide
  Sense strand starting at position 179 of SEQ ID NO: 1244054
gucccaucagcauggcaaa

SEQ ID NO: 1461505 - RNA, 19 nt, Artificial Sequence
  Description of Artificial Sequence: Synthetic oligonucleotide
  Antisense strand to SEQ ID NO: 1461504
uuugccaugcugaugggac

SEQ ID NO: 1461506 - RNA, 19 nt, Artificial Sequence
  Description of Artificial Sequence: Synthetic oligonucleotide
  Sense strand starting at position 402 of SEQ ID NO: 1244054
augucagggccguggaauu

SEQ ID NO: 1461507 - RNA, 19 nt, Artificial Sequence
  Description of Artificial Sequence: Synthetic oligonucleotide
  Antisense strand to SEQ ID NO: 1461506
aauuccacggcccugacau

SEQ ID NO: 1461508 - RNA, 19 nt, Artificial Sequence
  Description of Artificial Sequence: Synthetic oligonucleotide
  Sense strand starting at position 412 of SEQ ID NO: 1244054
cguggaauugccugaggag

SEQ ID NO: 1461509 - RNA, 19 nt, Artificial Sequence
  Description of Artificial Sequence: Synthetic oligonucleotide
  Antisense strand to SEQ ID NO: 1461508
cuccucaggcaauuccacg

SEQ ID NO: 1461510 - RNA, 19 nt, Artificial Sequence
  Description of Artificial Sequence: Synthetic oligonucleotide
  Sense strand starting at position 496 of SEQ ID NO: 1244054
ggucaagggucacugacuu

SEQ ID NO: 1461511 - RNA, 19 nt, Artificial Sequence
  Description of Artificial Sequence: Synthetic oligonucleotide
  Antisense strand to SEQ ID NO: 1461510
aagucagugacccuugacc

SEQ ID NO: 1461512 - RNA, 19 nt, Artificial Sequence
  Description of Artificial Sequence: Synthetic oligonucleotide
  Sense strand starting at position 657 of SEQ ID NO: 1244054
ucuugaggucagugcuacu

SEQ ID NO: 1461513 - RNA, 19 nt, Artificial Sequence
  Description of Artificial Sequence: Synthetic oligonucleotide
  Antisense strand to SEQ ID NO: 1461512
aguagcacugaccucaaga

SEQ ID NO: 1461514 - RNA, 19 nt, Artificial Sequence
  Description of Artificial Sequence: Synthetic oligonucleotide
  Sense strand starting at position 670 of SEQ ID NO: 1244054
gcuacugacucccuaaguu

SEQ ID NO: 1461515 - RNA, 19 nt, Artificial Sequence
  Description of Artificial Sequence: Synthetic oligonucleotide
  Antisense strand to SEQ ID NO: 1461514
aacuuagggagucaguagc

SEQ ID NO: 1461516 - RNA, 19 nt, Artificial Sequence
  Description of Artificial Sequence: Synthetic oligonucleotide
  Sense strand starting at position 1308 of SEQ ID NO: 1244054
ggugcaucuugggcagaca

SEQ ID NO: 1461517 - RNA, 19 nt, Artificial Sequence
  Description of Artificial Sequence: Synthetic oligonucleotide
  Antisense strand to SEQ ID NO: 1461516
ugucugcccaagaugcacc

SEQ ID NO: 1461518 - RNA, 19 nt, Artificial Sequence
  Description of Artificial Sequence: Synthetic oligonucleotide
  Sense strand starting at position 1309 of SEQ ID NO: 1244054
gugcaucuugggcagacau

SEQ ID NO: 1461519 - RNA, 19 nt, Artificial Sequence
  Description of Artificial Sequence: Synthetic oligonucleotide
  Antisense strand to SEQ ID NO: 1461518
augucugcccaagaugcac

SEQ ID NO: 1461520 - RNA, 19 nt, Artificial Sequence
  Description of Artificial Sequence: Synthetic oligonucleotide
  Sense strand starting at position 1567 of SEQ ID NO: 1244054
gaggcuggcuugguacaaa

SEQ ID NO: 1461521 - RNA, 19 nt, Artificial Sequence
  Description of Artificial Sequence: Synthetic oligonucleotide
  Antisense strand to SEQ ID NO: 1461520
uuuguaccaagccagccuc

SEQ ID NO: 1461522 - RNA, 19 nt, Artificial Sequence
  Description of Artificial Sequence: Synthetic oligonucleotide
  Sense strand starting at position 1579 of SEQ ID NO: 1244054
guacaaaugucccuccaga

SEQ ID NO: 1461523 - RNA, 19 nt, Artificial Sequence
  Description of Artificial Sequence: Synthetic oligonucleotide
  Antisense strand to SEQ ID NO: 1461522
ucuggagggacauuuguac

SEQ ID NO: 1461524 - RNA, 19 nt, Artificial Sequence
  Description of Artificial Sequence: Synthetic oligonucleotide
  Sense strand starting at position 2302 of SEQ ID NO: 1244054
uugaauuagagcuacgguu

SEQ ID NO: 1461525 - RNA, 19 nt, Artificial Sequence
  Description of Artificial Sequence: Synthetic oligonucleotide
  Antisense strand to SEQ ID NO: 1461524
aaccguagcucuaauucaa

SEQ ID NO: 1461526 - RNA, 19 nt, Artificial Sequence
  Description of Artificial Sequence: Synthetic oligonucleotide
  Sense strand starting at position 2304 of SEQ ID NO: 1244054
gaauuagagcuacgguuuc

SEQ ID NO: 1461527 - RNA, 19 nt, Artificial Sequence
  Description of Artificial Sequence: Synthetic oligonucleotide
  Antisense strand to SEQ ID NO: 1461526
gaaaccguagcucuaauuc

SEQ ID NO: 1461528 - RNA, 19 nt, Artificial Sequence
  Description of Artificial Sequence: Synthetic oligonucleotide
  Sense strand starting at position 2451 of SEQ ID NO: 1244054
ggagcaacuugguucguaa

SEQ ID NO: 1461529 - RNA, 19 nt, Artificial Sequence
  Description of Artificial Sequence: Synthetic oligonucleotide
  Antisense strand to SEQ ID NO: 1461528
uuacgaaccaaguugcucc

SEQ ID NO: 1461530 - RNA, 19 nt, Artificial Sequence
  Description of Artificial Sequence: Synthetic oligonucleotide
  Sense strand starting at position 2485 of SEQ ID NO: 1244054
uugcgacucuuguccagaa

SEQ ID NO: 1461531 - RNA, 19 nt, Artificial Sequence
  Description of Artificial Sequence: Synthetic oligonucleotide
  Antisense strand to SEQ ID NO: 1461530
uucuggacaagagucgcaa

SEQ ID NO: 1461532 - RNA, 19 nt, Artificial Sequence
  Description of Artificial Sequence: Synthetic oligonucleotide
  Sense strand starting at position 2489 of SEQ ID NO: 1244054
gacucuuguccagaaggua

SEQ ID NO: 1461533 - RNA, 19 nt, Artificial Sequence
  Description of Artificial Sequence: Synthetic oligonucleotide
  Antisense strand to SEQ ID NO: 1461532
uaccuucuggacaagaguc

SEQ ID NO: 1461534 - RNA, 19 nt, Artificial Sequence
  Description of Artificial Sequence: Synthetic oligonucleotide
  Sense strand starting at position 2574 of SEQ ID NO: 1244054
aacagugcuguuuguaaca

SEQ ID NO: 1461535 - RNA, 19 nt, Artificial Sequence
  Description of Artificial Sequence: Synthetic oligonucleotide
  Antisense strand to SEQ ID NO: 1461534
uguuacaaacagcacuguu

SEQ ID NO: 1461536 - RNA, 19 nt, Artificial Sequence
  Description of Artificial Sequence: Synthetic oligonucleotide
  Sense strand starting at position 2601 of SEQ ID NO: 1244054
uuggaaagugcccaaacau

SEQ ID NO: 1461537 - RNA, 19 nt, Artificial Sequence
  Description of Artificial Sequence: Synthetic oligonucleotide
  Antisense strand to SEQ ID NO: 1461536
auguuugggcacuuuccaa

SEQ ID NO: 1461538 - RNA, 19 nt, Artificial Sequence
  Description of Artificial Sequence: Synthetic oligonucleotide
  Sense strand starting at position 2618 of SEQ ID NO: 1244054
auccauuaucguuagaaug

SEQ ID NO: 1461539 - RNA, 19 nt, Artificial Sequence
  Description of Artificial Sequence: Synthetic oligonucleotide
  Antisense strand to SEQ ID NO: 1461538
cauucuaacgauaauggau

SEQ ID NO: 1461540 - RNA, 19 nt, Artificial Sequence
  Description of Artificial Sequence: Synthetic oligonucleotide
  Sense strand starting at position 2673 of SEQ ID NO: 1244054
gagagugagugaucuacaa

SEQ ID NO: 1461541 - RNA, 19 nt, Artificial Sequence
  Description of Artificial Sequence: Synthetic oligonucleotide
  Antisense strand to SEQ ID NO: 1461540
uuguagaucacucacucuc

SEQ ID NO: 1461542 - RNA, 19 nt, Artificial Sequence
  Description of Artificial Sequence: Synthetic oligonucleotide
  Sense strand starting at position 2677 of SEQ ID NO: 1244054
gugagugaucuacaauuau

SEQ ID NO: 1461543 - RNA, 19 nt, Artificial Sequence
  Description of Artificial Sequence: Synthetic oligonucleotide
  Antisense strand to SEQ ID NO: 1461542
auaauuguagaucacucac

SEQ ID NO: 1461544 - RNA, 19 nt, Artificial Sequence
  Description of Artificial Sequence: Synthetic oligonucleotide
  Sense strand starting at position 2818 of SEQ ID NO: 1244054
acaacagucugcccuuaga

SEQ ID NO: 1461545 - RNA, 19 nt, Artificial Sequence
  Description of Artificial Sequence: Synthetic oligonucleotide
  Antisense strand to SEQ ID NO: 1461544
ucuaagggcagacuguugu

SEQ ID NO: 1461546 - RNA, 19 nt, Artificial Sequence
  Description of Artificial Sequence: Synthetic oligonucleotide
  Sense strand starting at position 2872 of SEQ ID NO: 1244054
ucuggaaugcuggagaugu

SEQ ID NO: 1461547 - RNA, 19 nt, Artificial Sequence
  Description of Artificial Sequence: Synthetic oligonucleotide
  Antisense strand to SEQ ID NO: 1461546
acaucuccagcauuccaga

SEQ ID NO: 1461548 - RNA, 19 nt, Artificial Sequence
  Description of Artificial Sequence: Synthetic oligonucleotide
  Sense strand starting at position 3243 of SEQ ID NO: 1244054
ccgagauguuguuucuuaa

SEQ ID NO: 1461549 - RNA, 19 nt, Artificial Sequence
  Description of Artificial Sequence: Synthetic oligonucleotide
  Antisense strand to SEQ ID NO: 1461548
uuaagaaacaacaucucgg

SEQ ID NO: 1461550 - RNA, 19 nt, Artificial Sequence
  Description of Artificial Sequence: Synthetic oligonucleotide
  Sense strand starting at position 3246 of SEQ ID NO: 1244054
agauguuguuucuuaaucu

SEQ ID NO: 1461551 - RNA, 19 nt, Artificial Sequence
  Description of Artificial Sequence: Synthetic oligonucleotide
  Antisense strand to SEQ ID NO: 1461550
agauuaagaaacaacaucu

SEQ ID NO: 1461552 - RNA, 19 nt, Artificial Sequence
  Description of Artificial Sequence: Synthetic oligonucleotide
  Sense strand starting at position 3250 of SEQ ID NO: 1244054
guuguuucuuaaucugagu

SEQ ID NO: 1461553 - RNA, 19 nt, Artificial Sequence
  Description of Artificial Sequence: Synthetic oligonucleotide
  Antisense strand to SEQ ID NO: 1461552
acucagauuaagaaacaac

SEQ ID NO: 1461554 - RNA, 19 nt, Artificial Sequence
  Description of Artificial Sequence: Synthetic oligonucleotide
  Sense strand starting at position 3263 of SEQ ID NO: 1244054
cugaguguuggugacacga

SEQ ID NO: 1461555 - RNA, 19 nt, Artificial Sequence
  Description of Artificial Sequence: Synthetic oligonucleotide
  Antisense strand to SEQ ID NO: 1461554
ucgugucaccaacacucag

SEQ ID NO: 1461556 - RNA, 19 nt, Artificial Sequence
  Description of Artificial Sequence: Synthetic oligonucleotide
  Sense strand starting at position 3280 of SEQ ID NO: 1244054
gagugcccugggugugaaa

SEQ ID NO: 1461557 - RNA, 19 nt, Artificial Sequence
  Description of Artificial Sequence: Synthetic oligonucleotide
  Antisense strand to SEQ ID NO: 1461556
uuucacacccagggcacuc

SEQ ID NO: 1461558 - RNA, 19 nt, Artificial Sequence
  Description of Artificial Sequence: Synthetic oligonucleotide
  Sense strand starting at position 3302 of SEQ ID NO: 1244054
cauugaguugggcauugau

SEQ ID NO: 1461559 - RNA, 19 nt, Artificial Sequence
  Description of Artificial Sequence: Synthetic oligonucleotide
  Antisense strand to SEQ ID NO: 1461558
aucaaugcccaacucaaug

SEQ ID NO: 1461560 - RNA, 19 nt, Artificial Sequence
  Description of Artificial Sequence: Synthetic oligonucleotide
  Sense strand starting at position 3305 of SEQ ID NO: 1244054
ugaguugggcauugaugac

SEQ ID NO: 1461561 - RNA, 19 nt, Artificial Sequence
  Description of Artificial Sequence: Synthetic oligonucleotide
  Antisense strand to SEQ ID NO: 1461560
gucaucaaugcccaacuca

SEQ ID NO: 1461562 - RNA, 19 nt, Artificial Sequence
  Description of Artificial Sequence: Synthetic oligonucleotide
  Sense strand starting at position 3490 of SEQ ID NO: 1244054
guacacggguucuuuaaga

SEQ ID NO: 1461563 - RNA, 19 nt, Artificial Sequence
  Description of Artificial Sequence: Synthetic oligonucleotide
  Antisense strand to SEQ ID NO: 1461562
ucuuaaagaacccguguac

SEQ ID NO: 1461564 - RNA, 19 nt, Artificial Sequence
  Description of Artificial Sequence: Synthetic oligonucleotide
  Sense strand starting at position 3500 of SEQ ID NO: 1244054
ucuuuaagauuggugugca

SEQ ID NO: 1461565 - RNA, 19 nt, Artificial Sequence
  Description of Artificial Sequence: Synthetic oligonucleotide
  Antisense strand to SEQ ID NO: 1461564
ugcacaccaaucuuaaaga

SEQ ID NO: 1461566 - RNA, 19 nt, Artificial Sequence
  Description of Artificial Sequence: Synthetic oligonucleotide
  Sense strand starting at position 3503 of SEQ ID NO: 1244054
uuaagauuggugugcauca

SEQ ID NO: 1461567 - RNA, 19 nt, Artificial Sequence
  Description of Artificial Sequence: Synthetic oligonucleotide
  Antisense strand to SEQ ID NO: 1461566
ugaugcacaccaaucuuaa

SEQ ID NO: 1461568 - RNA, 19 nt, Artificial Sequence
  Description of Artificial Sequence: Synthetic oligonucleotide
  Sense strand starting at position 3533 of SEQ ID NO: 1244054
ggagcuuguuaagucagau

SEQ ID NO: 1461569 - RNA, 19 nt, Artificial Sequence
  Description of Artificial Sequence: Synthetic oligonucleotide
  Antisense strand to SEQ ID NO: 1461568
aucugacuuaacaagcucc

SEQ ID NO: 1461570 - RNA, 19 nt, Artificial Sequence
  Description of Artificial Sequence: Synthetic oligonucleotide
  Sense strand starting at position 3554 of SEQ ID NO: 1244054
cuaggcuccucuccuagaa

SEQ ID NO: 1461571 - RNA, 19 nt, Artificial Sequence
  Description of Artificial Sequence: Synthetic oligonucleotide
  Antisense strand to SEQ ID NO: 1461570
uucuaggagaggagccuag

SEQ ID NO: 1461572 - RNA, 19 nt, Artificial Sequence
  Description of Artificial Sequence: Synthetic oligonucleotide
  Sense strand starting at position 3584 of SEQ ID NO: 1244054
agguguagggucuagaaug

SEQ ID NO: 1461573 - RNA, 19 nt, Artificial Sequence
  Description of Artificial Sequence: Synthetic oligonucleotide
  Antisense strand to SEQ ID NO: 1461572
cauucuagacccuacaccu

SEQ ID NO: 1461574 - RNA, 19 nt, Artificial Sequence
  Description of Artificial Sequence: Synthetic oligonucleotide
  Sense strand starting at position 3585 of SEQ ID NO: 1244054
gguguagggucuagaaugu

SEQ ID NO: 1461575 - RNA, 19 nt, Artificial Sequence
  Description of Artificial Sequence: Synthetic oligonucleotide
  Antisense strand to SEQ ID NO: 1461574
acauucuagacccuacacc

SEQ ID NO: 1461576 - RNA, 19 nt, Artificial Sequence
  Description of Artificial Sequence: Synthetic oligonucleotide
  Sense strand starting at position 3725 of SEQ ID NO: 1244054
cagagaaaccuuugguuuc

SEQ ID NO: 1461577 - RNA, 19 nt, Artificial Sequence
  Description of Artificial Sequence: Synthetic oligonucleotide
  Antisense strand to SEQ ID NO: 1461576
gaaaccaaagguuucucug

SEQ ID NO: 1461578 - RNA, 19 nt, Artificial Sequence
  Description of Artificial Sequence: Synthetic oligonucleotide
  Sense strand starting at position 3908 of SEQ ID NO: 1244054
cuguuaacacaggguaaga

SEQ ID NO: 1461579 - RNA, 19 nt, Artificial Sequence
  Description of Artificial Sequence: Synthetic oligonucleotide
  Antisense strand to SEQ ID NO: 1461578
ucuuacccuguguuaacag

SEQ ID NO: 1461580 - RNA, 19 nt, Artificial Sequence
  Description of Artificial Sequence: Synthetic oligonucleotide
  Sense strand starting at position 3929 of SEQ ID NO: 1244054
guuagaaucucagaaugaa

SEQ ID NO: 1461581 - RNA, 19 nt, Artificial Sequence
  Description of Artificial Sequence: Synthetic oligonucleotide
  Antisense strand to SEQ ID NO: 1461580
uucauucugagauucuaac

SEQ ID NO: 1461582 - RNA, 19 nt, Artificial Sequence
  Description of Artificial Sequence: Synthetic oligonucleotide
  Sense strand starting at position 233 of SEQ ID NO: 1244055
cagcuugguucccaauaga

SEQ ID NO: 1461583 - RNA, 19 nt, Artificial Sequence
  Description of Artificial Sequence: Synthetic oligonucleotide
  Antisense strand to SEQ ID NO: 1461582
ucuauugggaaccaagcug

SEQ ID NO: 1461584 - RNA, 19 nt, Artificial Sequence
  Description of Artificial Sequence: Synthetic oligonucleotide
  Sense strand starting at position 550 of SEQ ID NO: 1244055
cccguaguucuugaguagu

SEQ ID NO: 1461585 - RNA, 19 nt, Artificial Sequence
  Description of Artificial Sequence: Synthetic oligonucleotide
  Antisense strand to SEQ ID NO: 1461584
acuacucaagaacuacggg

SEQ ID NO: 1461586 - RNA, 19 nt, Artificial Sequence
  Description of Artificial Sequence: Synthetic oligonucleotide
  Sense strand starting at position 558 of SEQ ID NO: 1244055
ucuugaguagugcgucauc

SEQ ID NO: 1461587 - RNA, 19 nt, Artificial Sequence
  Description of Artificial Sequence: Synthetic oligonucleotide
  Antisense strand to SEQ ID NO: 1461586
gaugacgcacuacucaaga

SEQ ID NO: 1461588 - RNA, 19 nt, Artificial Sequence
  Description of Artificial Sequence: Synthetic oligonucleotide
  Sense strand starting at position 560 of SEQ ID NO: 1244055
uugaguagugcgucaucgu

SEQ ID NO: 1461589 - RNA, 19 nt, Artificial Sequence
  Description of Artificial Sequence: Synthetic oligonucleotide
  Antisense strand to SEQ ID NO: 1461588
acgaugacgcacuacucaa

SEQ ID NO: 1461590 - RNA, 19 nt, Artificial Sequence
  Description of Artificial Sequence: Synthetic oligonucleotide
  Sense strand starting at position 561 of SEQ ID NO: 1244055
ugaguagugcgucaucguu

SEQ ID NO: 1461591 - RNA, 19 nt, Artificial Sequence
  Description of Artificial Sequence: Synthetic oligonucleotide
  Antisense strand to SEQ ID NO: 1461590
aacgaugacgcacuacuca

SEQ ID NO: 1461592 - RNA, 19 nt, Artificial Sequence
  Description of Artificial Sequence: Synthetic oligonucleotide
  Sense strand starting at position 567 of SEQ ID NO: 1244055
gugcgucaucguuguguga

SEQ ID NO: 1461593 - RNA, 19 nt, Artificial Sequence
  Description of Artificial Sequence: Synthetic oligonucleotide
  Antisense strand to SEQ ID NO: 1461592
ucacacaacgaugacgcac

SEQ ID NO: 1461594 - RNA, 19 nt, Artificial Sequence
  Description of Artificial Sequence: Synthetic oligonucleotide
  Sense strand starting at position 570 of SEQ ID NO: 1244055
cgucaucguugugugaguu

SEQ ID NO: 1461595 - RNA, 19 nt, Artificial Sequence
  Description of Artificial Sequence: Synthetic oligonucleotide
  Antisense strand to SEQ ID NO: 1461594
aacucacacaacgaugacg

SEQ ID NO: 1461596 - RNA, 19 nt, Artificial Sequence
  Description of Artificial Sequence: Synthetic oligonucleotide
  Sense strand starting at position 571 of SEQ ID NO: 1244055
gucaucguugugugaguuu

SEQ ID NO: 1461597 - RNA, 19 nt, Artificial Sequence
  Description of Artificial Sequence: Synthetic oligonucleotide
  Antisense strand to SEQ ID NO: 1461596
aaacucacacaacgaugac

SEQ ID NO: 1461598 - RNA, 19 nt, Artificial Sequence
  Description of Artificial Sequence: Synthetic oligonucleotide
  Sense strand starting at position 580 of SEQ ID NO: 1244055
gugugaguuugugucgaac

SEQ ID NO: 1461599 - RNA, 19 nt, Artificial Sequence
  Description of Artificial Sequence: Synthetic oligonucleotide
  Antisense strand to SEQ ID NO: 1461598
guucgacacaaacucacac

SEQ ID NO: 1461600 - RNA, 19 nt, Artificial Sequence
  Description of Artificial Sequence: Synthetic oligonucleotide
  Sense strand starting at position 583 of SEQ ID NO: 1244055
ugaguuugugucgaacuug

SEQ ID NO: 1461601 - RNA, 19 nt, Artificial Sequence
  Description of Artificial Sequence: Synthetic oligonucleotide
  Antisense strand to SEQ ID NO: 1461600
caaguucgacacaaacuca

SEQ ID NO: 1461602 - RNA, 19 nt, Artificial Sequence
  Description of Artificial Sequence: Synthetic oligonucleotide
  Sense strand starting at position 600 of SEQ ID NO: 1244055
ugcuguaggucugcuugaa

SEQ ID NO: 1461603 - RNA, 19 nt, Artificial Sequence
  Description of Artificial Sequence: Synthetic oligonucleotide
  Antisense strand to SEQ ID NO: 1461602
uucaagcagaccuacagca

SEQ ID NO: 1461604 - RNA, 19 nt, Artificial Sequence
  Description of Artificial Sequence: Synthetic oligonucleotide
  Sense strand starting at position 604 of SEQ ID NO: 1244055
guaggucugcuugaagauc

SEQ ID NO: 1461605 - RNA, 19 nt, Artificial Sequence
  Description of Artificial Sequence: Synthetic oligonucleotide
  Antisense strand to SEQ ID NO: 1461604
gaucuucaagcagaccuac

SEQ ID NO: 1461606 - RNA, 19 nt, Artificial Sequence
  Description of Artificial Sequence: Synthetic oligonucleotide
  Sense strand starting at position 612 of SEQ ID NO: 1244055
gcuugaagaucugcccagu

SEQ ID NO: 1461607 - RNA, 19 nt, Artificial Sequence
  Description of Artificial Sequence: Synthetic oligonucleotide
  Antisense strand to SEQ ID NO: 1461606
acugggcagaucuucaagc

SEQ ID NO: 1461608 - RNA, 19 nt, Artificial Sequence
  Description of Artificial Sequence: Synthetic oligonucleotide
  Sense strand starting at position 833 of SEQ ID NO: 1244055
gcagcaguguuucucuaac

SEQ ID NO: 1461609 - RNA, 19 nt, Artificial Sequence
  Description of Artificial Sequence: Synthetic oligonucleotide
  Antisense strand to SEQ ID NO: 1461608
guuagagaaacacugcugc

SEQ ID NO: 1461610 - RNA, 19 nt, Artificial Sequence
  Description of Artificial Sequence: Synthetic oligonucleotide
  Sense strand starting at position 835 of SEQ ID NO: 1244055
agcaguguuucucuaacac

SEQ ID NO: 1461611 - RNA, 19 nt, Artificial Sequence
  Description of Artificial Sequence: Synthetic oligonucleotide
  Antisense strand to SEQ ID NO: 1461610
guguuagagaaacacugcu

SEQ ID NO: 1461612 - RNA, 19 nt, Artificial Sequence
  Description of Artificial Sequence: Synthetic oligonucleotide
  Sense strand starting at position 937 of SEQ ID NO: 1244055
gguccuuuaggaggucaua

SEQ ID NO: 1461613 - RNA, 19 nt, Artificial Sequence
  Description of Artificial Sequence: Synthetic oligonucleotide
  Antisense strand to SEQ ID NO: 1461612
uaugaccuccuaaaggacc

SEQ ID NO: 1461614 - RNA, 19 nt, Artificial Sequence
  Description of Artificial Sequence: Synthetic oligonucleotide
  Sense strand starting at position 985 of SEQ ID NO: 1244055
ggcuguuggcgaagacacu

SEQ ID NO: 1461615 - RNA, 19 nt, Artificial Sequence
  Description of Artificial Sequence: Synthetic oligonucleotide
  Antisense strand to SEQ ID NO: 1461614
agugucuucgccaacagcc

SEQ ID NO: 1461616 - RNA, 19 nt, Artificial Sequence
  Description of Artificial Sequence: Synthetic oligonucleotide
  Sense strand starting at position 1176 of SEQ ID NO: 1244055
guguuuccucccuguugga

SEQ ID NO: 1461617 - RNA, 19 nt, Artificial Sequence
  Description of Artificial Sequence: Synthetic oligonucleotide
  Antisense strand to SEQ ID NO: 1461616
uccaacagggaggaaacac

SEQ ID NO: 1461618 - RNA, 19 nt, Artificial Sequence
  Description of Artificial Sequence: Synthetic oligonucleotide
  Sense strand starting at position 1202 of SEQ ID NO: 1244055
ggaauagacucugagaaac

SEQ ID NO: 1461619 - RNA, 19 nt, Artificial Sequence
  Description of Artificial Sequence: Synthetic oligonucleotide
  Antisense strand to SEQ ID NO: 1461618
guuucucagagucuauucc

SEQ ID NO: 1461620 - RNA, 19 nt, Artificial Sequence
  Description of Artificial Sequence: Synthetic oligonucleotide
  Sense strand starting at position 1253 of SEQ ID NO: 1244055
uacuucuguuccuuuggga

SEQ ID NO: 1461621 - RNA, 19 nt, Artificial Sequence
  Description of Artificial Sequence: Synthetic oligonucleotide
  Antisense strand to SEQ ID NO: 1461620
ucccaaaggaacagaagua

SEQ ID NO: 1461622 - RNA, 19 nt, Artificial Sequence
  Description of Artificial Sequence: Synthetic oligonucleotide
  Sense strand starting at position 1256 of SEQ ID NO: 1244055
uucuguuccuuugggauau

SEQ ID NO: 1461623 - RNA, 19 nt, Artificial Sequence
  Description of Artificial Sequence: Synthetic oligonucleotide
  Antisense strand to SEQ ID NO: 1461622
auaucccaaaggaacagaa

SEQ ID NO: 1461624 - RNA, 19 nt, Artificial Sequence
  Description of Artificial Sequence: Synthetic oligonucleotide
  Sense strand starting at position 1257 of SEQ ID NO: 1244055
ucuguuccuuugggauaua

SEQ ID NO: 1461625 - RNA, 19 nt, Artificial Sequence
  Description of Artificial Sequence: Synthetic oligonucleotide
  Antisense strand to SEQ ID NO: 1461624
uauaucccaaaggaacaga

SEQ ID NO: 1461626 - RNA, 19 nt, Artificial Sequence
  Description of Artificial Sequence: Synthetic oligonucleotide
  Sense strand starting at position 1496 of SEQ ID NO: 1244055
acuccugguaggugucaaa

SEQ ID NO: 1461627 - RNA, 19 nt, Artificial Sequence
  Description of Artificial Sequence: Synthetic oligonucleotide
  Antisense strand to SEQ ID NO: 1461626
uuugacaccuaccaggagu

SEQ ID NO: 1461628 - RNA, 19 nt, Artificial Sequence
  Description of Artificial Sequence: Synthetic oligonucleotide
  Sense strand starting at position 1758 of SEQ ID NO: 1244055
ccaggagcuuucugagauu

SEQ ID NO: 1461629 - RNA, 19 nt, Artificial Sequence
  Description of Artificial Sequence: Synthetic oligonucleotide
  Antisense strand to SEQ ID NO: 1461628
aaucucagaaagcuccugg

SEQ ID NO: 1461630 - RNA, 19 nt, Artificial Sequence
  Description of Artificial Sequence: Synthetic oligonucleotide
  Sense strand starting at position 1764 of SEQ ID NO: 1244055
gcuuucugagauuggccaa

SEQ ID NO: 1461631 - RNA, 19 nt, Artificial Sequence
  Description of Artificial Sequence: Synthetic oligonucleotide
  Antisense strand to SEQ ID NO: 1461630
uuggccaaucucagaaagc

SEQ ID NO: 1461632 - RNA, 19 nt, Artificial Sequence
  Description of Artificial Sequence: Synthetic oligonucleotide
  Sense strand starting at position 1767 of SEQ ID NO: 1244055
uucugagauuggccaaaua

SEQ ID NO: 1461633 - RNA, 19 nt, Artificial Sequence
  Description of Artificial Sequence: Synthetic oligonucleotide
  Antisense strand to SEQ ID NO: 1461632
uauuuggccaaucucagaa

SEQ ID NO: 1461634 - RNA, 19 nt, Artificial Sequence
  Description of Artificial Sequence: Synthetic oligonucleotide
  Sense strand starting at position 1778 of SEQ ID NO: 1244055
gccaaauacugggcuuaca

SEQ ID NO: 1461635 - RNA, 19 nt, Artificial Sequence
  Description of Artificial Sequence: Synthetic oligonucleotide
  Antisense strand to SEQ ID NO: 1461634
uguaagcccaguauuuggc

SEQ ID NO: 1461636 - RNA, 19 nt, Artificial Sequence
  Description of Artificial Sequence: Synthetic oligonucleotide
  Sense strand starting at position 2197 of SEQ ID NO: 1244055
cagagugucagccagagau

SEQ ID NO: 1461637 - RNA, 19 nt, Artificial Sequence
  Description of Artificial Sequence: Synthetic oligonucleotide
  Antisense strand to SEQ ID NO: 1461636
aucucuggcugacacucug

SEQ ID NO: 1461638 - RNA, 19 nt, Artificial Sequence
  Description of Artificial Sequence: Synthetic oligonucleotide
  Sense strand starting at position 2199 of SEQ ID NO: 1244055
gagugucagccagagauac

SEQ ID NO: 1461639 - RNA, 19 nt, Artificial Sequence
  Description of Artificial Sequence: Synthetic oligonucleotide
  Antisense strand to SEQ ID NO: 1461638
guaucucuggcugacacuc

SEQ ID NO: 1461640 - RNA, 19 nt, Artificial Sequence
  Description of Artificial Sequence: Synthetic oligonucleotide
  Sense strand starting at position 2292 of SEQ ID NO: 1244055
ggcgaaggaugucaggaua

SEQ ID NO: 1461641 - RNA, 19 nt, Artificial Sequence
  Description of Artificial Sequence: Synthetic oligonucleotide
  Antisense strand to SEQ ID NO: 1461640
uauccugacauccuucgcc

SEQ ID NO: 1461642 - RNA, 19 nt, Artificial Sequence
  Description of Artificial Sequence: Synthetic oligonucleotide
  Sense strand starting at position 2682 of SEQ ID NO: 1244055
aacagaaaucccgggagca

SEQ ID NO: 1461643 - RNA, 19 nt, Artificial Sequence
  Description of Artificial Sequence: Synthetic oligonucleotide
  Antisense strand to SEQ ID NO: 1461642
ugcucccgggauuucuguu

SEQ ID NO: 1461644 - RNA, 19 nt, Artificial Sequence
  Description of Artificial Sequence: Synthetic oligonucleotide
  Sense strand starting at position 2818 of SEQ ID NO: 1244055
gccgaaagaugcucuauca

SEQ ID NO: 1461645 - RNA, 19 nt, Artificial Sequence
  Description of Artificial Sequence: Synthetic oligonucleotide
  Antisense strand to SEQ ID NO: 1461644
ugauagagcaucuuucggc

SEQ ID NO: 1461646 - RNA, 19 nt, Artificial Sequence
  Description of Artificial Sequence: Synthetic oligonucleotide
  Sense strand starting at position 2925 of SEQ ID NO: 1244055
uggcuaaccaggugaaauc

SEQ ID NO: 1461647 - RNA, 19 nt, Artificial Sequence
  Description of Artificial Sequence: Synthetic oligonucleotide
  Antisense strand to SEQ ID NO: 1461646
gauuucaccugguuagcca

SEQ ID NO: 1461648 - RNA, 19 nt, Artificial Sequence
  Description of Artificial Sequence: Synthetic oligonucleotide
  Sense strand starting at position 3250 of SEQ ID NO: 1244055
ugugcauucucacaucuga

SEQ ID NO: 1461649 - RNA, 19 nt, Artificial Sequence
  Description of Artificial Sequence: Synthetic oligonucleotide
  Antisense strand to SEQ ID NO: 1461648
ucagaugugagaaugcaca

SEQ ID NO: 1461650 - RNA, 19 nt, Artificial Sequence
  Description of Artificial Sequence: Synthetic oligonucleotide
  Sense strand starting at position 3273 of SEQ ID NO: 1244055
ccacuugucuugugaagga

SEQ ID NO: 1461651 - RNA, 19 nt, Artificial Sequence
  Description of Artificial Sequence: Synthetic oligonucleotide
  Antisense strand to SEQ ID NO: 1461650
uccuucacaagacaagugg

SEQ ID NO: 1461652 - RNA, 19 nt, Artificial Sequence
  Description of Artificial Sequence: Synthetic oligonucleotide
  Sense strand starting at position 3277 of SEQ ID NO: 1244055
uugucuugugaaggaggua

SEQ ID NO: 1461653 - RNA, 19 nt, Artificial Sequence
  Description of Artificial Sequence: Synthetic oligonucleotide
  Antisense strand to SEQ ID NO: 1461652
uaccuccuucacaagacaa

SEQ ID NO: 1461654 - RNA, 19 nt, Artificial Sequence
  Description of Artificial Sequence: Synthetic oligonucleotide
  Sense strand starting at position 3278 of SEQ ID NO: 1244055
ugucuugugaaggagguau

SEQ ID NO: 1461655 - RNA, 19 nt, Artificial Sequence
  Description of Artificial Sequence: Synthetic oligonucleotide
  Antisense strand to SEQ ID NO: 1461654
auaccuccuucacaagaca

SEQ ID NO: 1461656 - RNA, 19 nt, Artificial Sequence
  Description of Artificial Sequence: Synthetic oligonucleotide
  Sense strand starting at position 3280 of SEQ ID NO: 1244055
ucuugugaaggagguauua

SEQ ID NO: 1461657 - RNA, 19 nt, Artificial Sequence
  Description of Artificial Sequence: Synthetic oligonucleotide
  Antisense strand to SEQ ID NO: 1461656
uaauaccuccuucacaaga

SEQ ID NO: 1461658 - RNA, 19 nt, Artificial Sequence
  Description of Artificial Sequence: Synthetic oligonucleotide
  Sense strand starting at position 3763 of SEQ ID NO: 1244055
ugugaugcuacugaguuau

SEQ ID NO: 1461659 - RNA, 19 nt, Artificial Sequence
  Description of Artificial Sequence: Synthetic oligonucleotide
  Antisense strand to SEQ ID NO: 1461658
auaacucaguagcaucaca

SEQ ID NO: 1461660 - RNA, 19 nt, Artificial Sequence
  Description of Artificial Sequence: Synthetic oligonucleotide
  Sense strand starting at position 3769 of SEQ ID NO: 1244055
gcuacugaguuauuuaguu

SEQ ID NO: 1461661 - RNA, 19 nt, Artificial Sequence
  Description of Artificial Sequence: Synthetic oligonucleotide
  Antisense strand to SEQ ID NO: 1461660
aacuaaauaacucaguagc

SEQ ID NO: 1461662 - RNA, 19 nt, Artificial Sequence
  Description of Artificial Sequence: Synthetic oligonucleotide
  Sense strand starting at position 155 of SEQ ID NO: 1244056
cagccugguucccaauaga

SEQ ID NO: 1461663 - RNA, 19 nt, Artificial Sequence
  Description of Artificial Sequence: Synthetic oligonucleotide
  Antisense strand to SEQ ID NO: 1461662
ucuauugggaaccaggcug

SEQ ID NO: 1461664 - RNA, 19 nt, Artificial Sequence
  Description of Artificial Sequence: Synthetic oligonucleotide
  Sense strand starting at position 483 of SEQ ID NO: 1244056
ugagcagugcgucaucguu

SEQ ID NO: 1461665 - RNA, 19 nt, Artificial Sequence
  Description of Artificial Sequence: Synthetic oligonucleotide
  Antisense strand to SEQ ID NO: 1461664
aacgaugacgcacugcuca

SEQ ID NO: 1461666 - RNA, 19 nt, Artificial Sequence
  Description of Artificial Sequence: Synthetic oligonucleotide
  Sense strand starting at position 489 of SEQ ID NO: 1244056
gugcgucaucguugugcga

SEQ ID NO: 1461667 - RNA, 19 nt, Artificial Sequence
  Description of Artificial Sequence: Synthetic oligonucleotide
  Antisense strand to SEQ ID NO: 1461666
ucgcacaacgaugacgcac

SEQ ID NO: 1461668 - RNA, 19 nt, Artificial Sequence
  Description of Artificial Sequence: Synthetic oligonucleotide
  Sense strand starting at position 490 of SEQ ID NO: 1244056
ugcgucaucguugugcgau

SEQ ID NO: 1461669 - RNA, 19 nt, Artificial Sequence
  Description of Artificial Sequence: Synthetic oligonucleotide
  Antisense strand to SEQ ID NO: 1461668
aucgcacaacgaugacgca

SEQ ID NO: 1461670 - RNA, 19 nt, Artificial Sequence
  Description of Artificial Sequence: Synthetic oligonucleotide
  Sense strand starting at position 491 of SEQ ID NO: 1244056
gcgucaucguugugcgauu

SEQ ID NO: 1461671 - RNA, 19 nt, Artificial Sequence
  Description of Artificial Sequence: Synthetic oligonucleotide
  Antisense strand to SEQ ID NO: 1461670
aaucgcacaacgaugacgc

SEQ ID NO: 1461672 - RNA, 19 nt, Artificial Sequence
  Description of Artificial Sequence: Synthetic oligonucleotide
  Sense strand starting at position 492 of SEQ ID NO: 1244056
cgucaucguugugcgauuu

SEQ ID NO: 1461673 - RNA, 19 nt, Artificial Sequence
  Description of Artificial Sequence: Synthetic oligonucleotide
  Antisense strand to SEQ ID NO: 1461672
aaaucgcacaacgaugacg

SEQ ID NO: 1461674 - RNA, 19 nt, Artificial Sequence
  Description of Artificial Sequence: Synthetic oligonucleotide
  Sense strand starting at position 513 of SEQ ID NO: 1244056
ugucaaacuugcuguagga

SEQ ID NO: 1461675 - RNA, 19 nt, Artificial Sequence
  Description of Artificial Sequence: Synthetic oligonucleotide
  Antisense strand to SEQ ID NO: 1461674
uccuacagcaaguuugaca

SEQ ID NO: 1461676 - RNA, 19 nt, Artificial Sequence
  Description of Artificial Sequence: Synthetic oligonucleotide
  Sense strand starting at position 522 of SEQ ID NO: 1244056
ugcuguaggacugauugaa

SEQ ID NO: 1461677 - RNA, 19 nt, Artificial Sequence
  Description of Artificial Sequence: Synthetic oligonucleotide
  Antisense strand to SEQ ID NO: 1461676
uucaaucaguccuacagca

SEQ ID NO: 1461678 - RNA, 19 nt, Artificial Sequence
  Description of Artificial Sequence: Synthetic oligonucleotide
  Sense strand starting at position 534 of SEQ ID NO: 1244056
gauugaagaucugcccagu

SEQ ID NO: 1461679 - RNA, 19 nt, Artificial Sequence
  Description of Artificial Sequence: Synthetic oligonucleotide
  Antisense strand to SEQ ID NO: 1461678
acugggcagaucuucaauc

SEQ ID NO: 1461680 - RNA, 19 nt, Artificial Sequence
  Description of Artificial Sequence: Synthetic oligonucleotide
  Sense strand starting at position 704 of SEQ ID NO: 1244056
ugaagaauacggugaguuc

SEQ ID NO: 1461681 - RNA, 19 nt, Artificial Sequence
  Description of Artificial Sequence: Synthetic oligonucleotide
  Antisense strand to SEQ ID NO: 1461680
gaacucaccguauucuuca

SEQ ID NO: 1461682 - RNA, 19 nt, Artificial Sequence
  Description of Artificial Sequence: Synthetic oligonucleotide
  Sense strand starting at position 705 of SEQ ID NO: 1244056
gaagaauacggugaguucu

SEQ ID NO: 1461683 - RNA, 19 nt, Artificial Sequence
  Description of Artificial Sequence: Synthetic oligonucleotide
  Antisense strand to SEQ ID NO: 1461682
agaacucaccguauucuuc

SEQ ID NO: 1461684 - RNA, 19 nt, Artificial Sequence
  Description of Artificial Sequence: Synthetic oligonucleotide
  Sense strand starting at position 859 of SEQ ID NO: 1244056
gguccuucagguggcgaua

SEQ ID NO: 1461685 - RNA, 19 nt, Artificial Sequence
  Description of Artificial Sequence: Synthetic oligonucleotide
  Antisense strand to SEQ ID NO: 1461684
uaucgccaccugaaggacc

SEQ ID NO: 1461686 - RNA, 19 nt, Artificial Sequence
  Description of Artificial Sequence: Synthetic oligonucleotide
  Sense strand starting at position 1074 of SEQ ID NO: 1244056
ggcauccacucacagauuu

SEQ ID NO: 1461687 - RNA, 19 nt, Artificial Sequence
  Description of Artificial Sequence: Synthetic oligonucleotide
  Antisense strand to SEQ ID NO: 1461686
aaaucugugaguggaugcc

SEQ ID NO: 1461688 - RNA, 19 nt, Artificial Sequence
  Description of Artificial Sequence: Synthetic oligonucleotide
  Sense strand starting at position 1085 of SEQ ID NO: 1244056
acagauuucugcugcguuu

SEQ ID NO: 1461689 - RNA, 19 nt, Artificial Sequence
  Description of Artificial Sequence: Synthetic oligonucleotide
  Antisense strand to SEQ ID NO: 1461688
aaacgcagcagaaaucugu

SEQ ID NO: 1461690 - RNA, 19 nt, Artificial Sequence
  Description of Artificial Sequence: Synthetic oligonucleotide
  Sense strand starting at position 1111 of SEQ ID NO: 1244056
guuggaagguguuggaaua

SEQ ID NO: 1461691 - RNA, 19 nt, Artificial Sequence
  Description of Artificial Sequence: Synthetic oligonucleotide
  Antisense strand to SEQ ID NO: 1461690
uauuccaacaccuuccaac

SEQ ID NO: 1461692 - RNA, 19 nt, Artificial Sequence
  Description of Artificial Sequence: Synthetic oligonucleotide
  Sense strand starting at position 1713 of SEQ ID NO: 1244056
gccaaauacugggcuuaga

SEQ ID NO: 1461693 - RNA, 19 nt, Artificial Sequence
  Description of Artificial Sequence: Synthetic oligonucleotide
  Antisense strand to SEQ ID NO: 1461692
ucuaagcccaguauuuggc

SEQ ID NO: 1461694 - RNA, 19 nt, Artificial Sequence
  Description of Artificial Sequence: Synthetic oligonucleotide
  Sense strand starting at position 1723 of SEQ ID NO: 1244056
gggcuuagauggcgauacu

SEQ ID NO: 1461695 - RNA, 19 nt, Artificial Sequence
  Description of Artificial Sequence: Synthetic oligonucleotide
  Antisense strand to SEQ ID NO: 1461694
aguaucgccaucuaagccc

SEQ ID NO: 1461696 - RNA, 19 nt, Artificial Sequence
  Description of Artificial Sequence: Synthetic oligonucleotide
  Sense strand starting at position 1724 of SEQ ID NO: 1244056
ggcuuagauggcgauacua

SEQ ID NO: 1461697 - RNA, 19 nt, Artificial Sequence
  Description of Artificial Sequence: Synthetic oligonucleotide
  Antisense strand to SEQ ID NO: 1461696
uaguaucgccaucuaagcc

SEQ ID NO: 1461698 - RNA, 19 nt, Artificial Sequence
  Description of Artificial Sequence: Synthetic oligonucleotide
  Sense strand starting at position 1726 of SEQ ID NO: 1244056
cuuagauggcgauacuaac

SEQ ID NO: 1461699 - RNA, 19 nt, Artificial Sequence
  Description of Artificial Sequence: Synthetic oligonucleotide
  Antisense strand to SEQ ID NO: 1461698
guuaguaucgccaucuaag

SEQ ID NO: 1461700 - RNA, 19 nt, Artificial Sequence
  Description of Artificial Sequence: Synthetic oligonucleotide
  Sense strand starting at position 1984 of SEQ ID NO: 1244056
ccuguuucucugcauguuu

SEQ ID NO: 1461701 - RNA, 19 nt, Artificial Sequence
  Description of Artificial Sequence: Synthetic oligonucleotide
  Antisense strand to SEQ ID NO: 1461700
aaacaugcagagaaacagg

SEQ ID NO: 1461702 - RNA, 19 nt, Artificial Sequence
  Description of Artificial Sequence: Synthetic oligonucleotide
  Sense strand starting at position 2120 of SEQ ID NO: 1244056
gaggguugugcacagaaug

SEQ ID NO: 1461703 - RNA, 19 nt, Artificial Sequence
  Description of Artificial Sequence: Synthetic oligonucleotide
  Antisense strand to SEQ ID NO: 1461702
cauucugugcacaacccuc

SEQ ID NO: 1461704 - RNA, 19 nt, Artificial Sequence
  Description of Artificial Sequence: Synthetic oligonucleotide
  Sense strand starting at position 2130 of SEQ ID NO: 1244056
cacagaaugucagcagaga

SEQ ID NO: 1461705 - RNA, 19 nt, Artificial Sequence
  Description of Artificial Sequence: Synthetic oligonucleotide
  Antisense strand to SEQ ID NO: 1461704
ucucugcugacauucugug

SEQ ID NO: 1461706 - RNA, 19 nt, Artificial Sequence
  Description of Artificial Sequence: Synthetic oligonucleotide
  Sense strand starting at position 2384 of SEQ ID NO: 1244056
ggguucugggcaugauuca

SEQ ID NO: 1461707 - RNA, 19 nt, Artificial Sequence
  Description of Artificial Sequence: Synthetic oligonucleotide
  Antisense strand to SEQ ID NO: 1461706
ugaaucaugcccagaaccc

SEQ ID NO: 1461708 - RNA, 19 nt, Artificial Sequence
  Description of Artificial Sequence: Synthetic oligonucleotide
  Sense strand starting at position 2391 of SEQ ID NO: 1244056
gggcaugauucagugcuga

SEQ ID NO: 1461709 - RNA, 19 nt, Artificial Sequence
  Description of Artificial Sequence: Synthetic oligonucleotide
  Antisense strand to SEQ ID NO: 1461708
ucagcacugaaucaugccc

SEQ ID NO: 1461710 - RNA, 19 nt, Artificial Sequence
  Description of Artificial Sequence: Synthetic oligonucleotide
  Sense strand starting at position 2953 of SEQ ID NO: 1244056
uugucuuguguaggagcua

SEQ ID NO: 1461711 - RNA, 19 nt, Artificial Sequence
  Description of Artificial Sequence: Synthetic oligonucleotide
  Antisense strand to SEQ ID NO: 1461710
uagcuccuacacaagacaa

SEQ ID NO: 1461712 - RNA, 19 nt, Artificial Sequence
  Description of Artificial Sequence: Synthetic oligonucleotide
  Sense strand starting at position 2954 of SEQ ID NO: 1244056
ugucuuguguaggagcuau

SEQ ID NO: 1461713 - RNA, 19 nt, Artificial Sequence
  Description of Artificial Sequence: Synthetic oligonucleotide
  Antisense strand to SEQ ID NO: 1461712
auagcuccuacacaagaca

SEQ ID NO: 1461714 - RNA, 19 nt, Artificial Sequence
  Description of Artificial Sequence: Synthetic oligonucleotide
  Sense strand starting at position 2958 of SEQ ID NO: 1244056
uuguguaggagcuaugacu

SEQ ID NO: 1461715 - RNA, 19 nt, Artificial Sequence
  Description of Artificial Sequence: Synthetic oligonucleotide
  Antisense strand to SEQ ID NO: 1461714
agucauagcuccuacacaa

SEQ ID NO: 1461716 - RNA, 19 nt, Artificial Sequence
  Description of Artificial Sequence: Synthetic oligonucleotide
  Sense strand starting at position 3625 of SEQ ID NO: 1244056
cgggcuaagauuugcacuu

SEQ ID NO: 1461717 - RNA, 19 nt, Artificial Sequence
  Description of Artificial Sequence: Synthetic oligonucleotide
  Antisense strand to SEQ ID NO: 1461716
aagugcaaaucuuagcccg

SEQ ID NO: 1461718 - RNA, 19 nt, Artificial Sequence
  Description of Artificial Sequence: Synthetic oligonucleotide
  Sense strand starting at position 3738 of SEQ ID NO: 1244056
agauuacuugcgugagcca

SEQ ID NO: 1461719 - RNA, 19 nt, Artificial Sequence
  Description of Artificial Sequence: Synthetic oligonucleotide
  Antisense strand to SEQ ID NO: 1461718
uggcucacgcaaguaaucu

SEQ ID NO: 1461720 - RNA, 19 nt, Artificial Sequence
  Description of Artificial Sequence: Synthetic oligonucleotide
  Sense strand starting at position 178 of SEQ ID NO: 1244057
cuuguuuagggcugccaga

SEQ ID NO: 1461721 - RNA, 19 nt, Artificial Sequence
  Description of Artificial Sequence: Synthetic oligonucleotide
  Antisense strand to SEQ ID NO: 1461720
ucuggcagcccuaaacaag

SEQ ID NO: 1461722 - RNA, 19 nt, Artificial Sequence
  Description of Artificial Sequence: Synthetic oligonucleotide
  Sense strand starting at position 224 of SEQ ID NO: 1244057
gagagaauguuggucuggu

SEQ ID NO: 1461723 - RNA, 19 nt, Artificial Sequence
  Description of Artificial Sequence: Synthetic oligonucleotide
  Antisense strand to SEQ ID NO: 1461722
accagaccaacauucucuc

SEQ ID NO: 1461724 - RNA, 19 nt, Artificial Sequence
  Description of Artificial Sequence: Synthetic oligonucleotide
  Sense strand starting at position 225 of SEQ ID NO: 1244057
agagaauguuggucuggug

SEQ ID NO: 1461725 - RNA, 19 nt, Artificial Sequence
  Description of Artificial Sequence: Synthetic oligonucleotide
  Antisense strand to SEQ ID NO: 1461724
caccagaccaacauucucu

SEQ ID NO: 1461726 - RNA, 19 nt, Artificial Sequence
  Description of Artificial Sequence: Synthetic oligonucleotide
  Sense strand starting at position 295 of SEQ ID NO: 1244057
ggaggguuuggcugcaagu

SEQ ID NO: 1461727 - RNA, 19 nt, Artificial Sequence
  Description of Artificial Sequence: Synthetic oligonucleotide
  Antisense strand to SEQ ID NO: 1461726
acuugcagccaaacccucc

SEQ ID NO: 1461728 - RNA, 19 nt, Artificial Sequence
  Description of Artificial Sequence: Synthetic oligonucleotide
  Sense strand starting at position 297 of SEQ ID NO: 1244057
aggguuuggcugcaaguca

SEQ ID NO: 1461729 - RNA, 19 nt, Artificial Sequence
  Description of Artificial Sequence: Synthetic oligonucleotide
  Antisense strand to SEQ ID NO: 1461728
ugacuugcagccaaacccu

SEQ ID NO: 1461730 - RNA, 19 nt, Artificial Sequence
  Description of Artificial Sequence: Synthetic oligonucleotide
  Sense strand starting at position 469 of SEQ ID NO: 1244057
ggagaugauuccggaaggu

SEQ ID NO: 1461731 - RNA, 19 nt, Artificial Sequence
  Description of Artificial Sequence: Synthetic oligonucleotide
  Antisense strand to SEQ ID NO: 1461730
accuuccggaaucaucucc

SEQ ID NO: 1461732 - RNA, 19 nt, Artificial Sequence
  Description of Artificial Sequence: Synthetic oligonucleotide
  Sense strand starting at position 482 of SEQ ID NO: 1244057
gaaggugcuuaugucuaua

SEQ ID NO: 1461733 - RNA, 19 nt, Artificial Sequence
  Description of Artificial Sequence: Synthetic oligonucleotide
  Antisense strand to SEQ ID NO: 1461732
uauagacauaagcaccuuc

SEQ ID NO: 1461734 - RNA, 19 nt, Artificial Sequence
  Description of Artificial Sequence: Synthetic oligonucleotide
  Sense strand starting at position 529 of SEQ ID NO: 1244057
aagccaguuucccaagagu

SEQ ID NO: 1461735 - RNA, 19 nt, Artificial Sequence
  Description of Artificial Sequence: Synthetic oligonucleotide
  Antisense strand to SEQ ID NO: 1461734
acucuugggaaacuggcuu

SEQ ID NO: 1461736 - RNA, 19 nt, Artificial Sequence
  Description of Artificial Sequence: Synthetic oligonucleotide
  Sense strand starting at position 532 of SEQ ID NO: 1244057
ccaguuucccaagaguuuc

SEQ ID NO: 1461737 - RNA, 19 nt, Artificial Sequence
  Description of Artificial Sequence: Synthetic oligonucleotide
  Antisense strand to SEQ ID NO: 1461736
gaaacucuugggaaacugg

SEQ ID NO: 1461738 - RNA, 19 nt, Artificial Sequence
  Description of Artificial Sequence: Synthetic oligonucleotide
  Sense strand starting at position 560 of SEQ ID NO: 1244057
uggugagacccuugaggga

SEQ ID NO: 1461739 - RNA, 19 nt, Artificial Sequence
  Description of Artificial Sequence: Synthetic oligonucleotide
  Antisense strand to SEQ ID NO: 1461738
ucccucaagggucucacca

SEQ ID NO: 1461740 - RNA, 19 nt, Artificial Sequence
  Description of Artificial Sequence: Synthetic oligonucleotide
  Sense strand starting at position 615 of SEQ ID NO: 1244057
ggacccagcaugggaaauu

SEQ ID NO: 1461741 - RNA, 19 nt, Artificial Sequence
  Description of Artificial Sequence: Synthetic oligonucleotide
  Antisense strand to SEQ ID NO: 1461740
aauuucccaugcugggucc

SEQ ID NO: 1461742 - RNA, 19 nt, Artificial Sequence
  Description of Artificial Sequence: Synthetic oligonucleotide
  Sense strand starting at position 785 of SEQ ID NO: 1244057
cugugcuccuucugaggga

SEQ ID NO: 1461743 - RNA, 19 nt, Artificial Sequence
  Description of Artificial Sequence: Synthetic oligonucleotide
  Antisense strand to SEQ ID NO: 1461742
ucccucagaaggagcacag

SEQ ID NO: 1461744 - RNA, 19 nt, Artificial Sequence
  Description of Artificial Sequence: Synthetic oligonucleotide
  Sense strand starting at position 786 of SEQ ID NO: 1244057
ugugcuccuucugagggaa

SEQ ID NO: 1461745 - RNA, 19 nt, Artificial Sequence
  Description of Artificial Sequence: Synthetic oligonucleotide
  Antisense strand to SEQ ID NO: 1461744
uucccucagaaggagcaca

SEQ ID NO: 1461746 - RNA, 19 nt, Artificial Sequence
  Description of Artificial Sequence: Synthetic oligonucleotide
  Sense strand starting at position 788 of SEQ ID NO: 1244057
ugcuccuucugagggaaca

SEQ ID NO: 1461747 - RNA, 19 nt, Artificial Sequence
  Description of Artificial Sequence: Synthetic oligonucleotide
  Antisense strand to SEQ ID NO: 1461746
uguucccucagaaggagca

SEQ ID NO: 1461748 - RNA, 19 nt, Artificial Sequence
  Description of Artificial Sequence: Synthetic oligonucleotide
  Sense strand starting at position 1294 of SEQ ID NO: 1244057
gcugcacugagcucuguuu

SEQ ID NO: 1461749 - RNA, 19 nt, Artificial Sequence
  Description of Artificial Sequence: Synthetic oligonucleotide
  Antisense strand to SEQ ID NO: 1461748
aaacagagcucagugcagc

SEQ ID NO: 1461750 - RNA, 19 nt, Artificial Sequence
  Description of Artificial Sequence: Synthetic oligonucleotide
  Sense strand starting at position 1372 of SEQ ID NO: 1244057
cgggugagguggcuaucau

SEQ ID NO: 1461751 - RNA, 19 nt, Artificial Sequence
  Description of Artificial Sequence: Synthetic oligonucleotide
  Antisense strand to SEQ ID NO: 1461750
augauagccaccucacccg

SEQ ID NO: 1461752 - RNA, 19 nt, Artificial Sequence
  Description of Artificial Sequence: Synthetic oligonucleotide
  Sense strand starting at position 1373 of SEQ ID NO: 1244057
gggugagguggcuaucauc

SEQ ID NO: 1461753 - RNA, 19 nt, Artificial Sequence
  Description of Artificial Sequence: Synthetic oligonucleotide
  Antisense strand to SEQ ID NO: 1461752
gaugauagccaccucaccc

SEQ ID NO: 1461754 - RNA, 19 nt, Artificial Sequence
  Description of Artificial Sequence: Synthetic oligonucleotide
  Sense strand starting at position 2109 of SEQ ID NO: 1244057
cuagcaugguccucaaacu

SEQ ID NO: 1461755 - RNA, 19 nt, Artificial Sequence
  Description of Artificial Sequence: Synthetic oligonucleotide
  Antisense strand to SEQ ID NO: 1461754
aguuugaggaccaugcuag

SEQ ID NO: 1461756 - RNA, 19 nt, Artificial Sequence
  Description of Artificial Sequence: Synthetic oligonucleotide
  Sense strand starting at position 2556 of SEQ ID NO: 1244057
ccucaagguaguugagaaa

SEQ ID NO: 1461757 - RNA, 19 nt, Artificial Sequence
  Description of Artificial Sequence: Synthetic oligonucleotide
  Antisense strand to SEQ ID NO: 1461756
uuucucaacuaccuugagg

SEQ ID NO: 1461758 - RNA, 19 nt, Artificial Sequence
  Description of Artificial Sequence: Synthetic oligonucleotide
  Sense strand starting at position 2559 of SEQ ID NO: 1244057
caagguaguugagaaagaa

SEQ ID NO: 1461759 - RNA, 19 nt, Artificial Sequence
  Description of Artificial Sequence: Synthetic oligonucleotide
  Antisense strand to SEQ ID NO: 1461758
uucuuucucaacuaccuug

SEQ ID NO: 1461760 - RNA, 19 nt, Artificial Sequence
  Description of Artificial Sequence: Synthetic oligonucleotide
  Sense strand starting at position 2635 of SEQ ID NO: 1244057
cugcuaagagcuugcaaag

SEQ ID NO: 1461761 - RNA, 19 nt, Artificial Sequence
  Description of Artificial Sequence: Synthetic oligonucleotide
  Antisense strand to SEQ ID NO: 1461760
cuuugcaagcucuuagcag

SEQ ID NO: 1461762 - RNA, 19 nt, Artificial Sequence
  Description of Artificial Sequence: Synthetic oligonucleotide
  Sense strand starting at position 2726 of SEQ ID NO: 1244057
aauaacgaguccucaagua

SEQ ID NO: 1461763 - RNA, 19 nt, Artificial Sequence
  Description of Artificial Sequence: Synthetic oligonucleotide
  Antisense strand to SEQ ID NO: 1461762
uacuugaggacucguuauu

SEQ ID NO: 1461764 - RNA, 19 nt, Artificial Sequence
  Description of Artificial Sequence: Synthetic oligonucleotide
  Sense strand starting at position 2746 of SEQ ID NO: 1244057
gaggacuugucacauauag

SEQ ID NO: 1461765 - RNA, 19 nt, Artificial Sequence
  Description of Artificial Sequence: Synthetic oligonucleotide
  Antisense strand to SEQ ID NO: 1461764
cuauaugugacaaguccuc

SEQ ID NO: 1461766 - RNA, 19 nt, Artificial Sequence
  Description of Artificial Sequence: Synthetic oligonucleotide
  Sense strand starting at position 3075 of SEQ ID NO: 1244057
agucacauaguuuaucuua

SEQ ID NO: 1461767 - RNA, 19 nt, Artificial Sequence
  Description of Artificial Sequence: Synthetic oligonucleotide
  Antisense strand to SEQ ID NO: 1461766
uaagauaaacuaugugacu

SEQ ID NO: 1461768 - RNA, 19 nt, Artificial Sequence
  Description of Artificial Sequence: Synthetic oligonucleotide
  Sense strand starting at position 3100 of SEQ ID NO: 1244057
caugguuauuaggugaaca

SEQ ID NO: 1461769 - RNA, 19 nt, Artificial Sequence
  Description of Artificial Sequence: Synthetic oligonucleotide
  Antisense strand to SEQ ID NO: 1461768
uguucaccuaauaaccaug

SEQ ID NO: 1461770 - RNA, 19 nt, Artificial Sequence
  Description of Artificial Sequence: Synthetic oligonucleotide
  Sense strand starting at position 3101 of SEQ ID NO: 1244057
augguuauuaggugaacau

SEQ ID NO: 1461771 - RNA, 19 nt, Artificial Sequence
  Description of Artificial Sequence: Synthetic oligonucleotide
  Antisense strand to SEQ ID NO: 1461770
auguucaccuaauaaccau

SEQ ID NO: 1461772 - RNA, 19 nt, Artificial Sequence
  Description of Artificial Sequence: Synthetic oligonucleotide
  Sense strand starting at position 3102 of SEQ ID NO: 1244057
ugguuauuaggugaacauc

SEQ ID NO: 1461773 - RNA, 19 nt, Artificial Sequence
  Description of Artificial Sequence: Synthetic oligonucleotide
  Antisense strand to SEQ ID NO: 1461772
gauguucaccuaauaacca

SEQ ID NO: 1461774 - RNA, 19 nt, Artificial Sequence
  Description of Artificial Sequence: Synthetic oligonucleotide
  Sense strand starting at position 3110 of SEQ ID NO: 1244057
aggugaacaucuguguuag

SEQ ID NO: 1461775 - RNA, 19 nt, Artificial Sequence
  Description of Artificial Sequence: Synthetic oligonucleotide
  Antisense strand to SEQ ID NO: 1461774
cuaacacagauguucaccu

SEQ ID NO: 1461776 - RNA, 19 nt, Artificial Sequence
  Description of Artificial Sequence: Synthetic oligonucleotide
  Sense strand starting at position 3111 of SEQ ID NO: 1244057
ggugaacaucuguguuagc

SEQ ID NO: 1461777 - RNA, 19 nt, Artificial Sequence
  Description of Artificial Sequence: Synthetic oligonucleotide
  Antisense strand to SEQ ID NO: 1461776
gcuaacacagauguucacc

SEQ ID NO: 1461778 - RNA, 19 nt, Artificial Sequence
  Description of Artificial Sequence: Synthetic oligonucleotide
  Sense strand starting at position 3112 of SEQ ID NO: 1244057
gugaacaucuguguuagcu

SEQ ID NO: 1461779 - RNA, 19 nt, Artificial Sequence
  Description of Artificial Sequence: Synthetic oligonucleotide
  Antisense strand to SEQ ID NO: 1461778
agcuaacacagauguucac

SEQ ID NO: 1461780 - RNA, 19 nt, Artificial Sequence
  Description of Artificial Sequence: Synthetic oligonucleotide
  Sense strand starting at position 3124 of SEQ ID NO: 1244057
guuagcuugcuggcuuuau

SEQ ID NO: 1461781 - RNA, 19 nt, Artificial Sequence
  Description of Artificial Sequence: Synthetic oligonucleotide
  Antisense strand to SEQ ID NO: 1461780
auaaagccagcaagcuaac

SEQ ID NO: 1461782 - RNA, 19 nt, Artificial Sequence
  Description of Artificial Sequence: Synthetic oligonucleotide
  Sense strand starting at position 3133 of SEQ ID NO: 1244057
cuggcuuuaucccaaggaa

SEQ ID NO: 1461783 - RNA, 19 nt, Artificial Sequence
  Description of Artificial Sequence: Synthetic oligonucleotide
  Antisense strand to SEQ ID NO: 1461782
uuccuugggauaaagccag

SEQ ID NO: 1461784 - RNA, 19 nt, Artificial Sequence
  Description of Artificial Sequence: Synthetic oligonucleotide
  Sense strand starting at position 3180 of SEQ ID NO: 1244057
uuggcagaguucuauucuu

SEQ ID NO: 1461785 - RNA, 19 nt, Artificial Sequence
  Description of Artificial Sequence: Synthetic oligonucleotide
  Antisense strand to SEQ ID NO: 1461784
aagaauagaacucugccaa

SEQ ID NO: 1461786 - RNA, 19 nt, Artificial Sequence
  Description of Artificial Sequence: Synthetic oligonucleotide
  Sense strand starting at position 3188 of SEQ ID NO: 1244057
guucuauucuuguugccca

SEQ ID NO: 1461787 - RNA, 19 nt, Artificial Sequence
  Description of Artificial Sequence: Synthetic oligonucleotide
  Antisense strand to SEQ ID NO: 1461786
ugggcaacaagaauagaac

SEQ ID NO: 1461788 - RNA, 19 nt, Artificial Sequence
  Description of Artificial Sequence: Synthetic oligonucleotide
  Sense strand starting at position 3527 of SEQ ID NO: 1244057
gccuguugccuuuauccca

SEQ ID NO: 1461789 - RNA, 19 nt, Artificial Sequence
  Description of Artificial Sequence: Synthetic oligonucleotide
  Antisense strand to SEQ ID NO: 1461788
ugggauaaaggcaacaggc

SEQ ID NO: 1461790 - RNA, 19 nt, Artificial Sequence
  Description of Artificial Sequence: Synthetic oligonucleotide
  Sense strand starting at position 3532 of SEQ ID NO: 1244057
uugccuuuaucccaaggaa

SEQ ID NO: 1461791 - RNA, 19 nt, Artificial Sequence
  Description of Artificial Sequence: Synthetic oligonucleotide
  Antisense strand to SEQ ID NO: 1461790
uuccuugggauaaaggcaa

SEQ ID NO: 1461792 - RNA, 19 nt, Artificial Sequence
  Description of Artificial Sequence: Synthetic oligonucleotide
  Sense strand starting at position 3754 of SEQ ID NO: 1244057
gagagagcucccuauguug

SEQ ID NO: 1461793 - RNA, 19 nt, Artificial Sequence
  Description of Artificial Sequence: Synthetic oligonucleotide
  Antisense strand to SEQ ID NO: 1461792
caacauagggagcucucuc

SEQ ID NO: 1461794 - RNA, 19 nt, Artificial Sequence
  Description of Artificial Sequence: Synthetic oligonucleotide
  Sense strand starting at position 3844 of SEQ ID NO: 1244057
cuggauaccuuugagaaga

SEQ ID NO: 1461795 - RNA, 19 nt, Artificial Sequence
  Description of Artificial Sequence: Synthetic oligonucleotide
  Antisense strand to SEQ ID NO: 1461794
ucuucucaaagguauccag

SEQ ID NO: 1461796 - RNA, 19 nt, Artificial Sequence
  Description of Artificial Sequence: Synthetic oligonucleotide
  Sense strand starting at position 3846 of SEQ ID NO: 1244057
ggauaccuuugagaagaga

SEQ ID NO: 1461797 - RNA, 19 nt, Artificial Sequence
  Description of Artificial Sequence: Synthetic oligonucleotide
  Antisense strand to SEQ ID NO: 1461796
ucucuucucaaagguaucc

SEQ ID NO: 1461798 - RNA, 19 nt, Artificial Sequence
  Description of Artificial Sequence: Synthetic oligonucleotide
  Sense strand starting at position 3861 of SEQ ID NO: 1244057
gagagcuacuacuugcuga

SEQ ID NO: 1461799 - RNA, 19 nt, Artificial Sequence
  Description of Artificial Sequence: Synthetic oligonucleotide
  Antisense strand to SEQ ID NO: 1461798
ucagcaaguaguagcucuc

SEQ ID NO: 1461800 - RNA, 19 nt, Artificial Sequence
  Description of Artificial Sequence: Synthetic oligonucleotide
  Sense strand starting at position 336 of SEQ ID NO: 1244058
aggagugaggugugggaaa

SEQ ID NO: 1461801 - RNA, 19 nt, Artificial Sequence
  Description of Artificial Sequence: Synthetic oligonucleotide
  Antisense strand to SEQ ID NO: 1461800
uuucccacaccucacuccu

SEQ ID NO: 1461802 - RNA, 19 nt, Artificial Sequence
  Description of Artificial Sequence: Synthetic oligonucleotide
  Sense strand starting at position 905 of SEQ ID NO: 1244058
ugcggauuccuggaacuga

SEQ ID NO: 1461803 - RNA, 19 nt, Artificial Sequence
  Description of Artificial Sequence: Synthetic oligonucleotide
  Antisense strand to SEQ ID NO: 1461802
ucaguuccaggaauccgca

SEQ ID NO: 1461804 - RNA, 19 nt, Artificial Sequence
  Description of Artificial Sequence: Synthetic oligonucleotide
  Sense strand starting at position 941 of SEQ ID NO: 1244058
augucucaggucugagaga

SEQ ID NO: 1461805 - RNA, 19 nt, Artificial Sequence
  Description of Artificial Sequence: Synthetic oligonucleotide
  Antisense strand to SEQ ID NO: 1461804
ucucucagaccugagacau

SEQ ID NO: 1461806 - RNA, 19 nt, Artificial Sequence
  Description of Artificial Sequence: Synthetic oligonucleotide
  Sense strand starting at position 999 of SEQ ID NO: 1244058
ggugaaaccaauggagagu

SEQ ID NO: 1461807 - RNA, 19 nt, Artificial Sequence
  Description of Artificial Sequence: Synthetic oligonucleotide
  Antisense strand to SEQ ID NO: 1461806
acucuccauugguuucacc

SEQ ID NO: 1461808 - RNA, 19 nt, Artificial Sequence
  Description of Artificial Sequence: Synthetic oligonucleotide
  Sense strand starting at position 1040 of SEQ ID NO: 1244058
gguggcagucccugaucua

SEQ ID NO: 1461809 - RNA, 19 nt, Artificial Sequence
  Description of Artificial Sequence: Synthetic oligonucleotide
  Antisense strand to SEQ ID NO: 1461808
uagaucagggacugccacc

SEQ ID NO: 1461810 - RNA, 19 nt, Artificial Sequence
  Description of Artificial Sequence: Synthetic oligonucleotide
  Sense strand starting at position 2050 of SEQ ID NO: 1244058
gggcgaggugcguuuguga

SEQ ID NO: 1461811 - RNA, 19 nt, Artificial Sequence
  Description of Artificial Sequence: Synthetic oligonucleotide
  Antisense strand to SEQ ID NO: 1461810
ucacaaacgcaccucgccc

SEQ ID NO: 1461812 - RNA, 19 nt, Artificial Sequence
  Description of Artificial Sequence: Synthetic oligonucleotide
  Sense strand starting at position 2051 of SEQ ID NO: 1244058
ggcgaggugcguuugugau

SEQ ID NO: 1461813 - RNA, 19 nt, Artificial Sequence
  Description of Artificial Sequence: Synthetic oligonucleotide
  Antisense strand to SEQ ID NO: 1461812
aucacaaacgcaccucgcc

SEQ ID NO: 1461814 - RNA, 19 nt, Artificial Sequence
  Description of Artificial Sequence: Synthetic oligonucleotide
  Sense strand starting at position 2058 of SEQ ID NO: 1244058
ugcguuugugaugcugauu

SEQ ID NO: 1461815 - RNA, 19 nt, Artificial Sequence
  Description of Artificial Sequence: Synthetic oligonucleotide
  Antisense strand to SEQ ID NO: 1461814
aaucagcaucacaaacgca

SEQ ID NO: 1461816 - RNA, 19 nt, Artificial Sequence
  Description of Artificial Sequence: Synthetic oligonucleotide
  Sense strand starting at position 2061 of SEQ ID NO: 1244058
guuugugaugcugauugac

SEQ ID NO: 1461817 - RNA, 19 nt, Artificial Sequence
  Description of Artificial Sequence: Synthetic oligonucleotide
  Antisense strand to SEQ ID NO: 1461816
gucaaucagcaucacaaac

SEQ ID NO: 1461818 - RNA, 19 nt, Artificial Sequence
  Description of Artificial Sequence: Synthetic oligonucleotide
  Sense strand starting at position 2121 of SEQ ID NO: 1244058
guaggugucaugcggaaga

SEQ ID NO: 1461819 - RNA, 19 nt, Artificial Sequence
  Description of Artificial Sequence: Synthetic oligonucleotide
  Antisense strand to SEQ ID NO: 1461818
ucuuccgcaugacaccuac

SEQ ID NO: 1461820 - RNA, 19 nt, Artificial Sequence
  Description of Artificial Sequence: Synthetic oligonucleotide
  Sense strand starting at position 2123 of SEQ ID NO: 1244058
aggugucaugcggaagaug

SEQ ID NO: 1461821 - RNA, 19 nt, Artificial Sequence
  Description of Artificial Sequence: Synthetic oligonucleotide
  Antisense strand to SEQ ID NO: 1461820
caucuuccgcaugacaccu

SEQ ID NO: 1461822 - RNA, 19 nt, Artificial Sequence
  Description of Artificial Sequence: Synthetic oligonucleotide
  Sense strand starting at position 2176 of SEQ ID NO: 1244058
gcguugagagguuuccgua

SEQ ID NO: 1461823 - RNA, 19 nt, Artificial Sequence
  Description of Artificial Sequence: Synthetic oligonucleotide
  Antisense strand to SEQ ID NO: 1461822
uacggaaaccucucaacgc

SEQ ID NO: 1461824 - RNA, 19 nt, Artificial Sequence
  Description of Artificial Sequence: Synthetic oligonucleotide
  Sense strand starting at position 2244 of SEQ ID NO: 1244058
ccagguuucgcgucucgca

SEQ ID NO: 1461825 - RNA, 19 nt, Artificial Sequence
  Description of Artificial Sequence: Synthetic oligonucleotide
  Antisense strand to SEQ ID NO: 1461824
ugcgagacgcgaaaccugg

SEQ ID NO: 1461826 - RNA, 19 nt, Artificial Sequence
  Description of Artificial Sequence: Synthetic oligonucleotide
  Sense strand starting at position 2473 of SEQ ID NO: 1244058
cgggcuucggcugugcaaa

SEQ ID NO: 1461827 - RNA, 19 nt, Artificial Sequence
  Description of Artificial Sequence: Synthetic oligonucleotide
  Antisense strand to SEQ ID NO: 1461826
uuugcacagccgaagcccg

SEQ ID NO: 1461828 - RNA, 19 nt, Artificial Sequence
  Description of Artificial Sequence: Synthetic oligonucleotide
  Sense strand starting at position 2614 of SEQ ID NO: 1244058
acgauacaguaauugauau

SEQ ID NO: 1461829 - RNA, 19 nt, Artificial Sequence
  Description of Artificial Sequence: Synthetic oligonucleotide
  Antisense strand to SEQ ID NO: 1461828
auaucaauuacuguaucgu

SEQ ID NO: 1461830 - RNA, 19 nt, Artificial Sequence
  Description of Artificial Sequence: Synthetic oligonucleotide
  Sense strand starting at position 2627 of SEQ ID NO: 1244058
ugauauuuggccugugcag

SEQ ID NO: 1461831 - RNA, 19 nt, Artificial Sequence
  Description of Artificial Sequence: Synthetic oligonucleotide
  Antisense strand to SEQ ID NO: 1461830
cugcacaggccaaauauca

SEQ ID NO: 1461832 - RNA, 19 nt, Artificial Sequence
  Description of Artificial Sequence: Synthetic oligonucleotide
  Sense strand starting at position 2717 of SEQ ID NO: 1244058
aaguuugggcucugaauca

SEQ ID NO: 1461833 - RNA, 19 nt, Artificial Sequence
  Description of Artificial Sequence: Synthetic oligonucleotide
  Antisense strand to SEQ ID NO: 1461832
ugauucagagcccaaacuu

SEQ ID NO: 1461834 - RNA, 19 nt, Artificial Sequence
  Description of Artificial Sequence: Synthetic oligonucleotide
  Sense strand starting at position 2734 of SEQ ID NO: 1244058
caggacuucgucuggguua

SEQ ID NO: 1461835 - RNA, 19 nt, Artificial Sequence
  Description of Artificial Sequence: Synthetic oligonucleotide
  Antisense strand to SEQ ID NO: 1461834
uaacccagacgaaguccug

SEQ ID NO: 1461836 - RNA, 19 nt, Artificial Sequence
  Description of Artificial Sequence: Synthetic oligonucleotide
  Sense strand starting at position 2736 of SEQ ID NO: 1244058
ggacuucgucuggguuaca

SEQ ID NO: 1461837 - RNA, 19 nt, Artificial Sequence
  Description of Artificial Sequence: Synthetic oligonucleotide
  Antisense strand to SEQ ID NO: 1461836
uguaacccagacgaagucc

SEQ ID NO: 1461838 - RNA, 19 nt, Artificial Sequence
  Description of Artificial Sequence: Synthetic oligonucleotide
  Sense strand starting at position 2994 of SEQ ID NO: 1244058
ucugaugaagcuuagaagu

SEQ ID NO: 1461839 - RNA, 19 nt, Artificial Sequence
  Description of Artificial Sequence: Synthetic oligonucleotide
  Antisense strand to SEQ ID NO: 1461838
acuucuaagcuucaucaga

SEQ ID NO: 1461840 - RNA, 19 nt, Artificial Sequence
  Description of Artificial Sequence: Synthetic oligonucleotide
  Sense strand starting at position 3039 of SEQ ID NO: 1244058
guggugucaggguaagagu

SEQ ID NO: 1461841 - RNA, 19 nt, Artificial Sequence
  Description of Artificial Sequence: Synthetic oligonucleotide
  Antisense strand to SEQ ID NO: 1461840
acucuuacccugacaccac

SEQ ID NO: 1461842 - RNA, 19 nt, Artificial Sequence
  Description of Artificial Sequence: Synthetic oligonucleotide
  Sense strand starting at position 3135 of SEQ ID NO: 1244058
gaggcacgguugucuuuaa

SEQ ID NO: 1461843 - RNA, 19 nt, Artificial Sequence
  Description of Artificial Sequence: Synthetic oligonucleotide
  Antisense strand to SEQ ID NO: 1461842
uuaaagacaaccgugccuc

SEQ ID NO: 1461844 - RNA, 19 nt, Artificial Sequence
  Description of Artificial Sequence: Synthetic oligonucleotide
  Sense strand starting at position 3160 of SEQ ID NO: 1244058
ccuguauguauugguagag

SEQ ID NO: 1461845 - RNA, 19 nt, Artificial Sequence
  Description of Artificial Sequence: Synthetic oligonucleotide
  Antisense strand to SEQ ID NO: 1461844
cucuaccaauacauacagg

SEQ ID NO: 1461846 - RNA, 19 nt, Artificial Sequence
  Description of Artificial Sequence: Synthetic oligonucleotide
  Sense strand starting at position 3161 of SEQ ID NO: 1244058
cuguauguauugguagaga

SEQ ID NO: 1461847 - RNA, 19 nt, Artificial Sequence
  Description of Artificial Sequence: Synthetic oligonucleotide
  Antisense strand to SEQ ID NO: 1461846
ucucuaccaauacauacag

SEQ ID NO: 1461848 - RNA, 19 nt, Artificial Sequence
  Description of Artificial Sequence: Synthetic oligonucleotide
  Sense strand starting at position 3201 of SEQ ID NO: 1244058
ggcccaccugaaugauguu

SEQ ID NO: 1461849 - RNA, 19 nt, Artificial Sequence
  Description of Artificial Sequence: Synthetic oligonucleotide
  Antisense strand to SEQ ID NO: 1461848
aacaucauucaggugggcc

SEQ ID NO: 1461850 - RNA, 19 nt, Artificial Sequence
  Description of Artificial Sequence: Synthetic oligonucleotide
  Sense strand starting at position 3262 of SEQ ID NO: 1244058
gguuuauaauauccugaua

SEQ ID NO: 1461851 - RNA, 19 nt, Artificial Sequence
  Description of Artificial Sequence: Synthetic oligonucleotide
  Antisense strand to SEQ ID NO: 1461850
uaucaggauauuauaaacc

SEQ ID NO: 1461852 - RNA, 19 nt, Artificial Sequence
  Description of Artificial Sequence: Synthetic oligonucleotide
  Sense strand starting at position 3267 of SEQ ID NO: 1244058
auaauauccugauaaggga

SEQ ID NO: 1461853 - RNA, 19 nt, Artificial Sequence
  Description of Artificial Sequence: Synthetic oligonucleotide
  Antisense strand to SEQ ID NO: 1461852
ucccuuaucaggauauuau

SEQ ID NO: 1461854 - RNA, 19 nt, Artificial Sequence
  Description of Artificial Sequence: Synthetic oligonucleotide
  Sense strand starting at position 3377 of SEQ ID NO: 1244058
uguuuaagcugagccauga

SEQ ID NO: 1461855 - RNA, 19 nt, Artificial Sequence
  Description of Artificial Sequence: Synthetic oligonucleotide
  Antisense strand to SEQ ID NO: 1461854
ucauggcucagcuuaaaca

SEQ ID NO: 1461856 - RNA, 19 nt, Artificial Sequence
  Description of Artificial Sequence: Synthetic oligonucleotide
  Sense strand starting at position 3381 of SEQ ID NO: 1244058
uaagcugagccaugauaga

SEQ ID NO: 1461857 - RNA, 19 nt, Artificial Sequence
  Description of Artificial Sequence: Synthetic oligonucleotide
  Antisense strand to SEQ ID NO: 1461856
ucuaucauggcucagcuua

SEQ ID NO: 1461858 - RNA, 19 nt, Artificial Sequence
  Description of Artificial Sequence: Synthetic oligonucleotide
  Sense strand starting at position 3400 of SEQ ID NO: 1244058
ugaguaggaguucagcaaa

SEQ ID NO: 1461859 - RNA, 19 nt, Artificial Sequence
  Description of Artificial Sequence: Synthetic oligonucleotide
  Antisense strand to SEQ ID NO: 1461858
uuugcugaacuccuacuca

SEQ ID NO: 1461860 - RNA, 19 nt, Artificial Sequence
  Description of Artificial Sequence: Synthetic oligonucleotide
  Sense strand starting at position 3426 of SEQ ID NO: 1244058
gagaguguuggguaucuag

SEQ ID NO: 1461861 - RNA, 19 nt, Artificial Sequence
  Description of Artificial Sequence: Synthetic oligonucleotide
  Antisense strand to SEQ ID NO: 1461860
cuagauacccaacacucuc

SEQ ID NO: 1461862 - RNA, 19 nt, Artificial Sequence
  Description of Artificial Sequence: Synthetic oligonucleotide
  Sense strand starting at position 3429 of SEQ ID NO: 1244058
aguguuggguaucuagaac

SEQ ID NO: 1461863 - RNA, 19 nt, Artificial Sequence
  Description of Artificial Sequence: Synthetic oligonucleotide
  Antisense strand to SEQ ID NO: 1461862
guucuagauacccaacacu

SEQ ID NO: 1461864 - RNA, 19 nt, Artificial Sequence
  Description of Artificial Sequence: Synthetic oligonucleotide
  Sense strand starting at position 3444 of SEQ ID NO: 1244058
gaacguguccagggugaca

SEQ ID NO: 1461865 - RNA, 19 nt, Artificial Sequence
  Description of Artificial Sequence: Synthetic oligonucleotide
  Antisense strand to SEQ ID NO: 1461864
ugucacccuggacacguuc

SEQ ID NO: 1461866 - RNA, 19 nt, Artificial Sequence
  Description of Artificial Sequence: Synthetic oligonucleotide
  Sense strand starting at position 3556 of SEQ ID NO: 1244058
ggaucugaugcuggcugaa

SEQ ID NO: 1461867 - RNA, 19 nt, Artificial Sequence
  Description of Artificial Sequence: Synthetic oligonucleotide
  Antisense strand to SEQ ID NO: 1461866
uucagccagcaucagaucc

SEQ ID NO: 1461868 - RNA, 19 nt, Artificial Sequence
  Description of Artificial Sequence: Synthetic oligonucleotide
  Sense strand starting at position 3576 of SEQ ID NO: 1244058
cucugaggucugugugauc

SEQ ID NO: 1461869 - RNA, 19 nt, Artificial Sequence
  Description of Artificial Sequence: Synthetic oligonucleotide
  Antisense strand to SEQ ID NO: 1461868
gaucacacagaccucagag

SEQ ID NO: 1461870 - RNA, 19 nt, Artificial Sequence
  Description of Artificial Sequence: Synthetic oligonucleotide
  Sense strand starting at position 3588 of SEQ ID NO: 1244058
ugugaucuugggcaugcaa

SEQ ID NO: 1461871 - RNA, 19 nt, Artificial Sequence
  Description of Artificial Sequence: Synthetic oligonucleotide
  Antisense strand to SEQ ID NO: 1461870
uugcaugcccaagaucaca

SEQ ID NO: 1461872 - RNA, 19 nt, Artificial Sequence
  Description of Artificial Sequence: Synthetic oligonucleotide
  Sense strand starting at position 3640 of SEQ ID NO: 1244058
cuagguugccuuugaggau

SEQ ID NO: 1461873 - RNA, 19 nt, Artificial Sequence
  Description of Artificial Sequence: Synthetic oligonucleotide
  Antisense strand to SEQ ID NO: 1461872
auccucaaaggcaaccuag

SEQ ID NO: 1461874 - RNA, 19 nt, Artificial Sequence
  Description of Artificial Sequence: Synthetic oligonucleotide
  Sense strand starting at position 3655 of SEQ ID NO: 1244058
ggaucuuucuggcugucaa

SEQ ID NO: 1461875 - RNA, 19 nt, Artificial Sequence
  Description of Artificial Sequence: Synthetic oligonucleotide
  Antisense strand to SEQ ID NO: 1461874
uugacagccagaaagaucc

SEQ ID NO: 1461876 - RNA, 19 nt, Artificial Sequence
  Description of Artificial Sequence: Synthetic oligonucleotide
  Sense strand starting at position 3656 of SEQ ID NO: 1244058
gaucuuucuggcugucaag

SEQ ID NO: 1461877 - RNA, 19 nt, Artificial Sequence
  Description of Artificial Sequence: Synthetic oligonucleotide
  Antisense strand to SEQ ID NO: 1461876
cuugacagccagaaagauc

SEQ ID NO: 1461878 - RNA, 19 nt, Artificial Sequence
  Description of Artificial Sequence: Synthetic oligonucleotide
  Sense strand starting at position 3888 of SEQ ID NO: 1244058
gguuuauauugacuaggcu

SEQ ID NO: 1461879 - RNA, 19 nt, Artificial Sequence
  Description of Artificial Sequence: Synthetic oligonucleotide
  Antisense strand to SEQ ID NO: 1461878
agccuagucaauauaaacc

SEQ ID NO: 1461880 - RNA, 19 nt, Artificial Sequence
  Description of Artificial Sequence: Synthetic oligonucleotide
  Sense strand starting at position 13 of SEQ ID NO: 1244059
ucauaagccuggguaacau

SEQ ID NO: 1461881 - RNA, 19 nt, Artificial Sequence
  Description of Artificial Sequence: Synthetic oligonucleotide
  Antisense strand to SEQ ID NO: 1461880
auguuacccaggcuuauga

SEQ ID NO: 1461882 - RNA, 19 nt, Artificial Sequence
  Description of Artificial Sequence: Synthetic oligonucleotide
  Sense strand starting at position 282 of SEQ ID NO: 1244059
aagggagauucugucaucu

SEQ ID NO: 1461883 - RNA, 19 nt, Artificial Sequence
  Description of Artificial Sequence: Synthetic oligonucleotide
  Antisense strand to SEQ ID NO: 1461882
agaugacagaaucucccuu

SEQ ID NO: 1461884 - RNA, 19 nt, Artificial Sequence
  Description of Artificial Sequence: Synthetic oligonucleotide
  Sense strand starting at position 290 of SEQ ID NO: 1244059
uucugucaucuucggacaa

SEQ ID NO: 1461885 - RNA, 19 nt, Artificial Sequence
  Description of Artificial Sequence: Synthetic oligonucleotide
  Antisense strand to SEQ ID NO: 1461884
uuguccgaagaugacagaa

SEQ ID NO: 1461886 - RNA, 19 nt, Artificial Sequence
  Description of Artificial Sequence: Synthetic oligonucleotide
  Sense strand starting at position 294 of SEQ ID NO: 1244059
gucaucuucggacaauuaa

SEQ ID NO: 1461887 - RNA, 19 nt, Artificial Sequence
  Description of Artificial Sequence: Synthetic oligonucleotide
  Antisense strand to SEQ ID NO: 1461886
uuaauuguccgaagaugac

SEQ ID NO: 1461888 - RNA, 19 nt, Artificial Sequence
  Description of Artificial Sequence: Synthetic oligonucleotide
  Sense strand starting at position 645 of SEQ ID NO: 1244059
aagguuauuuccugagcua

SEQ ID NO: 1461889 - RNA, 19 nt, Artificial Sequence
  Description of Artificial Sequence: Synthetic oligonucleotide
  Antisense strand to SEQ ID NO: 1461888
uagcucaggaaauaaccuu

SEQ ID NO: 1461890 - RNA, 19 nt, Artificial Sequence
  Description of Artificial Sequence: Synthetic oligonucleotide
  Sense strand starting at position 726 of SEQ ID NO: 1244059
gggcaaagcccugagguuu

SEQ ID NO: 1461891 - RNA, 19 nt, Artificial Sequence
  Description of Artificial Sequence: Synthetic oligonucleotide
  Antisense strand to SEQ ID NO: 1461890
aaaccucagggcuuugccc

SEQ ID NO: 1461892 - RNA, 19 nt, Artificial Sequence
  Description of Artificial Sequence: Synthetic oligonucleotide
  Sense strand starting at position 1128 of SEQ ID NO: 1244059
uggaguuagugacuagaag

SEQ ID NO: 1461893 - RNA, 19 nt, Artificial Sequence
  Description of Artificial Sequence: Synthetic oligonucleotide
  Antisense strand to SEQ ID NO: 1461892
cuucuagucacuaacucca

SEQ ID NO: 1461894 - RNA, 19 nt, Artificial Sequence
  Description of Artificial Sequence: Synthetic oligonucleotide
  Sense strand starting at position 1678 of SEQ ID NO: 1244059
auguguagagaucgaguuu

SEQ ID NO: 1461895 - RNA, 19 nt, Artificial Sequence
  Description of Artificial Sequence: Synthetic oligonucleotide
  Antisense strand to SEQ ID NO: 1461894
aaacucgaucucuacacau

SEQ ID NO: 1461896 - RNA, 19 nt, Artificial Sequence
  Description of Artificial Sequence: Synthetic oligonucleotide
  Sense strand starting at position 1687 of SEQ ID NO: 1244059
gaucgaguuucccuccauu

SEQ ID NO: 1461897 - RNA, 19 nt, Artificial Sequence
  Description of Artificial Sequence: Synthetic oligonucleotide
  Antisense strand to SEQ ID NO: 1461896
aauggagggaaacucgauc

SEQ ID NO: 1461898 - RNA, 19 nt, Artificial Sequence
  Description of Artificial Sequence: Synthetic oligonucleotide
  Sense strand starting at position 1860 of SEQ ID NO: 1244059
caggguugccaagauccau

SEQ ID NO: 1461899 - RNA, 19 nt, Artificial Sequence
  Description of Artificial Sequence: Synthetic oligonucleotide
  Antisense strand to SEQ ID NO: 1461898
auggaucuuggcaacccug

SEQ ID NO: 1461900 - RNA, 19 nt, Artificial Sequence
  Description of Artificial Sequence: Synthetic oligonucleotide
  Sense strand starting at position 2024 of SEQ ID NO: 1244059
ccuuuauauuaggcauaga

SEQ ID NO: 1461901 - RNA, 19 nt, Artificial Sequence
  Description of Artificial Sequence: Synthetic oligonucleotide
  Antisense strand to SEQ ID NO: 1461900
ucuaugccuaauauaaagg

SEQ ID NO: 1461902 - RNA, 19 nt, Artificial Sequence
  Description of Artificial Sequence: Synthetic oligonucleotide
  Sense strand starting at position 2138 of SEQ ID NO: 1244059
ccaccugaacugugcuaau

SEQ ID NO: 1461903 - RNA, 19 nt, Artificial Sequence
  Description of Artificial Sequence: Synthetic oligonucleotide
  Antisense strand to SEQ ID NO: 1461902
auuagcacaguucaggugg

SEQ ID NO: 1461904 - RNA, 19 nt, Artificial Sequence
  Description of Artificial Sequence: Synthetic oligonucleotide
  Sense strand starting at position 2147 of SEQ ID NO: 1244059
cugugcuaauuggugauua

SEQ ID NO: 1461905 - RNA, 19 nt, Artificial Sequence
  Description of Artificial Sequence: Synthetic oligonucleotide
  Antisense strand to SEQ ID NO: 1461904
uaaucaccaauuagcacag

SEQ ID NO: 1461906 - RNA, 19 nt, Artificial Sequence
  Description of Artificial Sequence: Synthetic oligonucleotide
  Sense strand starting at position 2149 of SEQ ID NO: 1244059
gugcuaauuggugauuaac

SEQ ID NO: 1461907 - RNA, 19 nt, Artificial Sequence
  Description of Artificial Sequence: Synthetic oligonucleotide
  Antisense strand to SEQ ID NO: 1461906
guuaaucaccaauuagcac

SEQ ID NO: 1461908 - RNA, 19 nt, Artificial Sequence
  Description of Artificial Sequence: Synthetic oligonucleotide
  Sense strand starting at position 2151 of SEQ ID NO: 1244059
gcuaauuggugauuaacau

SEQ ID NO: 1461909 - RNA, 19 nt, Artificial Sequence
  Description of Artificial Sequence: Synthetic oligonucleotide
  Antisense strand to SEQ ID NO: 1461908
auguuaaucaccaauuagc

SEQ ID NO: 1461910 - RNA, 19 nt, Artificial Sequence
  Description of Artificial Sequence: Synthetic oligonucleotide
  Sense strand starting at position 2307 of SEQ ID NO: 1244059
cucaguuagaagggauacu

SEQ ID NO: 1461911 - RNA, 19 nt, Artificial Sequence
  Description of Artificial Sequence: Synthetic oligonucleotide
  Antisense strand to SEQ ID NO: 1461910
aguaucccuucuaacugag

SEQ ID NO: 1461912 - RNA, 19 nt, Artificial Sequence
  Description of Artificial Sequence: Synthetic oligonucleotide
  Sense strand starting at position 2341 of SEQ ID NO: 1244059
augaaucacgucuguaauc

SEQ ID NO: 1461913 - RNA, 19 nt, Artificial Sequence
  Description of Artificial Sequence: Synthetic oligonucleotide
  Antisense strand to SEQ ID NO: 1461912
gauuacagacgugauucau

SEQ ID NO: 1461914 - RNA, 19 nt, Artificial Sequence
  Description of Artificial Sequence: Synthetic oligonucleotide
  Sense strand starting at position 2474 of SEQ ID NO: 1244059
ggucgugcacggcuguaau

SEQ ID NO: 1461915 - RNA, 19 nt, Artificial Sequence
  Description of Artificial Sequence: Synthetic oligonucleotide
  Antisense strand to SEQ ID NO: 1461914
auuacagccgugcacgacc

SEQ ID NO: 1461916 - RNA, 19 nt, Artificial Sequence
  Description of Artificial Sequence: Synthetic oligonucleotide
  Sense strand starting at position 3145 of SEQ ID NO: 1244059
gguacuuguagugaagaca

SEQ ID NO: 1461917 - RNA, 19 nt, Artificial Sequence
  Description of Artificial Sequence: Synthetic oligonucleotide
  Antisense strand to SEQ ID NO: 1461916
ugucuucacuacaaguacc

SEQ ID NO: 1461918 - RNA, 19 nt, Artificial Sequence
  Description of Artificial Sequence: Synthetic oligonucleotide
  Sense strand starting at position 3218 of SEQ ID NO: 1244059
gcuacuucugggugggaga

SEQ ID NO: 1461919 - RNA, 19 nt, Artificial Sequence
  Description of Artificial Sequence: Synthetic oligonucleotide
  Antisense strand to SEQ ID NO: 1461918
ucucccacccagaaguagc

SEQ ID NO: 1461920 - RNA, 19 nt, Artificial Sequence
  Description of Artificial Sequence: Synthetic oligonucleotide
  Sense strand starting at position 3236 of SEQ ID NO: 1244059
agaguagguccacagucau

SEQ ID NO: 1461921 - RNA, 19 nt, Artificial Sequence
  Description of Artificial Sequence: Synthetic oligonucleotide
  Antisense strand to SEQ ID NO: 1461920
augacuguggaccuacucu

SEQ ID NO: 1461922 - RNA, 19 nt, Artificial Sequence
  Description of Artificial Sequence: Synthetic oligonucleotide
  Sense strand starting at position 3242 of SEQ ID NO: 1244059
gguccacagucaucugaau

SEQ ID NO: 1461923 - RNA, 19 nt, Artificial Sequence
  Description of Artificial Sequence: Synthetic oligonucleotide
  Antisense strand to SEQ ID NO: 1461922
auucagaugacuguggacc

SEQ ID NO: 1461924 - RNA, 19 nt, Artificial Sequence
  Description of Artificial Sequence: Synthetic oligonucleotide
  Sense strand starting at position 3277 of SEQ ID NO: 1244059
ggccuauggcuuuggugau

SEQ ID NO: 1461925 - RNA, 19 nt, Artificial Sequence
  Description of Artificial Sequence: Synthetic oligonucleotide
  Antisense strand to SEQ ID NO: 1461924
aucaccaaagccauaggcc

SEQ ID NO: 1461926 - RNA, 19 nt, Artificial Sequence
  Description of Artificial Sequence: Synthetic oligonucleotide
  Sense strand starting at position 3330 of SEQ ID NO: 1244059
gucccaagggcucaauguu

SEQ ID NO: 1461927 - RNA, 19 nt, Artificial Sequence
  Description of Artificial Sequence: Synthetic oligonucleotide
  Antisense strand to SEQ ID NO: 1461926
aacauugagcccuugggac

SEQ ID NO: 1461928 - RNA, 19 nt, Artificial Sequence
  Description of Artificial Sequence: Synthetic oligonucleotide
  Sense strand starting at position 3340 of SEQ ID NO: 1244059
cucaauguugagggaauau

SEQ ID NO: 1461929 - RNA, 19 nt, Artificial Sequence
  Description of Artificial Sequence: Synthetic oligonucleotide
  Antisense strand to SEQ ID NO: 1461928
auauucccucaacauugag

SEQ ID NO: 1461930 - RNA, 19 nt, Artificial Sequence
  Description of Artificial Sequence: Synthetic oligonucleotide
  Sense strand starting at position 3386 of SEQ ID NO: 1244059
uggauaaacugagaacaua

SEQ ID NO: 1461931 - RNA, 19 nt, Artificial Sequence
  Description of Artificial Sequence: Synthetic oligonucleotide
  Antisense strand to SEQ ID NO: 1461930
uauguucucaguuuaucca

SEQ ID NO: 1461932 - RNA, 19 nt, Artificial Sequence
  Description of Artificial Sequence: Synthetic oligonucleotide
  Sense strand starting at position 3445 of SEQ ID NO: 1244059
gagaaagagacauguuugu

SEQ ID NO: 1461933 - RNA, 19 nt, Artificial Sequence
  Description of Artificial Sequence: Synthetic oligonucleotide
  Antisense strand to SEQ ID NO: 1461932
acaaacaugucucuuucuc

SEQ ID NO: 1461934 - RNA, 19 nt, Artificial Sequence
  Description of Artificial Sequence: Synthetic oligonucleotide
  Sense strand starting at position 3449 of SEQ ID NO: 1244059
aagagacauguuuguaccu

SEQ ID NO: 1461935 - RNA, 19 nt, Artificial Sequence
  Description of Artificial Sequence: Synthetic oligonucleotide
  Antisense strand to SEQ ID NO: 1461934
agguacaaacaugucucuu

SEQ ID NO: 1461936 - RNA, 19 nt, Artificial Sequence
  Description of Artificial Sequence: Synthetic oligonucleotide
  Sense strand starting at position 3540 of SEQ ID NO: 1244059
ccuacuguccuguacaaga

SEQ ID NO: 1461937 - RNA, 19 nt, Artificial Sequence
  Description of Artificial Sequence: Synthetic oligonucleotide
  Antisense strand to SEQ ID NO: 1461936
ucuuguacaggacaguagg

SEQ ID NO: 1461938 - RNA, 19 nt, Artificial Sequence
  Description of Artificial Sequence: Synthetic oligonucleotide
  Sense strand starting at position 3542 of SEQ ID NO: 1244059
uacuguccuguacaagaga

SEQ ID NO: 1461939 - RNA, 19 nt, Artificial Sequence
  Description of Artificial Sequence: Synthetic oligonucleotide
  Antisense strand to SEQ ID NO: 1461938
ucucuuguacaggacagua

SEQ ID NO: 1461940 - RNA, 19 nt, Artificial Sequence
  Description of Artificial Sequence: Synthetic oligonucleotide
  Sense strand starting at position 3545 of SEQ ID NO: 1244059
uguccuguacaagagaagu

SEQ ID NO: 1461941 - RNA, 19 nt, Artificial Sequence
  Description of Artificial Sequence: Synthetic oligonucleotide
  Antisense strand to SEQ ID NO: 1461940
acuucucuuguacaggaca

SEQ ID NO: 1461942 - RNA, 19 nt, Artificial Sequence
  Description of Artificial Sequence: Synthetic oligonucleotide
  Sense strand starting at position 3553 of SEQ ID NO: 1244059
acaagagaaguaugucauc

SEQ ID NO: 1461943 - RNA, 19 nt, Artificial Sequence
  Description of Artificial Sequence: Synthetic oligonucleotide
  Antisense strand to SEQ ID NO: 1461942
gaugacauacuucucuugu

SEQ ID NO: 1461944 - RNA, 19 nt, Artificial Sequence
  Description of Artificial Sequence: Synthetic oligonucleotide
  Sense strand starting at position 3558 of SEQ ID NO: 1244059
agaaguaugucauccuguc

SEQ ID NO: 1461945 - RNA, 19 nt, Artificial Sequence
  Description of Artificial Sequence: Synthetic oligonucleotide
  Antisense strand to SEQ ID NO: 1461944
gacaggaugacauacuucu

SEQ ID NO: 1461946 - RNA, 19 nt, Artificial Sequence
  Description of Artificial Sequence: Synthetic oligonucleotide
  Sense strand starting at position 3578 of SEQ ID NO: 1244059
cuucuaucagagugaagac

SEQ ID NO: 1461947 - RNA, 19 nt, Artificial Sequence
  Description of Artificial Sequence: Synthetic oligonucleotide
  Antisense strand to SEQ ID NO: 1461946
gucuucacucugauagaag

SEQ ID NO: 1461948 - RNA, 19 nt, Artificial Sequence
  Description of Artificial Sequence: Synthetic oligonucleotide
  Sense strand starting at position 3587 of SEQ ID NO: 1244059
gagugaagacccuggaguu

SEQ ID NO: 1461949 - RNA, 19 nt, Artificial Sequence
  Description of Artificial Sequence: Synthetic oligonucleotide
  Antisense strand to SEQ ID NO: 1461948
aacuccagggucuucacuc

SEQ ID NO: 1461950 - RNA, 19 nt, Artificial Sequence
  Description of Artificial Sequence: Synthetic oligonucleotide
  Sense strand starting at position 3588 of SEQ ID NO: 1244059
agugaagacccuggaguua

SEQ ID NO: 1461951 - RNA, 19 nt, Artificial Sequence
  Description of Artificial Sequence: Synthetic oligonucleotide
  Antisense strand to SEQ ID NO: 1461950
uaacuccagggucuucacu

SEQ ID NO: 1461952 - RNA, 19 nt, Artificial Sequence
  Description of Artificial Sequence: Synthetic oligonucleotide
  Sense strand starting at position 3600 of SEQ ID NO: 1244059
ggaguuaugcugugccucu

SEQ ID NO: 1461953 - RNA, 19 nt, Artificial Sequence
  Description of Artificial Sequence: Synthetic oligonucleotide
  Antisense strand to SEQ ID NO: 1461952
agaggcacagcauaacucc

SEQ ID NO: 1461954 - RNA, 19 nt, Artificial Sequence
  Description of Artificial Sequence: Synthetic oligonucleotide
  Sense strand starting at position 3607 of SEQ ID NO: 1244059
ugcugugccucucuauuau

SEQ ID NO: 1461955 - RNA, 19 nt, Artificial Sequence
  Description of Artificial Sequence: Synthetic oligonucleotide
  Antisense strand to SEQ ID NO: 1461954
auaauagagaggcacagca

SEQ ID NO: 1461956 - RNA, 19 nt, Artificial Sequence
  Description of Artificial Sequence: Synthetic oligonucleotide
  Sense strand starting at position 3766 of SEQ ID NO: 1244059
ggagacuccuugggauacu

SEQ ID NO: 1461957 - RNA, 19 nt, Artificial Sequence
  Description of Artificial Sequence: Synthetic oligonucleotide
  Antisense strand to SEQ ID NO: 1461956
aguaucccaaggagucucc

SEQ ID NO: 1461958 - RNA, 19 nt, Artificial Sequence
  Description of Artificial Sequence: Synthetic oligonucleotide
  Sense strand starting at position 3919 of SEQ ID NO: 1244059
auggguacuugggaccaua

SEQ ID NO: 1461959 - RNA, 19 nt, Artificial Sequence
  Description of Artificial Sequence: Synthetic oligonucleotide
  Antisense strand to SEQ ID NO: 1461958
uauggucccaaguacccau

SEQ ID NO: 1461960 - RNA, 19 nt, Artificial Sequence
  Description of Artificial Sequence: Synthetic oligonucleotide
  Sense strand starting at position 105 of SEQ ID NO: 1244060
cuucuuugccucugaauug

SEQ ID NO: 1461961 - RNA, 19 nt, Artificial Sequence
  Description of Artificial Sequence: Synthetic oligonucleotide
  Antisense strand to SEQ ID NO: 1461960
caauucagaggcaaagaag

SEQ ID NO: 1461962 - RNA, 19 nt, Artificial Sequence
  Description of Artificial Sequence: Synthetic oligonucleotide
  Sense strand starting at position 106 of SEQ ID NO: 1244060
uucuuugccucugaauuga

SEQ ID NO: 1461963 - RNA, 19 nt, Artificial Sequence
  Description of Artificial Sequence: Synthetic oligonucleotide
  Antisense strand to SEQ ID NO: 1461962
ucaauucagaggcaaagaa

SEQ ID NO: 1461964 - RNA, 19 nt, Artificial Sequence
  Description of Artificial Sequence: Synthetic oligonucleotide
  Sense strand starting at position 147 of SEQ ID NO: 1244060
aggaaagucuuguugggau

SEQ ID NO: 1461965 - RNA, 19 nt, Artificial Sequence
  Description of Artificial Sequence: Synthetic oligonucleotide
  Antisense strand to SEQ ID NO: 1461964
aucccaacaagacuuuccu

SEQ ID NO: 1461966 - RNA, 19 nt, Artificial Sequence
  Description of Artificial Sequence: Synthetic oligonucleotide
  Sense strand starting at position 149 of SEQ ID NO: 1244060
gaaagucuuguugggauua

SEQ ID NO: 1461967 - RNA, 19 nt, Artificial Sequence
  Description of Artificial Sequence: Synthetic oligonucleotide
  Antisense strand to SEQ ID NO: 1461966
uaaucccaacaagacuuuc

SEQ ID NO: 1461968 - RNA, 19 nt, Artificial Sequence
  Description of Artificial Sequence: Synthetic oligonucleotide
  Sense strand starting at position 151 of SEQ ID NO: 1244060
aagucuuguugggauuaca

SEQ ID NO: 1461969 - RNA, 19 nt, Artificial Sequence
  Description of Artificial Sequence: Synthetic oligonucleotide
  Antisense strand to SEQ ID NO: 1461968
uguaaucccaacaagacuu

SEQ ID NO: 1461970 - RNA, 19 nt, Artificial Sequence
  Description of Artificial Sequence: Synthetic oligonucleotide
  Sense strand starting at position 168 of SEQ ID NO: 1244060
cagaguaagcugggaacaa

SEQ ID NO: 1461971 - RNA, 19 nt, Artificial Sequence
  Description of Artificial Sequence: Synthetic oligonucleotide
  Antisense strand to SEQ ID NO: 1461970
uuguucccagcuuacucug

SEQ ID NO: 1461972 - RNA, 19 nt, Artificial Sequence
  Description of Artificial Sequence: Synthetic oligonucleotide
  Sense strand starting at position 169 of SEQ ID NO: 1244060
agaguaagcugggaacaaa

SEQ ID NO: 1461973 - RNA, 19 nt, Artificial Sequence
  Description of Artificial Sequence: Synthetic oligonucleotide
  Antisense strand to SEQ ID NO: 1461972
uuuguucccagcuuacucu

SEQ ID NO: 1461974 - RNA, 19 nt, Artificial Sequence
  Description of Artificial Sequence: Synthetic oligonucleotide
  Sense strand starting at position 264 of SEQ ID NO: 1244060
cacggaguuguggaacagu

SEQ ID NO: 1461975 - RNA, 19 nt, Artificial Sequence
  Description of Artificial Sequence: Synthetic oligonucleotide
  Antisense strand to SEQ ID NO: 1461974
acuguuccacaacuccgug

SEQ ID NO: 1461976 - RNA, 19 nt, Artificial Sequence
  Description of Artificial Sequence: Synthetic oligonucleotide
  Sense strand starting at position 284 of SEQ ID NO: 1244060
gggagacauuuauaaggca

SEQ ID NO: 1461977 - RNA, 19 nt, Artificial Sequence
  Description of Artificial Sequence: Synthetic oligonucleotide
  Antisense strand to SEQ ID NO: 1461976
ugccuuauaaaugucuccc

SEQ ID NO: 1461978 - RNA, 19 nt, Artificial Sequence
  Description of Artificial Sequence: Synthetic oligonucleotide
  Sense strand starting at position 418 of SEQ ID NO: 1244060
cuaggaggccuuggucaua

SEQ ID NO: 1461979 - RNA, 19 nt, Artificial Sequence
  Description of Artificial Sequence: Synthetic oligonucleotide
  Antisense strand to SEQ ID NO: 1461978
uaugaccaaggccuccuag

SEQ ID NO: 1461980 - RNA, 19 nt, Artificial Sequence
  Description of Artificial Sequence: Synthetic oligonucleotide
  Sense strand starting at position 473 of SEQ ID NO: 1244060
agucauaguucccaaauac

SEQ ID NO: 1461981 - RNA, 19 nt, Artificial Sequence
  Description of Artificial Sequence: Synthetic oligonucleotide
  Antisense strand to SEQ ID NO: 1461980
guauuugggaacuaugacu

SEQ ID NO: 1461982 - RNA, 19 nt, Artificial Sequence
  Description of Artificial Sequence: Synthetic oligonucleotide
  Sense strand starting at position 678 of SEQ ID NO: 1244060
ggagauagcuccuuugcua

SEQ ID NO: 1461983 - RNA, 19 nt, Artificial Sequence
  Description of Artificial Sequence: Synthetic oligonucleotide
  Antisense strand to SEQ ID NO: 1461982
uagcaaaggagcuaucucc

SEQ ID NO: 1461984 - RNA, 19 nt, Artificial Sequence
  Description of Artificial Sequence: Synthetic oligonucleotide
  Sense strand starting at position 682 of SEQ ID NO: 1244060
auagcuccuuugcuaaaga

SEQ ID NO: 1461985 - RNA, 19 nt, Artificial Sequence
  Description of Artificial Sequence: Synthetic oligonucleotide
  Antisense strand to SEQ ID NO: 1461984
ucuuuagcaaaggagcuau

SEQ ID NO: 1461986 - RNA, 19 nt, Artificial Sequence
  Description of Artificial Sequence: Synthetic oligonucleotide
  Sense strand starting at position 844 of SEQ ID NO: 1244060
aguccuaacucuguuagga

SEQ ID NO: 1461987 - RNA, 19 nt, Artificial Sequence
  Description of Artificial Sequence: Synthetic oligonucleotide
  Antisense strand to SEQ ID NO: 1461986
uccuaacagaguuaggacu

SEQ ID NO: 1461988 - RNA, 19 nt, Artificial Sequence
  Description of Artificial Sequence: Synthetic oligonucleotide
  Sense strand starting at position 846 of SEQ ID NO: 1244060
uccuaacucuguuaggaaa

SEQ ID NO: 1461989 - RNA, 19 nt, Artificial Sequence
  Description of Artificial Sequence: Synthetic oligonucleotide
  Antisense strand to SEQ ID NO: 1461988
uuuccuaacagaguuagga

SEQ ID NO: 1461990 - RNA, 19 nt, Artificial Sequence
  Description of Artificial Sequence: Synthetic oligonucleotide
  Sense strand starting at position 994 of SEQ ID NO: 1244060
ccaggauagcuugaugcca

SEQ ID NO: 1461991 - RNA, 19 nt, Artificial Sequence
  Description of Artificial Sequence: Synthetic oligonucleotide
  Antisense strand to SEQ ID NO: 1461990
uggcaucaagcuauccugg

SEQ ID NO: 1461992 - RNA, 19 nt, Artificial Sequence
  Description of Artificial Sequence: Synthetic oligonucleotide
  Sense strand starting at position 1100 of SEQ ID NO: 1244060
gaugccucccgagaagaca

SEQ ID NO: 1461993 - RNA, 19 nt, Artificial Sequence
  Description of Artificial Sequence: Synthetic oligonucleotide
  Antisense strand to SEQ ID NO: 1461992
ugucuucucgggaggcauc

SEQ ID NO: 1461994 - RNA, 19 nt, Artificial Sequence
  Description of Artificial Sequence: Synthetic oligonucleotide
  Sense strand starting at position 1182 of SEQ ID NO: 1244060
gcagggaguccugggagua

SEQ ID NO: 1461995 - RNA, 19 nt, Artificial Sequence
  Description of Artificial Sequence: Synthetic oligonucleotide
  Antisense strand to SEQ ID NO: 1461994
uacucccaggacucccugc

SEQ ID NO: 1461996 - RNA, 19 nt, Artificial Sequence
  Description of Artificial Sequence: Synthetic oligonucleotide
  Sense strand starting at position 1209 of SEQ ID NO: 1244060
ucaucugcuccugaggaga

SEQ ID NO: 1461997 - RNA, 19 nt, Artificial Sequence
  Description of Artificial Sequence: Synthetic oligonucleotide
  Antisense strand to SEQ ID NO: 1461996
ucuccucaggagcagauga

SEQ ID NO: 1461998 - RNA, 19 nt, Artificial Sequence
  Description of Artificial Sequence: Synthetic oligonucleotide
  Sense strand starting at position 1333 of SEQ ID NO: 1244060
guggcacugagaugacaua

SEQ ID NO: 1461999 - RNA, 19 nt, Artificial Sequence
  Description of Artificial Sequence: Synthetic oligonucleotide
  Antisense strand to SEQ ID NO: 1461998
uaugucaucucagugccac

SEQ ID NO: 1462000 - RNA, 19 nt, Artificial Sequence
  Description of Artificial Sequence: Synthetic oligonucleotide
  Sense strand starting at position 1420 of SEQ ID NO: 1244060
ggcgcuuccgucggauaca

SEQ ID NO: 1462001 - RNA, 19 nt, Artificial Sequence
  Description of Artificial Sequence: Synthetic oligonucleotide
  Antisense strand to SEQ ID NO: 1462000
uguauccgacggaagcgcc

SEQ ID NO: 1462002 - RNA, 19 nt, Artificial Sequence
  Description of Artificial Sequence: Synthetic oligonucleotide
  Sense strand starting at position 2506 of SEQ ID NO: 1244060
gucacacucuugcugaaua

SEQ ID NO: 1462003 - RNA, 19 nt, Artificial Sequence
  Description of Artificial Sequence: Synthetic oligonucleotide
  Antisense strand to SEQ ID NO: 1462002
uauucagcaagagugugac

SEQ ID NO: 1462004 - RNA, 19 nt, Artificial Sequence
  Description of Artificial Sequence: Synthetic oligonucleotide
  Sense strand starting at position 2638 of SEQ ID NO: 1244060
gagagaaucugggcgguuu

SEQ ID NO: 1462005 - RNA, 19 nt, Artificial Sequence
  Description of Artificial Sequence: Synthetic oligonucleotide
  Antisense strand to SEQ ID NO: 1462004
aaaccgcccagauucucuc

SEQ ID NO: 1462006 - RNA, 19 nt, Artificial Sequence
  Description of Artificial Sequence: Synthetic oligonucleotide
  Sense strand starting at position 3051 of SEQ ID NO: 1244060
ccaggucaguggugacaau

SEQ ID NO: 1462007 - RNA, 19 nt, Artificial Sequence
  Description of Artificial Sequence: Synthetic oligonucleotide
  Antisense strand to SEQ ID NO: 1462006
auugucaccacugaccugg

SEQ ID NO: 1462008 - RNA, 19 nt, Artificial Sequence
  Description of Artificial Sequence: Synthetic oligonucleotide
  Sense strand starting at position 3052 of SEQ ID NO: 1244060
caggucaguggugacaauu

SEQ ID NO: 1462009 - RNA, 19 nt, Artificial Sequence
  Description of Artificial Sequence: Synthetic oligonucleotide
  Antisense strand to SEQ ID NO: 1462008
aauugucaccacugaccug

SEQ ID NO: 1462010 - RNA, 19 nt, Artificial Sequence
  Description of Artificial Sequence: Synthetic oligonucleotide
  Sense strand starting at position 3093 of SEQ ID NO: 1244060
agagacuccugcuuguuaa

SEQ ID NO: 1462011 - RNA, 19 nt, Artificial Sequence
  Description of Artificial Sequence: Synthetic oligonucleotide
  Antisense strand to SEQ ID NO: 1462010
uuaacaagcaggagucucu

SEQ ID NO: 1462012 - RNA, 19 nt, Artificial Sequence
  Description of Artificial Sequence: Synthetic oligonucleotide
  Sense strand starting at position 3094 of SEQ ID NO: 1244060
gagacuccugcuuguuaag

SEQ ID NO: 1462013 - RNA, 19 nt, Artificial Sequence
  Description of Artificial Sequence: Synthetic oligonucleotide
  Antisense strand to SEQ ID NO: 1462012
cuuaacaagcaggagucuc

SEQ ID NO: 1462014 - RNA, 19 nt, Artificial Sequence
  Description of Artificial Sequence: Synthetic oligonucleotide
  Sense strand starting at position 3096 of SEQ ID NO: 1244060
gacuccugcuuguuaagau

SEQ ID NO: 1462015 - RNA, 19 nt, Artificial Sequence
  Description of Artificial Sequence: Synthetic oligonucleotide
  Antisense strand to SEQ ID NO: 1462014
aucuuaacaagcaggaguc

SEQ ID NO: 1462016 - RNA, 19 nt, Artificial Sequence
  Description of Artificial Sequence: Synthetic oligonucleotide
  Sense strand starting at position 3137 of SEQ ID NO: 1244060
ugcucaaguuggucgauua

SEQ ID NO: 1462017 - RNA, 19 nt, Artificial Sequence
  Description of Artificial Sequence: Synthetic oligonucleotide
  Antisense strand to SEQ ID NO: 1462016
uaaucgaccaacuugagca

SEQ ID NO: 1462018 - RNA, 19 nt, Artificial Sequence
  Description of Artificial Sequence: Synthetic oligonucleotide
  Sense strand starting at position 3138 of SEQ ID NO: 1244060
gcucaaguuggucgauuau

SEQ ID NO: 1462019 - RNA, 19 nt, Artificial Sequence
  Description of Artificial Sequence: Synthetic oligonucleotide
  Antisense strand to SEQ ID NO: 1462018
auaaucgaccaacuugagc

SEQ ID NO: 1462020 - RNA, 19 nt, Artificial Sequence
  Description of Artificial Sequence: Synthetic oligonucleotide
  Sense strand starting at position 3177 of SEQ ID NO: 1244060
agugauuugugggugggca

SEQ ID NO: 1462021 - RNA, 19 nt, Artificial Sequence
  Description of Artificial Sequence: Synthetic oligonucleotide
  Antisense strand to SEQ ID NO: 1462020
ugcccacccacaaaucacu

SEQ ID NO: 1462022 - RNA, 19 nt, Artificial Sequence
  Description of Artificial Sequence: Synthetic oligonucleotide
  Sense strand starting at position 3211 of SEQ ID NO: 1244060
ggagacaaguaaugcucau

SEQ ID NO: 1462023 - RNA, 19 nt, Artificial Sequence
  Description of Artificial Sequence: Synthetic oligonucleotide
  Antisense strand to SEQ ID NO: 1462022
augagcauuacuugucucc

SEQ ID NO: 1462024 - RNA, 19 nt, Artificial Sequence
  Description of Artificial Sequence: Synthetic oligonucleotide
  Sense strand starting at position 3215 of SEQ ID NO: 1244060
acaaguaaugcucaugagu

SEQ ID NO: 1462025 - RNA, 19 nt, Artificial Sequence
  Description of Artificial Sequence: Synthetic oligonucleotide
  Antisense strand to SEQ ID NO: 1462024
acucaugagcauuacuugu

SEQ ID NO: 1462026 - RNA, 19 nt, Artificial Sequence
  Description of Artificial Sequence: Synthetic oligonucleotide
  Sense strand starting at position 3282 of SEQ ID NO: 1244060
ggcccagauugacaaguuu

SEQ ID NO: 1462027 - RNA, 19 nt, Artificial Sequence
  Description of Artificial Sequence: Synthetic oligonucleotide
  Antisense strand to SEQ ID NO: 1462026
aaacuugucaaucugggcc

SEQ ID NO: 1462028 - RNA, 19 nt, Artificial Sequence
  Description of Artificial Sequence: Synthetic oligonucleotide
  Sense strand starting at position 3288 of SEQ ID NO: 1244060
gauugacaaguuuguuuga

SEQ ID NO: 1462029 - RNA, 19 nt, Artificial Sequence
  Description of Artificial Sequence: Synthetic oligonucleotide
  Antisense strand to SEQ ID NO: 1462028
ucaaacaaacuugucaauc

SEQ ID NO: 1462030 - RNA, 19 nt, Artificial Sequence
  Description of Artificial Sequence: Synthetic oligonucleotide
  Sense strand starting at position 3289 of SEQ ID NO: 1244060
auugacaaguuuguuugaa

SEQ ID NO: 1462031 - RNA, 19 nt, Artificial Sequence
  Description of Artificial Sequence: Synthetic oligonucleotide
  Antisense strand to SEQ ID NO: 1462030
uucaaacaaacuugucaau

SEQ ID NO: 1462032 - RNA, 19 nt, Artificial Sequence
  Description of Artificial Sequence: Synthetic oligonucleotide
  Sense strand starting at position 3301 of SEQ ID NO: 1244060
guuugaaaucgcgauccau

SEQ ID NO: 1462033 - RNA, 19 nt, Artificial Sequence
  Description of Artificial Sequence: Synthetic oligonucleotide
  Antisense strand to SEQ ID NO: 1462032
auggaucgcgauuucaaac

SEQ ID NO: 1462034 - RNA, 19 nt, Artificial Sequence
  Description of Artificial Sequence: Synthetic oligonucleotide
  Sense strand starting at position 3309 of SEQ ID NO: 1244060
ucgcgauccaugggcuuua

SEQ ID NO: 1462035 - RNA, 19 nt, Artificial Sequence
  Description of Artificial Sequence: Synthetic oligonucleotide
  Antisense strand to SEQ ID NO: 1462034
uaaagcccauggaucgcga

SEQ ID NO: 1462036 - RNA, 19 nt, Artificial Sequence
  Description of Artificial Sequence: Synthetic oligonucleotide
  Sense strand starting at position 3923 of SEQ ID NO: 1244060
cugguuggcucagagacua

SEQ ID NO: 1462037 - RNA, 19 nt, Artificial Sequence
  Description of Artificial Sequence: Synthetic oligonucleotide
  Antisense strand to SEQ ID NO: 1462036
uagucucugagccaaccag

SEQ ID NO: 1462038 - RNA, 19 nt, Artificial Sequence
  Description of Artificial Sequence: Synthetic oligonucleotide
  Sense strand starting at position 3962 of SEQ ID NO: 1244060
ggacacaucguccaaacuu

SEQ ID NO: 1462039 - RNA, 19 nt, Artificial Sequence
  Description of Artificial Sequence: Synthetic oligonucleotide
  Antisense strand to SEQ ID NO: 1462038
aaguuuggacgaugugucc

SEQ ID NO: 1462040 - RNA, 19 nt, Artificial Sequence
  Description of Artificial Sequence: Synthetic oligonucleotide
  Sense strand starting at position 60 of SEQ ID NO: 1244061
ugacauuauuaacgcauuu

SEQ ID NO: 1462041 - RNA, 19 nt, Artificial Sequence
  Description of Artificial Sequence: Synthetic oligonucleotide
  Antisense strand to SEQ ID NO: 1462040
aaaugcguuaauaauguca

SEQ ID NO: 1462042 - RNA, 19 nt, Artificial Sequence
  Description of Artificial Sequence: Synthetic oligonucleotide
  Sense strand starting at position 111 of SEQ ID NO: 1244061
guuuccugcuuaucaggaa

SEQ ID NO: 1462043 - RNA, 19 nt, Artificial Sequence
  Description of Artificial Sequence: Synthetic oligonucleotide
  Antisense strand to SEQ ID NO: 1462042
uuccugauaagcaggaaac

SEQ ID NO: 1462044 - RNA, 19 nt, Artificial Sequence
  Description of Artificial Sequence: Synthetic oligonucleotide
  Sense strand starting at position 115 of SEQ ID NO: 1244061
ccugcuuaucaggaaauua

SEQ ID NO: 1462045 - RNA, 19 nt, Artificial Sequence
  Description of Artificial Sequence: Synthetic oligonucleotide
  Antisense strand to SEQ ID NO: 1462044
uaauuuccugauaagcagg

SEQ ID NO: 1462046 - RNA, 19 nt, Artificial Sequence
  Description of Artificial Sequence: Synthetic oligonucleotide
  Sense strand starting at position 191 of SEQ ID NO: 1244061
gaacguauacacgacacaa

SEQ ID NO: 1462047 - RNA, 19 nt, Artificial Sequence
  Description of Artificial Sequence: Synthetic oligonucleotide
  Antisense strand to SEQ ID NO: 1462046
uugugucguguauacguuc

SEQ ID NO: 1462048 - RNA, 19 nt, Artificial Sequence
  Description of Artificial Sequence: Synthetic oligonucleotide
  Sense strand starting at position 288 of SEQ ID NO: 1244061
ucacaucgucuugaugcua

SEQ ID NO: 1462049 - RNA, 19 nt, Artificial Sequence
  Description of Artificial Sequence: Synthetic oligonucleotide
  Antisense strand to SEQ ID NO: 1462048
uagcaucaagacgauguga

SEQ ID NO: 1462050 - RNA, 19 nt, Artificial Sequence
  Description of Artificial Sequence: Synthetic oligonucleotide
  Sense strand starting at position 323 of SEQ ID NO: 1244061
gcauaaugaaaucgguauc

SEQ ID NO: 1462051 - RNA, 19 nt, Artificial Sequence
  Description of Artificial Sequence: Synthetic oligonucleotide
  Antisense strand to SEQ ID NO: 1462050
gauaccgauuucauuaugc

SEQ ID NO: 1462052 - RNA, 19 nt, Artificial Sequence
  Description of Artificial Sequence: Synthetic oligonucleotide
  Sense strand starting at position 326 of SEQ ID NO: 1244061
uaaugaaaucgguaucacu

SEQ ID NO: 1462053 - RNA, 19 nt, Artificial Sequence
  Description of Artificial Sequence: Synthetic oligonucleotide
  Antisense strand to SEQ ID NO: 1462052
agugauaccgauuucauua

SEQ ID NO: 1462054 - RNA, 19 nt, Artificial Sequence
  Description of Artificial Sequence: Synthetic oligonucleotide
  Sense strand starting at position 345 of SEQ ID NO: 1244061
gccaguucucaaugaacaa

SEQ ID NO: 1462055 - RNA, 19 nt, Artificial Sequence
  Description of Artificial Sequence: Synthetic oligonucleotide
  Antisense strand to SEQ ID NO: 1462054
uuguucauugagaacuggc

SEQ ID NO: 1462056 - RNA, 19 nt, Artificial Sequence
  Description of Artificial Sequence: Synthetic oligonucleotide
  Sense strand starting at position 582 of SEQ ID NO: 1244061
aguucucaaguuugacaaa

SEQ ID NO: 1462057 - RNA, 19 nt, Artificial Sequence
  Description of Artificial Sequence: Synthetic oligonucleotide
  Antisense strand to SEQ ID NO: 1462056
uuugucaaacuugagaacu

SEQ ID NO: 1462058 - RNA, 19 nt, Artificial Sequence
  Description of Artificial Sequence: Synthetic oligonucleotide
  Sense strand starting at position 620 of SEQ ID NO: 1244061
aaguaaagacaacgaguua

SEQ ID NO: 1462059 - RNA, 19 nt, Artificial Sequence
  Description of Artificial Sequence: Synthetic oligonucleotide
  Antisense strand to SEQ ID NO: 1462058
uaacucguugucuuuacuu

SEQ ID NO: 1462060 - RNA, 19 nt, Artificial Sequence
  Description of Artificial Sequence: Synthetic oligonucleotide
  Sense strand starting at position 632 of SEQ ID NO: 1244061
cgaguuaaucaggaggcga

SEQ ID NO: 1462061 - RNA, 19 nt, Artificial Sequence
  Description of Artificial Sequence: Synthetic oligonucleotide
  Antisense strand to SEQ ID NO: 1462060
ucgccuccugauuaacucg

SEQ ID NO: 1462062 - RNA, 19 nt, Artificial Sequence
  Description of Artificial Sequence: Synthetic oligonucleotide
  Sense strand starting at position 973 of SEQ ID NO: 1244061
agccguuucccucccgauu

SEQ ID NO: 1462063 - RNA, 19 nt, Artificial Sequence
  Description of Artificial Sequence: Synthetic oligonucleotide
  Antisense strand to SEQ ID NO: 1462062
aaucgggagggaaacggcu

SEQ ID NO: 1462064 - RNA, 19 nt, Artificial Sequence
  Description of Artificial Sequence: Synthetic oligonucleotide
  Sense strand starting at position 1605 of SEQ ID NO: 1244061
caacuuuccgcggucgagu

SEQ ID NO: 1462065 - RNA, 19 nt, Artificial Sequence
  Description of Artificial Sequence: Synthetic oligonucleotide
  Antisense strand to SEQ ID NO: 1462064
acucgaccgcggaaaguug

SEQ ID NO: 1462066 - RNA, 19 nt, Artificial Sequence
  Description of Artificial Sequence: Synthetic oligonucleotide
  Sense strand starting at position 1882 of SEQ ID NO: 1244061
gaggccuugguccauugua

SEQ ID NO: 1462067 - RNA, 19 nt, Artificial Sequence
  Description of Artificial Sequence: Synthetic oligonucleotide
  Antisense strand to SEQ ID NO: 1462066
uacaauggaccaaggccuc

SEQ ID NO: 1462068 - RNA, 19 nt, Artificial Sequence
  Description of Artificial Sequence: Synthetic oligonucleotide
  Sense strand starting at position 1934 of SEQ ID NO: 1244061
cucuacaauuccucgagga

SEQ ID NO: 1462069 - RNA, 19 nt, Artificial Sequence
  Description of Artificial Sequence: Synthetic oligonucleotide
  Antisense strand to SEQ ID NO: 1462068
uccucgaggaauuguagag

SEQ ID NO: 1462070 - RNA, 19 nt, Artificial Sequence
  Description of Artificial Sequence: Synthetic oligonucleotide
  Sense strand starting at position 1935 of SEQ ID NO: 1244061
ucuacaauuccucgaggau

SEQ ID NO: 1462071 - RNA, 19 nt, Artificial Sequence
  Description of Artificial Sequence: Synthetic oligonucleotide
  Antisense strand to SEQ ID NO: 1462070
auccucgaggaauuguaga

SEQ ID NO: 1462072 - RNA, 19 nt, Artificial Sequence
  Description of Artificial Sequence: Synthetic oligonucleotide
  Sense strand starting at position 1936 of SEQ ID NO: 1244061
cuacaauuccucgaggauc

SEQ ID NO: 1462073 - RNA, 19 nt, Artificial Sequence
  Description of Artificial Sequence: Synthetic oligonucleotide
  Antisense strand to SEQ ID NO: 1462072
gauccucgaggaauuguag

SEQ ID NO: 1462074 - RNA, 19 nt, Artificial Sequence
  Description of Artificial Sequence: Synthetic oligonucleotide
  Sense strand starting at position 1993 of SEQ ID NO: 1244061
uuagcagugcucuagauac

SEQ ID NO: 1462075 - RNA, 19 nt, Artificial Sequence
  Description of Artificial Sequence: Synthetic oligonucleotide
  Antisense strand to SEQ ID NO: 1462074
guaucuagagcacugcuaa

SEQ ID NO: 1462076 - RNA, 19 nt, Artificial Sequence
  Description of Artificial Sequence: Synthetic oligonucleotide
  Sense strand starting at position 1995 of SEQ ID NO: 1244061
agcagugcucuagauacuu

SEQ ID NO: 1462077 - RNA, 19 nt, Artificial Sequence
  Description of Artificial Sequence: Synthetic oligonucleotide
  Antisense strand to SEQ ID NO: 1462076
aaguaucuagagcacugcu

SEQ ID NO: 1462078 - RNA, 19 nt, Artificial Sequence
  Description of Artificial Sequence: Synthetic oligonucleotide
  Sense strand starting at position 2021 of SEQ ID NO: 1244061
ccugaacuucucggauuag

SEQ ID NO: 1462079 - RNA, 19 nt, Artificial Sequence
  Description of Artificial Sequence: Synthetic oligonucleotide
  Antisense strand to SEQ ID NO: 1462078
cuaauccgagaaguucagg

SEQ ID NO: 1462080 - RNA, 19 nt, Artificial Sequence
  Description of Artificial Sequence: Synthetic oligonucleotide
  Sense strand starting at position 2168 of SEQ ID NO: 1244061
cuccaaaugcuuuaaguag

SEQ ID NO: 1462081 - RNA, 19 nt, Artificial Sequence
  Description of Artificial Sequence: Synthetic oligonucleotide
  Antisense strand to SEQ ID NO: 1462080
cuacuuaaagcauuuggag

SEQ ID NO: 1462082 - RNA, 19 nt, Artificial Sequence
  Description of Artificial Sequence: Synthetic oligonucleotide
  Sense strand starting at position 2185 of SEQ ID NO: 1244061
agaguaagacuuuggguaa

SEQ ID NO: 1462083 - RNA, 19 nt, Artificial Sequence
  Description of Artificial Sequence: Synthetic oligonucleotide
  Antisense strand to SEQ ID NO: 1462082
uuacccaaagucuuacucu

SEQ ID NO: 1462084 - RNA, 19 nt, Artificial Sequence
  Description of Artificial Sequence: Synthetic oligonucleotide
  Sense strand starting at position 2188 of SEQ ID NO: 1244061
guaagacuuuggguaauaa

SEQ ID NO: 1462085 - RNA, 19 nt, Artificial Sequence
  Description of Artificial Sequence: Synthetic oligonucleotide
  Antisense strand to SEQ ID NO: 1462084
uuauuacccaaagucuuac

SEQ ID NO: 1462086 - RNA, 19 nt, Artificial Sequence
  Description of Artificial Sequence: Synthetic oligonucleotide
  Sense strand starting at position 2192 of SEQ ID NO: 1244061
gacuuuggguaauaaagga

SEQ ID NO: 1462087 - RNA, 19 nt, Artificial Sequence
  Description of Artificial Sequence: Synthetic oligonucleotide
  Antisense strand to SEQ ID NO: 1462086
uccuuuauuacccaaaguc

SEQ ID NO: 1462088 - RNA, 19 nt, Artificial Sequence
  Description of Artificial Sequence: Synthetic oligonucleotide
  Sense strand starting at position 2228 of SEQ ID NO: 1244061
gggcgaccucuggaaugau

SEQ ID NO: 1462089 - RNA, 19 nt, Artificial Sequence
  Description of Artificial Sequence: Synthetic oligonucleotide
  Antisense strand to SEQ ID NO: 1462088
aucauuccagaggucgccc

SEQ ID NO: 1462090 - RNA, 19 nt, Artificial Sequence
  Description of Artificial Sequence: Synthetic oligonucleotide
  Sense strand starting at position 2237 of SEQ ID NO: 1244061
cuggaaugaucucaucuga

SEQ ID NO: 1462091 - RNA, 19 nt, Artificial Sequence
  Description of Artificial Sequence: Synthetic oligonucleotide
  Antisense strand to SEQ ID NO: 1462090
ucagaugagaucauuccag

SEQ ID NO: 1462092 - RNA, 19 nt, Artificial Sequence
  Description of Artificial Sequence: Synthetic oligonucleotide
  Sense strand starting at position 2245 of SEQ ID NO: 1244061
aucucaucugagcaucaga

SEQ ID NO: 1462093 - RNA, 19 nt, Artificial Sequence
  Description of Artificial Sequence: Synthetic oligonucleotide
  Antisense strand to SEQ ID NO: 1462092
ucugaugcucagaugagau

SEQ ID NO: 1462094 - RNA, 19 nt, Artificial Sequence
  Description of Artificial Sequence: Synthetic oligonucleotide
  Sense strand starting at position 2310 of SEQ ID NO: 1244061
gaaauuaagcgcuaacaag

SEQ ID NO: 1462095 - RNA, 19 nt, Artificial Sequence
  Description of Artificial Sequence: Synthetic oligonucleotide
  Antisense strand to SEQ ID NO: 1462094
cuuguuagcgcuuaauuuc

SEQ ID NO: 1462096 - RNA, 19 nt, Artificial Sequence
  Description of Artificial Sequence: Synthetic oligonucleotide
  Sense strand starting at position 2317 of SEQ ID NO: 1244061
agcgcuaacaagugagguu

SEQ ID NO: 1462097 - RNA, 19 nt, Artificial Sequence
  Description of Artificial Sequence: Synthetic oligonucleotide
  Antisense strand to SEQ ID NO: 1462096
aaccucacuuguuagcgcu

SEQ ID NO: 1462098 - RNA, 19 nt, Artificial Sequence
  Description of Artificial Sequence: Synthetic oligonucleotide
  Sense strand starting at position 2318 of SEQ ID NO: 1244061
gcgcuaacaagugagguua

SEQ ID NO: 1462099 - RNA, 19 nt, Artificial Sequence
  Description of Artificial Sequence: Synthetic oligonucleotide
  Antisense strand to SEQ ID NO: 1462098
uaaccucacuuguuagcgc

SEQ ID NO: 1462100 - RNA, 19 nt, Artificial Sequence
  Description of Artificial Sequence: Synthetic oligonucleotide
  Sense strand starting at position 2332 of SEQ ID NO: 1244061
gguuacuugcugcaaguca

SEQ ID NO: 1462101 - RNA, 19 nt, Artificial Sequence
  Description of Artificial Sequence: Synthetic oligonucleotide
  Antisense strand to SEQ ID NO: 1462100
ugacuugcagcaaguaacc

SEQ ID NO: 1462102 - RNA, 19 nt, Artificial Sequence
  Description of Artificial Sequence: Synthetic oligonucleotide
  Sense strand starting at position 2435 of SEQ ID NO: 1244061
uuguguggccaguauguuu

SEQ ID NO: 1462103 - RNA, 19 nt, Artificial Sequence
  Description of Artificial Sequence: Synthetic oligonucleotide
  Antisense strand to SEQ ID NO: 1462102
aaacauacuggccacacaa

SEQ ID NO: 1462104 - RNA, 19 nt, Artificial Sequence
  Description of Artificial Sequence: Synthetic oligonucleotide
  Sense strand starting at position 2644 of SEQ ID NO: 1244061
aguacuucucccugugauu

SEQ ID NO: 1462105 - RNA, 19 nt, Artificial Sequence
  Description of Artificial Sequence: Synthetic oligonucleotide
  Antisense strand to SEQ ID NO: 1462104
aaucacagggagaaguacu

SEQ ID NO: 1462106 - RNA, 19 nt, Artificial Sequence
  Description of Artificial Sequence: Synthetic oligonucleotide
  Sense strand starting at position 2655 of SEQ ID NO: 1244061
cugugauugcuguagucug

SEQ ID NO: 1462107 - RNA, 19 nt, Artificial Sequence
  Description of Artificial Sequence: Synthetic oligonucleotide
  Antisense strand to SEQ ID NO: 1462106
cagacuacagcaaucacag

SEQ ID NO: 1462108 - RNA, 19 nt, Artificial Sequence
  Description of Artificial Sequence: Synthetic oligonucleotide
  Sense strand starting at position 3107 of SEQ ID NO: 1244061
acaucauuguaccuguuga

SEQ ID NO: 1462109 - RNA, 19 nt, Artificial Sequence
  Description of Artificial Sequence: Synthetic oligonucleotide
  Antisense strand to SEQ ID NO: 1462108
ucaacagguacaaugaugu

SEQ ID NO: 1462110 - RNA, 19 nt, Artificial Sequence
  Description of Artificial Sequence: Synthetic oligonucleotide
  Sense strand starting at position 3112 of SEQ ID NO: 1244061
auuguaccuguugaauaaa

SEQ ID NO: 1462111 - RNA, 19 nt, Artificial Sequence
  Description of Artificial Sequence: Synthetic oligonucleotide
  Antisense strand to SEQ ID NO: 1462110
uuuauucaacagguacaau

SEQ ID NO: 1462112 - RNA, 19 nt, Artificial Sequence
  Description of Artificial Sequence: Synthetic oligonucleotide
  Sense strand starting at position 3155 of SEQ ID NO: 1244061
acuguaaacuaguacaaau

SEQ ID NO: 1462113 - RNA, 19 nt, Artificial Sequence
  Description of Artificial Sequence: Synthetic oligonucleotide
  Antisense strand to SEQ ID NO: 1462112
auuuguacuaguuuacagu

SEQ ID NO: 1462114 - RNA, 19 nt, Artificial Sequence
  Description of Artificial Sequence: Synthetic oligonucleotide
  Sense strand starting at position 3476 of SEQ ID NO: 1244061
ccuaaaucacuuuguuguu

SEQ ID NO: 1462115 - RNA, 19 nt, Artificial Sequence
  Description of Artificial Sequence: Synthetic oligonucleotide
  Antisense strand to SEQ ID NO: 1462114
aacaacaaagugauuuagg

SEQ ID NO: 1462116 - RNA, 19 nt, Artificial Sequence
  Description of Artificial Sequence: Synthetic oligonucleotide
  Sense strand starting at position 3972 of SEQ ID NO: 1244061
gagcuuuggcgugcugagu

SEQ ID NO: 1462117 - RNA, 19 nt, Artificial Sequence
  Description of Artificial Sequence: Synthetic oligonucleotide
  Antisense strand to SEQ ID NO: 1462116
acucagcacgccaaagcuc

SEQ ID NO: 1462118 - RNA, 19 nt, Artificial Sequence
  Description of Artificial Sequence: Synthetic oligonucleotide
  Sense strand starting at position 3980 of SEQ ID NO: 1244061
gcgugcugagugcuuugaa

SEQ ID NO: 1462119 - RNA, 19 nt, Artificial Sequence
  Description of Artificial Sequence: Synthetic oligonucleotide
  Antisense strand to SEQ ID NO: 1462118
uucaaagcacucagcacgc

SEQ ID NO: 1462120 - RNA, 19 nt, Artificial Sequence
  Description of Artificial Sequence: Synthetic oligonucleotide
  Sense strand starting at position 27 of SEQ ID NO: 1244062
augaauugauuacagagaa

SEQ ID NO: 1462121 - RNA, 19 nt, Artificial Sequence
  Description of Artificial Sequence: Synthetic oligonucleotide
  Antisense strand to SEQ ID NO: 1462120
uucucuguaaucaauucau

SEQ ID NO: 1462122 - RNA, 19 nt, Artificial Sequence
  Description of Artificial Sequence: Synthetic oligonucleotide
  Sense strand starting at position 70 of SEQ ID NO: 1244062
uuaagagaacugugguaga

SEQ ID NO: 1462123 - RNA, 19 nt, Artificial Sequence
  Description of Artificial Sequence: Synthetic oligonucleotide
  Antisense strand to SEQ ID NO: 1462122
ucuaccacaguucucuuaa

SEQ ID NO: 1462124 - RNA, 19 nt, Artificial Sequence
  Description of Artificial Sequence: Synthetic oligonucleotide
  Sense strand starting at position 97 of SEQ ID NO: 1244062
agagaacuguuucugguag

SEQ ID NO: 1462125 - RNA, 19 nt, Artificial Sequence
  Description of Artificial Sequence: Synthetic oligonucleotide
  Antisense strand to SEQ ID NO: 1462124
cuaccagaaacaguucucu

SEQ ID NO: 1462126 - RNA, 19 nt, Artificial Sequence
  Description of Artificial Sequence: Synthetic oligonucleotide
  Sense strand starting at position 171 of SEQ ID NO: 1244062
gguuguuugaaaugcuuug

SEQ ID NO: 1462127 - RNA, 19 nt, Artificial Sequence
  Description of Artificial Sequence: Synthetic oligonucleotide
  Antisense strand to SEQ ID NO: 1462126
caaagcauuucaaacaacc

SEQ ID NO: 1462128 - RNA, 19 nt, Artificial Sequence
  Description of Artificial Sequence: Synthetic oligonucleotide
  Sense strand starting at position 199 of SEQ ID NO: 1244062
acaacaguuuaaguaguaa

SEQ ID NO: 1462129 - RNA, 19 nt, Artificial Sequence
  Description of Artificial Sequence: Synthetic oligonucleotide
  Antisense strand to SEQ ID NO: 1462128
uuacuacuuaaacuguugu

SEQ ID NO: 1462130 - RNA, 19 nt, Artificial Sequence
  Description of Artificial Sequence: Synthetic oligonucleotide
  Sense strand starting at position 437 of SEQ ID NO: 1244062
gugauacaacucuaugcua

SEQ ID NO: 1462131 - RNA, 19 nt, Artificial Sequence
  Description of Artificial Sequence: Synthetic oligonucleotide
  Antisense strand to SEQ ID NO: 1462130
uagcauagaguuguaucac

SEQ ID NO: 1462132 - RNA, 19 nt, Artificial Sequence
  Description of Artificial Sequence: Synthetic oligonucleotide
  Sense strand starting at position 541 of SEQ ID NO: 1244062
uuccauacccucugagguu

SEQ ID NO: 1462133 - RNA, 19 nt, Artificial Sequence
  Description of Artificial Sequence: Synthetic oligonucleotide
  Antisense strand to SEQ ID NO: 1462132
aaccucagaggguauggaa

SEQ ID NO: 1462134 - RNA, 19 nt, Artificial Sequence
  Description of Artificial Sequence: Synthetic oligonucleotide
  Sense strand starting at position 547 of SEQ ID NO: 1244062
acccucugagguugaaauu

SEQ ID NO: 1462135 - RNA, 19 nt, Artificial Sequence
  Description of Artificial Sequence: Synthetic oligonucleotide
  Antisense strand to SEQ ID NO: 1462134
aauuucaaccucagagggu

SEQ ID NO: 1462136 - RNA, 19 nt, Artificial Sequence
  Description of Artificial Sequence: Synthetic oligonucleotide
  Sense strand starting at position 683 of SEQ ID NO: 1244062
guuuccugcuuaucaggaa

SEQ ID NO: 1462137 - RNA, 19 nt, Artificial Sequence
  Description of Artificial Sequence: Synthetic oligonucleotide
  Antisense strand to SEQ ID NO: 1462136
uuccugauaagcaggaaac

SEQ ID NO: 1462138 - RNA, 19 nt, Artificial Sequence
  Description of Artificial Sequence: Synthetic oligonucleotide
  Sense strand starting at position 687 of SEQ ID NO: 1244062
ccugcuuaucaggaaauua

SEQ ID NO: 1462139 - RNA, 19 nt, Artificial Sequence
  Description of Artificial Sequence: Synthetic oligonucleotide
  Antisense strand to SEQ ID NO: 1462138
uaauuuccugauaagcagg

SEQ ID NO: 1462140 - RNA, 19 nt, Artificial Sequence
  Description of Artificial Sequence: Synthetic oligonucleotide
  Sense strand starting at position 763 of SEQ ID NO: 1244062
gaacguauacacgacacaa

SEQ ID NO: 1462141 - RNA, 19 nt, Artificial Sequence
  Description of Artificial Sequence: Synthetic oligonucleotide
  Antisense strand to SEQ ID NO: 1462140
uugugucguguauacguuc

SEQ ID NO: 1462142 - RNA, 19 nt, Artificial Sequence
  Description of Artificial Sequence: Synthetic oligonucleotide
  Sense strand starting at position 860 of SEQ ID NO: 1244062
ucacaucgucuugaugcua

SEQ ID NO: 1462143 - RNA, 19 nt, Artificial Sequence
  Description of Artificial Sequence: Synthetic oligonucleotide
  Antisense strand to SEQ ID NO: 1462142
uagcaucaagacgauguga

SEQ ID NO: 1462144 - RNA, 19 nt, Artificial Sequence
  Description of Artificial Sequence: Synthetic oligonucleotide
  Sense strand starting at position 895 of SEQ ID NO: 1244062
gcauaaugaaaucgguauc

SEQ ID NO: 1462145 - RNA, 19 nt, Artificial Sequence
  Description of Artificial Sequence: Synthetic oligonucleotide
  Antisense strand to SEQ ID NO: 1462144
gauaccgauuucauuaugc

SEQ ID NO: 1462146 - RNA, 19 nt, Artificial Sequence
  Description of Artificial Sequence: Synthetic oligonucleotide
  Sense strand starting at position 898 of SEQ ID NO: 1244062
uaaugaaaucgguaucacu

SEQ ID NO: 1462147 - RNA, 19 nt, Artificial Sequence
  Description of Artificial Sequence: Synthetic oligonucleotide
  Antisense strand to SEQ ID NO: 1462146
agugauaccgauuucauua

SEQ ID NO: 1462148 - RNA, 19 nt, Artificial Sequence
  Description of Artificial Sequence: Synthetic oligonucleotide
  Sense strand starting at position 917 of SEQ ID NO: 1244062
gccaguucucaaugaacaa

SEQ ID NO: 1462149 - RNA, 19 nt, Artificial Sequence
  Description of Artificial Sequence: Synthetic oligonucleotide
  Antisense strand to SEQ ID NO: 1462148
uuguucauugagaacuggc

SEQ ID NO: 1462150 - RNA, 19 nt, Artificial Sequence
  Description of Artificial Sequence: Synthetic oligonucleotide
  Sense strand starting at position 1154 of SEQ ID NO: 1244062
aguucucaaguuugacaaa

SEQ ID NO: 1462151 - RNA, 19 nt, Artificial Sequence
  Description of Artificial Sequence: Synthetic oligonucleotide
  Antisense strand to SEQ ID NO: 1462150
uuugucaaacuugagaacu

SEQ ID NO: 1462152 - RNA, 19 nt, Artificial Sequence
  Description of Artificial Sequence: Synthetic oligonucleotide
  Sense strand starting at position 1192 of SEQ ID NO: 1244062
aaguaaagacaacgaguua

SEQ ID NO: 1462153 - RNA, 19 nt, Artificial Sequence
  Description of Artificial Sequence: Synthetic oligonucleotide
  Antisense strand to SEQ ID NO: 1462152
uaacucguugucuuuacuu

SEQ ID NO: 1462154 - RNA, 19 nt, Artificial Sequence
  Description of Artificial Sequence: Synthetic oligonucleotide
  Sense strand starting at position 1204 of SEQ ID NO: 1244062
cgaguuaaucaggaggcga

SEQ ID NO: 1462155 - RNA, 19 nt, Artificial Sequence
  Description of Artificial Sequence: Synthetic oligonucleotide
  Antisense strand to SEQ ID NO: 1462154
ucgccuccugauuaacucg

SEQ ID NO: 1462156 - RNA, 19 nt, Artificial Sequence
  Description of Artificial Sequence: Synthetic oligonucleotide
  Sense strand starting at position 1545 of SEQ ID NO: 1244062
agccguuucccucccgauu

SEQ ID NO: 1462157 - RNA, 19 nt, Artificial Sequence
  Description of Artificial Sequence: Synthetic oligonucleotide
  Antisense strand to SEQ ID NO: 1462156
aaucgggagggaaacggcu

SEQ ID NO: 1462158 - RNA, 19 nt, Artificial Sequence
  Description of Artificial Sequence: Synthetic oligonucleotide
  Sense strand starting at position 2177 of SEQ ID NO: 1244062
caacuuuccgcggucgagu

SEQ ID NO: 1462159 - RNA, 19 nt, Artificial Sequence
  Description of Artificial Sequence: Synthetic oligonucleotide
  Antisense strand to SEQ ID NO: 1462158
acucgaccgcggaaaguug

SEQ ID NO: 1462160 - RNA, 19 nt, Artificial Sequence
  Description of Artificial Sequence: Synthetic oligonucleotide
  Sense strand starting at position 2454 of SEQ ID NO: 1244062
gaggccuugguccauugua

SEQ ID NO: 1462161 - RNA, 19 nt, Artificial Sequence
  Description of Artificial Sequence: Synthetic oligonucleotide
  Antisense strand to SEQ ID NO: 1462160
uacaauggaccaaggccuc

SEQ ID NO: 1462162 - RNA, 19 nt, Artificial Sequence
  Description of Artificial Sequence: Synthetic oligonucleotide
  Sense strand starting at position 2506 of SEQ ID NO: 1244062
cucuacaauuccucgagga

SEQ ID NO: 1462163 - RNA, 19 nt, Artificial Sequence
  Description of Artificial Sequence: Synthetic oligonucleotide
  Antisense strand to SEQ ID NO: 1462162
uccucgaggaauuguagag

SEQ ID NO: 1462164 - RNA, 19 nt, Artificial Sequence
  Description of Artificial Sequence: Synthetic oligonucleotide
  Sense strand starting at position 2507 of SEQ ID NO: 1244062
ucuacaauuccucgaggau

SEQ ID NO: 1462165 - RNA, 19 nt, Artificial Sequence
  Description of Artificial Sequence: Synthetic oligonucleotide
  Antisense strand to SEQ ID NO: 1462164
auccucgaggaauuguaga

SEQ ID NO: 1462166 - RNA, 19 nt, Artificial Sequence
  Description of Artificial Sequence: Synthetic oligonucleotide
  Sense strand starting at position 2508 of SEQ ID NO: 1244062
cuacaauuccucgaggauc

SEQ ID NO: 1462167 - RNA, 19 nt, Artificial Sequence
  Description of Artificial Sequence: Synthetic oligonucleotide
  Antisense strand to SEQ ID NO: 1462166
gauccucgaggaauuguag

SEQ ID NO: 1462168 - RNA, 19 nt, Artificial Sequence
  Description of Artificial Sequence: Synthetic oligonucleotide
  Sense strand starting at position 2565 of SEQ ID NO: 1244062
uuagcagugcucuagauac

SEQ ID NO: 1462169 - RNA, 19 nt, Artificial Sequence
  Description of Artificial Sequence: Synthetic oligonucleotide
  Antisense strand to SEQ ID NO: 1462168
guaucuagagcacugcuaa

SEQ ID NO: 1462170 - RNA, 19 nt, Artificial Sequence
  Description of Artificial Sequence: Synthetic oligonucleotide
  Sense strand starting at position 2567 of SEQ ID NO: 1244062
agcagugcucuagauacuu

SEQ ID NO: 1462171 - RNA, 19 nt, Artificial Sequence
  Description of Artificial Sequence: Synthetic oligonucleotide
  Antisense strand to SEQ ID NO: 1462170
aaguaucuagagcacugcu

SEQ ID NO: 1462172 - RNA, 19 nt, Artificial Sequence
  Description of Artificial Sequence: Synthetic oligonucleotide
  Sense strand starting at position 2593 of SEQ ID NO: 1244062
ccugaacuucucggauuag

SEQ ID NO: 1462173 - RNA, 19 nt, Artificial Sequence
  Description of Artificial Sequence: Synthetic oligonucleotide
  Antisense strand to SEQ ID NO: 1462172
cuaauccgagaaguucagg

SEQ ID NO: 1462174 - RNA, 19 nt, Artificial Sequence
  Description of Artificial Sequence: Synthetic oligonucleotide
  Sense strand starting at position 2740 of SEQ ID NO: 1244062
cuccaaaugcuuuaaguag

SEQ ID NO: 1462175 - RNA, 19 nt, Artificial Sequence
  Description of Artificial Sequence: Synthetic oligonucleotide
  Antisense strand to SEQ ID NO: 1462174
cuacuuaaagcauuuggag

SEQ ID NO: 1462176 - RNA, 19 nt, Artificial Sequence
  Description of Artificial Sequence: Synthetic oligonucleotide
  Sense strand starting at position 2757 of SEQ ID NO: 1244062
agaguaagacuuuggguaa

SEQ ID NO: 1462177 - RNA, 19 nt, Artificial Sequence
  Description of Artificial Sequence: Synthetic oligonucleotide
  Antisense strand to SEQ ID NO: 1462176
uuacccaaagucuuacucu

SEQ ID NO: 1462178 - RNA, 19 nt, Artificial Sequence
  Description of Artificial Sequence: Synthetic oligonucleotide
  Sense strand starting at position 2760 of SEQ ID NO: 1244062
guaagacuuuggguaauaa

SEQ ID NO: 1462179 - RNA, 19 nt, Artificial Sequence
  Description of Artificial Sequence: Synthetic oligonucleotide
  Antisense strand to SEQ ID NO: 1462178
uuauuacccaaagucuuac

SEQ ID NO: 1462180 - RNA, 19 nt, Artificial Sequence
  Description of Artificial Sequence: Synthetic oligonucleotide
  Sense strand starting at position 2764 of SEQ ID NO: 1244062
gacuuuggguaauaaagga

SEQ ID NO: 1462181 - RNA, 19 nt, Artificial Sequence
  Description of Artificial Sequence: Synthetic oligonucleotide
  Antisense strand to SEQ ID NO: 1462180
uccuuuauuacccaaaguc

SEQ ID NO: 1462182 - RNA, 19 nt, Artificial Sequence
  Description of Artificial Sequence: Synthetic oligonucleotide
  Sense strand starting at position 2800 of SEQ ID NO: 1244062
gggcgaccucuggaaugau

SEQ ID NO: 1462183 - RNA, 19 nt, Artificial Sequence
  Description of Artificial Sequence: Synthetic oligonucleotide
  Antisense strand to SEQ ID NO: 1462182
aucauuccagaggucgccc

SEQ ID NO: 1462184 - RNA, 19 nt, Artificial Sequence
  Description of Artificial Sequence: Synthetic oligonucleotide
  Sense strand starting at position 2817 of SEQ ID NO: 1244062
aucucaucugagcaucaga

SEQ ID NO: 1462185 - RNA, 19 nt, Artificial Sequence
  Description of Artificial Sequence: Synthetic oligonucleotide
  Antisense strand to SEQ ID NO: 1462184
ucugaugcucagaugagau

SEQ ID NO: 1462186 - RNA, 19 nt, Artificial Sequence
  Description of Artificial Sequence: Synthetic oligonucleotide
  Sense strand starting at position 2882 of SEQ ID NO: 1244062
gaaauuaagcgcuaacaag

SEQ ID NO: 1462187 - RNA, 19 nt, Artificial Sequence
  Description of Artificial Sequence: Synthetic oligonucleotide
  Antisense strand to SEQ ID NO: 1462186
cuuguuagcgcuuaauuuc

SEQ ID NO: 1462188 - RNA, 19 nt, Artificial Sequence
  Description of Artificial Sequence: Synthetic oligonucleotide
  Sense strand starting at position 2890 of SEQ ID NO: 1244062
gcgcuaacaagugagguua

SEQ ID NO: 1462189 - RNA, 19 nt, Artificial Sequence
  Description of Artificial Sequence: Synthetic oligonucleotide
  Antisense strand to SEQ ID NO: 1462188
uaaccucacuuguuagcgc

SEQ ID NO: 1462190 - RNA, 19 nt, Artificial Sequence
  Description of Artificial Sequence: Synthetic oligonucleotide
  Sense strand starting at position 2904 of SEQ ID NO: 1244062
gguuacuugcugcaaguca

SEQ ID NO: 1462191 - RNA, 19 nt, Artificial Sequence
  Description of Artificial Sequence: Synthetic oligonucleotide
  Antisense strand to SEQ ID NO: 1462190
ugacuugcagcaaguaacc

SEQ ID NO: 1462192 - RNA, 19 nt, Artificial Sequence
  Description of Artificial Sequence: Synthetic oligonucleotide
  Sense strand starting at position 3216 of SEQ ID NO: 1244062
aguacuucucccugugauu

SEQ ID NO: 1462193 - RNA, 19 nt, Artificial Sequence
  Description of Artificial Sequence: Synthetic oligonucleotide
  Antisense strand to SEQ ID NO: 1462192
aaucacagggagaaguacu

SEQ ID NO: 1462194 - RNA, 19 nt, Artificial Sequence
  Description of Artificial Sequence: Synthetic oligonucleotide
  Sense strand starting at position 3227 of SEQ ID NO: 1244062
cugugauugcuguagucug

SEQ ID NO: 1462195 - RNA, 19 nt, Artificial Sequence
  Description of Artificial Sequence: Synthetic oligonucleotide
  Antisense strand to SEQ ID NO: 1462194
cagacuacagcaaucacag

SEQ ID NO: 1462196 - RNA, 19 nt, Artificial Sequence
  Description of Artificial Sequence: Synthetic oligonucleotide
  Sense strand starting at position 3679 of SEQ ID NO: 1244062
acaucauuguaccuguuga

SEQ ID NO: 1462197 - RNA, 19 nt, Artificial Sequence
  Description of Artificial Sequence: Synthetic oligonucleotide
  Antisense strand to SEQ ID NO: 1462196
ucaacagguacaaugaugu

SEQ ID NO: 1462198 - RNA, 19 nt, Artificial Sequence
  Description of Artificial Sequence: Synthetic oligonucleotide
  Sense strand starting at position 3684 of SEQ ID NO: 1244062
auuguaccuguugaauaaa

SEQ ID NO: 1462199 - RNA, 19 nt, Artificial Sequence
  Description of Artificial Sequence: Synthetic oligonucleotide
  Antisense strand to SEQ ID NO: 1462198
uuuauucaacagguacaau

SEQ ID NO: 1462200 - RNA, 19 nt, Artificial Sequence
  Description of Artificial Sequence: Synthetic oligonucleotide
  Sense strand starting at position 1217 of SEQ ID NO: 1244063
cucugacuucagggugagu

SEQ ID NO: 1462201 - RNA, 19 nt, Artificial Sequence
  Description of Artificial Sequence: Synthetic oligonucleotide
  Antisense strand to SEQ ID NO: 1462200
acucacccugaagucagag

SEQ ID NO: 1462202 - RNA, 19 nt, Artificial Sequence
  Description of Artificial Sequence: Synthetic oligonucleotide
  Sense strand starting at position 1226 of SEQ ID NO: 1244063
cagggugagucgugaggua

SEQ ID NO: 1462203 - RNA, 19 nt, Artificial Sequence
  Description of Artificial Sequence: Synthetic oligonucleotide
  Antisense strand to SEQ ID NO: 1462202
uaccucacgacucacccug

SEQ ID NO: 1462204 - RNA, 19 nt, Artificial Sequence
  Description of Artificial Sequence: Synthetic oligonucleotide
  Sense strand starting at position 1229 of SEQ ID NO: 1244063
ggugagucgugagguagga

SEQ ID NO: 1462205 - RNA, 19 nt, Artificial Sequence
  Description of Artificial Sequence: Synthetic oligonucleotide
  Antisense strand to SEQ ID NO: 1462204
uccuaccucacgacucacc

SEQ ID NO: 1462206 - RNA, 19 nt, Artificial Sequence
  Description of Artificial Sequence: Synthetic oligonucleotide
  Sense strand starting at position 1255 of SEQ ID NO: 1244063
ggguuuagcgaugagacca

SEQ ID NO: 1462207 - RNA, 19 nt, Artificial Sequence
  Description of Artificial Sequence: Synthetic oligonucleotide
  Antisense strand to SEQ ID NO: 1462206
uggucucaucgcuaaaccc

SEQ ID NO: 1462208 - RNA, 19 nt, Artificial Sequence
  Description of Artificial Sequence: Synthetic oligonucleotide
  Sense strand starting at position 1316 of SEQ ID NO: 1244063
gacgcucagcuauggguua

SEQ ID NO: 1462209 - RNA, 19 nt, Artificial Sequence
  Description of Artificial Sequence: Synthetic oligonucleotide
  Antisense strand to SEQ ID NO: 1462208
uaacccauagcugagcguc

SEQ ID NO: 1462210 - RNA, 19 nt, Artificial Sequence
  Description of Artificial Sequence: Synthetic oligonucleotide
  Sense strand starting at position 1434 of SEQ ID NO: 1244063
cccagauucuuaggaagga

SEQ ID NO: 1462211 - RNA, 19 nt, Artificial Sequence
  Description of Artificial Sequence: Synthetic oligonucleotide
  Antisense strand to SEQ ID NO: 1462210
uccuuccuaagaaucuggg

SEQ ID NO: 1462212 - RNA, 19 nt, Artificial Sequence
  Description of Artificial Sequence: Synthetic oligonucleotide
  Sense strand starting at position 1515 of SEQ ID NO: 1244063
gcccuuagcugucaaggau

SEQ ID NO: 1462213 - RNA, 19 nt, Artificial Sequence
  Description of Artificial Sequence: Synthetic oligonucleotide
  Antisense strand to SEQ ID NO: 1462212
auccuugacagcuaagggc

SEQ ID NO: 1462214 - RNA, 19 nt, Artificial Sequence
  Description of Artificial Sequence: Synthetic oligonucleotide
  Sense strand starting at position 1527 of SEQ ID NO: 1244063
caaggaugcugugggaaga

SEQ ID NO: 1462215 - RNA, 19 nt, Artificial Sequence
  Description of Artificial Sequence: Synthetic oligonucleotide
  Antisense strand to SEQ ID NO: 1462214
ucuucccacagcauccuug

SEQ ID NO: 1462216 - RNA, 19 nt, Artificial Sequence
  Description of Artificial Sequence: Synthetic oligonucleotide
  Sense strand starting at position 1728 of SEQ ID NO: 1244063
gguccuuugucggaggugu

SEQ ID NO: 1462217 - RNA, 19 nt, Artificial Sequence
  Description of Artificial Sequence: Synthetic oligonucleotide
  Antisense strand to SEQ ID NO: 1462216
acaccuccgacaaaggacc

SEQ ID NO: 1462218 - RNA, 19 nt, Artificial Sequence
  Description of Artificial Sequence: Synthetic oligonucleotide
  Sense strand starting at position 2149 of SEQ ID NO: 1244063
ggcccucacucuuuagcua

SEQ ID NO: 1462219 - RNA, 19 nt, Artificial Sequence
  Description of Artificial Sequence: Synthetic oligonucleotide
  Antisense strand to SEQ ID NO: 1462218
uagcuaaagagugagggcc

SEQ ID NO: 1462220 - RNA, 19 nt, Artificial Sequence
  Description of Artificial Sequence: Synthetic oligonucleotide
  Sense strand starting at position 2210 of SEQ ID NO: 1244063
auccuuuaucgaggaagcu

SEQ ID NO: 1462221 - RNA, 19 nt, Artificial Sequence
  Description of Artificial Sequence: Synthetic oligonucleotide
  Antisense strand to SEQ ID NO: 1462220
agcuuccucgauaaaggau

SEQ ID NO: 1462222 - RNA, 19 nt, Artificial Sequence
  Description of Artificial Sequence: Synthetic oligonucleotide
  Sense strand starting at position 2293 of SEQ ID NO: 1244063
aaccaugcccugugaagau

SEQ ID NO: 1462223 - RNA, 19 nt, Artificial Sequence
  Description of Artificial Sequence: Synthetic oligonucleotide
  Antisense strand to SEQ ID NO: 1462222
aucuucacagggcaugguu

SEQ ID NO: 1462224 - RNA, 19 nt, Artificial Sequence
  Description of Artificial Sequence: Synthetic oligonucleotide
  Sense strand starting at position 2330 of SEQ ID NO: 1244063
gagguuuggugcuggaguu

SEQ ID NO: 1462225 - RNA, 19 nt, Artificial Sequence
  Description of Artificial Sequence: Synthetic oligonucleotide
  Antisense strand to SEQ ID NO: 1462224
aacuccagcaccaaaccuc

SEQ ID NO: 1462226 - RNA, 19 nt, Artificial Sequence
  Description of Artificial Sequence: Synthetic oligonucleotide
  Sense strand starting at position 2331 of SEQ ID NO: 1244063
agguuuggugcuggaguuu

SEQ ID NO: 1462227 - RNA, 19 nt, Artificial Sequence
  Description of Artificial Sequence: Synthetic oligonucleotide
  Antisense strand to SEQ ID NO: 1462226
aaacuccagcaccaaaccu

SEQ ID NO: 1462228 - RNA, 19 nt, Artificial Sequence
  Description of Artificial Sequence: Synthetic oligonucleotide
  Sense strand starting at position 2394 of SEQ ID NO: 1244063
ccgcucaccuuggacaaau

SEQ ID NO: 1462229 - RNA, 19 nt, Artificial Sequence
  Description of Artificial Sequence: Synthetic oligonucleotide
  Antisense strand to SEQ ID NO: 1462228
auuuguccaaggugagcgg

SEQ ID NO: 1462230 - RNA, 19 nt, Artificial Sequence
  Description of Artificial Sequence: Synthetic oligonucleotide
  Sense strand starting at position 2405 of SEQ ID NO: 1244063
ggacaaaucauucggcggu

SEQ ID NO: 1462231 - RNA, 19 nt, Artificial Sequence
  Description of Artificial Sequence: Synthetic oligonucleotide
  Antisense strand to SEQ ID NO: 1462230
accgccgaaugauuugucc

SEQ ID NO: 1462232 - RNA, 19 nt, Artificial Sequence
  Description of Artificial Sequence: Synthetic oligonucleotide
  Sense strand starting at position 2406 of SEQ ID NO: 1244063
gacaaaucauucggcggua

SEQ ID NO: 1462233 - RNA, 19 nt, Artificial Sequence
  Description of Artificial Sequence: Synthetic oligonucleotide
  Antisense strand to SEQ ID NO: 1462232
uaccgccgaaugauuuguc

SEQ ID NO: 1462234 - RNA, 19 nt, Artificial Sequence
  Description of Artificial Sequence: Synthetic oligonucleotide
  Sense strand starting at position 2592 of SEQ ID NO: 1244063
gggauucucuacuucuuaa

SEQ ID NO: 1462235 - RNA, 19 nt, Artificial Sequence
  Description of Artificial Sequence: Synthetic oligonucleotide
  Antisense strand to SEQ ID NO: 1462234
uuaagaaguagagaauccc

SEQ ID NO: 1462236 - RNA, 19 nt, Artificial Sequence
  Description of Artificial Sequence: Synthetic oligonucleotide
  Sense strand starting at position 2712 of SEQ ID NO: 1244063
ccaagugccuggcuuugau

SEQ ID NO: 1462237 - RNA, 19 nt, Artificial Sequence
  Description of Artificial Sequence: Synthetic oligonucleotide
  Antisense strand to SEQ ID NO: 1462236
aucaaagccaggcacuugg

SEQ ID NO: 1462238 - RNA, 19 nt, Artificial Sequence
  Description of Artificial Sequence: Synthetic oligonucleotide
  Sense strand starting at position 2716 of SEQ ID NO: 1244063
gugccuggcuuugauaguu

SEQ ID NO: 1462239 - RNA, 19 nt, Artificial Sequence
  Description of Artificial Sequence: Synthetic oligonucleotide
  Antisense strand to SEQ ID NO: 1462238
aacuaucaaagccaggcac

SEQ ID NO: 1462240 - RNA, 19 nt, Artificial Sequence
  Description of Artificial Sequence: Synthetic oligonucleotide
  Sense strand starting at position 2721 of SEQ ID NO: 1244063
uggcuuugauaguuaaaua

SEQ ID NO: 1462241 - RNA, 19 nt, Artificial Sequence
  Description of Artificial Sequence: Synthetic oligonucleotide
  Antisense strand to SEQ ID NO: 1462240
uauuuaacuaucaaagcca

SEQ ID NO: 1462242 - RNA, 19 nt, Artificial Sequence
  Description of Artificial Sequence: Synthetic oligonucleotide
  Sense strand starting at position 2764 of SEQ ID NO: 1244063
uucuguuauuuccagcuuu

SEQ ID NO: 1462243 - RNA, 19 nt, Artificial Sequence
  Description of Artificial Sequence: Synthetic oligonucleotide
  Antisense strand to SEQ ID NO: 1462242
aaagcuggaaauaacagaa

SEQ ID NO: 1462244 - RNA, 19 nt, Artificial Sequence
  Description of Artificial Sequence: Synthetic oligonucleotide
  Sense strand starting at position 2871 of SEQ ID NO: 1244063
uggcaugaucuuggcugaa

SEQ ID NO: 1462245 - RNA, 19 nt, Artificial Sequence
  Description of Artificial Sequence: Synthetic oligonucleotide
  Antisense strand to SEQ ID NO: 1462244
uucagccaagaucaugcca

SEQ ID NO: 1462246 - RNA, 19 nt, Artificial Sequence
  Description of Artificial Sequence: Synthetic oligonucleotide
  Sense strand starting at position 2873 of SEQ ID NO: 1244063
gcaugaucuuggcugaaug

SEQ ID NO: 1462247 - RNA, 19 nt, Artificial Sequence
  Description of Artificial Sequence: Synthetic oligonucleotide
  Antisense strand to SEQ ID NO: 1462246
cauucagccaagaucaugc

SEQ ID NO: 1462248 - RNA, 19 nt, Artificial Sequence
  Description of Artificial Sequence: Synthetic oligonucleotide
  Sense strand starting at position 3475 of SEQ ID NO: 1244063
cccagaaggcucugaauug

SEQ ID NO: 1462249 - RNA, 19 nt, Artificial Sequence
  Description of Artificial Sequence: Synthetic oligonucleotide
  Antisense strand to SEQ ID NO: 1462248
caauucagagccuucuggg

SEQ ID NO: 1462250 - RNA, 19 nt, Artificial Sequence
  Description of Artificial Sequence: Synthetic oligonucleotide
  Sense strand starting at position 3476 of SEQ ID NO: 1244063
ccagaaggcucugaauuga

SEQ ID NO: 1462251 - RNA, 19 nt, Artificial Sequence
  Description of Artificial Sequence: Synthetic oligonucleotide
  Antisense strand to SEQ ID NO: 1462250
ucaauucagagccuucugg

SEQ ID NO: 1462252 - RNA, 19 nt, Artificial Sequence
  Description of Artificial Sequence: Synthetic oligonucleotide
  Sense strand starting at position 3563 of SEQ ID NO: 1244063
cggugaucugaguggucag

SEQ ID NO: 1462253 - RNA, 19 nt, Artificial Sequence
  Description of Artificial Sequence: Synthetic oligonucleotide
  Antisense strand to SEQ ID NO: 1462252
cugaccacucagaucaccg

SEQ ID NO: 1462254 - RNA, 19 nt, Artificial Sequence
  Description of Artificial Sequence: Synthetic oligonucleotide
  Sense strand starting at position 3566 of SEQ ID NO: 1244063
ugaucugaguggucaggga

SEQ ID NO: 1462255 - RNA, 19 nt, Artificial Sequence
  Description of Artificial Sequence: Synthetic oligonucleotide
  Antisense strand to SEQ ID NO: 1462254
ucccugaccacucagauca

SEQ ID NO: 1462256 - RNA, 19 nt, Artificial Sequence
  Description of Artificial Sequence: Synthetic oligonucleotide
  Sense strand starting at position 3597 of SEQ ID NO: 1244063
ggcugagauguuugguugu

SEQ ID NO: 1462257 - RNA, 19 nt, Artificial Sequence
  Description of Artificial Sequence: Synthetic oligonucleotide
  Antisense strand to SEQ ID NO: 1462256
acaaccaaacaucucagcc

SEQ ID NO: 1462258 - RNA, 19 nt, Artificial Sequence
  Description of Artificial Sequence: Synthetic oligonucleotide
  Sense strand starting at position 3599 of SEQ ID NO: 1244063
cugagauguuugguugucu

SEQ ID NO: 1462259 - RNA, 19 nt, Artificial Sequence
  Description of Artificial Sequence: Synthetic oligonucleotide
  Antisense strand to SEQ ID NO: 1462258
agacaaccaaacaucucag

SEQ ID NO: 1462260 - RNA, 19 nt, Artificial Sequence
  Description of Artificial Sequence: Synthetic oligonucleotide
  Sense strand starting at position 3703 of SEQ ID NO: 1244063
ccguuagcuccauaugcca

SEQ ID NO: 1462261 - RNA, 19 nt, Artificial Sequence
  Description of Artificial Sequence: Synthetic oligonucleotide
  Antisense strand to SEQ ID NO: 1462260
uggcauauggagcuaacgg

SEQ ID NO: 1462262 - RNA, 19 nt, Artificial Sequence
  Description of Artificial Sequence: Synthetic oligonucleotide
  Sense strand starting at position 3728 of SEQ ID NO: 1244063
ucauucgauucucugucaa

SEQ ID NO: 1462263 - RNA, 19 nt, Artificial Sequence
  Description of Artificial Sequence: Synthetic oligonucleotide
  Antisense strand to SEQ ID NO: 1462262
uugacagagaaucgaauga

SEQ ID NO: 1462264 - RNA, 19 nt, Artificial Sequence
  Description of Artificial Sequence: Synthetic oligonucleotide
  Sense strand starting at position 3730 of SEQ ID NO: 1244063
auucgauucucugucaaug

SEQ ID NO: 1462265 - RNA, 19 nt, Artificial Sequence
  Description of Artificial Sequence: Synthetic oligonucleotide
  Antisense strand to SEQ ID NO: 1462264
cauugacagagaaucgaau

SEQ ID NO: 1462266 - RNA, 19 nt, Artificial Sequence
  Description of Artificial Sequence: Synthetic oligonucleotide
  Sense strand starting at position 3732 of SEQ ID NO: 1244063
ucgauucucugucaauggu

SEQ ID NO: 1462267 - RNA, 19 nt, Artificial Sequence
  Description of Artificial Sequence: Synthetic oligonucleotide
  Antisense strand to SEQ ID NO: 1462266
accauugacagagaaucga

SEQ ID NO: 1462268 - RNA, 19 nt, Artificial Sequence
  Description of Artificial Sequence: Synthetic oligonucleotide
  Sense strand starting at position 170 of SEQ ID NO: 1244064
cucaucuaccuguggauau

SEQ ID NO: 1462269 - RNA, 19 nt, Artificial Sequence
  Description of Artificial Sequence: Synthetic oligonucleotide
  Antisense strand to SEQ ID NO: 1462268
auauccacagguagaugag

SEQ ID NO: 1462270 - RNA, 19 nt, Artificial Sequence
  Description of Artificial Sequence: Synthetic oligonucleotide
  Sense strand starting at position 182 of SEQ ID NO: 1244064
uggauauccuaucuuuaga

SEQ ID NO: 1462271 - RNA, 19 nt, Artificial Sequence
  Description of Artificial Sequence: Synthetic oligonucleotide
  Antisense strand to SEQ ID NO: 1462270
ucuaaagauaggauaucca

SEQ ID NO: 1462272 - RNA, 19 nt, Artificial Sequence
  Description of Artificial Sequence: Synthetic oligonucleotide
  Sense strand starting at position 570 of SEQ ID NO: 1244064
uaauaagguguugaaucuu

SEQ ID NO: 1462273 - RNA, 19 nt, Artificial Sequence
  Description of Artificial Sequence: Synthetic oligonucleotide
  Antisense strand to SEQ ID NO: 1462272
aagauucaacaccuuauua

SEQ ID NO: 1462274 - RNA, 19 nt, Artificial Sequence
  Description of Artificial Sequence: Synthetic oligonucleotide
  Sense strand starting at position 890 of SEQ ID NO: 1244064
guguuuaaucuuugcaaca

SEQ ID NO: 1462275 - RNA, 19 nt, Artificial Sequence
  Description of Artificial Sequence: Synthetic oligonucleotide
  Antisense strand to SEQ ID NO: 1462274
uguugcaaagauuaaacac

SEQ ID NO: 1462276 - RNA, 19 nt, Artificial Sequence
  Description of Artificial Sequence: Synthetic oligonucleotide
  Sense strand starting at position 913 of SEQ ID NO: 1244064
uuugaucgacgaggaaaua

SEQ ID NO: 1462277 - RNA, 19 nt, Artificial Sequence
  Description of Artificial Sequence: Synthetic oligonucleotide
  Antisense strand to SEQ ID NO: 1462276
uauuuccucgucgaucaaa

SEQ ID NO: 1462278 - RNA, 19 nt, Artificial Sequence
  Description of Artificial Sequence: Synthetic oligonucleotide
  Sense strand starting at position 937 of SEQ ID NO: 1244064
aagggacagcucugugguu

SEQ ID NO: 1462279 - RNA, 19 nt, Artificial Sequence
  Description of Artificial Sequence: Synthetic oligonucleotide
  Antisense strand to SEQ ID NO: 1462278
aaccacagagcugucccuu

SEQ ID NO: 1462280 - RNA, 19 nt, Artificial Sequence
  Description of Artificial Sequence: Synthetic oligonucleotide
  Sense strand starting at position 953 of SEQ ID NO: 1244064
guuucugcuaucgaaaguu

SEQ ID NO: 1462281 - RNA, 19 nt, Artificial Sequence
  Description of Artificial Sequence: Synthetic oligonucleotide
  Antisense strand to SEQ ID NO: 1462280
aacuuucgauagcagaaac

SEQ ID NO: 1462282 - RNA, 19 nt, Artificial Sequence
  Description of Artificial Sequence: Synthetic oligonucleotide
  Sense strand starting at position 1053 of SEQ ID NO: 1244064
ggccaugagcucuaaugga

SEQ ID NO: 1462283 - RNA, 19 nt, Artificial Sequence
  Description of Artificial Sequence: Synthetic oligonucleotide
  Antisense strand to SEQ ID NO: 1462282
uccauuagagcucauggcc

SEQ ID NO: 1462284 - RNA, 19 nt, Artificial Sequence
  Description of Artificial Sequence: Synthetic oligonucleotide
  Sense strand starting at position 1057 of SEQ ID NO: 1244064
augagcucuaauggaggau

SEQ ID NO: 1462285 - RNA, 19 nt, Artificial Sequence
  Description of Artificial Sequence: Synthetic oligonucleotide
  Antisense strand to SEQ ID NO: 1462284
auccuccauuagagcucau

SEQ ID NO: 1462286 - RNA, 19 nt, Artificial Sequence
  Description of Artificial Sequence: Synthetic oligonucleotide
  Sense strand starting at position 1060 of SEQ ID NO: 1244064
agcucuaauggaggauaua

SEQ ID NO: 1462287 - RNA, 19 nt, Artificial Sequence
  Description of Artificial Sequence: Synthetic oligonucleotide
  Antisense strand to SEQ ID NO: 1462286
uauauccuccauuagagcu

SEQ ID NO: 1462288 - RNA, 19 nt, Artificial Sequence
  Description of Artificial Sequence: Synthetic oligonucleotide
  Sense strand starting at position 1216 of SEQ ID NO: 1244064
ucaagucuuccuuaguggu

SEQ ID NO: 1462289 - RNA, 19 nt, Artificial Sequence
  Description of Artificial Sequence: Synthetic oligonucleotide
  Antisense strand to SEQ ID NO: 1462288
accacuaaggaagacuuga

SEQ ID NO: 1462290 - RNA, 19 nt, Artificial Sequence
  Description of Artificial Sequence: Synthetic oligonucleotide
  Sense strand starting at position 1357 of SEQ ID NO: 1244064
agcagauggguugagaguu

SEQ ID NO: 1462291 - RNA, 19 nt, Artificial Sequence
  Description of Artificial Sequence: Synthetic oligonucleotide
  Antisense strand to SEQ ID NO: 1462290
aacucucaacccaucugcu

SEQ ID NO: 1462292 - RNA, 19 nt, Artificial Sequence
  Description of Artificial Sequence: Synthetic oligonucleotide
  Sense strand starting at position 1572 of SEQ ID NO: 1244064
ucaauaaacguuuacgagu

SEQ ID NO: 1462293 - RNA, 19 nt, Artificial Sequence
  Description of Artificial Sequence: Synthetic oligonucleotide
  Antisense strand to SEQ ID NO: 1462292
acucguaaacguuuauuga

SEQ ID NO: 1462294 - RNA, 19 nt, Artificial Sequence
  Description of Artificial Sequence: Synthetic oligonucleotide
  Sense strand starting at position 1581 of SEQ ID NO: 1244064
guuuacgaguggcuuaaau

SEQ ID NO: 1462295 - RNA, 19 nt, Artificial Sequence
  Description of Artificial Sequence: Synthetic oligonucleotide
  Antisense strand to SEQ ID NO: 1462294
auuuaagccacucguaaac

SEQ ID NO: 1462296 - RNA, 19 nt, Artificial Sequence
  Description of Artificial Sequence: Synthetic oligonucleotide
  Sense strand starting at position 1583 of SEQ ID NO: 1244064
uuacgaguggcuuaaauga

SEQ ID NO: 1462297 - RNA, 19 nt, Artificial Sequence
  Description of Artificial Sequence: Synthetic oligonucleotide
  Antisense strand to SEQ ID NO: 1462296
ucauuuaagccacucguaa

SEQ ID NO: 1462298 - RNA, 19 nt, Artificial Sequence
  Description of Artificial Sequence: Synthetic oligonucleotide
  Sense strand starting at position 1843 of SEQ ID NO: 1244064
ccaggacgucccgauagaa

SEQ ID NO: 1462299 - RNA, 19 nt, Artificial Sequence
  Description of Artificial Sequence: Synthetic oligonucleotide
  Antisense strand to SEQ ID NO: 1462298
uucuaucgggacguccugg

SEQ ID NO: 1462300 - RNA, 19 nt, Artificial Sequence
  Description of Artificial Sequence: Synthetic oligonucleotide
  Sense strand starting at position 2492 of SEQ ID NO: 1244064
gaauaagcgucuuuggaau

SEQ ID NO: 1462301 - RNA, 19 nt, Artificial Sequence
  Description of Artificial Sequence: Synthetic oligonucleotide
  Antisense strand to SEQ ID NO: 1462300
auuccaaagacgcuuauuc

SEQ ID NO: 1462302 - RNA, 19 nt, Artificial Sequence
  Description of Artificial Sequence: Synthetic oligonucleotide
  Sense strand starting at position 2698 of SEQ ID NO: 1244064
caguaacaaggauguugau

SEQ ID NO: 1462303 - RNA, 19 nt, Artificial Sequence
  Description of Artificial Sequence: Synthetic oligonucleotide
  Antisense strand to SEQ ID NO: 1462302
aucaacauccuuguuacug

SEQ ID NO: 1462304 - RNA, 19 nt, Artificial Sequence
  Description of Artificial Sequence: Synthetic oligonucleotide
  Sense strand starting at position 2710 of SEQ ID NO: 1244064
uguugauaguuaccuguuu

SEQ ID NO: 1462305 - RNA, 19 nt, Artificial Sequence
  Description of Artificial Sequence: Synthetic oligonucleotide
  Antisense strand to SEQ ID NO: 1462304
aaacagguaacuaucaaca

SEQ ID NO: 1462306 - RNA, 19 nt, Artificial Sequence
  Description of Artificial Sequence: Synthetic oligonucleotide
  Sense strand starting at position 2989 of SEQ ID NO: 1244064
aauaauggguuagugauua

SEQ ID NO: 1462307 - RNA, 19 nt, Artificial Sequence
  Description of Artificial Sequence: Synthetic oligonucleotide
  Antisense strand to SEQ ID NO: 1462306
uaaucacuaacccauuauu

SEQ ID NO: 1462308 - RNA, 19 nt, Artificial Sequence
  Description of Artificial Sequence: Synthetic oligonucleotide
  Sense strand starting at position 2993 of SEQ ID NO: 1244064
auggguuagugauuaccca

SEQ ID NO: 1462309 - RNA, 19 nt, Artificial Sequence
  Description of Artificial Sequence: Synthetic oligonucleotide
  Antisense strand to SEQ ID NO: 1462308
uggguaaucacuaacccau

SEQ ID NO: 1462310 - RNA, 19 nt, Artificial Sequence
  Description of Artificial Sequence: Synthetic oligonucleotide
  Sense strand starting at position 2997 of SEQ ID NO: 1244064
guuagugauuacccagugu

SEQ ID NO: 1462311 - RNA, 19 nt, Artificial Sequence
  Description of Artificial Sequence: Synthetic oligonucleotide
  Antisense strand to SEQ ID NO: 1462310
acacuggguaaucacuaac

SEQ ID NO: 1462312 - RNA, 19 nt, Artificial Sequence
  Description of Artificial Sequence: Synthetic oligonucleotide
  Sense strand starting at position 3001 of SEQ ID NO: 1244064
gugauuacccaguguaucu

SEQ ID NO: 1462313 - RNA, 19 nt, Artificial Sequence
  Description of Artificial Sequence: Synthetic oligonucleotide
  Antisense strand to SEQ ID NO: 1462312
agauacacuggguaaucac

SEQ ID NO: 1462314 - RNA, 19 nt, Artificial Sequence
  Description of Artificial Sequence: Synthetic oligonucleotide
  Sense strand starting at position 3347 of SEQ ID NO: 1244064
ucucauacuugucuuagga

SEQ ID NO: 1462315 - RNA, 19 nt, Artificial Sequence
  Description of Artificial Sequence: Synthetic oligonucleotide
  Antisense strand to SEQ ID NO: 1462314
uccuaagacaaguaugaga

SEQ ID NO: 1462316 - RNA, 19 nt, Artificial Sequence
  Description of Artificial Sequence: Synthetic oligonucleotide
  Sense strand starting at position 3414 of SEQ ID NO: 1244064
uucucaaaccuguguaucu

SEQ ID NO: 1462317 - RNA, 19 nt, Artificial Sequence
  Description of Artificial Sequence: Synthetic oligonucleotide
  Antisense strand to SEQ ID NO: 1462316
agauacacagguuugagaa

SEQ ID NO: 1462318 - RNA, 19 nt, Artificial Sequence
  Description of Artificial Sequence: Synthetic oligonucleotide
  Sense strand starting at position 3415 of SEQ ID NO: 1244064
ucucaaaccuguguaucuu

SEQ ID NO: 1462319 - RNA, 19 nt, Artificial Sequence
  Description of Artificial Sequence: Synthetic oligonucleotide
  Antisense strand to SEQ ID NO: 1462318
aagauacacagguuugaga

SEQ ID NO: 1462320 - RNA, 19 nt, Artificial Sequence
  Description of Artificial Sequence: Synthetic oligonucleotide
  Sense strand starting at position 3416 of SEQ ID NO: 1244064
cucaaaccuguguaucuua

SEQ ID NO: 1462321 - RNA, 19 nt, Artificial Sequence
  Description of Artificial Sequence: Synthetic oligonucleotide
  Antisense strand to SEQ ID NO: 1462320
uaagauacacagguuugag

SEQ ID NO: 1462322 - RNA, 19 nt, Artificial Sequence
  Description of Artificial Sequence: Synthetic oligonucleotide
  Sense strand starting at position 3477 of SEQ ID NO: 1244064
uuguguuguggcucuuuau

SEQ ID NO: 1462323 - RNA, 19 nt, Artificial Sequence
  Description of Artificial Sequence: Synthetic oligonucleotide
  Antisense strand to SEQ ID NO: 1462322
auaaagagccacaacacaa

SEQ ID NO: 1462324 - RNA, 19 nt, Artificial Sequence
  Description of Artificial Sequence: Synthetic oligonucleotide
  Sense strand starting at position 3489 of SEQ ID NO: 1244064
ucuuuauggucucuaggaa

SEQ ID NO: 1462325 - RNA, 19 nt, Artificial Sequence
  Description of Artificial Sequence: Synthetic oligonucleotide
  Antisense strand to SEQ ID NO: 1462324
uuccuagagaccauaaaga

SEQ ID NO: 1462326 - RNA, 19 nt, Artificial Sequence
  Description of Artificial Sequence: Synthetic oligonucleotide
  Sense strand starting at position 3576 of SEQ ID NO: 1244064
uaagaaagcguuuacugaa

SEQ ID NO: 1462327 - RNA, 19 nt, Artificial Sequence
  Description of Artificial Sequence: Synthetic oligonucleotide
  Antisense strand to SEQ ID NO: 1462326
uucaguaaacgcuuucuua

SEQ ID NO: 1462328 - RNA, 19 nt, Artificial Sequence
  Description of Artificial Sequence: Synthetic oligonucleotide
  Sense strand starting at position 3625 of SEQ ID NO: 1244064
ugccaauguggugauaacu

SEQ ID NO: 1462329 - RNA, 19 nt, Artificial Sequence
  Description of Artificial Sequence: Synthetic oligonucleotide
  Antisense strand to SEQ ID NO: 1462328
aguuaucaccacauuggca

SEQ ID NO: 1462330 - RNA, 19 nt, Artificial Sequence
  Description of Artificial Sequence: Synthetic oligonucleotide
  Sense strand starting at position 3653 of SEQ ID NO: 1244064
cugcuuauuccagaagcag

SEQ ID NO: 1462331 - RNA, 19 nt, Artificial Sequence
  Description of Artificial Sequence: Synthetic oligonucleotide
  Antisense strand to SEQ ID NO: 1462330
cugcuucuggaauaagcag

SEQ ID NO: 1462332 - RNA, 19 nt, Artificial Sequence
  Description of Artificial Sequence: Synthetic oligonucleotide
  Sense strand starting at position 3670 of SEQ ID NO: 1244064
agaucuaagaagcgaggua

SEQ ID NO: 1462333 - RNA, 19 nt, Artificial Sequence
  Description of Artificial Sequence: Synthetic oligonucleotide
  Antisense strand to SEQ ID NO: 1462332
uaccucgcuucuuagaucu

SEQ ID NO: 1462334 - RNA, 19 nt, Artificial Sequence
  Description of Artificial Sequence: Synthetic oligonucleotide
  Sense strand starting at position 3781 of SEQ ID NO: 1244064
auguaacuccgauguugau

SEQ ID NO: 1462335 - RNA, 19 nt, Artificial Sequence
  Description of Artificial Sequence: Synthetic oligonucleotide
  Antisense strand to SEQ ID NO: 1462334
aucaacaucggaguuacau

SEQ ID NO: 1462336 - RNA, 19 nt, Artificial Sequence
  Description of Artificial Sequence: Synthetic oligonucleotide
  Sense strand starting at position 3790 of SEQ ID NO: 1244064
cgauguugauuagcaguua

SEQ ID NO: 1462337 - RNA, 19 nt, Artificial Sequence
  Description of Artificial Sequence: Synthetic oligonucleotide
  Antisense strand to SEQ ID NO: 1462336
uaacugcuaaucaacaucg

SEQ ID NO: 1462338 - RNA, 19 nt, Artificial Sequence
  Description of Artificial Sequence: Synthetic oligonucleotide
  Sense strand starting at position 3805 of SEQ ID NO: 1244064
guuacaaagucuuuggucu

SEQ ID NO: 1462339 - RNA, 19 nt, Artificial Sequence
  Description of Artificial Sequence: Synthetic oligonucleotide
  Antisense strand to SEQ ID NO: 1462338
agaccaaagacuuuguaac

SEQ ID NO: 1462340 - RNA, 19 nt, Artificial Sequence
  Description of Artificial Sequence: Synthetic oligonucleotide
  Sense strand starting at position 3806 of SEQ ID NO: 1244064
uuacaaagucuuuggucua

SEQ ID NO: 1462341 - RNA, 19 nt, Artificial Sequence
  Description of Artificial Sequence: Synthetic oligonucleotide
  Antisense strand to SEQ ID NO: 1462340
uagaccaaagacuuuguaa

SEQ ID NO: 1462342 - RNA, 19 nt, Artificial Sequence
  Description of Artificial Sequence: Synthetic oligonucleotide
  Sense strand starting at position 3818 of SEQ ID NO: 1244064
uggucuaaauaugagaaga

SEQ ID NO: 1462343 - RNA, 19 nt, Artificial Sequence
  Description of Artificial Sequence: Synthetic oligonucleotide
  Antisense strand to SEQ ID NO: 1462342
ucuucucauauuuagacca

SEQ ID NO: 1462344 - RNA, 19 nt, Artificial Sequence
  Description of Artificial Sequence: Synthetic oligonucleotide
  Sense strand starting at position 3820 of SEQ ID NO: 1244064
gucuaaauaugagaagaua

SEQ ID NO: 1462345 - RNA, 19 nt, Artificial Sequence
  Description of Artificial Sequence: Synthetic oligonucleotide
  Antisense strand to SEQ ID NO: 1462344
uaucuucucauauuuagac

SEQ ID NO: 1462346 - RNA, 19 nt, Artificial Sequence
  Description of Artificial Sequence: Synthetic oligonucleotide
  Sense strand starting at position 3934 of SEQ ID NO: 1244064
ucuguaacccagugaguca

SEQ ID NO: 1462347 - RNA, 19 nt, Artificial Sequence
  Description of Artificial Sequence: Synthetic oligonucleotide
  Antisense strand to SEQ ID NO: 1462346
ugacucacuggguuacaga

SEQ ID NO: 1462348 - RNA, 19 nt, Artificial Sequence
  Description of Artificial Sequence: Synthetic oligonucleotide
  Sense strand starting at position 385 of SEQ ID NO: 1244065
ugagccauuccuuaagcua

SEQ ID NO: 1462349 - RNA, 19 nt, Artificial Sequence
  Description of Artificial Sequence: Synthetic oligonucleotide
  Antisense strand to SEQ ID NO: 1462348
uagcuuaaggaauggcuca

SEQ ID NO: 1462350 - RNA, 19 nt, Artificial Sequence
  Description of Artificial Sequence: Synthetic oligonucleotide
  Sense strand starting at position 501 of SEQ ID NO: 1244065
aaggucuaaucuucuugga

SEQ ID NO: 1462351 - RNA, 19 nt, Artificial Sequence
  Description of Artificial Sequence: Synthetic oligonucleotide
  Antisense strand to SEQ ID NO: 1462350
uccaagaagauuagaccuu

SEQ ID NO: 1462352 - RNA, 19 nt, Artificial Sequence
  Description of Artificial Sequence: Synthetic oligonucleotide
  Sense strand starting at position 503 of SEQ ID NO: 1244065
ggucuaaucuucuuggaua

SEQ ID NO: 1462353 - RNA, 19 nt, Artificial Sequence
  Description of Artificial Sequence: Synthetic oligonucleotide
  Antisense strand to SEQ ID NO: 1462352
uauccaagaagauuagacc

SEQ ID NO: 1462354 - RNA, 19 nt, Artificial Sequence
  Description of Artificial Sequence: Synthetic oligonucleotide
  Sense strand starting at position 505 of SEQ ID NO: 1244065
ucuaaucuucuuggauaga

SEQ ID NO: 1462355 - RNA, 19 nt, Artificial Sequence
  Description of Artificial Sequence: Synthetic oligonucleotide
  Antisense strand to SEQ ID NO: 1462354
ucuauccaagaagauuaga

SEQ ID NO: 1462356 - RNA, 19 nt, Artificial Sequence
  Description of Artificial Sequence: Synthetic oligonucleotide
  Sense strand starting at position 653 of SEQ ID NO: 1244065
cgagacucaguuuacucau

SEQ ID NO: 1462357 - RNA, 19 nt, Artificial Sequence
  Description of Artificial Sequence: Synthetic oligonucleotide
  Antisense strand to SEQ ID NO: 1462356
augaguaaacugagucucg

SEQ ID NO: 1462358 - RNA, 19 nt, Artificial Sequence
  Description of Artificial Sequence: Synthetic oligonucleotide
  Sense strand starting at position 703 of SEQ ID NO: 1244065
ucuauaggguugcugagaa

SEQ ID NO: 1462359 - RNA, 19 nt, Artificial Sequence
  Description of Artificial Sequence: Synthetic oligonucleotide
  Antisense strand to SEQ ID NO: 1462358
uucucagcaacccuauaga

SEQ ID NO: 1462360 - RNA, 19 nt, Artificial Sequence
  Description of Artificial Sequence: Synthetic oligonucleotide
  Sense strand starting at position 1284 of SEQ ID NO: 1244065
aguagagugauuuguaguu

SEQ ID NO: 1462361 - RNA, 19 nt, Artificial Sequence
  Description of Artificial Sequence: Synthetic oligonucleotide
  Antisense strand to SEQ ID NO: 1462360
aacuacaaaucacucuacu

SEQ ID NO: 1462362 - RNA, 19 nt, Artificial Sequence
  Description of Artificial Sequence: Synthetic oligonucleotide
  Sense strand starting at position 1289 of SEQ ID NO: 1244065
agugauuuguaguuugcau

SEQ ID NO: 1462363 - RNA, 19 nt, Artificial Sequence
  Description of Artificial Sequence: Synthetic oligonucleotide
  Antisense strand to SEQ ID NO: 1462362
augcaaacuacaaaucacu

SEQ ID NO: 1462364 - RNA, 19 nt, Artificial Sequence
  Description of Artificial Sequence: Synthetic oligonucleotide
  Sense strand starting at position 1433 of SEQ ID NO: 1244065
uacucaaagcugggagaau

SEQ ID NO: 1462365 - RNA, 19 nt, Artificial Sequence
  Description of Artificial Sequence: Synthetic oligonucleotide
  Antisense strand to SEQ ID NO: 1462364
auucucccagcuuugagua

SEQ ID NO: 1462366 - RNA, 19 nt, Artificial Sequence
  Description of Artificial Sequence: Synthetic oligonucleotide
  Sense strand starting at position 1466 of SEQ ID NO: 1244065
gaaggauaugugcagcaau

SEQ ID NO: 1462367 - RNA, 19 nt, Artificial Sequence
  Description of Artificial Sequence: Synthetic oligonucleotide
  Antisense strand to SEQ ID NO: 1462366
auugcugcacauauccuuc

SEQ ID NO: 1462368 - RNA, 19 nt, Artificial Sequence
  Description of Artificial Sequence: Synthetic oligonucleotide
  Sense strand starting at position 1485 of SEQ ID NO: 1244065
uguaaaugcuauuugcaga

SEQ ID NO: 1462369 - RNA, 19 nt, Artificial Sequence
  Description of Artificial Sequence: Synthetic oligonucleotide
  Antisense strand to SEQ ID NO: 1462368
ucugcaaauagcauuuaca

SEQ ID NO: 1462370 - RNA, 19 nt, Artificial Sequence
  Description of Artificial Sequence: Synthetic oligonucleotide
  Sense strand starting at position 1667 of SEQ ID NO: 1244065
cuuugaaugcuaggauuau

SEQ ID NO: 1462371 - RNA, 19 nt, Artificial Sequence
  Description of Artificial Sequence: Synthetic oligonucleotide
  Antisense strand to SEQ ID NO: 1462370
auaauccuagcauucaaag

SEQ ID NO: 1462372 - RNA, 19 nt, Artificial Sequence
  Description of Artificial Sequence: Synthetic oligonucleotide
  Sense strand starting at position 1807 of SEQ ID NO: 1244065
ucuuacuugcuugauggaa

SEQ ID NO: 1462373 - RNA, 19 nt, Artificial Sequence
  Description of Artificial Sequence: Synthetic oligonucleotide
  Antisense strand to SEQ ID NO: 1462372
uuccaucaagcaaguaaga

SEQ ID NO: 1462374 - RNA, 19 nt, Artificial Sequence
  Description of Artificial Sequence: Synthetic oligonucleotide
  Sense strand starting at position 2094 of SEQ ID NO: 1244065
agaggaaauguuugcacaa

SEQ ID NO: 1462375 - RNA, 19 nt, Artificial Sequence
  Description of Artificial Sequence: Synthetic oligonucleotide
  Antisense strand to SEQ ID NO: 1462374
uugugcaaacauuuccucu

SEQ ID NO: 1462376 - RNA, 19 nt, Artificial Sequence
  Description of Artificial Sequence: Synthetic oligonucleotide
  Sense strand starting at position 2095 of SEQ ID NO: 1244065
gaggaaauguuugcacaaa

SEQ ID NO: 1462377 - RNA, 19 nt, Artificial Sequence
  Description of Artificial Sequence: Synthetic oligonucleotide
  Antisense strand to SEQ ID NO: 1462376
uuugugcaaacauuuccuc

SEQ ID NO: 1462378 - RNA, 19 nt, Artificial Sequence
  Description of Artificial Sequence: Synthetic oligonucleotide
  Sense strand starting at position 2324 of SEQ ID NO: 1244065
gaagguucugcucaaugca

SEQ ID NO: 1462379 - RNA, 19 nt, Artificial Sequence
  Description of Artificial Sequence: Synthetic oligonucleotide
  Antisense strand to SEQ ID NO: 1462378
ugcauugagcagaaccuuc

SEQ ID NO: 1462380 - RNA, 19 nt, Artificial Sequence
  Description of Artificial Sequence: Synthetic oligonucleotide
  Sense strand starting at position 2367 of SEQ ID NO: 1244065
guucgagcuacagaggaau

SEQ ID NO: 1462381 - RNA, 19 nt, Artificial Sequence
  Description of Artificial Sequence: Synthetic oligonucleotide
  Antisense strand to SEQ ID NO: 1462380
auuccucuguagcucgaac

SEQ ID NO: 1462382 - RNA, 19 nt, Artificial Sequence
  Description of Artificial Sequence: Synthetic oligonucleotide
  Sense strand starting at position 2378 of SEQ ID NO: 1244065
agaggaauggcuggcagaa

SEQ ID NO: 1462383 - RNA, 19 nt, Artificial Sequence
  Description of Artificial Sequence: Synthetic oligonucleotide
  Antisense strand to SEQ ID NO: 1462382
uucugccagccauuccucu

SEQ ID NO: 1462384 - RNA, 19 nt, Artificial Sequence
  Description of Artificial Sequence: Synthetic oligonucleotide
  Sense strand starting at position 2453 of SEQ ID NO: 1244065
uuucuaaggcauuaagcuu

SEQ ID NO: 1462385 - RNA, 19 nt, Artificial Sequence
  Description of Artificial Sequence: Synthetic oligonucleotide
  Antisense strand to SEQ ID NO: 1462384
aagcuuaaugccuuagaaa

SEQ ID NO: 1462386 - RNA, 19 nt, Artificial Sequence
  Description of Artificial Sequence: Synthetic oligonucleotide
  Sense strand starting at position 2614 of SEQ ID NO: 1244065
guagguuaugccuacacaa

SEQ ID NO: 1462387 - RNA, 19 nt, Artificial Sequence
  Description of Artificial Sequence: Synthetic oligonucleotide
  Antisense strand to SEQ ID NO: 1462386
uuguguaggcauaaccuac

SEQ ID NO: 1462388 - RNA, 19 nt, Artificial Sequence
  Description of Artificial Sequence: Synthetic oligonucleotide
  Sense strand starting at position 2616 of SEQ ID NO: 1244065
agguuaugccuacacaaua

SEQ ID NO: 1462389 - RNA, 19 nt, Artificial Sequence
  Description of Artificial Sequence: Synthetic oligonucleotide
  Antisense strand to SEQ ID NO: 1462388
uauuguguaggcauaaccu

SEQ ID NO: 1462390 - RNA, 19 nt, Artificial Sequence
  Description of Artificial Sequence: Synthetic oligonucleotide
  Sense strand starting at position 2821 of SEQ ID NO: 1244065
uucgcacauccugacaaua

SEQ ID NO: 1462391 - RNA, 19 nt, Artificial Sequence
  Description of Artificial Sequence: Synthetic oligonucleotide
  Antisense strand to SEQ ID NO: 1462390
uauugucaggaugugcgaa

SEQ ID NO: 1462392 - RNA, 19 nt, Artificial Sequence
  Description of Artificial Sequence: Synthetic oligonucleotide
  Sense strand starting at position 2954 of SEQ ID NO: 1244065
caggucuucugaccagagu

SEQ ID NO: 1462393 - RNA, 19 nt, Artificial Sequence
  Description of Artificial Sequence: Synthetic oligonucleotide
  Antisense strand to SEQ ID NO: 1462392
acucuggucagaagaccug

SEQ ID NO: 1462394 - RNA, 19 nt, Artificial Sequence
  Description of Artificial Sequence: Synthetic oligonucleotide
  Sense strand starting at position 2955 of SEQ ID NO: 1244065
aggucuucugaccagaguu

SEQ ID NO: 1462395 - RNA, 19 nt, Artificial Sequence
  Description of Artificial Sequence: Synthetic oligonucleotide
  Antisense strand to SEQ ID NO: 1462394
aacucuggucagaagaccu

SEQ ID NO: 1462396 - RNA, 19 nt, Artificial Sequence
  Description of Artificial Sequence: Synthetic oligonucleotide
  Sense strand starting at position 3152 of SEQ ID NO: 1244065
gguggaagaugucuugauu

SEQ ID NO: 1462397 - RNA, 19 nt, Artificial Sequence
  Description of Artificial Sequence: Synthetic oligonucleotide
  Antisense strand to SEQ ID NO: 1462396
aaucaagacaucuuccacc

SEQ ID NO: 1462398 - RNA, 19 nt, Artificial Sequence
  Description of Artificial Sequence: Synthetic oligonucleotide
  Sense strand starting at position 3155 of SEQ ID NO: 1244065
ggaagaugucuugauuggu

SEQ ID NO: 1462399 - RNA, 19 nt, Artificial Sequence
  Description of Artificial Sequence: Synthetic oligonucleotide
  Antisense strand to SEQ ID NO: 1462398
accaaucaagacaucuucc

SEQ ID NO: 1462400 - RNA, 19 nt, Artificial Sequence
  Description of Artificial Sequence: Synthetic oligonucleotide
  Sense strand starting at position 3160 of SEQ ID NO: 1244065
augucuugauugguuggaa

SEQ ID NO: 1462401 - RNA, 19 nt, Artificial Sequence
  Description of Artificial Sequence: Synthetic oligonucleotide
  Antisense strand to SEQ ID NO: 1462400
uuccaaccaaucaagacau

SEQ ID NO: 1462402 - RNA, 19 nt, Artificial Sequence
  Description of Artificial Sequence: Synthetic oligonucleotide
  Sense strand starting at position 3161 of SEQ ID NO: 1244065
ugucuugauugguuggaac

SEQ ID NO: 1462403 - RNA, 19 nt, Artificial Sequence
  Description of Artificial Sequence: Synthetic oligonucleotide
  Antisense strand to SEQ ID NO: 1462402
guuccaaccaaucaagaca

SEQ ID NO: 1462404 - RNA, 19 nt, Artificial Sequence
  Description of Artificial Sequence: Synthetic oligonucleotide
  Sense strand starting at position 3274 of SEQ ID NO: 1244065
ggaacucauccuggguaac

SEQ ID NO: 1462405 - RNA, 19 nt, Artificial Sequence
  Description of Artificial Sequence: Synthetic oligonucleotide
  Antisense strand to SEQ ID NO: 1462404
guuacccaggaugaguucc

SEQ ID NO: 1462406 - RNA, 19 nt, Artificial Sequence
  Description of Artificial Sequence: Synthetic oligonucleotide
  Sense strand starting at position 3275 of SEQ ID NO: 1244065
gaacucauccuggguaacu

SEQ ID NO: 1462407 - RNA, 19 nt, Artificial Sequence
  Description of Artificial Sequence: Synthetic oligonucleotide
  Antisense strand to SEQ ID NO: 1462406
aguuacccaggaugaguuc

SEQ ID NO: 1462408 - RNA, 19 nt, Artificial Sequence
  Description of Artificial Sequence: Synthetic oligonucleotide
  Sense strand starting at position 3449 of SEQ ID NO: 1244065
gugucaccucuggaauuga

SEQ ID NO: 1462409 - RNA, 19 nt, Artificial Sequence
  Description of Artificial Sequence: Synthetic oligonucleotide
  Antisense strand to SEQ ID NO: 1462408
ucaauuccagaggugacac

SEQ ID NO: 1462410 - RNA, 19 nt, Artificial Sequence
  Description of Artificial Sequence: Synthetic oligonucleotide
  Sense strand starting at position 3470 of SEQ ID NO: 1244065
uggucaucucucugggaug

SEQ ID NO: 1462411 - RNA, 19 nt, Artificial Sequence
  Description of Artificial Sequence: Synthetic oligonucleotide
  Antisense strand to SEQ ID NO: 1462410
caucccagagagaugacca

SEQ ID NO: 1462412 - RNA, 19 nt, Artificial Sequence
  Description of Artificial Sequence: Synthetic oligonucleotide
  Sense strand starting at position 3531 of SEQ ID NO: 1244065
agggauggacuuuggucau

SEQ ID NO: 1462413 - RNA, 19 nt, Artificial Sequence
  Description of Artificial Sequence: Synthetic oligonucleotide
  Antisense strand to SEQ ID NO: 1462412
augaccaaaguccaucccu

SEQ ID NO: 1462414 - RNA, 19 nt, Artificial Sequence
  Description of Artificial Sequence: Synthetic oligonucleotide
  Sense strand starting at position 3534 of SEQ ID NO: 1244065
gauggacuuuggucauuga

SEQ ID NO: 1462415 - RNA, 19 nt, Artificial Sequence
  Description of Artificial Sequence: Synthetic oligonucleotide
  Antisense strand to SEQ ID NO: 1462414
ucaaugaccaaaguccauc

SEQ ID NO: 1462416 - RNA, 19 nt, Artificial Sequence
  Description of Artificial Sequence: Synthetic oligonucleotide
  Sense strand starting at position 3568 of SEQ ID NO: 1244065
cguucugugagugcucauu

SEQ ID NO: 1462417 - RNA, 19 nt, Artificial Sequence
  Description of Artificial Sequence: Synthetic oligonucleotide
  Antisense strand to SEQ ID NO: 1462416
aaugagcacucacagaacg

SEQ ID NO: 1462418 - RNA, 19 nt, Artificial Sequence
  Description of Artificial Sequence: Synthetic oligonucleotide
  Sense strand starting at position 3574 of SEQ ID NO: 1244065
gugagugcucauuaaagau

SEQ ID NO: 1462419 - RNA, 19 nt, Artificial Sequence
  Description of Artificial Sequence: Synthetic oligonucleotide
  Antisense strand to SEQ ID NO: 1462418
aucuuuaaugagcacucac

SEQ ID NO: 1462420 - RNA, 19 nt, Artificial Sequence
  Description of Artificial Sequence: Synthetic oligonucleotide
  Sense strand starting at position 3617 of SEQ ID NO: 1244065
aauggucugucuuuaaaga

SEQ ID NO: 1462421 - RNA, 19 nt, Artificial Sequence
  Description of Artificial Sequence: Synthetic oligonucleotide
  Antisense strand to SEQ ID NO: 1462420
ucuuuaaagacagaccauu

SEQ ID NO: 1462422 - RNA, 19 nt, Artificial Sequence
  Description of Artificial Sequence: Synthetic oligonucleotide
  Sense strand starting at position 3618 of SEQ ID NO: 1244065
auggucugucuuuaaagaa

SEQ ID NO: 1462423 - RNA, 19 nt, Artificial Sequence
  Description of Artificial Sequence: Synthetic oligonucleotide
  Antisense strand to SEQ ID NO: 1462422
uucuuuaaagacagaccau

SEQ ID NO: 1462424 - RNA, 19 nt, Artificial Sequence
  Description of Artificial Sequence: Synthetic oligonucleotide
  Sense strand starting at position 3694 of SEQ ID NO: 1244065
uccuuuauuucugaaggga

SEQ ID NO: 1462425 - RNA, 19 nt, Artificial Sequence
  Description of Artificial Sequence: Synthetic oligonucleotide
  Antisense strand to SEQ ID NO: 1462424
ucccuucagaaauaaagga

SEQ ID NO: 1462426 - RNA, 19 nt, Artificial Sequence
  Description of Artificial Sequence: Synthetic oligonucleotide
  Sense strand starting at position 3873 of SEQ ID NO: 1244065
gagugauauuaacccagua

SEQ ID NO: 1462427 - RNA, 19 nt, Artificial Sequence
  Description of Artificial Sequence: Synthetic oligonucleotide
  Antisense strand to SEQ ID NO: 1462426
uacuggguuaauaucacuc

SEQ ID NO: 1462428 - RNA, 19 nt, Artificial Sequence
  Description of Artificial Sequence: Synthetic oligonucleotide
  Sense strand starting at position 31 of SEQ ID NO: 1244066
gcguguuggagcuuagugu

SEQ ID NO: 1462429 - RNA, 19 nt, Artificial Sequence
  Description of Artificial Sequence: Synthetic oligonucleotide
  Antisense strand to SEQ ID NO: 1462428
acacuaagcuccaacacgc

SEQ ID NO: 1462430 - RNA, 19 nt, Artificial Sequence
  Description of Artificial Sequence: Synthetic oligonucleotide
  Sense strand starting at position 39 of SEQ ID NO: 1244066
gagcuuaguguuggacaug

SEQ ID NO: 1462431 - RNA, 19 nt, Artificial Sequence
  Description of Artificial Sequence: Synthetic oligonucleotide
  Antisense strand to SEQ ID NO: 1462430
cauguccaacacuaagcuc

SEQ ID NO: 1462432 - RNA, 19 nt, Artificial Sequence
  Description of Artificial Sequence: Synthetic oligonucleotide
  Sense strand starting at position 42 of SEQ ID NO: 1244066
cuuaguguuggacauggua

SEQ ID NO: 1462433 - RNA, 19 nt, Artificial Sequence
  Description of Artificial Sequence: Synthetic oligonucleotide
  Antisense strand to SEQ ID NO: 1462432
uaccauguccaacacuaag

SEQ ID NO: 1462434 - RNA, 19 nt, Artificial Sequence
  Description of Artificial Sequence: Synthetic oligonucleotide
  Sense strand starting at position 62 of SEQ ID NO: 1244066
guuugcuaugccuagguga

SEQ ID NO: 1462435 - RNA, 19 nt, Artificial Sequence
  Description of Artificial Sequence: Synthetic oligonucleotide
  Antisense strand to SEQ ID NO: 1462434
ucaccuaggcauagcaaac

SEQ ID NO: 1462436 - RNA, 19 nt, Artificial Sequence
  Description of Artificial Sequence: Synthetic oligonucleotide
  Sense strand starting at position 64 of SEQ ID NO: 1244066
uugcuaugccuaggugaca

SEQ ID NO: 1462437 - RNA, 19 nt, Artificial Sequence
  Description of Artificial Sequence: Synthetic oligonucleotide
  Antisense strand to SEQ ID NO: 1462436
ugucaccuaggcauagcaa

SEQ ID NO: 1462438 - RNA, 19 nt, Artificial Sequence
  Description of Artificial Sequence: Synthetic oligonucleotide
  Sense strand starting at position 65 of SEQ ID NO: 1244066
ugcuaugccuaggugacau

SEQ ID NO: 1462439 - RNA, 19 nt, Artificial Sequence
  Description of Artificial Sequence: Synthetic oligonucleotide
  Antisense strand to SEQ ID NO: 1462438
augucaccuaggcauagca

SEQ ID NO: 1462440 - RNA, 19 nt, Artificial Sequence
  Description of Artificial Sequence: Synthetic oligonucleotide
  Sense strand starting at position 77 of SEQ ID NO: 1244066
gugacauccaaguggaaau

SEQ ID NO: 1462441 - RNA, 19 nt, Artificial Sequence
  Description of Artificial Sequence: Synthetic oligonucleotide
  Antisense strand to SEQ ID NO: 1462440
auuuccacuuggaugucac

SEQ ID NO: 1462442 - RNA, 19 nt, Artificial Sequence
  Description of Artificial Sequence: Synthetic oligonucleotide
  Sense strand starting at position 98 of SEQ ID NO: 1244066
cgaauaggcaaucguauau

SEQ ID NO: 1462443 - RNA, 19 nt, Artificial Sequence
  Description of Artificial Sequence: Synthetic oligonucleotide
  Antisense strand to SEQ ID NO: 1462442
auauacgauugccuauucg

SEQ ID NO: 1462444 - RNA, 19 nt, Artificial Sequence
  Description of Artificial Sequence: Synthetic oligonucleotide
  Sense strand starting at position 102 of SEQ ID NO: 1244066
uaggcaaucguauauguag

SEQ ID NO: 1462445 - RNA, 19 nt, Artificial Sequence
  Description of Artificial Sequence: Synthetic oligonucleotide
  Antisense strand to SEQ ID NO: 1462444
cuacauauacgauugccua

SEQ ID NO: 1462446 - RNA, 19 nt, Artificial Sequence
  Description of Artificial Sequence: Synthetic oligonucleotide
  Sense strand starting at position 104 of SEQ ID NO: 1244066
ggcaaucguauauguagga

SEQ ID NO: 1462447 - RNA, 19 nt, Artificial Sequence
  Description of Artificial Sequence: Synthetic oligonucleotide
  Antisense strand to SEQ ID NO: 1462446
uccuacauauacgauugcc

SEQ ID NO: 1462448 - RNA, 19 nt, Artificial Sequence
  Description of Artificial Sequence: Synthetic oligonucleotide
  Sense strand starting at position 105 of SEQ ID NO: 1244066
gcaaucguauauguaggau

SEQ ID NO: 1462449 - RNA, 19 nt, Artificial Sequence
  Description of Artificial Sequence: Synthetic oligonucleotide
  Antisense strand to SEQ ID NO: 1462448
auccuacauauacgauugc

SEQ ID NO: 1462450 - RNA, 19 nt, Artificial Sequence
  Description of Artificial Sequence: Synthetic oligonucleotide
  Sense strand starting at position 136 of SEQ ID NO: 1244066
gagaaaguggauugaaguu

SEQ ID NO: 1462451 - RNA, 19 nt, Artificial Sequence
  Description of Artificial Sequence: Synthetic oligonucleotide
  Antisense strand to SEQ ID NO: 1462450
aacuucaauccacuuucuc

SEQ ID NO: 1462452 - RNA, 19 nt, Artificial Sequence
  Description of Artificial Sequence: Synthetic oligonucleotide
  Sense strand starting at position 142 of SEQ ID NO: 1244066
guggauugaaguugugauu

SEQ ID NO: 1462453 - RNA, 19 nt, Artificial Sequence
  Description of Artificial Sequence: Synthetic oligonucleotide
  Antisense strand to SEQ ID NO: 1462452
aaucacaacuucaauccac

SEQ ID NO: 1462454 - RNA, 19 nt, Artificial Sequence
  Description of Artificial Sequence: Synthetic oligonucleotide
  Sense strand starting at position 151 of SEQ ID NO: 1244066
aguugugauuuggaaguua

SEQ ID NO: 1462455 - RNA, 19 nt, Artificial Sequence
  Description of Artificial Sequence: Synthetic oligonucleotide
  Antisense strand to SEQ ID NO: 1462454
uaacuuccaaaucacaacu

SEQ ID NO: 1462456 - RNA, 19 nt, Artificial Sequence
  Description of Artificial Sequence: Synthetic oligonucleotide
  Sense strand starting at position 162 of SEQ ID NO: 1244066
ggaaguuaucaguguauga

SEQ ID NO: 1462457 - RNA, 19 nt, Artificial Sequence
  Description of Artificial Sequence: Synthetic oligonucleotide
  Antisense strand to SEQ ID NO: 1462456
ucauacacugauaacuucc

SEQ ID NO: 1462458 - RNA, 19 nt, Artificial Sequence
  Description of Artificial Sequence: Synthetic oligonucleotide
  Sense strand starting at position 164 of SEQ ID NO: 1244066
aaguuaucaguguaugaaa

SEQ ID NO: 1462459 - RNA, 19 nt, Artificial Sequence
  Description of Artificial Sequence: Synthetic oligonucleotide
  Antisense strand to SEQ ID NO: 1462458
uuucauacacugauaacuu

SEQ ID NO: 1462460 - RNA, 19 nt, Artificial Sequence
  Description of Artificial Sequence: Synthetic oligonucleotide
  Sense strand starting at position 166 of SEQ ID NO: 1244066
guuaucaguguaugaaaug

SEQ ID NO: 1462461 - RNA, 19 nt, Artificial Sequence
  Description of Artificial Sequence: Synthetic oligonucleotide
  Antisense strand to SEQ ID NO: 1462460
cauuucauacacugauaac

SEQ ID NO: 1462462 - RNA, 19 nt, Artificial Sequence
  Description of Artificial Sequence: Synthetic oligonucleotide
  Sense strand starting at position 1208 of SEQ ID NO: 1244066
gcgagacgauuugagagaa

SEQ ID NO: 1462463 - RNA, 19 nt, Artificial Sequence
  Description of Artificial Sequence: Synthetic oligonucleotide
  Antisense strand to SEQ ID NO: 1462462
uucucucaaaucgucucgc

SEQ ID NO: 1462464 - RNA, 19 nt, Artificial Sequence
  Description of Artificial Sequence: Synthetic oligonucleotide
  Sense strand starting at position 1481 of SEQ ID NO: 1244066
agcagauucugcccugaag

SEQ ID NO: 1462465 - RNA, 19 nt, Artificial Sequence
  Description of Artificial Sequence: Synthetic oligonucleotide
  Antisense strand to SEQ ID NO: 1462464
cuucagggcagaaucugcu

SEQ ID NO: 1462466 - RNA, 19 nt, Artificial Sequence
  Description of Artificial Sequence: Synthetic oligonucleotide
  Sense strand starting at position 2041 of SEQ ID NO: 1244066
ggcgcaaaggauuaauaau

SEQ ID NO: 1462467 - RNA, 19 nt, Artificial Sequence
  Description of Artificial Sequence: Synthetic oligonucleotide
  Antisense strand to SEQ ID NO: 1462466
auuauuaauccuuugcgcc

SEQ ID NO: 1462468 - RNA, 19 nt, Artificial Sequence
  Description of Artificial Sequence: Synthetic oligonucleotide
  Sense strand starting at position 2158 of SEQ ID NO: 1244066
agugacagaucagugcauu

SEQ ID NO: 1462469 - RNA, 19 nt, Artificial Sequence
  Description of Artificial Sequence: Synthetic oligonucleotide
  Antisense strand to SEQ ID NO: 1462468
aaugcacugaucugucacu

SEQ ID NO: 1462470 - RNA, 19 nt, Artificial Sequence
  Description of Artificial Sequence: Synthetic oligonucleotide
  Sense strand starting at position 2265 of SEQ ID NO: 1244066
uggugugggcccuaaauuc

SEQ ID NO: 1462471 - RNA, 19 nt, Artificial Sequence
  Description of Artificial Sequence: Synthetic oligonucleotide
  Antisense strand to SEQ ID NO: 1462470
gaauuuagggcccacacca

SEQ ID NO: 1462472 - RNA, 19 nt, Artificial Sequence
  Description of Artificial Sequence: Synthetic oligonucleotide
  Sense strand starting at position 2293 of SEQ ID NO: 1244066
uugaguucccuccacugua

SEQ ID NO: 1462473 - RNA, 19 nt, Artificial Sequence
  Description of Artificial Sequence: Synthetic oligonucleotide
  Antisense strand to SEQ ID NO: 1462472
uacaguggagggaacucaa

SEQ ID NO: 1462474 - RNA, 19 nt, Artificial Sequence
  Description of Artificial Sequence: Synthetic oligonucleotide
  Sense strand starting at position 2296 of SEQ ID NO: 1244066
aguucccuccacuguaaau

SEQ ID NO: 1462475 - RNA, 19 nt, Artificial Sequence
  Description of Artificial Sequence: Synthetic oligonucleotide
  Antisense strand to SEQ ID NO: 1462474
auuuacaguggagggaacu

SEQ ID NO: 1462476 - RNA, 19 nt, Artificial Sequence
  Description of Artificial Sequence: Synthetic oligonucleotide
  Sense strand starting at position 2318 of SEQ ID NO: 1244066
ggauaauaauagguacuuu

SEQ ID NO: 1462477 - RNA, 19 nt, Artificial Sequence
  Description of Artificial Sequence: Synthetic oligonucleotide
  Antisense strand to SEQ ID NO: 1462476
aaaguaccuauuauuaucc

SEQ ID NO: 1462478 - RNA, 19 nt, Artificial Sequence
  Description of Artificial Sequence: Synthetic oligonucleotide
  Sense strand starting at position 2337 of SEQ ID NO: 1244066
gcaagccucaugugaggau

SEQ ID NO: 1462479 - RNA, 19 nt, Artificial Sequence
  Description of Artificial Sequence: Synthetic oligonucleotide
  Antisense strand to SEQ ID NO: 1462478
auccucacaugaggcuugc

SEQ ID NO: 1462480 - RNA, 19 nt, Artificial Sequence
  Description of Artificial Sequence: Synthetic oligonucleotide
  Sense strand starting at position 2341 of SEQ ID NO: 1244066
gccucaugugaggauuaaa

SEQ ID NO: 1462481 - RNA, 19 nt, Artificial Sequence
  Description of Artificial Sequence: Synthetic oligonucleotide
  Antisense strand to SEQ ID NO: 1462480
uuuaauccucacaugaggc

SEQ ID NO: 1462482 - RNA, 19 nt, Artificial Sequence
  Description of Artificial Sequence: Synthetic oligonucleotide
  Sense strand starting at position 2358 of SEQ ID NO: 1244066
aaugauaacguaugugaaa

SEQ ID NO: 1462483 - RNA, 19 nt, Artificial Sequence
  Description of Artificial Sequence: Synthetic oligonucleotide
  Antisense strand to SEQ ID NO: 1462482
uuucacauacguuaucauu

SEQ ID NO: 1462484 - RNA, 19 nt, Artificial Sequence
  Description of Artificial Sequence: Synthetic oligonucleotide
  Sense strand starting at position 2738 of SEQ ID NO: 1244066
uugucuugaccuggauaca

SEQ ID NO: 1462485 - RNA, 19 nt, Artificial Sequence
  Description of Artificial Sequence: Synthetic oligonucleotide
  Antisense strand to SEQ ID NO: 1462484
uguauccaggucaagacaa

SEQ ID NO: 1462486 - RNA, 19 nt, Artificial Sequence
  Description of Artificial Sequence: Synthetic oligonucleotide
  Sense strand starting at position 2739 of SEQ ID NO: 1244066
ugucuugaccuggauacau

SEQ ID NO: 1462487 - RNA, 19 nt, Artificial Sequence
  Description of Artificial Sequence: Synthetic oligonucleotide
  Antisense strand to SEQ ID NO: 1462486
auguauccaggucaagaca

SEQ ID NO: 1462488 - RNA, 19 nt, Artificial Sequence
  Description of Artificial Sequence: Synthetic oligonucleotide
  Sense strand starting at position 2962 of SEQ ID NO: 1244066
acuggaaugugaccucuga

SEQ ID NO: 1462489 - RNA, 19 nt, Artificial Sequence
  Description of Artificial Sequence: Synthetic oligonucleotide
  Antisense strand to SEQ ID NO: 1462488
ucagaggucacauuccagu

SEQ ID NO: 1462490 - RNA, 19 nt, Artificial Sequence
  Description of Artificial Sequence: Synthetic oligonucleotide
  Sense strand starting at position 2966 of SEQ ID NO: 1244066
gaaugugaccucugaugac

SEQ ID NO: 1462491 - RNA, 19 nt, Artificial Sequence
  Description of Artificial Sequence: Synthetic oligonucleotide
  Antisense strand to SEQ ID NO: 1462490
gucaucagaggucacauuc

SEQ ID NO: 1462492 - RNA, 19 nt, Artificial Sequence
  Description of Artificial Sequence: Synthetic oligonucleotide
  Sense strand starting at position 2992 of SEQ ID NO: 1244066
uuguuauucuugcuuacag

SEQ ID NO: 1462493 - RNA, 19 nt, Artificial Sequence
  Description of Artificial Sequence: Synthetic oligonucleotide
  Antisense strand to SEQ ID NO: 1462492
cuguaagcaagaauaacaa

SEQ ID NO: 1462494 - RNA, 19 nt, Artificial Sequence
  Description of Artificial Sequence: Synthetic oligonucleotide
  Sense strand starting at position 2994 of SEQ ID NO: 1244066
guuauucuugcuuacagca

SEQ ID NO: 1462495 - RNA, 19 nt, Artificial Sequence
  Description of Artificial Sequence: Synthetic oligonucleotide
  Antisense strand to SEQ ID NO: 1462494
ugcuguaagcaagaauaac

SEQ ID NO: 1462496 - RNA, 19 nt, Artificial Sequence
  Description of Artificial Sequence: Synthetic oligonucleotide
  Sense strand starting at position 3015 of SEQ ID NO: 1244066
uggaauauugcuuaagcca

SEQ ID NO: 1462497 - RNA, 19 nt, Artificial Sequence
  Description of Artificial Sequence: Synthetic oligonucleotide
  Antisense strand to SEQ ID NO: 1462496
uggcuuaagcaauauucca

SEQ ID NO: 1462498 - RNA, 19 nt, Artificial Sequence
  Description of Artificial Sequence: Synthetic oligonucleotide
  Sense strand starting at position 3063 of SEQ ID NO: 1244066
uaaacaaaggaguguguau

SEQ ID NO: 1462499 - RNA, 19 nt, Artificial Sequence
  Description of Artificial Sequence: Synthetic oligonucleotide
  Antisense strand to SEQ ID NO: 1462498
auacacacuccuuuguuua

SEQ ID NO: 1462500 - RNA, 19 nt, Artificial Sequence
  Description of Artificial Sequence: Synthetic oligonucleotide
  Sense strand starting at position 3598 of SEQ ID NO: 1244066
uucuuagaguuauuccugu

SEQ ID NO: 1462501 - RNA, 19 nt, Artificial Sequence
  Description of Artificial Sequence: Synthetic oligonucleotide
  Antisense strand to SEQ ID NO: 1462500
acaggaauaacucuaagaa

SEQ ID NO: 1462502 - RNA, 19 nt, Artificial Sequence
  Description of Artificial Sequence: Synthetic oligonucleotide
  Sense strand starting at position 3936 of SEQ ID NO: 1244066
uuguauaugucuucuucua

SEQ ID NO: 1462503 - RNA, 19 nt, Artificial Sequence
  Description of Artificial Sequence: Synthetic oligonucleotide
  Antisense strand to SEQ ID NO: 1462502
uagaagaagacauauacaa

SEQ ID NO: 1462504 - RNA, 19 nt, Artificial Sequence
  Description of Artificial Sequence: Synthetic oligonucleotide
  Sense strand starting at position 3938 of SEQ ID NO: 1244066
guauaugucuucuucuaag

SEQ ID NO: 1462505 - RNA, 19 nt, Artificial Sequence
  Description of Artificial Sequence: Synthetic oligonucleotide
  Antisense strand to SEQ ID NO: 1462504
cuuagaagaagacauauac

SEQ ID NO: 1462506 - RNA, 19 nt, Artificial Sequence
  Description of Artificial Sequence: Synthetic oligonucleotide
  Sense strand starting at position 3972 of SEQ ID NO: 1244066
ccggauucucaagguguua

SEQ ID NO: 1462507 - RNA, 19 nt, Artificial Sequence
  Description of Artificial Sequence: Synthetic oligonucleotide
  Antisense strand to SEQ ID NO: 1462506
uaacaccuugagaauccgg

SEQ ID NO: 1462508 - RNA, 19 nt, Artificial Sequence
  Description of Artificial Sequence: Synthetic oligonucleotide
  Sense strand starting at position 97 of SEQ ID NO: 1244067
aauguaacuucucagaggu

SEQ ID NO: 1462509 - RNA, 19 nt, Artificial Sequence
  Description of Artificial Sequence: Synthetic oligonucleotide
  Antisense strand to SEQ ID NO: 1462508
accucugagaaguuacauu

SEQ ID NO: 1462510 - RNA, 19 nt, Artificial Sequence
  Description of Artificial Sequence: Synthetic oligonucleotide
  Sense strand starting at position 99 of SEQ ID NO: 1244067
uguaacuucucagagguua

SEQ ID NO: 1462511 - RNA, 19 nt, Artificial Sequence
  Description of Artificial Sequence: Synthetic oligonucleotide
  Antisense strand to SEQ ID NO: 1462510
uaaccucugagaaguuaca

SEQ ID NO: 1462512 - RNA, 19 nt, Artificial Sequence
  Description of Artificial Sequence: Synthetic oligonucleotide
  Sense strand starting at position 127 of SEQ ID NO: 1244067
acaguugcucacugucuua

SEQ ID NO: 1462513 - RNA, 19 nt, Artificial Sequence
  Description of Artificial Sequence: Synthetic oligonucleotide
  Antisense strand to SEQ ID NO: 1462512
uaagacagugagcaacugu

SEQ ID NO: 1462514 - RNA, 19 nt, Artificial Sequence
  Description of Artificial Sequence: Synthetic oligonucleotide
  Sense strand starting at position 279 of SEQ ID NO: 1244067
gaaguuaugcugcacagac

SEQ ID NO: 1462515 - RNA, 19 nt, Artificial Sequence
  Description of Artificial Sequence: Synthetic oligonucleotide
  Antisense strand to SEQ ID NO: 1462514
gucugugcagcauaacuuc

SEQ ID NO: 1462516 - RNA, 19 nt, Artificial Sequence
  Description of Artificial Sequence: Synthetic oligonucleotide
  Sense strand starting at position 304 of SEQ ID NO: 1244067
uguccaagcucagaagaaa

SEQ ID NO: 1462517 - RNA, 19 nt, Artificial Sequence
  Description of Artificial Sequence: Synthetic oligonucleotide
  Antisense strand to SEQ ID NO: 1462516
uuucuucugagcuuggaca

SEQ ID NO: 1462518 - RNA, 19 nt, Artificial Sequence
  Description of Artificial Sequence: Synthetic oligonucleotide
  Sense strand starting at position 393 of SEQ ID NO: 1244067
gcuccauguucuguuuguu

SEQ ID NO: 1462519 - RNA, 19 nt, Artificial Sequence
  Description of Artificial Sequence: Synthetic oligonucleotide
  Antisense strand to SEQ ID NO: 1462518
aacaaacagaacauggagc

SEQ ID NO: 1462520 - RNA, 19 nt, Artificial Sequence
  Description of Artificial Sequence: Synthetic oligonucleotide
  Sense strand starting at position 632 of SEQ ID NO: 1244067
uuugaucaaucugaacagu

SEQ ID NO: 1462521 - RNA, 19 nt, Artificial Sequence
  Description of Artificial Sequence: Synthetic oligonucleotide
  Antisense strand to SEQ ID NO: 1462520
acuguucagauugaucaaa

SEQ ID NO: 1462522 - RNA, 19 nt, Artificial Sequence
  Description of Artificial Sequence: Synthetic oligonucleotide
  Sense strand starting at position 836 of SEQ ID NO: 1244067
cugagaaacuguucuacug

SEQ ID NO: 1462523 - RNA, 19 nt, Artificial Sequence
  Description of Artificial Sequence: Synthetic oligonucleotide
  Antisense strand to SEQ ID NO: 1462522
caguagaacaguuucucag

SEQ ID NO: 1462524 - RNA, 19 nt, Artificial Sequence
  Description of Artificial Sequence: Synthetic oligonucleotide
  Sense strand starting at position 844 of SEQ ID NO: 1244067
cuguucuacugucaaauuu

SEQ ID NO: 1462525 - RNA, 19 nt, Artificial Sequence
  Description of Artificial Sequence: Synthetic oligonucleotide
  Antisense strand to SEQ ID NO: 1462524
aaauuugacaguagaacag

SEQ ID NO: 1462526 - RNA, 19 nt, Artificial Sequence
  Description of Artificial Sequence: Synthetic oligonucleotide
  Sense strand starting at position 881 of SEQ ID NO: 1244067
cuagauuccugaugacuua

SEQ ID NO: 1462527 - RNA, 19 nt, Artificial Sequence
  Description of Artificial Sequence: Synthetic oligonucleotide
  Antisense strand to SEQ ID NO: 1462526
uaagucaucaggaaucuag

SEQ ID NO: 1462528 - RNA, 19 nt, Artificial Sequence
  Description of Artificial Sequence: Synthetic oligonucleotide
  Sense strand starting at position 909 of SEQ ID NO: 1244067
auaaucaaugcucaacgua

SEQ ID NO: 1462529 - RNA, 19 nt, Artificial Sequence
  Description of Artificial Sequence: Synthetic oligonucleotide
  Antisense strand to SEQ ID NO: 1462528
uacguugagcauugauuau

SEQ ID NO: 1462530 - RNA, 19 nt, Artificial Sequence
  Description of Artificial Sequence: Synthetic oligonucleotide
  Sense strand starting at position 912 of SEQ ID NO: 1244067
aucaaugcucaacguagau

SEQ ID NO: 1462531 - RNA, 19 nt, Artificial Sequence
  Description of Artificial Sequence: Synthetic oligonucleotide
  Antisense strand to SEQ ID NO: 1462530
aucuacguugagcauugau

SEQ ID NO: 1462532 - RNA, 19 nt, Artificial Sequence
  Description of Artificial Sequence: Synthetic oligonucleotide
  Sense strand starting at position 935 of SEQ ID NO: 1244067
cuuacaacucaguguacau

SEQ ID NO: 1462533 - RNA, 19 nt, Artificial Sequence
  Description of Artificial Sequence: Synthetic oligonucleotide
  Antisense strand to SEQ ID NO: 1462532
auguacacugaguuguaag

SEQ ID NO: 1462534 - RNA, 19 nt, Artificial Sequence
  Description of Artificial Sequence: Synthetic oligonucleotide
  Sense strand starting at position 942 of SEQ ID NO: 1244067
cucaguguacauuaagaac

SEQ ID NO: 1462535 - RNA, 19 nt, Artificial Sequence
  Description of Artificial Sequence: Synthetic oligonucleotide
  Antisense strand to SEQ ID NO: 1462534
guucuuaauguacacugag

SEQ ID NO: 1462536 - RNA, 19 nt, Artificial Sequence
  Description of Artificial Sequence: Synthetic oligonucleotide
  Sense strand starting at position 951 of SEQ ID NO: 1244067
cauuaagaacgagguguuu

SEQ ID NO: 1462537 - RNA, 19 nt, Artificial Sequence
  Description of Artificial Sequence: Synthetic oligonucleotide
  Antisense strand to SEQ ID NO: 1462536
aaacaccucguucuuaaug

SEQ ID NO: 1462538 - RNA, 19 nt, Artificial Sequence
  Description of Artificial Sequence: Synthetic oligonucleotide
  Sense strand starting at position 974 of SEQ ID NO: 1244067
ggcucacagucaguuaaca

SEQ ID NO: 1462539 - RNA, 19 nt, Artificial Sequence
  Description of Artificial Sequence: Synthetic oligonucleotide
  Antisense strand to SEQ ID NO: 1462538
uguuaacugacugugagcc

SEQ ID NO: 1462540 - RNA, 19 nt, Artificial Sequence
  Description of Artificial Sequence: Synthetic oligonucleotide
  Sense strand starting at position 985 of SEQ ID NO: 1244067
aguuaacauguugaugcua

SEQ ID NO: 1462541 - RNA, 19 nt, Artificial Sequence
  Description of Artificial Sequence: Synthetic oligonucleotide
  Antisense strand to SEQ ID NO: 1462540
uagcaucaacauguuaacu

SEQ ID NO: 1462542 - RNA, 19 nt, Artificial Sequence
  Description of Artificial Sequence: Synthetic oligonucleotide
  Sense strand starting at position 1055 of SEQ ID NO: 1244067
ucaauuaaggacugucaag

SEQ ID NO: 1462543 - RNA, 19 nt, Artificial Sequence
  Description of Artificial Sequence: Synthetic oligonucleotide
  Antisense strand to SEQ ID NO: 1462542
cuugacaguccuuaauuga

SEQ ID NO: 1462544 - RNA, 19 nt, Artificial Sequence
  Description of Artificial Sequence: Synthetic oligonucleotide
  Sense strand starting at position 1139 of SEQ ID NO: 1244067
acaacuguucuuuauaguu

SEQ ID NO: 1462545 - RNA, 19 nt, Artificial Sequence
  Description of Artificial Sequence: Synthetic oligonucleotide
  Antisense strand to SEQ ID NO: 1462544
aacuauaaagaacaguugu

SEQ ID NO: 1462546 - RNA, 19 nt, Artificial Sequence
  Description of Artificial Sequence: Synthetic oligonucleotide
  Sense strand starting at position 1184 of SEQ ID NO: 1244067
cuggcuguggucuagugau

SEQ ID NO: 1462547 - RNA, 19 nt, Artificial Sequence
  Description of Artificial Sequence: Synthetic oligonucleotide
  Antisense strand to SEQ ID NO: 1462546
aucacuagaccacagccag

SEQ ID NO: 1462548 - RNA, 19 nt, Artificial Sequence
  Description of Artificial Sequence: Synthetic oligonucleotide
  Sense strand starting at position 1312 of SEQ ID NO: 1244067
gcagaagucccuuauguac

SEQ ID NO: 1462549 - RNA, 19 nt, Artificial Sequence
  Description of Artificial Sequence: Synthetic oligonucleotide
  Antisense strand to SEQ ID NO: 1462548
guacauaagggacuucugc

SEQ ID NO: 1462550 - RNA, 19 nt, Artificial Sequence
  Description of Artificial Sequence: Synthetic oligonucleotide
  Sense strand starting at position 1359 of SEQ ID NO: 1244067
accugcaaucuguagcaaa

SEQ ID NO: 1462551 - RNA, 19 nt, Artificial Sequence
  Description of Artificial Sequence: Synthetic oligonucleotide
  Antisense strand to SEQ ID NO: 1462550
uuugcuacagauugcaggu

SEQ ID NO: 1462552 - RNA, 19 nt, Artificial Sequence
  Description of Artificial Sequence: Synthetic oligonucleotide
  Sense strand starting at position 1429 of SEQ ID NO: 1244067
aggcgcugcaccuaaauuu

SEQ ID NO: 1462553 - RNA, 19 nt, Artificial Sequence
  Description of Artificial Sequence: Synthetic oligonucleotide
  Antisense strand to SEQ ID NO: 1462552
aaauuuaggugcagcgccu

SEQ ID NO: 1462554 - RNA, 19 nt, Artificial Sequence
  Description of Artificial Sequence: Synthetic oligonucleotide
  Sense strand starting at position 1483 of SEQ ID NO: 1244067
cgcagaaacgaguguuaau

SEQ ID NO: 1462555 - RNA, 19 nt, Artificial Sequence
  Description of Artificial Sequence: Synthetic oligonucleotide
  Antisense strand to SEQ ID NO: 1462554
auuaacacucguuucugcg

SEQ ID NO: 1462556 - RNA, 19 nt, Artificial Sequence
  Description of Artificial Sequence: Synthetic oligonucleotide
  Sense strand starting at position 1486 of SEQ ID NO: 1244067
agaaacgaguguuaauuau

SEQ ID NO: 1462557 - RNA, 19 nt, Artificial Sequence
  Description of Artificial Sequence: Synthetic oligonucleotide
  Antisense strand to SEQ ID NO: 1462556
auaauuaacacucguuucu

SEQ ID NO: 1462558 - RNA, 19 nt, Artificial Sequence
  Description of Artificial Sequence: Synthetic oligonucleotide
  Sense strand starting at position 1533 of SEQ ID NO: 1244067
uuucgauuucuuugaaugc

SEQ ID NO: 1462559 - RNA, 19 nt, Artificial Sequence
  Description of Artificial Sequence: Synthetic oligonucleotide
  Antisense strand to SEQ ID NO: 1462558
gcauucaaagaaaucgaaa

SEQ ID NO: 1462560 - RNA, 19 nt, Artificial Sequence
  Description of Artificial Sequence: Synthetic oligonucleotide
  Sense strand starting at position 1540 of SEQ ID NO: 1244067
uucuuugaaugcccagaaa

SEQ ID NO: 1462561 - RNA, 19 nt, Artificial Sequence
  Description of Artificial Sequence: Synthetic oligonucleotide
  Antisense strand to SEQ ID NO: 1462560
uuucugggcauucaaagaa

SEQ ID NO: 1462562 - RNA, 19 nt, Artificial Sequence
  Description of Artificial Sequence: Synthetic oligonucleotide
  Sense strand starting at position 1782 of SEQ ID NO: 1244067
gaacguguugcacagaaau

SEQ ID NO: 1462563 - RNA, 19 nt, Artificial Sequence
  Description of Artificial Sequence: Synthetic oligonucleotide
  Antisense strand to SEQ ID NO: 1462562
auuucugugcaacacguuc

SEQ ID NO: 1462564 - RNA, 19 nt, Artificial Sequence
  Description of Artificial Sequence: Synthetic oligonucleotide
  Sense strand starting at position 1784 of SEQ ID NO: 1244067
acguguugcacagaaauca

SEQ ID NO: 1462565 - RNA, 19 nt, Artificial Sequence
  Description of Artificial Sequence: Synthetic oligonucleotide
  Antisense strand to SEQ ID NO: 1462564
ugauuucugugcaacacgu

SEQ ID NO: 1462566 - RNA, 19 nt, Artificial Sequence
  Description of Artificial Sequence: Synthetic oligonucleotide
  Sense strand starting at position 1877 of SEQ ID NO: 1244067
gguccacucucuccugauu

SEQ ID NO: 1462567 - RNA, 19 nt, Artificial Sequence
  Description of Artificial Sequence: Synthetic oligonucleotide
  Antisense strand to SEQ ID NO: 1462566
aaucaggagagaguggacc

SEQ ID NO: 1462568 - RNA, 19 nt, Artificial Sequence
  Description of Artificial Sequence: Synthetic oligonucleotide
  Sense strand starting at position 1969 of SEQ ID NO: 1244067
acaagaagucucgggcaaa

SEQ ID NO: 1462569 - RNA, 19 nt, Artificial Sequence
  Description of Artificial Sequence: Synthetic oligonucleotide
  Antisense strand to SEQ ID NO: 1462568
uuugcccgagacuucuugu

SEQ ID NO: 1462570 - RNA, 19 nt, Artificial Sequence
  Description of Artificial Sequence: Synthetic oligonucleotide
  Sense strand starting at position 2010 of SEQ ID NO: 1244067
ccagaacucgcuugcuuag

SEQ ID NO: 1462571 - RNA, 19 nt, Artificial Sequence
  Description of Artificial Sequence: Synthetic oligonucleotide
  Antisense strand to SEQ ID NO: 1462570
cuaagcaagcgaguucugg

SEQ ID NO: 1462572 - RNA, 19 nt, Artificial Sequence
  Description of Artificial Sequence: Synthetic oligonucleotide
  Sense strand starting at position 2537 of SEQ ID NO: 1244067
cuuugaucacguugcugua

SEQ ID NO: 1462573 - RNA, 19 nt, Artificial Sequence
  Description of Artificial Sequence: Synthetic oligonucleotide
  Antisense strand to SEQ ID NO: 1462572
uacagcaacgugaucaaag

SEQ ID NO: 1462574 - RNA, 19 nt, Artificial Sequence
  Description of Artificial Sequence: Synthetic oligonucleotide
  Sense strand starting at position 2714 of SEQ ID NO: 1244067
ugucgaucuccuuggacuu

SEQ ID NO: 1462575 - RNA, 19 nt, Artificial Sequence
  Description of Artificial Sequence: Synthetic oligonucleotide
  Antisense strand to SEQ ID NO: 1462574
aaguccaaggagaucgaca

SEQ ID NO: 1462576 - RNA, 19 nt, Artificial Sequence
  Description of Artificial Sequence: Synthetic oligonucleotide
  Sense strand starting at position 3430 of SEQ ID NO: 1244067
ggacucgaaaguuauucga

SEQ ID NO: 1462577 - RNA, 19 nt, Artificial Sequence
  Description of Artificial Sequence: Synthetic oligonucleotide
  Antisense strand to SEQ ID NO: 1462576
ucgaauaacuuucgagucc

SEQ ID NO: 1462578 - RNA, 19 nt, Artificial Sequence
  Description of Artificial Sequence: Synthetic oligonucleotide
  Sense strand starting at position 3432 of SEQ ID NO: 1244067
acucgaaaguuauucgaac

SEQ ID NO: 1462579 - RNA, 19 nt, Artificial Sequence
  Description of Artificial Sequence: Synthetic oligonucleotide
  Antisense strand to SEQ ID NO: 1462578
guucgaauaacuuucgagu

SEQ ID NO: 1462580 - RNA, 19 nt, Artificial Sequence
  Description of Artificial Sequence: Synthetic oligonucleotide
  Sense strand starting at position 3433 of SEQ ID NO: 1244067
cucgaaaguuauucgaaca

SEQ ID NO: 1462581 - RNA, 19 nt, Artificial Sequence
  Description of Artificial Sequence: Synthetic oligonucleotide
  Antisense strand to SEQ ID NO: 1462580
uguucgaauaacuuucgag

SEQ ID NO: 1462582 - RNA, 19 nt, Artificial Sequence
  Description of Artificial Sequence: Synthetic oligonucleotide
  Sense strand starting at position 3434 of SEQ ID NO: 1244067
ucgaaaguuauucgaacag

SEQ ID NO: 1462583 - RNA, 19 nt, Artificial Sequence
  Description of Artificial Sequence: Synthetic oligonucleotide
  Antisense strand to SEQ ID NO: 1462582
cuguucgaauaacuuucga

SEQ ID NO: 1462584 - RNA, 19 nt, Artificial Sequence
  Description of Artificial Sequence: Synthetic oligonucleotide
  Sense strand starting at position 3949 of SEQ ID NO: 1244067
ggaguugauguucacuuga

SEQ ID NO: 1462585 - RNA, 19 nt, Artificial Sequence
  Description of Artificial Sequence: Synthetic oligonucleotide
  Antisense strand to SEQ ID NO: 1462584
ucaagugaacaucaacucc

SEQ ID NO: 1462586 - RNA, 19 nt, Artificial Sequence
  Description of Artificial Sequence: Synthetic oligonucleotide
  Sense strand starting at position 3954 of SEQ ID NO: 1244067
ugauguucacuugagacgu

SEQ ID NO: 1462587 - RNA, 19 nt, Artificial Sequence
  Description of Artificial Sequence: Synthetic oligonucleotide
  Antisense strand to SEQ ID NO: 1462586
acgucucaagugaacauca

SEQ ID NO: 1462588 - RNA, 19 nt, Artificial Sequence
  Description of Artificial Sequence: Synthetic oligonucleotide
  Sense strand starting at position 27 of SEQ ID NO: 1244068
ucaauuaaggacugucaag

SEQ ID NO: 1462589 - RNA, 19 nt, Artificial Sequence
  Description of Artificial Sequence: Synthetic oligonucleotide
  Antisense strand to SEQ ID NO: 1462588
cuugacaguccuuaauuga

SEQ ID NO: 1462590 - RNA, 19 nt, Artificial Sequence
  Description of Artificial Sequence: Synthetic oligonucleotide
  Sense strand starting at position 111 of SEQ ID NO: 1244068
acaacuguucuuuauaguu

SEQ ID NO: 1462591 - RNA, 19 nt, Artificial Sequence
  Description of Artificial Sequence: Synthetic oligonucleotide
  Antisense strand to SEQ ID NO: 1462590
aacuauaaagaacaguugu

SEQ ID NO: 1462592 - RNA, 19 nt, Artificial Sequence
  Description of Artificial Sequence: Synthetic oligonucleotide
  Sense strand starting at position 156 of SEQ ID NO: 1244068
cuggcuguggucuagugau

SEQ ID NO: 1462593 - RNA, 19 nt, Artificial Sequence
  Description of Artificial Sequence: Synthetic oligonucleotide
  Antisense strand to SEQ ID NO: 1462592
aucacuagaccacagccag

SEQ ID NO: 1462594 - RNA, 19 nt, Artificial Sequence
  Description of Artificial Sequence: Synthetic oligonucleotide
  Sense strand starting at position 284 of SEQ ID NO: 1244068
gcagaagucccuuauguac

SEQ ID NO: 1462595 - RNA, 19 nt, Artificial Sequence
  Description of Artificial Sequence: Synthetic oligonucleotide
  Antisense strand to SEQ ID NO: 1462594
guacauaagggacuucugc

SEQ ID NO: 1462596 - RNA, 19 nt, Artificial Sequence
  Description of Artificial Sequence: Synthetic oligonucleotide
  Sense strand starting at position 331 of SEQ ID NO: 1244068
accugcaaucuguagcaaa

SEQ ID NO: 1462597 - RNA, 19 nt, Artificial Sequence
  Description of Artificial Sequence: Synthetic oligonucleotide
  Antisense strand to SEQ ID NO: 1462596
uuugcuacagauugcaggu

SEQ ID NO: 1462598 - RNA, 19 nt, Artificial Sequence
  Description of Artificial Sequence: Synthetic oligonucleotide
  Sense strand starting at position 401 of SEQ ID NO: 1244068
aggcgcugcaccuaaauuu

SEQ ID NO: 1462599 - RNA, 19 nt, Artificial Sequence
  Description of Artificial Sequence: Synthetic oligonucleotide
  Antisense strand to SEQ ID NO: 1462598
aaauuuaggugcagcgccu

SEQ ID NO: 1462600 - RNA, 19 nt, Artificial Sequence
  Description of Artificial Sequence: Synthetic oligonucleotide
  Sense strand starting at position 505 of SEQ ID NO: 1244068
uuucgauuucuuugaaugc

SEQ ID NO: 1462601 - RNA, 19 nt, Artificial Sequence
  Description of Artificial Sequence: Synthetic oligonucleotide
  Antisense strand to SEQ ID NO: 1462600
gcauucaaagaaaucgaaa

SEQ ID NO: 1462602 - RNA, 19 nt, Artificial Sequence
  Description of Artificial Sequence: Synthetic oligonucleotide
  Sense strand starting at position 512 of SEQ ID NO: 1244068
uucuuugaaugcccagaaa

SEQ ID NO: 1462603 - RNA, 19 nt, Artificial Sequence
  Description of Artificial Sequence: Synthetic oligonucleotide
  Antisense strand to SEQ ID NO: 1462602
uuucugggcauucaaagaa

SEQ ID NO: 1462604 - RNA, 19 nt, Artificial Sequence
  Description of Artificial Sequence: Synthetic oligonucleotide
  Sense strand starting at position 754 of SEQ ID NO: 1244068
gaacguguugcacagaaau

SEQ ID NO: 1462605 - RNA, 19 nt, Artificial Sequence
  Description of Artificial Sequence: Synthetic oligonucleotide
  Antisense strand to SEQ ID NO: 1462604
auuucugugcaacacguuc

SEQ ID NO: 1462606 - RNA, 19 nt, Artificial Sequence
  Description of Artificial Sequence: Synthetic oligonucleotide
  Sense strand starting at position 756 of SEQ ID NO: 1244068
acguguugcacagaaauca

SEQ ID NO: 1462607 - RNA, 19 nt, Artificial Sequence
  Description of Artificial Sequence: Synthetic oligonucleotide
  Antisense strand to SEQ ID NO: 1462606
ugauuucugugcaacacgu

SEQ ID NO: 1462608 - RNA, 19 nt, Artificial Sequence
  Description of Artificial Sequence: Synthetic oligonucleotide
  Sense strand starting at position 849 of SEQ ID NO: 1244068
gguccacucucuccugauu

SEQ ID NO: 1462609 - RNA, 19 nt, Artificial Sequence
  Description of Artificial Sequence: Synthetic oligonucleotide
  Antisense strand to SEQ ID NO: 1462608
aaucaggagagaguggacc

SEQ ID NO: 1462610 - RNA, 19 nt, Artificial Sequence
  Description of Artificial Sequence: Synthetic oligonucleotide
  Sense strand starting at position 941 of SEQ ID NO: 1244068
acaagaagucucgggcaaa

SEQ ID NO: 1462611 - RNA, 19 nt, Artificial Sequence
  Description of Artificial Sequence: Synthetic oligonucleotide
  Antisense strand to SEQ ID NO: 1462610
uuugcccgagacuucuugu

SEQ ID NO: 1462612 - RNA, 19 nt, Artificial Sequence
  Description of Artificial Sequence: Synthetic oligonucleotide
  Sense strand starting at position 1686 of SEQ ID NO: 1244068
ugucgaucuccuuggacuu

SEQ ID NO: 1462613 - RNA, 19 nt, Artificial Sequence
  Description of Artificial Sequence: Synthetic oligonucleotide
  Antisense strand to SEQ ID NO: 1462612
aaguccaaggagaucgaca

SEQ ID NO: 1462614 - RNA, 19 nt, Artificial Sequence
  Description of Artificial Sequence: Synthetic oligonucleotide
  Sense strand starting at position 2402 of SEQ ID NO: 1244068
ggacucgaaaguuauucga

SEQ ID NO: 1462615 - RNA, 19 nt, Artificial Sequence
  Description of Artificial Sequence: Synthetic oligonucleotide
  Antisense strand to SEQ ID NO: 1462614
ucgaauaacuuucgagucc

SEQ ID NO: 1462616 - RNA, 19 nt, Artificial Sequence
  Description of Artificial Sequence: Synthetic oligonucleotide
  Sense strand starting at position 2404 of SEQ ID NO: 1244068
acucgaaaguuauucgaac

SEQ ID NO: 1462617 - RNA, 19 nt, Artificial Sequence
  Description of Artificial Sequence: Synthetic oligonucleotide
  Antisense strand to SEQ ID NO: 1462616
guucgaauaacuuucgagu

SEQ ID NO: 1462618 - RNA, 19 nt, Artificial Sequence
  Description of Artificial Sequence: Synthetic oligonucleotide
  Sense strand starting at position 2405 of SEQ ID NO: 1244068
cucgaaaguuauucgaaca

SEQ ID NO: 1462619 - RNA, 19 nt, Artificial Sequence
  Description of Artificial Sequence: Synthetic oligonucleotide
  Antisense strand to SEQ ID NO: 1462618
uguucgaauaacuuucgag

SEQ ID NO: 1462620 - RNA, 19 nt, Artificial Sequence
  Description of Artificial Sequence: Synthetic oligonucleotide
  Sense strand starting at position 2406 of SEQ ID NO: 1244068
ucgaaaguuauucgaacag

SEQ ID NO: 1462621 - RNA, 19 nt, Artificial Sequence
  Description of Artificial Sequence: Synthetic oligonucleotide
  Antisense strand to SEQ ID NO: 1462620
cuguucgaauaacuuucga

SEQ ID NO: 1462622 - RNA, 19 nt, Artificial Sequence
  Description of Artificial Sequence: Synthetic oligonucleotide
  Sense strand starting at position 2921 of SEQ ID NO: 1244068
ggaguugauguucacuuga

SEQ ID NO: 1462623 - RNA, 19 nt, Artificial Sequence
  Description of Artificial Sequence: Synthetic oligonucleotide
  Antisense strand to SEQ ID NO: 1462622
ucaagugaacaucaacucc

SEQ ID NO: 1462624 - RNA, 19 nt, Artificial Sequence
  Description of Artificial Sequence: Synthetic oligonucleotide
  Sense strand starting at position 2926 of SEQ ID NO: 1244068
ugauguucacuugagacgu

SEQ ID NO: 1462625 - RNA, 19 nt, Artificial Sequence
  Description of Artificial Sequence: Synthetic oligonucleotide
  Antisense strand to SEQ ID NO: 1462624
acgucucaagugaacauca

SEQ ID NO: 1462626 - RNA, 19 nt, Artificial Sequence
  Description of Artificial Sequence: Synthetic oligonucleotide
  Sense strand starting at position 3021 of SEQ ID NO: 1244068
ccggaauuagcgaguggca

SEQ ID NO: 1462627 - RNA, 19 nt, Artificial Sequence
  Description of Artificial Sequence: Synthetic oligonucleotide
  Antisense strand to SEQ ID NO: 1462626
ugccacucgcuaauuccgg

SEQ ID NO: 1462628 - RNA, 19 nt, Artificial Sequence
  Description of Artificial Sequence: Synthetic oligonucleotide
  Sense strand starting at position 3046 of SEQ ID NO: 1244068
gggugaggucauggugaaa

SEQ ID NO: 1462629 - RNA, 19 nt, Artificial Sequence
  Description of Artificial Sequence: Synthetic oligonucleotide
  Antisense strand to SEQ ID NO: 1462628
uuucaccaugaccucaccc

SEQ ID NO: 1462630 - RNA, 19 nt, Artificial Sequence
  Description of Artificial Sequence: Synthetic oligonucleotide
  Sense strand starting at position 3155 of SEQ ID NO: 1244068
gcuuuccugccagauuaca

SEQ ID NO: 1462631 - RNA, 19 nt, Artificial Sequence
  Description of Artificial Sequence: Synthetic oligonucleotide
  Antisense strand to SEQ ID NO: 1462630
uguaaucuggcaggaaagc

SEQ ID NO: 1462632 - RNA, 19 nt, Artificial Sequence
  Description of Artificial Sequence: Synthetic oligonucleotide
  Sense strand starting at position 3411 of SEQ ID NO: 1244068
cucagaaacuucguaugua

SEQ ID NO: 1462633 - RNA, 19 nt, Artificial Sequence
  Description of Artificial Sequence: Synthetic oligonucleotide
  Antisense strand to SEQ ID NO: 1462632
uacauacgaaguuucugag

SEQ ID NO: 1462634 - RNA, 19 nt, Artificial Sequence
  Description of Artificial Sequence: Synthetic oligonucleotide
  Sense strand starting at position 3414 of SEQ ID NO: 1244068
agaaacuucguauguauaa

SEQ ID NO: 1462635 - RNA, 19 nt, Artificial Sequence
  Description of Artificial Sequence: Synthetic oligonucleotide
  Antisense strand to SEQ ID NO: 1462634
uuauacauacgaaguuucu

SEQ ID NO: 1462636 - RNA, 19 nt, Artificial Sequence
  Description of Artificial Sequence: Synthetic oligonucleotide
  Sense strand starting at position 3415 of SEQ ID NO: 1244068
gaaacuucguauguauaag

SEQ ID NO: 1462637 - RNA, 19 nt, Artificial Sequence
  Description of Artificial Sequence: Synthetic oligonucleotide
  Antisense strand to SEQ ID NO: 1462636
cuuauacauacgaaguuuc

SEQ ID NO: 1462638 - RNA, 19 nt, Artificial Sequence
  Description of Artificial Sequence: Synthetic oligonucleotide
  Sense strand starting at position 3440 of SEQ ID NO: 1244068
gagguaagaggucagcauu

SEQ ID NO: 1462639 - RNA, 19 nt, Artificial Sequence
  Description of Artificial Sequence: Synthetic oligonucleotide
  Antisense strand to SEQ ID NO: 1462638
aaugcugaccucuuaccuc

SEQ ID NO: 1462640 - RNA, 19 nt, Artificial Sequence
  Description of Artificial Sequence: Synthetic oligonucleotide
  Sense strand starting at position 3443 of SEQ ID NO: 1244068
guaagaggucagcauucca

SEQ ID NO: 1462641 - RNA, 19 nt, Artificial Sequence
  Description of Artificial Sequence: Synthetic oligonucleotide
  Antisense strand to SEQ ID NO: 1462640
uggaaugcugaccucuuac

SEQ ID NO: 1462642 - RNA, 19 nt, Artificial Sequence
  Description of Artificial Sequence: Synthetic oligonucleotide
  Sense strand starting at position 3520 of SEQ ID NO: 1244068
uuggguuaaugaccgagaa

SEQ ID NO: 1462643 - RNA, 19 nt, Artificial Sequence
  Description of Artificial Sequence: Synthetic oligonucleotide
  Antisense strand to SEQ ID NO: 1462642
uucucggucauuaacccaa

SEQ ID NO: 1462644 - RNA, 19 nt, Artificial Sequence
  Description of Artificial Sequence: Synthetic oligonucleotide
  Sense strand starting at position 3521 of SEQ ID NO: 1244068
uggguuaaugaccgagaag

SEQ ID NO: 1462645 - RNA, 19 nt, Artificial Sequence
  Description of Artificial Sequence: Synthetic oligonucleotide
  Antisense strand to SEQ ID NO: 1462644
cuucucggucauuaaccca

SEQ ID NO: 1462646 - RNA, 19 nt, Artificial Sequence
  Description of Artificial Sequence: Synthetic oligonucleotide
  Sense strand starting at position 3538 of SEQ ID NO: 1244068
agccucgacucaguagauu

SEQ ID NO: 1462647 - RNA, 19 nt, Artificial Sequence
  Description of Artificial Sequence: Synthetic oligonucleotide
  Antisense strand to SEQ ID NO: 1462646
aaucuacugagucgaggcu

SEQ ID NO: 1462648 - RNA, 19 nt, Artificial Sequence
  Description of Artificial Sequence: Synthetic oligonucleotide
  Sense strand starting at position 3550 of SEQ ID NO: 1244068
guagauuggcugcaguaaa

SEQ ID NO: 1462649 - RNA, 19 nt, Artificial Sequence
  Description of Artificial Sequence: Synthetic oligonucleotide
  Antisense strand to SEQ ID NO: 1462648
uuuacugcagccaaucuac

SEQ ID NO: 1462650 - RNA, 19 nt, Artificial Sequence
  Description of Artificial Sequence: Synthetic oligonucleotide
  Sense strand starting at position 3564 of SEQ ID NO: 1244068
guaaacaaugccuguagua

SEQ ID NO: 1462651 - RNA, 19 nt, Artificial Sequence
  Description of Artificial Sequence: Synthetic oligonucleotide
  Antisense strand to SEQ ID NO: 1462650
uacuacaggcauuguuuac

SEQ ID NO: 1462652 - RNA, 19 nt, Artificial Sequence
  Description of Artificial Sequence: Synthetic oligonucleotide
  Sense strand starting at position 3653 of SEQ ID NO: 1244068
ccuccaauaucuguggauu

SEQ ID NO: 1462653 - RNA, 19 nt, Artificial Sequence
  Description of Artificial Sequence: Synthetic oligonucleotide
  Antisense strand to SEQ ID NO: 1462652
aauccacagauauuggagg

SEQ ID NO: 1462654 - RNA, 19 nt, Artificial Sequence
  Description of Artificial Sequence: Synthetic oligonucleotide
  Sense strand starting at position 3654 of SEQ ID NO: 1244068
cuccaauaucuguggauug

SEQ ID NO: 1462655 - RNA, 19 nt, Artificial Sequence
  Description of Artificial Sequence: Synthetic oligonucleotide
  Antisense strand to SEQ ID NO: 1462654
caauccacagauauuggag

SEQ ID NO: 1462656 - RNA, 19 nt, Artificial Sequence
  Description of Artificial Sequence: Synthetic oligonucleotide
  Sense strand starting at position 3659 of SEQ ID NO: 1244068
auaucuguggauugauaag

SEQ ID NO: 1462657 - RNA, 19 nt, Artificial Sequence
  Description of Artificial Sequence: Synthetic oligonucleotide
  Antisense strand to SEQ ID NO: 1462656
cuuaucaauccacagauau

SEQ ID NO: 1462658 - RNA, 19 nt, Artificial Sequence
  Description of Artificial Sequence: Synthetic oligonucleotide
  Sense strand starting at position 3679 of SEQ ID NO: 1244068
gucagaaucacugagcagu

SEQ ID NO: 1462659 - RNA, 19 nt, Artificial Sequence
  Description of Artificial Sequence: Synthetic oligonucleotide
  Antisense strand to SEQ ID NO: 1462658
acugcucagugauucugac

SEQ ID NO: 1462660 - RNA, 19 nt, Artificial Sequence
  Description of Artificial Sequence: Synthetic oligonucleotide
  Sense strand starting at position 3773 of SEQ ID NO: 1244068
ggcccuguucucuaaccau

SEQ ID NO: 1462661 - RNA, 19 nt, Artificial Sequence
  Description of Artificial Sequence: Synthetic oligonucleotide
  Antisense strand to SEQ ID NO: 1462660
augguuagagaacagggcc

SEQ ID NO: 1462662 - RNA, 19 nt, Artificial Sequence
  Description of Artificial Sequence: Synthetic oligonucleotide
  Sense strand starting at position 3897 of SEQ ID NO: 1244068
cuuguaaguuagguaguua

SEQ ID NO: 1462663 - RNA, 19 nt, Artificial Sequence
  Description of Artificial Sequence: Synthetic oligonucleotide
  Antisense strand to SEQ ID NO: 1462662
uaacuaccuaacuuacaag

SEQ ID NO: 1462664 - RNA, 19 nt, Artificial Sequence
  Description of Artificial Sequence: Synthetic oligonucleotide
  Sense strand starting at position 3898 of SEQ ID NO: 1244068
uuguaaguuagguaguuaa

SEQ ID NO: 1462665 - RNA, 19 nt, Artificial Sequence
  Description of Artificial Sequence: Synthetic oligonucleotide
  Antisense strand to SEQ ID NO: 1462664
uuaacuaccuaacuuacaa

SEQ ID NO: 1462666 - RNA, 19 nt, Artificial Sequence
  Description of Artificial Sequence: Synthetic oligonucleotide
  Sense strand starting at position 3901 of SEQ ID NO: 1244068
uaaguuagguaguuaacau

SEQ ID NO: 1462667 - RNA, 19 nt, Artificial Sequence
  Description of Artificial Sequence: Synthetic oligonucleotide
  Antisense strand to SEQ ID NO: 1462666
auguuaacuaccuaacuua

SEQ ID NO: 1462668 - RNA, 19 nt, Artificial Sequence
  Description of Artificial Sequence: Synthetic oligonucleotide
  Sense strand starting at position 27 of SEQ ID NO: 1244069
gcugcaaauggguauuaaa

SEQ ID NO: 1462669 - RNA, 19 nt, Artificial Sequence
  Description of Artificial Sequence: Synthetic oligonucleotide
  Antisense strand to SEQ ID NO: 1462668
uuuaauacccauuugcagc

SEQ ID NO: 1462670 - RNA, 19 nt, Artificial Sequence
  Description of Artificial Sequence: Synthetic oligonucleotide
  Sense strand starting at position 60 of SEQ ID NO: 1244069
gcaauuauuguggguacua

SEQ ID NO: 1462671 - RNA, 19 nt, Artificial Sequence
  Description of Artificial Sequence: Synthetic oligonucleotide
  Antisense strand to SEQ ID NO: 1462670
uaguacccacaauaauugc

SEQ ID NO: 1462672 - RNA, 19 nt, Artificial Sequence
  Description of Artificial Sequence: Synthetic oligonucleotide
  Sense strand starting at position 61 of SEQ ID NO: 1244069
caauuauuguggguacuaa

SEQ ID NO: 1462673 - RNA, 19 nt, Artificial Sequence
  Description of Artificial Sequence: Synthetic oligonucleotide
  Antisense strand to SEQ ID NO: 1462672
uuaguacccacaauaauug

SEQ ID NO: 1462674 - RNA, 19 nt, Artificial Sequence
  Description of Artificial Sequence: Synthetic oligonucleotide
  Sense strand starting at position 172 of SEQ ID NO: 1244069
uuauuaucacugcaggguu

SEQ ID NO: 1462675 - RNA, 19 nt, Artificial Sequence
  Description of Artificial Sequence: Synthetic oligonucleotide
  Antisense strand to SEQ ID NO: 1462674
aacccugcagugauaauaa

SEQ ID NO: 1462676 - RNA, 19 nt, Artificial Sequence
  Description of Artificial Sequence: Synthetic oligonucleotide
  Sense strand starting at position 297 of SEQ ID NO: 1244069
gucacuuguccuggacuca

SEQ ID NO: 1462677 - RNA, 19 nt, Artificial Sequence
  Description of Artificial Sequence: Synthetic oligonucleotide
  Antisense strand to SEQ ID NO: 1462676
ugaguccaggacaagugac

SEQ ID NO: 1462678 - RNA, 19 nt, Artificial Sequence
  Description of Artificial Sequence: Synthetic oligonucleotide
  Sense strand starting at position 407 of SEQ ID NO: 1244069
agcugaucauaggcucaaa

SEQ ID NO: 1462679 - RNA, 19 nt, Artificial Sequence
  Description of Artificial Sequence: Synthetic oligonucleotide
  Antisense strand to SEQ ID NO: 1462678
uuugagccuaugaucagcu

SEQ ID NO: 1462680 - RNA, 19 nt, Artificial Sequence
  Description of Artificial Sequence: Synthetic oligonucleotide
  Sense strand starting at position 410 of SEQ ID NO: 1244069
ugaucauaggcucaaaguu

SEQ ID NO: 1462681 - RNA, 19 nt, Artificial Sequence
  Description of Artificial Sequence: Synthetic oligonucleotide
  Antisense strand to SEQ ID NO: 1462680
aacuuugagccuaugauca

SEQ ID NO: 1462682 - RNA, 19 nt, Artificial Sequence
  Description of Artificial Sequence: Synthetic oligonucleotide
  Sense strand starting at position 564 of SEQ ID NO: 1244069
uggugaccucacuagcuua

SEQ ID NO: 1462683 - RNA, 19 nt, Artificial Sequence
  Description of Artificial Sequence: Synthetic oligonucleotide
  Antisense strand to SEQ ID NO: 1462682
uaagcuagugaggucacca

SEQ ID NO: 1462684 - RNA, 19 nt, Artificial Sequence
  Description of Artificial Sequence: Synthetic oligonucleotide
  Sense strand starting at position 745 of SEQ ID NO: 1244069
cuuuguguugcccauugga

SEQ ID NO: 1462685 - RNA, 19 nt, Artificial Sequence
  Description of Artificial Sequence: Synthetic oligonucleotide
  Antisense strand to SEQ ID NO: 1462684
uccaaugggcaacacaaag

SEQ ID NO: 1462686 - RNA, 19 nt, Artificial Sequence
  Description of Artificial Sequence: Synthetic oligonucleotide
  Sense strand starting at position 927 of SEQ ID NO: 1244069
gaauguggguuccugagca

SEQ ID NO: 1462687 - RNA, 19 nt, Artificial Sequence
  Description of Artificial Sequence: Synthetic oligonucleotide
  Antisense strand to SEQ ID NO: 1462686
ugcucaggaacccacauuc

SEQ ID NO: 1462688 - RNA, 19 nt, Artificial Sequence
  Description of Artificial Sequence: Synthetic oligonucleotide
  Sense strand starting at position 931 of SEQ ID NO: 1244069
guggguuccugagcacaga

SEQ ID NO: 1462689 - RNA, 19 nt, Artificial Sequence
  Description of Artificial Sequence: Synthetic oligonucleotide
  Antisense strand to SEQ ID NO: 1462688
ucugugcucaggaacccac

SEQ ID NO: 1462690 - RNA, 19 nt, Artificial Sequence
  Description of Artificial Sequence: Synthetic oligonucleotide
  Sense strand starting at position 1265 of SEQ ID NO: 1244069
ugguacaacuguccuguua

SEQ ID NO: 1462691 - RNA, 19 nt, Artificial Sequence
  Description of Artificial Sequence: Synthetic oligonucleotide
  Antisense strand to SEQ ID NO: 1462690
uaacaggacaguuguacca

SEQ ID NO: 1462692 - RNA, 19 nt, Artificial Sequence
  Description of Artificial Sequence: Synthetic oligonucleotide
  Sense strand starting at position 1278 of SEQ ID NO: 1244069
cuguuaaugcgugaaccac

SEQ ID NO: 1462693 - RNA, 19 nt, Artificial Sequence
  Description of Artificial Sequence: Synthetic oligonucleotide
  Antisense strand to SEQ ID NO: 1462692
gugguucacgcauuaacag

SEQ ID NO: 1462694 - RNA, 19 nt, Artificial Sequence
  Description of Artificial Sequence: Synthetic oligonucleotide
  Sense strand starting at position 1349 of SEQ ID NO: 1244069
accgcaaguugaucugaaa

SEQ ID NO: 1462695 - RNA, 19 nt, Artificial Sequence
  Description of Artificial Sequence: Synthetic oligonucleotide
  Antisense strand to SEQ ID NO: 1462694
uuucagaucaacuugcggu

SEQ ID NO: 1462696 - RNA, 19 nt, Artificial Sequence
  Description of Artificial Sequence: Synthetic oligonucleotide
  Sense strand starting at position 1352 of SEQ ID NO: 1244069
gcaaguugaucugaaauuu

SEQ ID NO: 1462697 - RNA, 19 nt, Artificial Sequence
  Description of Artificial Sequence: Synthetic oligonucleotide
  Antisense strand to SEQ ID NO: 1462696
aaauuucagaucaacuugc

SEQ ID NO: 1462698 - RNA, 19 nt, Artificial Sequence
  Description of Artificial Sequence: Synthetic oligonucleotide
  Sense strand starting at position 1412 of SEQ ID NO: 1244069
aucugagucccucacauua

SEQ ID NO: 1462699 - RNA, 19 nt, Artificial Sequence
  Description of Artificial Sequence: Synthetic oligonucleotide
  Antisense strand to SEQ ID NO: 1462698
uaaugugagggacucagau

SEQ ID NO: 1462700 - RNA, 19 nt, Artificial Sequence
  Description of Artificial Sequence: Synthetic oligonucleotide
  Sense strand starting at position 1423 of SEQ ID NO: 1244069
ucacauuacgcuuggucaa

SEQ ID NO: 1462701 - RNA, 19 nt, Artificial Sequence
  Description of Artificial Sequence: Synthetic oligonucleotide
  Antisense strand to SEQ ID NO: 1462700
uugaccaagcguaauguga

SEQ ID NO: 1462702 - RNA, 19 nt, Artificial Sequence
  Description of Artificial Sequence: Synthetic oligonucleotide
  Sense strand starting at position 1424 of SEQ ID NO: 1244069
cacauuacgcuuggucaau

SEQ ID NO: 1462703 - RNA, 19 nt, Artificial Sequence
  Description of Artificial Sequence: Synthetic oligonucleotide
  Antisense strand to SEQ ID NO: 1462702
auugaccaagcguaaugug

SEQ ID NO: 1462704 - RNA, 19 nt, Artificial Sequence
  Description of Artificial Sequence: Synthetic oligonucleotide
  Sense strand starting at position 1425 of SEQ ID NO: 1244069
acauuacgcuuggucaauu

SEQ ID NO: 1462705 - RNA, 19 nt, Artificial Sequence
  Description of Artificial Sequence: Synthetic oligonucleotide
  Antisense strand to SEQ ID NO: 1462704
aauugaccaagcguaaugu

SEQ ID NO: 1462706 - RNA, 19 nt, Artificial Sequence
  Description of Artificial Sequence: Synthetic oligonucleotide
  Sense strand starting at position 1426 of SEQ ID NO: 1244069
cauuacgcuuggucaauuu

SEQ ID NO: 1462707 - RNA, 19 nt, Artificial Sequence
  Description of Artificial Sequence: Synthetic oligonucleotide
  Antisense strand to SEQ ID NO: 1462706
aaauugaccaagcguaaug

SEQ ID NO: 1462708 - RNA, 19 nt, Artificial Sequence
  Description of Artificial Sequence: Synthetic oligonucleotide
  Sense strand starting at position 1639 of SEQ ID NO: 1244069
gacggaucuccauauccua

SEQ ID NO: 1462709 - RNA, 19 nt, Artificial Sequence
  Description of Artificial Sequence: Synthetic oligonucleotide
  Antisense strand to SEQ ID NO: 1462708
uaggauauggagauccguc

SEQ ID NO: 1462710 - RNA, 19 nt, Artificial Sequence
  Description of Artificial Sequence: Synthetic oligonucleotide
  Sense strand starting at position 2252 of SEQ ID NO: 1244069
ggacaacuaugugcaggua

SEQ ID NO: 1462711 - RNA, 19 nt, Artificial Sequence
  Description of Artificial Sequence: Synthetic oligonucleotide
  Antisense strand to SEQ ID NO: 1462710
uaccugcacauaguugucc

SEQ ID NO: 1462712 - RNA, 19 nt, Artificial Sequence
  Description of Artificial Sequence: Synthetic oligonucleotide
  Sense strand starting at position 2369 of SEQ ID NO: 1244069
cugggccuuggcugagaaa

SEQ ID NO: 1462713 - RNA, 19 nt, Artificial Sequence
  Description of Artificial Sequence: Synthetic oligonucleotide
  Antisense strand to SEQ ID NO: 1462712
uuucucagccaaggcccag

SEQ ID NO: 1462714 - RNA, 19 nt, Artificial Sequence
  Description of Artificial Sequence: Synthetic oligonucleotide
  Sense strand starting at position 2370 of SEQ ID NO: 1244069
ugggccuuggcugagaaau

SEQ ID NO: 1462715 - RNA, 19 nt, Artificial Sequence
  Description of Artificial Sequence: Synthetic oligonucleotide
  Antisense strand to SEQ ID NO: 1462714
auuucucagccaaggccca

SEQ ID NO: 1462716 - RNA, 19 nt, Artificial Sequence
  Description of Artificial Sequence: Synthetic oligonucleotide
  Sense strand starting at position 2477 of SEQ ID NO: 1244069
cucucagagccucagagau

SEQ ID NO: 1462717 - RNA, 19 nt, Artificial Sequence
  Description of Artificial Sequence: Synthetic oligonucleotide
  Antisense strand to SEQ ID NO: 1462716
aucucugaggcucugagag

SEQ ID NO: 1462718 - RNA, 19 nt, Artificial Sequence
  Description of Artificial Sequence: Synthetic oligonucleotide
  Sense strand starting at position 2487 of SEQ ID NO: 1244069
cucagagaugccugggaca

SEQ ID NO: 1462719 - RNA, 19 nt, Artificial Sequence
  Description of Artificial Sequence: Synthetic oligonucleotide
  Antisense strand to SEQ ID NO: 1462718
ugucccaggcaucucugag

SEQ ID NO: 1462720 - RNA, 19 nt, Artificial Sequence
  Description of Artificial Sequence: Synthetic oligonucleotide
  Sense strand starting at position 2489 of SEQ ID NO: 1244069
cagagaugccugggacaga

SEQ ID NO: 1462721 - RNA, 19 nt, Artificial Sequence
  Description of Artificial Sequence: Synthetic oligonucleotide
  Antisense strand to SEQ ID NO: 1462720
ucugucccaggcaucucug

SEQ ID NO: 1462722 - RNA, 19 nt, Artificial Sequence
  Description of Artificial Sequence: Synthetic oligonucleotide
  Sense strand starting at position 2510 of SEQ ID NO: 1244069
gugcgauuccauccuguuc

SEQ ID NO: 1462723 - RNA, 19 nt, Artificial Sequence
  Description of Artificial Sequence: Synthetic oligonucleotide
  Antisense strand to SEQ ID NO: 1462722
gaacaggauggaaucgcac

SEQ ID NO: 1462724 - RNA, 19 nt, Artificial Sequence
  Description of Artificial Sequence: Synthetic oligonucleotide
  Sense strand starting at position 2555 of SEQ ID NO: 1244069
cugaguucccacgggucaa

SEQ ID NO: 1462725 - RNA, 19 nt, Artificial Sequence
  Description of Artificial Sequence: Synthetic oligonucleotide
  Antisense strand to SEQ ID NO: 1462724
uugacccgugggaacucag

SEQ ID NO: 1462726 - RNA, 19 nt, Artificial Sequence
  Description of Artificial Sequence: Synthetic oligonucleotide
  Sense strand starting at position 2556 of SEQ ID NO: 1244069
ugaguucccacgggucaau

SEQ ID NO: 1462727 - RNA, 19 nt, Artificial Sequence
  Description of Artificial Sequence: Synthetic oligonucleotide
  Antisense strand to SEQ ID NO: 1462726
auugacccgugggaacuca

SEQ ID NO: 1462728 - RNA, 19 nt, Artificial Sequence
  Description of Artificial Sequence: Synthetic oligonucleotide
  Sense strand starting at position 2602 of SEQ ID NO: 1244069
acagaugcuggcgaucauu

SEQ ID NO: 1462729 - RNA, 19 nt, Artificial Sequence
  Description of Artificial Sequence: Synthetic oligonucleotide
  Antisense strand to SEQ ID NO: 1462728
aaugaucgccagcaucugu

SEQ ID NO: 1462730 - RNA, 19 nt, Artificial Sequence
  Description of Artificial Sequence: Synthetic oligonucleotide
  Sense strand starting at position 2605 of SEQ ID NO: 1244069
gaugcuggcgaucauucua

SEQ ID NO: 1462731 - RNA, 19 nt, Artificial Sequence
  Description of Artificial Sequence: Synthetic oligonucleotide
  Antisense strand to SEQ ID NO: 1462730
uagaaugaucgccagcauc

SEQ ID NO: 1462732 - RNA, 19 nt, Artificial Sequence
  Description of Artificial Sequence: Synthetic oligonucleotide
  Sense strand starting at position 2835 of SEQ ID NO: 1244069
gggagguggcauuguagaa

SEQ ID NO: 1462733 - RNA, 19 nt, Artificial Sequence
  Description of Artificial Sequence: Synthetic oligonucleotide
  Antisense strand to SEQ ID NO: 1462732
uucuacaaugccaccuccc

SEQ ID NO: 1462734 - RNA, 19 nt, Artificial Sequence
  Description of Artificial Sequence: Synthetic oligonucleotide
  Sense strand starting at position 2924 of SEQ ID NO: 1244069
gcaacugagccaugaugga

SEQ ID NO: 1462735 - RNA, 19 nt, Artificial Sequence
  Description of Artificial Sequence: Synthetic oligonucleotide
  Antisense strand to SEQ ID NO: 1462734
uccaucauggcucaguugc

SEQ ID NO: 1462736 - RNA, 19 nt, Artificial Sequence
  Description of Artificial Sequence: Synthetic oligonucleotide
  Sense strand starting at position 2969 of SEQ ID NO: 1244069
guacaacuaccuugugaga

SEQ ID NO: 1462737 - RNA, 19 nt, Artificial Sequence
  Description of Artificial Sequence: Synthetic oligonucleotide
  Antisense strand to SEQ ID NO: 1462736
ucucacaagguaguuguac

SEQ ID NO: 1462738 - RNA, 19 nt, Artificial Sequence
  Description of Artificial Sequence: Synthetic oligonucleotide
  Sense strand starting at position 3740 of SEQ ID NO: 1244069
gugacuuuacgacaguuua

SEQ ID NO: 1462739 - RNA, 19 nt, Artificial Sequence
  Description of Artificial Sequence: Synthetic oligonucleotide
  Antisense strand to SEQ ID NO: 1462738
uaaacugucguaaagucac

SEQ ID NO: 1462740 - RNA, 19 nt, Artificial Sequence
  Description of Artificial Sequence: Synthetic oligonucleotide
  Sense strand starting at position 3780 of SEQ ID NO: 1244069
uuccucugcucccugaaga

SEQ ID NO: 1462741 - RNA, 19 nt, Artificial Sequence
  Description of Artificial Sequence: Synthetic oligonucleotide
  Antisense strand to SEQ ID NO: 1462740
ucuucagggagcagaggaa

SEQ ID NO: 1462742 - RNA, 19 nt, Artificial Sequence
  Description of Artificial Sequence: Synthetic oligonucleotide
  Sense strand starting at position 3924 of SEQ ID NO: 1244069
guaacaagugcucauggga

SEQ ID NO: 1462743 - RNA, 19 nt, Artificial Sequence
  Description of Artificial Sequence: Synthetic oligonucleotide
  Antisense strand to SEQ ID NO: 1462742
ucccaugagcacuuguuac

SEQ ID NO: 1462744 - RNA, 19 nt, Artificial Sequence
  Description of Artificial Sequence: Synthetic oligonucleotide
  Sense strand starting at position 3927 of SEQ ID NO: 1244069
acaagugcucaugggaaau

SEQ ID NO: 1462745 - RNA, 19 nt, Artificial Sequence
  Description of Artificial Sequence: Synthetic oligonucleotide
  Antisense strand to SEQ ID NO: 1462744
auuucccaugagcacuugu

SEQ ID NO: 1462746 - RNA, 19 nt, Artificial Sequence
  Description of Artificial Sequence: Synthetic oligonucleotide
  Sense strand starting at position 3963 of SEQ ID NO: 1244069
caguaaugacagcaguuaa

SEQ ID NO: 1462747 - RNA, 19 nt, Artificial Sequence
  Description of Artificial Sequence: Synthetic oligonucleotide
  Antisense strand to SEQ ID NO: 1462746
uuaacugcugucauuacug

SEQ ID NO: 1462748 - RNA, 19 nt, Artificial Sequence
  Description of Artificial Sequence: Synthetic oligonucleotide
  Sense strand starting at position 264 of SEQ ID NO: 1244070
uggauugucugucuaugga

SEQ ID NO: 1462749 - RNA, 19 nt, Artificial Sequence
  Description of Artificial Sequence: Synthetic oligonucleotide
  Antisense strand to SEQ ID NO: 1462748
uccauagacagacaaucca

SEQ ID NO: 1462750 - RNA, 19 nt, Artificial Sequence
  Description of Artificial Sequence: Synthetic oligonucleotide
  Sense strand starting at position 271 of SEQ ID NO: 1244070
ucugucuauggaggaaauu

SEQ ID NO: 1462751 - RNA, 19 nt, Artificial Sequence
  Description of Artificial Sequence: Synthetic oligonucleotide
  Antisense strand to SEQ ID NO: 1462750
aauuuccuccauagacaga

SEQ ID NO: 1462752 - RNA, 19 nt, Artificial Sequence
  Description of Artificial Sequence: Synthetic oligonucleotide
  Sense strand starting at position 280 of SEQ ID NO: 1244070
ggaggaaauuuggauuguc

SEQ ID NO: 1462753 - RNA, 19 nt, Artificial Sequence
  Description of Artificial Sequence: Synthetic oligonucleotide
  Antisense strand to SEQ ID NO: 1462752
gacaauccaaauuuccucc

SEQ ID NO: 1462754 - RNA, 19 nt, Artificial Sequence
  Description of Artificial Sequence: Synthetic oligonucleotide
  Sense strand starting at position 288 of SEQ ID NO: 1244070
uuuggauugucugucuaua

SEQ ID NO: 1462755 - RNA, 19 nt, Artificial Sequence
  Description of Artificial Sequence: Synthetic oligonucleotide
  Antisense strand to SEQ ID NO: 1462754
uauagacagacaauccaaa

SEQ ID NO: 1462756 - RNA, 19 nt, Artificial Sequence
  Description of Artificial Sequence: Synthetic oligonucleotide
  Sense strand starting at position 290 of SEQ ID NO: 1244070
uggauugucugucuauaga

SEQ ID NO: 1462757 - RNA, 19 nt, Artificial Sequence
  Description of Artificial Sequence: Synthetic oligonucleotide
  Antisense strand to SEQ ID NO: 1462756
ucuauagacagacaaucca

SEQ ID NO: 1462758 - RNA, 19 nt, Artificial Sequence
  Description of Artificial Sequence: Synthetic oligonucleotide
  Sense strand starting at position 314 of SEQ ID NO: 1244070
cugucugucugucuacaga

SEQ ID NO: 1462759 - RNA, 19 nt, Artificial Sequence
  Description of Artificial Sequence: Synthetic oligonucleotide
  Antisense strand to SEQ ID NO: 1462758
ucuguagacagacagacag

SEQ ID NO: 1462760 - RNA, 19 nt, Artificial Sequence
  Description of Artificial Sequence: Synthetic oligonucleotide
  Sense strand starting at position 1201 of SEQ ID NO: 1244070
gcugcaaauggguauuaaa

SEQ ID NO: 1462761 - RNA, 19 nt, Artificial Sequence
  Description of Artificial Sequence: Synthetic oligonucleotide
  Antisense strand to SEQ ID NO: 1462760
uuuaauacccauuugcagc

SEQ ID NO: 1462762 - RNA, 19 nt, Artificial Sequence
  Description of Artificial Sequence: Synthetic oligonucleotide
  Sense strand starting at position 1234 of SEQ ID NO: 1244070
gcaauuauuguggguacua

SEQ ID NO: 1462763 - RNA, 19 nt, Artificial Sequence
  Description of Artificial Sequence: Synthetic oligonucleotide
  Antisense strand to SEQ ID NO: 1462762
uaguacccacaauaauugc

SEQ ID NO: 1462764 - RNA, 19 nt, Artificial Sequence
  Description of Artificial Sequence: Synthetic oligonucleotide
  Sense strand starting at position 1235 of SEQ ID NO: 1244070
caauuauuguggguacuaa

SEQ ID NO: 1462765 - RNA, 19 nt, Artificial Sequence
  Description of Artificial Sequence: Synthetic oligonucleotide
  Antisense strand to SEQ ID NO: 1462764
uuaguacccacaauaauug

SEQ ID NO: 1462766 - RNA, 19 nt, Artificial Sequence
  Description of Artificial Sequence: Synthetic oligonucleotide
  Sense strand starting at position 1346 of SEQ ID NO: 1244070
uuauuaucacugcaggguu

SEQ ID NO: 1462767 - RNA, 19 nt, Artificial Sequence
  Description of Artificial Sequence: Synthetic oligonucleotide
  Antisense strand to SEQ ID NO: 1462766
aacccugcagugauaauaa

SEQ ID NO: 1462768 - RNA, 19 nt, Artificial Sequence
  Description of Artificial Sequence: Synthetic oligonucleotide
  Sense strand starting at position 1471 of SEQ ID NO: 1244070
gucacuuguccuggacuca

SEQ ID NO: 1462769 - RNA, 19 nt, Artificial Sequence
  Description of Artificial Sequence: Synthetic oligonucleotide
  Antisense strand to SEQ ID NO: 1462768
ugaguccaggacaagugac

SEQ ID NO: 1462770 - RNA, 19 nt, Artificial Sequence
  Description of Artificial Sequence: Synthetic oligonucleotide
  Sense strand starting at position 1581 of SEQ ID NO: 1244070
agcugaucauaggcucaaa

SEQ ID NO: 1462771 - RNA, 19 nt, Artificial Sequence
  Description of Artificial Sequence: Synthetic oligonucleotide
  Antisense strand to SEQ ID NO: 1462770
uuugagccuaugaucagcu

SEQ ID NO: 1462772 - RNA, 19 nt, Artificial Sequence
  Description of Artificial Sequence: Synthetic oligonucleotide
  Sense strand starting at position 1584 of SEQ ID NO: 1244070
ugaucauaggcucaaaguu

SEQ ID NO: 1462773 - RNA, 19 nt, Artificial Sequence
  Description of Artificial Sequence: Synthetic oligonucleotide
  Antisense strand to SEQ ID NO: 1462772
aacuuugagccuaugauca

SEQ ID NO: 1462774 - RNA, 19 nt, Artificial Sequence
  Description of Artificial Sequence: Synthetic oligonucleotide
  Sense strand starting at position 1738 of SEQ ID NO: 1244070
uggugaccucacuagcuua

SEQ ID NO: 1462775 - RNA, 19 nt, Artificial Sequence
  Description of Artificial Sequence: Synthetic oligonucleotide
  Antisense strand to SEQ ID NO: 1462774
uaagcuagugaggucacca

SEQ ID NO: 1462776 - RNA, 19 nt, Artificial Sequence
  Description of Artificial Sequence: Synthetic oligonucleotide
  Sense strand starting at position 1919 of SEQ ID NO: 1244070
cuuuguguugcccauugga

SEQ ID NO: 1462777 - RNA, 19 nt, Artificial Sequence
  Description of Artificial Sequence: Synthetic oligonucleotide
  Antisense strand to SEQ ID NO: 1462776
uccaaugggcaacacaaag

SEQ ID NO: 1462778 - RNA, 19 nt, Artificial Sequence
  Description of Artificial Sequence: Synthetic oligonucleotide
  Sense strand starting at position 2101 of SEQ ID NO: 1244070
gaauguggguuccugagca

SEQ ID NO: 1462779 - RNA, 19 nt, Artificial Sequence
  Description of Artificial Sequence: Synthetic oligonucleotide
  Antisense strand to SEQ ID NO: 1462778
ugcucaggaacccacauuc

SEQ ID NO: 1462780 - RNA, 19 nt, Artificial Sequence
  Description of Artificial Sequence: Synthetic oligonucleotide
  Sense strand starting at position 2105 of SEQ ID NO: 1244070
guggguuccugagcacaga

SEQ ID NO: 1462781 - RNA, 19 nt, Artificial Sequence
  Description of Artificial Sequence: Synthetic oligonucleotide
  Antisense strand to SEQ ID NO: 1462780
ucugugcucaggaacccac

SEQ ID NO: 1462782 - RNA, 19 nt, Artificial Sequence
  Description of Artificial Sequence: Synthetic oligonucleotide
  Sense strand starting at position 2439 of SEQ ID NO: 1244070
ugguacaacuguccuguua

SEQ ID NO: 1462783 - RNA, 19 nt, Artificial Sequence
  Description of Artificial Sequence: Synthetic oligonucleotide
  Antisense strand to SEQ ID NO: 1462782
uaacaggacaguuguacca

SEQ ID NO: 1462784 - RNA, 19 nt, Artificial Sequence
  Description of Artificial Sequence: Synthetic oligonucleotide
  Sense strand starting at position 2452 of SEQ ID NO: 1244070
cuguuaaugcgugaaccac

SEQ ID NO: 1462785 - RNA, 19 nt, Artificial Sequence
  Description of Artificial Sequence: Synthetic oligonucleotide
  Antisense strand to SEQ ID NO: 1462784
gugguucacgcauuaacag

SEQ ID NO: 1462786 - RNA, 19 nt, Artificial Sequence
  Description of Artificial Sequence: Synthetic oligonucleotide
  Sense strand starting at position 2523 of SEQ ID NO: 1244070
accgcaaguugaucugaaa

SEQ ID NO: 1462787 - RNA, 19 nt, Artificial Sequence
  Description of Artificial Sequence: Synthetic oligonucleotide
  Antisense strand to SEQ ID NO: 1462786
uuucagaucaacuugcggu

SEQ ID NO: 1462788 - RNA, 19 nt, Artificial Sequence
  Description of Artificial Sequence: Synthetic oligonucleotide
  Sense strand starting at position 2526 of SEQ ID NO: 1244070
gcaaguugaucugaaauuu

SEQ ID NO: 1462789 - RNA, 19 nt, Artificial Sequence
  Description of Artificial Sequence: Synthetic oligonucleotide
  Antisense strand to SEQ ID NO: 1462788
aaauuucagaucaacuugc

SEQ ID NO: 1462790 - RNA, 19 nt, Artificial Sequence
  Description of Artificial Sequence: Synthetic oligonucleotide
  Sense strand starting at position 2575 of SEQ ID NO: 1244070
ccuguugucuaaucugagu

SEQ ID NO: 1462791 - RNA, 19 nt, Artificial Sequence
  Description of Artificial Sequence: Synthetic oligonucleotide
  Antisense strand to SEQ ID NO: 1462790
acucagauuagacaacagg

SEQ ID NO: 1462792 - RNA, 19 nt, Artificial Sequence
  Description of Artificial Sequence: Synthetic oligonucleotide
  Sense strand starting at position 2586 of SEQ ID NO: 1244070
aucugagucccucacauua

SEQ ID NO: 1462793 - RNA, 19 nt, Artificial Sequence
  Description of Artificial Sequence: Synthetic oligonucleotide
  Antisense strand to SEQ ID NO: 1462792
uaaugugagggacucagau

SEQ ID NO: 1462794 - RNA, 19 nt, Artificial Sequence
  Description of Artificial Sequence: Synthetic oligonucleotide
  Sense strand starting at position 2597 of SEQ ID NO: 1244070
ucacauuacgcuuggucaa

SEQ ID NO: 1462795 - RNA, 19 nt, Artificial Sequence
  Description of Artificial Sequence: Synthetic oligonucleotide
  Antisense strand to SEQ ID NO: 1462794
uugaccaagcguaauguga

SEQ ID NO: 1462796 - RNA, 19 nt, Artificial Sequence
  Description of Artificial Sequence: Synthetic oligonucleotide
  Sense strand starting at position 2598 of SEQ ID NO: 1244070
cacauuacgcuuggucaau

SEQ ID NO: 1462797 - RNA, 19 nt, Artificial Sequence
  Description of Artificial Sequence: Synthetic oligonucleotide
  Antisense strand to SEQ ID NO: 1462796
auugaccaagcguaaugug

SEQ ID NO: 1462798 - RNA, 19 nt, Artificial Sequence
  Description of Artificial Sequence: Synthetic oligonucleotide
  Sense strand starting at position 2599 of SEQ ID NO: 1244070
acauuacgcuuggucaauu

SEQ ID NO: 1462799 - RNA, 19 nt, Artificial Sequence
  Description of Artificial Sequence: Synthetic oligonucleotide
  Antisense strand to SEQ ID NO: 1462798
aauugaccaagcguaaugu

SEQ ID NO: 1462800 - RNA, 19 nt, Artificial Sequence
  Description of Artificial Sequence: Synthetic oligonucleotide
  Sense strand starting at position 2600 of SEQ ID NO: 1244070
cauuacgcuuggucaauuu

SEQ ID NO: 1462801 - RNA, 19 nt, Artificial Sequence
  Description of Artificial Sequence: Synthetic oligonucleotide
  Antisense strand to SEQ ID NO: 1462800
aaauugaccaagcguaaug

SEQ ID NO: 1462802 - RNA, 19 nt, Artificial Sequence
  Description of Artificial Sequence: Synthetic oligonucleotide
  Sense strand starting at position 2813 of SEQ ID NO: 1244070
gacggaucuccauauccua

SEQ ID NO: 1462803 - RNA, 19 nt, Artificial Sequence
  Description of Artificial Sequence: Synthetic oligonucleotide
  Antisense strand to SEQ ID NO: 1462802
uaggauauggagauccguc

SEQ ID NO: 1462804 - RNA, 19 nt, Artificial Sequence
  Description of Artificial Sequence: Synthetic oligonucleotide
  Sense strand starting at position 3426 of SEQ ID NO: 1244070
ggacaacuaugugcaggua

SEQ ID NO: 1462805 - RNA, 19 nt, Artificial Sequence
  Description of Artificial Sequence: Synthetic oligonucleotide
  Antisense strand to SEQ ID NO: 1462804
uaccugcacauaguugucc

SEQ ID NO: 1462806 - RNA, 19 nt, Artificial Sequence
  Description of Artificial Sequence: Synthetic oligonucleotide
  Sense strand starting at position 3543 of SEQ ID NO: 1244070
cugggccuuggcugagaaa

SEQ ID NO: 1462807 - RNA, 19 nt, Artificial Sequence
  Description of Artificial Sequence: Synthetic oligonucleotide
  Antisense strand to SEQ ID NO: 1462806
uuucucagccaaggcccag

SEQ ID NO: 1462808 - RNA, 19 nt, Artificial Sequence
  Description of Artificial Sequence: Synthetic oligonucleotide
  Sense strand starting at position 3544 of SEQ ID NO: 1244070
ugggccuuggcugagaaau

SEQ ID NO: 1462809 - RNA, 19 nt, Artificial Sequence
  Description of Artificial Sequence: Synthetic oligonucleotide
  Antisense strand to SEQ ID NO: 1462808
auuucucagccaaggccca

SEQ ID NO: 1462810 - RNA, 19 nt, Artificial Sequence
  Description of Artificial Sequence: Synthetic oligonucleotide
  Sense strand starting at position 3651 of SEQ ID NO: 1244070
cucucagagccucagagau

SEQ ID NO: 1462811 - RNA, 19 nt, Artificial Sequence
  Description of Artificial Sequence: Synthetic oligonucleotide
  Antisense strand to SEQ ID NO: 1462810
aucucugaggcucugagag

SEQ ID NO: 1462812 - RNA, 19 nt, Artificial Sequence
  Description of Artificial Sequence: Synthetic oligonucleotide
  Sense strand starting at position 3661 of SEQ ID NO: 1244070
cucagagaugccugggaca

SEQ ID NO: 1462813 - RNA, 19 nt, Artificial Sequence
  Description of Artificial Sequence: Synthetic oligonucleotide
  Antisense strand to SEQ ID NO: 1462812
ugucccaggcaucucugag

SEQ ID NO: 1462814 - RNA, 19 nt, Artificial Sequence
  Description of Artificial Sequence: Synthetic oligonucleotide
  Sense strand starting at position 3663 of SEQ ID NO: 1244070
cagagaugccugggacaga

SEQ ID NO: 1462815 - RNA, 19 nt, Artificial Sequence
  Description of Artificial Sequence: Synthetic oligonucleotide
  Antisense strand to SEQ ID NO: 1462814
ucugucccaggcaucucug

SEQ ID NO: 1462816 - RNA, 19 nt, Artificial Sequence
  Description of Artificial Sequence: Synthetic oligonucleotide
  Sense strand starting at position 3684 of SEQ ID NO: 1244070
gugcgauuccauccuguuc

SEQ ID NO: 1462817 - RNA, 19 nt, Artificial Sequence
  Description of Artificial Sequence: Synthetic oligonucleotide
  Antisense strand to SEQ ID NO: 1462816
gaacaggauggaaucgcac

SEQ ID NO: 1462818 - RNA, 19 nt, Artificial Sequence
  Description of Artificial Sequence: Synthetic oligonucleotide
  Sense strand starting at position 3729 of SEQ ID NO: 1244070
cugaguucccacgggucaa

SEQ ID NO: 1462819 - RNA, 19 nt, Artificial Sequence
  Description of Artificial Sequence: Synthetic oligonucleotide
  Antisense strand to SEQ ID NO: 1462818
uugacccgugggaacucag

SEQ ID NO: 1462820 - RNA, 19 nt, Artificial Sequence
  Description of Artificial Sequence: Synthetic oligonucleotide
  Sense strand starting at position 3730 of SEQ ID NO: 1244070
ugaguucccacgggucaau

SEQ ID NO: 1462821 - RNA, 19 nt, Artificial Sequence
  Description of Artificial Sequence: Synthetic oligonucleotide
  Antisense strand to SEQ ID NO: 1462820
auugacccgugggaacuca

SEQ ID NO: 1462822 - RNA, 19 nt, Artificial Sequence
  Description of Artificial Sequence: Synthetic oligonucleotide
  Sense strand starting at position 3776 of SEQ ID NO: 1244070
acagaugcuggcgaucauu

SEQ ID NO: 1462823 - RNA, 19 nt, Artificial Sequence
  Description of Artificial Sequence: Synthetic oligonucleotide
  Antisense strand to SEQ ID NO: 1462822
aaugaucgccagcaucugu

SEQ ID NO: 1462824 - RNA, 19 nt, Artificial Sequence
  Description of Artificial Sequence: Synthetic oligonucleotide
  Sense strand starting at position 3779 of SEQ ID NO: 1244070
gaugcuggcgaucauucua

SEQ ID NO: 1462825 - RNA, 19 nt, Artificial Sequence
  Description of Artificial Sequence: Synthetic oligonucleotide
  Antisense strand to SEQ ID NO: 1462824
uagaaugaucgccagcauc

SEQ ID NO: 1462826 - RNA, 19 nt, Artificial Sequence
  Description of Artificial Sequence: Synthetic oligonucleotide
  Sense strand starting at position 3875 of SEQ ID NO: 1244070
gggcucuuucccugaguuu

SEQ ID NO: 1462827 - RNA, 19 nt, Artificial Sequence
  Description of Artificial Sequence: Synthetic oligonucleotide
  Antisense strand to SEQ ID NO: 1462826
aaacucagggaaagagccc

SEQ ID NO: 1462828 - RNA, 19 nt, Artificial Sequence
  Description of Artificial Sequence: Synthetic oligonucleotide
  Sense strand starting at position 283 of SEQ ID NO: 1244071
uggauugucugucuaugga

SEQ ID NO: 1462829 - RNA, 19 nt, Artificial Sequence
  Description of Artificial Sequence: Synthetic oligonucleotide
  Antisense strand to SEQ ID NO: 1462828
uccauagacagacaaucca

SEQ ID NO: 1462830 - RNA, 19 nt, Artificial Sequence
  Description of Artificial Sequence: Synthetic oligonucleotide
  Sense strand starting at position 290 of SEQ ID NO: 1244071
ucugucuauggaggaaauu

SEQ ID NO: 1462831 - RNA, 19 nt, Artificial Sequence
  Description of Artificial Sequence: Synthetic oligonucleotide
  Antisense strand to SEQ ID NO: 1462830
aauuuccuccauagacaga

SEQ ID NO: 1462832 - RNA, 19 nt, Artificial Sequence
  Description of Artificial Sequence: Synthetic oligonucleotide
  Sense strand starting at position 299 of SEQ ID NO: 1244071
ggaggaaauuuggauuguc

SEQ ID NO: 1462833 - RNA, 19 nt, Artificial Sequence
  Description of Artificial Sequence: Synthetic oligonucleotide
  Antisense strand to SEQ ID NO: 1462832
gacaauccaaauuuccucc

SEQ ID NO: 1462834 - RNA, 19 nt, Artificial Sequence
  Description of Artificial Sequence: Synthetic oligonucleotide
  Sense strand starting at position 307 of SEQ ID NO: 1244071
uuuggauugucugucuaua

SEQ ID NO: 1462835 - RNA, 19 nt, Artificial Sequence
  Description of Artificial Sequence: Synthetic oligonucleotide
  Antisense strand to SEQ ID NO: 1462834
uauagacagacaauccaaa

SEQ ID NO: 1462836 - RNA, 19 nt, Artificial Sequence
  Description of Artificial Sequence: Synthetic oligonucleotide
  Sense strand starting at position 309 of SEQ ID NO: 1244071
uggauugucugucuauaga

SEQ ID NO: 1462837 - RNA, 19 nt, Artificial Sequence
  Description of Artificial Sequence: Synthetic oligonucleotide
  Antisense strand to SEQ ID NO: 1462836
ucuauagacagacaaucca

SEQ ID NO: 1462838 - RNA, 19 nt, Artificial Sequence
  Description of Artificial Sequence: Synthetic oligonucleotide
  Sense strand starting at position 333 of SEQ ID NO: 1244071
cugucugucugucuacaga

SEQ ID NO: 1462839 - RNA, 19 nt, Artificial Sequence
  Description of Artificial Sequence: Synthetic oligonucleotide
  Antisense strand to SEQ ID NO: 1462838
ucuguagacagacagacag

SEQ ID NO: 1462840 - RNA, 19 nt, Artificial Sequence
  Description of Artificial Sequence: Synthetic oligonucleotide
  Sense strand starting at position 1220 of SEQ ID NO: 1244071
gcugcaaauggguauuaaa

SEQ ID NO: 1462841 - RNA, 19 nt, Artificial Sequence
  Description of Artificial Sequence: Synthetic oligonucleotide
  Antisense strand to SEQ ID NO: 1462840
uuuaauacccauuugcagc

SEQ ID NO: 1462842 - RNA, 19 nt, Artificial Sequence
  Description of Artificial Sequence: Synthetic oligonucleotide
  Sense strand starting at position 1253 of SEQ ID NO: 1244071
gcaauuauuguggguacua

SEQ ID NO: 1462843 - RNA, 19 nt, Artificial Sequence
  Description of Artificial Sequence: Synthetic oligonucleotide
  Antisense strand to SEQ ID NO: 1462842
uaguacccacaauaauugc

SEQ ID NO: 1462844 - RNA, 19 nt, Artificial Sequence
  Description of Artificial Sequence: Synthetic oligonucleotide
  Sense strand starting at position 1254 of SEQ ID NO: 1244071
caauuauuguggguacuaa

SEQ ID NO: 1462845 - RNA, 19 nt, Artificial Sequence
  Description of Artificial Sequence: Synthetic oligonucleotide
  Antisense strand to SEQ ID NO: 1462844
uuaguacccacaauaauug

SEQ ID NO: 1462846 - RNA, 19 nt, Artificial Sequence
  Description of Artificial Sequence: Synthetic oligonucleotide
  Sense strand starting at position 1365 of SEQ ID NO: 1244071
uuauuaucacugcaggguu

SEQ ID NO: 1462847 - RNA, 19 nt, Artificial Sequence
  Description of Artificial Sequence: Synthetic oligonucleotide
  Antisense strand to SEQ ID NO: 1462846
aacccugcagugauaauaa

SEQ ID NO: 1462848 - RNA, 19 nt, Artificial Sequence
  Description of Artificial Sequence: Synthetic oligonucleotide
  Sense strand starting at position 1490 of SEQ ID NO: 1244071
gucacuuguccuggacuca

SEQ ID NO: 1462849 - RNA, 19 nt, Artificial Sequence
  Description of Artificial Sequence: Synthetic oligonucleotide
  Antisense strand to SEQ ID NO: 1462848
ugaguccaggacaagugac

SEQ ID NO: 1462850 - RNA, 19 nt, Artificial Sequence
  Description of Artificial Sequence: Synthetic oligonucleotide
  Sense strand starting at position 1600 of SEQ ID NO: 1244071
agcugaucauaggcucaaa

SEQ ID NO: 1462851 - RNA, 19 nt, Artificial Sequence
  Description of Artificial Sequence: Synthetic oligonucleotide
  Antisense strand to SEQ ID NO: 1462850
uuugagccuaugaucagcu

SEQ ID NO: 1462852 - RNA, 19 nt, Artificial Sequence
  Description of Artificial Sequence: Synthetic oligonucleotide
  Sense strand starting at position 1603 of SEQ ID NO: 1244071
ugaucauaggcucaaaguu

SEQ ID NO: 1462853 - RNA, 19 nt, Artificial Sequence
  Description of Artificial Sequence: Synthetic oligonucleotide
  Antisense strand to SEQ ID NO: 1462852
aacuuugagccuaugauca

SEQ ID NO: 1462854 - RNA, 19 nt, Artificial Sequence
  Description of Artificial Sequence: Synthetic oligonucleotide
  Sense strand starting at position 1757 of SEQ ID NO: 1244071
uggugaccucacuagcuua

SEQ ID NO: 1462855 - RNA, 19 nt, Artificial Sequence
  Description of Artificial Sequence: Synthetic oligonucleotide
  Antisense strand to SEQ ID NO: 1462854
uaagcuagugaggucacca

SEQ ID NO: 1462856 - RNA, 19 nt, Artificial Sequence
  Description of Artificial Sequence: Synthetic oligonucleotide
  Sense strand starting at position 1938 of SEQ ID NO: 1244071
cuuuguguugcccauugga

SEQ ID NO: 1462857 - RNA, 19 nt, Artificial Sequence
  Description of Artificial Sequence: Synthetic oligonucleotide
  Antisense strand to SEQ ID NO: 1462856
uccaaugggcaacacaaag

SEQ ID NO: 1462858 - RNA, 19 nt, Artificial Sequence
  Description of Artificial Sequence: Synthetic oligonucleotide
  Sense strand starting at position 2120 of SEQ ID NO: 1244071
gaauguggguuccugagca

SEQ ID NO: 1462859 - RNA, 19 nt, Artificial Sequence
  Description of Artificial Sequence: Synthetic oligonucleotide
  Antisense strand to SEQ ID NO: 1462858
ugcucaggaacccacauuc

SEQ ID NO: 1462860 - RNA, 19 nt, Artificial Sequence
  Description of Artificial Sequence: Synthetic oligonucleotide
  Sense strand starting at position 2124 of SEQ ID NO: 1244071
guggguuccugagcacaga

SEQ ID NO: 1462861 - RNA, 19 nt, Artificial Sequence
  Description of Artificial Sequence: Synthetic oligonucleotide
  Antisense strand to SEQ ID NO: 1462860
ucugugcucaggaacccac

SEQ ID NO: 1462862 - RNA, 19 nt, Artificial Sequence
  Description of Artificial Sequence: Synthetic oligonucleotide
  Sense strand starting at position 2458 of SEQ ID NO: 1244071
ugguacaacuguccuguua

SEQ ID NO: 1462863 - RNA, 19 nt, Artificial Sequence
  Description of Artificial Sequence: Synthetic oligonucleotide
  Antisense strand to SEQ ID NO: 1462862
uaacaggacaguuguacca

SEQ ID NO: 1462864 - RNA, 19 nt, Artificial Sequence
  Description of Artificial Sequence: Synthetic oligonucleotide
  Sense strand starting at position 2471 of SEQ ID NO: 1244071
cuguuaaugcgugaaccac

SEQ ID NO: 1462865 - RNA, 19 nt, Artificial Sequence
  Description of Artificial Sequence: Synthetic oligonucleotide
  Antisense strand to SEQ ID NO: 1462864
gugguucacgcauuaacag

SEQ ID NO: 1462866 - RNA, 19 nt, Artificial Sequence
  Description of Artificial Sequence: Synthetic oligonucleotide
  Sense strand starting at position 2542 of SEQ ID NO: 1244071
accgcaaguugaucugaaa

SEQ ID NO: 1462867 - RNA, 19 nt, Artificial Sequence
  Description of Artificial Sequence: Synthetic oligonucleotide
  Antisense strand to SEQ ID NO: 1462866
uuucagaucaacuugcggu

SEQ ID NO: 1462868 - RNA, 19 nt, Artificial Sequence
  Description of Artificial Sequence: Synthetic oligonucleotide
  Sense strand starting at position 2545 of SEQ ID NO: 1244071
gcaaguugaucugaaauuu

SEQ ID NO: 1462869 - RNA, 19 nt, Artificial Sequence
  Description of Artificial Sequence: Synthetic oligonucleotide
  Antisense strand to SEQ ID NO: 1462868
aaauuucagaucaacuugc

SEQ ID NO: 1462870 - RNA, 19 nt, Artificial Sequence
  Description of Artificial Sequence: Synthetic oligonucleotide
  Sense strand starting at position 2594 of SEQ ID NO: 1244071
ccuguugucuaaucugagu

SEQ ID NO: 1462871 - RNA, 19 nt, Artificial Sequence
  Description of Artificial Sequence: Synthetic oligonucleotide
  Antisense strand to SEQ ID NO: 1462870
acucagauuagacaacagg

SEQ ID NO: 1462872 - RNA, 19 nt, Artificial Sequence
  Description of Artificial Sequence: Synthetic oligonucleotide
  Sense strand starting at position 2605 of SEQ ID NO: 1244071
aucugagucccucacauua

SEQ ID NO: 1462873 - RNA, 19 nt, Artificial Sequence
  Description of Artificial Sequence: Synthetic oligonucleotide
  Antisense strand to SEQ ID NO: 1462872
uaaugugagggacucagau

SEQ ID NO: 1462874 - RNA, 19 nt, Artificial Sequence
  Description of Artificial Sequence: Synthetic oligonucleotide
  Sense strand starting at position 2616 of SEQ ID NO: 1244071
ucacauuacgcuuggucaa

SEQ ID NO: 1462875 - RNA, 19 nt, Artificial Sequence
  Description of Artificial Sequence: Synthetic oligonucleotide
  Antisense strand to SEQ ID NO: 1462874
uugaccaagcguaauguga

SEQ ID NO: 1462876 - RNA, 19 nt, Artificial Sequence
  Description of Artificial Sequence: Synthetic oligonucleotide
  Sense strand starting at position 2617 of SEQ ID NO: 1244071
cacauuacgcuuggucaau

SEQ ID NO: 1462877 - RNA, 19 nt, Artificial Sequence
  Description of Artificial Sequence: Synthetic oligonucleotide
  Antisense strand to SEQ ID NO: 1462876
auugaccaagcguaaugug

SEQ ID NO: 1462878 - RNA, 19 nt, Artificial Sequence
  Description of Artificial Sequence: Synthetic oligonucleotide
  Sense strand starting at position 2618 of SEQ ID NO: 1244071
acauuacgcuuggucaauu

SEQ ID NO: 1462879 - RNA, 19 nt, Artificial Sequence
  Description of Artificial Sequence: Synthetic oligonucleotide
  Antisense strand to SEQ ID NO: 1462878
aauugaccaagcguaaugu

SEQ ID NO: 1462880 - RNA, 19 nt, Artificial Sequence
  Description of Artificial Sequence: Synthetic oligonucleotide
  Sense strand starting at position 2619 of SEQ ID NO: 1244071
cauuacgcuuggucaauuu

SEQ ID NO: 1462881 - RNA, 19 nt, Artificial Sequence
  Description of Artificial Sequence: Synthetic oligonucleotide
  Antisense strand to SEQ ID NO: 1462880
aaauugaccaagcguaaug

SEQ ID NO: 1462882 - RNA, 19 nt, Artificial Sequence
  Description of Artificial Sequence: Synthetic oligonucleotide
  Sense strand starting at position 2832 of SEQ ID NO: 1244071
gacggaucuccauauccua

SEQ ID NO: 1462883 - RNA, 19 nt, Artificial Sequence
  Description of Artificial Sequence: Synthetic oligonucleotide
  Antisense strand to SEQ ID NO: 1462882
uaggauauggagauccguc

SEQ ID NO: 1462884 - RNA, 19 nt, Artificial Sequence
  Description of Artificial Sequence: Synthetic oligonucleotide
  Sense strand starting at position 3445 of SEQ ID NO: 1244071
ggacaacuaugugcaggua

SEQ ID NO: 1462885 - RNA, 19 nt, Artificial Sequence
  Description of Artificial Sequence: Synthetic oligonucleotide
  Antisense strand to SEQ ID NO: 1462884
uaccugcacauaguugucc

SEQ ID NO: 1462886 - RNA, 19 nt, Artificial Sequence
  Description of Artificial Sequence: Synthetic oligonucleotide
  Sense strand starting at position 3562 of SEQ ID NO: 1244071
cugggccuuggcugagaaa

SEQ ID NO: 1462887 - RNA, 19 nt, Artificial Sequence
  Description of Artificial Sequence: Synthetic oligonucleotide
  Antisense strand to SEQ ID NO: 1462886
uuucucagccaaggcccag

SEQ ID NO: 1462888 - RNA, 19 nt, Artificial Sequence
  Description of Artificial Sequence: Synthetic oligonucleotide
  Sense strand starting at position 3563 of SEQ ID NO: 1244071
ugggccuuggcugagaaau

SEQ ID NO: 1462889 - RNA, 19 nt, Artificial Sequence
  Description of Artificial Sequence: Synthetic oligonucleotide
  Antisense strand to SEQ ID NO: 1462888
auuucucagccaaggccca

SEQ ID NO: 1462890 - RNA, 19 nt, Artificial Sequence
  Description of Artificial Sequence: Synthetic oligonucleotide
  Sense strand starting at position 3670 of SEQ ID NO: 1244071
cucucagagccucagagau

SEQ ID NO: 1462891 - RNA, 19 nt, Artificial Sequence
  Description of Artificial Sequence: Synthetic oligonucleotide
  Antisense strand to SEQ ID NO: 1462890
aucucugaggcucugagag

SEQ ID NO: 1462892 - RNA, 19 nt, Artificial Sequence
  Description of Artificial Sequence: Synthetic oligonucleotide
  Sense strand starting at position 3680 of SEQ ID NO: 1244071
cucagagaugccugggaca

SEQ ID NO: 1462893 - RNA, 19 nt, Artificial Sequence
  Description of Artificial Sequence: Synthetic oligonucleotide
  Antisense strand to SEQ ID NO: 1462892
ugucccaggcaucucugag

SEQ ID NO: 1462894 - RNA, 19 nt, Artificial Sequence
  Description of Artificial Sequence: Synthetic oligonucleotide
  Sense strand starting at position 3682 of SEQ ID NO: 1244071
cagagaugccugggacaga

SEQ ID NO: 1462895 - RNA, 19 nt, Artificial Sequence
  Description of Artificial Sequence: Synthetic oligonucleotide
  Antisense strand to SEQ ID NO: 1462894
ucugucccaggcaucucug

SEQ ID NO: 1462896 - RNA, 19 nt, Artificial Sequence
  Description of Artificial Sequence: Synthetic oligonucleotide
  Sense strand starting at position 3703 of SEQ ID NO: 1244071
gugcgauuccauccuguuc

SEQ ID NO: 1462897 - RNA, 19 nt, Artificial Sequence
  Description of Artificial Sequence: Synthetic oligonucleotide
  Antisense strand to SEQ ID NO: 1462896
gaacaggauggaaucgcac

SEQ ID NO: 1462898 - RNA, 19 nt, Artificial Sequence
  Description of Artificial Sequence: Synthetic oligonucleotide
  Sense strand starting at position 3748 of SEQ ID NO: 1244071
cugaguucccacgggucaa

SEQ ID NO: 1462899 - RNA, 19 nt, Artificial Sequence
  Description of Artificial Sequence: Synthetic oligonucleotide
  Antisense strand to SEQ ID NO: 1462898
uugacccgugggaacucag

SEQ ID NO: 1462900 - RNA, 19 nt, Artificial Sequence
  Description of Artificial Sequence: Synthetic oligonucleotide
  Sense strand starting at position 3749 of SEQ ID NO: 1244071
ugaguucccacgggucaau

SEQ ID NO: 1462901 - RNA, 19 nt, Artificial Sequence
  Description of Artificial Sequence: Synthetic oligonucleotide
  Antisense strand to SEQ ID NO: 1462900
auugacccgugggaacuca

SEQ ID NO: 1462902 - RNA, 19 nt, Artificial Sequence
  Description of Artificial Sequence: Synthetic oligonucleotide
  Sense strand starting at position 3795 of SEQ ID NO: 1244071
acagaugcuggcgaucauu

SEQ ID NO: 1462903 - RNA, 19 nt, Artificial Sequence
  Description of Artificial Sequence: Synthetic oligonucleotide
  Antisense strand to SEQ ID NO: 1462902
aaugaucgccagcaucugu

SEQ ID NO: 1462904 - RNA, 19 nt, Artificial Sequence
  Description of Artificial Sequence: Synthetic oligonucleotide
  Sense strand starting at position 3798 of SEQ ID NO: 1244071
gaugcuggcgaucauucua

SEQ ID NO: 1462905 - RNA, 19 nt, Artificial Sequence
  Description of Artificial Sequence: Synthetic oligonucleotide
  Antisense strand to SEQ ID NO: 1462904
uagaaugaucgccagcauc

SEQ ID NO: 1462906 - RNA, 19 nt, Artificial Sequence
  Description of Artificial Sequence: Synthetic oligonucleotide
  Sense strand starting at position 3894 of SEQ ID NO: 1244071
gggcucuuucccugaguuu

SEQ ID NO: 1462907 - RNA, 19 nt, Artificial Sequence
  Description of Artificial Sequence: Synthetic oligonucleotide
  Antisense strand to SEQ ID NO: 1462906
aaacucagggaaagagccc

SEQ ID NO: 1462908 - RNA, 19 nt, Artificial Sequence
  Description of Artificial Sequence: Synthetic oligonucleotide
  Sense strand starting at position 28 of SEQ ID NO: 1244072
uagagaaauugguuuagca

SEQ ID NO: 1462909 - RNA, 19 nt, Artificial Sequence
  Description of Artificial Sequence: Synthetic oligonucleotide
  Antisense strand to SEQ ID NO: 1462908
ugcuaaaccaauuucucua

SEQ ID NO: 1462910 - RNA, 19 nt, Artificial Sequence
  Description of Artificial Sequence: Synthetic oligonucleotide
  Sense strand starting at position 30 of SEQ ID NO: 1244072
gagaaauugguuuagcagu

SEQ ID NO: 1462911 - RNA, 19 nt, Artificial Sequence
  Description of Artificial Sequence: Synthetic oligonucleotide
  Antisense strand to SEQ ID NO: 1462910
acugcuaaaccaauuucuc

SEQ ID NO: 1462912 - RNA, 19 nt, Artificial Sequence
  Description of Artificial Sequence: Synthetic oligonucleotide
  Sense strand starting at position 97 of SEQ ID NO: 1244072
cacagauacgaguauucuc

SEQ ID NO: 1462913 - RNA, 19 nt, Artificial Sequence
  Description of Artificial Sequence: Synthetic oligonucleotide
  Antisense strand to SEQ ID NO: 1462912
gagaauacucguaucugug

SEQ ID NO: 1462914 - RNA, 19 nt, Artificial Sequence
  Description of Artificial Sequence: Synthetic oligonucleotide
  Sense strand starting at position 100 of SEQ ID NO: 1244072
agauacgaguauucucauu

SEQ ID NO: 1462915 - RNA, 19 nt, Artificial Sequence
  Description of Artificial Sequence: Synthetic oligonucleotide
  Antisense strand to SEQ ID NO: 1462914
aaugagaauacucguaucu

SEQ ID NO: 1462916 - RNA, 19 nt, Artificial Sequence
  Description of Artificial Sequence: Synthetic oligonucleotide
  Sense strand starting at position 121 of SEQ ID NO: 1244072
uggugaagugaagguuaaa

SEQ ID NO: 1462917 - RNA, 19 nt, Artificial Sequence
  Description of Artificial Sequence: Synthetic oligonucleotide
  Antisense strand to SEQ ID NO: 1462916
uuuaaccuucacuucacca

SEQ ID NO: 1462918 - RNA, 19 nt, Artificial Sequence
  Description of Artificial Sequence: Synthetic oligonucleotide
  Sense strand starting at position 156 of SEQ ID NO: 1244072
accagagguaaugguauaa

SEQ ID NO: 1462919 - RNA, 19 nt, Artificial Sequence
  Description of Artificial Sequence: Synthetic oligonucleotide
  Antisense strand to SEQ ID NO: 1462918
uuauaccauuaccucuggu

SEQ ID NO: 1462920 - RNA, 19 nt, Artificial Sequence
  Description of Artificial Sequence: Synthetic oligonucleotide
  Sense strand starting at position 228 of SEQ ID NO: 1244072
agaaauagaaagcguaguu

SEQ ID NO: 1462921 - RNA, 19 nt, Artificial Sequence
  Description of Artificial Sequence: Synthetic oligonucleotide
  Antisense strand to SEQ ID NO: 1462920
aacuacgcuuucuauuucu

SEQ ID NO: 1462922 - RNA, 19 nt, Artificial Sequence
  Description of Artificial Sequence: Synthetic oligonucleotide
  Sense strand starting at position 394 of SEQ ID NO: 1244072
auguauugguaaucauaug

SEQ ID NO: 1462923 - RNA, 19 nt, Artificial Sequence
  Description of Artificial Sequence: Synthetic oligonucleotide
  Antisense strand to SEQ ID NO: 1462922
cauaugauuaccaauacau

SEQ ID NO: 1462924 - RNA, 19 nt, Artificial Sequence
  Description of Artificial Sequence: Synthetic oligonucleotide
  Sense strand starting at position 400 of SEQ ID NO: 1244072
ugguaaucauaugcuuaca

SEQ ID NO: 1462925 - RNA, 19 nt, Artificial Sequence
  Description of Artificial Sequence: Synthetic oligonucleotide
  Antisense strand to SEQ ID NO: 1462924
uguaagcauaugauuacca

SEQ ID NO: 1462926 - RNA, 19 nt, Artificial Sequence
  Description of Artificial Sequence: Synthetic oligonucleotide
  Sense strand starting at position 433 of SEQ ID NO: 1244072
guagguugucaguaaugag

SEQ ID NO: 1462927 - RNA, 19 nt, Artificial Sequence
  Description of Artificial Sequence: Synthetic oligonucleotide
  Antisense strand to SEQ ID NO: 1462926
cucauuacugacaaccuac

SEQ ID NO: 1462928 - RNA, 19 nt, Artificial Sequence
  Description of Artificial Sequence: Synthetic oligonucleotide
  Sense strand starting at position 489 of SEQ ID NO: 1244072
caggcuaaugacuaguaau

SEQ ID NO: 1462929 - RNA, 19 nt, Artificial Sequence
  Description of Artificial Sequence: Synthetic oligonucleotide
  Antisense strand to SEQ ID NO: 1462928
auuacuagucauuagccug

SEQ ID NO: 1462930 - RNA, 19 nt, Artificial Sequence
  Description of Artificial Sequence: Synthetic oligonucleotide
  Sense strand starting at position 875 of SEQ ID NO: 1244072
ucaaaugggcauuguaaua

SEQ ID NO: 1462931 - RNA, 19 nt, Artificial Sequence
  Description of Artificial Sequence: Synthetic oligonucleotide
  Antisense strand to SEQ ID NO: 1462930
uauuacaaugcccauuuga

SEQ ID NO: 1462932 - RNA, 19 nt, Artificial Sequence
  Description of Artificial Sequence: Synthetic oligonucleotide
  Sense strand starting at position 921 of SEQ ID NO: 1244072
cugugauuggaauaauugu

SEQ ID NO: 1462933 - RNA, 19 nt, Artificial Sequence
  Description of Artificial Sequence: Synthetic oligonucleotide
  Antisense strand to SEQ ID NO: 1462932
acaauuauuccaaucacag

SEQ ID NO: 1462934 - RNA, 19 nt, Artificial Sequence
  Description of Artificial Sequence: Synthetic oligonucleotide
  Sense strand starting at position 928 of SEQ ID NO: 1244072
uggaauaauugucuucucu

SEQ ID NO: 1462935 - RNA, 19 nt, Artificial Sequence
  Description of Artificial Sequence: Synthetic oligonucleotide
  Antisense strand to SEQ ID NO: 1462934
agagaagacaauuauucca

SEQ ID NO: 1462936 - RNA, 19 nt, Artificial Sequence
  Description of Artificial Sequence: Synthetic oligonucleotide
  Sense strand starting at position 939 of SEQ ID NO: 1244072
ucuucucuaguaggaaaca

SEQ ID NO: 1462937 - RNA, 19 nt, Artificial Sequence
  Description of Artificial Sequence: Synthetic oligonucleotide
  Antisense strand to SEQ ID NO: 1462936
uguuuccuacuagagaaga

SEQ ID NO: 1462938 - RNA, 19 nt, Artificial Sequence
  Description of Artificial Sequence: Synthetic oligonucleotide
  Sense strand starting at position 975 of SEQ ID NO: 1244072
aaaguaugauaggcaaauc

SEQ ID NO: 1462939 - RNA, 19 nt, Artificial Sequence
  Description of Artificial Sequence: Synthetic oligonucleotide
  Antisense strand to SEQ ID NO: 1462938
gauuugccuaucauacuuu

SEQ ID NO: 1462940 - RNA, 19 nt, Artificial Sequence
  Description of Artificial Sequence: Synthetic oligonucleotide
  Sense strand starting at position 1005 of SEQ ID NO: 1244072
agaauugaguuucuuagac

SEQ ID NO: 1462941 - RNA, 19 nt, Artificial Sequence
  Description of Artificial Sequence: Synthetic oligonucleotide
  Antisense strand to SEQ ID NO: 1462940
gucuaagaaacucaauucu

SEQ ID NO: 1462942 - RNA, 19 nt, Artificial Sequence
  Description of Artificial Sequence: Synthetic oligonucleotide
  Sense strand starting at position 1097 of SEQ ID NO: 1244072
uuuggaaaguaguuucuau

SEQ ID NO: 1462943 - RNA, 19 nt, Artificial Sequence
  Description of Artificial Sequence: Synthetic oligonucleotide
  Antisense strand to SEQ ID NO: 1462942
auagaaacuacuuuccaaa

SEQ ID NO: 1462944 - RNA, 19 nt, Artificial Sequence
  Description of Artificial Sequence: Synthetic oligonucleotide
  Sense strand starting at position 1107 of SEQ ID NO: 1244072
aguuucuaugcggcuguaa

SEQ ID NO: 1462945 - RNA, 19 nt, Artificial Sequence
  Description of Artificial Sequence: Synthetic oligonucleotide
  Antisense strand to SEQ ID NO: 1462944
uuacagccgcauagaaacu

SEQ ID NO: 1462946 - RNA, 19 nt, Artificial Sequence
  Description of Artificial Sequence: Synthetic oligonucleotide
  Sense strand starting at position 1108 of SEQ ID NO: 1244072
guuucuaugcggcuguaaa

SEQ ID NO: 1462947 - RNA, 19 nt, Artificial Sequence
  Description of Artificial Sequence: Synthetic oligonucleotide
  Antisense strand to SEQ ID NO: 1462946
uuuacagccgcauagaaac

SEQ ID NO: 1462948 - RNA, 19 nt, Artificial Sequence
  Description of Artificial Sequence: Synthetic oligonucleotide
  Sense strand starting at position 1165 of SEQ ID NO: 1244072
gcucuuguugaucaucaua

SEQ ID NO: 1462949 - RNA, 19 nt, Artificial Sequence
  Description of Artificial Sequence: Synthetic oligonucleotide
  Antisense strand to SEQ ID NO: 1462948
uaugaugaucaacaagagc

SEQ ID NO: 1462950 - RNA, 19 nt, Artificial Sequence
  Description of Artificial Sequence: Synthetic oligonucleotide
  Sense strand starting at position 1181 of SEQ ID NO: 1244072
auaauccacgaaugaguuu

SEQ ID NO: 1462951 - RNA, 19 nt, Artificial Sequence
  Description of Artificial Sequence: Synthetic oligonucleotide
  Antisense strand to SEQ ID NO: 1462950
aaacucauucguggauuau

SEQ ID NO: 1462952 - RNA, 19 nt, Artificial Sequence
  Description of Artificial Sequence: Synthetic oligonucleotide
  Sense strand starting at position 1211 of SEQ ID NO: 1244072
acuuuauccgacuauaguu

SEQ ID NO: 1462953 - RNA, 19 nt, Artificial Sequence
  Description of Artificial Sequence: Synthetic oligonucleotide
  Antisense strand to SEQ ID NO: 1462952
aacuauagucggauaaagu

SEQ ID NO: 1462954 - RNA, 19 nt, Artificial Sequence
  Description of Artificial Sequence: Synthetic oligonucleotide
  Sense strand starting at position 1252 of SEQ ID NO: 1244072
ugucaaaucacaggaaggu

SEQ ID NO: 1462955 - RNA, 19 nt, Artificial Sequence
  Description of Artificial Sequence: Synthetic oligonucleotide
  Antisense strand to SEQ ID NO: 1462954
accuuccugugauuugaca

SEQ ID NO: 1462956 - RNA, 19 nt, Artificial Sequence
  Description of Artificial Sequence: Synthetic oligonucleotide
  Sense strand starting at position 2042 of SEQ ID NO: 1244072
gcguguuuccgccuugaga

SEQ ID NO: 1462957 - RNA, 19 nt, Artificial Sequence
  Description of Artificial Sequence: Synthetic oligonucleotide
  Antisense strand to SEQ ID NO: 1462956
ucucaaggcggaaacacgc

SEQ ID NO: 1462958 - RNA, 19 nt, Artificial Sequence
  Description of Artificial Sequence: Synthetic oligonucleotide
  Sense strand starting at position 2043 of SEQ ID NO: 1244072
cguguuuccgccuugagag

SEQ ID NO: 1462959 - RNA, 19 nt, Artificial Sequence
  Description of Artificial Sequence: Synthetic oligonucleotide
  Antisense strand to SEQ ID NO: 1462958
cucucaaggcggaaacacg

SEQ ID NO: 1462960 - RNA, 19 nt, Artificial Sequence
  Description of Artificial Sequence: Synthetic oligonucleotide
  Sense strand starting at position 2106 of SEQ ID NO: 1244072
ugaucaauucguuaucuua

SEQ ID NO: 1462961 - RNA, 19 nt, Artificial Sequence
  Description of Artificial Sequence: Synthetic oligonucleotide
  Antisense strand to SEQ ID NO: 1462960
uaagauaacgaauugauca

SEQ ID NO: 1462962 - RNA, 19 nt, Artificial Sequence
  Description of Artificial Sequence: Synthetic oligonucleotide
  Sense strand starting at position 2262 of SEQ ID NO: 1244072
ggagaaucauccucaggca

SEQ ID NO: 1462963 - RNA, 19 nt, Artificial Sequence
  Description of Artificial Sequence: Synthetic oligonucleotide
  Antisense strand to SEQ ID NO: 1462962
ugccugaggaugauucucc

SEQ ID NO: 1462964 - RNA, 19 nt, Artificial Sequence
  Description of Artificial Sequence: Synthetic oligonucleotide
  Sense strand starting at position 2508 of SEQ ID NO: 1244072
uagaaagagugagcuaacu

SEQ ID NO: 1462965 - RNA, 19 nt, Artificial Sequence
  Description of Artificial Sequence: Synthetic oligonucleotide
  Antisense strand to SEQ ID NO: 1462964
aguuagcucacucuuucua

SEQ ID NO: 1462966 - RNA, 19 nt, Artificial Sequence
  Description of Artificial Sequence: Synthetic oligonucleotide
  Sense strand starting at position 2631 of SEQ ID NO: 1244072
auucuagugaaguguagaa

SEQ ID NO: 1462967 - RNA, 19 nt, Artificial Sequence
  Description of Artificial Sequence: Synthetic oligonucleotide
  Antisense strand to SEQ ID NO: 1462966
uucuacacuucacuagaau

SEQ ID NO: 1462968 - RNA, 19 nt, Artificial Sequence
  Description of Artificial Sequence: Synthetic oligonucleotide
  Sense strand starting at position 2651 of SEQ ID NO: 1244072
ccuuaauuccuguaaaguu

SEQ ID NO: 1462969 - RNA, 19 nt, Artificial Sequence
  Description of Artificial Sequence: Synthetic oligonucleotide
  Antisense strand to SEQ ID NO: 1462968
aacuuuacaggaauuaagg

SEQ ID NO: 1462970 - RNA, 19 nt, Artificial Sequence
  Description of Artificial Sequence: Synthetic oligonucleotide
  Sense strand starting at position 2761 of SEQ ID NO: 1244072
aagggucaggcauaaguua

SEQ ID NO: 1462971 - RNA, 19 nt, Artificial Sequence
  Description of Artificial Sequence: Synthetic oligonucleotide
  Antisense strand to SEQ ID NO: 1462970
uaacuuaugccugacccuu

SEQ ID NO: 1462972 - RNA, 19 nt, Artificial Sequence
  Description of Artificial Sequence: Synthetic oligonucleotide
  Sense strand starting at position 2795 of SEQ ID NO: 1244072
gaggaaagcuuacuugauu

SEQ ID NO: 1462973 - RNA, 19 nt, Artificial Sequence
  Description of Artificial Sequence: Synthetic oligonucleotide
  Antisense strand to SEQ ID NO: 1462972
aaucaaguaagcuuuccuc

SEQ ID NO: 1462974 - RNA, 19 nt, Artificial Sequence
  Description of Artificial Sequence: Synthetic oligonucleotide
  Sense strand starting at position 2917 of SEQ ID NO: 1244072
aguagaucagcuggugaca

SEQ ID NO: 1462975 - RNA, 19 nt, Artificial Sequence
  Description of Artificial Sequence: Synthetic oligonucleotide
  Antisense strand to SEQ ID NO: 1462974
ugucaccagcugaucuacu

SEQ ID NO: 1462976 - RNA, 19 nt, Artificial Sequence
  Description of Artificial Sequence: Synthetic oligonucleotide
  Sense strand starting at position 3354 of SEQ ID NO: 1244072
ugaugacgugaaugcuaga

SEQ ID NO: 1462977 - RNA, 19 nt, Artificial Sequence
  Description of Artificial Sequence: Synthetic oligonucleotide
  Antisense strand to SEQ ID NO: 1462976
ucuagcauucacgucauca

SEQ ID NO: 1462978 - RNA, 19 nt, Artificial Sequence
  Description of Artificial Sequence: Synthetic oligonucleotide
  Sense strand starting at position 3359 of SEQ ID NO: 1244072
acgugaaugcuagaucuug

SEQ ID NO: 1462979 - RNA, 19 nt, Artificial Sequence
  Description of Artificial Sequence: Synthetic oligonucleotide
  Antisense strand to SEQ ID NO: 1462978
caagaucuagcauucacgu

SEQ ID NO: 1462980 - RNA, 19 nt, Artificial Sequence
  Description of Artificial Sequence: Synthetic oligonucleotide
  Sense strand starting at position 3470 of SEQ ID NO: 1244072
cagauuugcugacagaaag

SEQ ID NO: 1462981 - RNA, 19 nt, Artificial Sequence
  Description of Artificial Sequence: Synthetic oligonucleotide
  Antisense strand to SEQ ID NO: 1462980
cuuucugucagcaaaucug

SEQ ID NO: 1462982 - RNA, 19 nt, Artificial Sequence
  Description of Artificial Sequence: Synthetic oligonucleotide
  Sense strand starting at position 3647 of SEQ ID NO: 1244072
guaauugcucacuaaagua

SEQ ID NO: 1462983 - RNA, 19 nt, Artificial Sequence
  Description of Artificial Sequence: Synthetic oligonucleotide
  Antisense strand to SEQ ID NO: 1462982
uacuuuagugagcaauuac

SEQ ID NO: 1462984 - RNA, 19 nt, Artificial Sequence
  Description of Artificial Sequence: Synthetic oligonucleotide
  Sense strand starting at position 3770 of SEQ ID NO: 1244072
gggcuauuggaaugacaau

SEQ ID NO: 1462985 - RNA, 19 nt, Artificial Sequence
  Description of Artificial Sequence: Synthetic oligonucleotide
  Antisense strand to SEQ ID NO: 1462984
auugucauuccaauagccc

SEQ ID NO: 1462986 - RNA, 19 nt, Artificial Sequence
  Description of Artificial Sequence: Synthetic oligonucleotide
  Sense strand starting at position 3826 of SEQ ID NO: 1244072
augagauucugaucuuauu

SEQ ID NO: 1462987 - RNA, 19 nt, Artificial Sequence
  Description of Artificial Sequence: Synthetic oligonucleotide
  Antisense strand to SEQ ID NO: 1462986
aauaagaucagaaucucau

SEQ ID NO: 1462988 - RNA, 19 nt, Artificial Sequence
  Description of Artificial Sequence: Synthetic oligonucleotide
  Sense strand starting at position 113 of SEQ ID NO: 1244073
ugugauuagcugcacugaa

SEQ ID NO: 1462989 - RNA, 19 nt, Artificial Sequence
  Description of Artificial Sequence: Synthetic oligonucleotide
  Antisense strand to SEQ ID NO: 1462988
uucagugcagcuaaucaca

SEQ ID NO: 1462990 - RNA, 19 nt, Artificial Sequence
  Description of Artificial Sequence: Synthetic oligonucleotide
  Sense strand starting at position 296 of SEQ ID NO: 1244073
ggcccuuucuuaguaacau

SEQ ID NO: 1462991 - RNA, 19 nt, Artificial Sequence
  Description of Artificial Sequence: Synthetic oligonucleotide
  Antisense strand to SEQ ID NO: 1462990
auguuacuaagaaagggcc

SEQ ID NO: 1462992 - RNA, 19 nt, Artificial Sequence
  Description of Artificial Sequence: Synthetic oligonucleotide
  Sense strand starting at position 366 of SEQ ID NO: 1244073
agucccuuccuauaacguu

SEQ ID NO: 1462993 - RNA, 19 nt, Artificial Sequence
  Description of Artificial Sequence: Synthetic oligonucleotide
  Antisense strand to SEQ ID NO: 1462992
aacguuauaggaagggacu

SEQ ID NO: 1462994 - RNA, 19 nt, Artificial Sequence
  Description of Artificial Sequence: Synthetic oligonucleotide
  Sense strand starting at position 373 of SEQ ID NO: 1244073
uccuauaacguuuauguga

SEQ ID NO: 1462995 - RNA, 19 nt, Artificial Sequence
  Description of Artificial Sequence: Synthetic oligonucleotide
  Antisense strand to SEQ ID NO: 1462994
ucacauaaacguuauagga

SEQ ID NO: 1462996 - RNA, 19 nt, Artificial Sequence
  Description of Artificial Sequence: Synthetic oligonucleotide
  Sense strand starting at position 376 of SEQ ID NO: 1244073
uauaacguuuaugugagaa

SEQ ID NO: 1462997 - RNA, 19 nt, Artificial Sequence
  Description of Artificial Sequence: Synthetic oligonucleotide
  Antisense strand to SEQ ID NO: 1462996
uucucacauaaacguuaua

SEQ ID NO: 1462998 - RNA, 19 nt, Artificial Sequence
  Description of Artificial Sequence: Synthetic oligonucleotide
  Sense strand starting at position 569 of SEQ ID NO: 1244073
aggccuugggagugugauu

SEQ ID NO: 1462999 - RNA, 19 nt, Artificial Sequence
  Description of Artificial Sequence: Synthetic oligonucleotide
  Antisense strand to SEQ ID NO: 1462998
aaucacacucccaaggccu

SEQ ID NO: 1463000 - RNA, 19 nt, Artificial Sequence
  Description of Artificial Sequence: Synthetic oligonucleotide
  Sense strand starting at position 612 of SEQ ID NO: 1244073
acagcauaaguuugaaagu

SEQ ID NO: 1463001 - RNA, 19 nt, Artificial Sequence
  Description of Artificial Sequence: Synthetic oligonucleotide
  Antisense strand to SEQ ID NO: 1463000
acuuucaaacuuaugcugu

SEQ ID NO: 1463002 - RNA, 19 nt, Artificial Sequence
  Description of Artificial Sequence: Synthetic oligonucleotide
  Sense strand starting at position 621 of SEQ ID NO: 1244073
guuugaaaguucucaauag

SEQ ID NO: 1463003 - RNA, 19 nt, Artificial Sequence
  Description of Artificial Sequence: Synthetic oligonucleotide
  Antisense strand to SEQ ID NO: 1463002
cuauugagaacuuucaaac

SEQ ID NO: 1463004 - RNA, 19 nt, Artificial Sequence
  Description of Artificial Sequence: Synthetic oligonucleotide
  Sense strand starting at position 707 of SEQ ID NO: 1244073
gcaguauuauucucaacag

SEQ ID NO: 1463005 - RNA, 19 nt, Artificial Sequence
  Description of Artificial Sequence: Synthetic oligonucleotide
  Antisense strand to SEQ ID NO: 1463004
cuguugagaauaauacugc

SEQ ID NO: 1463006 - RNA, 19 nt, Artificial Sequence
  Description of Artificial Sequence: Synthetic oligonucleotide
  Sense strand starting at position 796 of SEQ ID NO: 1244073
acggaauauuauuccguca

SEQ ID NO: 1463007 - RNA, 19 nt, Artificial Sequence
  Description of Artificial Sequence: Synthetic oligonucleotide
  Antisense strand to SEQ ID NO: 1463006
ugacggaauaauauuccgu

SEQ ID NO: 1463008 - RNA, 19 nt, Artificial Sequence
  Description of Artificial Sequence: Synthetic oligonucleotide
  Sense strand starting at position 895 of SEQ ID NO: 1244073
aggacaaauucuguaugac

SEQ ID NO: 1463009 - RNA, 19 nt, Artificial Sequence
  Description of Artificial Sequence: Synthetic oligonucleotide
  Antisense strand to SEQ ID NO: 1463008
gucauacagaauuuguccu

SEQ ID NO: 1463010 - RNA, 19 nt, Artificial Sequence
  Description of Artificial Sequence: Synthetic oligonucleotide
  Sense strand starting at position 938 of SEQ ID NO: 1244073
uagguaaacucauagagag

SEQ ID NO: 1463011 - RNA, 19 nt, Artificial Sequence
  Description of Artificial Sequence: Synthetic oligonucleotide
  Antisense strand to SEQ ID NO: 1463010
cucucuaugaguuuaccua

SEQ ID NO: 1463012 - RNA, 19 nt, Artificial Sequence
  Description of Artificial Sequence: Synthetic oligonucleotide
  Sense strand starting at position 970 of SEQ ID NO: 1244073
guuacuagguguucuggaa

SEQ ID NO: 1463013 - RNA, 19 nt, Artificial Sequence
  Description of Artificial Sequence: Synthetic oligonucleotide
  Antisense strand to SEQ ID NO: 1463012
uuccagaacaccuaguaac

SEQ ID NO: 1463014 - RNA, 19 nt, Artificial Sequence
  Description of Artificial Sequence: Synthetic oligonucleotide
  Sense strand starting at position 977 of SEQ ID NO: 1244073
gguguucuggaaggaagaa

SEQ ID NO: 1463015 - RNA, 19 nt, Artificial Sequence
  Description of Artificial Sequence: Synthetic oligonucleotide
  Antisense strand to SEQ ID NO: 1463014
uucuuccuuccagaacacc

SEQ ID NO: 1463016 - RNA, 19 nt, Artificial Sequence
  Description of Artificial Sequence: Synthetic oligonucleotide
  Sense strand starting at position 1048 of SEQ ID NO: 1244073
auggaucguagugauguaa

SEQ ID NO: 1463017 - RNA, 19 nt, Artificial Sequence
  Description of Artificial Sequence: Synthetic oligonucleotide
  Antisense strand to SEQ ID NO: 1463016
uuacaucacuacgauccau

SEQ ID NO: 1463018 - RNA, 19 nt, Artificial Sequence
  Description of Artificial Sequence: Synthetic oligonucleotide
  Sense strand starting at position 1052 of SEQ ID NO: 1244073
aucguagugauguaaguug

SEQ ID NO: 1463019 - RNA, 19 nt, Artificial Sequence
  Description of Artificial Sequence: Synthetic oligonucleotide
  Antisense strand to SEQ ID NO: 1463018
caacuuacaucacuacgau

SEQ ID NO: 1463020 - RNA, 19 nt, Artificial Sequence
  Description of Artificial Sequence: Synthetic oligonucleotide
  Sense strand starting at position 1057 of SEQ ID NO: 1244073
agugauguaaguugugaau

SEQ ID NO: 1463021 - RNA, 19 nt, Artificial Sequence
  Description of Artificial Sequence: Synthetic oligonucleotide
  Antisense strand to SEQ ID NO: 1463020
auucacaacuuacaucacu

SEQ ID NO: 1463022 - RNA, 19 nt, Artificial Sequence
  Description of Artificial Sequence: Synthetic oligonucleotide
  Sense strand starting at position 1063 of SEQ ID NO: 1244073
guaaguugugaauguacuc

SEQ ID NO: 1463023 - RNA, 19 nt, Artificial Sequence
  Description of Artificial Sequence: Synthetic oligonucleotide
  Antisense strand to SEQ ID NO: 1463022
gaguacauucacaacuuac

SEQ ID NO: 1463024 - RNA, 19 nt, Artificial Sequence
  Description of Artificial Sequence: Synthetic oligonucleotide
  Sense strand starting at position 1068 of SEQ ID NO: 1244073
uugugaauguacucaaugu

SEQ ID NO: 1463025 - RNA, 19 nt, Artificial Sequence
  Description of Artificial Sequence: Synthetic oligonucleotide
  Antisense strand to SEQ ID NO: 1463024
acauugaguacauucacaa

SEQ ID NO: 1463026 - RNA, 19 nt, Artificial Sequence
  Description of Artificial Sequence: Synthetic oligonucleotide
  Sense strand starting at position 1119 of SEQ ID NO: 1244073
aguaaaucuuauguugugu

SEQ ID NO: 1463027 - RNA, 19 nt, Artificial Sequence
  Description of Artificial Sequence: Synthetic oligonucleotide
  Antisense strand to SEQ ID NO: 1463026
acacaacauaagauuuacu

SEQ ID NO: 1463028 - RNA, 19 nt, Artificial Sequence
  Description of Artificial Sequence: Synthetic oligonucleotide
  Sense strand starting at position 1255 of SEQ ID NO: 1244073
cuacguaucucagcaauuc

SEQ ID NO: 1463029 - RNA, 19 nt, Artificial Sequence
  Description of Artificial Sequence: Synthetic oligonucleotide
  Antisense strand to SEQ ID NO: 1463028
gaauugcugagauacguag

SEQ ID NO: 1463030 - RNA, 19 nt, Artificial Sequence
  Description of Artificial Sequence: Synthetic oligonucleotide
  Sense strand starting at position 1395 of SEQ ID NO: 1244073
agugaaugcuacguggaca

SEQ ID NO: 1463031 - RNA, 19 nt, Artificial Sequence
  Description of Artificial Sequence: Synthetic oligonucleotide
  Antisense strand to SEQ ID NO: 1463030
uguccacguagcauucacu

SEQ ID NO: 1463032 - RNA, 19 nt, Artificial Sequence
  Description of Artificial Sequence: Synthetic oligonucleotide
  Sense strand starting at position 1434 of SEQ ID NO: 1244073
aaauguggucuuuaguaua

SEQ ID NO: 1463033 - RNA, 19 nt, Artificial Sequence
  Description of Artificial Sequence: Synthetic oligonucleotide
  Antisense strand to SEQ ID NO: 1463032
uauacuaaagaccacauuu

SEQ ID NO: 1463034 - RNA, 19 nt, Artificial Sequence
  Description of Artificial Sequence: Synthetic oligonucleotide
  Sense strand starting at position 1584 of SEQ ID NO: 1244073
uugacaagugcuggacaaa

SEQ ID NO: 1463035 - RNA, 19 nt, Artificial Sequence
  Description of Artificial Sequence: Synthetic oligonucleotide
  Antisense strand to SEQ ID NO: 1463034
uuuguccagcacuugucaa

SEQ ID NO: 1463036 - RNA, 19 nt, Artificial Sequence
  Description of Artificial Sequence: Synthetic oligonucleotide
  Sense strand starting at position 1587 of SEQ ID NO: 1244073
acaagugcuggacaaaguu

SEQ ID NO: 1463037 - RNA, 19 nt, Artificial Sequence
  Description of Artificial Sequence: Synthetic oligonucleotide
  Antisense strand to SEQ ID NO: 1463036
aacuuuguccagcacuugu

SEQ ID NO: 1463038 - RNA, 19 nt, Artificial Sequence
  Description of Artificial Sequence: Synthetic oligonucleotide
  Sense strand starting at position 2119 of SEQ ID NO: 1244073
gaaggauaaguguagucac

SEQ ID NO: 1463039 - RNA, 19 nt, Artificial Sequence
  Description of Artificial Sequence: Synthetic oligonucleotide
  Antisense strand to SEQ ID NO: 1463038
gugacuacacuuauccuuc

SEQ ID NO: 1463040 - RNA, 19 nt, Artificial Sequence
  Description of Artificial Sequence: Synthetic oligonucleotide
  Sense strand starting at position 2182 of SEQ ID NO: 1244073
gaaggcuagccucaggauu

SEQ ID NO: 1463041 - RNA, 19 nt, Artificial Sequence
  Description of Artificial Sequence: Synthetic oligonucleotide
  Antisense strand to SEQ ID NO: 1463040
aauccugaggcuagccuuc

SEQ ID NO: 1463042 - RNA, 19 nt, Artificial Sequence
  Description of Artificial Sequence: Synthetic oligonucleotide
  Sense strand starting at position 2217 of SEQ ID NO: 1244073
aggacaaucgcgggauacu

SEQ ID NO: 1463043 - RNA, 19 nt, Artificial Sequence
  Description of Artificial Sequence: Synthetic oligonucleotide
  Antisense strand to SEQ ID NO: 1463042
aguaucccgcgauuguccu

SEQ ID NO: 1463044 - RNA, 19 nt, Artificial Sequence
  Description of Artificial Sequence: Synthetic oligonucleotide
  Sense strand starting at position 2218 of SEQ ID NO: 1244073
ggacaaucgcgggauacua

SEQ ID NO: 1463045 - RNA, 19 nt, Artificial Sequence
  Description of Artificial Sequence: Synthetic oligonucleotide
  Antisense strand to SEQ ID NO: 1463044
uaguaucccgcgauugucc

SEQ ID NO: 1463046 - RNA, 19 nt, Artificial Sequence
  Description of Artificial Sequence: Synthetic oligonucleotide
  Sense strand starting at position 2237 of SEQ ID NO: 1244073
acgagagguccucagagca

SEQ ID NO: 1463047 - RNA, 19 nt, Artificial Sequence
  Description of Artificial Sequence: Synthetic oligonucleotide
  Antisense strand to SEQ ID NO: 1463046
ugcucugaggaccucucgu

SEQ ID NO: 1463048 - RNA, 19 nt, Artificial Sequence
  Description of Artificial Sequence: Synthetic oligonucleotide
  Sense strand starting at position 2281 of SEQ ID NO: 1244073
ugcuguucucugccgcaga

SEQ ID NO: 1463049 - RNA, 19 nt, Artificial Sequence
  Description of Artificial Sequence: Synthetic oligonucleotide
  Antisense strand to SEQ ID NO: 1463048
ucugcggcagagaacagca

SEQ ID NO: 1463050 - RNA, 19 nt, Artificial Sequence
  Description of Artificial Sequence: Synthetic oligonucleotide
  Sense strand starting at position 2402 of SEQ ID NO: 1244073
gcauuugucuacucacucu

SEQ ID NO: 1463051 - RNA, 19 nt, Artificial Sequence
  Description of Artificial Sequence: Synthetic oligonucleotide
  Antisense strand to SEQ ID NO: 1463050
agagugaguagacaaaugc

SEQ ID NO: 1463052 - RNA, 19 nt, Artificial Sequence
  Description of Artificial Sequence: Synthetic oligonucleotide
  Sense strand starting at position 2465 of SEQ ID NO: 1244073
uacauugaaugagugguua

SEQ ID NO: 1463053 - RNA, 19 nt, Artificial Sequence
  Description of Artificial Sequence: Synthetic oligonucleotide
  Antisense strand to SEQ ID NO: 1463052
uaaccacucauucaaugua

SEQ ID NO: 1463054 - RNA, 19 nt, Artificial Sequence
  Description of Artificial Sequence: Synthetic oligonucleotide
  Sense strand starting at position 2469 of SEQ ID NO: 1244073
uugaaugagugguuauuau

SEQ ID NO: 1463055 - RNA, 19 nt, Artificial Sequence
  Description of Artificial Sequence: Synthetic oligonucleotide
  Antisense strand to SEQ ID NO: 1463054
auaauaaccacucauucaa

SEQ ID NO: 1463056 - RNA, 19 nt, Artificial Sequence
  Description of Artificial Sequence: Synthetic oligonucleotide
  Sense strand starting at position 2476 of SEQ ID NO: 1244073
agugguuauuaugugucau

SEQ ID NO: 1463057 - RNA, 19 nt, Artificial Sequence
  Description of Artificial Sequence: Synthetic oligonucleotide
  Antisense strand to SEQ ID NO: 1463056
augacacauaauaaccacu

SEQ ID NO: 1463058 - RNA, 19 nt, Artificial Sequence
  Description of Artificial Sequence: Synthetic oligonucleotide
  Sense strand starting at position 2484 of SEQ ID NO: 1244073
uuaugugucauguguaaag

SEQ ID NO: 1463059 - RNA, 19 nt, Artificial Sequence
  Description of Artificial Sequence: Synthetic oligonucleotide
  Antisense strand to SEQ ID NO: 1463058
cuuuacacaugacacauaa

SEQ ID NO: 1463060 - RNA, 19 nt, Artificial Sequence
  Description of Artificial Sequence: Synthetic oligonucleotide
  Sense strand starting at position 2486 of SEQ ID NO: 1244073
augugucauguguaaagua

SEQ ID NO: 1463061 - RNA, 19 nt, Artificial Sequence
  Description of Artificial Sequence: Synthetic oligonucleotide
  Antisense strand to SEQ ID NO: 1463060
uacuuuacacaugacacau

SEQ ID NO: 1463062 - RNA, 19 nt, Artificial Sequence
  Description of Artificial Sequence: Synthetic oligonucleotide
  Sense strand starting at position 2491 of SEQ ID NO: 1244073
ucauguguaaaguagggaa

SEQ ID NO: 1463063 - RNA, 19 nt, Artificial Sequence
  Description of Artificial Sequence: Synthetic oligonucleotide
  Antisense strand to SEQ ID NO: 1463062
uucccuacuuuacacauga

SEQ ID NO: 1463064 - RNA, 19 nt, Artificial Sequence
  Description of Artificial Sequence: Synthetic oligonucleotide
  Sense strand starting at position 2534 of SEQ ID NO: 1244073
gagguucuggucugggaaa

SEQ ID NO: 1463065 - RNA, 19 nt, Artificial Sequence
  Description of Artificial Sequence: Synthetic oligonucleotide
  Antisense strand to SEQ ID NO: 1463064
uuucccagaccagaaccuc

SEQ ID NO: 1463066 - RNA, 19 nt, Artificial Sequence
  Description of Artificial Sequence: Synthetic oligonucleotide
  Sense strand starting at position 3216 of SEQ ID NO: 1244073
gguugaaccaguuaacagu

SEQ ID NO: 1463067 - RNA, 19 nt, Artificial Sequence
  Description of Artificial Sequence: Synthetic oligonucleotide
  Antisense strand to SEQ ID NO: 1463066
acuguuaacugguucaacc

SEQ ID NO: 1463068 - RNA, 19 nt, Artificial Sequence
  Description of Artificial Sequence: Synthetic oligonucleotide
  Sense strand starting at position 2568 of SEQ ID NO: 1244074
acagcugcauucugagagu

SEQ ID NO: 1463069 - RNA, 19 nt, Artificial Sequence
  Description of Artificial Sequence: Synthetic oligonucleotide
  Antisense strand to SEQ ID NO: 1463068
acucucagaaugcagcugu

SEQ ID NO: 1463070 - RNA, 19 nt, Artificial Sequence
  Description of Artificial Sequence: Synthetic oligonucleotide
  Sense strand starting at position 2577 of SEQ ID NO: 1244074
uucugagaguugccuacuu

SEQ ID NO: 1463071 - RNA, 19 nt, Artificial Sequence
  Description of Artificial Sequence: Synthetic oligonucleotide
  Antisense strand to SEQ ID NO: 1463070
aaguaggcaacucucagaa

SEQ ID NO: 1463072 - RNA, 19 nt, Artificial Sequence
  Description of Artificial Sequence: Synthetic oligonucleotide
  Sense strand starting at position 2634 of SEQ ID NO: 1244074
agucuaugcugauuucuuu

SEQ ID NO: 1463073 - RNA, 19 nt, Artificial Sequence
  Description of Artificial Sequence: Synthetic oligonucleotide
  Antisense strand to SEQ ID NO: 1463072
aaagaaaucagcauagacu

SEQ ID NO: 1463074 - RNA, 19 nt, Artificial Sequence
  Description of Artificial Sequence: Synthetic oligonucleotide
  Sense strand starting at position 2663 of SEQ ID NO: 1244074
uccauugacucgguucuua

SEQ ID NO: 1463075 - RNA, 19 nt, Artificial Sequence
  Description of Artificial Sequence: Synthetic oligonucleotide
  Antisense strand to SEQ ID NO: 1463074
uaagaaccgagucaaugga

SEQ ID NO: 1463076 - RNA, 19 nt, Artificial Sequence
  Description of Artificial Sequence: Synthetic oligonucleotide
  Sense strand starting at position 2674 of SEQ ID NO: 1244074
gguucuuaccaaggucuuu

SEQ ID NO: 1463077 - RNA, 19 nt, Artificial Sequence
  Description of Artificial Sequence: Synthetic oligonucleotide
  Antisense strand to SEQ ID NO: 1463076
aaagaccuugguaagaacc

SEQ ID NO: 1463078 - RNA, 19 nt, Artificial Sequence
  Description of Artificial Sequence: Synthetic oligonucleotide
  Sense strand starting at position 2705 of SEQ ID NO: 1244074
ccucuacauccaugggaaa

SEQ ID NO: 1463079 - RNA, 19 nt, Artificial Sequence
  Description of Artificial Sequence: Synthetic oligonucleotide
  Antisense strand to SEQ ID NO: 1463078
uuucccauggauguagagg

SEQ ID NO: 1463080 - RNA, 19 nt, Artificial Sequence
  Description of Artificial Sequence: Synthetic oligonucleotide
  Sense strand starting at position 2708 of SEQ ID NO: 1244074
cuacauccaugggaaacuu

SEQ ID NO: 1463081 - RNA, 19 nt, Artificial Sequence
  Description of Artificial Sequence: Synthetic oligonucleotide
  Antisense strand to SEQ ID NO: 1463080
aaguuucccauggauguag

SEQ ID NO: 1463082 - RNA, 19 nt, Artificial Sequence
  Description of Artificial Sequence: Synthetic oligonucleotide
  Sense strand starting at position 2717 of SEQ ID NO: 1244074
ugggaaacuucuccacugu

SEQ ID NO: 1463083 - RNA, 19 nt, Artificial Sequence
  Description of Artificial Sequence: Synthetic oligonucleotide
  Antisense strand to SEQ ID NO: 1463082
acaguggagaaguuuccca

SEQ ID NO: 1463084 - RNA, 19 nt, Artificial Sequence
  Description of Artificial Sequence: Synthetic oligonucleotide
  Sense strand starting at position 2723 of SEQ ID NO: 1244074
acuucuccacugugaucuu

SEQ ID NO: 1463085 - RNA, 19 nt, Artificial Sequence
  Description of Artificial Sequence: Synthetic oligonucleotide
  Antisense strand to SEQ ID NO: 1463084
aagaucacaguggagaagu

SEQ ID NO: 1463086 - RNA, 19 nt, Artificial Sequence
  Description of Artificial Sequence: Synthetic oligonucleotide
  Sense strand starting at position 2724 of SEQ ID NO: 1244074
cuucuccacugugaucuua

SEQ ID NO: 1463087 - RNA, 19 nt, Artificial Sequence
  Description of Artificial Sequence: Synthetic oligonucleotide
  Antisense strand to SEQ ID NO: 1463086
uaagaucacaguggagaag

SEQ ID NO: 1463088 - RNA, 19 nt, Artificial Sequence
  Description of Artificial Sequence: Synthetic oligonucleotide
  Sense strand starting at position 2726 of SEQ ID NO: 1244074
ucuccacugugaucuuacu

SEQ ID NO: 1463089 - RNA, 19 nt, Artificial Sequence
  Description of Artificial Sequence: Synthetic oligonucleotide
  Antisense strand to SEQ ID NO: 1463088
aguaagaucacaguggaga

SEQ ID NO: 1463090 - RNA, 19 nt, Artificial Sequence
  Description of Artificial Sequence: Synthetic oligonucleotide
  Sense strand starting at position 2910 of SEQ ID NO: 1244074
cagaguuugugcuuaggcu

SEQ ID NO: 1463091 - RNA, 19 nt, Artificial Sequence
  Description of Artificial Sequence: Synthetic oligonucleotide
  Antisense strand to SEQ ID NO: 1463090
agccuaagcacaaacucug

SEQ ID NO: 1463092 - RNA, 19 nt, Artificial Sequence
  Description of Artificial Sequence: Synthetic oligonucleotide
  Sense strand starting at position 3435 of SEQ ID NO: 1244074
ucaccaaguccuggugauu

SEQ ID NO: 1463093 - RNA, 19 nt, Artificial Sequence
  Description of Artificial Sequence: Synthetic oligonucleotide
  Antisense strand to SEQ ID NO: 1463092
aaucaccaggacuugguga

SEQ ID NO: 1463094 - RNA, 19 nt, Artificial Sequence
  Description of Artificial Sequence: Synthetic oligonucleotide
  Sense strand starting at position 127 of SEQ ID NO: 1244075
ggaauucugugguugacag

SEQ ID NO: 1463095 - RNA, 19 nt, Artificial Sequence
  Description of Artificial Sequence: Synthetic oligonucleotide
  Antisense strand to SEQ ID NO: 1463094
cugucaaccacagaauucc

SEQ ID NO: 1463096 - RNA, 19 nt, Artificial Sequence
  Description of Artificial Sequence: Synthetic oligonucleotide
  Sense strand starting at position 128 of SEQ ID NO: 1244075
gaauucugugguugacagu

SEQ ID NO: 1463097 - RNA, 19 nt, Artificial Sequence
  Description of Artificial Sequence: Synthetic oligonucleotide
  Antisense strand to SEQ ID NO: 1463096
acugucaaccacagaauuc

SEQ ID NO: 1463098 - RNA, 19 nt, Artificial Sequence
  Description of Artificial Sequence: Synthetic oligonucleotide
  Sense strand starting at position 227 of SEQ ID NO: 1244075
aaagcauuugcgggcuuua

SEQ ID NO: 1463099 - RNA, 19 nt, Artificial Sequence
  Description of Artificial Sequence: Synthetic oligonucleotide
  Antisense strand to SEQ ID NO: 1463098
uaaagcccgcaaaugcuuu

SEQ ID NO: 1463100 - RNA, 19 nt, Artificial Sequence
  Description of Artificial Sequence: Synthetic oligonucleotide
  Sense strand starting at position 238 of SEQ ID NO: 1244075
gggcuuuaguuaucaguau

SEQ ID NO: 1463101 - RNA, 19 nt, Artificial Sequence
  Description of Artificial Sequence: Synthetic oligonucleotide
  Antisense strand to SEQ ID NO: 1463100
auacugauaacuaaagccc

SEQ ID NO: 1463102 - RNA, 19 nt, Artificial Sequence
  Description of Artificial Sequence: Synthetic oligonucleotide
  Sense strand starting at position 242 of SEQ ID NO: 1244075
uuuaguuaucaguaugucu

SEQ ID NO: 1463103 - RNA, 19 nt, Artificial Sequence
  Description of Artificial Sequence: Synthetic oligonucleotide
  Antisense strand to SEQ ID NO: 1463102
agacauacugauaacuaaa

SEQ ID NO: 1463104 - RNA, 19 nt, Artificial Sequence
  Description of Artificial Sequence: Synthetic oligonucleotide
  Sense strand starting at position 245 of SEQ ID NO: 1244075
aguuaucaguaugucucua

SEQ ID NO: 1463105 - RNA, 19 nt, Artificial Sequence
  Description of Artificial Sequence: Synthetic oligonucleotide
  Antisense strand to SEQ ID NO: 1463104
uagagacauacugauaacu

SEQ ID NO: 1463106 - RNA, 19 nt, Artificial Sequence
  Description of Artificial Sequence: Synthetic oligonucleotide
  Sense strand starting at position 355 of SEQ ID NO: 1244075
auauauuucucagggauca

SEQ ID NO: 1463107 - RNA, 19 nt, Artificial Sequence
  Description of Artificial Sequence: Synthetic oligonucleotide
  Antisense strand to SEQ ID NO: 1463106
ugaucccugagaaauauau

SEQ ID NO: 1463108 - RNA, 19 nt, Artificial Sequence
  Description of Artificial Sequence: Synthetic oligonucleotide
  Sense strand starting at position 431 of SEQ ID NO: 1244075
uccugagacucuccuguau

SEQ ID NO: 1463109 - RNA, 19 nt, Artificial Sequence
  Description of Artificial Sequence: Synthetic oligonucleotide
  Antisense strand to SEQ ID NO: 1463108
auacaggagagucucagga

SEQ ID NO: 1463110 - RNA, 19 nt, Artificial Sequence
  Description of Artificial Sequence: Synthetic oligonucleotide
  Sense strand starting at position 435 of SEQ ID NO: 1244075
gagacucuccuguauugug

SEQ ID NO: 1463111 - RNA, 19 nt, Artificial Sequence
  Description of Artificial Sequence: Synthetic oligonucleotide
  Antisense strand to SEQ ID NO: 1463110
cacaauacaggagagucuc

SEQ ID NO: 1463112 - RNA, 19 nt, Artificial Sequence
  Description of Artificial Sequence: Synthetic oligonucleotide
  Sense strand starting at position 444 of SEQ ID NO: 1244075
cuguauugugcugcagcua

SEQ ID NO: 1463113 - RNA, 19 nt, Artificial Sequence
  Description of Artificial Sequence: Synthetic oligonucleotide
  Antisense strand to SEQ ID NO: 1463112
uagcugcagcacaauacag

SEQ ID NO: 1463114 - RNA, 19 nt, Artificial Sequence
  Description of Artificial Sequence: Synthetic oligonucleotide
  Sense strand starting at position 553 of SEQ ID NO: 1244075
guuaacagugcugaguuaa

SEQ ID NO: 1463115 - RNA, 19 nt, Artificial Sequence
  Description of Artificial Sequence: Synthetic oligonucleotide
  Antisense strand to SEQ ID NO: 1463114
uuaacucagcacuguuaac

SEQ ID NO: 1463116 - RNA, 19 nt, Artificial Sequence
  Description of Artificial Sequence: Synthetic oligonucleotide
  Sense strand starting at position 608 of SEQ ID NO: 1244075
cuaucaucucagggaauuc

SEQ ID NO: 1463117 - RNA, 19 nt, Artificial Sequence
  Description of Artificial Sequence: Synthetic oligonucleotide
  Antisense strand to SEQ ID NO: 1463116
gaauucccugagaugauag

SEQ ID NO: 1463118 - RNA, 19 nt, Artificial Sequence
  Description of Artificial Sequence: Synthetic oligonucleotide
  Sense strand starting at position 683 of SEQ ID NO: 1244075
uaggaucugcagcgggaua

SEQ ID NO: 1463119 - RNA, 19 nt, Artificial Sequence
  Description of Artificial Sequence: Synthetic oligonucleotide
  Antisense strand to SEQ ID NO: 1463118
uaucccgcugcagauccua

SEQ ID NO: 1463120 - RNA, 19 nt, Artificial Sequence
  Description of Artificial Sequence: Synthetic oligonucleotide
  Sense strand starting at position 685 of SEQ ID NO: 1244075
ggaucugcagcgggauaaa

SEQ ID NO: 1463121 - RNA, 19 nt, Artificial Sequence
  Description of Artificial Sequence: Synthetic oligonucleotide
  Antisense strand to SEQ ID NO: 1463120
uuuaucccgcugcagaucc

SEQ ID NO: 1463122 - RNA, 19 nt, Artificial Sequence
  Description of Artificial Sequence: Synthetic oligonucleotide
  Sense strand starting at position 746 of SEQ ID NO: 1244075
caggauaugcgguaguaau

SEQ ID NO: 1463123 - RNA, 19 nt, Artificial Sequence
  Description of Artificial Sequence: Synthetic oligonucleotide
  Antisense strand to SEQ ID NO: 1463122
auuacuaccgcauauccug

SEQ ID NO: 1463124 - RNA, 19 nt, Artificial Sequence
  Description of Artificial Sequence: Synthetic oligonucleotide
  Sense strand starting at position 786 of SEQ ID NO: 1244075
ugagacucuacggauguau

SEQ ID NO: 1463125 - RNA, 19 nt, Artificial Sequence
  Description of Artificial Sequence: Synthetic oligonucleotide
  Antisense strand to SEQ ID NO: 1463124
auacauccguagagucuca

SEQ ID NO: 1463126 - RNA, 19 nt, Artificial Sequence
  Description of Artificial Sequence: Synthetic oligonucleotide
  Sense strand starting at position 848 of SEQ ID NO: 1244075
ucgagauuuccgcgguaac

SEQ ID NO: 1463127 - RNA, 19 nt, Artificial Sequence
  Description of Artificial Sequence: Synthetic oligonucleotide
  Antisense strand to SEQ ID NO: 1463126
guuaccgcggaaaucucga

SEQ ID NO: 1463128 - RNA, 19 nt, Artificial Sequence
  Description of Artificial Sequence: Synthetic oligonucleotide
  Sense strand starting at position 849 of SEQ ID NO: 1244075
cgagauuuccgcgguaaca

SEQ ID NO: 1463129 - RNA, 19 nt, Artificial Sequence
  Description of Artificial Sequence: Synthetic oligonucleotide
  Antisense strand to SEQ ID NO: 1463128
uguuaccgcggaaaucucg

SEQ ID NO: 1463130 - RNA, 19 nt, Artificial Sequence
  Description of Artificial Sequence: Synthetic oligonucleotide
  Sense strand starting at position 1054 of SEQ ID NO: 1244075
ucucacaaaucuuucgaga

SEQ ID NO: 1463131 - RNA, 19 nt, Artificial Sequence
  Description of Artificial Sequence: Synthetic oligonucleotide
  Antisense strand to SEQ ID NO: 1463130
ucucgaaagauuugugaga

SEQ ID NO: 1463132 - RNA, 19 nt, Artificial Sequence
  Description of Artificial Sequence: Synthetic oligonucleotide
  Sense strand starting at position 1069 of SEQ ID NO: 1244075
gagauaggauuugagguua

SEQ ID NO: 1463133 - RNA, 19 nt, Artificial Sequence
  Description of Artificial Sequence: Synthetic oligonucleotide
  Antisense strand to SEQ ID NO: 1463132
uaaccucaaauccuaucuc

SEQ ID NO: 1463134 - RNA, 19 nt, Artificial Sequence
  Description of Artificial Sequence: Synthetic oligonucleotide
  Sense strand starting at position 1100 of SEQ ID NO: 1244075
aucauaguccaguaacuua

SEQ ID NO: 1463135 - RNA, 19 nt, Artificial Sequence
  Description of Artificial Sequence: Synthetic oligonucleotide
  Antisense strand to SEQ ID NO: 1463134
uaaguuacuggacuaugau

SEQ ID NO: 1463136 - RNA, 19 nt, Artificial Sequence
  Description of Artificial Sequence: Synthetic oligonucleotide
  Sense strand starting at position 1169 of SEQ ID NO: 1244075
gcgaaaucucaauguauga

SEQ ID NO: 1463137 - RNA, 19 nt, Artificial Sequence
  Description of Artificial Sequence: Synthetic oligonucleotide
  Antisense strand to SEQ ID NO: 1463136
ucauacauugagauuucgc

SEQ ID NO: 1463138 - RNA, 19 nt, Artificial Sequence
  Description of Artificial Sequence: Synthetic oligonucleotide
  Sense strand starting at position 1263 of SEQ ID NO: 1244075
auugauuuaucacagugaa

SEQ ID NO: 1463139 - RNA, 19 nt, Artificial Sequence
  Description of Artificial Sequence: Synthetic oligonucleotide
  Antisense strand to SEQ ID NO: 1463138
uucacugugauaaaucaau

SEQ ID NO: 1463140 - RNA, 19 nt, Artificial Sequence
  Description of Artificial Sequence: Synthetic oligonucleotide
  Sense strand starting at position 1482 of SEQ ID NO: 1244075
uccgaaauccgaugccaaa

SEQ ID NO: 1463141 - RNA, 19 nt, Artificial Sequence
  Description of Artificial Sequence: Synthetic oligonucleotide
  Antisense strand to SEQ ID NO: 1463140
uuuggcaucggauuucgga

SEQ ID NO: 1463142 - RNA, 19 nt, Artificial Sequence
  Description of Artificial Sequence: Synthetic oligonucleotide
  Sense strand starting at position 1727 of SEQ ID NO: 1244075
ccguguuuaccugaaaguc

SEQ ID NO: 1463143 - RNA, 19 nt, Artificial Sequence
  Description of Artificial Sequence: Synthetic oligonucleotide
  Antisense strand to SEQ ID NO: 1463142
gacuuucagguaaacacgg

SEQ ID NO: 1463144 - RNA, 19 nt, Artificial Sequence
  Description of Artificial Sequence: Synthetic oligonucleotide
  Sense strand starting at position 1907 of SEQ ID NO: 1244075
gcgagaaugcgcguccuga

SEQ ID NO: 1463145 - RNA, 19 nt, Artificial Sequence
  Description of Artificial Sequence: Synthetic oligonucleotide
  Antisense strand to SEQ ID NO: 1463144
ucaggacgcgcauucucgc

SEQ ID NO: 1463146 - RNA, 19 nt, Artificial Sequence
  Description of Artificial Sequence: Synthetic oligonucleotide
  Sense strand starting at position 2088 of SEQ ID NO: 1244075
cggacaaaucuggauguuu

SEQ ID NO: 1463147 - RNA, 19 nt, Artificial Sequence
  Description of Artificial Sequence: Synthetic oligonucleotide
  Antisense strand to SEQ ID NO: 1463146
aaacauccagauuuguccg

SEQ ID NO: 1463148 - RNA, 19 nt, Artificial Sequence
  Description of Artificial Sequence: Synthetic oligonucleotide
  Sense strand starting at position 2157 of SEQ ID NO: 1244075
cgcagaaguccaucgucuu

SEQ ID NO: 1463149 - RNA, 19 nt, Artificial Sequence
  Description of Artificial Sequence: Synthetic oligonucleotide
  Antisense strand to SEQ ID NO: 1463148
aagacgauggacuucugcg

SEQ ID NO: 1463150 - RNA, 19 nt, Artificial Sequence
  Description of Artificial Sequence: Synthetic oligonucleotide
  Sense strand starting at position 2243 of SEQ ID NO: 1244075
ucagcucacccugaggauu

SEQ ID NO: 1463151 - RNA, 19 nt, Artificial Sequence
  Description of Artificial Sequence: Synthetic oligonucleotide
  Antisense strand to SEQ ID NO: 1463150
aauccucagggugagcuga

SEQ ID NO: 1463152 - RNA, 19 nt, Artificial Sequence
  Description of Artificial Sequence: Synthetic oligonucleotide
  Sense strand starting at position 2256 of SEQ ID NO: 1244075
aggauucaacggugaacga

SEQ ID NO: 1463153 - RNA, 19 nt, Artificial Sequence
  Description of Artificial Sequence: Synthetic oligonucleotide
  Antisense strand to SEQ ID NO: 1463152
ucguucaccguugaauccu

SEQ ID NO: 1463154 - RNA, 19 nt, Artificial Sequence
  Description of Artificial Sequence: Synthetic oligonucleotide
  Sense strand starting at position 2298 of SEQ ID NO: 1244075
gggauuucauuccagugga

SEQ ID NO: 1463155 - RNA, 19 nt, Artificial Sequence
  Description of Artificial Sequence: Synthetic oligonucleotide
  Antisense strand to SEQ ID NO: 1463154
uccacuggaaugaaauccc

SEQ ID NO: 1463156 - RNA, 19 nt, Artificial Sequence
  Description of Artificial Sequence: Synthetic oligonucleotide
  Sense strand starting at position 2508 of SEQ ID NO: 1244075
cgagccauccuuugagaga

SEQ ID NO: 1463157 - RNA, 19 nt, Artificial Sequence
  Description of Artificial Sequence: Synthetic oligonucleotide
  Antisense strand to SEQ ID NO: 1463156
ucucucaaaggauggcucg

SEQ ID NO: 1463158 - RNA, 19 nt, Artificial Sequence
  Description of Artificial Sequence: Synthetic oligonucleotide
  Sense strand starting at position 2541 of SEQ ID NO: 1244075
gaccgaaguugauccagau

SEQ ID NO: 1463159 - RNA, 19 nt, Artificial Sequence
  Description of Artificial Sequence: Synthetic oligonucleotide
  Antisense strand to SEQ ID NO: 1463158
aucuggaucaacuucgguc

SEQ ID NO: 1463160 - RNA, 19 nt, Artificial Sequence
  Description of Artificial Sequence: Synthetic oligonucleotide
  Sense strand starting at position 2548 of SEQ ID NO: 1244075
guugauccagaucgacuaa

SEQ ID NO: 1463161 - RNA, 19 nt, Artificial Sequence
  Description of Artificial Sequence: Synthetic oligonucleotide
  Antisense strand to SEQ ID NO: 1463160
uuagucgaucuggaucaac

SEQ ID NO: 1463162 - RNA, 19 nt, Artificial Sequence
  Description of Artificial Sequence: Synthetic oligonucleotide
  Sense strand starting at position 2804 of SEQ ID NO: 1244075
gucuuacccugcccugaaa

SEQ ID NO: 1463163 - RNA, 19 nt, Artificial Sequence
  Description of Artificial Sequence: Synthetic oligonucleotide
  Antisense strand to SEQ ID NO: 1463162
uuucagggcaggguaagac

SEQ ID NO: 1463164 - RNA, 19 nt, Artificial Sequence
  Description of Artificial Sequence: Synthetic oligonucleotide
  Sense strand starting at position 3586 of SEQ ID NO: 1244075
gguagcgugaaagauugaa

SEQ ID NO: 1463165 - RNA, 19 nt, Artificial Sequence
  Description of Artificial Sequence: Synthetic oligonucleotide
  Antisense strand to SEQ ID NO: 1463164
uucaaucuuucacgcuacc

SEQ ID NO: 1463166 - RNA, 19 nt, Artificial Sequence
  Description of Artificial Sequence: Synthetic oligonucleotide
  Sense strand starting at position 3590 of SEQ ID NO: 1244075
gcgugaaagauugaaucac

SEQ ID NO: 1463167 - RNA, 19 nt, Artificial Sequence
  Description of Artificial Sequence: Synthetic oligonucleotide
  Antisense strand to SEQ ID NO: 1463166
gugauucaaucuuucacgc

SEQ ID NO: 1463168 - RNA, 19 nt, Artificial Sequence
  Description of Artificial Sequence: Synthetic oligonucleotide
  Sense strand starting at position 3779 of SEQ ID NO: 1244075
acuuuaguagaguggagaa

SEQ ID NO: 1463169 - RNA, 19 nt, Artificial Sequence
  Description of Artificial Sequence: Synthetic oligonucleotide
  Antisense strand to SEQ ID NO: 1463168
uucuccacucuacuaaagu

SEQ ID NO: 1463170 - RNA, 19 nt, Artificial Sequence
  Description of Artificial Sequence: Synthetic oligonucleotide
  Sense strand starting at position 3880 of SEQ ID NO: 1244075
ccuggugccacugaugauu

SEQ ID NO: 1463171 - RNA, 19 nt, Artificial Sequence
  Description of Artificial Sequence: Synthetic oligonucleotide
  Antisense strand to SEQ ID NO: 1463170
aaucaucaguggcaccagg

SEQ ID NO: 1463172 - RNA, 19 nt, Artificial Sequence
  Description of Artificial Sequence: Synthetic oligonucleotide
  Sense strand starting at position 3967 of SEQ ID NO: 1244075
cuggacuuuauaggugaga

SEQ ID NO: 1463173 - RNA, 19 nt, Artificial Sequence
  Description of Artificial Sequence: Synthetic oligonucleotide
  Antisense strand to SEQ ID NO: 1463172
ucucaccuauaaaguccag

SEQ ID NO: 1463174 - RNA, 19 nt, Artificial Sequence
  Description of Artificial Sequence: Synthetic oligonucleotide
  Sense strand starting at position 505 of SEQ ID NO: 1244076
gggcuaugaucccaagagg

SEQ ID NO: 1463175 - RNA, 19 nt, Artificial Sequence
  Description of Artificial Sequence: Synthetic oligonucleotide
  Antisense strand to SEQ ID NO: 1463174
ccucuugggaucauagccc

SEQ ID NO: 1463176 - RNA, 19 nt, Artificial Sequence
  Description of Artificial Sequence: Synthetic oligonucleotide
  Sense strand starting at position 700 of SEQ ID NO: 1244076
uucccuggcccuggugaaa

SEQ ID NO: 1463177 - RNA, 19 nt, Artificial Sequence
  Description of Artificial Sequence: Synthetic oligonucleotide
  Antisense strand to SEQ ID NO: 1463176
uuucaccagggccagggaa

SEQ ID NO: 1463178 - RNA, 19 nt, Artificial Sequence
  Description of Artificial Sequence: Synthetic oligonucleotide
  Sense strand starting at position 980 of SEQ ID NO: 1244076
ggaguuagaucucacauca

SEQ ID NO: 1463179 - RNA, 19 nt, Artificial Sequence
  Description of Artificial Sequence: Synthetic oligonucleotide
  Antisense strand to SEQ ID NO: 1463178
ugaugugagaucuaacucc

SEQ ID NO: 1463180 - RNA, 19 nt, Artificial Sequence
  Description of Artificial Sequence: Synthetic oligonucleotide
  Sense strand starting at position 1087 of SEQ ID NO: 1244076
gccugaaagucccaugguu

SEQ ID NO: 1463181 - RNA, 19 nt, Artificial Sequence
  Description of Artificial Sequence: Synthetic oligonucleotide
  Antisense strand to SEQ ID NO: 1463180
aaccaugggacuuucaggc

SEQ ID NO: 1463182 - RNA, 19 nt, Artificial Sequence
  Description of Artificial Sequence: Synthetic oligonucleotide
  Sense strand starting at position 1089 of SEQ ID NO: 1244076
cugaaagucccaugguuug

SEQ ID NO: 1463183 - RNA, 19 nt, Artificial Sequence
  Description of Artificial Sequence: Synthetic oligonucleotide
  Antisense strand to SEQ ID NO: 1463182
caaaccaugggacuuucag

SEQ ID NO: 1463184 - RNA, 19 nt, Artificial Sequence
  Description of Artificial Sequence: Synthetic oligonucleotide
  Sense strand starting at position 1312 of SEQ ID NO: 1244076
gagggucccugccaacauu

SEQ ID NO: 1463185 - RNA, 19 nt, Artificial Sequence
  Description of Artificial Sequence: Synthetic oligonucleotide
  Antisense strand to SEQ ID NO: 1463184
aauguuggcagggacccuc

SEQ ID NO: 1463186 - RNA, 19 nt, Artificial Sequence
  Description of Artificial Sequence: Synthetic oligonucleotide
  Sense strand starting at position 1511 of SEQ ID NO: 1244076
cuuuguuucuuugagggau

SEQ ID NO: 1463187 - RNA, 19 nt, Artificial Sequence
  Description of Artificial Sequence: Synthetic oligonucleotide
  Antisense strand to SEQ ID NO: 1463186
aucccucaaagaaacaaag

SEQ ID NO: 1463188 - RNA, 19 nt, Artificial Sequence
  Description of Artificial Sequence: Synthetic oligonucleotide
  Sense strand starting at position 1513 of SEQ ID NO: 1244076
uuguuucuuugagggaugu

SEQ ID NO: 1463189 - RNA, 19 nt, Artificial Sequence
  Description of Artificial Sequence: Synthetic oligonucleotide
  Antisense strand to SEQ ID NO: 1463188
acaucccucaaagaaacaa

SEQ ID NO: 1463190 - RNA, 19 nt, Artificial Sequence
  Description of Artificial Sequence: Synthetic oligonucleotide
  Sense strand starting at position 1514 of SEQ ID NO: 1244076
uguuucuuugagggaugua

SEQ ID NO: 1463191 - RNA, 19 nt, Artificial Sequence
  Description of Artificial Sequence: Synthetic oligonucleotide
  Antisense strand to SEQ ID NO: 1463190
uacaucccucaaagaaaca

SEQ ID NO: 1463192 - RNA, 19 nt, Artificial Sequence
  Description of Artificial Sequence: Synthetic oligonucleotide
  Sense strand starting at position 1515 of SEQ ID NO: 1244076
guuucuuugagggauguac

SEQ ID NO: 1463193 - RNA, 19 nt, Artificial Sequence
  Description of Artificial Sequence: Synthetic oligonucleotide
  Antisense strand to SEQ ID NO: 1463192
guacaucccucaaagaaac

SEQ ID NO: 1463194 - RNA, 19 nt, Artificial Sequence
  Description of Artificial Sequence: Synthetic oligonucleotide
  Sense strand starting at position 1613 of SEQ ID NO: 1244076
acuagagcucccuggauuc

SEQ ID NO: 1463195 - RNA, 19 nt, Artificial Sequence
  Description of Artificial Sequence: Synthetic oligonucleotide
  Antisense strand to SEQ ID NO: 1463194
gaauccagggagcucuagu

SEQ ID NO: 1463196 - RNA, 19 nt, Artificial Sequence
  Description of Artificial Sequence: Synthetic oligonucleotide
  Sense strand starting at position 1661 of SEQ ID NO: 1244076
gggacugaguuugcuacaa

SEQ ID NO: 1463197 - RNA, 19 nt, Artificial Sequence
  Description of Artificial Sequence: Synthetic oligonucleotide
  Antisense strand to SEQ ID NO: 1463196
uuguagcaaacucaguccc

SEQ ID NO: 1463198 - RNA, 19 nt, Artificial Sequence
  Description of Artificial Sequence: Synthetic oligonucleotide
  Sense strand starting at position 1663 of SEQ ID NO: 1244076
gacugaguuugcuacaaug

SEQ ID NO: 1463199 - RNA, 19 nt, Artificial Sequence
  Description of Artificial Sequence: Synthetic oligonucleotide
  Antisense strand to SEQ ID NO: 1463198
cauuguagcaaacucaguc

SEQ ID NO: 1463200 - RNA, 19 nt, Artificial Sequence
  Description of Artificial Sequence: Synthetic oligonucleotide
  Sense strand starting at position 1665 of SEQ ID NO: 1244076
cugaguuugcuacaaugau

SEQ ID NO: 1463201 - RNA, 19 nt, Artificial Sequence
  Description of Artificial Sequence: Synthetic oligonucleotide
  Antisense strand to SEQ ID NO: 1463200
aucauuguagcaaacucag

SEQ ID NO: 1463202 - RNA, 19 nt, Artificial Sequence
  Description of Artificial Sequence: Synthetic oligonucleotide
  Sense strand starting at position 1749 of SEQ ID NO: 1244076
cuggauucaccuggcggaa

SEQ ID NO: 1463203 - RNA, 19 nt, Artificial Sequence
  Description of Artificial Sequence: Synthetic oligonucleotide
  Antisense strand to SEQ ID NO: 1463202
uuccgccaggugaauccag

SEQ ID NO: 1463204 - RNA, 19 nt, Artificial Sequence
  Description of Artificial Sequence: Synthetic oligonucleotide
  Sense strand starting at position 2014 of SEQ ID NO: 1244076
ugggauccaugguucaaga

SEQ ID NO: 1463205 - RNA, 19 nt, Artificial Sequence
  Description of Artificial Sequence: Synthetic oligonucleotide
  Antisense strand to SEQ ID NO: 1463204
ucuugaaccauggauccca

SEQ ID NO: 1463206 - RNA, 19 nt, Artificial Sequence
  Description of Artificial Sequence: Synthetic oligonucleotide
  Sense strand starting at position 2107 of SEQ ID NO: 1244076
agccuauacagaggugaga

SEQ ID NO: 1463207 - RNA, 19 nt, Artificial Sequence
  Description of Artificial Sequence: Synthetic oligonucleotide
  Antisense strand to SEQ ID NO: 1463206
ucucaccucuguauaggcu

SEQ ID NO: 1463208 - RNA, 19 nt, Artificial Sequence
  Description of Artificial Sequence: Synthetic oligonucleotide
  Sense strand starting at position 2142 of SEQ ID NO: 1244076
uggcgauucuuuccuacau

SEQ ID NO: 1463209 - RNA, 19 nt, Artificial Sequence
  Description of Artificial Sequence: Synthetic oligonucleotide
  Antisense strand to SEQ ID NO: 1463208
auguaggaaagaaucgcca

SEQ ID NO: 1463210 - RNA, 19 nt, Artificial Sequence
  Description of Artificial Sequence: Synthetic oligonucleotide
  Sense strand starting at position 2143 of SEQ ID NO: 1244076
ggcgauucuuuccuacaug

SEQ ID NO: 1463211 - RNA, 19 nt, Artificial Sequence
  Description of Artificial Sequence: Synthetic oligonucleotide
  Antisense strand to SEQ ID NO: 1463210
cauguaggaaagaaucgcc

SEQ ID NO: 1463212 - RNA, 19 nt, Artificial Sequence
  Description of Artificial Sequence: Synthetic oligonucleotide
  Sense strand starting at position 2252 of SEQ ID NO: 1244076
ggugaaagauguuaugaag

SEQ ID NO: 1463213 - RNA, 19 nt, Artificial Sequence
  Description of Artificial Sequence: Synthetic oligonucleotide
  Antisense strand to SEQ ID NO: 1463212
cuucauaacaucuuucacc

SEQ ID NO: 1463214 - RNA, 19 nt, Artificial Sequence
  Description of Artificial Sequence: Synthetic oligonucleotide
  Sense strand starting at position 2990 of SEQ ID NO: 1244076
ggccaaggauuccuucuua

SEQ ID NO: 1463215 - RNA, 19 nt, Artificial Sequence
  Description of Artificial Sequence: Synthetic oligonucleotide
  Antisense strand to SEQ ID NO: 1463214
uaagaaggaauccuuggcc

SEQ ID NO: 1463216 - RNA, 19 nt, Artificial Sequence
  Description of Artificial Sequence: Synthetic oligonucleotide
  Sense strand starting at position 3160 of SEQ ID NO: 1244076
ccaccaagcuuggcuaaua

SEQ ID NO: 1463217 - RNA, 19 nt, Artificial Sequence
  Description of Artificial Sequence: Synthetic oligonucleotide
  Antisense strand to SEQ ID NO: 1463216
uauuagccaagcuuggugg

SEQ ID NO: 1463218 - RNA, 19 nt, Artificial Sequence
  Description of Artificial Sequence: Synthetic oligonucleotide
  Sense strand starting at position 3277 of SEQ ID NO: 1244076
uggaauuaaaggugugaga

SEQ ID NO: 1463219 - RNA, 19 nt, Artificial Sequence
  Description of Artificial Sequence: Synthetic oligonucleotide
  Antisense strand to SEQ ID NO: 1463218
ucucacaccuuuaauucca

SEQ ID NO: 1463220 - RNA, 19 nt, Artificial Sequence
  Description of Artificial Sequence: Synthetic oligonucleotide
  Sense strand starting at position 3280 of SEQ ID NO: 1244076
aauuaaaggugugagacau

SEQ ID NO: 1463221 - RNA, 19 nt, Artificial Sequence
  Description of Artificial Sequence: Synthetic oligonucleotide
  Antisense strand to SEQ ID NO: 1463220
augucucacaccuuuaauu

SEQ ID NO: 1463222 - RNA, 19 nt, Artificial Sequence
  Description of Artificial Sequence: Synthetic oligonucleotide
  Sense strand starting at position 3551 of SEQ ID NO: 1244076
gucccaagcuugcaagagu

SEQ ID NO: 1463223 - RNA, 19 nt, Artificial Sequence
  Description of Artificial Sequence: Synthetic oligonucleotide
  Antisense strand to SEQ ID NO: 1463222
acucuugcaagcuugggac

SEQ ID NO: 1463224 - RNA, 19 nt, Artificial Sequence
  Description of Artificial Sequence: Synthetic oligonucleotide
  Sense strand starting at position 3589 of SEQ ID NO: 1244076
acuagagauuccuugucca

SEQ ID NO: 1463225 - RNA, 19 nt, Artificial Sequence
  Description of Artificial Sequence: Synthetic oligonucleotide
  Antisense strand to SEQ ID NO: 1463224
uggacaaggaaucucuagu

SEQ ID NO: 1463226 - RNA, 19 nt, Artificial Sequence
  Description of Artificial Sequence: Synthetic oligonucleotide
  Sense strand starting at position 3592 of SEQ ID NO: 1244076
agagauuccuuguccaaag

SEQ ID NO: 1463227 - RNA, 19 nt, Artificial Sequence
  Description of Artificial Sequence: Synthetic oligonucleotide
  Antisense strand to SEQ ID NO: 1463226
cuuuggacaaggaaucucu

SEQ ID NO: 1463228 - RNA, 19 nt, Artificial Sequence
  Description of Artificial Sequence: Synthetic oligonucleotide
  Sense strand starting at position 3593 of SEQ ID NO: 1244076
gagauuccuuguccaaagg

SEQ ID NO: 1463229 - RNA, 19 nt, Artificial Sequence
  Description of Artificial Sequence: Synthetic oligonucleotide
  Antisense strand to SEQ ID NO: 1463228
ccuuuggacaaggaaucuc

SEQ ID NO: 1463230 - RNA, 19 nt, Artificial Sequence
  Description of Artificial Sequence: Synthetic oligonucleotide
  Sense strand starting at position 3610 of SEQ ID NO: 1244076
gggaucacuuaucacaauu

SEQ ID NO: 1463231 - RNA, 19 nt, Artificial Sequence
  Description of Artificial Sequence: Synthetic oligonucleotide
  Antisense strand to SEQ ID NO: 1463230
aauugugauaagugauccc

SEQ ID NO: 1463232 - RNA, 19 nt, Artificial Sequence
  Description of Artificial Sequence: Synthetic oligonucleotide
  Sense strand starting at position 211 of SEQ ID NO: 1244077
gcaggagaaucaucuguac

SEQ ID NO: 1463233 - RNA, 19 nt, Artificial Sequence
  Description of Artificial Sequence: Synthetic oligonucleotide
  Antisense strand to SEQ ID NO: 1463232
guacagaugauucuccugc

SEQ ID NO: 1463234 - RNA, 19 nt, Artificial Sequence
  Description of Artificial Sequence: Synthetic oligonucleotide
  Sense strand starting at position 214 of SEQ ID NO: 1244077
ggagaaucaucuguaccug

SEQ ID NO: 1463235 - RNA, 19 nt, Artificial Sequence
  Description of Artificial Sequence: Synthetic oligonucleotide
  Antisense strand to SEQ ID NO: 1463234
cagguacagaugauucucc

SEQ ID NO: 1463236 - RNA, 19 nt, Artificial Sequence
  Description of Artificial Sequence: Synthetic oligonucleotide
  Sense strand starting at position 350 of SEQ ID NO: 1244077
agcucucaguugcuagaga

SEQ ID NO: 1463237 - RNA, 19 nt, Artificial Sequence
  Description of Artificial Sequence: Synthetic oligonucleotide
  Antisense strand to SEQ ID NO: 1463236
ucucuagcaacugagagcu

SEQ ID NO: 1463238 - RNA, 19 nt, Artificial Sequence
  Description of Artificial Sequence: Synthetic oligonucleotide
  Sense strand starting at position 421 of SEQ ID NO: 1244077
gugcauagauugucacugu

SEQ ID NO: 1463239 - RNA, 19 nt, Artificial Sequence
  Description of Artificial Sequence: Synthetic oligonucleotide
  Antisense strand to SEQ ID NO: 1463238
acagugacaaucuaugcac

SEQ ID NO: 1463240 - RNA, 19 nt, Artificial Sequence
  Description of Artificial Sequence: Synthetic oligonucleotide
  Sense strand starting at position 425 of SEQ ID NO: 1244077
auagauugucacugucauc

SEQ ID NO: 1463241 - RNA, 19 nt, Artificial Sequence
  Description of Artificial Sequence: Synthetic oligonucleotide
  Antisense strand to SEQ ID NO: 1463240
gaugacagugacaaucuau

SEQ ID NO: 1463242 - RNA, 19 nt, Artificial Sequence
  Description of Artificial Sequence: Synthetic oligonucleotide
  Sense strand starting at position 849 of SEQ ID NO: 1244077
acauguguauaccugcaua

SEQ ID NO: 1463243 - RNA, 19 nt, Artificial Sequence
  Description of Artificial Sequence: Synthetic oligonucleotide
  Antisense strand to SEQ ID NO: 1463242
uaugcagguauacacaugu

SEQ ID NO: 1463244 - RNA, 19 nt, Artificial Sequence
  Description of Artificial Sequence: Synthetic oligonucleotide
  Sense strand starting at position 852 of SEQ ID NO: 1244077
uguguauaccugcauauag

SEQ ID NO: 1463245 - RNA, 19 nt, Artificial Sequence
  Description of Artificial Sequence: Synthetic oligonucleotide
  Antisense strand to SEQ ID NO: 1463244
cuauaugcagguauacaca

SEQ ID NO: 1463246 - RNA, 19 nt, Artificial Sequence
  Description of Artificial Sequence: Synthetic oligonucleotide
  Sense strand starting at position 854 of SEQ ID NO: 1244077
uguauaccugcauauagau

SEQ ID NO: 1463247 - RNA, 19 nt, Artificial Sequence
  Description of Artificial Sequence: Synthetic oligonucleotide
  Antisense strand to SEQ ID NO: 1463246
aucuauaugcagguauaca

SEQ ID NO: 1463248 - RNA, 19 nt, Artificial Sequence
  Description of Artificial Sequence: Synthetic oligonucleotide
  Sense strand starting at position 869 of SEQ ID NO: 1244077
agauguaugcuacauaugu

SEQ ID NO: 1463249 - RNA, 19 nt, Artificial Sequence
  Description of Artificial Sequence: Synthetic oligonucleotide
  Antisense strand to SEQ ID NO: 1463248
acauauguagcauacaucu

SEQ ID NO: 1463250 - RNA, 19 nt, Artificial Sequence
  Description of Artificial Sequence: Synthetic oligonucleotide
  Sense strand starting at position 877 of SEQ ID NO: 1244077
gcuacauauguauaccuau

SEQ ID NO: 1463251 - RNA, 19 nt, Artificial Sequence
  Description of Artificial Sequence: Synthetic oligonucleotide
  Antisense strand to SEQ ID NO: 1463250
auagguauacauauguagc

SEQ ID NO: 1463252 - RNA, 19 nt, Artificial Sequence
  Description of Artificial Sequence: Synthetic oligonucleotide
  Sense strand starting at position 948 of SEQ ID NO: 1244077
ccagauaaauauggauuga

SEQ ID NO: 1463253 - RNA, 19 nt, Artificial Sequence
  Description of Artificial Sequence: Synthetic oligonucleotide
  Antisense strand to SEQ ID NO: 1463252
ucaauccauauuuaucugg

SEQ ID NO: 1463254 - RNA, 19 nt, Artificial Sequence
  Description of Artificial Sequence: Synthetic oligonucleotide
  Sense strand starting at position 959 of SEQ ID NO: 1244077
uggauugauuuauacacau

SEQ ID NO: 1463255 - RNA, 19 nt, Artificial Sequence
  Description of Artificial Sequence: Synthetic oligonucleotide
  Antisense strand to SEQ ID NO: 1463254
auguguauaaaucaaucca

SEQ ID NO: 1463256 - RNA, 19 nt, Artificial Sequence
  Description of Artificial Sequence: Synthetic oligonucleotide
  Sense strand starting at position 986 of SEQ ID NO: 1244077
acaccuguauguguuaaca

SEQ ID NO: 1463257 - RNA, 19 nt, Artificial Sequence
  Description of Artificial Sequence: Synthetic oligonucleotide
  Antisense strand to SEQ ID NO: 1463256
uguuaacacauacaggugu

SEQ ID NO: 1463258 - RNA, 19 nt, Artificial Sequence
  Description of Artificial Sequence: Synthetic oligonucleotide
  Sense strand starting at position 1085 of SEQ ID NO: 1244077
gcacauguucgugccaaau

SEQ ID NO: 1463259 - RNA, 19 nt, Artificial Sequence
  Description of Artificial Sequence: Synthetic oligonucleotide
  Antisense strand to SEQ ID NO: 1463258
auuuggcacgaacaugugc

SEQ ID NO: 1463260 - RNA, 19 nt, Artificial Sequence
  Description of Artificial Sequence: Synthetic oligonucleotide
  Sense strand starting at position 1205 of SEQ ID NO: 1244077
cuggcuugaguccauagaa

SEQ ID NO: 1463261 - RNA, 19 nt, Artificial Sequence
  Description of Artificial Sequence: Synthetic oligonucleotide
  Antisense strand to SEQ ID NO: 1463260
uucuauggacucaagccag

SEQ ID NO: 1463262 - RNA, 19 nt, Artificial Sequence
  Description of Artificial Sequence: Synthetic oligonucleotide
  Sense strand starting at position 1352 of SEQ ID NO: 1244077
cgaggcucccuaggucauu

SEQ ID NO: 1463263 - RNA, 19 nt, Artificial Sequence
  Description of Artificial Sequence: Synthetic oligonucleotide
  Antisense strand to SEQ ID NO: 1463262
aaugaccuagggagccucg

SEQ ID NO: 1463264 - RNA, 19 nt, Artificial Sequence
  Description of Artificial Sequence: Synthetic oligonucleotide
  Sense strand starting at position 1358 of SEQ ID NO: 1244077
ucccuaggucauuggucaa

SEQ ID NO: 1463265 - RNA, 19 nt, Artificial Sequence
  Description of Artificial Sequence: Synthetic oligonucleotide
  Antisense strand to SEQ ID NO: 1463264
uugaccaaugaccuaggga

SEQ ID NO: 1463266 - RNA, 19 nt, Artificial Sequence
  Description of Artificial Sequence: Synthetic oligonucleotide
  Sense strand starting at position 1774 of SEQ ID NO: 1244077
ugggcaucuccagaguaga

SEQ ID NO: 1463267 - RNA, 19 nt, Artificial Sequence
  Description of Artificial Sequence: Synthetic oligonucleotide
  Antisense strand to SEQ ID NO: 1463266
ucuacucuggagaugccca

SEQ ID NO: 1463268 - RNA, 19 nt, Artificial Sequence
  Description of Artificial Sequence: Synthetic oligonucleotide
  Sense strand starting at position 1777 of SEQ ID NO: 1244077
gcaucuccagaguagagau

SEQ ID NO: 1463269 - RNA, 19 nt, Artificial Sequence
  Description of Artificial Sequence: Synthetic oligonucleotide
  Antisense strand to SEQ ID NO: 1463268
aucucuacucuggagaugc

SEQ ID NO: 1463270 - RNA, 19 nt, Artificial Sequence
  Description of Artificial Sequence: Synthetic oligonucleotide
  Sense strand starting at position 1837 of SEQ ID NO: 1244077
gguacagauccuggcuuga

SEQ ID NO: 1463271 - RNA, 19 nt, Artificial Sequence
  Description of Artificial Sequence: Synthetic oligonucleotide
  Antisense strand to SEQ ID NO: 1463270
ucaagccaggaucuguacc

SEQ ID NO: 1463272 - RNA, 19 nt, Artificial Sequence
  Description of Artificial Sequence: Synthetic oligonucleotide
  Sense strand starting at position 1839 of SEQ ID NO: 1244077
uacagauccuggcuugacu

SEQ ID NO: 1463273 - RNA, 19 nt, Artificial Sequence
  Description of Artificial Sequence: Synthetic oligonucleotide
  Antisense strand to SEQ ID NO: 1463272
agucaagccaggaucugua

SEQ ID NO: 1463274 - RNA, 19 nt, Artificial Sequence
  Description of Artificial Sequence: Synthetic oligonucleotide
  Sense strand starting at position 1847 of SEQ ID NO: 1244077
cuggcuugacuugggaaga

SEQ ID NO: 1463275 - RNA, 19 nt, Artificial Sequence
  Description of Artificial Sequence: Synthetic oligonucleotide
  Antisense strand to SEQ ID NO: 1463274
ucuucccaagucaagccag

SEQ ID NO: 1463276 - RNA, 19 nt, Artificial Sequence
  Description of Artificial Sequence: Synthetic oligonucleotide
  Sense strand starting at position 2163 of SEQ ID NO: 1244077
ggcuucuggauguagguau

SEQ ID NO: 1463277 - RNA, 19 nt, Artificial Sequence
  Description of Artificial Sequence: Synthetic oligonucleotide
  Antisense strand to SEQ ID NO: 1463276
auaccuacauccagaagcc

SEQ ID NO: 1463278 - RNA, 19 nt, Artificial Sequence
  Description of Artificial Sequence: Synthetic oligonucleotide
  Sense strand starting at position 2632 of SEQ ID NO: 1244077
uaccguaauuggucuuugu

SEQ ID NO: 1463279 - RNA, 19 nt, Artificial Sequence
  Description of Artificial Sequence: Synthetic oligonucleotide
  Antisense strand to SEQ ID NO: 1463278
acaaagaccaauuacggua

SEQ ID NO: 1463280 - RNA, 19 nt, Artificial Sequence
  Description of Artificial Sequence: Synthetic oligonucleotide
  Sense strand starting at position 2635 of SEQ ID NO: 1244077
cguaauuggucuuuguaca

SEQ ID NO: 1463281 - RNA, 19 nt, Artificial Sequence
  Description of Artificial Sequence: Synthetic oligonucleotide
  Antisense strand to SEQ ID NO: 1463280
uguacaaagaccaauuacg

SEQ ID NO: 1463282 - RNA, 19 nt, Artificial Sequence
  Description of Artificial Sequence: Synthetic oligonucleotide
  Sense strand starting at position 2636 of SEQ ID NO: 1244077
guaauuggucuuuguacag

SEQ ID NO: 1463283 - RNA, 19 nt, Artificial Sequence
  Description of Artificial Sequence: Synthetic oligonucleotide
  Antisense strand to SEQ ID NO: 1463282
cuguacaaagaccaauuac

SEQ ID NO: 1463284 - RNA, 19 nt, Artificial Sequence
  Description of Artificial Sequence: Synthetic oligonucleotide
  Sense strand starting at position 2680 of SEQ ID NO: 1244077
ucaugugccuuaucugaau

SEQ ID NO: 1463285 - RNA, 19 nt, Artificial Sequence
  Description of Artificial Sequence: Synthetic oligonucleotide
  Antisense strand to SEQ ID NO: 1463284
auucagauaaggcacauga

SEQ ID NO: 1463286 - RNA, 19 nt, Artificial Sequence
  Description of Artificial Sequence: Synthetic oligonucleotide
  Sense strand starting at position 2686 of SEQ ID NO: 1244077
gccuuaucugaaugagucu

SEQ ID NO: 1463287 - RNA, 19 nt, Artificial Sequence
  Description of Artificial Sequence: Synthetic oligonucleotide
  Antisense strand to SEQ ID NO: 1463286
agacucauucagauaaggc

SEQ ID NO: 1463288 - RNA, 19 nt, Artificial Sequence
  Description of Artificial Sequence: Synthetic oligonucleotide
  Sense strand starting at position 2719 of SEQ ID NO: 1244077
uauggugaauguucuuauc

SEQ ID NO: 1463289 - RNA, 19 nt, Artificial Sequence
  Description of Artificial Sequence: Synthetic oligonucleotide
  Antisense strand to SEQ ID NO: 1463288
gauaagaacauucaccaua

SEQ ID NO: 1463290 - RNA, 19 nt, Artificial Sequence
  Description of Artificial Sequence: Synthetic oligonucleotide
  Sense strand starting at position 2918 of SEQ ID NO: 1244077
accacaguguuguuuauga

SEQ ID NO: 1463291 - RNA, 19 nt, Artificial Sequence
  Description of Artificial Sequence: Synthetic oligonucleotide
  Antisense strand to SEQ ID NO: 1463290
ucauaaacaacacuguggu

SEQ ID NO: 1463292 - RNA, 19 nt, Artificial Sequence
  Description of Artificial Sequence: Synthetic oligonucleotide
  Sense strand starting at position 3133 of SEQ ID NO: 1244077
gagauagauucuuugucca

SEQ ID NO: 1463293 - RNA, 19 nt, Artificial Sequence
  Description of Artificial Sequence: Synthetic oligonucleotide
  Antisense strand to SEQ ID NO: 1463292
uggacaaagaaucuaucuc

SEQ ID NO: 1463294 - RNA, 19 nt, Artificial Sequence
  Description of Artificial Sequence: Synthetic oligonucleotide
  Sense strand starting at position 3739 of SEQ ID NO: 1244077
accuuugauguccaagauc

SEQ ID NO: 1463295 - RNA, 19 nt, Artificial Sequence
  Description of Artificial Sequence: Synthetic oligonucleotide
  Antisense strand to SEQ ID NO: 1463294
gaucuuggacaucaaaggu

SEQ ID NO: 1463296 - RNA, 19 nt, Artificial Sequence
  Description of Artificial Sequence: Synthetic oligonucleotide
  Sense strand starting at position 3742 of SEQ ID NO: 1244077
uuugauguccaagaucauu

SEQ ID NO: 1463297 - RNA, 19 nt, Artificial Sequence
  Description of Artificial Sequence: Synthetic oligonucleotide
  Antisense strand to SEQ ID NO: 1463296
aaugaucuuggacaucaaa

SEQ ID NO: 1463298 - RNA, 19 nt, Artificial Sequence
  Description of Artificial Sequence: Synthetic oligonucleotide
  Sense strand starting at position 3748 of SEQ ID NO: 1244077
guccaagaucauugagugu

SEQ ID NO: 1463299 - RNA, 19 nt, Artificial Sequence
  Description of Artificial Sequence: Synthetic oligonucleotide
  Antisense strand to SEQ ID NO: 1463298
acacucaaugaucuuggac

SEQ ID NO: 1463300 - RNA, 19 nt, Artificial Sequence
  Description of Artificial Sequence: Synthetic oligonucleotide
  Sense strand starting at position 3752 of SEQ ID NO: 1244077
aagaucauugaguguaugu

SEQ ID NO: 1463301 - RNA, 19 nt, Artificial Sequence
  Description of Artificial Sequence: Synthetic oligonucleotide
  Antisense strand to SEQ ID NO: 1463300
acauacacucaaugaucuu

SEQ ID NO: 1463302 - RNA, 19 nt, Artificial Sequence
  Description of Artificial Sequence: Synthetic oligonucleotide
  Sense strand starting at position 3754 of SEQ ID NO: 1244077
gaucauugaguguauguag

SEQ ID NO: 1463303 - RNA, 19 nt, Artificial Sequence
  Description of Artificial Sequence: Synthetic oligonucleotide
  Antisense strand to SEQ ID NO: 1463302
cuacauacacucaaugauc

SEQ ID NO: 1463304 - RNA, 19 nt, Artificial Sequence
  Description of Artificial Sequence: Synthetic oligonucleotide
  Sense strand starting at position 3757 of SEQ ID NO: 1244077
cauugaguguauguaggua

SEQ ID NO: 1463305 - RNA, 19 nt, Artificial Sequence
  Description of Artificial Sequence: Synthetic oligonucleotide
  Antisense strand to SEQ ID NO: 1463304
uaccuacauacacucaaug

SEQ ID NO: 1463306 - RNA, 19 nt, Artificial Sequence
  Description of Artificial Sequence: Synthetic oligonucleotide
  Sense strand starting at position 3762 of SEQ ID NO: 1244077
aguguauguagguagggau

SEQ ID NO: 1463307 - RNA, 19 nt, Artificial Sequence
  Description of Artificial Sequence: Synthetic oligonucleotide
  Antisense strand to SEQ ID NO: 1463306
aucccuaccuacauacacu

SEQ ID NO: 1463308 - RNA, 19 nt, Artificial Sequence
  Description of Artificial Sequence: Synthetic oligonucleotide
  Sense strand starting at position 3813 of SEQ ID NO: 1244077
ccaguugaccucugcaaac

SEQ ID NO: 1463309 - RNA, 19 nt, Artificial Sequence
  Description of Artificial Sequence: Synthetic oligonucleotide
  Antisense strand to SEQ ID NO: 1463308
guuugcagaggucaacugg

SEQ ID NO: 1463310 - RNA, 19 nt, Artificial Sequence
  Description of Artificial Sequence: Synthetic oligonucleotide
  Sense strand starting at position 3815 of SEQ ID NO: 1244077
aguugaccucugcaaacaa

SEQ ID NO: 1463311 - RNA, 19 nt, Artificial Sequence
  Description of Artificial Sequence: Synthetic oligonucleotide
  Antisense strand to SEQ ID NO: 1463310
uuguuugcagaggucaacu

SEQ ID NO: 1463312 - RNA, 19 nt, Artificial Sequence
  Description of Artificial Sequence: Synthetic oligonucleotide
  Sense strand starting at position 201 of SEQ ID NO: 1244078
uuuaguaaguugcugagua

SEQ ID NO: 1463313 - RNA, 19 nt, Artificial Sequence
  Description of Artificial Sequence: Synthetic oligonucleotide
  Antisense strand to SEQ ID NO: 1463312
uacucagcaacuuacuaaa

SEQ ID NO: 1463314 - RNA, 19 nt, Artificial Sequence
  Description of Artificial Sequence: Synthetic oligonucleotide
  Sense strand starting at position 203 of SEQ ID NO: 1244078
uaguaaguugcugaguaac

SEQ ID NO: 1463315 - RNA, 19 nt, Artificial Sequence
  Description of Artificial Sequence: Synthetic oligonucleotide
  Antisense strand to SEQ ID NO: 1463314
guuacucagcaacuuacua

SEQ ID NO: 1463316 - RNA, 19 nt, Artificial Sequence
  Description of Artificial Sequence: Synthetic oligonucleotide
  Sense strand starting at position 205 of SEQ ID NO: 1244078
guaaguugcugaguaacuu

SEQ ID NO: 1463317 - RNA, 19 nt, Artificial Sequence
  Description of Artificial Sequence: Synthetic oligonucleotide
  Antisense strand to SEQ ID NO: 1463316
aaguuacucagcaacuuac

SEQ ID NO: 1463318 - RNA, 19 nt, Artificial Sequence
  Description of Artificial Sequence: Synthetic oligonucleotide
  Sense strand starting at position 206 of SEQ ID NO: 1244078
uaaguugcugaguaacuua

SEQ ID NO: 1463319 - RNA, 19 nt, Artificial Sequence
  Description of Artificial Sequence: Synthetic oligonucleotide
  Antisense strand to SEQ ID NO: 1463318
uaaguuacucagcaacuua

SEQ ID NO: 1463320 - RNA, 19 nt, Artificial Sequence
  Description of Artificial Sequence: Synthetic oligonucleotide
  Sense strand starting at position 209 of SEQ ID NO: 1244078
guugcugaguaacuuaaca

SEQ ID NO: 1463321 - RNA, 19 nt, Artificial Sequence
  Description of Artificial Sequence: Synthetic oligonucleotide
  Antisense strand to SEQ ID NO: 1463320
uguuaaguuacucagcaac

SEQ ID NO: 1463322 - RNA, 19 nt, Artificial Sequence
  Description of Artificial Sequence: Synthetic oligonucleotide
  Sense strand starting at position 245 of SEQ ID NO: 1244078
cuggucccauccugaaaua

SEQ ID NO: 1463323 - RNA, 19 nt, Artificial Sequence
  Description of Artificial Sequence: Synthetic oligonucleotide
  Antisense strand to SEQ ID NO: 1463322
uauuucaggaugggaccag

SEQ ID NO: 1463324 - RNA, 19 nt, Artificial Sequence
  Description of Artificial Sequence: Synthetic oligonucleotide
  Sense strand starting at position 246 of SEQ ID NO: 1244078
uggucccauccugaaauau

SEQ ID NO: 1463325 - RNA, 19 nt, Artificial Sequence
  Description of Artificial Sequence: Synthetic oligonucleotide
  Antisense strand to SEQ ID NO: 1463324
auauuucaggaugggacca

SEQ ID NO: 1463326 - RNA, 19 nt, Artificial Sequence
  Description of Artificial Sequence: Synthetic oligonucleotide
  Sense strand starting at position 377 of SEQ ID NO: 1244078
cagggacccucagagaguu

SEQ ID NO: 1463327 - RNA, 19 nt, Artificial Sequence
  Description of Artificial Sequence: Synthetic oligonucleotide
  Antisense strand to SEQ ID NO: 1463326
aacucucugagggucccug

SEQ ID NO: 1463328 - RNA, 19 nt, Artificial Sequence
  Description of Artificial Sequence: Synthetic oligonucleotide
  Sense strand starting at position 1100 of SEQ ID NO: 1244078
ggacucagcucuggucaga

SEQ ID NO: 1463329 - RNA, 19 nt, Artificial Sequence
  Description of Artificial Sequence: Synthetic oligonucleotide
  Antisense strand to SEQ ID NO: 1463328
ucugaccagagcugagucc

SEQ ID NO: 1463330 - RNA, 19 nt, Artificial Sequence
  Description of Artificial Sequence: Synthetic oligonucleotide
  Sense strand starting at position 1189 of SEQ ID NO: 1244078
ccuucugaucccugaacgu

SEQ ID NO: 1463331 - RNA, 19 nt, Artificial Sequence
  Description of Artificial Sequence: Synthetic oligonucleotide
  Antisense strand to SEQ ID NO: 1463330
acguucagggaucagaagg

SEQ ID NO: 1463332 - RNA, 19 nt, Artificial Sequence
  Description of Artificial Sequence: Synthetic oligonucleotide
  Sense strand starting at position 1237 of SEQ ID NO: 1244078
gcuguaaggucuuugaagc

SEQ ID NO: 1463333 - RNA, 19 nt, Artificial Sequence
  Description of Artificial Sequence: Synthetic oligonucleotide
  Antisense strand to SEQ ID NO: 1463332
gcuucaaagaccuuacagc

SEQ ID NO: 1463334 - RNA, 19 nt, Artificial Sequence
  Description of Artificial Sequence: Synthetic oligonucleotide
  Sense strand starting at position 1238 of SEQ ID NO: 1244078
cuguaaggucuuugaagcu

SEQ ID NO: 1463335 - RNA, 19 nt, Artificial Sequence
  Description of Artificial Sequence: Synthetic oligonucleotide
  Antisense strand to SEQ ID NO: 1463334
agcuucaaagaccuuacag

SEQ ID NO: 1463336 - RNA, 19 nt, Artificial Sequence
  Description of Artificial Sequence: Synthetic oligonucleotide
  Sense strand starting at position 1244 of SEQ ID NO: 1244078
ggucuuugaagcuggugaa

SEQ ID NO: 1463337 - RNA, 19 nt, Artificial Sequence
  Description of Artificial Sequence: Synthetic oligonucleotide
  Antisense strand to SEQ ID NO: 1463336
uucaccagcuucaaagacc

SEQ ID NO: 1463338 - RNA, 19 nt, Artificial Sequence
  Description of Artificial Sequence: Synthetic oligonucleotide
  Sense strand starting at position 1247 of SEQ ID NO: 1244078
cuuugaagcuggugaacaa

SEQ ID NO: 1463339 - RNA, 19 nt, Artificial Sequence
  Description of Artificial Sequence: Synthetic oligonucleotide
  Antisense strand to SEQ ID NO: 1463338
uuguucaccagcuucaaag

SEQ ID NO: 1463340 - RNA, 19 nt, Artificial Sequence
  Description of Artificial Sequence: Synthetic oligonucleotide
  Sense strand starting at position 1292 of SEQ ID NO: 1244078
ggugcugugccugaacaca

SEQ ID NO: 1463341 - RNA, 19 nt, Artificial Sequence
  Description of Artificial Sequence: Synthetic oligonucleotide
  Antisense strand to SEQ ID NO: 1463340
uguguucaggcacagcacc

SEQ ID NO: 1463342 - RNA, 19 nt, Artificial Sequence
  Description of Artificial Sequence: Synthetic oligonucleotide
  Sense strand starting at position 1384 of SEQ ID NO: 1244078
ggaguugcaucuucugcuu

SEQ ID NO: 1463343 - RNA, 19 nt, Artificial Sequence
  Description of Artificial Sequence: Synthetic oligonucleotide
  Antisense strand to SEQ ID NO: 1463342
aagcagaagaugcaacucc

SEQ ID NO: 1463344 - RNA, 19 nt, Artificial Sequence
  Description of Artificial Sequence: Synthetic oligonucleotide
  Sense strand starting at position 1387 of SEQ ID NO: 1244078
guugcaucuucugcuuaaa

SEQ ID NO: 1463345 - RNA, 19 nt, Artificial Sequence
  Description of Artificial Sequence: Synthetic oligonucleotide
  Antisense strand to SEQ ID NO: 1463344
uuuaagcagaagaugcaac

SEQ ID NO: 1463346 - RNA, 19 nt, Artificial Sequence
  Description of Artificial Sequence: Synthetic oligonucleotide
  Sense strand starting at position 1389 of SEQ ID NO: 1244078
ugcaucuucugcuuaaaga

SEQ ID NO: 1463347 - RNA, 19 nt, Artificial Sequence
  Description of Artificial Sequence: Synthetic oligonucleotide
  Antisense strand to SEQ ID NO: 1463346
ucuuuaagcagaagaugca

SEQ ID NO: 1463348 - RNA, 19 nt, Artificial Sequence
  Description of Artificial Sequence: Synthetic oligonucleotide
  Sense strand starting at position 1390 of SEQ ID NO: 1244078
gcaucuucugcuuaaagau

SEQ ID NO: 1463349 - RNA, 19 nt, Artificial Sequence
  Description of Artificial Sequence: Synthetic oligonucleotide
  Antisense strand to SEQ ID NO: 1463348
aucuuuaagcagaagaugc

SEQ ID NO: 1463350 - RNA, 19 nt, Artificial Sequence
  Description of Artificial Sequence: Synthetic oligonucleotide
  Sense strand starting at position 1399 of SEQ ID NO: 1244078
gcuuaaagauucucagagg

SEQ ID NO: 1463351 - RNA, 19 nt, Artificial Sequence
  Description of Artificial Sequence: Synthetic oligonucleotide
  Antisense strand to SEQ ID NO: 1463350
ccucugagaaucuuuaagc

SEQ ID NO: 1463352 - RNA, 19 nt, Artificial Sequence
  Description of Artificial Sequence: Synthetic oligonucleotide
  Sense strand starting at position 1402 of SEQ ID NO: 1244078
uaaagauucucagaggguu

SEQ ID NO: 1463353 - RNA, 19 nt, Artificial Sequence
  Description of Artificial Sequence: Synthetic oligonucleotide
  Antisense strand to SEQ ID NO: 1463352
aacccucugagaaucuuua

SEQ ID NO: 1463354 - RNA, 19 nt, Artificial Sequence
  Description of Artificial Sequence: Synthetic oligonucleotide
  Sense strand starting at position 1488 of SEQ ID NO: 1244078
gcuccagccucagauuauu

SEQ ID NO: 1463355 - RNA, 19 nt, Artificial Sequence
  Description of Artificial Sequence: Synthetic oligonucleotide
  Antisense strand to SEQ ID NO: 1463354
aauaaucugaggcuggagc

SEQ ID NO: 1463356 - RNA, 19 nt, Artificial Sequence
  Description of Artificial Sequence: Synthetic oligonucleotide
  Sense strand starting at position 1540 of SEQ ID NO: 1244078
uggaaucaguuguacaaau

SEQ ID NO: 1463357 - RNA, 19 nt, Artificial Sequence
  Description of Artificial Sequence: Synthetic oligonucleotide
  Antisense strand to SEQ ID NO: 1463356
auuuguacaacugauucca

SEQ ID NO: 1463358 - RNA, 19 nt, Artificial Sequence
  Description of Artificial Sequence: Synthetic oligonucleotide
  Sense strand starting at position 1562 of SEQ ID NO: 1244078
uuuaaucgccuccgaaauc

SEQ ID NO: 1463359 - RNA, 19 nt, Artificial Sequence
  Description of Artificial Sequence: Synthetic oligonucleotide
  Antisense strand to SEQ ID NO: 1463358
gauuucggaggcgauuaaa

SEQ ID NO: 1463360 - RNA, 19 nt, Artificial Sequence
  Description of Artificial Sequence: Synthetic oligonucleotide
  Sense strand starting at position 1611 of SEQ ID NO: 1244078
ccagcucuccugugaguca

SEQ ID NO: 1463361 - RNA, 19 nt, Artificial Sequence
  Description of Artificial Sequence: Synthetic oligonucleotide
  Antisense strand to SEQ ID NO: 1463360
ugacucacaggagagcugg

SEQ ID NO: 1463362 - RNA, 19 nt, Artificial Sequence
  Description of Artificial Sequence: Synthetic oligonucleotide
  Sense strand starting at position 2339 of SEQ ID NO: 1244078
cccugagcucucugagacu

SEQ ID NO: 1463363 - RNA, 19 nt, Artificial Sequence
  Description of Artificial Sequence: Synthetic oligonucleotide
  Antisense strand to SEQ ID NO: 1463362
agucucagagagcucaggg

SEQ ID NO: 1463364 - RNA, 19 nt, Artificial Sequence
  Description of Artificial Sequence: Synthetic oligonucleotide
  Sense strand starting at position 2348 of SEQ ID NO: 1244078
cucugagacuuggaaaucu

SEQ ID NO: 1463365 - RNA, 19 nt, Artificial Sequence
  Description of Artificial Sequence: Synthetic oligonucleotide
  Antisense strand to SEQ ID NO: 1463364
agauuuccaagucucagag

SEQ ID NO: 1463366 - RNA, 19 nt, Artificial Sequence
  Description of Artificial Sequence: Synthetic oligonucleotide
  Sense strand starting at position 2379 of SEQ ID NO: 1244078
ucuggaaugucacucugga

SEQ ID NO: 1463367 - RNA, 19 nt, Artificial Sequence
  Description of Artificial Sequence: Synthetic oligonucleotide
  Antisense strand to SEQ ID NO: 1463366
uccagagugacauuccaga

SEQ ID NO: 1463368 - RNA, 19 nt, Artificial Sequence
  Description of Artificial Sequence: Synthetic oligonucleotide
  Sense strand starting at position 2524 of SEQ ID NO: 1244078
uuaggaucuugaucgugga

SEQ ID NO: 1463369 - RNA, 19 nt, Artificial Sequence
  Description of Artificial Sequence: Synthetic oligonucleotide
  Antisense strand to SEQ ID NO: 1463368
uccacgaucaagauccuaa

SEQ ID NO: 1463370 - RNA, 19 nt, Artificial Sequence
  Description of Artificial Sequence: Synthetic oligonucleotide
  Sense strand starting at position 2528 of SEQ ID NO: 1244078
gaucuugaucguggaguuu

SEQ ID NO: 1463371 - RNA, 19 nt, Artificial Sequence
  Description of Artificial Sequence: Synthetic oligonucleotide
  Antisense strand to SEQ ID NO: 1463370
aaacuccacgaucaagauc

SEQ ID NO: 1463372 - RNA, 19 nt, Artificial Sequence
  Description of Artificial Sequence: Synthetic oligonucleotide
  Sense strand starting at position 2534 of SEQ ID NO: 1244078
gaucguggaguuuguaagu

SEQ ID NO: 1463373 - RNA, 19 nt, Artificial Sequence
  Description of Artificial Sequence: Synthetic oligonucleotide
  Antisense strand to SEQ ID NO: 1463372
acuuacaaacuccacgauc

SEQ ID NO: 1463374 - RNA, 19 nt, Artificial Sequence
  Description of Artificial Sequence: Synthetic oligonucleotide
  Sense strand starting at position 2537 of SEQ ID NO: 1244078
cguggaguuuguaagugau

SEQ ID NO: 1463375 - RNA, 19 nt, Artificial Sequence
  Description of Artificial Sequence: Synthetic oligonucleotide
  Antisense strand to SEQ ID NO: 1463374
aucacuuacaaacuccacg

SEQ ID NO: 1463376 - RNA, 19 nt, Artificial Sequence
  Description of Artificial Sequence: Synthetic oligonucleotide
  Sense strand starting at position 2539 of SEQ ID NO: 1244078
uggaguuuguaagugauug

SEQ ID NO: 1463377 - RNA, 19 nt, Artificial Sequence
  Description of Artificial Sequence: Synthetic oligonucleotide
  Antisense strand to SEQ ID NO: 1463376
caaucacuuacaaacucca

SEQ ID NO: 1463378 - RNA, 19 nt, Artificial Sequence
  Description of Artificial Sequence: Synthetic oligonucleotide
  Sense strand starting at position 2545 of SEQ ID NO: 1244078
uuguaagugauugggucuu

SEQ ID NO: 1463379 - RNA, 19 nt, Artificial Sequence
  Description of Artificial Sequence: Synthetic oligonucleotide
  Antisense strand to SEQ ID NO: 1463378
aagacccaaucacuuacaa

SEQ ID NO: 1463380 - RNA, 19 nt, Artificial Sequence
  Description of Artificial Sequence: Synthetic oligonucleotide
  Sense strand starting at position 2555 of SEQ ID NO: 1244078
uugggucuuccagcgugua

SEQ ID NO: 1463381 - RNA, 19 nt, Artificial Sequence
  Description of Artificial Sequence: Synthetic oligonucleotide
  Antisense strand to SEQ ID NO: 1463380
uacacgcuggaagacccaa

SEQ ID NO: 1463382 - RNA, 19 nt, Artificial Sequence
  Description of Artificial Sequence: Synthetic oligonucleotide
  Sense strand starting at position 2556 of SEQ ID NO: 1244078
ugggucuuccagcguguaa

SEQ ID NO: 1463383 - RNA, 19 nt, Artificial Sequence
  Description of Artificial Sequence: Synthetic oligonucleotide
  Antisense strand to SEQ ID NO: 1463382
uuacacgcuggaagaccca

SEQ ID NO: 1463384 - RNA, 19 nt, Artificial Sequence
  Description of Artificial Sequence: Synthetic oligonucleotide
  Sense strand starting at position 2558 of SEQ ID NO: 1244078
ggucuuccagcguguaaca

SEQ ID NO: 1463385 - RNA, 19 nt, Artificial Sequence
  Description of Artificial Sequence: Synthetic oligonucleotide
  Antisense strand to SEQ ID NO: 1463384
uguuacacgcuggaagacc

SEQ ID NO: 1463386 - RNA, 19 nt, Artificial Sequence
  Description of Artificial Sequence: Synthetic oligonucleotide
  Sense strand starting at position 2670 of SEQ ID NO: 1244078
gcgcuuugauagucugaau

SEQ ID NO: 1463387 - RNA, 19 nt, Artificial Sequence
  Description of Artificial Sequence: Synthetic oligonucleotide
  Antisense strand to SEQ ID NO: 1463386
auucagacuaucaaagcgc

SEQ ID NO: 1463388 - RNA, 19 nt, Artificial Sequence
  Description of Artificial Sequence: Synthetic oligonucleotide
  Sense strand starting at position 2673 of SEQ ID NO: 1244078
cuuugauagucugaauuuc

SEQ ID NO: 1463389 - RNA, 19 nt, Artificial Sequence
  Description of Artificial Sequence: Synthetic oligonucleotide
  Antisense strand to SEQ ID NO: 1463388
gaaauucagacuaucaaag

SEQ ID NO: 1463390 - RNA, 19 nt, Artificial Sequence
  Description of Artificial Sequence: Synthetic oligonucleotide
  Sense strand starting at position 3437 of SEQ ID NO: 1244078
cugcaucaccguuacauca

SEQ ID NO: 1463391 - RNA, 19 nt, Artificial Sequence
  Description of Artificial Sequence: Synthetic oligonucleotide
  Antisense strand to SEQ ID NO: 1463390
ugauguaacggugaugcag

SEQ ID NO: 1463392 - RNA, 19 nt, Artificial Sequence
  Description of Artificial Sequence: Synthetic oligonucleotide
  Sense strand starting at position 170 of SEQ ID NO: 1244079
cccugagcucucugagacu

SEQ ID NO: 1463393 - RNA, 19 nt, Artificial Sequence
  Description of Artificial Sequence: Synthetic oligonucleotide
  Antisense strand to SEQ ID NO: 1463392
agucucagagagcucaggg

SEQ ID NO: 1463394 - RNA, 19 nt, Artificial Sequence
  Description of Artificial Sequence: Synthetic oligonucleotide
  Sense strand starting at position 179 of SEQ ID NO: 1244079
cucugagacuuggaaaucu

SEQ ID NO: 1463395 - RNA, 19 nt, Artificial Sequence
  Description of Artificial Sequence: Synthetic oligonucleotide
  Antisense strand to SEQ ID NO: 1463394
agauuuccaagucucagag

SEQ ID NO: 1463396 - RNA, 19 nt, Artificial Sequence
  Description of Artificial Sequence: Synthetic oligonucleotide
  Sense strand starting at position 210 of SEQ ID NO: 1244079
ucuggaaugucacucugga

SEQ ID NO: 1463397 - RNA, 19 nt, Artificial Sequence
  Description of Artificial Sequence: Synthetic oligonucleotide
  Antisense strand to SEQ ID NO: 1463396
uccagagugacauuccaga

SEQ ID NO: 1463398 - RNA, 19 nt, Artificial Sequence
  Description of Artificial Sequence: Synthetic oligonucleotide
  Sense strand starting at position 352 of SEQ ID NO: 1244079
gcuuuaggaucuugaucgu

SEQ ID NO: 1463399 - RNA, 19 nt, Artificial Sequence
  Description of Artificial Sequence: Synthetic oligonucleotide
  Antisense strand to SEQ ID NO: 1463398
acgaucaagauccuaaagc

SEQ ID NO: 1463400 - RNA, 19 nt, Artificial Sequence
  Description of Artificial Sequence: Synthetic oligonucleotide
  Sense strand starting at position 355 of SEQ ID NO: 1244079
uuaggaucuugaucgugga

SEQ ID NO: 1463401 - RNA, 19 nt, Artificial Sequence
  Description of Artificial Sequence: Synthetic oligonucleotide
  Antisense strand to SEQ ID NO: 1463400
uccacgaucaagauccuaa

SEQ ID NO: 1463402 - RNA, 19 nt, Artificial Sequence
  Description of Artificial Sequence: Synthetic oligonucleotide
  Sense strand starting at position 358 of SEQ ID NO: 1244079
ggaucuugaucguggaguu

SEQ ID NO: 1463403 - RNA, 19 nt, Artificial Sequence
  Description of Artificial Sequence: Synthetic oligonucleotide
  Antisense strand to SEQ ID NO: 1463402
aacuccacgaucaagaucc

SEQ ID NO: 1463404 - RNA, 19 nt, Artificial Sequence
  Description of Artificial Sequence: Synthetic oligonucleotide
  Sense strand starting at position 359 of SEQ ID NO: 1244079
gaucuugaucguggaguuu

SEQ ID NO: 1463405 - RNA, 19 nt, Artificial Sequence
  Description of Artificial Sequence: Synthetic oligonucleotide
  Antisense strand to SEQ ID NO: 1463404
aaacuccacgaucaagauc

SEQ ID NO: 1463406 - RNA, 19 nt, Artificial Sequence
  Description of Artificial Sequence: Synthetic oligonucleotide
  Sense strand starting at position 365 of SEQ ID NO: 1244079
gaucguggaguuuguaagu

SEQ ID NO: 1463407 - RNA, 19 nt, Artificial Sequence
  Description of Artificial Sequence: Synthetic oligonucleotide
  Antisense strand to SEQ ID NO: 1463406
acuuacaaacuccacgauc

SEQ ID NO: 1463408 - RNA, 19 nt, Artificial Sequence
  Description of Artificial Sequence: Synthetic oligonucleotide
  Sense strand starting at position 368 of SEQ ID NO: 1244079
cguggaguuuguaagugau

SEQ ID NO: 1463409 - RNA, 19 nt, Artificial Sequence
  Description of Artificial Sequence: Synthetic oligonucleotide
  Antisense strand to SEQ ID NO: 1463408
aucacuuacaaacuccacg

SEQ ID NO: 1463410 - RNA, 19 nt, Artificial Sequence
  Description of Artificial Sequence: Synthetic oligonucleotide
  Sense strand starting at position 370 of SEQ ID NO: 1244079
uggaguuuguaagugauug

SEQ ID NO: 1463411 - RNA, 19 nt, Artificial Sequence
  Description of Artificial Sequence: Synthetic oligonucleotide
  Antisense strand to SEQ ID NO: 1463410
caaucacuuacaaacucca

SEQ ID NO: 1463412 - RNA, 19 nt, Artificial Sequence
  Description of Artificial Sequence: Synthetic oligonucleotide
  Sense strand starting at position 376 of SEQ ID NO: 1244079
uuguaagugauugggucuu

SEQ ID NO: 1463413 - RNA, 19 nt, Artificial Sequence
  Description of Artificial Sequence: Synthetic oligonucleotide
  Antisense strand to SEQ ID NO: 1463412
aagacccaaucacuuacaa

SEQ ID NO: 1463414 - RNA, 19 nt, Artificial Sequence
  Description of Artificial Sequence: Synthetic oligonucleotide
  Sense strand starting at position 386 of SEQ ID NO: 1244079
uugggucuuccagcgugua

SEQ ID NO: 1463415 - RNA, 19 nt, Artificial Sequence
  Description of Artificial Sequence: Synthetic oligonucleotide
  Antisense strand to SEQ ID NO: 1463414
uacacgcuggaagacccaa

SEQ ID NO: 1463416 - RNA, 19 nt, Artificial Sequence
  Description of Artificial Sequence: Synthetic oligonucleotide
  Sense strand starting at position 387 of SEQ ID NO: 1244079
ugggucuuccagcguguaa

SEQ ID NO: 1463417 - RNA, 19 nt, Artificial Sequence
  Description of Artificial Sequence: Synthetic oligonucleotide
  Antisense strand to SEQ ID NO: 1463416
uuacacgcuggaagaccca

SEQ ID NO: 1463418 - RNA, 19 nt, Artificial Sequence
  Description of Artificial Sequence: Synthetic oligonucleotide
  Sense strand starting at position 389 of SEQ ID NO: 1244079
ggucuuccagcguguaaca

SEQ ID NO: 1463419 - RNA, 19 nt, Artificial Sequence
  Description of Artificial Sequence: Synthetic oligonucleotide
  Antisense strand to SEQ ID NO: 1463418
uguuacacgcuggaagacc

SEQ ID NO: 1463420 - RNA, 19 nt, Artificial Sequence
  Description of Artificial Sequence: Synthetic oligonucleotide
  Sense strand starting at position 501 of SEQ ID NO: 1244079
gcgcuuugauagucugaau

SEQ ID NO: 1463421 - RNA, 19 nt, Artificial Sequence
  Description of Artificial Sequence: Synthetic oligonucleotide
  Antisense strand to SEQ ID NO: 1463420
auucagacuaucaaagcgc

SEQ ID NO: 1463422 - RNA, 19 nt, Artificial Sequence
  Description of Artificial Sequence: Synthetic oligonucleotide
  Sense strand starting at position 504 of SEQ ID NO: 1244079
cuuugauagucugaauuuc

SEQ ID NO: 1463423 - RNA, 19 nt, Artificial Sequence
  Description of Artificial Sequence: Synthetic oligonucleotide
  Antisense strand to SEQ ID NO: 1463422
gaaauucagacuaucaaag

SEQ ID NO: 1463424 - RNA, 19 nt, Artificial Sequence
  Description of Artificial Sequence: Synthetic oligonucleotide
  Sense strand starting at position 1268 of SEQ ID NO: 1244079
cugcaucaccguuacauca

SEQ ID NO: 1463425 - RNA, 19 nt, Artificial Sequence
  Description of Artificial Sequence: Synthetic oligonucleotide
  Antisense strand to SEQ ID NO: 1463424
ugauguaacggugaugcag

SEQ ID NO: 1463426 - RNA, 19 nt, Artificial Sequence
  Description of Artificial Sequence: Synthetic oligonucleotide
  Sense strand starting at position 2046 of SEQ ID NO: 1244079
ugcuccgacuuguccuaau

SEQ ID NO: 1463427 - RNA, 19 nt, Artificial Sequence
  Description of Artificial Sequence: Synthetic oligonucleotide
  Antisense strand to SEQ ID NO: 1463426
auuaggacaagucggagca

SEQ ID NO: 1463428 - RNA, 19 nt, Artificial Sequence
  Description of Artificial Sequence: Synthetic oligonucleotide
  Sense strand starting at position 2049 of SEQ ID NO: 1244079
uccgacuuguccuaauuag

SEQ ID NO: 1463429 - RNA, 19 nt, Artificial Sequence
  Description of Artificial Sequence: Synthetic oligonucleotide
  Antisense strand to SEQ ID NO: 1463428
cuaauuaggacaagucgga

SEQ ID NO: 1463430 - RNA, 19 nt, Artificial Sequence
  Description of Artificial Sequence: Synthetic oligonucleotide
  Sense strand starting at position 2157 of SEQ ID NO: 1244079
cguccuuuccaggagguca

SEQ ID NO: 1463431 - RNA, 19 nt, Artificial Sequence
  Description of Artificial Sequence: Synthetic oligonucleotide
  Antisense strand to SEQ ID NO: 1463430
ugaccuccuggaaaggacg

SEQ ID NO: 1463432 - RNA, 19 nt, Artificial Sequence
  Description of Artificial Sequence: Synthetic oligonucleotide
  Sense strand starting at position 2263 of SEQ ID NO: 1244079
gaagcuggaccgcagaaau

SEQ ID NO: 1463433 - RNA, 19 nt, Artificial Sequence
  Description of Artificial Sequence: Synthetic oligonucleotide
  Antisense strand to SEQ ID NO: 1463432
auuucugcgguccagcuuc

SEQ ID NO: 1463434 - RNA, 19 nt, Artificial Sequence
  Description of Artificial Sequence: Synthetic oligonucleotide
  Sense strand starting at position 2304 of SEQ ID NO: 1244079
acuuauccagcccgauaaa

SEQ ID NO: 1463435 - RNA, 19 nt, Artificial Sequence
  Description of Artificial Sequence: Synthetic oligonucleotide
  Antisense strand to SEQ ID NO: 1463434
uuuaucgggcuggauaagu

SEQ ID NO: 1463436 - RNA, 19 nt, Artificial Sequence
  Description of Artificial Sequence: Synthetic oligonucleotide
  Sense strand starting at position 2605 of SEQ ID NO: 1244079
cccggaguguuugcucaac

SEQ ID NO: 1463437 - RNA, 19 nt, Artificial Sequence
  Description of Artificial Sequence: Synthetic oligonucleotide
  Antisense strand to SEQ ID NO: 1463436
guugagcaaacacuccggg

SEQ ID NO: 1463438 - RNA, 19 nt, Artificial Sequence
  Description of Artificial Sequence: Synthetic oligonucleotide
  Sense strand starting at position 2773 of SEQ ID NO: 1244079
cuaugaaucacccggaguu

SEQ ID NO: 1463439 - RNA, 19 nt, Artificial Sequence
  Description of Artificial Sequence: Synthetic oligonucleotide
  Antisense strand to SEQ ID NO: 1463438
aacuccgggugauucauag

SEQ ID NO: 1463440 - RNA, 19 nt, Artificial Sequence
  Description of Artificial Sequence: Synthetic oligonucleotide
  Sense strand starting at position 2774 of SEQ ID NO: 1244079
uaugaaucacccggaguug

SEQ ID NO: 1463441 - RNA, 19 nt, Artificial Sequence
  Description of Artificial Sequence: Synthetic oligonucleotide
  Antisense strand to SEQ ID NO: 1463440
caacuccgggugauucaua

SEQ ID NO: 1463442 - RNA, 19 nt, Artificial Sequence
  Description of Artificial Sequence: Synthetic oligonucleotide
  Sense strand starting at position 2785 of SEQ ID NO: 1244079
cggaguugcuggagcgaua

SEQ ID NO: 1463443 - RNA, 19 nt, Artificial Sequence
  Description of Artificial Sequence: Synthetic oligonucleotide
  Antisense strand to SEQ ID NO: 1463442
uaucgcuccagcaacuccg

SEQ ID NO: 1463444 - RNA, 19 nt, Artificial Sequence
  Description of Artificial Sequence: Synthetic oligonucleotide
  Sense strand starting at position 2888 of SEQ ID NO: 1244079
aggcccugguucucuagaa

SEQ ID NO: 1463445 - RNA, 19 nt, Artificial Sequence
  Description of Artificial Sequence: Synthetic oligonucleotide
  Antisense strand to SEQ ID NO: 1463444
uucuagagaaccagggccu

SEQ ID NO: 1463446 - RNA, 19 nt, Artificial Sequence
  Description of Artificial Sequence: Synthetic oligonucleotide
  Sense strand starting at position 3185 of SEQ ID NO: 1244079
ugggacuaguucucgugaa

SEQ ID NO: 1463447 - RNA, 19 nt, Artificial Sequence
  Description of Artificial Sequence: Synthetic oligonucleotide
  Antisense strand to SEQ ID NO: 1463446
uucacgagaacuaguccca

SEQ ID NO: 1463448 - RNA, 19 nt, Artificial Sequence
  Description of Artificial Sequence: Synthetic oligonucleotide
  Sense strand starting at position 3186 of SEQ ID NO: 1244079
gggacuaguucucgugaag

SEQ ID NO: 1463449 - RNA, 19 nt, Artificial Sequence
  Description of Artificial Sequence: Synthetic oligonucleotide
  Antisense strand to SEQ ID NO: 1463448
cuucacgagaacuaguccc

SEQ ID NO: 1463450 - RNA, 19 nt, Artificial Sequence
  Description of Artificial Sequence: Synthetic oligonucleotide
  Sense strand starting at position 3189 of SEQ ID NO: 1244079
acuaguucucgugaagcag

SEQ ID NO: 1463451 - RNA, 19 nt, Artificial Sequence
  Description of Artificial Sequence: Synthetic oligonucleotide
  Antisense strand to SEQ ID NO: 1463450
cugcuucacgagaacuagu

SEQ ID NO: 1463452 - RNA, 19 nt, Artificial Sequence
  Description of Artificial Sequence: Synthetic oligonucleotide
  Sense strand starting at position 3243 of SEQ ID NO: 1244079
cgcucauuagcauauguga

SEQ ID NO: 1463453 - RNA, 19 nt, Artificial Sequence
  Description of Artificial Sequence: Synthetic oligonucleotide
  Antisense strand to SEQ ID NO: 1463452
ucacauaugcuaaugagcg

SEQ ID NO: 1463454 - RNA, 19 nt, Artificial Sequence
  Description of Artificial Sequence: Synthetic oligonucleotide
  Sense strand starting at position 3306 of SEQ ID NO: 1244079
cgagacugcuugugaccuu

SEQ ID NO: 1463455 - RNA, 19 nt, Artificial Sequence
  Description of Artificial Sequence: Synthetic oligonucleotide
  Antisense strand to SEQ ID NO: 1463454
aaggucacaagcagucucg

SEQ ID NO: 1463456 - RNA, 19 nt, Artificial Sequence
  Description of Artificial Sequence: Synthetic oligonucleotide
  Sense strand starting at position 3307 of SEQ ID NO: 1244079
gagacugcuugugaccuua

SEQ ID NO: 1463457 - RNA, 19 nt, Artificial Sequence
  Description of Artificial Sequence: Synthetic oligonucleotide
  Antisense strand to SEQ ID NO: 1463456
uaaggucacaagcagucuc

SEQ ID NO: 1463458 - RNA, 19 nt, Artificial Sequence
  Description of Artificial Sequence: Synthetic oligonucleotide
  Sense strand starting at position 3340 of SEQ ID NO: 1244079
aauuguggaucuggcagau

SEQ ID NO: 1463459 - RNA, 19 nt, Artificial Sequence
  Description of Artificial Sequence: Synthetic oligonucleotide
  Antisense strand to SEQ ID NO: 1463458
aucugccagauccacaauu

SEQ ID NO: 1463460 - RNA, 19 nt, Artificial Sequence
  Description of Artificial Sequence: Synthetic oligonucleotide
  Sense strand starting at position 3531 of SEQ ID NO: 1244079
gcggauauguagggagguu

SEQ ID NO: 1463461 - RNA, 19 nt, Artificial Sequence
  Description of Artificial Sequence: Synthetic oligonucleotide
  Antisense strand to SEQ ID NO: 1463460
aaccucccuacauauccgc

SEQ ID NO: 1463462 - RNA, 19 nt, Artificial Sequence
  Description of Artificial Sequence: Synthetic oligonucleotide
  Sense strand starting at position 3532 of SEQ ID NO: 1244079
cggauauguagggagguuu

SEQ ID NO: 1463463 - RNA, 19 nt, Artificial Sequence
  Description of Artificial Sequence: Synthetic oligonucleotide
  Antisense strand to SEQ ID NO: 1463462
aaaccucccuacauauccg

SEQ ID NO: 1463464 - RNA, 19 nt, Artificial Sequence
  Description of Artificial Sequence: Synthetic oligonucleotide
  Sense strand starting at position 3544 of SEQ ID NO: 1244079
gagguuuccugagagcugu

SEQ ID NO: 1463465 - RNA, 19 nt, Artificial Sequence
  Description of Artificial Sequence: Synthetic oligonucleotide
  Antisense strand to SEQ ID NO: 1463464
acagcucucaggaaaccuc

SEQ ID NO: 1463466 - RNA, 19 nt, Artificial Sequence
  Description of Artificial Sequence: Synthetic oligonucleotide
  Sense strand starting at position 3552 of SEQ ID NO: 1244079
cugagagcuguuugcucuu

SEQ ID NO: 1463467 - RNA, 19 nt, Artificial Sequence
  Description of Artificial Sequence: Synthetic oligonucleotide
  Antisense strand to SEQ ID NO: 1463466
aagagcaaacagcucucag

SEQ ID NO: 1463468 - RNA, 19 nt, Artificial Sequence
  Description of Artificial Sequence: Synthetic oligonucleotide
  Sense strand starting at position 3832 of SEQ ID NO: 1244079
gcugcuuuccgagacucca

SEQ ID NO: 1463469 - RNA, 19 nt, Artificial Sequence
  Description of Artificial Sequence: Synthetic oligonucleotide
  Antisense strand to SEQ ID NO: 1463468
uggagucucggaaagcagc

SEQ ID NO: 1463470 - RNA, 19 nt, Artificial Sequence
  Description of Artificial Sequence: Synthetic oligonucleotide
  Sense strand starting at position 3945 of SEQ ID NO: 1244079
acuacacucugagaagugu

SEQ ID NO: 1463471 - RNA, 19 nt, Artificial Sequence
  Description of Artificial Sequence: Synthetic oligonucleotide
  Antisense strand to SEQ ID NO: 1463470
acacuucucagaguguagu

SEQ ID NO: 1463472 - RNA, 19 nt, Artificial Sequence
  Description of Artificial Sequence: Synthetic oligonucleotide
  Sense strand starting at position 169 of SEQ ID NO: 1244080
acugcugucccaggagcua

SEQ ID NO: 1463473 - RNA, 19 nt, Artificial Sequence
  Description of Artificial Sequence: Synthetic oligonucleotide
  Antisense strand to SEQ ID NO: 1463472
uagcuccugggacagcagu

SEQ ID NO: 1463474 - RNA, 19 nt, Artificial Sequence
  Description of Artificial Sequence: Synthetic oligonucleotide
  Sense strand starting at position 346 of SEQ ID NO: 1244080
cuacaagccucaugugagu

SEQ ID NO: 1463475 - RNA, 19 nt, Artificial Sequence
  Description of Artificial Sequence: Synthetic oligonucleotide
  Antisense strand to SEQ ID NO: 1463474
acucacaugaggcuuguag

SEQ ID NO: 1463476 - RNA, 19 nt, Artificial Sequence
  Description of Artificial Sequence: Synthetic oligonucleotide
  Sense strand starting at position 352 of SEQ ID NO: 1244080
gccucaugugagugcgcaa

SEQ ID NO: 1463477 - RNA, 19 nt, Artificial Sequence
  Description of Artificial Sequence: Synthetic oligonucleotide
  Antisense strand to SEQ ID NO: 1463476
uugcgcacucacaugaggc

SEQ ID NO: 1463478 - RNA, 19 nt, Artificial Sequence
  Description of Artificial Sequence: Synthetic oligonucleotide
  Sense strand starting at position 353 of SEQ ID NO: 1244080
ccucaugugagugcgcaau

SEQ ID NO: 1463479 - RNA, 19 nt, Artificial Sequence
  Description of Artificial Sequence: Synthetic oligonucleotide
  Antisense strand to SEQ ID NO: 1463478
auugcgcacucacaugagg

SEQ ID NO: 1463480 - RNA, 19 nt, Artificial Sequence
  Description of Artificial Sequence: Synthetic oligonucleotide
  Sense strand starting at position 355 of SEQ ID NO: 1244080
ucaugugagugcgcaauca

SEQ ID NO: 1463481 - RNA, 19 nt, Artificial Sequence
  Description of Artificial Sequence: Synthetic oligonucleotide
  Antisense strand to SEQ ID NO: 1463480
ugauugcgcacucacauga

SEQ ID NO: 1463482 - RNA, 19 nt, Artificial Sequence
  Description of Artificial Sequence: Synthetic oligonucleotide
  Sense strand starting at position 370 of SEQ ID NO: 1244080
aucagaaacgcugaugguu

SEQ ID NO: 1463483 - RNA, 19 nt, Artificial Sequence
  Description of Artificial Sequence: Synthetic oligonucleotide
  Antisense strand to SEQ ID NO: 1463482
aaccaucagcguuucugau

SEQ ID NO: 1463484 - RNA, 19 nt, Artificial Sequence
  Description of Artificial Sequence: Synthetic oligonucleotide
  Sense strand starting at position 425 of SEQ ID NO: 1244080
ggaucauucuaccugcugu

SEQ ID NO: 1463485 - RNA, 19 nt, Artificial Sequence
  Description of Artificial Sequence: Synthetic oligonucleotide
  Antisense strand to SEQ ID NO: 1463484
acagcagguagaaugaucc

SEQ ID NO: 1463486 - RNA, 19 nt, Artificial Sequence
  Description of Artificial Sequence: Synthetic oligonucleotide
  Sense strand starting at position 668 of SEQ ID NO: 1244080
gcgagagacccgcacuguu

SEQ ID NO: 1463487 - RNA, 19 nt, Artificial Sequence
  Description of Artificial Sequence: Synthetic oligonucleotide
  Antisense strand to SEQ ID NO: 1463486
aacagugcgggucucucgc

SEQ ID NO: 1463488 - RNA, 19 nt, Artificial Sequence
  Description of Artificial Sequence: Synthetic oligonucleotide
  Sense strand starting at position 706 of SEQ ID NO: 1244080
caagaucuuccaggccagu

SEQ ID NO: 1463489 - RNA, 19 nt, Artificial Sequence
  Description of Artificial Sequence: Synthetic oligonucleotide
  Antisense strand to SEQ ID NO: 1463488
acuggccuggaagaucuug

SEQ ID NO: 1463490 - RNA, 19 nt, Artificial Sequence
  Description of Artificial Sequence: Synthetic oligonucleotide
  Sense strand starting at position 860 of SEQ ID NO: 1244080
gccugauucuagccgcuca

SEQ ID NO: 1463491 - RNA, 19 nt, Artificial Sequence
  Description of Artificial Sequence: Synthetic oligonucleotide
  Antisense strand to SEQ ID NO: 1463490
ugagcggcuagaaucaggc

SEQ ID NO: 1463492 - RNA, 19 nt, Artificial Sequence
  Description of Artificial Sequence: Synthetic oligonucleotide
  Sense strand starting at position 953 of SEQ ID NO: 1244080
ccaccauccugauguaguu

SEQ ID NO: 1463493 - RNA, 19 nt, Artificial Sequence
  Description of Artificial Sequence: Synthetic oligonucleotide
  Antisense strand to SEQ ID NO: 1463492
aacuacaucaggauggugg

SEQ ID NO: 1463494 - RNA, 19 nt, Artificial Sequence
  Description of Artificial Sequence: Synthetic oligonucleotide
  Sense strand starting at position 965 of SEQ ID NO: 1244080
uguaguuuccuccaagcca

SEQ ID NO: 1463495 - RNA, 19 nt, Artificial Sequence
  Description of Artificial Sequence: Synthetic oligonucleotide
  Antisense strand to SEQ ID NO: 1463494
uggcuuggaggaaacuaca

SEQ ID NO: 1463496 - RNA, 19 nt, Artificial Sequence
  Description of Artificial Sequence: Synthetic oligonucleotide
  Sense strand starting at position 1036 of SEQ ID NO: 1244080
cggaaucuguccugagcag

SEQ ID NO: 1463497 - RNA, 19 nt, Artificial Sequence
  Description of Artificial Sequence: Synthetic oligonucleotide
  Antisense strand to SEQ ID NO: 1463496
cugcucaggacagauuccg

SEQ ID NO: 1463498 - RNA, 19 nt, Artificial Sequence
  Description of Artificial Sequence: Synthetic oligonucleotide
  Sense strand starting at position 1060 of SEQ ID NO: 1244080
cagcaauacugggcugaga

SEQ ID NO: 1463499 - RNA, 19 nt, Artificial Sequence
  Description of Artificial Sequence: Synthetic oligonucleotide
  Antisense strand to SEQ ID NO: 1463498
ucucagcccaguauugcug

SEQ ID NO: 1463500 - RNA, 19 nt, Artificial Sequence
  Description of Artificial Sequence: Synthetic oligonucleotide
  Sense strand starting at position 1062 of SEQ ID NO: 1244080
gcaauacugggcugagagu

SEQ ID NO: 1463501 - RNA, 19 nt, Artificial Sequence
  Description of Artificial Sequence: Synthetic oligonucleotide
  Antisense strand to SEQ ID NO: 1463500
acucucagcccaguauugc

SEQ ID NO: 1463502 - RNA, 19 nt, Artificial Sequence
  Description of Artificial Sequence: Synthetic oligonucleotide
  Sense strand starting at position 1110 of SEQ ID NO: 1244080
gagucaucucagggagccu

SEQ ID NO: 1463503 - RNA, 19 nt, Artificial Sequence
  Description of Artificial Sequence: Synthetic oligonucleotide
  Antisense strand to SEQ ID NO: 1463502
aggcucccugagaugacuc

SEQ ID NO: 1463504 - RNA, 19 nt, Artificial Sequence
  Description of Artificial Sequence: Synthetic oligonucleotide
  Sense strand starting at position 1421 of SEQ ID NO: 1244080
gaagguaccucguagagca

SEQ ID NO: 1463505 - RNA, 19 nt, Artificial Sequence
  Description of Artificial Sequence: Synthetic oligonucleotide
  Antisense strand to SEQ ID NO: 1463504
ugcucuacgagguaccuuc

SEQ ID NO: 1463506 - RNA, 19 nt, Artificial Sequence
  Description of Artificial Sequence: Synthetic oligonucleotide
  Sense strand starting at position 2299 of SEQ ID NO: 1244080
gucuucaucgccgucaaga

SEQ ID NO: 1463507 - RNA, 19 nt, Artificial Sequence
  Description of Artificial Sequence: Synthetic oligonucleotide
  Antisense strand to SEQ ID NO: 1463506
ucuugacggcgaugaagac

SEQ ID NO: 1463508 - RNA, 19 nt, Artificial Sequence
  Description of Artificial Sequence: Synthetic oligonucleotide
  Sense strand starting at position 2515 of SEQ ID NO: 1244080
ccagaagccucauagauug

SEQ ID NO: 1463509 - RNA, 19 nt, Artificial Sequence
  Description of Artificial Sequence: Synthetic oligonucleotide
  Antisense strand to SEQ ID NO: 1463508
caaucuaugaggcuucugg

SEQ ID NO: 1463510 - RNA, 19 nt, Artificial Sequence
  Description of Artificial Sequence: Synthetic oligonucleotide
  Sense strand starting at position 2638 of SEQ ID NO: 1244080
gagccuuucucgcuccgaa

SEQ ID NO: 1463511 - RNA, 19 nt, Artificial Sequence
  Description of Artificial Sequence: Synthetic oligonucleotide
  Antisense strand to SEQ ID NO: 1463510
uucggagcgagaaaggcuc

SEQ ID NO: 1463512 - RNA, 19 nt, Artificial Sequence
  Description of Artificial Sequence: Synthetic oligonucleotide
  Sense strand starting at position 3098 of SEQ ID NO: 1244080
gcgugcuucccgucucuga

SEQ ID NO: 1463513 - RNA, 19 nt, Artificial Sequence
  Description of Artificial Sequence: Synthetic oligonucleotide
  Antisense strand to SEQ ID NO: 1463512
ucagagacgggaagcacgc

SEQ ID NO: 1463514 - RNA, 19 nt, Artificial Sequence
  Description of Artificial Sequence: Synthetic oligonucleotide
  Sense strand starting at position 3100 of SEQ ID NO: 1244080
gugcuucccgucucugauu

SEQ ID NO: 1463515 - RNA, 19 nt, Artificial Sequence
  Description of Artificial Sequence: Synthetic oligonucleotide
  Antisense strand to SEQ ID NO: 1463514
aaucagagacgggaagcac

SEQ ID NO: 1463516 - RNA, 19 nt, Artificial Sequence
  Description of Artificial Sequence: Synthetic oligonucleotide
  Sense strand starting at position 3181 of SEQ ID NO: 1244080
gcaagauguccguggagua

SEQ ID NO: 1463517 - RNA, 19 nt, Artificial Sequence
  Description of Artificial Sequence: Synthetic oligonucleotide
  Antisense strand to SEQ ID NO: 1463516
uacuccacggacaucuugc

SEQ ID NO: 1463518 - RNA, 19 nt, Artificial Sequence
  Description of Artificial Sequence: Synthetic oligonucleotide
  Sense strand starting at position 3182 of SEQ ID NO: 1244080
caagauguccguggaguau

SEQ ID NO: 1463519 - RNA, 19 nt, Artificial Sequence
  Description of Artificial Sequence: Synthetic oligonucleotide
  Antisense strand to SEQ ID NO: 1463518
auacuccacggacaucuug

SEQ ID NO: 1463520 - RNA, 19 nt, Artificial Sequence
  Description of Artificial Sequence: Synthetic oligonucleotide
  Sense strand starting at position 3184 of SEQ ID NO: 1244080
agauguccguggaguauga

SEQ ID NO: 1463521 - RNA, 19 nt, Artificial Sequence
  Description of Artificial Sequence: Synthetic oligonucleotide
  Antisense strand to SEQ ID NO: 1463520
ucauacuccacggacaucu

SEQ ID NO: 1463522 - RNA, 19 nt, Artificial Sequence
  Description of Artificial Sequence: Synthetic oligonucleotide
  Sense strand starting at position 3342 of SEQ ID NO: 1244080
ccacguggaugaugacaau

SEQ ID NO: 1463523 - RNA, 19 nt, Artificial Sequence
  Description of Artificial Sequence: Synthetic oligonucleotide
  Antisense strand to SEQ ID NO: 1463522
auugucaucauccacgugg

SEQ ID NO: 1463524 - RNA, 19 nt, Artificial Sequence
  Description of Artificial Sequence: Synthetic oligonucleotide
  Sense strand starting at position 3345 of SEQ ID NO: 1244080
cguggaugaugacaauuau

SEQ ID NO: 1463525 - RNA, 19 nt, Artificial Sequence
  Description of Artificial Sequence: Synthetic oligonucleotide
  Antisense strand to SEQ ID NO: 1463524
auaauugucaucauccacg

SEQ ID NO: 1463526 - RNA, 19 nt, Artificial Sequence
  Description of Artificial Sequence: Synthetic oligonucleotide
  Sense strand starting at position 3351 of SEQ ID NO: 1244080
ugaugacaauuaugugaac

SEQ ID NO: 1463527 - RNA, 19 nt, Artificial Sequence
  Description of Artificial Sequence: Synthetic oligonucleotide
  Antisense strand to SEQ ID NO: 1463526
guucacauaauugucauca

SEQ ID NO: 1463528 - RNA, 19 nt, Artificial Sequence
  Description of Artificial Sequence: Synthetic oligonucleotide
  Sense strand starting at position 3485 of SEQ ID NO: 1244080
cugugagugucggagcaga

SEQ ID NO: 1463529 - RNA, 19 nt, Artificial Sequence
  Description of Artificial Sequence: Synthetic oligonucleotide
  Antisense strand to SEQ ID NO: 1463528
ucugcuccgacacucacag

SEQ ID NO: 1463530 - RNA, 19 nt, Artificial Sequence
  Description of Artificial Sequence: Synthetic oligonucleotide
  Sense strand starting at position 3618 of SEQ ID NO: 1244080
guuugcaugugguguuuca

SEQ ID NO: 1463531 - RNA, 19 nt, Artificial Sequence
  Description of Artificial Sequence: Synthetic oligonucleotide
  Antisense strand to SEQ ID NO: 1463530
ugaaacaccacaugcaaac

SEQ ID NO: 1463532 - RNA, 19 nt, Artificial Sequence
  Description of Artificial Sequence: Synthetic oligonucleotide
  Sense strand starting at position 3714 of SEQ ID NO: 1244080
gggucaauggccugcagaa

SEQ ID NO: 1463533 - RNA, 19 nt, Artificial Sequence
  Description of Artificial Sequence: Synthetic oligonucleotide
  Antisense strand to SEQ ID NO: 1463532
uucugcaggccauugaccc

SEQ ID NO: 1463534 - RNA, 19 nt, Artificial Sequence
  Description of Artificial Sequence: Synthetic oligonucleotide
  Sense strand starting at position 3761 of SEQ ID NO: 1244080
uucuguuaccuggguggga

SEQ ID NO: 1463535 - RNA, 19 nt, Artificial Sequence
  Description of Artificial Sequence: Synthetic oligonucleotide
  Antisense strand to SEQ ID NO: 1463534
ucccacccagguaacagaa

SEQ ID NO: 1463536 - RNA, 19 nt, Artificial Sequence
  Description of Artificial Sequence: Synthetic oligonucleotide
  Sense strand starting at position 3920 of SEQ ID NO: 1244080
cggguucugccucagcaga

SEQ ID NO: 1463537 - RNA, 19 nt, Artificial Sequence
  Description of Artificial Sequence: Synthetic oligonucleotide
  Antisense strand to SEQ ID NO: 1463536
ucugcugaggcagaacccg

SEQ ID NO: 1463538 - RNA, 19 nt, Artificial Sequence
  Description of Artificial Sequence: Synthetic oligonucleotide
  Sense strand starting at position 41 of SEQ ID NO: 1244081
cugucugagugggcugaaa

SEQ ID NO: 1463539 - RNA, 19 nt, Artificial Sequence
  Description of Artificial Sequence: Synthetic oligonucleotide
  Antisense strand to SEQ ID NO: 1463538
uuucagcccacucagacag

SEQ ID NO: 1463540 - RNA, 19 nt, Artificial Sequence
  Description of Artificial Sequence: Synthetic oligonucleotide
  Sense strand starting at position 43 of SEQ ID NO: 1244081
gucugagugggcugaaagu

SEQ ID NO: 1463541 - RNA, 19 nt, Artificial Sequence
  Description of Artificial Sequence: Synthetic oligonucleotide
  Antisense strand to SEQ ID NO: 1463540
acuuucagcccacucagac

SEQ ID NO: 1463542 - RNA, 19 nt, Artificial Sequence
  Description of Artificial Sequence: Synthetic oligonucleotide
  Sense strand starting at position 181 of SEQ ID NO: 1244081
cuccuuugaccuugaggaa

SEQ ID NO: 1463543 - RNA, 19 nt, Artificial Sequence
  Description of Artificial Sequence: Synthetic oligonucleotide
  Antisense strand to SEQ ID NO: 1463542
uuccucaaggucaaaggag

SEQ ID NO: 1463544 - RNA, 19 nt, Artificial Sequence
  Description of Artificial Sequence: Synthetic oligonucleotide
  Sense strand starting at position 397 of SEQ ID NO: 1244081
ugagaacucgccuacaaac

SEQ ID NO: 1463545 - RNA, 19 nt, Artificial Sequence
  Description of Artificial Sequence: Synthetic oligonucleotide
  Antisense strand to SEQ ID NO: 1463544
guuuguaggcgaguucuca

SEQ ID NO: 1463546 - RNA, 19 nt, Artificial Sequence
  Description of Artificial Sequence: Synthetic oligonucleotide
  Sense strand starting at position 434 of SEQ ID NO: 1244081
cagugacuuguguguaucu

SEQ ID NO: 1463547 - RNA, 19 nt, Artificial Sequence
  Description of Artificial Sequence: Synthetic oligonucleotide
  Antisense strand to SEQ ID NO: 1463546
agauacacacaagucacug

SEQ ID NO: 1463548 - RNA, 19 nt, Artificial Sequence
  Description of Artificial Sequence: Synthetic oligonucleotide
  Sense strand starting at position 436 of SEQ ID NO: 1244081
gugacuuguguguaucugu

SEQ ID NO: 1463549 - RNA, 19 nt, Artificial Sequence
  Description of Artificial Sequence: Synthetic oligonucleotide
  Antisense strand to SEQ ID NO: 1463548
acagauacacacaagucac

SEQ ID NO: 1463550 - RNA, 19 nt, Artificial Sequence
  Description of Artificial Sequence: Synthetic oligonucleotide
  Sense strand starting at position 473 of SEQ ID NO: 1244081
aacuuaagugcuugauaug

SEQ ID NO: 1463551 - RNA, 19 nt, Artificial Sequence
  Description of Artificial Sequence: Synthetic oligonucleotide
  Antisense strand to SEQ ID NO: 1463550
cauaucaagcacuuaaguu

SEQ ID NO: 1463552 - RNA, 19 nt, Artificial Sequence
  Description of Artificial Sequence: Synthetic oligonucleotide
  Sense strand starting at position 474 of SEQ ID NO: 1244081
acuuaagugcuugauaugu

SEQ ID NO: 1463553 - RNA, 19 nt, Artificial Sequence
  Description of Artificial Sequence: Synthetic oligonucleotide
  Antisense strand to SEQ ID NO: 1463552
acauaucaagcacuuaagu

SEQ ID NO: 1463554 - RNA, 19 nt, Artificial Sequence
  Description of Artificial Sequence: Synthetic oligonucleotide
  Sense strand starting at position 482 of SEQ ID NO: 1244081
gcuugauauguuugugacu

SEQ ID NO: 1463555 - RNA, 19 nt, Artificial Sequence
  Description of Artificial Sequence: Synthetic oligonucleotide
  Antisense strand to SEQ ID NO: 1463554
agucacaaacauaucaagc

SEQ ID NO: 1463556 - RNA, 19 nt, Artificial Sequence
  Description of Artificial Sequence: Synthetic oligonucleotide
  Sense strand starting at position 483 of SEQ ID NO: 1244081
cuugauauguuugugacuu

SEQ ID NO: 1463557 - RNA, 19 nt, Artificial Sequence
  Description of Artificial Sequence: Synthetic oligonucleotide
  Antisense strand to SEQ ID NO: 1463556
aagucacaaacauaucaag

SEQ ID NO: 1463558 - RNA, 19 nt, Artificial Sequence
  Description of Artificial Sequence: Synthetic oligonucleotide
  Sense strand starting at position 485 of SEQ ID NO: 1244081
ugauauguuugugacuuga

SEQ ID NO: 1463559 - RNA, 19 nt, Artificial Sequence
  Description of Artificial Sequence: Synthetic oligonucleotide
  Antisense strand to SEQ ID NO: 1463558
ucaagucacaaacauauca

SEQ ID NO: 1463560 - RNA, 19 nt, Artificial Sequence
  Description of Artificial Sequence: Synthetic oligonucleotide
  Sense strand starting at position 487 of SEQ ID NO: 1244081
auauguuugugacuugaau

SEQ ID NO: 1463561 - RNA, 19 nt, Artificial Sequence
  Description of Artificial Sequence: Synthetic oligonucleotide
  Antisense strand to SEQ ID NO: 1463560
auucaagucacaaacauau

SEQ ID NO: 1463562 - RNA, 19 nt, Artificial Sequence
  Description of Artificial Sequence: Synthetic oligonucleotide
  Sense strand starting at position 499 of SEQ ID NO: 1244081
cuugaauacugguggcaag

SEQ ID NO: 1463563 - RNA, 19 nt, Artificial Sequence
  Description of Artificial Sequence: Synthetic oligonucleotide
  Antisense strand to SEQ ID NO: 1463562
cuugccaccaguauucaag

SEQ ID NO: 1463564 - RNA, 19 nt, Artificial Sequence
  Description of Artificial Sequence: Synthetic oligonucleotide
  Sense strand starting at position 502 of SEQ ID NO: 1244081
gaauacugguggcaaggau

SEQ ID NO: 1463565 - RNA, 19 nt, Artificial Sequence
  Description of Artificial Sequence: Synthetic oligonucleotide
  Antisense strand to SEQ ID NO: 1463564
auccuugccaccaguauuc

SEQ ID NO: 1463566 - RNA, 19 nt, Artificial Sequence
  Description of Artificial Sequence: Synthetic oligonucleotide
  Sense strand starting at position 688 of SEQ ID NO: 1244081
ggcugugaccuccaagaag

SEQ ID NO: 1463567 - RNA, 19 nt, Artificial Sequence
  Description of Artificial Sequence: Synthetic oligonucleotide
  Antisense strand to SEQ ID NO: 1463566
cuucuuggaggucacagcc

SEQ ID NO: 1463568 - RNA, 19 nt, Artificial Sequence
  Description of Artificial Sequence: Synthetic oligonucleotide
  Sense strand starting at position 721 of SEQ ID NO: 1244081
gugguuucuuuaguccuca

SEQ ID NO: 1463569 - RNA, 19 nt, Artificial Sequence
  Description of Artificial Sequence: Synthetic oligonucleotide
  Antisense strand to SEQ ID NO: 1463568
ugaggacuaaagaaaccac

SEQ ID NO: 1463570 - RNA, 19 nt, Artificial Sequence
  Description of Artificial Sequence: Synthetic oligonucleotide
  Sense strand starting at position 757 of SEQ ID NO: 1244081
augaguuccugugugaaca

SEQ ID NO: 1463571 - RNA, 19 nt, Artificial Sequence
  Description of Artificial Sequence: Synthetic oligonucleotide
  Antisense strand to SEQ ID NO: 1463570
uguucacacaggaacucau

SEQ ID NO: 1463572 - RNA, 19 nt, Artificial Sequence
  Description of Artificial Sequence: Synthetic oligonucleotide
  Sense strand starting at position 758 of SEQ ID NO: 1244081
ugaguuccugugugaacag

SEQ ID NO: 1463573 - RNA, 19 nt, Artificial Sequence
  Description of Artificial Sequence: Synthetic oligonucleotide
  Antisense strand to SEQ ID NO: 1463572
cuguucacacaggaacuca

SEQ ID NO: 1463574 - RNA, 19 nt, Artificial Sequence
  Description of Artificial Sequence: Synthetic oligonucleotide
  Sense strand starting at position 993 of SEQ ID NO: 1244081
uuucuugagcugcaggaaa

SEQ ID NO: 1463575 - RNA, 19 nt, Artificial Sequence
  Description of Artificial Sequence: Synthetic oligonucleotide
  Antisense strand to SEQ ID NO: 1463574
uuuccugcagcucaagaaa

SEQ ID NO: 1463576 - RNA, 19 nt, Artificial Sequence
  Description of Artificial Sequence: Synthetic oligonucleotide
  Sense strand starting at position 1017 of SEQ ID NO: 1244081
gugcuucucuuccuguaga

SEQ ID NO: 1463577 - RNA, 19 nt, Artificial Sequence
  Description of Artificial Sequence: Synthetic oligonucleotide
  Antisense strand to SEQ ID NO: 1463576
ucuacaggaagagaagcac

SEQ ID NO: 1463578 - RNA, 19 nt, Artificial Sequence
  Description of Artificial Sequence: Synthetic oligonucleotide
  Sense strand starting at position 1115 of SEQ ID NO: 1244081
aaucaaagcugggaaaguu

SEQ ID NO: 1463579 - RNA, 19 nt, Artificial Sequence
  Description of Artificial Sequence: Synthetic oligonucleotide
  Antisense strand to SEQ ID NO: 1463578
aacuuucccagcuuugauu

SEQ ID NO: 1463580 - RNA, 19 nt, Artificial Sequence
  Description of Artificial Sequence: Synthetic oligonucleotide
  Sense strand starting at position 1151 of SEQ ID NO: 1244081
guuccuuggucuccucuaa

SEQ ID NO: 1463581 - RNA, 19 nt, Artificial Sequence
  Description of Artificial Sequence: Synthetic oligonucleotide
  Antisense strand to SEQ ID NO: 1463580
uuagaggagaccaaggaac

SEQ ID NO: 1463582 - RNA, 19 nt, Artificial Sequence
  Description of Artificial Sequence: Synthetic oligonucleotide
  Sense strand starting at position 1155 of SEQ ID NO: 1244081
cuuggucuccucuaaugac

SEQ ID NO: 1463583 - RNA, 19 nt, Artificial Sequence
  Description of Artificial Sequence: Synthetic oligonucleotide
  Antisense strand to SEQ ID NO: 1463582
gucauuagaggagaccaag

SEQ ID NO: 1463584 - RNA, 19 nt, Artificial Sequence
  Description of Artificial Sequence: Synthetic oligonucleotide
  Sense strand starting at position 1248 of SEQ ID NO: 1244081
cucuucuuccucuggagaa

SEQ ID NO: 1463585 - RNA, 19 nt, Artificial Sequence
  Description of Artificial Sequence: Synthetic oligonucleotide
  Antisense strand to SEQ ID NO: 1463584
uucuccagaggaagaagag

SEQ ID NO: 1463586 - RNA, 19 nt, Artificial Sequence
  Description of Artificial Sequence: Synthetic oligonucleotide
  Sense strand starting at position 1249 of SEQ ID NO: 1244081
ucuucuuccucuggagaau

SEQ ID NO: 1463587 - RNA, 19 nt, Artificial Sequence
  Description of Artificial Sequence: Synthetic oligonucleotide
  Antisense strand to SEQ ID NO: 1463586
auucuccagaggaagaaga

SEQ ID NO: 1463588 - RNA, 19 nt, Artificial Sequence
  Description of Artificial Sequence: Synthetic oligonucleotide
  Sense strand starting at position 1250 of SEQ ID NO: 1244081
cuucuuccucuggagaauc

SEQ ID NO: 1463589 - RNA, 19 nt, Artificial Sequence
  Description of Artificial Sequence: Synthetic oligonucleotide
  Antisense strand to SEQ ID NO: 1463588
gauucuccagaggaagaag

SEQ ID NO: 1463590 - RNA, 19 nt, Artificial Sequence
  Description of Artificial Sequence: Synthetic oligonucleotide
  Sense strand starting at position 2058 of SEQ ID NO: 1244081
ggccgaguccuuccggagu

SEQ ID NO: 1463591 - RNA, 19 nt, Artificial Sequence
  Description of Artificial Sequence: Synthetic oligonucleotide
  Antisense strand to SEQ ID NO: 1463590
acuccggaaggacucggcc

SEQ ID NO: 1463592 - RNA, 19 nt, Artificial Sequence
  Description of Artificial Sequence: Synthetic oligonucleotide
  Sense strand starting at position 2087 of SEQ ID NO: 1244081
gccgaccucacaggugaaa

SEQ ID NO: 1463593 - RNA, 19 nt, Artificial Sequence
  Description of Artificial Sequence: Synthetic oligonucleotide
  Antisense strand to SEQ ID NO: 1463592
uuucaccugugaggucggc

SEQ ID NO: 1463594 - RNA, 19 nt, Artificial Sequence
  Description of Artificial Sequence: Synthetic oligonucleotide
  Sense strand starting at position 2089 of SEQ ID NO: 1244081
cgaccucacaggugaaaga

SEQ ID NO: 1463595 - RNA, 19 nt, Artificial Sequence
  Description of Artificial Sequence: Synthetic oligonucleotide
  Antisense strand to SEQ ID NO: 1463594
ucuuucaccugugaggucg

SEQ ID NO: 1463596 - RNA, 19 nt, Artificial Sequence
  Description of Artificial Sequence: Synthetic oligonucleotide
  Sense strand starting at position 2302 of SEQ ID NO: 1244081
gguguuuauuggcuccuua

SEQ ID NO: 1463597 - RNA, 19 nt, Artificial Sequence
  Description of Artificial Sequence: Synthetic oligonucleotide
  Antisense strand to SEQ ID NO: 1463596
uaaggagccaauaaacacc

SEQ ID NO: 1463598 - RNA, 19 nt, Artificial Sequence
  Description of Artificial Sequence: Synthetic oligonucleotide
  Sense strand starting at position 2306 of SEQ ID NO: 1244081
uuuauuggcuccuuagaaa

SEQ ID NO: 1463599 - RNA, 19 nt, Artificial Sequence
  Description of Artificial Sequence: Synthetic oligonucleotide
  Antisense strand to SEQ ID NO: 1463598
uuucuaaggagccaauaaa

SEQ ID NO: 1463600 - RNA, 19 nt, Artificial Sequence
  Description of Artificial Sequence: Synthetic oligonucleotide
  Sense strand starting at position 2309 of SEQ ID NO: 1244081
auuggcuccuuagaaauca

SEQ ID NO: 1463601 - RNA, 19 nt, Artificial Sequence
  Description of Artificial Sequence: Synthetic oligonucleotide
  Antisense strand to SEQ ID NO: 1463600
ugauuucuaaggagccaau

SEQ ID NO: 1463602 - RNA, 19 nt, Artificial Sequence
  Description of Artificial Sequence: Synthetic oligonucleotide
  Sense strand starting at position 2692 of SEQ ID NO: 1244081
ccacgagucacgggaauga

SEQ ID NO: 1463603 - RNA, 19 nt, Artificial Sequence
  Description of Artificial Sequence: Synthetic oligonucleotide
  Antisense strand to SEQ ID NO: 1463602
ucauucccgugacucgugg

SEQ ID NO: 1463604 - RNA, 19 nt, Artificial Sequence
  Description of Artificial Sequence: Synthetic oligonucleotide
  Sense strand starting at position 2750 of SEQ ID NO: 1244081
cccgacugugcuuguagua

SEQ ID NO: 1463605 - RNA, 19 nt, Artificial Sequence
  Description of Artificial Sequence: Synthetic oligonucleotide
  Antisense strand to SEQ ID NO: 1463604
uacuacaagcacagucggg

SEQ ID NO: 1463606 - RNA, 19 nt, Artificial Sequence
  Description of Artificial Sequence: Synthetic oligonucleotide
  Sense strand starting at position 2981 of SEQ ID NO: 1244081
cccggaaucugucagacaa

SEQ ID NO: 1463607 - RNA, 19 nt, Artificial Sequence
  Description of Artificial Sequence: Synthetic oligonucleotide
  Antisense strand to SEQ ID NO: 1463606
uugucugacagauuccggg

SEQ ID NO: 1463608 - RNA, 19 nt, Artificial Sequence
  Description of Artificial Sequence: Synthetic oligonucleotide
  Sense strand starting at position 2983 of SEQ ID NO: 1244081
cggaaucugucagacaaga

SEQ ID NO: 1463609 - RNA, 19 nt, Artificial Sequence
  Description of Artificial Sequence: Synthetic oligonucleotide
  Antisense strand to SEQ ID NO: 1463608
ucuugucugacagauuccg

SEQ ID NO: 1463610 - RNA, 19 nt, Artificial Sequence
  Description of Artificial Sequence: Synthetic oligonucleotide
  Sense strand starting at position 3042 of SEQ ID NO: 1244081
cuugcaaagucuguuccaa

SEQ ID NO: 1463611 - RNA, 19 nt, Artificial Sequence
  Description of Artificial Sequence: Synthetic oligonucleotide
  Antisense strand to SEQ ID NO: 1463610
uuggaacagacuuugcaag

SEQ ID NO: 1463612 - RNA, 19 nt, Artificial Sequence
  Description of Artificial Sequence: Synthetic oligonucleotide
  Sense strand starting at position 3614 of SEQ ID NO: 1244081
acuuauuacguaugaacau

SEQ ID NO: 1463613 - RNA, 19 nt, Artificial Sequence
  Description of Artificial Sequence: Synthetic oligonucleotide
  Antisense strand to SEQ ID NO: 1463612
auguucauacguaauaagu

SEQ ID NO: 1463614 - RNA, 19 nt, Artificial Sequence
  Description of Artificial Sequence: Synthetic oligonucleotide
  Sense strand starting at position 3615 of SEQ ID NO: 1244081
cuuauuacguaugaacauu

SEQ ID NO: 1463615 - RNA, 19 nt, Artificial Sequence
  Description of Artificial Sequence: Synthetic oligonucleotide
  Antisense strand to SEQ ID NO: 1463614
aauguucauacguaauaag

SEQ ID NO: 1463616 - RNA, 19 nt, Artificial Sequence
  Description of Artificial Sequence: Synthetic oligonucleotide
  Sense strand starting at position 3623 of SEQ ID NO: 1244081
guaugaacauuguagagag

SEQ ID NO: 1463617 - RNA, 19 nt, Artificial Sequence
  Description of Artificial Sequence: Synthetic oligonucleotide
  Antisense strand to SEQ ID NO: 1463616
cucucuacaauguucauac

SEQ ID NO: 1463618 - RNA, 19 nt, Artificial Sequence
  Description of Artificial Sequence: Synthetic oligonucleotide
  Sense strand starting at position 63 of SEQ ID NO: 1244082
cgcccuuucccauggagau

SEQ ID NO: 1463619 - RNA, 19 nt, Artificial Sequence
  Description of Artificial Sequence: Synthetic oligonucleotide
  Antisense strand to SEQ ID NO: 1463618
aucuccaugggaaagggcg

SEQ ID NO: 1463620 - RNA, 19 nt, Artificial Sequence
  Description of Artificial Sequence: Synthetic oligonucleotide
  Sense strand starting at position 64 of SEQ ID NO: 1244082
gcccuuucccauggagaug

SEQ ID NO: 1463621 - RNA, 19 nt, Artificial Sequence
  Description of Artificial Sequence: Synthetic oligonucleotide
  Antisense strand to SEQ ID NO: 1463620
caucuccaugggaaagggc

SEQ ID NO: 1463622 - RNA, 19 nt, Artificial Sequence
  Description of Artificial Sequence: Synthetic oligonucleotide
  Sense strand starting at position 75 of SEQ ID NO: 1244082
uggagaugucaaggugaca

SEQ ID NO: 1463623 - RNA, 19 nt, Artificial Sequence
  Description of Artificial Sequence: Synthetic oligonucleotide
  Antisense strand to SEQ ID NO: 1463622
ugucaccuugacaucucca

SEQ ID NO: 1463624 - RNA, 19 nt, Artificial Sequence
  Description of Artificial Sequence: Synthetic oligonucleotide
  Sense strand starting at position 100 of SEQ ID NO: 1244082
uccugagucugggucucau

SEQ ID NO: 1463625 - RNA, 19 nt, Artificial Sequence
  Description of Artificial Sequence: Synthetic oligonucleotide
  Antisense strand to SEQ ID NO: 1463624
augagacccagacucagga

SEQ ID NO: 1463626 - RNA, 19 nt, Artificial Sequence
  Description of Artificial Sequence: Synthetic oligonucleotide
  Sense strand starting at position 261 of SEQ ID NO: 1244082
gccauuuguccagggugag

SEQ ID NO: 1463627 - RNA, 19 nt, Artificial Sequence
  Description of Artificial Sequence: Synthetic oligonucleotide
  Antisense strand to SEQ ID NO: 1463626
cucacccuggacaaauggc

SEQ ID NO: 1463628 - RNA, 19 nt, Artificial Sequence
  Description of Artificial Sequence: Synthetic oligonucleotide
  Sense strand starting at position 262 of SEQ ID NO: 1244082
ccauuuguccagggugagu

SEQ ID NO: 1463629 - RNA, 19 nt, Artificial Sequence
  Description of Artificial Sequence: Synthetic oligonucleotide
  Antisense strand to SEQ ID NO: 1463628
acucacccuggacaaaugg

SEQ ID NO: 1463630 - RNA, 19 nt, Artificial Sequence
  Description of Artificial Sequence: Synthetic oligonucleotide
  Sense strand starting at position 576 of SEQ ID NO: 1244082
agugcucucagaugagaaa

SEQ ID NO: 1463631 - RNA, 19 nt, Artificial Sequence
  Description of Artificial Sequence: Synthetic oligonucleotide
  Antisense strand to SEQ ID NO: 1463630
uuucucaucugagagcacu

SEQ ID NO: 1463632 - RNA, 19 nt, Artificial Sequence
  Description of Artificial Sequence: Synthetic oligonucleotide
  Sense strand starting at position 882 of SEQ ID NO: 1244082
ucaguuuagucaccuguga

SEQ ID NO: 1463633 - RNA, 19 nt, Artificial Sequence
  Description of Artificial Sequence: Synthetic oligonucleotide
  Antisense strand to SEQ ID NO: 1463632
ucacaggugacuaaacuga

SEQ ID NO: 1463634 - RNA, 19 nt, Artificial Sequence
  Description of Artificial Sequence: Synthetic oligonucleotide
  Sense strand starting at position 884 of SEQ ID NO: 1244082
aguuuagucaccugugaaa

SEQ ID NO: 1463635 - RNA, 19 nt, Artificial Sequence
  Description of Artificial Sequence: Synthetic oligonucleotide
  Antisense strand to SEQ ID NO: 1463634
uuucacaggugacuaaacu

SEQ ID NO: 1463636 - RNA, 19 nt, Artificial Sequence
  Description of Artificial Sequence: Synthetic oligonucleotide
  Sense strand starting at position 886 of SEQ ID NO: 1244082
uuuagucaccugugaaaug

SEQ ID NO: 1463637 - RNA, 19 nt, Artificial Sequence
  Description of Artificial Sequence: Synthetic oligonucleotide
  Antisense strand to SEQ ID NO: 1463636
cauuucacaggugacuaaa

SEQ ID NO: 1463638 - RNA, 19 nt, Artificial Sequence
  Description of Artificial Sequence: Synthetic oligonucleotide
  Sense strand starting at position 937 of SEQ ID NO: 1244082
ugaggugugcugcugaguu

SEQ ID NO: 1463639 - RNA, 19 nt, Artificial Sequence
  Description of Artificial Sequence: Synthetic oligonucleotide
  Antisense strand to SEQ ID NO: 1463638
aacucagcagcacaccuca

SEQ ID NO: 1463640 - RNA, 19 nt, Artificial Sequence
  Description of Artificial Sequence: Synthetic oligonucleotide
  Sense strand starting at position 1299 of SEQ ID NO: 1244082
ggagaaaugaacgguggua

SEQ ID NO: 1463641 - RNA, 19 nt, Artificial Sequence
  Description of Artificial Sequence: Synthetic oligonucleotide
  Antisense strand to SEQ ID NO: 1463640
uaccaccguucauuucucc

SEQ ID NO: 1463642 - RNA, 19 nt, Artificial Sequence
  Description of Artificial Sequence: Synthetic oligonucleotide
  Sense strand starting at position 1347 of SEQ ID NO: 1244082
cugggaagcucauccuuga

SEQ ID NO: 1463643 - RNA, 19 nt, Artificial Sequence
  Description of Artificial Sequence: Synthetic oligonucleotide
  Antisense strand to SEQ ID NO: 1463642
ucaaggaugagcuucccag

SEQ ID NO: 1463644 - RNA, 19 nt, Artificial Sequence
  Description of Artificial Sequence: Synthetic oligonucleotide
  Sense strand starting at position 1396 of SEQ ID NO: 1244082
agguuagcauguguacuua

SEQ ID NO: 1463645 - RNA, 19 nt, Artificial Sequence
  Description of Artificial Sequence: Synthetic oligonucleotide
  Antisense strand to SEQ ID NO: 1463644
uaaguacacaugcuaaccu

SEQ ID NO: 1463646 - RNA, 19 nt, Artificial Sequence
  Description of Artificial Sequence: Synthetic oligonucleotide
  Sense strand starting at position 1578 of SEQ ID NO: 1244082
gguaauaucucaucgaauc

SEQ ID NO: 1463647 - RNA, 19 nt, Artificial Sequence
  Description of Artificial Sequence: Synthetic oligonucleotide
  Antisense strand to SEQ ID NO: 1463646
gauucgaugagauauuacc

SEQ ID NO: 1463648 - RNA, 19 nt, Artificial Sequence
  Description of Artificial Sequence: Synthetic oligonucleotide
  Sense strand starting at position 1579 of SEQ ID NO: 1244082
guaauaucucaucgaaucc

SEQ ID NO: 1463649 - RNA, 19 nt, Artificial Sequence
  Description of Artificial Sequence: Synthetic oligonucleotide
  Antisense strand to SEQ ID NO: 1463648
ggauucgaugagauauuac

SEQ ID NO: 1463650 - RNA, 19 nt, Artificial Sequence
  Description of Artificial Sequence: Synthetic oligonucleotide
  Sense strand starting at position 1611 of SEQ ID NO: 1244082
aaaggagggucauuaguua

SEQ ID NO: 1463651 - RNA, 19 nt, Artificial Sequence
  Description of Artificial Sequence: Synthetic oligonucleotide
  Antisense strand to SEQ ID NO: 1463650
uaacuaaugacccuccuuu

SEQ ID NO: 1463652 - RNA, 19 nt, Artificial Sequence
  Description of Artificial Sequence: Synthetic oligonucleotide
  Sense strand starting at position 1831 of SEQ ID NO: 1244082
gugugucucccuuguugaa

SEQ ID NO: 1463653 - RNA, 19 nt, Artificial Sequence
  Description of Artificial Sequence: Synthetic oligonucleotide
  Antisense strand to SEQ ID NO: 1463652
uucaacaagggagacacac

SEQ ID NO: 1463654 - RNA, 19 nt, Artificial Sequence
  Description of Artificial Sequence: Synthetic oligonucleotide
  Sense strand starting at position 2609 of SEQ ID NO: 1244082
gaagguaccucuucugguu

SEQ ID NO: 1463655 - RNA, 19 nt, Artificial Sequence
  Description of Artificial Sequence: Synthetic oligonucleotide
  Antisense strand to SEQ ID NO: 1463654
aaccagaagagguaccuuc

SEQ ID NO: 1463656 - RNA, 19 nt, Artificial Sequence
  Description of Artificial Sequence: Synthetic oligonucleotide
  Sense strand starting at position 2639 of SEQ ID NO: 1244082
caccuuaggugggacuuaa

SEQ ID NO: 1463657 - RNA, 19 nt, Artificial Sequence
  Description of Artificial Sequence: Synthetic oligonucleotide
  Antisense strand to SEQ ID NO: 1463656
uuaagucccaccuaaggug

SEQ ID NO: 1463658 - RNA, 19 nt, Artificial Sequence
  Description of Artificial Sequence: Synthetic oligonucleotide
  Sense strand starting at position 2650 of SEQ ID NO: 1244082
ggacuuaaauccuaagguc

SEQ ID NO: 1463659 - RNA, 19 nt, Artificial Sequence
  Description of Artificial Sequence: Synthetic oligonucleotide
  Antisense strand to SEQ ID NO: 1463658
gaccuuaggauuuaagucc

SEQ ID NO: 1463660 - RNA, 19 nt, Artificial Sequence
  Description of Artificial Sequence: Synthetic oligonucleotide
  Sense strand starting at position 2666 of SEQ ID NO: 1244082
gucaacaagacuuguaggu

SEQ ID NO: 1463661 - RNA, 19 nt, Artificial Sequence
  Description of Artificial Sequence: Synthetic oligonucleotide
  Antisense strand to SEQ ID NO: 1463660
accuacaagucuuguugac

SEQ ID NO: 1463662 - RNA, 19 nt, Artificial Sequence
  Description of Artificial Sequence: Synthetic oligonucleotide
  Sense strand starting at position 3072 of SEQ ID NO: 1244082
cgauccuccugccugagau

SEQ ID NO: 1463663 - RNA, 19 nt, Artificial Sequence
  Description of Artificial Sequence: Synthetic oligonucleotide
  Antisense strand to SEQ ID NO: 1463662
aucucaggcaggaggaucg

SEQ ID NO: 1463664 - RNA, 19 nt, Artificial Sequence
  Description of Artificial Sequence: Synthetic oligonucleotide
  Sense strand starting at position 3073 of SEQ ID NO: 1244082
gauccuccugccugagauu

SEQ ID NO: 1463665 - RNA, 19 nt, Artificial Sequence
  Description of Artificial Sequence: Synthetic oligonucleotide
  Antisense strand to SEQ ID NO: 1463664
aaucucaggcaggaggauc

SEQ ID NO: 1463666 - RNA, 19 nt, Artificial Sequence
  Description of Artificial Sequence: Synthetic oligonucleotide
  Sense strand starting at position 3185 of SEQ ID NO: 1244082
cuuaguggguuuguuauga

SEQ ID NO: 1463667 - RNA, 19 nt, Artificial Sequence
  Description of Artificial Sequence: Synthetic oligonucleotide
  Antisense strand to SEQ ID NO: 1463666
ucauaacaaacccacuaag

SEQ ID NO: 1463668 - RNA, 19 nt, Artificial Sequence
  Description of Artificial Sequence: Synthetic oligonucleotide
  Sense strand starting at position 3193 of SEQ ID NO: 1244082
guuuguuaugagcaguguu

SEQ ID NO: 1463669 - RNA, 19 nt, Artificial Sequence
  Description of Artificial Sequence: Synthetic oligonucleotide
  Antisense strand to SEQ ID NO: 1463668
aacacugcucauaacaaac

SEQ ID NO: 1463670 - RNA, 19 nt, Artificial Sequence
  Description of Artificial Sequence: Synthetic oligonucleotide
  Sense strand starting at position 3196 of SEQ ID NO: 1244082
uguuaugagcaguguuauc

SEQ ID NO: 1463671 - RNA, 19 nt, Artificial Sequence
  Description of Artificial Sequence: Synthetic oligonucleotide
  Antisense strand to SEQ ID NO: 1463670
gauaacacugcucauaaca

SEQ ID NO: 1463672 - RNA, 19 nt, Artificial Sequence
  Description of Artificial Sequence: Synthetic oligonucleotide
  Sense strand starting at position 3207 of SEQ ID NO: 1244082
guguuaucgguguagcaau

SEQ ID NO: 1463673 - RNA, 19 nt, Artificial Sequence
  Description of Artificial Sequence: Synthetic oligonucleotide
  Antisense strand to SEQ ID NO: 1463672
auugcuacaccgauaacac

SEQ ID NO: 1463674 - RNA, 19 nt, Artificial Sequence
  Description of Artificial Sequence: Synthetic oligonucleotide
  Sense strand starting at position 3275 of SEQ ID NO: 1244082
acagcuguauuguuuggaa

SEQ ID NO: 1463675 - RNA, 19 nt, Artificial Sequence
  Description of Artificial Sequence: Synthetic oligonucleotide
  Antisense strand to SEQ ID NO: 1463674
uuccaaacaauacagcugu

SEQ ID NO: 1463676 - RNA, 19 nt, Artificial Sequence
  Description of Artificial Sequence: Synthetic oligonucleotide
  Sense strand starting at position 3295 of SEQ ID NO: 1244082
caggguucucccugggaaa

SEQ ID NO: 1463677 - RNA, 19 nt, Artificial Sequence
  Description of Artificial Sequence: Synthetic oligonucleotide
  Antisense strand to SEQ ID NO: 1463676
uuucccagggagaacccug

SEQ ID NO: 1463678 - RNA, 19 nt, Artificial Sequence
  Description of Artificial Sequence: Synthetic oligonucleotide
  Sense strand starting at position 3296 of SEQ ID NO: 1244082
aggguucucccugggaaag

SEQ ID NO: 1463679 - RNA, 19 nt, Artificial Sequence
  Description of Artificial Sequence: Synthetic oligonucleotide
  Antisense strand to SEQ ID NO: 1463678
cuuucccagggagaacccu

SEQ ID NO: 1463680 - RNA, 19 nt, Artificial Sequence
  Description of Artificial Sequence: Synthetic oligonucleotide
  Sense strand starting at position 3297 of SEQ ID NO: 1244082
ggguucucccugggaaaga

SEQ ID NO: 1463681 - RNA, 19 nt, Artificial Sequence
  Description of Artificial Sequence: Synthetic oligonucleotide
  Antisense strand to SEQ ID NO: 1463680
ucuuucccagggagaaccc

SEQ ID NO: 1463682 - RNA, 19 nt, Artificial Sequence
  Description of Artificial Sequence: Synthetic oligonucleotide
  Sense strand starting at position 3298 of SEQ ID NO: 1244082
gguucucccugggaaagaa

SEQ ID NO: 1463683 - RNA, 19 nt, Artificial Sequence
  Description of Artificial Sequence: Synthetic oligonucleotide
  Antisense strand to SEQ ID NO: 1463682
uucuuucccagggagaacc

SEQ ID NO: 1463684 - RNA, 19 nt, Artificial Sequence
  Description of Artificial Sequence: Synthetic oligonucleotide
  Sense strand starting at position 3373 of SEQ ID NO: 1244082
cuggaugaaucagugugaa

SEQ ID NO: 1463685 - RNA, 19 nt, Artificial Sequence
  Description of Artificial Sequence: Synthetic oligonucleotide
  Antisense strand to SEQ ID NO: 1463684
uucacacugauucauccag

SEQ ID NO: 1463686 - RNA, 19 nt, Artificial Sequence
  Description of Artificial Sequence: Synthetic oligonucleotide
  Sense strand starting at position 3376 of SEQ ID NO: 1244082
gaugaaucagugugaaguc

SEQ ID NO: 1463687 - RNA, 19 nt, Artificial Sequence
  Description of Artificial Sequence: Synthetic oligonucleotide
  Antisense strand to SEQ ID NO: 1463686
gacuucacacugauucauc

SEQ ID NO: 1463688 - RNA, 19 nt, Artificial Sequence
  Description of Artificial Sequence: Synthetic oligonucleotide
  Sense strand starting at position 3440 of SEQ ID NO: 1244082
uuaauauaggcucaugguu

SEQ ID NO: 1463689 - RNA, 19 nt, Artificial Sequence
  Description of Artificial Sequence: Synthetic oligonucleotide
  Antisense strand to SEQ ID NO: 1463688
aaccaugagccuauauuaa

SEQ ID NO: 1463690 - RNA, 19 nt, Artificial Sequence
  Description of Artificial Sequence: Synthetic oligonucleotide
  Sense strand starting at position 3600 of SEQ ID NO: 1244082
cugaccuucuggccaauaa

SEQ ID NO: 1463691 - RNA, 19 nt, Artificial Sequence
  Description of Artificial Sequence: Synthetic oligonucleotide
  Antisense strand to SEQ ID NO: 1463690
uuauuggccagaaggucag

SEQ ID NO: 1463692 - RNA, 19 nt, Artificial Sequence
  Description of Artificial Sequence: Synthetic oligonucleotide
  Sense strand starting at position 3601 of SEQ ID NO: 1244082
ugaccuucuggccaauaau

SEQ ID NO: 1463693 - RNA, 19 nt, Artificial Sequence
  Description of Artificial Sequence: Synthetic oligonucleotide
  Antisense strand to SEQ ID NO: 1463692
auuauuggccagaagguca

SEQ ID NO: 1463694 - RNA, 19 nt, Artificial Sequence
  Description of Artificial Sequence: Synthetic oligonucleotide
  Sense strand starting at position 3604 of SEQ ID NO: 1244082
ccuucuggccaauaauaga

SEQ ID NO: 1463695 - RNA, 19 nt, Artificial Sequence
  Description of Artificial Sequence: Synthetic oligonucleotide
  Antisense strand to SEQ ID NO: 1463694
ucuauuauuggccagaagg

SEQ ID NO: 1463696 - RNA, 19 nt, Artificial Sequence
  Description of Artificial Sequence: Synthetic oligonucleotide
  Sense strand starting at position 3776 of SEQ ID NO: 1244082
ucuggagucccugagccaa

SEQ ID NO: 1463697 - RNA, 19 nt, Artificial Sequence
  Description of Artificial Sequence: Synthetic oligonucleotide
  Antisense strand to SEQ ID NO: 1463696
uuggcucagggacuccaga

SEQ ID NO: 1463698 - RNA, 19 nt, Artificial Sequence
  Description of Artificial Sequence: Synthetic oligonucleotide
  Sense strand starting at position 10 of SEQ ID NO: 1244083
cgcccuuucccauggagau

SEQ ID NO: 1463699 - RNA, 19 nt, Artificial Sequence
  Description of Artificial Sequence: Synthetic oligonucleotide
  Antisense strand to SEQ ID NO: 1463698
aucuccaugggaaagggcg

SEQ ID NO: 1463700 - RNA, 19 nt, Artificial Sequence
  Description of Artificial Sequence: Synthetic oligonucleotide
  Sense strand starting at position 11 of SEQ ID NO: 1244083
gcccuuucccauggagaug

SEQ ID NO: 1463701 - RNA, 19 nt, Artificial Sequence
  Description of Artificial Sequence: Synthetic oligonucleotide
  Antisense strand to SEQ ID NO: 1463700
caucuccaugggaaagggc

SEQ ID NO: 1463702 - RNA, 19 nt, Artificial Sequence
  Description of Artificial Sequence: Synthetic oligonucleotide
  Sense strand starting at position 22 of SEQ ID NO: 1244083
uggagaugucaaggugaca

SEQ ID NO: 1463703 - RNA, 19 nt, Artificial Sequence
  Description of Artificial Sequence: Synthetic oligonucleotide
  Antisense strand to SEQ ID NO: 1463702
ugucaccuugacaucucca

SEQ ID NO: 1463704 - RNA, 19 nt, Artificial Sequence
  Description of Artificial Sequence: Synthetic oligonucleotide
  Sense strand starting at position 47 of SEQ ID NO: 1244083
uccugagucugggucucau

SEQ ID NO: 1463705 - RNA, 19 nt, Artificial Sequence
  Description of Artificial Sequence: Synthetic oligonucleotide
  Antisense strand to SEQ ID NO: 1463704
augagacccagacucagga

SEQ ID NO: 1463706 - RNA, 19 nt, Artificial Sequence
  Description of Artificial Sequence: Synthetic oligonucleotide
  Sense strand starting at position 208 of SEQ ID NO: 1244083
gccauuuguccagggugag

SEQ ID NO: 1463707 - RNA, 19 nt, Artificial Sequence
  Description of Artificial Sequence: Synthetic oligonucleotide
  Antisense strand to SEQ ID NO: 1463706
cucacccuggacaaauggc

SEQ ID NO: 1463708 - RNA, 19 nt, Artificial Sequence
  Description of Artificial Sequence: Synthetic oligonucleotide
  Sense strand starting at position 209 of SEQ ID NO: 1244083
ccauuuguccagggugagu

SEQ ID NO: 1463709 - RNA, 19 nt, Artificial Sequence
  Description of Artificial Sequence: Synthetic oligonucleotide
  Antisense strand to SEQ ID NO: 1463708
acucacccuggacaaaugg

SEQ ID NO: 1463710 - RNA, 19 nt, Artificial Sequence
  Description of Artificial Sequence: Synthetic oligonucleotide
  Sense strand starting at position 224 of SEQ ID NO: 1244083
gaguccaugagccagaguu

SEQ ID NO: 1463711 - RNA, 19 nt, Artificial Sequence
  Description of Artificial Sequence: Synthetic oligonucleotide
  Antisense strand to SEQ ID NO: 1463710
aacucuggcucauggacuc

SEQ ID NO: 1463712 - RNA, 19 nt, Artificial Sequence
  Description of Artificial Sequence: Synthetic oligonucleotide
  Sense strand starting at position 523 of SEQ ID NO: 1244083
agugcucucagaugagaaa

SEQ ID NO: 1463713 - RNA, 19 nt, Artificial Sequence
  Description of Artificial Sequence: Synthetic oligonucleotide
  Antisense strand to SEQ ID NO: 1463712
uuucucaucugagagcacu

SEQ ID NO: 1463714 - RNA, 19 nt, Artificial Sequence
  Description of Artificial Sequence: Synthetic oligonucleotide
  Sense strand starting at position 829 of SEQ ID NO: 1244083
ucaguuuagucaccuguga

SEQ ID NO: 1463715 - RNA, 19 nt, Artificial Sequence
  Description of Artificial Sequence: Synthetic oligonucleotide
  Antisense strand to SEQ ID NO: 1463714
ucacaggugacuaaacuga

SEQ ID NO: 1463716 - RNA, 19 nt, Artificial Sequence
  Description of Artificial Sequence: Synthetic oligonucleotide
  Sense strand starting at position 831 of SEQ ID NO: 1244083
aguuuagucaccugugaaa

SEQ ID NO: 1463717 - RNA, 19 nt, Artificial Sequence
  Description of Artificial Sequence: Synthetic oligonucleotide
  Antisense strand to SEQ ID NO: 1463716
uuucacaggugacuaaacu

SEQ ID NO: 1463718 - RNA, 19 nt, Artificial Sequence
  Description of Artificial Sequence: Synthetic oligonucleotide
  Sense strand starting at position 833 of SEQ ID NO: 1244083
uuuagucaccugugaaaug

SEQ ID NO: 1463719 - RNA, 19 nt, Artificial Sequence
  Description of Artificial Sequence: Synthetic oligonucleotide
  Antisense strand to SEQ ID NO: 1463718
cauuucacaggugacuaaa

SEQ ID NO: 1463720 - RNA, 19 nt, Artificial Sequence
  Description of Artificial Sequence: Synthetic oligonucleotide
  Sense strand starting at position 884 of SEQ ID NO: 1244083
ugaggugugcugcugaguu

SEQ ID NO: 1463721 - RNA, 19 nt, Artificial Sequence
  Description of Artificial Sequence: Synthetic oligonucleotide
  Antisense strand to SEQ ID NO: 1463720
aacucagcagcacaccuca

SEQ ID NO: 1463722 - RNA, 19 nt, Artificial Sequence
  Description of Artificial Sequence: Synthetic oligonucleotide
  Sense strand starting at position 1246 of SEQ ID NO: 1244083
ggagaaaugaacgguggua

SEQ ID NO: 1463723 - RNA, 19 nt, Artificial Sequence
  Description of Artificial Sequence: Synthetic oligonucleotide
  Antisense strand to SEQ ID NO: 1463722
uaccaccguucauuucucc

SEQ ID NO: 1463724 - RNA, 19 nt, Artificial Sequence
  Description of Artificial Sequence: Synthetic oligonucleotide
  Sense strand starting at position 1294 of SEQ ID NO: 1244083
cugggaagcucauccuuga

SEQ ID NO: 1463725 - RNA, 19 nt, Artificial Sequence
  Description of Artificial Sequence: Synthetic oligonucleotide
  Antisense strand to SEQ ID NO: 1463724
ucaaggaugagcuucccag

SEQ ID NO: 1463726 - RNA, 19 nt, Artificial Sequence
  Description of Artificial Sequence: Synthetic oligonucleotide
  Sense strand starting at position 1343 of SEQ ID NO: 1244083
agguuagcauguguacuua

SEQ ID NO: 1463727 - RNA, 19 nt, Artificial Sequence
  Description of Artificial Sequence: Synthetic oligonucleotide
  Antisense strand to SEQ ID NO: 1463726
uaaguacacaugcuaaccu

SEQ ID NO: 1463728 - RNA, 19 nt, Artificial Sequence
  Description of Artificial Sequence: Synthetic oligonucleotide
  Sense strand starting at position 1525 of SEQ ID NO: 1244083
gguaauaucucaucgaauc

SEQ ID NO: 1463729 - RNA, 19 nt, Artificial Sequence
  Description of Artificial Sequence: Synthetic oligonucleotide
  Antisense strand to SEQ ID NO: 1463728
gauucgaugagauauuacc

SEQ ID NO: 1463730 - RNA, 19 nt, Artificial Sequence
  Description of Artificial Sequence: Synthetic oligonucleotide
  Sense strand starting at position 1526 of SEQ ID NO: 1244083
guaauaucucaucgaaucc

SEQ ID NO: 1463731 - RNA, 19 nt, Artificial Sequence
  Description of Artificial Sequence: Synthetic oligonucleotide
  Antisense strand to SEQ ID NO: 1463730
ggauucgaugagauauuac

SEQ ID NO: 1463732 - RNA, 19 nt, Artificial Sequence
  Description of Artificial Sequence: Synthetic oligonucleotide
  Sense strand starting at position 1558 of SEQ ID NO: 1244083
aaaggagggucauuaguua

SEQ ID NO: 1463733 - RNA, 19 nt, Artificial Sequence
  Description of Artificial Sequence: Synthetic oligonucleotide
  Antisense strand to SEQ ID NO: 1463732
uaacuaaugacccuccuuu

SEQ ID NO: 1463734 - RNA, 19 nt, Artificial Sequence
  Description of Artificial Sequence: Synthetic oligonucleotide
  Sense strand starting at position 2556 of SEQ ID NO: 1244083
gaagguaccucuucugguu

SEQ ID NO: 1463735 - RNA, 19 nt, Artificial Sequence
  Description of Artificial Sequence: Synthetic oligonucleotide
  Antisense strand to SEQ ID NO: 1463734
aaccagaagagguaccuuc

SEQ ID NO: 1463736 - RNA, 19 nt, Artificial Sequence
  Description of Artificial Sequence: Synthetic oligonucleotide
  Sense strand starting at position 2597 of SEQ ID NO: 1244083
ggacuuaaauccuaagguc

SEQ ID NO: 1463737 - RNA, 19 nt, Artificial Sequence
  Description of Artificial Sequence: Synthetic oligonucleotide
  Antisense strand to SEQ ID NO: 1463736
gaccuuaggauuuaagucc

SEQ ID NO: 1463738 - RNA, 19 nt, Artificial Sequence
  Description of Artificial Sequence: Synthetic oligonucleotide
  Sense strand starting at position 2613 of SEQ ID NO: 1244083
gucaacaagacuuguaggu

SEQ ID NO: 1463739 - RNA, 19 nt, Artificial Sequence
  Description of Artificial Sequence: Synthetic oligonucleotide
  Antisense strand to SEQ ID NO: 1463738
accuacaagucuuguugac

SEQ ID NO: 1463740 - RNA, 19 nt, Artificial Sequence
  Description of Artificial Sequence: Synthetic oligonucleotide
  Sense strand starting at position 3019 of SEQ ID NO: 1244083
cgauccuccugccugagau

SEQ ID NO: 1463741 - RNA, 19 nt, Artificial Sequence
  Description of Artificial Sequence: Synthetic oligonucleotide
  Antisense strand to SEQ ID NO: 1463740
aucucaggcaggaggaucg

SEQ ID NO: 1463742 - RNA, 19 nt, Artificial Sequence
  Description of Artificial Sequence: Synthetic oligonucleotide
  Sense strand starting at position 3020 of SEQ ID NO: 1244083
gauccuccugccugagauu

SEQ ID NO: 1463743 - RNA, 19 nt, Artificial Sequence
  Description of Artificial Sequence: Synthetic oligonucleotide
  Antisense strand to SEQ ID NO: 1463742
aaucucaggcaggaggauc

SEQ ID NO: 1463744 - RNA, 19 nt, Artificial Sequence
  Description of Artificial Sequence: Synthetic oligonucleotide
  Sense strand starting at position 3067 of SEQ ID NO: 1244083
gagcgagucuccuucucaa

SEQ ID NO: 1463745 - RNA, 19 nt, Artificial Sequence
  Description of Artificial Sequence: Synthetic oligonucleotide
  Antisense strand to SEQ ID NO: 1463744
uugagaaggagacucgcuc

SEQ ID NO: 1463746 - RNA, 19 nt, Artificial Sequence
  Description of Artificial Sequence: Synthetic oligonucleotide
  Sense strand starting at position 3134 of SEQ ID NO: 1244083
cuuaguggguuuguuauga

SEQ ID NO: 1463747 - RNA, 19 nt, Artificial Sequence
  Description of Artificial Sequence: Synthetic oligonucleotide
  Antisense strand to SEQ ID NO: 1463746
ucauaacaaacccacuaag

SEQ ID NO: 1463748 - RNA, 19 nt, Artificial Sequence
  Description of Artificial Sequence: Synthetic oligonucleotide
  Sense strand starting at position 3142 of SEQ ID NO: 1244083
guuuguuaugagcaguguu

SEQ ID NO: 1463749 - RNA, 19 nt, Artificial Sequence
  Description of Artificial Sequence: Synthetic oligonucleotide
  Antisense strand to SEQ ID NO: 1463748
aacacugcucauaacaaac

SEQ ID NO: 1463750 - RNA, 19 nt, Artificial Sequence
  Description of Artificial Sequence: Synthetic oligonucleotide
  Sense strand starting at position 3145 of SEQ ID NO: 1244083
uguuaugagcaguguuauc

SEQ ID NO: 1463751 - RNA, 19 nt, Artificial Sequence
  Description of Artificial Sequence: Synthetic oligonucleotide
  Antisense strand to SEQ ID NO: 1463750
gauaacacugcucauaaca

SEQ ID NO: 1463752 - RNA, 19 nt, Artificial Sequence
  Description of Artificial Sequence: Synthetic oligonucleotide
  Sense strand starting at position 3156 of SEQ ID NO: 1244083
guguuaucgguguagcaau

SEQ ID NO: 1463753 - RNA, 19 nt, Artificial Sequence
  Description of Artificial Sequence: Synthetic oligonucleotide
  Antisense strand to SEQ ID NO: 1463752
auugcuacaccgauaacac

SEQ ID NO: 1463754 - RNA, 19 nt, Artificial Sequence
  Description of Artificial Sequence: Synthetic oligonucleotide
  Sense strand starting at position 3244 of SEQ ID NO: 1244083
caggguucucccugggaaa

SEQ ID NO: 1463755 - RNA, 19 nt, Artificial Sequence
  Description of Artificial Sequence: Synthetic oligonucleotide
  Antisense strand to SEQ ID NO: 1463754
uuucccagggagaacccug

SEQ ID NO: 1463756 - RNA, 19 nt, Artificial Sequence
  Description of Artificial Sequence: Synthetic oligonucleotide
  Sense strand starting at position 3245 of SEQ ID NO: 1244083
aggguucucccugggaaag

SEQ ID NO: 1463757 - RNA, 19 nt, Artificial Sequence
  Description of Artificial Sequence: Synthetic oligonucleotide
  Antisense strand to SEQ ID NO: 1463756
cuuucccagggagaacccu

SEQ ID NO: 1463758 - RNA, 19 nt, Artificial Sequence
  Description of Artificial Sequence: Synthetic oligonucleotide
  Sense strand starting at position 3246 of SEQ ID NO: 1244083
ggguucucccugggaaaga

SEQ ID NO: 1463759 - RNA, 19 nt, Artificial Sequence
  Description of Artificial Sequence: Synthetic oligonucleotide
  Antisense strand to SEQ ID NO: 1463758
ucuuucccagggagaaccc

SEQ ID NO: 1463760 - RNA, 19 nt, Artificial Sequence
  Description of Artificial Sequence: Synthetic oligonucleotide
  Sense strand starting at position 3247 of SEQ ID NO: 1244083
gguucucccugggaaagaa

SEQ ID NO: 1463761 - RNA, 19 nt, Artificial Sequence
  Description of Artificial Sequence: Synthetic oligonucleotide
  Antisense strand to SEQ ID NO: 1463760
uucuuucccagggagaacc

SEQ ID NO: 1463762 - RNA, 19 nt, Artificial Sequence
  Description of Artificial Sequence: Synthetic oligonucleotide
  Sense strand starting at position 3322 of SEQ ID NO: 1244083
cuggaugaaucagugugaa

SEQ ID NO: 1463763 - RNA, 19 nt, Artificial Sequence
  Description of Artificial Sequence: Synthetic oligonucleotide
  Antisense strand to SEQ ID NO: 1463762
uucacacugauucauccag

SEQ ID NO: 1463764 - RNA, 19 nt, Artificial Sequence
  Description of Artificial Sequence: Synthetic oligonucleotide
  Sense strand starting at position 3325 of SEQ ID NO: 1244083
gaugaaucagugugaaguc

SEQ ID NO: 1463765 - RNA, 19 nt, Artificial Sequence
  Description of Artificial Sequence: Synthetic oligonucleotide
  Antisense strand to SEQ ID NO: 1463764
gacuucacacugauucauc

SEQ ID NO: 1463766 - RNA, 19 nt, Artificial Sequence
  Description of Artificial Sequence: Synthetic oligonucleotide
  Sense strand starting at position 3549 of SEQ ID NO: 1244083
cugaccuucuggccaauaa

SEQ ID NO: 1463767 - RNA, 19 nt, Artificial Sequence
  Description of Artificial Sequence: Synthetic oligonucleotide
  Antisense strand to SEQ ID NO: 1463766
uuauuggccagaaggucag

SEQ ID NO: 1463768 - RNA, 19 nt, Artificial Sequence
  Description of Artificial Sequence: Synthetic oligonucleotide
  Sense strand starting at position 3550 of SEQ ID NO: 1244083
ugaccuucuggccaauaau

SEQ ID NO: 1463769 - RNA, 19 nt, Artificial Sequence
  Description of Artificial Sequence: Synthetic oligonucleotide
  Antisense strand to SEQ ID NO: 1463768
auuauuggccagaagguca

SEQ ID NO: 1463770 - RNA, 19 nt, Artificial Sequence
  Description of Artificial Sequence: Synthetic oligonucleotide
  Sense strand starting at position 3553 of SEQ ID NO: 1244083
ccuucuggccaauaauaga

SEQ ID NO: 1463771 - RNA, 19 nt, Artificial Sequence
  Description of Artificial Sequence: Synthetic oligonucleotide
  Antisense strand to SEQ ID NO: 1463770
ucuauuauuggccagaagg

SEQ ID NO: 1463772 - RNA, 19 nt, Artificial Sequence
  Description of Artificial Sequence: Synthetic oligonucleotide
  Sense strand starting at position 3567 of SEQ ID NO: 1244083
auagaagaaucgcuugaac

SEQ ID NO: 1463773 - RNA, 19 nt, Artificial Sequence
  Description of Artificial Sequence: Synthetic oligonucleotide
  Antisense strand to SEQ ID NO: 1463772
guucaagcgauucuucuau

SEQ ID NO: 1463774 - RNA, 19 nt, Artificial Sequence
  Description of Artificial Sequence: Synthetic oligonucleotide
  Sense strand starting at position 3725 of SEQ ID NO: 1244083
ucuggagucccugagccaa

SEQ ID NO: 1463775 - RNA, 19 nt, Artificial Sequence
  Description of Artificial Sequence: Synthetic oligonucleotide
  Antisense strand to SEQ ID NO: 1463774
uuggcucagggacuccaga

SEQ ID NO: 1463776 - RNA, 19 nt, Artificial Sequence
  Description of Artificial Sequence: Synthetic oligonucleotide
  Sense strand starting at position 3961 of SEQ ID NO: 1244083
ggugcuucuagccauauga

SEQ ID NO: 1463777 - RNA, 19 nt, Artificial Sequence
  Description of Artificial Sequence: Synthetic oligonucleotide
  Antisense strand to SEQ ID NO: 1463776
ucauauggcuagaagcacc

SEQ ID NO: 1463778 - RNA, 19 nt, Artificial Sequence
  Description of Artificial Sequence: Synthetic oligonucleotide
  Sense strand starting at position 75 of SEQ ID NO: 1244084
auaaaugcuuguguuuagu

SEQ ID NO: 1463779 - RNA, 19 nt, Artificial Sequence
  Description of Artificial Sequence: Synthetic oligonucleotide
  Antisense strand to SEQ ID NO: 1463778
acuaaacacaagcauuuau

SEQ ID NO: 1463780 - RNA, 19 nt, Artificial Sequence
  Description of Artificial Sequence: Synthetic oligonucleotide
  Sense strand starting at position 78 of SEQ ID NO: 1244084
aaugcuuguguuuaguaga

SEQ ID NO: 1463781 - RNA, 19 nt, Artificial Sequence
  Description of Artificial Sequence: Synthetic oligonucleotide
  Antisense strand to SEQ ID NO: 1463780
ucuacuaaacacaagcauu

SEQ ID NO: 1463782 - RNA, 19 nt, Artificial Sequence
  Description of Artificial Sequence: Synthetic oligonucleotide
  Sense strand starting at position 83 of SEQ ID NO: 1244084
uuguguuuaguagaagaaa

SEQ ID NO: 1463783 - RNA, 19 nt, Artificial Sequence
  Description of Artificial Sequence: Synthetic oligonucleotide
  Antisense strand to SEQ ID NO: 1463782
uuucuucuacuaaacacaa

SEQ ID NO: 1463784 - RNA, 19 nt, Artificial Sequence
  Description of Artificial Sequence: Synthetic oligonucleotide
  Sense strand starting at position 92 of SEQ ID NO: 1244084
guagaagaaagcugauuau

SEQ ID NO: 1463785 - RNA, 19 nt, Artificial Sequence
  Description of Artificial Sequence: Synthetic oligonucleotide
  Antisense strand to SEQ ID NO: 1463784
auaaucagcuuucuucuac

SEQ ID NO: 1463786 - RNA, 19 nt, Artificial Sequence
  Description of Artificial Sequence: Synthetic oligonucleotide
  Sense strand starting at position 473 of SEQ ID NO: 1244084
ggcacagaagcauaaucuu

SEQ ID NO: 1463787 - RNA, 19 nt, Artificial Sequence
  Description of Artificial Sequence: Synthetic oligonucleotide
  Antisense strand to SEQ ID NO: 1463786
aagauuaugcuucugugcc

SEQ ID NO: 1463788 - RNA, 19 nt, Artificial Sequence
  Description of Artificial Sequence: Synthetic oligonucleotide
  Sense strand starting at position 555 of SEQ ID NO: 1244084
acugauuucuuagggauga

SEQ ID NO: 1463789 - RNA, 19 nt, Artificial Sequence
  Description of Artificial Sequence: Synthetic oligonucleotide
  Antisense strand to SEQ ID NO: 1463788
ucaucccuaagaaaucagu

SEQ ID NO: 1463790 - RNA, 19 nt, Artificial Sequence
  Description of Artificial Sequence: Synthetic oligonucleotide
  Sense strand starting at position 556 of SEQ ID NO: 1244084
cugauuucuuagggaugaa

SEQ ID NO: 1463791 - RNA, 19 nt, Artificial Sequence
  Description of Artificial Sequence: Synthetic oligonucleotide
  Antisense strand to SEQ ID NO: 1463790
uucaucccuaagaaaucag

SEQ ID NO: 1463792 - RNA, 19 nt, Artificial Sequence
  Description of Artificial Sequence: Synthetic oligonucleotide
  Sense strand starting at position 703 of SEQ ID NO: 1244084
gagagucucuucccgagga

SEQ ID NO: 1463793 - RNA, 19 nt, Artificial Sequence
  Description of Artificial Sequence: Synthetic oligonucleotide
  Antisense strand to SEQ ID NO: 1463792
uccucgggaagagacucuc

SEQ ID NO: 1463794 - RNA, 19 nt, Artificial Sequence
  Description of Artificial Sequence: Synthetic oligonucleotide
  Sense strand starting at position 705 of SEQ ID NO: 1244084
gagucucuucccgaggaaa

SEQ ID NO: 1463795 - RNA, 19 nt, Artificial Sequence
  Description of Artificial Sequence: Synthetic oligonucleotide
  Antisense strand to SEQ ID NO: 1463794
uuuccucgggaagagacuc

SEQ ID NO: 1463796 - RNA, 19 nt, Artificial Sequence
  Description of Artificial Sequence: Synthetic oligonucleotide
  Sense strand starting at position 857 of SEQ ID NO: 1244084
gggcaaaugacuugcauua

SEQ ID NO: 1463797 - RNA, 19 nt, Artificial Sequence
  Description of Artificial Sequence: Synthetic oligonucleotide
  Antisense strand to SEQ ID NO: 1463796
uaaugcaagucauuugccc

SEQ ID NO: 1463798 - RNA, 19 nt, Artificial Sequence
  Description of Artificial Sequence: Synthetic oligonucleotide
  Sense strand starting at position 981 of SEQ ID NO: 1244084
ucucucaugugucugacau

SEQ ID NO: 1463799 - RNA, 19 nt, Artificial Sequence
  Description of Artificial Sequence: Synthetic oligonucleotide
  Antisense strand to SEQ ID NO: 1463798
augucagacacaugagaga

SEQ ID NO: 1463800 - RNA, 19 nt, Artificial Sequence
  Description of Artificial Sequence: Synthetic oligonucleotide
  Sense strand starting at position 982 of SEQ ID NO: 1244084
cucucaugugucugacauu

SEQ ID NO: 1463801 - RNA, 19 nt, Artificial Sequence
  Description of Artificial Sequence: Synthetic oligonucleotide
  Antisense strand to SEQ ID NO: 1463800
aaugucagacacaugagag

SEQ ID NO: 1463802 - RNA, 19 nt, Artificial Sequence
  Description of Artificial Sequence: Synthetic oligonucleotide
  Sense strand starting at position 983 of SEQ ID NO: 1244084
ucucaugugucugacauuu

SEQ ID NO: 1463803 - RNA, 19 nt, Artificial Sequence
  Description of Artificial Sequence: Synthetic oligonucleotide
  Antisense strand to SEQ ID NO: 1463802
aaaugucagacacaugaga

SEQ ID NO: 1463804 - RNA, 19 nt, Artificial Sequence
  Description of Artificial Sequence: Synthetic oligonucleotide
  Sense strand starting at position 992 of SEQ ID NO: 1244084
ucugacauuucggaaaguc

SEQ ID NO: 1463805 - RNA, 19 nt, Artificial Sequence
  Description of Artificial Sequence: Synthetic oligonucleotide
  Antisense strand to SEQ ID NO: 1463804
gacuuuccgaaaugucaga

SEQ ID NO: 1463806 - RNA, 19 nt, Artificial Sequence
  Description of Artificial Sequence: Synthetic oligonucleotide
  Sense strand starting at position 1116 of SEQ ID NO: 1244084
acucauguguggcuuacaa

SEQ ID NO: 1463807 - RNA, 19 nt, Artificial Sequence
  Description of Artificial Sequence: Synthetic oligonucleotide
  Antisense strand to SEQ ID NO: 1463806
uuguaagccacacaugagu

SEQ ID NO: 1463808 - RNA, 19 nt, Artificial Sequence
  Description of Artificial Sequence: Synthetic oligonucleotide
  Sense strand starting at position 1118 of SEQ ID NO: 1244084
ucauguguggcuuacaauc

SEQ ID NO: 1463809 - RNA, 19 nt, Artificial Sequence
  Description of Artificial Sequence: Synthetic oligonucleotide
  Antisense strand to SEQ ID NO: 1463808
gauuguaagccacacauga

SEQ ID NO: 1463810 - RNA, 19 nt, Artificial Sequence
  Description of Artificial Sequence: Synthetic oligonucleotide
  Sense strand starting at position 1124 of SEQ ID NO: 1244084
guggcuuacaaucauagag

SEQ ID NO: 1463811 - RNA, 19 nt, Artificial Sequence
  Description of Artificial Sequence: Synthetic oligonucleotide
  Antisense strand to SEQ ID NO: 1463810
cucuaugauuguaagccac

SEQ ID NO: 1463812 - RNA, 19 nt, Artificial Sequence
  Description of Artificial Sequence: Synthetic oligonucleotide
  Sense strand starting at position 1126 of SEQ ID NO: 1244084
ggcuuacaaucauagagag

SEQ ID NO: 1463813 - RNA, 19 nt, Artificial Sequence
  Description of Artificial Sequence: Synthetic oligonucleotide
  Antisense strand to SEQ ID NO: 1463812
cucucuaugauuguaagcc

SEQ ID NO: 1463814 - RNA, 19 nt, Artificial Sequence
  Description of Artificial Sequence: Synthetic oligonucleotide
  Sense strand starting at position 1980 of SEQ ID NO: 1244084
cgucggugucccgcgagaa

SEQ ID NO: 1463815 - RNA, 19 nt, Artificial Sequence
  Description of Artificial Sequence: Synthetic oligonucleotide
  Antisense strand to SEQ ID NO: 1463814
uucucgcgggacaccgacg

SEQ ID NO: 1463816 - RNA, 19 nt, Artificial Sequence
  Description of Artificial Sequence: Synthetic oligonucleotide
  Sense strand starting at position 1983 of SEQ ID NO: 1244084
cggugucccgcgagaacuu

SEQ ID NO: 1463817 - RNA, 19 nt, Artificial Sequence
  Description of Artificial Sequence: Synthetic oligonucleotide
  Antisense strand to SEQ ID NO: 1463816
aaguucucgcgggacaccg

SEQ ID NO: 1463818 - RNA, 19 nt, Artificial Sequence
  Description of Artificial Sequence: Synthetic oligonucleotide
  Sense strand starting at position 1992 of SEQ ID NO: 1244084
gcgagaacuucuccacgag

SEQ ID NO: 1463819 - RNA, 19 nt, Artificial Sequence
  Description of Artificial Sequence: Synthetic oligonucleotide
  Antisense strand to SEQ ID NO: 1463818
cucguggagaaguucucgc

SEQ ID NO: 1463820 - RNA, 19 nt, Artificial Sequence
  Description of Artificial Sequence: Synthetic oligonucleotide
  Sense strand starting at position 2208 of SEQ ID NO: 1244084
acagcuuagcccugaagga

SEQ ID NO: 1463821 - RNA, 19 nt, Artificial Sequence
  Description of Artificial Sequence: Synthetic oligonucleotide
  Antisense strand to SEQ ID NO: 1463820
uccuucagggcuaagcugu

SEQ ID NO: 1463822 - RNA, 19 nt, Artificial Sequence
  Description of Artificial Sequence: Synthetic oligonucleotide
  Sense strand starting at position 2359 of SEQ ID NO: 1244084
gagaauccgguccguacaa

SEQ ID NO: 1463823 - RNA, 19 nt, Artificial Sequence
  Description of Artificial Sequence: Synthetic oligonucleotide
  Antisense strand to SEQ ID NO: 1463822
uuguacggaccggauucuc

SEQ ID NO: 1463824 - RNA, 19 nt, Artificial Sequence
  Description of Artificial Sequence: Synthetic oligonucleotide
  Sense strand starting at position 2456 of SEQ ID NO: 1244084
ccaauauaggccgaacacu

SEQ ID NO: 1463825 - RNA, 19 nt, Artificial Sequence
  Description of Artificial Sequence: Synthetic oligonucleotide
  Antisense strand to SEQ ID NO: 1463824
aguguucggccuauauugg

SEQ ID NO: 1463826 - RNA, 19 nt, Artificial Sequence
  Description of Artificial Sequence: Synthetic oligonucleotide
  Sense strand starting at position 2489 of SEQ ID NO: 1244084
acagaaaucuuggcccuua

SEQ ID NO: 1463827 - RNA, 19 nt, Artificial Sequence
  Description of Artificial Sequence: Synthetic oligonucleotide
  Antisense strand to SEQ ID NO: 1463826
uaagggccaagauuucugu

SEQ ID NO: 1463828 - RNA, 19 nt, Artificial Sequence
  Description of Artificial Sequence: Synthetic oligonucleotide
  Sense strand starting at position 2578 of SEQ ID NO: 1244084
gaguuugcugaggaagcua

SEQ ID NO: 1463829 - RNA, 19 nt, Artificial Sequence
  Description of Artificial Sequence: Synthetic oligonucleotide
  Antisense strand to SEQ ID NO: 1463828
uagcuuccucagcaaacuc

SEQ ID NO: 1463830 - RNA, 19 nt, Artificial Sequence
  Description of Artificial Sequence: Synthetic oligonucleotide
  Sense strand starting at position 2658 of SEQ ID NO: 1244084
ggcgaugucugaucugagu

SEQ ID NO: 1463831 - RNA, 19 nt, Artificial Sequence
  Description of Artificial Sequence: Synthetic oligonucleotide
  Antisense strand to SEQ ID NO: 1463830
acucagaucagacaucgcc

SEQ ID NO: 1463832 - RNA, 19 nt, Artificial Sequence
  Description of Artificial Sequence: Synthetic oligonucleotide
  Sense strand starting at position 2660 of SEQ ID NO: 1244084
cgaugucugaucugagucu

SEQ ID NO: 1463833 - RNA, 19 nt, Artificial Sequence
  Description of Artificial Sequence: Synthetic oligonucleotide
  Antisense strand to SEQ ID NO: 1463832
agacucagaucagacaucg

SEQ ID NO: 1463834 - RNA, 19 nt, Artificial Sequence
  Description of Artificial Sequence: Synthetic oligonucleotide
  Sense strand starting at position 2792 of SEQ ID NO: 1244084
gaaagucguguucugugca

SEQ ID NO: 1463835 - RNA, 19 nt, Artificial Sequence
  Description of Artificial Sequence: Synthetic oligonucleotide
  Antisense strand to SEQ ID NO: 1463834
ugcacagaacacgacuuuc

SEQ ID NO: 1463836 - RNA, 19 nt, Artificial Sequence
  Description of Artificial Sequence: Synthetic oligonucleotide
  Sense strand starting at position 2799 of SEQ ID NO: 1244084
guguucugugcagugcuaa

SEQ ID NO: 1463837 - RNA, 19 nt, Artificial Sequence
  Description of Artificial Sequence: Synthetic oligonucleotide
  Antisense strand to SEQ ID NO: 1463836
uuagcacugcacagaacac

SEQ ID NO: 1463838 - RNA, 19 nt, Artificial Sequence
  Description of Artificial Sequence: Synthetic oligonucleotide
  Sense strand starting at position 2802 of SEQ ID NO: 1244084
uucugugcagugcuaagua

SEQ ID NO: 1463839 - RNA, 19 nt, Artificial Sequence
  Description of Artificial Sequence: Synthetic oligonucleotide
  Antisense strand to SEQ ID NO: 1463838
uacuuagcacugcacagaa

SEQ ID NO: 1463840 - RNA, 19 nt, Artificial Sequence
  Description of Artificial Sequence: Synthetic oligonucleotide
  Sense strand starting at position 2865 of SEQ ID NO: 1244084
agaugaggcuuggagaaau

SEQ ID NO: 1463841 - RNA, 19 nt, Artificial Sequence
  Description of Artificial Sequence: Synthetic oligonucleotide
  Antisense strand to SEQ ID NO: 1463840
auuucuccaagccucaucu

SEQ ID NO: 1463842 - RNA, 19 nt, Artificial Sequence
  Description of Artificial Sequence: Synthetic oligonucleotide
  Sense strand starting at position 3072 of SEQ ID NO: 1244084
gagcaucaccugugugcaa

SEQ ID NO: 1463843 - RNA, 19 nt, Artificial Sequence
  Description of Artificial Sequence: Synthetic oligonucleotide
  Antisense strand to SEQ ID NO: 1463842
uugcacacaggugaugcuc

SEQ ID NO: 1463844 - RNA, 19 nt, Artificial Sequence
  Description of Artificial Sequence: Synthetic oligonucleotide
  Sense strand starting at position 3137 of SEQ ID NO: 1244084
agugcuuuguaaucuagag

SEQ ID NO: 1463845 - RNA, 19 nt, Artificial Sequence
  Description of Artificial Sequence: Synthetic oligonucleotide
  Antisense strand to SEQ ID NO: 1463844
cucuagauuacaaagcacu

SEQ ID NO: 1463846 - RNA, 19 nt, Artificial Sequence
  Description of Artificial Sequence: Synthetic oligonucleotide
  Sense strand starting at position 3149 of SEQ ID NO: 1244084
ucuagaguugccuaaucug

SEQ ID NO: 1463847 - RNA, 19 nt, Artificial Sequence
  Description of Artificial Sequence: Synthetic oligonucleotide
  Antisense strand to SEQ ID NO: 1463846
cagauuaggcaacucuaga

SEQ ID NO: 1463848 - RNA, 19 nt, Artificial Sequence
  Description of Artificial Sequence: Synthetic oligonucleotide
  Sense strand starting at position 3152 of SEQ ID NO: 1244084
agaguugccuaaucuguaa

SEQ ID NO: 1463849 - RNA, 19 nt, Artificial Sequence
  Description of Artificial Sequence: Synthetic oligonucleotide
  Antisense strand to SEQ ID NO: 1463848
uuacagauuaggcaacucu

SEQ ID NO: 1463850 - RNA, 19 nt, Artificial Sequence
  Description of Artificial Sequence: Synthetic oligonucleotide
  Sense strand starting at position 3156 of SEQ ID NO: 1244084
uugccuaaucuguaagaca

SEQ ID NO: 1463851 - RNA, 19 nt, Artificial Sequence
  Description of Artificial Sequence: Synthetic oligonucleotide
  Antisense strand to SEQ ID NO: 1463850
ugucuuacagauuaggcaa

SEQ ID NO: 1463852 - RNA, 19 nt, Artificial Sequence
  Description of Artificial Sequence: Synthetic oligonucleotide
  Sense strand starting at position 3232 of SEQ ID NO: 1244084
guacuuggugcugagcuaa

SEQ ID NO: 1463853 - RNA, 19 nt, Artificial Sequence
  Description of Artificial Sequence: Synthetic oligonucleotide
  Antisense strand to SEQ ID NO: 1463852
uuagcucagcaccaaguac

SEQ ID NO: 1463854 - RNA, 19 nt, Artificial Sequence
  Description of Artificial Sequence: Synthetic oligonucleotide
  Sense strand starting at position 3252 of SEQ ID NO: 1244084
caagaaggauuugguuuga

SEQ ID NO: 1463855 - RNA, 19 nt, Artificial Sequence
  Description of Artificial Sequence: Synthetic oligonucleotide
  Antisense strand to SEQ ID NO: 1463854
ucaaaccaaauccuucuug

SEQ ID NO: 1463856 - RNA, 19 nt, Artificial Sequence
  Description of Artificial Sequence: Synthetic oligonucleotide
  Sense strand starting at position 3298 of SEQ ID NO: 1244084
aggaaagaguaauggaauc

SEQ ID NO: 1463857 - RNA, 19 nt, Artificial Sequence
  Description of Artificial Sequence: Synthetic oligonucleotide
  Antisense strand to SEQ ID NO: 1463856
gauuccauuacucuuuccu

SEQ ID NO: 1463858 - RNA, 19 nt, Artificial Sequence
  Description of Artificial Sequence: Synthetic oligonucleotide
  Sense strand starting at position 74 of SEQ ID NO: 1244085
auaaaugcuuguguuuagu

SEQ ID NO: 1463859 - RNA, 19 nt, Artificial Sequence
  Description of Artificial Sequence: Synthetic oligonucleotide
  Antisense strand to SEQ ID NO: 1463858
acuaaacacaagcauuuau

SEQ ID NO: 1463860 - RNA, 19 nt, Artificial Sequence
  Description of Artificial Sequence: Synthetic oligonucleotide
  Sense strand starting at position 77 of SEQ ID NO: 1244085
aaugcuuguguuuaguaga

SEQ ID NO: 1463861 - RNA, 19 nt, Artificial Sequence
  Description of Artificial Sequence: Synthetic oligonucleotide
  Antisense strand to SEQ ID NO: 1463860
ucuacuaaacacaagcauu

SEQ ID NO: 1463862 - RNA, 19 nt, Artificial Sequence
  Description of Artificial Sequence: Synthetic oligonucleotide
  Sense strand starting at position 82 of SEQ ID NO: 1244085
uuguguuuaguagaagaaa

SEQ ID NO: 1463863 - RNA, 19 nt, Artificial Sequence
  Description of Artificial Sequence: Synthetic oligonucleotide
  Antisense strand to SEQ ID NO: 1463862
uuucuucuacuaaacacaa

SEQ ID NO: 1463864 - RNA, 19 nt, Artificial Sequence
  Description of Artificial Sequence: Synthetic oligonucleotide
  Sense strand starting at position 91 of SEQ ID NO: 1244085
guagaagaaagcugauuau

SEQ ID NO: 1463865 - RNA, 19 nt, Artificial Sequence
  Description of Artificial Sequence: Synthetic oligonucleotide
  Antisense strand to SEQ ID NO: 1463864
auaaucagcuuucuucuac

SEQ ID NO: 1463866 - RNA, 19 nt, Artificial Sequence
  Description of Artificial Sequence: Synthetic oligonucleotide
  Sense strand starting at position 472 of SEQ ID NO: 1244085
ggcacagaagcauaaucuu

SEQ ID NO: 1463867 - RNA, 19 nt, Artificial Sequence
  Description of Artificial Sequence: Synthetic oligonucleotide
  Antisense strand to SEQ ID NO: 1463866
aagauuaugcuucugugcc

SEQ ID NO: 1463868 - RNA, 19 nt, Artificial Sequence
  Description of Artificial Sequence: Synthetic oligonucleotide
  Sense strand starting at position 554 of SEQ ID NO: 1244085
acugauuucuuagggauga

SEQ ID NO: 1463869 - RNA, 19 nt, Artificial Sequence
  Description of Artificial Sequence: Synthetic oligonucleotide
  Antisense strand to SEQ ID NO: 1463868
ucaucccuaagaaaucagu

SEQ ID NO: 1463870 - RNA, 19 nt, Artificial Sequence
  Description of Artificial Sequence: Synthetic oligonucleotide
  Sense strand starting at position 555 of SEQ ID NO: 1244085
cugauuucuuagggaugaa

SEQ ID NO: 1463871 - RNA, 19 nt, Artificial Sequence
  Description of Artificial Sequence: Synthetic oligonucleotide
  Antisense strand to SEQ ID NO: 1463870
uucaucccuaagaaaucag

SEQ ID NO: 1463872 - RNA, 19 nt, Artificial Sequence
  Description of Artificial Sequence: Synthetic oligonucleotide
  Sense strand starting at position 702 of SEQ ID NO: 1244085
gagagucucuucccgagga

SEQ ID NO: 1463873 - RNA, 19 nt, Artificial Sequence
  Description of Artificial Sequence: Synthetic oligonucleotide
  Antisense strand to SEQ ID NO: 1463872
uccucgggaagagacucuc

SEQ ID NO: 1463874 - RNA, 19 nt, Artificial Sequence
  Description of Artificial Sequence: Synthetic oligonucleotide
  Sense strand starting at position 704 of SEQ ID NO: 1244085
gagucucuucccgaggaaa

SEQ ID NO: 1463875 - RNA, 19 nt, Artificial Sequence
  Description of Artificial Sequence: Synthetic oligonucleotide
  Antisense strand to SEQ ID NO: 1463874
uuuccucgggaagagacuc

SEQ ID NO: 1463876 - RNA, 19 nt, Artificial Sequence
  Description of Artificial Sequence: Synthetic oligonucleotide
  Sense strand starting at position 856 of SEQ ID NO: 1244085
gggcaaaugacuugcauua

SEQ ID NO: 1463877 - RNA, 19 nt, Artificial Sequence
  Description of Artificial Sequence: Synthetic oligonucleotide
  Antisense strand to SEQ ID NO: 1463876
uaaugcaagucauuugccc

SEQ ID NO: 1463878 - RNA, 19 nt, Artificial Sequence
  Description of Artificial Sequence: Synthetic oligonucleotide
  Sense strand starting at position 980 of SEQ ID NO: 1244085
ucucucaugugucugacau

SEQ ID NO: 1463879 - RNA, 19 nt, Artificial Sequence
  Description of Artificial Sequence: Synthetic oligonucleotide
  Antisense strand to SEQ ID NO: 1463878
augucagacacaugagaga

SEQ ID NO: 1463880 - RNA, 19 nt, Artificial Sequence
  Description of Artificial Sequence: Synthetic oligonucleotide
  Sense strand starting at position 981 of SEQ ID NO: 1244085
cucucaugugucugacauu

SEQ ID NO: 1463881 - RNA, 19 nt, Artificial Sequence
  Description of Artificial Sequence: Synthetic oligonucleotide
  Antisense strand to SEQ ID NO: 1463880
aaugucagacacaugagag

SEQ ID NO: 1463882 - RNA, 19 nt, Artificial Sequence
  Description of Artificial Sequence: Synthetic oligonucleotide
  Sense strand starting at position 982 of SEQ ID NO: 1244085
ucucaugugucugacauuu

SEQ ID NO: 1463883 - RNA, 19 nt, Artificial Sequence
  Description of Artificial Sequence: Synthetic oligonucleotide
  Antisense strand to SEQ ID NO: 1463882
aaaugucagacacaugaga

SEQ ID NO: 1463884 - RNA, 19 nt, Artificial Sequence
  Description of Artificial Sequence: Synthetic oligonucleotide
  Sense strand starting at position 991 of SEQ ID NO: 1244085
ucugacauuucggaaaguc

SEQ ID NO: 1463885 - RNA, 19 nt, Artificial Sequence
  Description of Artificial Sequence: Synthetic oligonucleotide
  Antisense strand to SEQ ID NO: 1463884
gacuuuccgaaaugucaga

SEQ ID NO: 1463886 - RNA, 19 nt, Artificial Sequence
  Description of Artificial Sequence: Synthetic oligonucleotide
  Sense strand starting at position 1115 of SEQ ID NO: 1244085
acucauguguggcuuacaa

SEQ ID NO: 1463887 - RNA, 19 nt, Artificial Sequence
  Description of Artificial Sequence: Synthetic oligonucleotide
  Antisense strand to SEQ ID NO: 1463886
uuguaagccacacaugagu

SEQ ID NO: 1463888 - RNA, 19 nt, Artificial Sequence
  Description of Artificial Sequence: Synthetic oligonucleotide
  Sense strand starting at position 1117 of SEQ ID NO: 1244085
ucauguguggcuuacaauc

SEQ ID NO: 1463889 - RNA, 19 nt, Artificial Sequence
  Description of Artificial Sequence: Synthetic oligonucleotide
  Antisense strand to SEQ ID NO: 1463888
gauuguaagccacacauga

SEQ ID NO: 1463890 - RNA, 19 nt, Artificial Sequence
  Description of Artificial Sequence: Synthetic oligonucleotide
  Sense strand starting at position 1123 of SEQ ID NO: 1244085
guggcuuacaaucauagag

SEQ ID NO: 1463891 - RNA, 19 nt, Artificial Sequence
  Description of Artificial Sequence: Synthetic oligonucleotide
  Antisense strand to SEQ ID NO: 1463890
cucuaugauuguaagccac

SEQ ID NO: 1463892 - RNA, 19 nt, Artificial Sequence
  Description of Artificial Sequence: Synthetic oligonucleotide
  Sense strand starting at position 1125 of SEQ ID NO: 1244085
ggcuuacaaucauagagag

SEQ ID NO: 1463893 - RNA, 19 nt, Artificial Sequence
  Description of Artificial Sequence: Synthetic oligonucleotide
  Antisense strand to SEQ ID NO: 1463892
cucucuaugauuguaagcc

SEQ ID NO: 1463894 - RNA, 19 nt, Artificial Sequence
  Description of Artificial Sequence: Synthetic oligonucleotide
  Sense strand starting at position 1979 of SEQ ID NO: 1244085
cgucggugucccgcgagaa

SEQ ID NO: 1463895 - RNA, 19 nt, Artificial Sequence
  Description of Artificial Sequence: Synthetic oligonucleotide
  Antisense strand to SEQ ID NO: 1463894
uucucgcgggacaccgacg

SEQ ID NO: 1463896 - RNA, 19 nt, Artificial Sequence
  Description of Artificial Sequence: Synthetic oligonucleotide
  Sense strand starting at position 1982 of SEQ ID NO: 1244085
cggugucccgcgagaacuu

SEQ ID NO: 1463897 - RNA, 19 nt, Artificial Sequence
  Description of Artificial Sequence: Synthetic oligonucleotide
  Antisense strand to SEQ ID NO: 1463896
aaguucucgcgggacaccg

SEQ ID NO: 1463898 - RNA, 19 nt, Artificial Sequence
  Description of Artificial Sequence: Synthetic oligonucleotide
  Sense strand starting at position 1991 of SEQ ID NO: 1244085
gcgagaacuucuccacgag

SEQ ID NO: 1463899 - RNA, 19 nt, Artificial Sequence
  Description of Artificial Sequence: Synthetic oligonucleotide
  Antisense strand to SEQ ID NO: 1463898
cucguggagaaguucucgc

SEQ ID NO: 1463900 - RNA, 19 nt, Artificial Sequence
  Description of Artificial Sequence: Synthetic oligonucleotide
  Sense strand starting at position 2207 of SEQ ID NO: 1244085
acagcuuagcccugaagga

SEQ ID NO: 1463901 - RNA, 19 nt, Artificial Sequence
  Description of Artificial Sequence: Synthetic oligonucleotide
  Antisense strand to SEQ ID NO: 1463900
uccuucagggcuaagcugu

SEQ ID NO: 1463902 - RNA, 19 nt, Artificial Sequence
  Description of Artificial Sequence: Synthetic oligonucleotide
  Sense strand starting at position 2358 of SEQ ID NO: 1244085
gagaauccgguccguacaa

SEQ ID NO: 1463903 - RNA, 19 nt, Artificial Sequence
  Description of Artificial Sequence: Synthetic oligonucleotide
  Antisense strand to SEQ ID NO: 1463902
uuguacggaccggauucuc

SEQ ID NO: 1463904 - RNA, 19 nt, Artificial Sequence
  Description of Artificial Sequence: Synthetic oligonucleotide
  Sense strand starting at position 2455 of SEQ ID NO: 1244085
ccaauauaggccgaacacu

SEQ ID NO: 1463905 - RNA, 19 nt, Artificial Sequence
  Description of Artificial Sequence: Synthetic oligonucleotide
  Antisense strand to SEQ ID NO: 1463904
aguguucggccuauauugg

SEQ ID NO: 1463906 - RNA, 19 nt, Artificial Sequence
  Description of Artificial Sequence: Synthetic oligonucleotide
  Sense strand starting at position 2488 of SEQ ID NO: 1244085
acagaaaucuuggcccuua

SEQ ID NO: 1463907 - RNA, 19 nt, Artificial Sequence
  Description of Artificial Sequence: Synthetic oligonucleotide
  Antisense strand to SEQ ID NO: 1463906
uaagggccaagauuucugu

SEQ ID NO: 1463908 - RNA, 19 nt, Artificial Sequence
  Description of Artificial Sequence: Synthetic oligonucleotide
  Sense strand starting at position 2577 of SEQ ID NO: 1244085
gaguuugcugaggaagcua

SEQ ID NO: 1463909 - RNA, 19 nt, Artificial Sequence
  Description of Artificial Sequence: Synthetic oligonucleotide
  Antisense strand to SEQ ID NO: 1463908
uagcuuccucagcaaacuc

SEQ ID NO: 1463910 - RNA, 19 nt, Artificial Sequence
  Description of Artificial Sequence: Synthetic oligonucleotide
  Sense strand starting at position 2657 of SEQ ID NO: 1244085
ggcgaugucugaucugagu

SEQ ID NO: 1463911 - RNA, 19 nt, Artificial Sequence
  Description of Artificial Sequence: Synthetic oligonucleotide
  Antisense strand to SEQ ID NO: 1463910
acucagaucagacaucgcc

SEQ ID NO: 1463912 - RNA, 19 nt, Artificial Sequence
  Description of Artificial Sequence: Synthetic oligonucleotide
  Sense strand starting at position 2659 of SEQ ID NO: 1244085
cgaugucugaucugagucu

SEQ ID NO: 1463913 - RNA, 19 nt, Artificial Sequence
  Description of Artificial Sequence: Synthetic oligonucleotide
  Antisense strand to SEQ ID NO: 1463912
agacucagaucagacaucg

SEQ ID NO: 1463914 - RNA, 19 nt, Artificial Sequence
  Description of Artificial Sequence: Synthetic oligonucleotide
  Sense strand starting at position 2791 of SEQ ID NO: 1244085
gaaagucguguucugugca

SEQ ID NO: 1463915 - RNA, 19 nt, Artificial Sequence
  Description of Artificial Sequence: Synthetic oligonucleotide
  Antisense strand to SEQ ID NO: 1463914
ugcacagaacacgacuuuc

SEQ ID NO: 1463916 - RNA, 19 nt, Artificial Sequence
  Description of Artificial Sequence: Synthetic oligonucleotide
  Sense strand starting at position 2798 of SEQ ID NO: 1244085
guguucugugcagugcuaa

SEQ ID NO: 1463917 - RNA, 19 nt, Artificial Sequence
  Description of Artificial Sequence: Synthetic oligonucleotide
  Antisense strand to SEQ ID NO: 1463916
uuagcacugcacagaacac

SEQ ID NO: 1463918 - RNA, 19 nt, Artificial Sequence
  Description of Artificial Sequence: Synthetic oligonucleotide
  Sense strand starting at position 2801 of SEQ ID NO: 1244085
uucugugcagugcuaagua

SEQ ID NO: 1463919 - RNA, 19 nt, Artificial Sequence
  Description of Artificial Sequence: Synthetic oligonucleotide
  Antisense strand to SEQ ID NO: 1463918
uacuuagcacugcacagaa

SEQ ID NO: 1463920 - RNA, 19 nt, Artificial Sequence
  Description of Artificial Sequence: Synthetic oligonucleotide
  Sense strand starting at position 2864 of SEQ ID NO: 1244085
agaugaggcuuggagaaau

SEQ ID NO: 1463921 - RNA, 19 nt, Artificial Sequence
  Description of Artificial Sequence: Synthetic oligonucleotide
  Antisense strand to SEQ ID NO: 1463920
auuucuccaagccucaucu

SEQ ID NO: 1463922 - RNA, 19 nt, Artificial Sequence
  Description of Artificial Sequence: Synthetic oligonucleotide
  Sense strand starting at position 3071 of SEQ ID NO: 1244085
gagcaucaccugugugcaa

SEQ ID NO: 1463923 - RNA, 19 nt, Artificial Sequence
  Description of Artificial Sequence: Synthetic oligonucleotide
  Antisense strand to SEQ ID NO: 1463922
uugcacacaggugaugcuc

SEQ ID NO: 1463924 - RNA, 19 nt, Artificial Sequence
  Description of Artificial Sequence: Synthetic oligonucleotide
  Sense strand starting at position 3136 of SEQ ID NO: 1244085
agugcuuuguaaucuagag

SEQ ID NO: 1463925 - RNA, 19 nt, Artificial Sequence
  Description of Artificial Sequence: Synthetic oligonucleotide
  Antisense strand to SEQ ID NO: 1463924
cucuagauuacaaagcacu

SEQ ID NO: 1463926 - RNA, 19 nt, Artificial Sequence
  Description of Artificial Sequence: Synthetic oligonucleotide
  Sense strand starting at position 3148 of SEQ ID NO: 1244085
ucuagaguugccuaaucug

SEQ ID NO: 1463927 - RNA, 19 nt, Artificial Sequence
  Description of Artificial Sequence: Synthetic oligonucleotide
  Antisense strand to SEQ ID NO: 1463926
cagauuaggcaacucuaga

SEQ ID NO: 1463928 - RNA, 19 nt, Artificial Sequence
  Description of Artificial Sequence: Synthetic oligonucleotide
  Sense strand starting at position 3151 of SEQ ID NO: 1244085
agaguugccuaaucuguaa

SEQ ID NO: 1463929 - RNA, 19 nt, Artificial Sequence
  Description of Artificial Sequence: Synthetic oligonucleotide
  Antisense strand to SEQ ID NO: 1463928
uuacagauuaggcaacucu

SEQ ID NO: 1463930 - RNA, 19 nt, Artificial Sequence
  Description of Artificial Sequence: Synthetic oligonucleotide
  Sense strand starting at position 3155 of SEQ ID NO: 1244085
uugccuaaucuguaagaca

SEQ ID NO: 1463931 - RNA, 19 nt, Artificial Sequence
  Description of Artificial Sequence: Synthetic oligonucleotide
  Antisense strand to SEQ ID NO: 1463930
ugucuuacagauuaggcaa

SEQ ID NO: 1463932 - RNA, 19 nt, Artificial Sequence
  Description of Artificial Sequence: Synthetic oligonucleotide
  Sense strand starting at position 3231 of SEQ ID NO: 1244085
guacuuggugcugagcuaa

SEQ ID NO: 1463933 - RNA, 19 nt, Artificial Sequence
  Description of Artificial Sequence: Synthetic oligonucleotide
  Antisense strand to SEQ ID NO: 1463932
uuagcucagcaccaaguac

SEQ ID NO: 1463934 - RNA, 19 nt, Artificial Sequence
  Description of Artificial Sequence: Synthetic oligonucleotide
  Sense strand starting at position 3251 of SEQ ID NO: 1244085
caagaaggauuugguuuga

SEQ ID NO: 1463935 - RNA, 19 nt, Artificial Sequence
  Description of Artificial Sequence: Synthetic oligonucleotide
  Antisense strand to SEQ ID NO: 1463934
ucaaaccaaauccuucuug

SEQ ID NO: 1463936 - RNA, 19 nt, Artificial Sequence
  Description of Artificial Sequence: Synthetic oligonucleotide
  Sense strand starting at position 3297 of SEQ ID NO: 1244085
aggaaagaguaauggaauc

SEQ ID NO: 1463937 - RNA, 19 nt, Artificial Sequence
  Description of Artificial Sequence: Synthetic oligonucleotide
  Antisense strand to SEQ ID NO: 1463936
gauuccauuacucuuuccu

SEQ ID NO: 1463938 - RNA, 19 nt, Artificial Sequence
  Description of Artificial Sequence: Synthetic oligonucleotide
  Sense strand starting at position 468 of SEQ ID NO: 1244086
agcuuagagaucuggaguu

SEQ ID NO: 1463939 - RNA, 19 nt, Artificial Sequence
  Description of Artificial Sequence: Synthetic oligonucleotide
  Antisense strand to SEQ ID NO: 1463938
aacuccagaucucuaagcu

SEQ ID NO: 1463940 - RNA, 19 nt, Artificial Sequence
  Description of Artificial Sequence: Synthetic oligonucleotide
  Sense strand starting at position 502 of SEQ ID NO: 1244086
cgguaaagcuucgguugga

SEQ ID NO: 1463941 - RNA, 19 nt, Artificial Sequence
  Description of Artificial Sequence: Synthetic oligonucleotide
  Antisense strand to SEQ ID NO: 1463940
uccaaccgaagcuuuaccg

SEQ ID NO: 1463942 - RNA, 19 nt, Artificial Sequence
  Description of Artificial Sequence: Synthetic oligonucleotide
  Sense strand starting at position 503 of SEQ ID NO: 1244086
gguaaagcuucgguuggaa

SEQ ID NO: 1463943 - RNA, 19 nt, Artificial Sequence
  Description of Artificial Sequence: Synthetic oligonucleotide
  Antisense strand to SEQ ID NO: 1463942
uuccaaccgaagcuuuacc

SEQ ID NO: 1463944 - RNA, 19 nt, Artificial Sequence
  Description of Artificial Sequence: Synthetic oligonucleotide
  Sense strand starting at position 506 of SEQ ID NO: 1244086
aaagcuucgguuggaaaca

SEQ ID NO: 1463945 - RNA, 19 nt, Artificial Sequence
  Description of Artificial Sequence: Synthetic oligonucleotide
  Antisense strand to SEQ ID NO: 1463944
uguuuccaaccgaagcuuu

SEQ ID NO: 1463946 - RNA, 19 nt, Artificial Sequence
  Description of Artificial Sequence: Synthetic oligonucleotide
  Sense strand starting at position 889 of SEQ ID NO: 1244086
cuggaugacuccuaguaua

SEQ ID NO: 1463947 - RNA, 19 nt, Artificial Sequence
  Description of Artificial Sequence: Synthetic oligonucleotide
  Antisense strand to SEQ ID NO: 1463946
uauacuaggagucauccag

SEQ ID NO: 1463948 - RNA, 19 nt, Artificial Sequence
  Description of Artificial Sequence: Synthetic oligonucleotide
  Sense strand starting at position 989 of SEQ ID NO: 1244086
aaaguuuaauucgggaaga

SEQ ID NO: 1463949 - RNA, 19 nt, Artificial Sequence
  Description of Artificial Sequence: Synthetic oligonucleotide
  Antisense strand to SEQ ID NO: 1463948
ucuucccgaauuaaacuuu

SEQ ID NO: 1463950 - RNA, 19 nt, Artificial Sequence
  Description of Artificial Sequence: Synthetic oligonucleotide
  Sense strand starting at position 990 of SEQ ID NO: 1244086
aaguuuaauucgggaagaa

SEQ ID NO: 1463951 - RNA, 19 nt, Artificial Sequence
  Description of Artificial Sequence: Synthetic oligonucleotide
  Antisense strand to SEQ ID NO: 1463950
uucuucccgaauuaaacuu

SEQ ID NO: 1463952 - RNA, 19 nt, Artificial Sequence
  Description of Artificial Sequence: Synthetic oligonucleotide
  Sense strand starting at position 1012 of SEQ ID NO: 1244086
uggagugucucugcaguua

SEQ ID NO: 1463953 - RNA, 19 nt, Artificial Sequence
  Description of Artificial Sequence: Synthetic oligonucleotide
  Antisense strand to SEQ ID NO: 1463952
uaacugcagagacacucca

SEQ ID NO: 1463954 - RNA, 19 nt, Artificial Sequence
  Description of Artificial Sequence: Synthetic oligonucleotide
  Sense strand starting at position 1550 of SEQ ID NO: 1244086
cgcagagacgucugucuua

SEQ ID NO: 1463955 - RNA, 19 nt, Artificial Sequence
  Description of Artificial Sequence: Synthetic oligonucleotide
  Antisense strand to SEQ ID NO: 1463954
uaagacagacgucucugcg

SEQ ID NO: 1463956 - RNA, 19 nt, Artificial Sequence
  Description of Artificial Sequence: Synthetic oligonucleotide
  Sense strand starting at position 1553 of SEQ ID NO: 1244086
agagacgucugucuuagag

SEQ ID NO: 1463957 - RNA, 19 nt, Artificial Sequence
  Description of Artificial Sequence: Synthetic oligonucleotide
  Antisense strand to SEQ ID NO: 1463956
cucuaagacagacgucucu

SEQ ID NO: 1463958 - RNA, 19 nt, Artificial Sequence
  Description of Artificial Sequence: Synthetic oligonucleotide
  Sense strand starting at position 1555 of SEQ ID NO: 1244086
agacgucugucuuagagac

SEQ ID NO: 1463959 - RNA, 19 nt, Artificial Sequence
  Description of Artificial Sequence: Synthetic oligonucleotide
  Antisense strand to SEQ ID NO: 1463958
gucucuaagacagacgucu

SEQ ID NO: 1463960 - RNA, 19 nt, Artificial Sequence
  Description of Artificial Sequence: Synthetic oligonucleotide
  Sense strand starting at position 1557 of SEQ ID NO: 1244086
acgucugucuuagagacuu

SEQ ID NO: 1463961 - RNA, 19 nt, Artificial Sequence
  Description of Artificial Sequence: Synthetic oligonucleotide
  Antisense strand to SEQ ID NO: 1463960
aagucucuaagacagacgu

SEQ ID NO: 1463962 - RNA, 19 nt, Artificial Sequence
  Description of Artificial Sequence: Synthetic oligonucleotide
  Sense strand starting at position 1647 of SEQ ID NO: 1244086
gggcuaguuucagcgggaa

SEQ ID NO: 1463963 - RNA, 19 nt, Artificial Sequence
  Description of Artificial Sequence: Synthetic oligonucleotide
  Antisense strand to SEQ ID NO: 1463962
uucccgcugaaacuagccc

SEQ ID NO: 1463964 - RNA, 19 nt, Artificial Sequence
  Description of Artificial Sequence: Synthetic oligonucleotide
  Sense strand starting at position 2153 of SEQ ID NO: 1244086
ggcaggcugucgucugaga

SEQ ID NO: 1463965 - RNA, 19 nt, Artificial Sequence
  Description of Artificial Sequence: Synthetic oligonucleotide
  Antisense strand to SEQ ID NO: 1463964
ucucagacgacagccugcc

SEQ ID NO: 1463966 - RNA, 19 nt, Artificial Sequence
  Description of Artificial Sequence: Synthetic oligonucleotide
  Sense strand starting at position 2157 of SEQ ID NO: 1244086
ggcugucgucugagaccga

SEQ ID NO: 1463967 - RNA, 19 nt, Artificial Sequence
  Description of Artificial Sequence: Synthetic oligonucleotide
  Antisense strand to SEQ ID NO: 1463966
ucggucucagacgacagcc

SEQ ID NO: 1463968 - RNA, 19 nt, Artificial Sequence
  Description of Artificial Sequence: Synthetic oligonucleotide
  Sense strand starting at position 2158 of SEQ ID NO: 1244086
gcugucgucugagaccgau

SEQ ID NO: 1463969 - RNA, 19 nt, Artificial Sequence
  Description of Artificial Sequence: Synthetic oligonucleotide
  Antisense strand to SEQ ID NO: 1463968
aucggucucagacgacagc

SEQ ID NO: 1463970 - RNA, 19 nt, Artificial Sequence
  Description of Artificial Sequence: Synthetic oligonucleotide
  Sense strand starting at position 2454 of SEQ ID NO: 1244086
ggcggagacucccugacua

SEQ ID NO: 1463971 - RNA, 19 nt, Artificial Sequence
  Description of Artificial Sequence: Synthetic oligonucleotide
  Antisense strand to SEQ ID NO: 1463970
uagucagggagucuccgcc

SEQ ID NO: 1463972 - RNA, 19 nt, Artificial Sequence
  Description of Artificial Sequence: Synthetic oligonucleotide
  Sense strand starting at position 2902 of SEQ ID NO: 1244086
gagcaaaguccagagucuu

SEQ ID NO: 1463973 - RNA, 19 nt, Artificial Sequence
  Description of Artificial Sequence: Synthetic oligonucleotide
  Antisense strand to SEQ ID NO: 1463972
aagacucuggacuuugcuc

SEQ ID NO: 1463974 - RNA, 19 nt, Artificial Sequence
  Description of Artificial Sequence: Synthetic oligonucleotide
  Sense strand starting at position 2915 of SEQ ID NO: 1244086
agucuuggcuucuccuuua

SEQ ID NO: 1463975 - RNA, 19 nt, Artificial Sequence
  Description of Artificial Sequence: Synthetic oligonucleotide
  Antisense strand to SEQ ID NO: 1463974
uaaaggagaagccaagacu

SEQ ID NO: 1463976 - RNA, 19 nt, Artificial Sequence
  Description of Artificial Sequence: Synthetic oligonucleotide
  Sense strand starting at position 3012 of SEQ ID NO: 1244086
ggauuccucuuagagggau

SEQ ID NO: 1463977 - RNA, 19 nt, Artificial Sequence
  Description of Artificial Sequence: Synthetic oligonucleotide
  Antisense strand to SEQ ID NO: 1463976
aucccucuaagaggaaucc

SEQ ID NO: 1463978 - RNA, 19 nt, Artificial Sequence
  Description of Artificial Sequence: Synthetic oligonucleotide
  Sense strand starting at position 3226 of SEQ ID NO: 1244086
guuucuccauguuaaccaa

SEQ ID NO: 1463979 - RNA, 19 nt, Artificial Sequence
  Description of Artificial Sequence: Synthetic oligonucleotide
  Antisense strand to SEQ ID NO: 1463978
uugguuaacauggagaaac

SEQ ID NO: 1463980 - RNA, 19 nt, Artificial Sequence
  Description of Artificial Sequence: Synthetic oligonucleotide
  Sense strand starting at position 3356 of SEQ ID NO: 1244086
cagggaucacuuuagcugu

SEQ ID NO: 1463981 - RNA, 19 nt, Artificial Sequence
  Description of Artificial Sequence: Synthetic oligonucleotide
  Antisense strand to SEQ ID NO: 1463980
acagcuaaagugaucccug

SEQ ID NO: 1463982 - RNA, 19 nt, Artificial Sequence
  Description of Artificial Sequence: Synthetic oligonucleotide
  Sense strand starting at position 3452 of SEQ ID NO: 1244086
cagcuugaugugggugaca

SEQ ID NO: 1463983 - RNA, 19 nt, Artificial Sequence
  Description of Artificial Sequence: Synthetic oligonucleotide
  Antisense strand to SEQ ID NO: 1463982
ugucacccacaucaagcug

SEQ ID NO: 1463984 - RNA, 19 nt, Artificial Sequence
  Description of Artificial Sequence: Synthetic oligonucleotide
  Sense strand starting at position 3478 of SEQ ID NO: 1244086
aaacaauccuuagggugau

SEQ ID NO: 1463985 - RNA, 19 nt, Artificial Sequence
  Description of Artificial Sequence: Synthetic oligonucleotide
  Antisense strand to SEQ ID NO: 1463984
aucacccuaaggauuguuu

SEQ ID NO: 1463986 - RNA, 19 nt, Artificial Sequence
  Description of Artificial Sequence: Synthetic oligonucleotide
  Sense strand starting at position 3479 of SEQ ID NO: 1244086
aacaauccuuagggugaua

SEQ ID NO: 1463987 - RNA, 19 nt, Artificial Sequence
  Description of Artificial Sequence: Synthetic oligonucleotide
  Antisense strand to SEQ ID NO: 1463986
uaucacccuaaggauuguu

SEQ ID NO: 1463988 - RNA, 19 nt, Artificial Sequence
  Description of Artificial Sequence: Synthetic oligonucleotide
  Sense strand starting at position 3481 of SEQ ID NO: 1244086
caauccuuagggugauaag

SEQ ID NO: 1463989 - RNA, 19 nt, Artificial Sequence
  Description of Artificial Sequence: Synthetic oligonucleotide
  Antisense strand to SEQ ID NO: 1463988
cuuaucacccuaaggauug

SEQ ID NO: 1463990 - RNA, 19 nt, Artificial Sequence
  Description of Artificial Sequence: Synthetic oligonucleotide
  Sense strand starting at position 3609 of SEQ ID NO: 1244086
caaggucucuuuggugaug

SEQ ID NO: 1463991 - RNA, 19 nt, Artificial Sequence
  Description of Artificial Sequence: Synthetic oligonucleotide
  Antisense strand to SEQ ID NO: 1463990
caucaccaaagagaccuug

SEQ ID NO: 1463992 - RNA, 19 nt, Artificial Sequence
  Description of Artificial Sequence: Synthetic oligonucleotide
  Sense strand starting at position 3611 of SEQ ID NO: 1244086
aggucucuuuggugaugga

SEQ ID NO: 1463993 - RNA, 19 nt, Artificial Sequence
  Description of Artificial Sequence: Synthetic oligonucleotide
  Antisense strand to SEQ ID NO: 1463992
uccaucaccaaagagaccu

SEQ ID NO: 1463994 - RNA, 19 nt, Artificial Sequence
  Description of Artificial Sequence: Synthetic oligonucleotide
  Sense strand starting at position 3675 of SEQ ID NO: 1244086
ucaacuaucuguuuaguac

SEQ ID NO: 1463995 - RNA, 19 nt, Artificial Sequence
  Description of Artificial Sequence: Synthetic oligonucleotide
  Antisense strand to SEQ ID NO: 1463994
guacuaaacagauaguuga

SEQ ID NO: 1463996 - RNA, 19 nt, Artificial Sequence
  Description of Artificial Sequence: Synthetic oligonucleotide
  Sense strand starting at position 3779 of SEQ ID NO: 1244086
caggaagauugauguuaac

SEQ ID NO: 1463997 - RNA, 19 nt, Artificial Sequence
  Description of Artificial Sequence: Synthetic oligonucleotide
  Antisense strand to SEQ ID NO: 1463996
guuaacaucaaucuuccug

SEQ ID NO: 1463998 - RNA, 19 nt, Artificial Sequence
  Description of Artificial Sequence: Synthetic oligonucleotide
  Sense strand starting at position 3828 of SEQ ID NO: 1244086
agacaacuaugcugggaaa

SEQ ID NO: 1463999 - RNA, 19 nt, Artificial Sequence
  Description of Artificial Sequence: Synthetic oligonucleotide
  Antisense strand to SEQ ID NO: 1463998
uuucccagcauaguugucu

SEQ ID NO: 1464000 - RNA, 19 nt, Artificial Sequence
  Description of Artificial Sequence: Synthetic oligonucleotide
  Sense strand starting at position 3902 of SEQ ID NO: 1244086
aggagaagcuggcugacau

SEQ ID NO: 1464001 - RNA, 19 nt, Artificial Sequence
  Description of Artificial Sequence: Synthetic oligonucleotide
  Antisense strand to SEQ ID NO: 1464000
augucagccagcuucuccu

SEQ ID NO: 1464002 - RNA, 19 nt, Artificial Sequence
  Description of Artificial Sequence: Synthetic oligonucleotide
  Sense strand starting at position 3 of SEQ ID NO: 1244087
cuuccuggcuuaggagaaa

SEQ ID NO: 1464003 - RNA, 19 nt, Artificial Sequence
  Description of Artificial Sequence: Synthetic oligonucleotide
  Antisense strand to SEQ ID NO: 1464002
uuucuccuaagccaggaag

SEQ ID NO: 1464004 - RNA, 19 nt, Artificial Sequence
  Description of Artificial Sequence: Synthetic oligonucleotide
  Sense strand starting at position 130 of SEQ ID NO: 1244087
gccugaggcuccugacauc

SEQ ID NO: 1464005 - RNA, 19 nt, Artificial Sequence
  Description of Artificial Sequence: Synthetic oligonucleotide
  Antisense strand to SEQ ID NO: 1464004
gaugucaggagccucaggc

SEQ ID NO: 1464006 - RNA, 19 nt, Artificial Sequence
  Description of Artificial Sequence: Synthetic oligonucleotide
  Sense strand starting at position 367 of SEQ ID NO: 1244087
ggaugaaguuccuccugac

SEQ ID NO: 1464007 - RNA, 19 nt, Artificial Sequence
  Description of Artificial Sequence: Synthetic oligonucleotide
  Antisense strand to SEQ ID NO: 1464006
gucaggaggaacuucaucc

SEQ ID NO: 1464008 - RNA, 19 nt, Artificial Sequence
  Description of Artificial Sequence: Synthetic oligonucleotide
  Sense strand starting at position 370 of SEQ ID NO: 1244087
ugaaguuccuccugacaca

SEQ ID NO: 1464009 - RNA, 19 nt, Artificial Sequence
  Description of Artificial Sequence: Synthetic oligonucleotide
  Antisense strand to SEQ ID NO: 1464008
ugugucaggaggaacuuca

SEQ ID NO: 1464010 - RNA, 19 nt, Artificial Sequence
  Description of Artificial Sequence: Synthetic oligonucleotide
  Sense strand starting at position 383 of SEQ ID NO: 1244087
gacacauucuccugggugu

SEQ ID NO: 1464011 - RNA, 19 nt, Artificial Sequence
  Description of Artificial Sequence: Synthetic oligonucleotide
  Antisense strand to SEQ ID NO: 1464010
acacccaggagaauguguc

SEQ ID NO: 1464012 - RNA, 19 nt, Artificial Sequence
  Description of Artificial Sequence: Synthetic oligonucleotide
  Sense strand starting at position 916 of SEQ ID NO: 1244087
agcuuagagaucuggaguu

SEQ ID NO: 1464013 - RNA, 19 nt, Artificial Sequence
  Description of Artificial Sequence: Synthetic oligonucleotide
  Antisense strand to SEQ ID NO: 1464012
aacuccagaucucuaagcu

SEQ ID NO: 1464014 - RNA, 19 nt, Artificial Sequence
  Description of Artificial Sequence: Synthetic oligonucleotide
  Sense strand starting at position 950 of SEQ ID NO: 1244087
cgguaaagcuucgguugga

SEQ ID NO: 1464015 - RNA, 19 nt, Artificial Sequence
  Description of Artificial Sequence: Synthetic oligonucleotide
  Antisense strand to SEQ ID NO: 1464014
uccaaccgaagcuuuaccg

SEQ ID NO: 1464016 - RNA, 19 nt, Artificial Sequence
  Description of Artificial Sequence: Synthetic oligonucleotide
  Sense strand starting at position 951 of SEQ ID NO: 1244087
gguaaagcuucgguuggaa

SEQ ID NO: 1464017 - RNA, 19 nt, Artificial Sequence
  Description of Artificial Sequence: Synthetic oligonucleotide
  Antisense strand to SEQ ID NO: 1464016
uuccaaccgaagcuuuacc

SEQ ID NO: 1464018 - RNA, 19 nt, Artificial Sequence
  Description of Artificial Sequence: Synthetic oligonucleotide
  Sense strand starting at position 954 of SEQ ID NO: 1244087
aaagcuucgguuggaaaca

SEQ ID NO: 1464019 - RNA, 19 nt, Artificial Sequence
  Description of Artificial Sequence: Synthetic oligonucleotide
  Antisense strand to SEQ ID NO: 1464018
uguuuccaaccgaagcuuu

SEQ ID NO: 1464020 - RNA, 19 nt, Artificial Sequence
  Description of Artificial Sequence: Synthetic oligonucleotide
  Sense strand starting at position 1337 of SEQ ID NO: 1244087
cuggaugacuccuaguaua

SEQ ID NO: 1464021 - RNA, 19 nt, Artificial Sequence
  Description of Artificial Sequence: Synthetic oligonucleotide
  Antisense strand to SEQ ID NO: 1464020
uauacuaggagucauccag

SEQ ID NO: 1464022 - RNA, 19 nt, Artificial Sequence
  Description of Artificial Sequence: Synthetic oligonucleotide
  Sense strand starting at position 1437 of SEQ ID NO: 1244087
aaaguuuaauucgggaaga

SEQ ID NO: 1464023 - RNA, 19 nt, Artificial Sequence
  Description of Artificial Sequence: Synthetic oligonucleotide
  Antisense strand to SEQ ID NO: 1464022
ucuucccgaauuaaacuuu

SEQ ID NO: 1464024 - RNA, 19 nt, Artificial Sequence
  Description of Artificial Sequence: Synthetic oligonucleotide
  Sense strand starting at position 1438 of SEQ ID NO: 1244087
aaguuuaauucgggaagaa

SEQ ID NO: 1464025 - RNA, 19 nt, Artificial Sequence
  Description of Artificial Sequence: Synthetic oligonucleotide
  Antisense strand to SEQ ID NO: 1464024
uucuucccgaauuaaacuu

SEQ ID NO: 1464026 - RNA, 19 nt, Artificial Sequence
  Description of Artificial Sequence: Synthetic oligonucleotide
  Sense strand starting at position 1460 of SEQ ID NO: 1244087
uggagugucucugcaguua

SEQ ID NO: 1464027 - RNA, 19 nt, Artificial Sequence
  Description of Artificial Sequence: Synthetic oligonucleotide
  Antisense strand to SEQ ID NO: 1464026
uaacugcagagacacucca

SEQ ID NO: 1464028 - RNA, 19 nt, Artificial Sequence
  Description of Artificial Sequence: Synthetic oligonucleotide
  Sense strand starting at position 1998 of SEQ ID NO: 1244087
cgcagagacgucugucuua

SEQ ID NO: 1464029 - RNA, 19 nt, Artificial Sequence
  Description of Artificial Sequence: Synthetic oligonucleotide
  Antisense strand to SEQ ID NO: 1464028
uaagacagacgucucugcg

SEQ ID NO: 1464030 - RNA, 19 nt, Artificial Sequence
  Description of Artificial Sequence: Synthetic oligonucleotide
  Sense strand starting at position 2001 of SEQ ID NO: 1244087
agagacgucugucuuagag

SEQ ID NO: 1464031 - RNA, 19 nt, Artificial Sequence
  Description of Artificial Sequence: Synthetic oligonucleotide
  Antisense strand to SEQ ID NO: 1464030
cucuaagacagacgucucu

SEQ ID NO: 1464032 - RNA, 19 nt, Artificial Sequence
  Description of Artificial Sequence: Synthetic oligonucleotide
  Sense strand starting at position 2003 of SEQ ID NO: 1244087
agacgucugucuuagagac

SEQ ID NO: 1464033 - RNA, 19 nt, Artificial Sequence
  Description of Artificial Sequence: Synthetic oligonucleotide
  Antisense strand to SEQ ID NO: 1464032
gucucuaagacagacgucu

SEQ ID NO: 1464034 - RNA, 19 nt, Artificial Sequence
  Description of Artificial Sequence: Synthetic oligonucleotide
  Sense strand starting at position 2005 of SEQ ID NO: 1244087
acgucugucuuagagacuu

SEQ ID NO: 1464035 - RNA, 19 nt, Artificial Sequence
  Description of Artificial Sequence: Synthetic oligonucleotide
  Antisense strand to SEQ ID NO: 1464034
aagucucuaagacagacgu

SEQ ID NO: 1464036 - RNA, 19 nt, Artificial Sequence
  Description of Artificial Sequence: Synthetic oligonucleotide
  Sense strand starting at position 2095 of SEQ ID NO: 1244087
gggcuaguuucagcgggaa

SEQ ID NO: 1464037 - RNA, 19 nt, Artificial Sequence
  Description of Artificial Sequence: Synthetic oligonucleotide
  Antisense strand to SEQ ID NO: 1464036
uucccgcugaaacuagccc

SEQ ID NO: 1464038 - RNA, 19 nt, Artificial Sequence
  Description of Artificial Sequence: Synthetic oligonucleotide
  Sense strand starting at position 2601 of SEQ ID NO: 1244087
ggcaggcugucgucugaga

SEQ ID NO: 1464039 - RNA, 19 nt, Artificial Sequence
  Description of Artificial Sequence: Synthetic oligonucleotide
  Antisense strand to SEQ ID NO: 1464038
ucucagacgacagccugcc

SEQ ID NO: 1464040 - RNA, 19 nt, Artificial Sequence
  Description of Artificial Sequence: Synthetic oligonucleotide
  Sense strand starting at position 2605 of SEQ ID NO: 1244087
ggcugucgucugagaccga

SEQ ID NO: 1464041 - RNA, 19 nt, Artificial Sequence
  Description of Artificial Sequence: Synthetic oligonucleotide
  Antisense strand to SEQ ID NO: 1464040
ucggucucagacgacagcc

SEQ ID NO: 1464042 - RNA, 19 nt, Artificial Sequence
  Description of Artificial Sequence: Synthetic oligonucleotide
  Sense strand starting at position 2606 of SEQ ID NO: 1244087
gcugucgucugagaccgau

SEQ ID NO: 1464043 - RNA, 19 nt, Artificial Sequence
  Description of Artificial Sequence: Synthetic oligonucleotide
  Antisense strand to SEQ ID NO: 1464042
aucggucucagacgacagc

SEQ ID NO: 1464044 - RNA, 19 nt, Artificial Sequence
  Description of Artificial Sequence: Synthetic oligonucleotide
  Sense strand starting at position 2902 of SEQ ID NO: 1244087
ggcggagacucccugacua

SEQ ID NO: 1464045 - RNA, 19 nt, Artificial Sequence
  Description of Artificial Sequence: Synthetic oligonucleotide
  Antisense strand to SEQ ID NO: 1464044
uagucagggagucuccgcc

SEQ ID NO: 1464046 - RNA, 19 nt, Artificial Sequence
  Description of Artificial Sequence: Synthetic oligonucleotide
  Sense strand starting at position 3350 of SEQ ID NO: 1244087
gagcaaaguccagagucuu

SEQ ID NO: 1464047 - RNA, 19 nt, Artificial Sequence
  Description of Artificial Sequence: Synthetic oligonucleotide
  Antisense strand to SEQ ID NO: 1464046
aagacucuggacuuugcuc

SEQ ID NO: 1464048 - RNA, 19 nt, Artificial Sequence
  Description of Artificial Sequence: Synthetic oligonucleotide
  Sense strand starting at position 3363 of SEQ ID NO: 1244087
agucuuggcuucuccuuua

SEQ ID NO: 1464049 - RNA, 19 nt, Artificial Sequence
  Description of Artificial Sequence: Synthetic oligonucleotide
  Antisense strand to SEQ ID NO: 1464048
uaaaggagaagccaagacu

SEQ ID NO: 1464050 - RNA, 19 nt, Artificial Sequence
  Description of Artificial Sequence: Synthetic oligonucleotide
  Sense strand starting at position 3460 of SEQ ID NO: 1244087
ggauuccucuuagagggau

SEQ ID NO: 1464051 - RNA, 19 nt, Artificial Sequence
  Description of Artificial Sequence: Synthetic oligonucleotide
  Antisense strand to SEQ ID NO: 1464050
aucccucuaagaggaaucc

SEQ ID NO: 1464052 - RNA, 19 nt, Artificial Sequence
  Description of Artificial Sequence: Synthetic oligonucleotide
  Sense strand starting at position 3674 of SEQ ID NO: 1244087
guuucuccauguuaaccaa

SEQ ID NO: 1464053 - RNA, 19 nt, Artificial Sequence
  Description of Artificial Sequence: Synthetic oligonucleotide
  Antisense strand to SEQ ID NO: 1464052
uugguuaacauggagaaac

SEQ ID NO: 1464054 - RNA, 19 nt, Artificial Sequence
  Description of Artificial Sequence: Synthetic oligonucleotide
  Sense strand starting at position 3804 of SEQ ID NO: 1244087
cagggaucacuuuagcugu

SEQ ID NO: 1464055 - RNA, 19 nt, Artificial Sequence
  Description of Artificial Sequence: Synthetic oligonucleotide
  Antisense strand to SEQ ID NO: 1464054
acagcuaaagugaucccug

SEQ ID NO: 1464056 - RNA, 19 nt, Artificial Sequence
  Description of Artificial Sequence: Synthetic oligonucleotide
  Sense strand starting at position 3900 of SEQ ID NO: 1244087
cagcuugaugugggugaca

SEQ ID NO: 1464057 - RNA, 19 nt, Artificial Sequence
  Description of Artificial Sequence: Synthetic oligonucleotide
  Antisense strand to SEQ ID NO: 1464056
ugucacccacaucaagcug

SEQ ID NO: 1464058 - RNA, 19 nt, Artificial Sequence
  Description of Artificial Sequence: Synthetic oligonucleotide
  Sense strand starting at position 3926 of SEQ ID NO: 1244087
aaacaauccuuagggugau

SEQ ID NO: 1464059 - RNA, 19 nt, Artificial Sequence
  Description of Artificial Sequence: Synthetic oligonucleotide
  Antisense strand to SEQ ID NO: 1464058
aucacccuaaggauuguuu

SEQ ID NO: 1464060 - RNA, 19 nt, Artificial Sequence
  Description of Artificial Sequence: Synthetic oligonucleotide
  Sense strand starting at position 3927 of SEQ ID NO: 1244087
aacaauccuuagggugaua

SEQ ID NO: 1464061 - RNA, 19 nt, Artificial Sequence
  Description of Artificial Sequence: Synthetic oligonucleotide
  Antisense strand to SEQ ID NO: 1464060
uaucacccuaaggauuguu

SEQ ID NO: 1464062 - RNA, 19 nt, Artificial Sequence
  Description of Artificial Sequence: Synthetic oligonucleotide
  Sense strand starting at position 3929 of SEQ ID NO: 1244087
caauccuuagggugauaag

SEQ ID NO: 1464063 - RNA, 19 nt, Artificial Sequence
  Description of Artificial Sequence: Synthetic oligonucleotide
  Antisense strand to SEQ ID NO: 1464062
cuuaucacccuaaggauug

SEQ ID NO: 1464064 - RNA, 19 nt, Artificial Sequence
  Description of Artificial Sequence: Synthetic oligonucleotide
  Sense strand starting at position 53 of SEQ ID NO: 1244088
gccuuaaccucccgaguaa

SEQ ID NO: 1464065 - RNA, 19 nt, Artificial Sequence
  Description of Artificial Sequence: Synthetic oligonucleotide
  Antisense strand to SEQ ID NO: 1464064
uuacucgggagguuaaggc

SEQ ID NO: 1464066 - RNA, 19 nt, Artificial Sequence
  Description of Artificial Sequence: Synthetic oligonucleotide
  Sense strand starting at position 228 of SEQ ID NO: 1244088
gcuccagugcucuuucuuu

SEQ ID NO: 1464067 - RNA, 19 nt, Artificial Sequence
  Description of Artificial Sequence: Synthetic oligonucleotide
  Antisense strand to SEQ ID NO: 1464066
aaagaaagagcacuggagc

SEQ ID NO: 1464068 - RNA, 19 nt, Artificial Sequence
  Description of Artificial Sequence: Synthetic oligonucleotide
  Sense strand starting at position 234 of SEQ ID NO: 1244088
gugcucuuucuuuagcaca

SEQ ID NO: 1464069 - RNA, 19 nt, Artificial Sequence
  Description of Artificial Sequence: Synthetic oligonucleotide
  Antisense strand to SEQ ID NO: 1464068
ugugcuaaagaaagagcac

SEQ ID NO: 1464070 - RNA, 19 nt, Artificial Sequence
  Description of Artificial Sequence: Synthetic oligonucleotide
  Sense strand starting at position 458 of SEQ ID NO: 1244088
guucauacuuggcgagguu

SEQ ID NO: 1464071 - RNA, 19 nt, Artificial Sequence
  Description of Artificial Sequence: Synthetic oligonucleotide
  Antisense strand to SEQ ID NO: 1464070
aaccucgccaaguaugaac

SEQ ID NO: 1464072 - RNA, 19 nt, Artificial Sequence
  Description of Artificial Sequence: Synthetic oligonucleotide
  Sense strand starting at position 470 of SEQ ID NO: 1244088
cgagguuuggccugcccaa

SEQ ID NO: 1464073 - RNA, 19 nt, Artificial Sequence
  Description of Artificial Sequence: Synthetic oligonucleotide
  Antisense strand to SEQ ID NO: 1464072
uugggcaggccaaaccucg

SEQ ID NO: 1464074 - RNA, 19 nt, Artificial Sequence
  Description of Artificial Sequence: Synthetic oligonucleotide
  Sense strand starting at position 485 of SEQ ID NO: 1244088
ccaagugaugagugaugca

SEQ ID NO: 1464075 - RNA, 19 nt, Artificial Sequence
  Description of Artificial Sequence: Synthetic oligonucleotide
  Antisense strand to SEQ ID NO: 1464074
ugcaucacucaucacuugg

SEQ ID NO: 1464076 - RNA, 19 nt, Artificial Sequence
  Description of Artificial Sequence: Synthetic oligonucleotide
  Sense strand starting at position 792 of SEQ ID NO: 1244088
acccauuugucugagggca

SEQ ID NO: 1464077 - RNA, 19 nt, Artificial Sequence
  Description of Artificial Sequence: Synthetic oligonucleotide
  Antisense strand to SEQ ID NO: 1464076
ugcccucagacaaaugggu

SEQ ID NO: 1464078 - RNA, 19 nt, Artificial Sequence
  Description of Artificial Sequence: Synthetic oligonucleotide
  Sense strand starting at position 1199 of SEQ ID NO: 1244088
cuuccuggcuuaggagaaa

SEQ ID NO: 1464079 - RNA, 19 nt, Artificial Sequence
  Description of Artificial Sequence: Synthetic oligonucleotide
  Antisense strand to SEQ ID NO: 1464078
uuucuccuaagccaggaag

SEQ ID NO: 1464080 - RNA, 19 nt, Artificial Sequence
  Description of Artificial Sequence: Synthetic oligonucleotide
  Sense strand starting at position 1326 of SEQ ID NO: 1244088
gccugaggcuccugacauc

SEQ ID NO: 1464081 - RNA, 19 nt, Artificial Sequence
  Description of Artificial Sequence: Synthetic oligonucleotide
  Antisense strand to SEQ ID NO: 1464080
gaugucaggagccucaggc

SEQ ID NO: 1464082 - RNA, 19 nt, Artificial Sequence
  Description of Artificial Sequence: Synthetic oligonucleotide
  Sense strand starting at position 1563 of SEQ ID NO: 1244088
ggaugaaguuccuccugac

SEQ ID NO: 1464083 - RNA, 19 nt, Artificial Sequence
  Description of Artificial Sequence: Synthetic oligonucleotide
  Antisense strand to SEQ ID NO: 1464082
gucaggaggaacuucaucc

SEQ ID NO: 1464084 - RNA, 19 nt, Artificial Sequence
  Description of Artificial Sequence: Synthetic oligonucleotide
  Sense strand starting at position 1566 of SEQ ID NO: 1244088
ugaaguuccuccugacaca

SEQ ID NO: 1464085 - RNA, 19 nt, Artificial Sequence
  Description of Artificial Sequence: Synthetic oligonucleotide
  Antisense strand to SEQ ID NO: 1464084
ugugucaggaggaacuuca

SEQ ID NO: 1464086 - RNA, 19 nt, Artificial Sequence
  Description of Artificial Sequence: Synthetic oligonucleotide
  Sense strand starting at position 1579 of SEQ ID NO: 1244088
gacacauucuccugggugu

SEQ ID NO: 1464087 - RNA, 19 nt, Artificial Sequence
  Description of Artificial Sequence: Synthetic oligonucleotide
  Antisense strand to SEQ ID NO: 1464086
acacccaggagaauguguc

SEQ ID NO: 1464088 - RNA, 19 nt, Artificial Sequence
  Description of Artificial Sequence: Synthetic oligonucleotide
  Sense strand starting at position 2112 of SEQ ID NO: 1244088
agcuuagagaucuggaguu

SEQ ID NO: 1464089 - RNA, 19 nt, Artificial Sequence
  Description of Artificial Sequence: Synthetic oligonucleotide
  Antisense strand to SEQ ID NO: 1464088
aacuccagaucucuaagcu

SEQ ID NO: 1464090 - RNA, 19 nt, Artificial Sequence
  Description of Artificial Sequence: Synthetic oligonucleotide
  Sense strand starting at position 2146 of SEQ ID NO: 1244088
cgguaaagcuucgguugga

SEQ ID NO: 1464091 - RNA, 19 nt, Artificial Sequence
  Description of Artificial Sequence: Synthetic oligonucleotide
  Antisense strand to SEQ ID NO: 1464090
uccaaccgaagcuuuaccg

SEQ ID NO: 1464092 - RNA, 19 nt, Artificial Sequence
  Description of Artificial Sequence: Synthetic oligonucleotide
  Sense strand starting at position 2147 of SEQ ID NO: 1244088
gguaaagcuucgguuggaa

SEQ ID NO: 1464093 - RNA, 19 nt, Artificial Sequence
  Description of Artificial Sequence: Synthetic oligonucleotide
  Antisense strand to SEQ ID NO: 1464092
uuccaaccgaagcuuuacc

SEQ ID NO: 1464094 - RNA, 19 nt, Artificial Sequence
  Description of Artificial Sequence: Synthetic oligonucleotide
  Sense strand starting at position 2150 of SEQ ID NO: 1244088
aaagcuucgguuggaaaca

SEQ ID NO: 1464095 - RNA, 19 nt, Artificial Sequence
  Description of Artificial Sequence: Synthetic oligonucleotide
  Antisense strand to SEQ ID NO: 1464094
uguuuccaaccgaagcuuu

SEQ ID NO: 1464096 - RNA, 19 nt, Artificial Sequence
  Description of Artificial Sequence: Synthetic oligonucleotide
  Sense strand starting at position 2533 of SEQ ID NO: 1244088
cuggaugacuccuaguaua

SEQ ID NO: 1464097 - RNA, 19 nt, Artificial Sequence
  Description of Artificial Sequence: Synthetic oligonucleotide
  Antisense strand to SEQ ID NO: 1464096
uauacuaggagucauccag

SEQ ID NO: 1464098 - RNA, 19 nt, Artificial Sequence
  Description of Artificial Sequence: Synthetic oligonucleotide
  Sense strand starting at position 2633 of SEQ ID NO: 1244088
aaaguuuaauucgggaaga

SEQ ID NO: 1464099 - RNA, 19 nt, Artificial Sequence
  Description of Artificial Sequence: Synthetic oligonucleotide
  Antisense strand to SEQ ID NO: 1464098
ucuucccgaauuaaacuuu

SEQ ID NO: 1464100 - RNA, 19 nt, Artificial Sequence
  Description of Artificial Sequence: Synthetic oligonucleotide
  Sense strand starting at position 2634 of SEQ ID NO: 1244088
aaguuuaauucgggaagaa

SEQ ID NO: 1464101 - RNA, 19 nt, Artificial Sequence
  Description of Artificial Sequence: Synthetic oligonucleotide
  Antisense strand to SEQ ID NO: 1464100
uucuucccgaauuaaacuu

SEQ ID NO: 1464102 - RNA, 19 nt, Artificial Sequence
  Description of Artificial Sequence: Synthetic oligonucleotide
  Sense strand starting at position 2656 of SEQ ID NO: 1244088
uggagugucucugcaguua

SEQ ID NO: 1464103 - RNA, 19 nt, Artificial Sequence
  Description of Artificial Sequence: Synthetic oligonucleotide
  Antisense strand to SEQ ID NO: 1464102
uaacugcagagacacucca

SEQ ID NO: 1464104 - RNA, 19 nt, Artificial Sequence
  Description of Artificial Sequence: Synthetic oligonucleotide
  Sense strand starting at position 3194 of SEQ ID NO: 1244088
cgcagagacgucugucuua

SEQ ID NO: 1464105 - RNA, 19 nt, Artificial Sequence
  Description of Artificial Sequence: Synthetic oligonucleotide
  Antisense strand to SEQ ID NO: 1464104
uaagacagacgucucugcg

SEQ ID NO: 1464106 - RNA, 19 nt, Artificial Sequence
  Description of Artificial Sequence: Synthetic oligonucleotide
  Sense strand starting at position 3197 of SEQ ID NO: 1244088
agagacgucugucuuagag

SEQ ID NO: 1464107 - RNA, 19 nt, Artificial Sequence
  Description of Artificial Sequence: Synthetic oligonucleotide
  Antisense strand to SEQ ID NO: 1464106
cucuaagacagacgucucu

SEQ ID NO: 1464108 - RNA, 19 nt, Artificial Sequence
  Description of Artificial Sequence: Synthetic oligonucleotide
  Sense strand starting at position 3199 of SEQ ID NO: 1244088
agacgucugucuuagagac

SEQ ID NO: 1464109 - RNA, 19 nt, Artificial Sequence
  Description of Artificial Sequence: Synthetic oligonucleotide
  Antisense strand to SEQ ID NO: 1464108
gucucuaagacagacgucu

SEQ ID NO: 1464110 - RNA, 19 nt, Artificial Sequence
  Description of Artificial Sequence: Synthetic oligonucleotide
  Sense strand starting at position 3201 of SEQ ID NO: 1244088
acgucugucuuagagacuu

SEQ ID NO: 1464111 - RNA, 19 nt, Artificial Sequence
  Description of Artificial Sequence: Synthetic oligonucleotide
  Antisense strand to SEQ ID NO: 1464110
aagucucuaagacagacgu

SEQ ID NO: 1464112 - RNA, 19 nt, Artificial Sequence
  Description of Artificial Sequence: Synthetic oligonucleotide
  Sense strand starting at position 3291 of SEQ ID NO: 1244088
gggcuaguuucagcgggaa

SEQ ID NO: 1464113 - RNA, 19 nt, Artificial Sequence
  Description of Artificial Sequence: Synthetic oligonucleotide
  Antisense strand to SEQ ID NO: 1464112
uucccgcugaaacuagccc

SEQ ID NO: 1464114 - RNA, 19 nt, Artificial Sequence
  Description of Artificial Sequence: Synthetic oligonucleotide
  Sense strand starting at position 3797 of SEQ ID NO: 1244088
ggcaggcugucgucugaga

SEQ ID NO: 1464115 - RNA, 19 nt, Artificial Sequence
  Description of Artificial Sequence: Synthetic oligonucleotide
  Antisense strand to SEQ ID NO: 1464114
ucucagacgacagccugcc

SEQ ID NO: 1464116 - RNA, 19 nt, Artificial Sequence
  Description of Artificial Sequence: Synthetic oligonucleotide
  Sense strand starting at position 3801 of SEQ ID NO: 1244088
ggcugucgucugagaccga

SEQ ID NO: 1464117 - RNA, 19 nt, Artificial Sequence
  Description of Artificial Sequence: Synthetic oligonucleotide
  Antisense strand to SEQ ID NO: 1464116
ucggucucagacgacagcc

SEQ ID NO: 1464118 - RNA, 19 nt, Artificial Sequence
  Description of Artificial Sequence: Synthetic oligonucleotide
  Sense strand starting at position 3802 of SEQ ID NO: 1244088
gcugucgucugagaccgau

SEQ ID NO: 1464119 - RNA, 19 nt, Artificial Sequence
  Description of Artificial Sequence: Synthetic oligonucleotide
  Antisense strand to SEQ ID NO: 1464118
aucggucucagacgacagc

SEQ ID NO: 1464120 - RNA, 19 nt, Artificial Sequence
  Description of Artificial Sequence: Synthetic oligonucleotide
  Sense strand starting at position 54 of SEQ ID NO: 1244089
agcuuagagaucuggaguu

SEQ ID NO: 1464121 - RNA, 19 nt, Artificial Sequence
  Description of Artificial Sequence: Synthetic oligonucleotide
  Antisense strand to SEQ ID NO: 1464120
aacuccagaucucuaagcu

SEQ ID NO: 1464122 - RNA, 19 nt, Artificial Sequence
  Description of Artificial Sequence: Synthetic oligonucleotide
  Sense strand starting at position 88 of SEQ ID NO: 1244089
cgguaaagcuucgguugga

SEQ ID NO: 1464123 - RNA, 19 nt, Artificial Sequence
  Description of Artificial Sequence: Synthetic oligonucleotide
  Antisense strand to SEQ ID NO: 1464122
uccaaccgaagcuuuaccg

SEQ ID NO: 1464124 - RNA, 19 nt, Artificial Sequence
  Description of Artificial Sequence: Synthetic oligonucleotide
  Sense strand starting at position 89 of SEQ ID NO: 1244089
gguaaagcuucgguuggaa

SEQ ID NO: 1464125 - RNA, 19 nt, Artificial Sequence
  Description of Artificial Sequence: Synthetic oligonucleotide
  Antisense strand to SEQ ID NO: 1464124
uuccaaccgaagcuuuacc

SEQ ID NO: 1464126 - RNA, 19 nt, Artificial Sequence
  Description of Artificial Sequence: Synthetic oligonucleotide
  Sense strand starting at position 92 of SEQ ID NO: 1244089
aaagcuucgguuggaaaca

SEQ ID NO: 1464127 - RNA, 19 nt, Artificial Sequence
  Description of Artificial Sequence: Synthetic oligonucleotide
  Antisense strand to SEQ ID NO: 1464126
uguuuccaaccgaagcuuu

SEQ ID NO: 1464128 - RNA, 19 nt, Artificial Sequence
  Description of Artificial Sequence: Synthetic oligonucleotide
  Sense strand starting at position 475 of SEQ ID NO: 1244089
cuggaugacuccuaguaua

SEQ ID NO: 1464129 - RNA, 19 nt, Artificial Sequence
  Description of Artificial Sequence: Synthetic oligonucleotide
  Antisense strand to SEQ ID NO: 1464128
uauacuaggagucauccag

SEQ ID NO: 1464130 - RNA, 19 nt, Artificial Sequence
  Description of Artificial Sequence: Synthetic oligonucleotide
  Sense strand starting at position 575 of SEQ ID NO: 1244089
aaaguuuaauucgggaaga

SEQ ID NO: 1464131 - RNA, 19 nt, Artificial Sequence
  Description of Artificial Sequence: Synthetic oligonucleotide
  Antisense strand to SEQ ID NO: 1464130
ucuucccgaauuaaacuuu

SEQ ID NO: 1464132 - RNA, 19 nt, Artificial Sequence
  Description of Artificial Sequence: Synthetic oligonucleotide
  Sense strand starting at position 576 of SEQ ID NO: 1244089
aaguuuaauucgggaagaa

SEQ ID NO: 1464133 - RNA, 19 nt, Artificial Sequence
  Description of Artificial Sequence: Synthetic oligonucleotide
  Antisense strand to SEQ ID NO: 1464132
uucuucccgaauuaaacuu

SEQ ID NO: 1464134 - RNA, 19 nt, Artificial Sequence
  Description of Artificial Sequence: Synthetic oligonucleotide
  Sense strand starting at position 598 of SEQ ID NO: 1244089
uggagugucucugcaguua

SEQ ID NO: 1464135 - RNA, 19 nt, Artificial Sequence
  Description of Artificial Sequence: Synthetic oligonucleotide
  Antisense strand to SEQ ID NO: 1464134
uaacugcagagacacucca

SEQ ID NO: 1464136 - RNA, 19 nt, Artificial Sequence
  Description of Artificial Sequence: Synthetic oligonucleotide
  Sense strand starting at position 1136 of SEQ ID NO: 1244089
cgcagagacgucugucuua

SEQ ID NO: 1464137 - RNA, 19 nt, Artificial Sequence
  Description of Artificial Sequence: Synthetic oligonucleotide
  Antisense strand to SEQ ID NO: 1464136
uaagacagacgucucugcg

SEQ ID NO: 1464138 - RNA, 19 nt, Artificial Sequence
  Description of Artificial Sequence: Synthetic oligonucleotide
  Sense strand starting at position 1139 of SEQ ID NO: 1244089
agagacgucugucuuagag

SEQ ID NO: 1464139 - RNA, 19 nt, Artificial Sequence
  Description of Artificial Sequence: Synthetic oligonucleotide
  Antisense strand to SEQ ID NO: 1464138
cucuaagacagacgucucu

SEQ ID NO: 1464140 - RNA, 19 nt, Artificial Sequence
  Description of Artificial Sequence: Synthetic oligonucleotide
  Sense strand starting at position 1141 of SEQ ID NO: 1244089
agacgucugucuuagagac

SEQ ID NO: 1464141 - RNA, 19 nt, Artificial Sequence
  Description of Artificial Sequence: Synthetic oligonucleotide
  Antisense strand to SEQ ID NO: 1464140
gucucuaagacagacgucu

SEQ ID NO: 1464142 - RNA, 19 nt, Artificial Sequence
  Description of Artificial Sequence: Synthetic oligonucleotide
  Sense strand starting at position 1143 of SEQ ID NO: 1244089
acgucugucuuagagacuu

SEQ ID NO: 1464143 - RNA, 19 nt, Artificial Sequence
  Description of Artificial Sequence: Synthetic oligonucleotide
  Antisense strand to SEQ ID NO: 1464142
aagucucuaagacagacgu

SEQ ID NO: 1464144 - RNA, 19 nt, Artificial Sequence
  Description of Artificial Sequence: Synthetic oligonucleotide
  Sense strand starting at position 1233 of SEQ ID NO: 1244089
gggcuaguuucagcgggaa

SEQ ID NO: 1464145 - RNA, 19 nt, Artificial Sequence
  Description of Artificial Sequence: Synthetic oligonucleotide
  Antisense strand to SEQ ID NO: 1464144
uucccgcugaaacuagccc

SEQ ID NO: 1464146 - RNA, 19 nt, Artificial Sequence
  Description of Artificial Sequence: Synthetic oligonucleotide
  Sense strand starting at position 1739 of SEQ ID NO: 1244089
ggcaggcugucgucugaga

SEQ ID NO: 1464147 - RNA, 19 nt, Artificial Sequence
  Description of Artificial Sequence: Synthetic oligonucleotide
  Antisense strand to SEQ ID NO: 1464146
ucucagacgacagccugcc

SEQ ID NO: 1464148 - RNA, 19 nt, Artificial Sequence
  Description of Artificial Sequence: Synthetic oligonucleotide
  Sense strand starting at position 1743 of SEQ ID NO: 1244089
ggcugucgucugagaccga

SEQ ID NO: 1464149 - RNA, 19 nt, Artificial Sequence
  Description of Artificial Sequence: Synthetic oligonucleotide
  Antisense strand to SEQ ID NO: 1464148
ucggucucagacgacagcc

SEQ ID NO: 1464150 - RNA, 19 nt, Artificial Sequence
  Description of Artificial Sequence: Synthetic oligonucleotide
  Sense strand starting at position 1744 of SEQ ID NO: 1244089
gcugucgucugagaccgau

SEQ ID NO: 1464151 - RNA, 19 nt, Artificial Sequence
  Description of Artificial Sequence: Synthetic oligonucleotide
  Antisense strand to SEQ ID NO: 1464150
aucggucucagacgacagc

SEQ ID NO: 1464152 - RNA, 19 nt, Artificial Sequence
  Description of Artificial Sequence: Synthetic oligonucleotide
  Sense strand starting at position 2040 of SEQ ID NO: 1244089
ggcggagacucccugacua

SEQ ID NO: 1464153 - RNA, 19 nt, Artificial Sequence
  Description of Artificial Sequence: Synthetic oligonucleotide
  Antisense strand to SEQ ID NO: 1464152
uagucagggagucuccgcc

SEQ ID NO: 1464154 - RNA, 19 nt, Artificial Sequence
  Description of Artificial Sequence: Synthetic oligonucleotide
  Sense strand starting at position 2488 of SEQ ID NO: 1244089
gagcaaaguccagagucuu

SEQ ID NO: 1464155 - RNA, 19 nt, Artificial Sequence
  Description of Artificial Sequence: Synthetic oligonucleotide
  Antisense strand to SEQ ID NO: 1464154
aagacucuggacuuugcuc

SEQ ID NO: 1464156 - RNA, 19 nt, Artificial Sequence
  Description of Artificial Sequence: Synthetic oligonucleotide
  Sense strand starting at position 2501 of SEQ ID NO: 1244089
agucuuggcuucuccuuua

SEQ ID NO: 1464157 - RNA, 19 nt, Artificial Sequence
  Description of Artificial Sequence: Synthetic oligonucleotide
  Antisense strand to SEQ ID NO: 1464156
uaaaggagaagccaagacu

SEQ ID NO: 1464158 - RNA, 19 nt, Artificial Sequence
  Description of Artificial Sequence: Synthetic oligonucleotide
  Sense strand starting at position 2598 of SEQ ID NO: 1244089
ggauuccucuuagagggau

SEQ ID NO: 1464159 - RNA, 19 nt, Artificial Sequence
  Description of Artificial Sequence: Synthetic oligonucleotide
  Antisense strand to SEQ ID NO: 1464158
aucccucuaagaggaaucc

SEQ ID NO: 1464160 - RNA, 19 nt, Artificial Sequence
  Description of Artificial Sequence: Synthetic oligonucleotide
  Sense strand starting at position 2812 of SEQ ID NO: 1244089
guuucuccauguuaaccaa

SEQ ID NO: 1464161 - RNA, 19 nt, Artificial Sequence
  Description of Artificial Sequence: Synthetic oligonucleotide
  Antisense strand to SEQ ID NO: 1464160
uugguuaacauggagaaac

SEQ ID NO: 1464162 - RNA, 19 nt, Artificial Sequence
  Description of Artificial Sequence: Synthetic oligonucleotide
  Sense strand starting at position 2942 of SEQ ID NO: 1244089
cagggaucacuuuagcugu

SEQ ID NO: 1464163 - RNA, 19 nt, Artificial Sequence
  Description of Artificial Sequence: Synthetic oligonucleotide
  Antisense strand to SEQ ID NO: 1464162
acagcuaaagugaucccug

SEQ ID NO: 1464164 - RNA, 19 nt, Artificial Sequence
  Description of Artificial Sequence: Synthetic oligonucleotide
  Sense strand starting at position 3038 of SEQ ID NO: 1244089
cagcuugaugugggugaca

SEQ ID NO: 1464165 - RNA, 19 nt, Artificial Sequence
  Description of Artificial Sequence: Synthetic oligonucleotide
  Antisense strand to SEQ ID NO: 1464164
ugucacccacaucaagcug

SEQ ID NO: 1464166 - RNA, 19 nt, Artificial Sequence
  Description of Artificial Sequence: Synthetic oligonucleotide
  Sense strand starting at position 3064 of SEQ ID NO: 1244089
aaacaauccuuagggugau

SEQ ID NO: 1464167 - RNA, 19 nt, Artificial Sequence
  Description of Artificial Sequence: Synthetic oligonucleotide
  Antisense strand to SEQ ID NO: 1464166
aucacccuaaggauuguuu

SEQ ID NO: 1464168 - RNA, 19 nt, Artificial Sequence
  Description of Artificial Sequence: Synthetic oligonucleotide
  Sense strand starting at position 3065 of SEQ ID NO: 1244089
aacaauccuuagggugaua

SEQ ID NO: 1464169 - RNA, 19 nt, Artificial Sequence
  Description of Artificial Sequence: Synthetic oligonucleotide
  Antisense strand to SEQ ID NO: 1464168
uaucacccuaaggauuguu

SEQ ID NO: 1464170 - RNA, 19 nt, Artificial Sequence
  Description of Artificial Sequence: Synthetic oligonucleotide
  Sense strand starting at position 3067 of SEQ ID NO: 1244089
caauccuuagggugauaag

SEQ ID NO: 1464171 - RNA, 19 nt, Artificial Sequence
  Description of Artificial Sequence: Synthetic oligonucleotide
  Antisense strand to SEQ ID NO: 1464170
cuuaucacccuaaggauug

SEQ ID NO: 1464172 - RNA, 19 nt, Artificial Sequence
  Description of Artificial Sequence: Synthetic oligonucleotide
  Sense strand starting at position 3195 of SEQ ID NO: 1244089
caaggucucuuuggugaug

SEQ ID NO: 1464173 - RNA, 19 nt, Artificial Sequence
  Description of Artificial Sequence: Synthetic oligonucleotide
  Antisense strand to SEQ ID NO: 1464172
caucaccaaagagaccuug

SEQ ID NO: 1464174 - RNA, 19 nt, Artificial Sequence
  Description of Artificial Sequence: Synthetic oligonucleotide
  Sense strand starting at position 3197 of SEQ ID NO: 1244089
aggucucuuuggugaugga

SEQ ID NO: 1464175 - RNA, 19 nt, Artificial Sequence
  Description of Artificial Sequence: Synthetic oligonucleotide
  Antisense strand to SEQ ID NO: 1464174
uccaucaccaaagagaccu

SEQ ID NO: 1464176 - RNA, 19 nt, Artificial Sequence
  Description of Artificial Sequence: Synthetic oligonucleotide
  Sense strand starting at position 3261 of SEQ ID NO: 1244089
ucaacuaucuguuuaguac

SEQ ID NO: 1464177 - RNA, 19 nt, Artificial Sequence
  Description of Artificial Sequence: Synthetic oligonucleotide
  Antisense strand to SEQ ID NO: 1464176
guacuaaacagauaguuga

SEQ ID NO: 1464178 - RNA, 19 nt, Artificial Sequence
  Description of Artificial Sequence: Synthetic oligonucleotide
  Sense strand starting at position 3365 of SEQ ID NO: 1244089
caggaagauugauguuaac

SEQ ID NO: 1464179 - RNA, 19 nt, Artificial Sequence
  Description of Artificial Sequence: Synthetic oligonucleotide
  Antisense strand to SEQ ID NO: 1464178
guuaacaucaaucuuccug

SEQ ID NO: 1464180 - RNA, 19 nt, Artificial Sequence
  Description of Artificial Sequence: Synthetic oligonucleotide
  Sense strand starting at position 3414 of SEQ ID NO: 1244089
agacaacuaugcugggaaa

SEQ ID NO: 1464181 - RNA, 19 nt, Artificial Sequence
  Description of Artificial Sequence: Synthetic oligonucleotide
  Antisense strand to SEQ ID NO: 1464180
uuucccagcauaguugucu

SEQ ID NO: 1464182 - RNA, 19 nt, Artificial Sequence
  Description of Artificial Sequence: Synthetic oligonucleotide
  Sense strand starting at position 3488 of SEQ ID NO: 1244089
aggagaagcuggcugacau

SEQ ID NO: 1464183 - RNA, 19 nt, Artificial Sequence
  Description of Artificial Sequence: Synthetic oligonucleotide
  Antisense strand to SEQ ID NO: 1464182
augucagccagcuucuccu

SEQ ID NO: 1464184 - RNA, 19 nt, Artificial Sequence
  Description of Artificial Sequence: Synthetic oligonucleotide
  Sense strand starting at position 3730 of SEQ ID NO: 1244089
ucccuaaccuuguguggaa

SEQ ID NO: 1464185 - RNA, 19 nt, Artificial Sequence
  Description of Artificial Sequence: Synthetic oligonucleotide
  Antisense strand to SEQ ID NO: 1464184
uuccacacaagguuaggga

SEQ ID NO: 1464186 - RNA, 19 nt, Artificial Sequence
  Description of Artificial Sequence: Synthetic oligonucleotide
  Sense strand starting at position 3731 of SEQ ID NO: 1244089
cccuaaccuuguguggaaa

SEQ ID NO: 1464187 - RNA, 19 nt, Artificial Sequence
  Description of Artificial Sequence: Synthetic oligonucleotide
  Antisense strand to SEQ ID NO: 1464186
uuuccacacaagguuaggg

SEQ ID NO: 1464188 - RNA, 19 nt, Artificial Sequence
  Description of Artificial Sequence: Synthetic oligonucleotide
  Sense strand starting at position 3835 of SEQ ID NO: 1244089
guggcuguucugcaaacca

SEQ ID NO: 1464189 - RNA, 19 nt, Artificial Sequence
  Description of Artificial Sequence: Synthetic oligonucleotide
  Antisense strand to SEQ ID NO: 1464188
ugguuugcagaacagccac

SEQ ID NO: 1464190 - RNA, 19 nt, Artificial Sequence
  Description of Artificial Sequence: Synthetic oligonucleotide
  Sense strand starting at position 3853 of SEQ ID NO: 1244089
agguuugagagccauccau

SEQ ID NO: 1464191 - RNA, 19 nt, Artificial Sequence
  Description of Artificial Sequence: Synthetic oligonucleotide
  Antisense strand to SEQ ID NO: 1464190
auggauggcucucaaaccu

SEQ ID NO: 1464192 - RNA, 19 nt, Artificial Sequence
  Description of Artificial Sequence: Synthetic oligonucleotide
  Sense strand starting at position 3868 of SEQ ID NO: 1244089
ccauccuguuuguccagau

SEQ ID NO: 1464193 - RNA, 19 nt, Artificial Sequence
  Description of Artificial Sequence: Synthetic oligonucleotide
  Antisense strand to SEQ ID NO: 1464192
aucuggacaaacaggaugg

SEQ ID NO: 1464194 - RNA, 19 nt, Artificial Sequence
  Description of Artificial Sequence: Synthetic oligonucleotide
  Sense strand starting at position 27 of SEQ ID NO: 1244090
ggguauguuuagucaaaga

SEQ ID NO: 1464195 - RNA, 19 nt, Artificial Sequence
  Description of Artificial Sequence: Synthetic oligonucleotide
  Antisense strand to SEQ ID NO: 1464194
ucuuugacuaaacauaccc

SEQ ID NO: 1464196 - RNA, 19 nt, Artificial Sequence
  Description of Artificial Sequence: Synthetic oligonucleotide
  Sense strand starting at position 147 of SEQ ID NO: 1244090
cagugugacccuggaugaa

SEQ ID NO: 1464197 - RNA, 19 nt, Artificial Sequence
  Description of Artificial Sequence: Synthetic oligonucleotide
  Antisense strand to SEQ ID NO: 1464196
uucauccagggucacacug

SEQ ID NO: 1464198 - RNA, 19 nt, Artificial Sequence
  Description of Artificial Sequence: Synthetic oligonucleotide
  Sense strand starting at position 199 of SEQ ID NO: 1244090
gaauaagcagucugccauu

SEQ ID NO: 1464199 - RNA, 19 nt, Artificial Sequence
  Description of Artificial Sequence: Synthetic oligonucleotide
  Antisense strand to SEQ ID NO: 1464198
aauggcagacugcuuauuc

SEQ ID NO: 1464200 - RNA, 19 nt, Artificial Sequence
  Description of Artificial Sequence: Synthetic oligonucleotide
  Sense strand starting at position 340 of SEQ ID NO: 1244090
ggaauaagggucugguaau

SEQ ID NO: 1464201 - RNA, 19 nt, Artificial Sequence
  Description of Artificial Sequence: Synthetic oligonucleotide
  Antisense strand to SEQ ID NO: 1464200
auuaccagacccuuauucc

SEQ ID NO: 1464202 - RNA, 19 nt, Artificial Sequence
  Description of Artificial Sequence: Synthetic oligonucleotide
  Sense strand starting at position 341 of SEQ ID NO: 1244090
gaauaagggucugguaaua

SEQ ID NO: 1464203 - RNA, 19 nt, Artificial Sequence
  Description of Artificial Sequence: Synthetic oligonucleotide
  Antisense strand to SEQ ID NO: 1464202
uauuaccagacccuuauuc

SEQ ID NO: 1464204 - RNA, 19 nt, Artificial Sequence
  Description of Artificial Sequence: Synthetic oligonucleotide
  Sense strand starting at position 608 of SEQ ID NO: 1244090
caaggagcuuccgaauucu

SEQ ID NO: 1464205 - RNA, 19 nt, Artificial Sequence
  Description of Artificial Sequence: Synthetic oligonucleotide
  Antisense strand to SEQ ID NO: 1464204
agaauucggaagcuccuug

SEQ ID NO: 1464206 - RNA, 19 nt, Artificial Sequence
  Description of Artificial Sequence: Synthetic oligonucleotide
  Sense strand starting at position 617 of SEQ ID NO: 1244090
uccgaauucugucucauca

SEQ ID NO: 1464207 - RNA, 19 nt, Artificial Sequence
  Description of Artificial Sequence: Synthetic oligonucleotide
  Antisense strand to SEQ ID NO: 1464206
ugaugagacagaauucgga

SEQ ID NO: 1464208 - RNA, 19 nt, Artificial Sequence
  Description of Artificial Sequence: Synthetic oligonucleotide
  Sense strand starting at position 840 of SEQ ID NO: 1244090
agcuuagucccauagacag

SEQ ID NO: 1464209 - RNA, 19 nt, Artificial Sequence
  Description of Artificial Sequence: Synthetic oligonucleotide
  Antisense strand to SEQ ID NO: 1464208
cugucuaugggacuaagcu

SEQ ID NO: 1464210 - RNA, 19 nt, Artificial Sequence
  Description of Artificial Sequence: Synthetic oligonucleotide
  Sense strand starting at position 984 of SEQ ID NO: 1244090
cuggaauguccucauccca

SEQ ID NO: 1464211 - RNA, 19 nt, Artificial Sequence
  Description of Artificial Sequence: Synthetic oligonucleotide
  Antisense strand to SEQ ID NO: 1464210
ugggaugaggacauuccag

SEQ ID NO: 1464212 - RNA, 19 nt, Artificial Sequence
  Description of Artificial Sequence: Synthetic oligonucleotide
  Sense strand starting at position 1255 of SEQ ID NO: 1244090
gcagacacauugucucaga

SEQ ID NO: 1464213 - RNA, 19 nt, Artificial Sequence
  Description of Artificial Sequence: Synthetic oligonucleotide
  Antisense strand to SEQ ID NO: 1464212
ucugagacaaugugucugc

SEQ ID NO: 1464214 - RNA, 19 nt, Artificial Sequence
  Description of Artificial Sequence: Synthetic oligonucleotide
  Sense strand starting at position 1258 of SEQ ID NO: 1244090
gacacauugucucagagac

SEQ ID NO: 1464215 - RNA, 19 nt, Artificial Sequence
  Description of Artificial Sequence: Synthetic oligonucleotide
  Antisense strand to SEQ ID NO: 1464214
gucucugagacaauguguc

SEQ ID NO: 1464216 - RNA, 19 nt, Artificial Sequence
  Description of Artificial Sequence: Synthetic oligonucleotide
  Sense strand starting at position 1382 of SEQ ID NO: 1244090
uggucaguccugcaggaca

SEQ ID NO: 1464217 - RNA, 19 nt, Artificial Sequence
  Description of Artificial Sequence: Synthetic oligonucleotide
  Antisense strand to SEQ ID NO: 1464216
uguccugcaggacugacca

SEQ ID NO: 1464218 - RNA, 19 nt, Artificial Sequence
  Description of Artificial Sequence: Synthetic oligonucleotide
  Sense strand starting at position 1536 of SEQ ID NO: 1244090
cugagauaccgauggcucu

SEQ ID NO: 1464219 - RNA, 19 nt, Artificial Sequence
  Description of Artificial Sequence: Synthetic oligonucleotide
  Antisense strand to SEQ ID NO: 1464218
agagccaucgguaucucag

SEQ ID NO: 1464220 - RNA, 19 nt, Artificial Sequence
  Description of Artificial Sequence: Synthetic oligonucleotide
  Sense strand starting at position 1571 of SEQ ID NO: 1244090
gaaacucugucgcaggagu

SEQ ID NO: 1464221 - RNA, 19 nt, Artificial Sequence
  Description of Artificial Sequence: Synthetic oligonucleotide
  Antisense strand to SEQ ID NO: 1464220
acuccugcgacagaguuuc

SEQ ID NO: 1464222 - RNA, 19 nt, Artificial Sequence
  Description of Artificial Sequence: Synthetic oligonucleotide
  Sense strand starting at position 1751 of SEQ ID NO: 1244090
cggaguucuugcuccucca

SEQ ID NO: 1464223 - RNA, 19 nt, Artificial Sequence
  Description of Artificial Sequence: Synthetic oligonucleotide
  Antisense strand to SEQ ID NO: 1464222
uggaggagcaagaacuccg

SEQ ID NO: 1464224 - RNA, 19 nt, Artificial Sequence
  Description of Artificial Sequence: Synthetic oligonucleotide
  Sense strand starting at position 2286 of SEQ ID NO: 1244090
gcucuuauucuucgggagu

SEQ ID NO: 1464225 - RNA, 19 nt, Artificial Sequence
  Description of Artificial Sequence: Synthetic oligonucleotide
  Antisense strand to SEQ ID NO: 1464224
acucccgaagaauaagagc

SEQ ID NO: 1464226 - RNA, 19 nt, Artificial Sequence
  Description of Artificial Sequence: Synthetic oligonucleotide
  Sense strand starting at position 2287 of SEQ ID NO: 1244090
cucuuauucuucgggaguu

SEQ ID NO: 1464227 - RNA, 19 nt, Artificial Sequence
  Description of Artificial Sequence: Synthetic oligonucleotide
  Antisense strand to SEQ ID NO: 1464226
aacucccgaagaauaagag

SEQ ID NO: 1464228 - RNA, 19 nt, Artificial Sequence
  Description of Artificial Sequence: Synthetic oligonucleotide
  Sense strand starting at position 2288 of SEQ ID NO: 1244090
ucuuauucuucgggaguuu

SEQ ID NO: 1464229 - RNA, 19 nt, Artificial Sequence
  Description of Artificial Sequence: Synthetic oligonucleotide
  Antisense strand to SEQ ID NO: 1464228
aaacucccgaagaauaaga

SEQ ID NO: 1464230 - RNA, 19 nt, Artificial Sequence
  Description of Artificial Sequence: Synthetic oligonucleotide
  Sense strand starting at position 2289 of SEQ ID NO: 1244090
cuuauucuucgggaguuua

SEQ ID NO: 1464231 - RNA, 19 nt, Artificial Sequence
  Description of Artificial Sequence: Synthetic oligonucleotide
  Antisense strand to SEQ ID NO: 1464230
uaaacucccgaagaauaag

SEQ ID NO: 1464232 - RNA, 19 nt, Artificial Sequence
  Description of Artificial Sequence: Synthetic oligonucleotide
  Sense strand starting at position 2342 of SEQ ID NO: 1244090
cuggacgggcucugaaaua

SEQ ID NO: 1464233 - RNA, 19 nt, Artificial Sequence
  Description of Artificial Sequence: Synthetic oligonucleotide
  Antisense strand to SEQ ID NO: 1464232
uauuucagagcccguccag

SEQ ID NO: 1464234 - RNA, 19 nt, Artificial Sequence
  Description of Artificial Sequence: Synthetic oligonucleotide
  Sense strand starting at position 2388 of SEQ ID NO: 1244090
auaagugucuuuccucgau

SEQ ID NO: 1464235 - RNA, 19 nt, Artificial Sequence
  Description of Artificial Sequence: Synthetic oligonucleotide
  Antisense strand to SEQ ID NO: 1464234
aucgaggaaagacacuuau

SEQ ID NO: 1464236 - RNA, 19 nt, Artificial Sequence
  Description of Artificial Sequence: Synthetic oligonucleotide
  Sense strand starting at position 2390 of SEQ ID NO: 1244090
aagugucuuuccucgauuu

SEQ ID NO: 1464237 - RNA, 19 nt, Artificial Sequence
  Description of Artificial Sequence: Synthetic oligonucleotide
  Antisense strand to SEQ ID NO: 1464236
aaaucgaggaaagacacuu

SEQ ID NO: 1464238 - RNA, 19 nt, Artificial Sequence
  Description of Artificial Sequence: Synthetic oligonucleotide
  Sense strand starting at position 2832 of SEQ ID NO: 1244090
gggccagcaucugcaagau

SEQ ID NO: 1464239 - RNA, 19 nt, Artificial Sequence
  Description of Artificial Sequence: Synthetic oligonucleotide
  Antisense strand to SEQ ID NO: 1464238
aucuugcagaugcuggccc

SEQ ID NO: 1464240 - RNA, 19 nt, Artificial Sequence
  Description of Artificial Sequence: Synthetic oligonucleotide
  Sense strand starting at position 25 of SEQ ID NO: 1244091
cuggaauguccucauccca

SEQ ID NO: 1464241 - RNA, 19 nt, Artificial Sequence
  Description of Artificial Sequence: Synthetic oligonucleotide
  Antisense strand to SEQ ID NO: 1464240
ugggaugaggacauuccag

SEQ ID NO: 1464242 - RNA, 19 nt, Artificial Sequence
  Description of Artificial Sequence: Synthetic oligonucleotide
  Sense strand starting at position 296 of SEQ ID NO: 1244091
gcagacacauugucucaga

SEQ ID NO: 1464243 - RNA, 19 nt, Artificial Sequence
  Description of Artificial Sequence: Synthetic oligonucleotide
  Antisense strand to SEQ ID NO: 1464242
ucugagacaaugugucugc

SEQ ID NO: 1464244 - RNA, 19 nt, Artificial Sequence
  Description of Artificial Sequence: Synthetic oligonucleotide
  Sense strand starting at position 299 of SEQ ID NO: 1244091
gacacauugucucagagac

SEQ ID NO: 1464245 - RNA, 19 nt, Artificial Sequence
  Description of Artificial Sequence: Synthetic oligonucleotide
  Antisense strand to SEQ ID NO: 1464244
gucucugagacaauguguc

SEQ ID NO: 1464246 - RNA, 19 nt, Artificial Sequence
  Description of Artificial Sequence: Synthetic oligonucleotide
  Sense strand starting at position 423 of SEQ ID NO: 1244091
uggucaguccugcaggaca

SEQ ID NO: 1464247 - RNA, 19 nt, Artificial Sequence
  Description of Artificial Sequence: Synthetic oligonucleotide
  Antisense strand to SEQ ID NO: 1464246
uguccugcaggacugacca

SEQ ID NO: 1464248 - RNA, 19 nt, Artificial Sequence
  Description of Artificial Sequence: Synthetic oligonucleotide
  Sense strand starting at position 577 of SEQ ID NO: 1244091
cugagauaccgauggcucu

SEQ ID NO: 1464249 - RNA, 19 nt, Artificial Sequence
  Description of Artificial Sequence: Synthetic oligonucleotide
  Antisense strand to SEQ ID NO: 1464248
agagccaucgguaucucag

SEQ ID NO: 1464250 - RNA, 19 nt, Artificial Sequence
  Description of Artificial Sequence: Synthetic oligonucleotide
  Sense strand starting at position 612 of SEQ ID NO: 1244091
gaaacucugucgcaggagu

SEQ ID NO: 1464251 - RNA, 19 nt, Artificial Sequence
  Description of Artificial Sequence: Synthetic oligonucleotide
  Antisense strand to SEQ ID NO: 1464250
acuccugcgacagaguuuc

SEQ ID NO: 1464252 - RNA, 19 nt, Artificial Sequence
  Description of Artificial Sequence: Synthetic oligonucleotide
  Sense strand starting at position 792 of SEQ ID NO: 1244091
cggaguucuugcuccucca

SEQ ID NO: 1464253 - RNA, 19 nt, Artificial Sequence
  Description of Artificial Sequence: Synthetic oligonucleotide
  Antisense strand to SEQ ID NO: 1464252
uggaggagcaagaacuccg

SEQ ID NO: 1464254 - RNA, 19 nt, Artificial Sequence
  Description of Artificial Sequence: Synthetic oligonucleotide
  Sense strand starting at position 1327 of SEQ ID NO: 1244091
gcucuuauucuucgggagu

SEQ ID NO: 1464255 - RNA, 19 nt, Artificial Sequence
  Description of Artificial Sequence: Synthetic oligonucleotide
  Antisense strand to SEQ ID NO: 1464254
acucccgaagaauaagagc

SEQ ID NO: 1464256 - RNA, 19 nt, Artificial Sequence
  Description of Artificial Sequence: Synthetic oligonucleotide
  Sense strand starting at position 1328 of SEQ ID NO: 1244091
cucuuauucuucgggaguu

SEQ ID NO: 1464257 - RNA, 19 nt, Artificial Sequence
  Description of Artificial Sequence: Synthetic oligonucleotide
  Antisense strand to SEQ ID NO: 1464256
aacucccgaagaauaagag

SEQ ID NO: 1464258 - RNA, 19 nt, Artificial Sequence
  Description of Artificial Sequence: Synthetic oligonucleotide
  Sense strand starting at position 1329 of SEQ ID NO: 1244091
ucuuauucuucgggaguuu

SEQ ID NO: 1464259 - RNA, 19 nt, Artificial Sequence
  Description of Artificial Sequence: Synthetic oligonucleotide
  Antisense strand to SEQ ID NO: 1464258
aaacucccgaagaauaaga

SEQ ID NO: 1464260 - RNA, 19 nt, Artificial Sequence
  Description of Artificial Sequence: Synthetic oligonucleotide
  Sense strand starting at position 1330 of SEQ ID NO: 1244091
cuuauucuucgggaguuua

SEQ ID NO: 1464261 - RNA, 19 nt, Artificial Sequence
  Description of Artificial Sequence: Synthetic oligonucleotide
  Antisense strand to SEQ ID NO: 1464260
uaaacucccgaagaauaag

SEQ ID NO: 1464262 - RNA, 19 nt, Artificial Sequence
  Description of Artificial Sequence: Synthetic oligonucleotide
  Sense strand starting at position 1383 of SEQ ID NO: 1244091
cuggacgggcucugaaaua

SEQ ID NO: 1464263 - RNA, 19 nt, Artificial Sequence
  Description of Artificial Sequence: Synthetic oligonucleotide
  Antisense strand to SEQ ID NO: 1464262
uauuucagagcccguccag

SEQ ID NO: 1464264 - RNA, 19 nt, Artificial Sequence
  Description of Artificial Sequence: Synthetic oligonucleotide
  Sense strand starting at position 1429 of SEQ ID NO: 1244091
auaagugucuuuccucgau

SEQ ID NO: 1464265 - RNA, 19 nt, Artificial Sequence
  Description of Artificial Sequence: Synthetic oligonucleotide
  Antisense strand to SEQ ID NO: 1464264
aucgaggaaagacacuuau

SEQ ID NO: 1464266 - RNA, 19 nt, Artificial Sequence
  Description of Artificial Sequence: Synthetic oligonucleotide
  Sense strand starting at position 1431 of SEQ ID NO: 1244091
aagugucuuuccucgauuu

SEQ ID NO: 1464267 - RNA, 19 nt, Artificial Sequence
  Description of Artificial Sequence: Synthetic oligonucleotide
  Antisense strand to SEQ ID NO: 1464266
aaaucgaggaaagacacuu

SEQ ID NO: 1464268 - RNA, 19 nt, Artificial Sequence
  Description of Artificial Sequence: Synthetic oligonucleotide
  Sense strand starting at position 1873 of SEQ ID NO: 1244091
gggccagcaucugcaagau

SEQ ID NO: 1464269 - RNA, 19 nt, Artificial Sequence
  Description of Artificial Sequence: Synthetic oligonucleotide
  Antisense strand to SEQ ID NO: 1464268
aucuugcagaugcuggccc

SEQ ID NO: 1464270 - RNA, 19 nt, Artificial Sequence
  Description of Artificial Sequence: Synthetic oligonucleotide
  Sense strand starting at position 3150 of SEQ ID NO: 1244091
caucuugagggcugccaua

SEQ ID NO: 1464271 - RNA, 19 nt, Artificial Sequence
  Description of Artificial Sequence: Synthetic oligonucleotide
  Antisense strand to SEQ ID NO: 1464270
uauggcagcccucaagaug

SEQ ID NO: 1464272 - RNA, 19 nt, Artificial Sequence
  Description of Artificial Sequence: Synthetic oligonucleotide
  Sense strand starting at position 3235 of SEQ ID NO: 1244091
cagugugucugacuggaaa

SEQ ID NO: 1464273 - RNA, 19 nt, Artificial Sequence
  Description of Artificial Sequence: Synthetic oligonucleotide
  Antisense strand to SEQ ID NO: 1464272
uuuccagucagacacacug

SEQ ID NO: 1464274 - RNA, 19 nt, Artificial Sequence
  Description of Artificial Sequence: Synthetic oligonucleotide
  Sense strand starting at position 3714 of SEQ ID NO: 1244091
gcaguagagagauggguaa

SEQ ID NO: 1464275 - RNA, 19 nt, Artificial Sequence
  Description of Artificial Sequence: Synthetic oligonucleotide
  Antisense strand to SEQ ID NO: 1464274
uuacccaucucucuacugc

SEQ ID NO: 1464276 - RNA, 19 nt, Artificial Sequence
  Description of Artificial Sequence: Synthetic oligonucleotide
  Sense strand starting at position 3769 of SEQ ID NO: 1244091
gguuaccucaguugcugaa

SEQ ID NO: 1464277 - RNA, 19 nt, Artificial Sequence
  Description of Artificial Sequence: Synthetic oligonucleotide
  Antisense strand to SEQ ID NO: 1464276
uucagcaacugagguaacc

SEQ ID NO: 1464278 - RNA, 19 nt, Artificial Sequence
  Description of Artificial Sequence: Synthetic oligonucleotide
  Sense strand starting at position 251 of SEQ ID NO: 1244092
gccgacaugucauuuccau

SEQ ID NO: 1464279 - RNA, 19 nt, Artificial Sequence
  Description of Artificial Sequence: Synthetic oligonucleotide
  Antisense strand to SEQ ID NO: 1464278
auggaaaugacaugucggc

SEQ ID NO: 1464280 - RNA, 19 nt, Artificial Sequence
  Description of Artificial Sequence: Synthetic oligonucleotide
  Sense strand starting at position 255 of SEQ ID NO: 1244092
acaugucauuuccauugua

SEQ ID NO: 1464281 - RNA, 19 nt, Artificial Sequence
  Description of Artificial Sequence: Synthetic oligonucleotide
  Antisense strand to SEQ ID NO: 1464280
uacaauggaaaugacaugu

SEQ ID NO: 1464282 - RNA, 19 nt, Artificial Sequence
  Description of Artificial Sequence: Synthetic oligonucleotide
  Sense strand starting at position 258 of SEQ ID NO: 1244092
ugucauuuccauuguauua

SEQ ID NO: 1464283 - RNA, 19 nt, Artificial Sequence
  Description of Artificial Sequence: Synthetic oligonucleotide
  Antisense strand to SEQ ID NO: 1464282
uaauacaauggaaaugaca

SEQ ID NO: 1464284 - RNA, 19 nt, Artificial Sequence
  Description of Artificial Sequence: Synthetic oligonucleotide
  Sense strand starting at position 379 of SEQ ID NO: 1244092
ggaaccaguuccgugaaga

SEQ ID NO: 1464285 - RNA, 19 nt, Artificial Sequence
  Description of Artificial Sequence: Synthetic oligonucleotide
  Antisense strand to SEQ ID NO: 1464284
ucuucacggaacugguucc

SEQ ID NO: 1464286 - RNA, 19 nt, Artificial Sequence
  Description of Artificial Sequence: Synthetic oligonucleotide
  Sense strand starting at position 380 of SEQ ID NO: 1244092
gaaccaguuccgugaagau

SEQ ID NO: 1464287 - RNA, 19 nt, Artificial Sequence
  Description of Artificial Sequence: Synthetic oligonucleotide
  Antisense strand to SEQ ID NO: 1464286
aucuucacggaacugguuc

SEQ ID NO: 1464288 - RNA, 19 nt, Artificial Sequence
  Description of Artificial Sequence: Synthetic oligonucleotide
  Sense strand starting at position 598 of SEQ ID NO: 1244092
cugugagggccugagaagu

SEQ ID NO: 1464289 - RNA, 19 nt, Artificial Sequence
  Description of Artificial Sequence: Synthetic oligonucleotide
  Antisense strand to SEQ ID NO: 1464288
acuucucaggcccucacag

SEQ ID NO: 1464290 - RNA, 19 nt, Artificial Sequence
  Description of Artificial Sequence: Synthetic oligonucleotide
  Sense strand starting at position 608 of SEQ ID NO: 1244092
cugagaaguugcucucugu

SEQ ID NO: 1464291 - RNA, 19 nt, Artificial Sequence
  Description of Artificial Sequence: Synthetic oligonucleotide
  Antisense strand to SEQ ID NO: 1464290
acagagagcaacuucucag

SEQ ID NO: 1464292 - RNA, 19 nt, Artificial Sequence
  Description of Artificial Sequence: Synthetic oligonucleotide
  Sense strand starting at position 622 of SEQ ID NO: 1244092
ucugucugugccucaguua

SEQ ID NO: 1464293 - RNA, 19 nt, Artificial Sequence
  Description of Artificial Sequence: Synthetic oligonucleotide
  Antisense strand to SEQ ID NO: 1464292
uaacugaggcacagacaga

SEQ ID NO: 1464294 - RNA, 19 nt, Artificial Sequence
  Description of Artificial Sequence: Synthetic oligonucleotide
  Sense strand starting at position 961 of SEQ ID NO: 1244092
uggugaauuaccugugcau

SEQ ID NO: 1464295 - RNA, 19 nt, Artificial Sequence
  Description of Artificial Sequence: Synthetic oligonucleotide
  Antisense strand to SEQ ID NO: 1464294
augcacagguaauucacca

SEQ ID NO: 1464296 - RNA, 19 nt, Artificial Sequence
  Description of Artificial Sequence: Synthetic oligonucleotide
  Sense strand starting at position 963 of SEQ ID NO: 1244092
gugaauuaccugugcaugu

SEQ ID NO: 1464297 - RNA, 19 nt, Artificial Sequence
  Description of Artificial Sequence: Synthetic oligonucleotide
  Antisense strand to SEQ ID NO: 1464296
acaugcacagguaauucac

SEQ ID NO: 1464298 - RNA, 19 nt, Artificial Sequence
  Description of Artificial Sequence: Synthetic oligonucleotide
  Sense strand starting at position 997 of SEQ ID NO: 1244092
cccuaaauugagggaguau

SEQ ID NO: 1464299 - RNA, 19 nt, Artificial Sequence
  Description of Artificial Sequence: Synthetic oligonucleotide
  Antisense strand to SEQ ID NO: 1464298
auacucccucaauuuaggg

SEQ ID NO: 1464300 - RNA, 19 nt, Artificial Sequence
  Description of Artificial Sequence: Synthetic oligonucleotide
  Sense strand starting at position 1008 of SEQ ID NO: 1244092
gggaguauaguguaugcuu

SEQ ID NO: 1464301 - RNA, 19 nt, Artificial Sequence
  Description of Artificial Sequence: Synthetic oligonucleotide
  Antisense strand to SEQ ID NO: 1464300
aagcauacacuauacuccc

SEQ ID NO: 1464302 - RNA, 19 nt, Artificial Sequence
  Description of Artificial Sequence: Synthetic oligonucleotide
  Sense strand starting at position 1011 of SEQ ID NO: 1244092
aguauaguguaugcuucua

SEQ ID NO: 1464303 - RNA, 19 nt, Artificial Sequence
  Description of Artificial Sequence: Synthetic oligonucleotide
  Antisense strand to SEQ ID NO: 1464302
uagaagcauacacuauacu

SEQ ID NO: 1464304 - RNA, 19 nt, Artificial Sequence
  Description of Artificial Sequence: Synthetic oligonucleotide
  Sense strand starting at position 1979 of SEQ ID NO: 1244092
uagggaucaugugauugga

SEQ ID NO: 1464305 - RNA, 19 nt, Artificial Sequence
  Description of Artificial Sequence: Synthetic oligonucleotide
  Antisense strand to SEQ ID NO: 1464304
uccaaucacaugaucccua

SEQ ID NO: 1464306 - RNA, 19 nt, Artificial Sequence
  Description of Artificial Sequence: Synthetic oligonucleotide
  Sense strand starting at position 1994 of SEQ ID NO: 1244092
uggagaaucaugugacguc

SEQ ID NO: 1464307 - RNA, 19 nt, Artificial Sequence
  Description of Artificial Sequence: Synthetic oligonucleotide
  Antisense strand to SEQ ID NO: 1464306
gacgucacaugauucucca

SEQ ID NO: 1464308 - RNA, 19 nt, Artificial Sequence
  Description of Artificial Sequence: Synthetic oligonucleotide
  Sense strand starting at position 2129 of SEQ ID NO: 1244092
aguguuaugaauugggaau

SEQ ID NO: 1464309 - RNA, 19 nt, Artificial Sequence
  Description of Artificial Sequence: Synthetic oligonucleotide
  Antisense strand to SEQ ID NO: 1464308
auucccaauucauaacacu

SEQ ID NO: 1464310 - RNA, 19 nt, Artificial Sequence
  Description of Artificial Sequence: Synthetic oligonucleotide
  Sense strand starting at position 2130 of SEQ ID NO: 1244092
guguuaugaauugggaaua

SEQ ID NO: 1464311 - RNA, 19 nt, Artificial Sequence
  Description of Artificial Sequence: Synthetic oligonucleotide
  Antisense strand to SEQ ID NO: 1464310
uauucccaauucauaacac

SEQ ID NO: 1464312 - RNA, 19 nt, Artificial Sequence
  Description of Artificial Sequence: Synthetic oligonucleotide
  Sense strand starting at position 2144 of SEQ ID NO: 1244092
gaauauuugugcucgccuu

SEQ ID NO: 1464313 - RNA, 19 nt, Artificial Sequence
  Description of Artificial Sequence: Synthetic oligonucleotide
  Antisense strand to SEQ ID NO: 1464312
aaggcgagcacaaauauuc

SEQ ID NO: 1464314 - RNA, 19 nt, Artificial Sequence
  Description of Artificial Sequence: Synthetic oligonucleotide
  Sense strand starting at position 2145 of SEQ ID NO: 1244092
aauauuugugcucgccuuu

SEQ ID NO: 1464315 - RNA, 19 nt, Artificial Sequence
  Description of Artificial Sequence: Synthetic oligonucleotide
  Antisense strand to SEQ ID NO: 1464314
aaaggcgagcacaaauauu

SEQ ID NO: 1464316 - RNA, 19 nt, Artificial Sequence
  Description of Artificial Sequence: Synthetic oligonucleotide
  Sense strand starting at position 2461 of SEQ ID NO: 1244092
cggacuuguguguuuguuu

SEQ ID NO: 1464317 - RNA, 19 nt, Artificial Sequence
  Description of Artificial Sequence: Synthetic oligonucleotide
  Antisense strand to SEQ ID NO: 1464316
aaacaaacacacaaguccg

SEQ ID NO: 1464318 - RNA, 19 nt, Artificial Sequence
  Description of Artificial Sequence: Synthetic oligonucleotide
  Sense strand starting at position 2576 of SEQ ID NO: 1244092
aggcgcugggauuacaaau

SEQ ID NO: 1464319 - RNA, 19 nt, Artificial Sequence
  Description of Artificial Sequence: Synthetic oligonucleotide
  Antisense strand to SEQ ID NO: 1464318
auuuguaaucccagcgccu

SEQ ID NO: 1464320 - RNA, 19 nt, Artificial Sequence
  Description of Artificial Sequence: Synthetic oligonucleotide
  Sense strand starting at position 2673 of SEQ ID NO: 1244092
ucuccaaacucgguugaca

SEQ ID NO: 1464321 - RNA, 19 nt, Artificial Sequence
  Description of Artificial Sequence: Synthetic oligonucleotide
  Antisense strand to SEQ ID NO: 1464320
ugucaaccgaguuuggaga

SEQ ID NO: 1464322 - RNA, 19 nt, Artificial Sequence
  Description of Artificial Sequence: Synthetic oligonucleotide
  Sense strand starting at position 2675 of SEQ ID NO: 1244092
uccaaacucgguugacaug

SEQ ID NO: 1464323 - RNA, 19 nt, Artificial Sequence
  Description of Artificial Sequence: Synthetic oligonucleotide
  Antisense strand to SEQ ID NO: 1464322
caugucaaccgaguuugga

SEQ ID NO: 1464324 - RNA, 19 nt, Artificial Sequence
  Description of Artificial Sequence: Synthetic oligonucleotide
  Sense strand starting at position 2718 of SEQ ID NO: 1244092
aaggaugguuuccaggaca

SEQ ID NO: 1464325 - RNA, 19 nt, Artificial Sequence
  Description of Artificial Sequence: Synthetic oligonucleotide
  Antisense strand to SEQ ID NO: 1464324
uguccuggaaaccauccuu

SEQ ID NO: 1464326 - RNA, 19 nt, Artificial Sequence
  Description of Artificial Sequence: Synthetic oligonucleotide
  Sense strand starting at position 2872 of SEQ ID NO: 1244092
aguagauugucuccaggug

SEQ ID NO: 1464327 - RNA, 19 nt, Artificial Sequence
  Description of Artificial Sequence: Synthetic oligonucleotide
  Antisense strand to SEQ ID NO: 1464326
caccuggagacaaucuacu

SEQ ID NO: 1464328 - RNA, 19 nt, Artificial Sequence
  Description of Artificial Sequence: Synthetic oligonucleotide
  Sense strand starting at position 2918 of SEQ ID NO: 1244092
ggagcaucuccuugagcug

SEQ ID NO: 1464329 - RNA, 19 nt, Artificial Sequence
  Description of Artificial Sequence: Synthetic oligonucleotide
  Antisense strand to SEQ ID NO: 1464328
cagcucaaggagaugcucc

SEQ ID NO: 1464330 - RNA, 19 nt, Artificial Sequence
  Description of Artificial Sequence: Synthetic oligonucleotide
  Sense strand starting at position 3012 of SEQ ID NO: 1244092
aggcuuggcagggauugaa

SEQ ID NO: 1464331 - RNA, 19 nt, Artificial Sequence
  Description of Artificial Sequence: Synthetic oligonucleotide
  Antisense strand to SEQ ID NO: 1464330
uucaaucccugccaagccu

SEQ ID NO: 1464332 - RNA, 19 nt, Artificial Sequence
  Description of Artificial Sequence: Synthetic oligonucleotide
  Sense strand starting at position 3139 of SEQ ID NO: 1244092
ccugccuucgaggaauuga

SEQ ID NO: 1464333 - RNA, 19 nt, Artificial Sequence
  Description of Artificial Sequence: Synthetic oligonucleotide
  Antisense strand to SEQ ID NO: 1464332
ucaauuccucgaaggcagg

SEQ ID NO: 1464334 - RNA, 19 nt, Artificial Sequence
  Description of Artificial Sequence: Synthetic oligonucleotide
  Sense strand starting at position 3193 of SEQ ID NO: 1244092
cagauuagccagugacaag

SEQ ID NO: 1464335 - RNA, 19 nt, Artificial Sequence
  Description of Artificial Sequence: Synthetic oligonucleotide
  Antisense strand to SEQ ID NO: 1464334
cuugucacuggcuaaucug

SEQ ID NO: 1464336 - RNA, 19 nt, Artificial Sequence
  Description of Artificial Sequence: Synthetic oligonucleotide
  Sense strand starting at position 3480 of SEQ ID NO: 1244092
gguucuaagccuggagcua

SEQ ID NO: 1464337 - RNA, 19 nt, Artificial Sequence
  Description of Artificial Sequence: Synthetic oligonucleotide
  Antisense strand to SEQ ID NO: 1464336
uagcuccaggcuuagaacc

SEQ ID NO: 1464338 - RNA, 19 nt, Artificial Sequence
  Description of Artificial Sequence: Synthetic oligonucleotide
  Sense strand starting at position 3562 of SEQ ID NO: 1244092
uggugacacauuugugcuu

SEQ ID NO: 1464339 - RNA, 19 nt, Artificial Sequence
  Description of Artificial Sequence: Synthetic oligonucleotide
  Antisense strand to SEQ ID NO: 1464338
aagcacaaaugugucacca

SEQ ID NO: 1464340 - RNA, 19 nt, Artificial Sequence
  Description of Artificial Sequence: Synthetic oligonucleotide
  Sense strand starting at position 3563 of SEQ ID NO: 1244092
ggugacacauuugugcuua

SEQ ID NO: 1464341 - RNA, 19 nt, Artificial Sequence
  Description of Artificial Sequence: Synthetic oligonucleotide
  Antisense strand to SEQ ID NO: 1464340
uaagcacaaaugugucacc

SEQ ID NO: 1464342 - RNA, 19 nt, Artificial Sequence
  Description of Artificial Sequence: Synthetic oligonucleotide
  Sense strand starting at position 3565 of SEQ ID NO: 1244092
ugacacauuugugcuuauu

SEQ ID NO: 1464343 - RNA, 19 nt, Artificial Sequence
  Description of Artificial Sequence: Synthetic oligonucleotide
  Antisense strand to SEQ ID NO: 1464342
aauaagcacaaauguguca

SEQ ID NO: 1464344 - RNA, 19 nt, Artificial Sequence
  Description of Artificial Sequence: Synthetic oligonucleotide
  Sense strand starting at position 3587 of SEQ ID NO: 1244092
cuuccuguguaucuugaga

SEQ ID NO: 1464345 - RNA, 19 nt, Artificial Sequence
  Description of Artificial Sequence: Synthetic oligonucleotide
  Antisense strand to SEQ ID NO: 1464344
ucucaagauacacaggaag

SEQ ID NO: 1464346 - RNA, 19 nt, Artificial Sequence
  Description of Artificial Sequence: Synthetic oligonucleotide
  Sense strand starting at position 3609 of SEQ ID NO: 1244092
gggaguauaguuuaugcuu

SEQ ID NO: 1464347 - RNA, 19 nt, Artificial Sequence
  Description of Artificial Sequence: Synthetic oligonucleotide
  Antisense strand to SEQ ID NO: 1464346
aagcauaaacuauacuccc

SEQ ID NO: 1464348 - RNA, 19 nt, Artificial Sequence
  Description of Artificial Sequence: Synthetic oligonucleotide
  Sense strand starting at position 3612 of SEQ ID NO: 1244092
aguauaguuuaugcuucua

SEQ ID NO: 1464349 - RNA, 19 nt, Artificial Sequence
  Description of Artificial Sequence: Synthetic oligonucleotide
  Antisense strand to SEQ ID NO: 1464348
uagaagcauaaacuauacu

SEQ ID NO: 1464350 - RNA, 19 nt, Artificial Sequence
  Description of Artificial Sequence: Synthetic oligonucleotide
  Sense strand starting at position 3659 of SEQ ID NO: 1244092
augaaauguuaggugaauc

SEQ ID NO: 1464351 - RNA, 19 nt, Artificial Sequence
  Description of Artificial Sequence: Synthetic oligonucleotide
  Antisense strand to SEQ ID NO: 1464350
gauucaccuaacauuucau

SEQ ID NO: 1464352 - RNA, 19 nt, Artificial Sequence
  Description of Artificial Sequence: Synthetic oligonucleotide
  Sense strand starting at position 3778 of SEQ ID NO: 1244092
cgucaaagccgugauucuu

SEQ ID NO: 1464353 - RNA, 19 nt, Artificial Sequence
  Description of Artificial Sequence: Synthetic oligonucleotide
  Antisense strand to SEQ ID NO: 1464352
aagaaucacggcuuugacg

SEQ ID NO: 1464354 - RNA, 19 nt, Artificial Sequence
  Description of Artificial Sequence: Synthetic oligonucleotide
  Sense strand starting at position 3841 of SEQ ID NO: 1244092
gagacaaucuggguuguca

SEQ ID NO: 1464355 - RNA, 19 nt, Artificial Sequence
  Description of Artificial Sequence: Synthetic oligonucleotide
  Antisense strand to SEQ ID NO: 1464354
ugacaacccagauugucuc

SEQ ID NO: 1464356 - RNA, 19 nt, Artificial Sequence
  Description of Artificial Sequence: Synthetic oligonucleotide
  Sense strand starting at position 3843 of SEQ ID NO: 1244092
gacaaucuggguugucaca

SEQ ID NO: 1464357 - RNA, 19 nt, Artificial Sequence
  Description of Artificial Sequence: Synthetic oligonucleotide
  Antisense strand to SEQ ID NO: 1464356
ugugacaacccagauuguc

SEQ ID NO: 1464358 - RNA, 19 nt, Artificial Sequence
  Description of Artificial Sequence: Synthetic oligonucleotide
  Sense strand starting at position 134 of SEQ ID NO: 1244093
gcauuuauuuagcaaugga

SEQ ID NO: 1464359 - RNA, 19 nt, Artificial Sequence
  Description of Artificial Sequence: Synthetic oligonucleotide
  Antisense strand to SEQ ID NO: 1464358
uccauugcuaaauaaaugc

SEQ ID NO: 1464360 - RNA, 19 nt, Artificial Sequence
  Description of Artificial Sequence: Synthetic oligonucleotide
  Sense strand starting at position 278 of SEQ ID NO: 1244093
uuuccauguguggguuaca

SEQ ID NO: 1464361 - RNA, 19 nt, Artificial Sequence
  Description of Artificial Sequence: Synthetic oligonucleotide
  Antisense strand to SEQ ID NO: 1464360
uguaacccacacauggaaa

SEQ ID NO: 1464362 - RNA, 19 nt, Artificial Sequence
  Description of Artificial Sequence: Synthetic oligonucleotide
  Sense strand starting at position 281 of SEQ ID NO: 1244093
ccauguguggguuacacuu

SEQ ID NO: 1464363 - RNA, 19 nt, Artificial Sequence
  Description of Artificial Sequence: Synthetic oligonucleotide
  Antisense strand to SEQ ID NO: 1464362
aaguguaacccacacaugg

SEQ ID NO: 1464364 - RNA, 19 nt, Artificial Sequence
  Description of Artificial Sequence: Synthetic oligonucleotide
  Sense strand starting at position 830 of SEQ ID NO: 1244093
uggugacuguaucuguguu

SEQ ID NO: 1464365 - RNA, 19 nt, Artificial Sequence
  Description of Artificial Sequence: Synthetic oligonucleotide
  Antisense strand to SEQ ID NO: 1464364
aacacagauacagucacca

SEQ ID NO: 1464366 - RNA, 19 nt, Artificial Sequence
  Description of Artificial Sequence: Synthetic oligonucleotide
  Sense strand starting at position 831 of SEQ ID NO: 1244093
ggugacuguaucuguguuu

SEQ ID NO: 1464367 - RNA, 19 nt, Artificial Sequence
  Description of Artificial Sequence: Synthetic oligonucleotide
  Antisense strand to SEQ ID NO: 1464366
aaacacagauacagucacc

SEQ ID NO: 1464368 - RNA, 19 nt, Artificial Sequence
  Description of Artificial Sequence: Synthetic oligonucleotide
  Sense strand starting at position 834 of SEQ ID NO: 1244093
gacuguaucuguguuucca

SEQ ID NO: 1464369 - RNA, 19 nt, Artificial Sequence
  Description of Artificial Sequence: Synthetic oligonucleotide
  Antisense strand to SEQ ID NO: 1464368
uggaaacacagauacaguc

SEQ ID NO: 1464370 - RNA, 19 nt, Artificial Sequence
  Description of Artificial Sequence: Synthetic oligonucleotide
  Sense strand starting at position 868 of SEQ ID NO: 1244093
gcaccuuccuuuguuauga

SEQ ID NO: 1464371 - RNA, 19 nt, Artificial Sequence
  Description of Artificial Sequence: Synthetic oligonucleotide
  Antisense strand to SEQ ID NO: 1464370
ucauaacaaaggaaggugc

SEQ ID NO: 1464372 - RNA, 19 nt, Artificial Sequence
  Description of Artificial Sequence: Synthetic oligonucleotide
  Sense strand starting at position 906 of SEQ ID NO: 1244093
cagcaacucgucugugacu

SEQ ID NO: 1464373 - RNA, 19 nt, Artificial Sequence
  Description of Artificial Sequence: Synthetic oligonucleotide
  Antisense strand to SEQ ID NO: 1464372
agucacagacgaguugcug

SEQ ID NO: 1464374 - RNA, 19 nt, Artificial Sequence
  Description of Artificial Sequence: Synthetic oligonucleotide
  Sense strand starting at position 986 of SEQ ID NO: 1244093
agaguucgagcuuggcaaa

SEQ ID NO: 1464375 - RNA, 19 nt, Artificial Sequence
  Description of Artificial Sequence: Synthetic oligonucleotide
  Antisense strand to SEQ ID NO: 1464374
uuugccaagcucgaacucu

SEQ ID NO: 1464376 - RNA, 19 nt, Artificial Sequence
  Description of Artificial Sequence: Synthetic oligonucleotide
  Sense strand starting at position 987 of SEQ ID NO: 1244093
gaguucgagcuuggcaaau

SEQ ID NO: 1464377 - RNA, 19 nt, Artificial Sequence
  Description of Artificial Sequence: Synthetic oligonucleotide
  Antisense strand to SEQ ID NO: 1464376
auuugccaagcucgaacuc

SEQ ID NO: 1464378 - RNA, 19 nt, Artificial Sequence
  Description of Artificial Sequence: Synthetic oligonucleotide
  Sense strand starting at position 1025 of SEQ ID NO: 1244093
gaauguggcccugagagau

SEQ ID NO: 1464379 - RNA, 19 nt, Artificial Sequence
  Description of Artificial Sequence: Synthetic oligonucleotide
  Antisense strand to SEQ ID NO: 1464378
aucucucagggccacauuc

SEQ ID NO: 1464380 - RNA, 19 nt, Artificial Sequence
  Description of Artificial Sequence: Synthetic oligonucleotide
  Sense strand starting at position 1033 of SEQ ID NO: 1244093
cccugagagaugugcgcua

SEQ ID NO: 1464381 - RNA, 19 nt, Artificial Sequence
  Description of Artificial Sequence: Synthetic oligonucleotide
  Antisense strand to SEQ ID NO: 1464380
uagcgcacaucucucaggg

SEQ ID NO: 1464382 - RNA, 19 nt, Artificial Sequence
  Description of Artificial Sequence: Synthetic oligonucleotide
  Sense strand starting at position 1038 of SEQ ID NO: 1244093
agagaugugcgcuaggaug

SEQ ID NO: 1464383 - RNA, 19 nt, Artificial Sequence
  Description of Artificial Sequence: Synthetic oligonucleotide
  Antisense strand to SEQ ID NO: 1464382
cauccuagcgcacaucucu

SEQ ID NO: 1464384 - RNA, 19 nt, Artificial Sequence
  Description of Artificial Sequence: Synthetic oligonucleotide
  Sense strand starting at position 1414 of SEQ ID NO: 1244093
aucuuaagucucugucuuu

SEQ ID NO: 1464385 - RNA, 19 nt, Artificial Sequence
  Description of Artificial Sequence: Synthetic oligonucleotide
  Antisense strand to SEQ ID NO: 1464384
aaagacagagacuuaagau

SEQ ID NO: 1464386 - RNA, 19 nt, Artificial Sequence
  Description of Artificial Sequence: Synthetic oligonucleotide
  Sense strand starting at position 1417 of SEQ ID NO: 1244093
uuaagucucugucuuugaa

SEQ ID NO: 1464387 - RNA, 19 nt, Artificial Sequence
  Description of Artificial Sequence: Synthetic oligonucleotide
  Antisense strand to SEQ ID NO: 1464386
uucaaagacagagacuuaa

SEQ ID NO: 1464388 - RNA, 19 nt, Artificial Sequence
  Description of Artificial Sequence: Synthetic oligonucleotide
  Sense strand starting at position 1419 of SEQ ID NO: 1244093
aagucucugucuuugaagu

SEQ ID NO: 1464389 - RNA, 19 nt, Artificial Sequence
  Description of Artificial Sequence: Synthetic oligonucleotide
  Antisense strand to SEQ ID NO: 1464388
acuucaaagacagagacuu

SEQ ID NO: 1464390 - RNA, 19 nt, Artificial Sequence
  Description of Artificial Sequence: Synthetic oligonucleotide
  Sense strand starting at position 1420 of SEQ ID NO: 1244093
agucucugucuuugaaguu

SEQ ID NO: 1464391 - RNA, 19 nt, Artificial Sequence
  Description of Artificial Sequence: Synthetic oligonucleotide
  Antisense strand to SEQ ID NO: 1464390
aacuucaaagacagagacu

SEQ ID NO: 1464392 - RNA, 19 nt, Artificial Sequence
  Description of Artificial Sequence: Synthetic oligonucleotide
  Sense strand starting at position 1731 of SEQ ID NO: 1244093
gagagauguccacaggccu

SEQ ID NO: 1464393 - RNA, 19 nt, Artificial Sequence
  Description of Artificial Sequence: Synthetic oligonucleotide
  Antisense strand to SEQ ID NO: 1464392
aggccuguggacaucucuc

SEQ ID NO: 1464394 - RNA, 19 nt, Artificial Sequence
  Description of Artificial Sequence: Synthetic oligonucleotide
  Sense strand starting at position 1769 of SEQ ID NO: 1244093
aaggccuaucgggauacuu

SEQ ID NO: 1464395 - RNA, 19 nt, Artificial Sequence
  Description of Artificial Sequence: Synthetic oligonucleotide
  Antisense strand to SEQ ID NO: 1464394
aaguaucccgauaggccuu

SEQ ID NO: 1464396 - RNA, 19 nt, Artificial Sequence
  Description of Artificial Sequence: Synthetic oligonucleotide
  Sense strand starting at position 1771 of SEQ ID NO: 1244093
ggccuaucgggauacuuau

SEQ ID NO: 1464397 - RNA, 19 nt, Artificial Sequence
  Description of Artificial Sequence: Synthetic oligonucleotide
  Antisense strand to SEQ ID NO: 1464396
auaaguaucccgauaggcc

SEQ ID NO: 1464398 - RNA, 19 nt, Artificial Sequence
  Description of Artificial Sequence: Synthetic oligonucleotide
  Sense strand starting at position 1780 of SEQ ID NO: 1244093
ggauacuuaucccacugga

SEQ ID NO: 1464399 - RNA, 19 nt, Artificial Sequence
  Description of Artificial Sequence: Synthetic oligonucleotide
  Antisense strand to SEQ ID NO: 1464398
uccagugggauaaguaucc

SEQ ID NO: 1464400 - RNA, 19 nt, Artificial Sequence
  Description of Artificial Sequence: Synthetic oligonucleotide
  Sense strand starting at position 1994 of SEQ ID NO: 1244093
ugcuuuaugcagggacaga

SEQ ID NO: 1464401 - RNA, 19 nt, Artificial Sequence
  Description of Artificial Sequence: Synthetic oligonucleotide
  Antisense strand to SEQ ID NO: 1464400
ucugucccugcauaaagca

SEQ ID NO: 1464402 - RNA, 19 nt, Artificial Sequence
  Description of Artificial Sequence: Synthetic oligonucleotide
  Sense strand starting at position 2320 of SEQ ID NO: 1244093
ugucaucaucaccgucauu

SEQ ID NO: 1464403 - RNA, 19 nt, Artificial Sequence
  Description of Artificial Sequence: Synthetic oligonucleotide
  Antisense strand to SEQ ID NO: 1464402
aaugacggugaugaugaca

SEQ ID NO: 1464404 - RNA, 19 nt, Artificial Sequence
  Description of Artificial Sequence: Synthetic oligonucleotide
  Sense strand starting at position 2454 of SEQ ID NO: 1244093
gcuugucagccugugugua

SEQ ID NO: 1464405 - RNA, 19 nt, Artificial Sequence
  Description of Artificial Sequence: Synthetic oligonucleotide
  Antisense strand to SEQ ID NO: 1464404
uacacacaggcugacaagc

SEQ ID NO: 1464406 - RNA, 19 nt, Artificial Sequence
  Description of Artificial Sequence: Synthetic oligonucleotide
  Sense strand starting at position 2467 of SEQ ID NO: 1244093
uguguauugcugccuuacu

SEQ ID NO: 1464407 - RNA, 19 nt, Artificial Sequence
  Description of Artificial Sequence: Synthetic oligonucleotide
  Antisense strand to SEQ ID NO: 1464406
aguaaggcagcaauacaca

SEQ ID NO: 1464408 - RNA, 19 nt, Artificial Sequence
  Description of Artificial Sequence: Synthetic oligonucleotide
  Sense strand starting at position 2523 of SEQ ID NO: 1244093
gcuagaagcagaugucuga

SEQ ID NO: 1464409 - RNA, 19 nt, Artificial Sequence
  Description of Artificial Sequence: Synthetic oligonucleotide
  Antisense strand to SEQ ID NO: 1464408
ucagacaucugcuucuagc

SEQ ID NO: 1464410 - RNA, 19 nt, Artificial Sequence
  Description of Artificial Sequence: Synthetic oligonucleotide
  Sense strand starting at position 2526 of SEQ ID NO: 1244093
agaagcagaugucugagua

SEQ ID NO: 1464411 - RNA, 19 nt, Artificial Sequence
  Description of Artificial Sequence: Synthetic oligonucleotide
  Antisense strand to SEQ ID NO: 1464410
uacucagacaucugcuucu

SEQ ID NO: 1464412 - RNA, 19 nt, Artificial Sequence
  Description of Artificial Sequence: Synthetic oligonucleotide
  Sense strand starting at position 2527 of SEQ ID NO: 1244093
gaagcagaugucugaguag

SEQ ID NO: 1464413 - RNA, 19 nt, Artificial Sequence
  Description of Artificial Sequence: Synthetic oligonucleotide
  Antisense strand to SEQ ID NO: 1464412
cuacucagacaucugcuuc

SEQ ID NO: 1464414 - RNA, 19 nt, Artificial Sequence
  Description of Artificial Sequence: Synthetic oligonucleotide
  Sense strand starting at position 2530 of SEQ ID NO: 1244093
gcagaugucugaguaggca

SEQ ID NO: 1464415 - RNA, 19 nt, Artificial Sequence
  Description of Artificial Sequence: Synthetic oligonucleotide
  Antisense strand to SEQ ID NO: 1464414
ugccuacucagacaucugc

SEQ ID NO: 1464416 - RNA, 19 nt, Artificial Sequence
  Description of Artificial Sequence: Synthetic oligonucleotide
  Sense strand starting at position 2593 of SEQ ID NO: 1244093
cgucucugcuucucacaga

SEQ ID NO: 1464417 - RNA, 19 nt, Artificial Sequence
  Description of Artificial Sequence: Synthetic oligonucleotide
  Antisense strand to SEQ ID NO: 1464416
ucugugagaagcagagacg

SEQ ID NO: 1464418 - RNA, 19 nt, Artificial Sequence
  Description of Artificial Sequence: Synthetic oligonucleotide
  Sense strand starting at position 2734 of SEQ ID NO: 1244093
gcuuaaaucucugccuaga

SEQ ID NO: 1464419 - RNA, 19 nt, Artificial Sequence
  Description of Artificial Sequence: Synthetic oligonucleotide
  Antisense strand to SEQ ID NO: 1464418
ucuaggcagagauuuaagc

SEQ ID NO: 1464420 - RNA, 19 nt, Artificial Sequence
  Description of Artificial Sequence: Synthetic oligonucleotide
  Sense strand starting at position 2736 of SEQ ID NO: 1244093
uuaaaucucugccuagaag

SEQ ID NO: 1464421 - RNA, 19 nt, Artificial Sequence
  Description of Artificial Sequence: Synthetic oligonucleotide
  Antisense strand to SEQ ID NO: 1464420
cuucuaggcagagauuuaa

SEQ ID NO: 1464422 - RNA, 19 nt, Artificial Sequence
  Description of Artificial Sequence: Synthetic oligonucleotide
  Sense strand starting at position 2789 of SEQ ID NO: 1244093
gucacauugcuagaggaca

SEQ ID NO: 1464423 - RNA, 19 nt, Artificial Sequence
  Description of Artificial Sequence: Synthetic oligonucleotide
  Antisense strand to SEQ ID NO: 1464422
uguccucuagcaaugugac

SEQ ID NO: 1464424 - RNA, 19 nt, Artificial Sequence
  Description of Artificial Sequence: Synthetic oligonucleotide
  Sense strand starting at position 2858 of SEQ ID NO: 1244093
ugcauaugugcagguauaa

SEQ ID NO: 1464425 - RNA, 19 nt, Artificial Sequence
  Description of Artificial Sequence: Synthetic oligonucleotide
  Antisense strand to SEQ ID NO: 1464424
uuauaccugcacauaugca

SEQ ID NO: 1464426 - RNA, 19 nt, Artificial Sequence
  Description of Artificial Sequence: Synthetic oligonucleotide
  Sense strand starting at position 2906 of SEQ ID NO: 1244093
ccuugaggcucuucuuagu

SEQ ID NO: 1464427 - RNA, 19 nt, Artificial Sequence
  Description of Artificial Sequence: Synthetic oligonucleotide
  Antisense strand to SEQ ID NO: 1464426
acuaagaagagccucaagg

SEQ ID NO: 1464428 - RNA, 19 nt, Artificial Sequence
  Description of Artificial Sequence: Synthetic oligonucleotide
  Sense strand starting at position 2950 of SEQ ID NO: 1244093
cccugaaugcugugaagag

SEQ ID NO: 1464429 - RNA, 19 nt, Artificial Sequence
  Description of Artificial Sequence: Synthetic oligonucleotide
  Antisense strand to SEQ ID NO: 1464428
cucuucacagcauucaggg

SEQ ID NO: 1464430 - RNA, 19 nt, Artificial Sequence
  Description of Artificial Sequence: Synthetic oligonucleotide
  Sense strand starting at position 3418 of SEQ ID NO: 1244093
ucucuaugucuugaaacag

SEQ ID NO: 1464431 - RNA, 19 nt, Artificial Sequence
  Description of Artificial Sequence: Synthetic oligonucleotide
  Antisense strand to SEQ ID NO: 1464430
cuguuucaagacauagaga

SEQ ID NO: 1464432 - RNA, 19 nt, Artificial Sequence
  Description of Artificial Sequence: Synthetic oligonucleotide
  Sense strand starting at position 3640 of SEQ ID NO: 1244093
gucccuucuccuuaggaga

SEQ ID NO: 1464433 - RNA, 19 nt, Artificial Sequence
  Description of Artificial Sequence: Synthetic oligonucleotide
  Antisense strand to SEQ ID NO: 1464432
ucuccuaaggagaagggac

SEQ ID NO: 1464434 - RNA, 19 nt, Artificial Sequence
  Description of Artificial Sequence: Synthetic oligonucleotide
  Sense strand starting at position 3682 of SEQ ID NO: 1244093
gugggaagguugucguuag

SEQ ID NO: 1464435 - RNA, 19 nt, Artificial Sequence
  Description of Artificial Sequence: Synthetic oligonucleotide
  Antisense strand to SEQ ID NO: 1464434
cuaacgacaaccuucccac

SEQ ID NO: 1464436 - RNA, 19 nt, Artificial Sequence
  Description of Artificial Sequence: Synthetic oligonucleotide
  Sense strand starting at position 3685 of SEQ ID NO: 1244093
ggaagguugucguuaggcu

SEQ ID NO: 1464437 - RNA, 19 nt, Artificial Sequence
  Description of Artificial Sequence: Synthetic oligonucleotide
  Antisense strand to SEQ ID NO: 1464436
agccuaacgacaaccuucc

SEQ ID NO: 1464438 - RNA, 19 nt, Artificial Sequence
  Description of Artificial Sequence: Synthetic oligonucleotide
  Sense strand starting at position 148 of SEQ ID NO: 1244094
augagaagagcucgcuaaa

SEQ ID NO: 1464439 - RNA, 19 nt, Artificial Sequence
  Description of Artificial Sequence: Synthetic oligonucleotide
  Antisense strand to SEQ ID NO: 1464438
uuuagcgagcucuucucau

SEQ ID NO: 1464440 - RNA, 19 nt, Artificial Sequence
  Description of Artificial Sequence: Synthetic oligonucleotide
  Sense strand starting at position 151 of SEQ ID NO: 1244094
agaagagcucgcuaaauua

SEQ ID NO: 1464441 - RNA, 19 nt, Artificial Sequence
  Description of Artificial Sequence: Synthetic oligonucleotide
  Antisense strand to SEQ ID NO: 1464440
uaauuuagcgagcucuucu

SEQ ID NO: 1464442 - RNA, 19 nt, Artificial Sequence
  Description of Artificial Sequence: Synthetic oligonucleotide
  Sense strand starting at position 220 of SEQ ID NO: 1244094
aacgguuuccaguggaaau

SEQ ID NO: 1464443 - RNA, 19 nt, Artificial Sequence
  Description of Artificial Sequence: Synthetic oligonucleotide
  Antisense strand to SEQ ID NO: 1464442
auuuccacuggaaaccguu

SEQ ID NO: 1464444 - RNA, 19 nt, Artificial Sequence
  Description of Artificial Sequence: Synthetic oligonucleotide
  Sense strand starting at position 221 of SEQ ID NO: 1244094
acgguuuccaguggaaaua

SEQ ID NO: 1464445 - RNA, 19 nt, Artificial Sequence
  Description of Artificial Sequence: Synthetic oligonucleotide
  Antisense strand to SEQ ID NO: 1464444
uauuuccacuggaaaccgu

SEQ ID NO: 1464446 - RNA, 19 nt, Artificial Sequence
  Description of Artificial Sequence: Synthetic oligonucleotide
  Sense strand starting at position 222 of SEQ ID NO: 1244094
cgguuuccaguggaaauaa

SEQ ID NO: 1464447 - RNA, 19 nt, Artificial Sequence
  Description of Artificial Sequence: Synthetic oligonucleotide
  Antisense strand to SEQ ID NO: 1464446
uuauuuccacuggaaaccg

SEQ ID NO: 1464448 - RNA, 19 nt, Artificial Sequence
  Description of Artificial Sequence: Synthetic oligonucleotide
  Sense strand starting at position 279 of SEQ ID NO: 1244094
uuccgugcauuucuuaaau

SEQ ID NO: 1464449 - RNA, 19 nt, Artificial Sequence
  Description of Artificial Sequence: Synthetic oligonucleotide
  Antisense strand to SEQ ID NO: 1464448
auuuaagaaaugcacggaa

SEQ ID NO: 1464450 - RNA, 19 nt, Artificial Sequence
  Description of Artificial Sequence: Synthetic oligonucleotide
  Sense strand starting at position 293 of SEQ ID NO: 1244094
uaaauuaagguguguggau

SEQ ID NO: 1464451 - RNA, 19 nt, Artificial Sequence
  Description of Artificial Sequence: Synthetic oligonucleotide
  Antisense strand to SEQ ID NO: 1464450
auccacacaccuuaauuua

SEQ ID NO: 1464452 - RNA, 19 nt, Artificial Sequence
  Description of Artificial Sequence: Synthetic oligonucleotide
  Sense strand starting at position 335 of SEQ ID NO: 1244094
uguugauugguugauaaca

SEQ ID NO: 1464453 - RNA, 19 nt, Artificial Sequence
  Description of Artificial Sequence: Synthetic oligonucleotide
  Antisense strand to SEQ ID NO: 1464452
uguuaucaaccaaucaaca

SEQ ID NO: 1464454 - RNA, 19 nt, Artificial Sequence
  Description of Artificial Sequence: Synthetic oligonucleotide
  Sense strand starting at position 517 of SEQ ID NO: 1244094
ccggcauccaaagaaaguu

SEQ ID NO: 1464455 - RNA, 19 nt, Artificial Sequence
  Description of Artificial Sequence: Synthetic oligonucleotide
  Antisense strand to SEQ ID NO: 1464454
aacuuucuuuggaugccgg

SEQ ID NO: 1464456 - RNA, 19 nt, Artificial Sequence
  Description of Artificial Sequence: Synthetic oligonucleotide
  Sense strand starting at position 563 of SEQ ID NO: 1244094
cggaaucuaucagcaucaa

SEQ ID NO: 1464457 - RNA, 19 nt, Artificial Sequence
  Description of Artificial Sequence: Synthetic oligonucleotide
  Antisense strand to SEQ ID NO: 1464456
uugaugcugauagauuccg

SEQ ID NO: 1464458 - RNA, 19 nt, Artificial Sequence
  Description of Artificial Sequence: Synthetic oligonucleotide
  Sense strand starting at position 585 of SEQ ID NO: 1244094
ggcuucuaacggcaaucau

SEQ ID NO: 1464459 - RNA, 19 nt, Artificial Sequence
  Description of Artificial Sequence: Synthetic oligonucleotide
  Antisense strand to SEQ ID NO: 1464458
augauugccguuagaagcc

SEQ ID NO: 1464460 - RNA, 19 nt, Artificial Sequence
  Description of Artificial Sequence: Synthetic oligonucleotide
  Sense strand starting at position 648 of SEQ ID NO: 1244094
ccucaaauacgcugaacau

SEQ ID NO: 1464461 - RNA, 19 nt, Artificial Sequence
  Description of Artificial Sequence: Synthetic oligonucleotide
  Antisense strand to SEQ ID NO: 1464460
auguucagcguauuugagg

SEQ ID NO: 1464462 - RNA, 19 nt, Artificial Sequence
  Description of Artificial Sequence: Synthetic oligonucleotide
  Sense strand starting at position 649 of SEQ ID NO: 1244094
cucaaauacgcugaacauu

SEQ ID NO: 1464463 - RNA, 19 nt, Artificial Sequence
  Description of Artificial Sequence: Synthetic oligonucleotide
  Antisense strand to SEQ ID NO: 1464462
aauguucagcguauuugag

SEQ ID NO: 1464464 - RNA, 19 nt, Artificial Sequence
  Description of Artificial Sequence: Synthetic oligonucleotide
  Sense strand starting at position 716 of SEQ ID NO: 1244094
aggguauugguucaaguau

SEQ ID NO: 1464465 - RNA, 19 nt, Artificial Sequence
  Description of Artificial Sequence: Synthetic oligonucleotide
  Antisense strand to SEQ ID NO: 1464464
auacuugaaccaauacccu

SEQ ID NO: 1464466 - RNA, 19 nt, Artificial Sequence
  Description of Artificial Sequence: Synthetic oligonucleotide
  Sense strand starting at position 1203 of SEQ ID NO: 1244094
gacaaucaguaccuggaau

SEQ ID NO: 1464467 - RNA, 19 nt, Artificial Sequence
  Description of Artificial Sequence: Synthetic oligonucleotide
  Antisense strand to SEQ ID NO: 1464466
auuccagguacugauuguc

SEQ ID NO: 1464468 - RNA, 19 nt, Artificial Sequence
  Description of Artificial Sequence: Synthetic oligonucleotide
  Sense strand starting at position 1205 of SEQ ID NO: 1244094
caaucaguaccuggaauga

SEQ ID NO: 1464469 - RNA, 19 nt, Artificial Sequence
  Description of Artificial Sequence: Synthetic oligonucleotide
  Antisense strand to SEQ ID NO: 1464468
ucauuccagguacugauug

SEQ ID NO: 1464470 - RNA, 19 nt, Artificial Sequence
  Description of Artificial Sequence: Synthetic oligonucleotide
  Sense strand starting at position 1231 of SEQ ID NO: 1244094
gccuuacuucuagaacgug

SEQ ID NO: 1464471 - RNA, 19 nt, Artificial Sequence
  Description of Artificial Sequence: Synthetic oligonucleotide
  Antisense strand to SEQ ID NO: 1464470
cacguucuagaaguaaggc

SEQ ID NO: 1464472 - RNA, 19 nt, Artificial Sequence
  Description of Artificial Sequence: Synthetic oligonucleotide
  Sense strand starting at position 1254 of SEQ ID NO: 1244094
agccaugacucaguaaaga

SEQ ID NO: 1464473 - RNA, 19 nt, Artificial Sequence
  Description of Artificial Sequence: Synthetic oligonucleotide
  Antisense strand to SEQ ID NO: 1464472
ucuuuacugagucauggcu

SEQ ID NO: 1464474 - RNA, 19 nt, Artificial Sequence
  Description of Artificial Sequence: Synthetic oligonucleotide
  Sense strand starting at position 1635 of SEQ ID NO: 1244094
caaugagguggugguaaau

SEQ ID NO: 1464475 - RNA, 19 nt, Artificial Sequence
  Description of Artificial Sequence: Synthetic oligonucleotide
  Antisense strand to SEQ ID NO: 1464474
auuuaccaccaccucauug

SEQ ID NO: 1464476 - RNA, 19 nt, Artificial Sequence
  Description of Artificial Sequence: Synthetic oligonucleotide
  Sense strand starting at position 1645 of SEQ ID NO: 1244094
gugguaaauuggccucaga

SEQ ID NO: 1464477 - RNA, 19 nt, Artificial Sequence
  Description of Artificial Sequence: Synthetic oligonucleotide
  Antisense strand to SEQ ID NO: 1464476
ucugaggccaauuuaccac

SEQ ID NO: 1464478 - RNA, 19 nt, Artificial Sequence
  Description of Artificial Sequence: Synthetic oligonucleotide
  Sense strand starting at position 1817 of SEQ ID NO: 1244094
cugggaauucuaggugucu

SEQ ID NO: 1464479 - RNA, 19 nt, Artificial Sequence
  Description of Artificial Sequence: Synthetic oligonucleotide
  Antisense strand to SEQ ID NO: 1464478
agacaccuagaauucccag

SEQ ID NO: 1464480 - RNA, 19 nt, Artificial Sequence
  Description of Artificial Sequence: Synthetic oligonucleotide
  Sense strand starting at position 1822 of SEQ ID NO: 1244094
aauucuaggugucuggaaa

SEQ ID NO: 1464481 - RNA, 19 nt, Artificial Sequence
  Description of Artificial Sequence: Synthetic oligonucleotide
  Antisense strand to SEQ ID NO: 1464480
uuuccagacaccuagaauu

SEQ ID NO: 1464482 - RNA, 19 nt, Artificial Sequence
  Description of Artificial Sequence: Synthetic oligonucleotide
  Sense strand starting at position 1823 of SEQ ID NO: 1244094
auucuaggugucuggaaag

SEQ ID NO: 1464483 - RNA, 19 nt, Artificial Sequence
  Description of Artificial Sequence: Synthetic oligonucleotide
  Antisense strand to SEQ ID NO: 1464482
cuuuccagacaccuagaau

SEQ ID NO: 1464484 - RNA, 19 nt, Artificial Sequence
  Description of Artificial Sequence: Synthetic oligonucleotide
  Sense strand starting at position 1988 of SEQ ID NO: 1244094
aacugaaaguuguccaggu

SEQ ID NO: 1464485 - RNA, 19 nt, Artificial Sequence
  Description of Artificial Sequence: Synthetic oligonucleotide
  Antisense strand to SEQ ID NO: 1464484
accuggacaacuuucaguu

SEQ ID NO: 1464486 - RNA, 19 nt, Artificial Sequence
  Description of Artificial Sequence: Synthetic oligonucleotide
  Sense strand starting at position 1990 of SEQ ID NO: 1244094
cugaaaguuguccaggugu

SEQ ID NO: 1464487 - RNA, 19 nt, Artificial Sequence
  Description of Artificial Sequence: Synthetic oligonucleotide
  Antisense strand to SEQ ID NO: 1464486
acaccuggacaacuuucag

SEQ ID NO: 1464488 - RNA, 19 nt, Artificial Sequence
  Description of Artificial Sequence: Synthetic oligonucleotide
  Sense strand starting at position 2450 of SEQ ID NO: 1244094
guaggagauccugguaugu

SEQ ID NO: 1464489 - RNA, 19 nt, Artificial Sequence
  Description of Artificial Sequence: Synthetic oligonucleotide
  Antisense strand to SEQ ID NO: 1464488
acauaccaggaucuccuac

SEQ ID NO: 1464490 - RNA, 19 nt, Artificial Sequence
  Description of Artificial Sequence: Synthetic oligonucleotide
  Sense strand starting at position 2476 of SEQ ID NO: 1244094
gugagugugggccagacaa

SEQ ID NO: 1464491 - RNA, 19 nt, Artificial Sequence
  Description of Artificial Sequence: Synthetic oligonucleotide
  Antisense strand to SEQ ID NO: 1464490
uugucuggcccacacucac

SEQ ID NO: 1464492 - RNA, 19 nt, Artificial Sequence
  Description of Artificial Sequence: Synthetic oligonucleotide
  Sense strand starting at position 2525 of SEQ ID NO: 1244094
aauccaguguguuuggaau

SEQ ID NO: 1464493 - RNA, 19 nt, Artificial Sequence
  Description of Artificial Sequence: Synthetic oligonucleotide
  Antisense strand to SEQ ID NO: 1464492
auuccaaacacacuggauu

SEQ ID NO: 1464494 - RNA, 19 nt, Artificial Sequence
  Description of Artificial Sequence: Synthetic oligonucleotide
  Sense strand starting at position 2531 of SEQ ID NO: 1244094
guguguuuggaauagagaa

SEQ ID NO: 1464495 - RNA, 19 nt, Artificial Sequence
  Description of Artificial Sequence: Synthetic oligonucleotide
  Antisense strand to SEQ ID NO: 1464494
uucucuauuccaaacacac

SEQ ID NO: 1464496 - RNA, 19 nt, Artificial Sequence
  Description of Artificial Sequence: Synthetic oligonucleotide
  Sense strand starting at position 2552 of SEQ ID NO: 1244094
ggaauaugaguagguauca

SEQ ID NO: 1464497 - RNA, 19 nt, Artificial Sequence
  Description of Artificial Sequence: Synthetic oligonucleotide
  Antisense strand to SEQ ID NO: 1464496
ugauaccuacucauauucc

SEQ ID NO: 1464498 - RNA, 19 nt, Artificial Sequence
  Description of Artificial Sequence: Synthetic oligonucleotide
  Sense strand starting at position 2553 of SEQ ID NO: 1244094
gaauaugaguagguaucaa

SEQ ID NO: 1464499 - RNA, 19 nt, Artificial Sequence
  Description of Artificial Sequence: Synthetic oligonucleotide
  Antisense strand to SEQ ID NO: 1464498
uugauaccuacucauauuc

SEQ ID NO: 1464500 - RNA, 19 nt, Artificial Sequence
  Description of Artificial Sequence: Synthetic oligonucleotide
  Sense strand starting at position 2776 of SEQ ID NO: 1244094
uggucuuccuuaucuggau

SEQ ID NO: 1464501 - RNA, 19 nt, Artificial Sequence
  Description of Artificial Sequence: Synthetic oligonucleotide
  Antisense strand to SEQ ID NO: 1464500
auccagauaaggaagacca

SEQ ID NO: 1464502 - RNA, 19 nt, Artificial Sequence
  Description of Artificial Sequence: Synthetic oligonucleotide
  Sense strand starting at position 3344 of SEQ ID NO: 1244094
ugugcuaaugcucacaaca

SEQ ID NO: 1464503 - RNA, 19 nt, Artificial Sequence
  Description of Artificial Sequence: Synthetic oligonucleotide
  Antisense strand to SEQ ID NO: 1464502
uguugugagcauuagcaca

SEQ ID NO: 1464504 - RNA, 19 nt, Artificial Sequence
  Description of Artificial Sequence: Synthetic oligonucleotide
  Sense strand starting at position 3460 of SEQ ID NO: 1244094
gaacccagaucguuguuga

SEQ ID NO: 1464505 - RNA, 19 nt, Artificial Sequence
  Description of Artificial Sequence: Synthetic oligonucleotide
  Antisense strand to SEQ ID NO: 1464504
ucaacaacgaucuggguuc

SEQ ID NO: 1464506 - RNA, 19 nt, Artificial Sequence
  Description of Artificial Sequence: Synthetic oligonucleotide
  Sense strand starting at position 3617 of SEQ ID NO: 1244094
gcuggacuugggcaaauau

SEQ ID NO: 1464507 - RNA, 19 nt, Artificial Sequence
  Description of Artificial Sequence: Synthetic oligonucleotide
  Antisense strand to SEQ ID NO: 1464506
auauuugcccaaguccagc

SEQ ID NO: 1464508 - RNA, 19 nt, Artificial Sequence
  Description of Artificial Sequence: Synthetic oligonucleotide
  Sense strand starting at position 3748 of SEQ ID NO: 1244094
gggaauagcagcugauacu

SEQ ID NO: 1464509 - RNA, 19 nt, Artificial Sequence
  Description of Artificial Sequence: Synthetic oligonucleotide
  Antisense strand to SEQ ID NO: 1464508
aguaucagcugcuauuccc

SEQ ID NO: 1464510 - RNA, 19 nt, Artificial Sequence
  Description of Artificial Sequence: Synthetic oligonucleotide
  Sense strand starting at position 3792 of SEQ ID NO: 1244094
gcccucgugagauaaggau

SEQ ID NO: 1464511 - RNA, 19 nt, Artificial Sequence
  Description of Artificial Sequence: Synthetic oligonucleotide
  Antisense strand to SEQ ID NO: 1464510
auccuuaucucacgagggc

SEQ ID NO: 1464512 - RNA, 19 nt, Artificial Sequence
  Description of Artificial Sequence: Synthetic oligonucleotide
  Sense strand starting at position 3801 of SEQ ID NO: 1244094
agauaaggauuccuugcua

SEQ ID NO: 1464513 - RNA, 19 nt, Artificial Sequence
  Description of Artificial Sequence: Synthetic oligonucleotide
  Antisense strand to SEQ ID NO: 1464512
uagcaaggaauccuuaucu

SEQ ID NO: 1464514 - RNA, 19 nt, Artificial Sequence
  Description of Artificial Sequence: Synthetic oligonucleotide
  Sense strand starting at position 3808 of SEQ ID NO: 1244094
gauuccuugcuauaggacu

SEQ ID NO: 1464515 - RNA, 19 nt, Artificial Sequence
  Description of Artificial Sequence: Synthetic oligonucleotide
  Antisense strand to SEQ ID NO: 1464514
aguccuauagcaaggaauc

SEQ ID NO: 1464516 - RNA, 19 nt, Artificial Sequence
  Description of Artificial Sequence: Synthetic oligonucleotide
  Sense strand starting at position 3841 of SEQ ID NO: 1244094
ccauguuggccucagaaag

SEQ ID NO: 1464517 - RNA, 19 nt, Artificial Sequence
  Description of Artificial Sequence: Synthetic oligonucleotide
  Antisense strand to SEQ ID NO: 1464516
cuuucugaggccaacaugg

SEQ ID NO: 1464518 - RNA, 19 nt, Artificial Sequence
  Description of Artificial Sequence: Synthetic oligonucleotide
  Sense strand starting at position 2 of SEQ ID NO: 1244095
auccuaguucuggguuaaa

SEQ ID NO: 1464519 - RNA, 19 nt, Artificial Sequence
  Description of Artificial Sequence: Synthetic oligonucleotide
  Antisense strand to SEQ ID NO: 1464518
uuuaacccagaacuaggau

SEQ ID NO: 1464520 - RNA, 19 nt, Artificial Sequence
  Description of Artificial Sequence: Synthetic oligonucleotide
  Sense strand starting at position 5 of SEQ ID NO: 1244095
cuaguucuggguuaaagua

SEQ ID NO: 1464521 - RNA, 19 nt, Artificial Sequence
  Description of Artificial Sequence: Synthetic oligonucleotide
  Antisense strand to SEQ ID NO: 1464520
uacuuuaacccagaacuag

SEQ ID NO: 1464522 - RNA, 19 nt, Artificial Sequence
  Description of Artificial Sequence: Synthetic oligonucleotide
  Sense strand starting at position 130 of SEQ ID NO: 1244095
uugacucagucuuugaaag

SEQ ID NO: 1464523 - RNA, 19 nt, Artificial Sequence
  Description of Artificial Sequence: Synthetic oligonucleotide
  Antisense strand to SEQ ID NO: 1464522
cuuucaaagacugagucaa

SEQ ID NO: 1464524 - RNA, 19 nt, Artificial Sequence
  Description of Artificial Sequence: Synthetic oligonucleotide
  Sense strand starting at position 223 of SEQ ID NO: 1244095
ccaaguaaucuggguacug

SEQ ID NO: 1464525 - RNA, 19 nt, Artificial Sequence
  Description of Artificial Sequence: Synthetic oligonucleotide
  Antisense strand to SEQ ID NO: 1464524
caguacccagauuacuugg

SEQ ID NO: 1464526 - RNA, 19 nt, Artificial Sequence
  Description of Artificial Sequence: Synthetic oligonucleotide
  Sense strand starting at position 225 of SEQ ID NO: 1244095
aaguaaucuggguacugcu

SEQ ID NO: 1464527 - RNA, 19 nt, Artificial Sequence
  Description of Artificial Sequence: Synthetic oligonucleotide
  Antisense strand to SEQ ID NO: 1464526
agcaguacccagauuacuu

SEQ ID NO: 1464528 - RNA, 19 nt, Artificial Sequence
  Description of Artificial Sequence: Synthetic oligonucleotide
  Sense strand starting at position 238 of SEQ ID NO: 1244095
acugcucuuggucacuuaa

SEQ ID NO: 1464529 - RNA, 19 nt, Artificial Sequence
  Description of Artificial Sequence: Synthetic oligonucleotide
  Antisense strand to SEQ ID NO: 1464528
uuaagugaccaagagcagu

SEQ ID NO: 1464530 - RNA, 19 nt, Artificial Sequence
  Description of Artificial Sequence: Synthetic oligonucleotide
  Sense strand starting at position 350 of SEQ ID NO: 1244095
gacuguaucagagaggucu

SEQ ID NO: 1464531 - RNA, 19 nt, Artificial Sequence
  Description of Artificial Sequence: Synthetic oligonucleotide
  Antisense strand to SEQ ID NO: 1464530
agaccucucugauacaguc

SEQ ID NO: 1464532 - RNA, 19 nt, Artificial Sequence
  Description of Artificial Sequence: Synthetic oligonucleotide
  Sense strand starting at position 352 of SEQ ID NO: 1244095
cuguaucagagaggucuga

SEQ ID NO: 1464533 - RNA, 19 nt, Artificial Sequence
  Description of Artificial Sequence: Synthetic oligonucleotide
  Antisense strand to SEQ ID NO: 1464532
ucagaccucucugauacag

SEQ ID NO: 1464534 - RNA, 19 nt, Artificial Sequence
  Description of Artificial Sequence: Synthetic oligonucleotide
  Sense strand starting at position 356 of SEQ ID NO: 1244095
aucagagaggucugagcua

SEQ ID NO: 1464535 - RNA, 19 nt, Artificial Sequence
  Description of Artificial Sequence: Synthetic oligonucleotide
  Antisense strand to SEQ ID NO: 1464534
uagcucagaccucucugau

SEQ ID NO: 1464536 - RNA, 19 nt, Artificial Sequence
  Description of Artificial Sequence: Synthetic oligonucleotide
  Sense strand starting at position 513 of SEQ ID NO: 1244095
aggaauaacugagaucaga

SEQ ID NO: 1464537 - RNA, 19 nt, Artificial Sequence
  Description of Artificial Sequence: Synthetic oligonucleotide
  Antisense strand to SEQ ID NO: 1464536
ucugaucucaguuauuccu

SEQ ID NO: 1464538 - RNA, 19 nt, Artificial Sequence
  Description of Artificial Sequence: Synthetic oligonucleotide
  Sense strand starting at position 612 of SEQ ID NO: 1244095
cagucuugauagccaagga

SEQ ID NO: 1464539 - RNA, 19 nt, Artificial Sequence
  Description of Artificial Sequence: Synthetic oligonucleotide
  Antisense strand to SEQ ID NO: 1464538
uccuuggcuaucaagacug

SEQ ID NO: 1464540 - RNA, 19 nt, Artificial Sequence
  Description of Artificial Sequence: Synthetic oligonucleotide
  Sense strand starting at position 616 of SEQ ID NO: 1244095
cuugauagccaaggaacau

SEQ ID NO: 1464541 - RNA, 19 nt, Artificial Sequence
  Description of Artificial Sequence: Synthetic oligonucleotide
  Antisense strand to SEQ ID NO: 1464540
auguuccuuggcuaucaag

SEQ ID NO: 1464542 - RNA, 19 nt, Artificial Sequence
  Description of Artificial Sequence: Synthetic oligonucleotide
  Sense strand starting at position 718 of SEQ ID NO: 1244095
ucacguaauuuguucucau

SEQ ID NO: 1464543 - RNA, 19 nt, Artificial Sequence
  Description of Artificial Sequence: Synthetic oligonucleotide
  Antisense strand to SEQ ID NO: 1464542
augagaacaaauuacguga

SEQ ID NO: 1464544 - RNA, 19 nt, Artificial Sequence
  Description of Artificial Sequence: Synthetic oligonucleotide
  Sense strand starting at position 722 of SEQ ID NO: 1244095
guaauuuguucucauuuga

SEQ ID NO: 1464545 - RNA, 19 nt, Artificial Sequence
  Description of Artificial Sequence: Synthetic oligonucleotide
  Antisense strand to SEQ ID NO: 1464544
ucaaaugagaacaaauuac

SEQ ID NO: 1464546 - RNA, 19 nt, Artificial Sequence
  Description of Artificial Sequence: Synthetic oligonucleotide
  Sense strand starting at position 1064 of SEQ ID NO: 1244095
acaacaguccucuagaguu

SEQ ID NO: 1464547 - RNA, 19 nt, Artificial Sequence
  Description of Artificial Sequence: Synthetic oligonucleotide
  Antisense strand to SEQ ID NO: 1464546
aacucuagaggacuguugu

SEQ ID NO: 1464548 - RNA, 19 nt, Artificial Sequence
  Description of Artificial Sequence: Synthetic oligonucleotide
  Sense strand starting at position 1066 of SEQ ID NO: 1244095
aacaguccucuagaguuga

SEQ ID NO: 1464549 - RNA, 19 nt, Artificial Sequence
  Description of Artificial Sequence: Synthetic oligonucleotide
  Antisense strand to SEQ ID NO: 1464548
ucaacucuagaggacuguu

SEQ ID NO: 1464550 - RNA, 19 nt, Artificial Sequence
  Description of Artificial Sequence: Synthetic oligonucleotide
  Sense strand starting at position 1258 of SEQ ID NO: 1244095
augagaagagcucgcuaaa

SEQ ID NO: 1464551 - RNA, 19 nt, Artificial Sequence
  Description of Artificial Sequence: Synthetic oligonucleotide
  Antisense strand to SEQ ID NO: 1464550
uuuagcgagcucuucucau

SEQ ID NO: 1464552 - RNA, 19 nt, Artificial Sequence
  Description of Artificial Sequence: Synthetic oligonucleotide
  Sense strand starting at position 1261 of SEQ ID NO: 1244095
agaagagcucgcuaaauua

SEQ ID NO: 1464553 - RNA, 19 nt, Artificial Sequence
  Description of Artificial Sequence: Synthetic oligonucleotide
  Antisense strand to SEQ ID NO: 1464552
uaauuuagcgagcucuucu

SEQ ID NO: 1464554 - RNA, 19 nt, Artificial Sequence
  Description of Artificial Sequence: Synthetic oligonucleotide
  Sense strand starting at position 1330 of SEQ ID NO: 1244095
aacgguuuccaguggaaau

SEQ ID NO: 1464555 - RNA, 19 nt, Artificial Sequence
  Description of Artificial Sequence: Synthetic oligonucleotide
  Antisense strand to SEQ ID NO: 1464554
auuuccacuggaaaccguu

SEQ ID NO: 1464556 - RNA, 19 nt, Artificial Sequence
  Description of Artificial Sequence: Synthetic oligonucleotide
  Sense strand starting at position 1331 of SEQ ID NO: 1244095
acgguuuccaguggaaaua

SEQ ID NO: 1464557 - RNA, 19 nt, Artificial Sequence
  Description of Artificial Sequence: Synthetic oligonucleotide
  Antisense strand to SEQ ID NO: 1464556
uauuuccacuggaaaccgu

SEQ ID NO: 1464558 - RNA, 19 nt, Artificial Sequence
  Description of Artificial Sequence: Synthetic oligonucleotide
  Sense strand starting at position 1332 of SEQ ID NO: 1244095
cgguuuccaguggaaauaa

SEQ ID NO: 1464559 - RNA, 19 nt, Artificial Sequence
  Description of Artificial Sequence: Synthetic oligonucleotide
  Antisense strand to SEQ ID NO: 1464558
uuauuuccacuggaaaccg

SEQ ID NO: 1464560 - RNA, 19 nt, Artificial Sequence
  Description of Artificial Sequence: Synthetic oligonucleotide
  Sense strand starting at position 1389 of SEQ ID NO: 1244095
uuccgugcauuucuuaaau

SEQ ID NO: 1464561 - RNA, 19 nt, Artificial Sequence
  Description of Artificial Sequence: Synthetic oligonucleotide
  Antisense strand to SEQ ID NO: 1464560
auuuaagaaaugcacggaa

SEQ ID NO: 1464562 - RNA, 19 nt, Artificial Sequence
  Description of Artificial Sequence: Synthetic oligonucleotide
  Sense strand starting at position 1403 of SEQ ID NO: 1244095
uaaauuaagguguguggau

SEQ ID NO: 1464563 - RNA, 19 nt, Artificial Sequence
  Description of Artificial Sequence: Synthetic oligonucleotide
  Antisense strand to SEQ ID NO: 1464562
auccacacaccuuaauuua

SEQ ID NO: 1464564 - RNA, 19 nt, Artificial Sequence
  Description of Artificial Sequence: Synthetic oligonucleotide
  Sense strand starting at position 1445 of SEQ ID NO: 1244095
uguugauugguugauaaca

SEQ ID NO: 1464565 - RNA, 19 nt, Artificial Sequence
  Description of Artificial Sequence: Synthetic oligonucleotide
  Antisense strand to SEQ ID NO: 1464564
uguuaucaaccaaucaaca

SEQ ID NO: 1464566 - RNA, 19 nt, Artificial Sequence
  Description of Artificial Sequence: Synthetic oligonucleotide
  Sense strand starting at position 1627 of SEQ ID NO: 1244095
ccggcauccaaagaaaguu

SEQ ID NO: 1464567 - RNA, 19 nt, Artificial Sequence
  Description of Artificial Sequence: Synthetic oligonucleotide
  Antisense strand to SEQ ID NO: 1464566
aacuuucuuuggaugccgg

SEQ ID NO: 1464568 - RNA, 19 nt, Artificial Sequence
  Description of Artificial Sequence: Synthetic oligonucleotide
  Sense strand starting at position 1673 of SEQ ID NO: 1244095
cggaaucuaucagcaucaa

SEQ ID NO: 1464569 - RNA, 19 nt, Artificial Sequence
  Description of Artificial Sequence: Synthetic oligonucleotide
  Antisense strand to SEQ ID NO: 1464568
uugaugcugauagauuccg

SEQ ID NO: 1464570 - RNA, 19 nt, Artificial Sequence
  Description of Artificial Sequence: Synthetic oligonucleotide
  Sense strand starting at position 1758 of SEQ ID NO: 1244095
ccucaaauacgcugaacau

SEQ ID NO: 1464571 - RNA, 19 nt, Artificial Sequence
  Description of Artificial Sequence: Synthetic oligonucleotide
  Antisense strand to SEQ ID NO: 1464570
auguucagcguauuugagg

SEQ ID NO: 1464572 - RNA, 19 nt, Artificial Sequence
  Description of Artificial Sequence: Synthetic oligonucleotide
  Sense strand starting at position 1759 of SEQ ID NO: 1244095
cucaaauacgcugaacauu

SEQ ID NO: 1464573 - RNA, 19 nt, Artificial Sequence
  Description of Artificial Sequence: Synthetic oligonucleotide
  Antisense strand to SEQ ID NO: 1464572
aauguucagcguauuugag

SEQ ID NO: 1464574 - RNA, 19 nt, Artificial Sequence
  Description of Artificial Sequence: Synthetic oligonucleotide
  Sense strand starting at position 1826 of SEQ ID NO: 1244095
aggguauugguucaaguau

SEQ ID NO: 1464575 - RNA, 19 nt, Artificial Sequence
  Description of Artificial Sequence: Synthetic oligonucleotide
  Antisense strand to SEQ ID NO: 1464574
auacuugaaccaauacccu

SEQ ID NO: 1464576 - RNA, 19 nt, Artificial Sequence
  Description of Artificial Sequence: Synthetic oligonucleotide
  Sense strand starting at position 2313 of SEQ ID NO: 1244095
gacaaucaguaccuggaau

SEQ ID NO: 1464577 - RNA, 19 nt, Artificial Sequence
  Description of Artificial Sequence: Synthetic oligonucleotide
  Antisense strand to SEQ ID NO: 1464576
auuccagguacugauuguc

SEQ ID NO: 1464578 - RNA, 19 nt, Artificial Sequence
  Description of Artificial Sequence: Synthetic oligonucleotide
  Sense strand starting at position 2315 of SEQ ID NO: 1244095
caaucaguaccuggaauga

SEQ ID NO: 1464579 - RNA, 19 nt, Artificial Sequence
  Description of Artificial Sequence: Synthetic oligonucleotide
  Antisense strand to SEQ ID NO: 1464578
ucauuccagguacugauug

SEQ ID NO: 1464580 - RNA, 19 nt, Artificial Sequence
  Description of Artificial Sequence: Synthetic oligonucleotide
  Sense strand starting at position 2364 of SEQ ID NO: 1244095
agccaugacucaguaaaga

SEQ ID NO: 1464581 - RNA, 19 nt, Artificial Sequence
  Description of Artificial Sequence: Synthetic oligonucleotide
  Antisense strand to SEQ ID NO: 1464580
ucuuuacugagucauggcu

SEQ ID NO: 1464582 - RNA, 19 nt, Artificial Sequence
  Description of Artificial Sequence: Synthetic oligonucleotide
  Sense strand starting at position 2745 of SEQ ID NO: 1244095
caaugagguggugguaaau

SEQ ID NO: 1464583 - RNA, 19 nt, Artificial Sequence
  Description of Artificial Sequence: Synthetic oligonucleotide
  Antisense strand to SEQ ID NO: 1464582
auuuaccaccaccucauug

SEQ ID NO: 1464584 - RNA, 19 nt, Artificial Sequence
  Description of Artificial Sequence: Synthetic oligonucleotide
  Sense strand starting at position 2932 of SEQ ID NO: 1244095
aauucuaggugucuggaaa

SEQ ID NO: 1464585 - RNA, 19 nt, Artificial Sequence
  Description of Artificial Sequence: Synthetic oligonucleotide
  Antisense strand to SEQ ID NO: 1464584
uuuccagacaccuagaauu

SEQ ID NO: 1464586 - RNA, 19 nt, Artificial Sequence
  Description of Artificial Sequence: Synthetic oligonucleotide
  Sense strand starting at position 2933 of SEQ ID NO: 1244095
auucuaggugucuggaaag

SEQ ID NO: 1464587 - RNA, 19 nt, Artificial Sequence
  Description of Artificial Sequence: Synthetic oligonucleotide
  Antisense strand to SEQ ID NO: 1464586
cuuuccagacaccuagaau

SEQ ID NO: 1464588 - RNA, 19 nt, Artificial Sequence
  Description of Artificial Sequence: Synthetic oligonucleotide
  Sense strand starting at position 3098 of SEQ ID NO: 1244095
aacugaaaguuguccaggu

SEQ ID NO: 1464589 - RNA, 19 nt, Artificial Sequence
  Description of Artificial Sequence: Synthetic oligonucleotide
  Antisense strand to SEQ ID NO: 1464588
accuggacaacuuucaguu

SEQ ID NO: 1464590 - RNA, 19 nt, Artificial Sequence
  Description of Artificial Sequence: Synthetic oligonucleotide
  Sense strand starting at position 3586 of SEQ ID NO: 1244095
gugagugugggccagacaa

SEQ ID NO: 1464591 - RNA, 19 nt, Artificial Sequence
  Description of Artificial Sequence: Synthetic oligonucleotide
  Antisense strand to SEQ ID NO: 1464590
uugucuggcccacacucac

SEQ ID NO: 1464592 - RNA, 19 nt, Artificial Sequence
  Description of Artificial Sequence: Synthetic oligonucleotide
  Sense strand starting at position 3641 of SEQ ID NO: 1244095
guguguuuggaauagagaa

SEQ ID NO: 1464593 - RNA, 19 nt, Artificial Sequence
  Description of Artificial Sequence: Synthetic oligonucleotide
  Antisense strand to SEQ ID NO: 1464592
uucucuauuccaaacacac

SEQ ID NO: 1464594 - RNA, 19 nt, Artificial Sequence
  Description of Artificial Sequence: Synthetic oligonucleotide
  Sense strand starting at position 3662 of SEQ ID NO: 1244095
ggaauaugaguagguauca

SEQ ID NO: 1464595 - RNA, 19 nt, Artificial Sequence
  Description of Artificial Sequence: Synthetic oligonucleotide
  Antisense strand to SEQ ID NO: 1464594
ugauaccuacucauauucc

SEQ ID NO: 1464596 - RNA, 19 nt, Artificial Sequence
  Description of Artificial Sequence: Synthetic oligonucleotide
  Sense strand starting at position 3663 of SEQ ID NO: 1244095
gaauaugaguagguaucaa

SEQ ID NO: 1464597 - RNA, 19 nt, Artificial Sequence
  Description of Artificial Sequence: Synthetic oligonucleotide
  Antisense strand to SEQ ID NO: 1464596
uugauaccuacucauauuc

SEQ ID NO: 1464598 - RNA, 19 nt, Artificial Sequence
  Description of Artificial Sequence: Synthetic oligonucleotide
  Sense strand starting at position 1994 of SEQ ID NO: 1244096
acgcaaacaucgcgagacu

SEQ ID NO: 1464599 - RNA, 19 nt, Artificial Sequence
  Description of Artificial Sequence: Synthetic oligonucleotide
  Antisense strand to SEQ ID NO: 1464598
agucucgcgauguuugcgu

SEQ ID NO: 1464600 - RNA, 19 nt, Artificial Sequence
  Description of Artificial Sequence: Synthetic oligonucleotide
  Sense strand starting at position 1995 of SEQ ID NO: 1244096
cgcaaacaucgcgagacuu

SEQ ID NO: 1464601 - RNA, 19 nt, Artificial Sequence
  Description of Artificial Sequence: Synthetic oligonucleotide
  Antisense strand to SEQ ID NO: 1464600
aagucucgcgauguuugcg

SEQ ID NO: 1464602 - RNA, 19 nt, Artificial Sequence
  Description of Artificial Sequence: Synthetic oligonucleotide
  Sense strand starting at position 2140 of SEQ ID NO: 1244096
ggucauggcucucguuuca

SEQ ID NO: 1464603 - RNA, 19 nt, Artificial Sequence
  Description of Artificial Sequence: Synthetic oligonucleotide
  Antisense strand to SEQ ID NO: 1464602
ugaaacgagagccaugacc

SEQ ID NO: 1464604 - RNA, 19 nt, Artificial Sequence
  Description of Artificial Sequence: Synthetic oligonucleotide
  Sense strand starting at position 2391 of SEQ ID NO: 1244096
cgaggugagcgcugaaauu

SEQ ID NO: 1464605 - RNA, 19 nt, Artificial Sequence
  Description of Artificial Sequence: Synthetic oligonucleotide
  Antisense strand to SEQ ID NO: 1464604
aauuucagcgcucaccucg

SEQ ID NO: 1464606 - RNA, 19 nt, Artificial Sequence
  Description of Artificial Sequence: Synthetic oligonucleotide
  Sense strand starting at position 2418 of SEQ ID NO: 1244096
ccucuauucugggaccuua

SEQ ID NO: 1464607 - RNA, 19 nt, Artificial Sequence
  Description of Artificial Sequence: Synthetic oligonucleotide
  Antisense strand to SEQ ID NO: 1464606
uaaggucccagaauagagg

SEQ ID NO: 1464608 - RNA, 19 nt, Artificial Sequence
  Description of Artificial Sequence: Synthetic oligonucleotide
  Sense strand starting at position 2444 of SEQ ID NO: 1244096
cuguguccgaaguguuaaa

SEQ ID NO: 1464609 - RNA, 19 nt, Artificial Sequence
  Description of Artificial Sequence: Synthetic oligonucleotide
  Antisense strand to SEQ ID NO: 1464608
uuuaacacuucggacacag

SEQ ID NO: 1464610 - RNA, 19 nt, Artificial Sequence
  Description of Artificial Sequence: Synthetic oligonucleotide
  Sense strand starting at position 2469 of SEQ ID NO: 1244096
ucagacuuuccgcacggaa

SEQ ID NO: 1464611 - RNA, 19 nt, Artificial Sequence
  Description of Artificial Sequence: Synthetic oligonucleotide
  Antisense strand to SEQ ID NO: 1464610
uuccgugcggaaagucuga

SEQ ID NO: 1464612 - RNA, 19 nt, Artificial Sequence
  Description of Artificial Sequence: Synthetic oligonucleotide
  Sense strand starting at position 2471 of SEQ ID NO: 1244096
agacuuuccgcacggaaag

SEQ ID NO: 1464613 - RNA, 19 nt, Artificial Sequence
  Description of Artificial Sequence: Synthetic oligonucleotide
  Antisense strand to SEQ ID NO: 1464612
cuuuccgugcggaaagucu

SEQ ID NO: 1464614 - RNA, 19 nt, Artificial Sequence
  Description of Artificial Sequence: Synthetic oligonucleotide
  Sense strand starting at position 2590 of SEQ ID NO: 1244096
gagaucuccugggaucacu

SEQ ID NO: 1464615 - RNA, 19 nt, Artificial Sequence
  Description of Artificial Sequence: Synthetic oligonucleotide
  Antisense strand to SEQ ID NO: 1464614
agugaucccaggagaucuc

SEQ ID NO: 1464616 - RNA, 19 nt, Artificial Sequence
  Description of Artificial Sequence: Synthetic oligonucleotide
  Sense strand starting at position 2610 of SEQ ID NO: 1244096
ugaggagguguuugagacu

SEQ ID NO: 1464617 - RNA, 19 nt, Artificial Sequence
  Description of Artificial Sequence: Synthetic oligonucleotide
  Antisense strand to SEQ ID NO: 1464616
agucucaaacaccuccuca

SEQ ID NO: 1464618 - RNA, 19 nt, Artificial Sequence
  Description of Artificial Sequence: Synthetic oligonucleotide
  Sense strand starting at position 2613 of SEQ ID NO: 1244096
ggagguguuugagacugaa

SEQ ID NO: 1464619 - RNA, 19 nt, Artificial Sequence
  Description of Artificial Sequence: Synthetic oligonucleotide
  Antisense strand to SEQ ID NO: 1464618
uucagucucaaacaccucc

SEQ ID NO: 1464620 - RNA, 19 nt, Artificial Sequence
  Description of Artificial Sequence: Synthetic oligonucleotide
  Sense strand starting at position 2616 of SEQ ID NO: 1244096
gguguuugagacugaaaug

SEQ ID NO: 1464621 - RNA, 19 nt, Artificial Sequence
  Description of Artificial Sequence: Synthetic oligonucleotide
  Antisense strand to SEQ ID NO: 1464620
cauuucagucucaaacacc

SEQ ID NO: 1464622 - RNA, 19 nt, Artificial Sequence
  Description of Artificial Sequence: Synthetic oligonucleotide
  Sense strand starting at position 2699 of SEQ ID NO: 1244096
auaacauguccauguccaa

SEQ ID NO: 1464623 - RNA, 19 nt, Artificial Sequence
  Description of Artificial Sequence: Synthetic oligonucleotide
  Antisense strand to SEQ ID NO: 1464622
uuggacauggacauguuau

SEQ ID NO: 1464624 - RNA, 19 nt, Artificial Sequence
  Description of Artificial Sequence: Synthetic oligonucleotide
  Sense strand starting at position 2853 of SEQ ID NO: 1244096
cgucuauuccagcagcaag

SEQ ID NO: 1464625 - RNA, 19 nt, Artificial Sequence
  Description of Artificial Sequence: Synthetic oligonucleotide
  Antisense strand to SEQ ID NO: 1464624
cuugcugcuggaauagacg

SEQ ID NO: 1464626 - RNA, 19 nt, Artificial Sequence
  Description of Artificial Sequence: Synthetic oligonucleotide
  Sense strand starting at position 2924 of SEQ ID NO: 1244096
uuccacugccguuguaauu

SEQ ID NO: 1464627 - RNA, 19 nt, Artificial Sequence
  Description of Artificial Sequence: Synthetic oligonucleotide
  Antisense strand to SEQ ID NO: 1464626
aauuacaacggcaguggaa

SEQ ID NO: 1464628 - RNA, 19 nt, Artificial Sequence
  Description of Artificial Sequence: Synthetic oligonucleotide
  Sense strand starting at position 3041 of SEQ ID NO: 1244096
agcuauccgucuucuaaga

SEQ ID NO: 1464629 - RNA, 19 nt, Artificial Sequence
  Description of Artificial Sequence: Synthetic oligonucleotide
  Antisense strand to SEQ ID NO: 1464628
ucuuagaagacggauagcu

SEQ ID NO: 1464630 - RNA, 19 nt, Artificial Sequence
  Description of Artificial Sequence: Synthetic oligonucleotide
  Sense strand starting at position 3046 of SEQ ID NO: 1244096
uccgucuucuaagagcaga

SEQ ID NO: 1464631 - RNA, 19 nt, Artificial Sequence
  Description of Artificial Sequence: Synthetic oligonucleotide
  Antisense strand to SEQ ID NO: 1464630
ucugcucuuagaagacgga

SEQ ID NO: 1464632 - RNA, 19 nt, Artificial Sequence
  Description of Artificial Sequence: Synthetic oligonucleotide
  Sense strand starting at position 3049 of SEQ ID NO: 1244096
gucuucuaagagcagacau

SEQ ID NO: 1464633 - RNA, 19 nt, Artificial Sequence
  Description of Artificial Sequence: Synthetic oligonucleotide
  Antisense strand to SEQ ID NO: 1464632
augucugcucuuagaagac

SEQ ID NO: 1464634 - RNA, 19 nt, Artificial Sequence
  Description of Artificial Sequence: Synthetic oligonucleotide
  Sense strand starting at position 3063 of SEQ ID NO: 1244096
gacauuagauugugccauu

SEQ ID NO: 1464635 - RNA, 19 nt, Artificial Sequence
  Description of Artificial Sequence: Synthetic oligonucleotide
  Antisense strand to SEQ ID NO: 1464634
aauggcacaaucuaauguc

SEQ ID NO: 1464636 - RNA, 19 nt, Artificial Sequence
  Description of Artificial Sequence: Synthetic oligonucleotide
  Sense strand starting at position 3123 of SEQ ID NO: 1244096
ugagcacacuuagacuaaa

SEQ ID NO: 1464637 - RNA, 19 nt, Artificial Sequence
  Description of Artificial Sequence: Synthetic oligonucleotide
  Antisense strand to SEQ ID NO: 1464636
uuuagucuaagugugcuca

SEQ ID NO: 1464638 - RNA, 19 nt, Artificial Sequence
  Description of Artificial Sequence: Synthetic oligonucleotide
  Sense strand starting at position 3179 of SEQ ID NO: 1244096
ugaucuggucucugcuuaa

SEQ ID NO: 1464639 - RNA, 19 nt, Artificial Sequence
  Description of Artificial Sequence: Synthetic oligonucleotide
  Antisense strand to SEQ ID NO: 1464638
uuaagcagagaccagauca

SEQ ID NO: 1464640 - RNA, 19 nt, Artificial Sequence
  Description of Artificial Sequence: Synthetic oligonucleotide
  Sense strand starting at position 3182 of SEQ ID NO: 1244096
ucuggucucugcuuaauuc

SEQ ID NO: 1464641 - RNA, 19 nt, Artificial Sequence
  Description of Artificial Sequence: Synthetic oligonucleotide
  Antisense strand to SEQ ID NO: 1464640
gaauuaagcagagaccaga

SEQ ID NO: 1464642 - RNA, 19 nt, Artificial Sequence
  Description of Artificial Sequence: Synthetic oligonucleotide
  Sense strand starting at position 3247 of SEQ ID NO: 1244096
uuauaaucggguuauucug

SEQ ID NO: 1464643 - RNA, 19 nt, Artificial Sequence
  Description of Artificial Sequence: Synthetic oligonucleotide
  Antisense strand to SEQ ID NO: 1464642
cagaauaacccgauuauaa

SEQ ID NO: 1464644 - RNA, 19 nt, Artificial Sequence
  Description of Artificial Sequence: Synthetic oligonucleotide
  Sense strand starting at position 3253 of SEQ ID NO: 1244096
ucggguuauucuguccuau

SEQ ID NO: 1464645 - RNA, 19 nt, Artificial Sequence
  Description of Artificial Sequence: Synthetic oligonucleotide
  Antisense strand to SEQ ID NO: 1464644
auaggacagaauaacccga

SEQ ID NO: 1464646 - RNA, 19 nt, Artificial Sequence
  Description of Artificial Sequence: Synthetic oligonucleotide
  Sense strand starting at position 3255 of SEQ ID NO: 1244096
ggguuauucuguccuauuc

SEQ ID NO: 1464647 - RNA, 19 nt, Artificial Sequence
  Description of Artificial Sequence: Synthetic oligonucleotide
  Antisense strand to SEQ ID NO: 1464646
gaauaggacagaauaaccc

SEQ ID NO: 1464648 - RNA, 19 nt, Artificial Sequence
  Description of Artificial Sequence: Synthetic oligonucleotide
  Sense strand starting at position 3257 of SEQ ID NO: 1244096
guuauucuguccuauucuu

SEQ ID NO: 1464649 - RNA, 19 nt, Artificial Sequence
  Description of Artificial Sequence: Synthetic oligonucleotide
  Antisense strand to SEQ ID NO: 1464648
aagaauaggacagaauaac

SEQ ID NO: 1464650 - RNA, 19 nt, Artificial Sequence
  Description of Artificial Sequence: Synthetic oligonucleotide
  Sense strand starting at position 3292 of SEQ ID NO: 1244096
gcauuauucuggccacaag

SEQ ID NO: 1464651 - RNA, 19 nt, Artificial Sequence
  Description of Artificial Sequence: Synthetic oligonucleotide
  Antisense strand to SEQ ID NO: 1464650
cuuguggccagaauaaugc

SEQ ID NO: 1464652 - RNA, 19 nt, Artificial Sequence
  Description of Artificial Sequence: Synthetic oligonucleotide
  Sense strand starting at position 3295 of SEQ ID NO: 1244096
uuauucuggccacaagacu

SEQ ID NO: 1464653 - RNA, 19 nt, Artificial Sequence
  Description of Artificial Sequence: Synthetic oligonucleotide
  Antisense strand to SEQ ID NO: 1464652
agucuuguggccagaauaa

SEQ ID NO: 1464654 - RNA, 19 nt, Artificial Sequence
  Description of Artificial Sequence: Synthetic oligonucleotide
  Sense strand starting at position 3303 of SEQ ID NO: 1244096
gccacaagacuuuguacuu

SEQ ID NO: 1464655 - RNA, 19 nt, Artificial Sequence
  Description of Artificial Sequence: Synthetic oligonucleotide
  Antisense strand to SEQ ID NO: 1464654
aaguacaaagucuuguggc

SEQ ID NO: 1464656 - RNA, 19 nt, Artificial Sequence
  Description of Artificial Sequence: Synthetic oligonucleotide
  Sense strand starting at position 3322 of SEQ ID NO: 1244096
gcuguuccuuugcuugaca

SEQ ID NO: 1464657 - RNA, 19 nt, Artificial Sequence
  Description of Artificial Sequence: Synthetic oligonucleotide
  Antisense strand to SEQ ID NO: 1464656
ugucaagcaaaggaacagc

SEQ ID NO: 1464658 - RNA, 19 nt, Artificial Sequence
  Description of Artificial Sequence: Synthetic oligonucleotide
  Sense strand starting at position 3348 of SEQ ID NO: 1244096
uccucuagguccugacgua

SEQ ID NO: 1464659 - RNA, 19 nt, Artificial Sequence
  Description of Artificial Sequence: Synthetic oligonucleotide
  Antisense strand to SEQ ID NO: 1464658
uacgucaggaccuagagga

SEQ ID NO: 1464660 - RNA, 19 nt, Artificial Sequence
  Description of Artificial Sequence: Synthetic oligonucleotide
  Sense strand starting at position 3364 of SEQ ID NO: 1244096
guaggugguuucuucuuaa

SEQ ID NO: 1464661 - RNA, 19 nt, Artificial Sequence
  Description of Artificial Sequence: Synthetic oligonucleotide
  Antisense strand to SEQ ID NO: 1464660
uuaagaagaaaccaccuac

SEQ ID NO: 1464662 - RNA, 19 nt, Artificial Sequence
  Description of Artificial Sequence: Synthetic oligonucleotide
  Sense strand starting at position 3367 of SEQ ID NO: 1244096
ggugguuucuucuuaaauu

SEQ ID NO: 1464663 - RNA, 19 nt, Artificial Sequence
  Description of Artificial Sequence: Synthetic oligonucleotide
  Antisense strand to SEQ ID NO: 1464662
aauuuaagaagaaaccacc

SEQ ID NO: 1464664 - RNA, 19 nt, Artificial Sequence
  Description of Artificial Sequence: Synthetic oligonucleotide
  Sense strand starting at position 3368 of SEQ ID NO: 1244096
gugguuucuucuuaaauuu

SEQ ID NO: 1464665 - RNA, 19 nt, Artificial Sequence
  Description of Artificial Sequence: Synthetic oligonucleotide
  Antisense strand to SEQ ID NO: 1464664
aaauuuaagaagaaaccac

SEQ ID NO: 1464666 - RNA, 19 nt, Artificial Sequence
  Description of Artificial Sequence: Synthetic oligonucleotide
  Sense strand starting at position 52 of SEQ ID NO: 1244097
agggaacuuucugcuucuu

SEQ ID NO: 1464667 - RNA, 19 nt, Artificial Sequence
  Description of Artificial Sequence: Synthetic oligonucleotide
  Antisense strand to SEQ ID NO: 1464666
aagaagcagaaaguucccu

SEQ ID NO: 1464668 - RNA, 19 nt, Artificial Sequence
  Description of Artificial Sequence: Synthetic oligonucleotide
  Sense strand starting at position 122 of SEQ ID NO: 1244097
ggaaauaccucugaacuag

SEQ ID NO: 1464669 - RNA, 19 nt, Artificial Sequence
  Description of Artificial Sequence: Synthetic oligonucleotide
  Antisense strand to SEQ ID NO: 1464668
cuaguucagagguauuucc

SEQ ID NO: 1464670 - RNA, 19 nt, Artificial Sequence
  Description of Artificial Sequence: Synthetic oligonucleotide
  Sense strand starting at position 213 of SEQ ID NO: 1244097
ggaguauguggugguggaa

SEQ ID NO: 1464671 - RNA, 19 nt, Artificial Sequence
  Description of Artificial Sequence: Synthetic oligonucleotide
  Antisense strand to SEQ ID NO: 1464670
uuccaccaccacauacucc

SEQ ID NO: 1464672 - RNA, 19 nt, Artificial Sequence
  Description of Artificial Sequence: Synthetic oligonucleotide
  Sense strand starting at position 284 of SEQ ID NO: 1244097
agaguuuacugcuugaugu

SEQ ID NO: 1464673 - RNA, 19 nt, Artificial Sequence
  Description of Artificial Sequence: Synthetic oligonucleotide
  Antisense strand to SEQ ID NO: 1464672
acaucaagcaguaaacucu

SEQ ID NO: 1464674 - RNA, 19 nt, Artificial Sequence
  Description of Artificial Sequence: Synthetic oligonucleotide
  Sense strand starting at position 285 of SEQ ID NO: 1244097
gaguuuacugcuugauguu

SEQ ID NO: 1464675 - RNA, 19 nt, Artificial Sequence
  Description of Artificial Sequence: Synthetic oligonucleotide
  Antisense strand to SEQ ID NO: 1464674
aacaucaagcaguaaacuc

SEQ ID NO: 1464676 - RNA, 19 nt, Artificial Sequence
  Description of Artificial Sequence: Synthetic oligonucleotide
  Sense strand starting at position 302 of SEQ ID NO: 1244097
uuggacuugagaggucgaa

SEQ ID NO: 1464677 - RNA, 19 nt, Artificial Sequence
  Description of Artificial Sequence: Synthetic oligonucleotide
  Antisense strand to SEQ ID NO: 1464676
uucgaccucucaaguccaa

SEQ ID NO: 1464678 - RNA, 19 nt, Artificial Sequence
  Description of Artificial Sequence: Synthetic oligonucleotide
  Sense strand starting at position 1717 of SEQ ID NO: 1244097
ccgaguaacccaugggaug

SEQ ID NO: 1464679 - RNA, 19 nt, Artificial Sequence
  Description of Artificial Sequence: Synthetic oligonucleotide
  Antisense strand to SEQ ID NO: 1464678
caucccauggguuacucgg

SEQ ID NO: 1464680 - RNA, 19 nt, Artificial Sequence
  Description of Artificial Sequence: Synthetic oligonucleotide
  Sense strand starting at position 1718 of SEQ ID NO: 1244097
cgaguaacccaugggauga

SEQ ID NO: 1464681 - RNA, 19 nt, Artificial Sequence
  Description of Artificial Sequence: Synthetic oligonucleotide
  Antisense strand to SEQ ID NO: 1464680
ucaucccauggguuacucg

SEQ ID NO: 1464682 - RNA, 19 nt, Artificial Sequence
  Description of Artificial Sequence: Synthetic oligonucleotide
  Sense strand starting at position 1729 of SEQ ID NO: 1244097
ugggaugauucugcugcua

SEQ ID NO: 1464683 - RNA, 19 nt, Artificial Sequence
  Description of Artificial Sequence: Synthetic oligonucleotide
  Antisense strand to SEQ ID NO: 1464682
uagcagcagaaucauccca

SEQ ID NO: 1464684 - RNA, 19 nt, Artificial Sequence
  Description of Artificial Sequence: Synthetic oligonucleotide
  Sense strand starting at position 1924 of SEQ ID NO: 1244097
cucugacauuuacagggaa

SEQ ID NO: 1464685 - RNA, 19 nt, Artificial Sequence
  Description of Artificial Sequence: Synthetic oligonucleotide
  Antisense strand to SEQ ID NO: 1464684
uucccuguaaaugucagag

SEQ ID NO: 1464686 - RNA, 19 nt, Artificial Sequence
  Description of Artificial Sequence: Synthetic oligonucleotide
  Sense strand starting at position 2087 of SEQ ID NO: 1244097
ugauuaggguccuuaauua

SEQ ID NO: 1464687 - RNA, 19 nt, Artificial Sequence
  Description of Artificial Sequence: Synthetic oligonucleotide
  Antisense strand to SEQ ID NO: 1464686
uaauuaaggacccuaauca

SEQ ID NO: 1464688 - RNA, 19 nt, Artificial Sequence
  Description of Artificial Sequence: Synthetic oligonucleotide
  Sense strand starting at position 2091 of SEQ ID NO: 1244097
uaggguccuuaauuaggua

SEQ ID NO: 1464689 - RNA, 19 nt, Artificial Sequence
  Description of Artificial Sequence: Synthetic oligonucleotide
  Antisense strand to SEQ ID NO: 1464688
uaccuaauuaaggacccua

SEQ ID NO: 1464690 - RNA, 19 nt, Artificial Sequence
  Description of Artificial Sequence: Synthetic oligonucleotide
  Sense strand starting at position 2095 of SEQ ID NO: 1244097
guccuuaauuagguaggga

SEQ ID NO: 1464691 - RNA, 19 nt, Artificial Sequence
  Description of Artificial Sequence: Synthetic oligonucleotide
  Antisense strand to SEQ ID NO: 1464690
ucccuaccuaauuaaggac

SEQ ID NO: 1464692 - RNA, 19 nt, Artificial Sequence
  Description of Artificial Sequence: Synthetic oligonucleotide
  Sense strand starting at position 2182 of SEQ ID NO: 1244097
gguagucagccagauccuu

SEQ ID NO: 1464693 - RNA, 19 nt, Artificial Sequence
  Description of Artificial Sequence: Synthetic oligonucleotide
  Antisense strand to SEQ ID NO: 1464692
aaggaucuggcugacuacc

SEQ ID NO: 1464694 - RNA, 19 nt, Artificial Sequence
  Description of Artificial Sequence: Synthetic oligonucleotide
  Sense strand starting at position 2299 of SEQ ID NO: 1244097
ccugcucagccagaaagua

SEQ ID NO: 1464695 - RNA, 19 nt, Artificial Sequence
  Description of Artificial Sequence: Synthetic oligonucleotide
  Antisense strand to SEQ ID NO: 1464694
uacuuucuggcugagcagg

SEQ ID NO: 1464696 - RNA, 19 nt, Artificial Sequence
  Description of Artificial Sequence: Synthetic oligonucleotide
  Sense strand starting at position 2346 of SEQ ID NO: 1244097
guaauccguccuggagaag

SEQ ID NO: 1464697 - RNA, 19 nt, Artificial Sequence
  Description of Artificial Sequence: Synthetic oligonucleotide
  Antisense strand to SEQ ID NO: 1464696
cuucuccaggacggauuac

SEQ ID NO: 1464698 - RNA, 19 nt, Artificial Sequence
  Description of Artificial Sequence: Synthetic oligonucleotide
  Sense strand starting at position 2391 of SEQ ID NO: 1244097
acaaucuucuguuuccagu

SEQ ID NO: 1464699 - RNA, 19 nt, Artificial Sequence
  Description of Artificial Sequence: Synthetic oligonucleotide
  Antisense strand to SEQ ID NO: 1464698
acuggaaacagaagauugu

SEQ ID NO: 1464700 - RNA, 19 nt, Artificial Sequence
  Description of Artificial Sequence: Synthetic oligonucleotide
  Sense strand starting at position 2431 of SEQ ID NO: 1244097
ccauccuuuggcuggcaaa

SEQ ID NO: 1464701 - RNA, 19 nt, Artificial Sequence
  Description of Artificial Sequence: Synthetic oligonucleotide
  Antisense strand to SEQ ID NO: 1464700
uuugccagccaaaggaugg

SEQ ID NO: 1464702 - RNA, 19 nt, Artificial Sequence
  Description of Artificial Sequence: Synthetic oligonucleotide
  Sense strand starting at position 2443 of SEQ ID NO: 1244097
uggcaaagucuauauccca

SEQ ID NO: 1464703 - RNA, 19 nt, Artificial Sequence
  Description of Artificial Sequence: Synthetic oligonucleotide
  Antisense strand to SEQ ID NO: 1464702
ugggauauagacuuugcca

SEQ ID NO: 1464704 - RNA, 19 nt, Artificial Sequence
  Description of Artificial Sequence: Synthetic oligonucleotide
  Sense strand starting at position 2547 of SEQ ID NO: 1244097
gcuucuccaugccuagaaa

SEQ ID NO: 1464705 - RNA, 19 nt, Artificial Sequence
  Description of Artificial Sequence: Synthetic oligonucleotide
  Antisense strand to SEQ ID NO: 1464704
uuucuaggcauggagaagc

SEQ ID NO: 1464706 - RNA, 19 nt, Artificial Sequence
  Description of Artificial Sequence: Synthetic oligonucleotide
  Sense strand starting at position 2591 of SEQ ID NO: 1244097
agcuuuggccuccgacaga

SEQ ID NO: 1464707 - RNA, 19 nt, Artificial Sequence
  Description of Artificial Sequence: Synthetic oligonucleotide
  Antisense strand to SEQ ID NO: 1464706
ucugucggaggccaaagcu

SEQ ID NO: 1464708 - RNA, 19 nt, Artificial Sequence
  Description of Artificial Sequence: Synthetic oligonucleotide
  Sense strand starting at position 2656 of SEQ ID NO: 1244097
gcuuaaucugaggguuguu

SEQ ID NO: 1464709 - RNA, 19 nt, Artificial Sequence
  Description of Artificial Sequence: Synthetic oligonucleotide
  Antisense strand to SEQ ID NO: 1464708
aacaacccucagauuaagc

SEQ ID NO: 1464710 - RNA, 19 nt, Artificial Sequence
  Description of Artificial Sequence: Synthetic oligonucleotide
  Sense strand starting at position 2682 of SEQ ID NO: 1244097
ugaauauaauugcccggau

SEQ ID NO: 1464711 - RNA, 19 nt, Artificial Sequence
  Description of Artificial Sequence: Synthetic oligonucleotide
  Antisense strand to SEQ ID NO: 1464710
auccgggcaauuauauuca

SEQ ID NO: 1464712 - RNA, 19 nt, Artificial Sequence
  Description of Artificial Sequence: Synthetic oligonucleotide
  Sense strand starting at position 2686 of SEQ ID NO: 1244097
uauaauugcccggauggca

SEQ ID NO: 1464713 - RNA, 19 nt, Artificial Sequence
  Description of Artificial Sequence: Synthetic oligonucleotide
  Antisense strand to SEQ ID NO: 1464712
ugccauccgggcaauuaua

SEQ ID NO: 1464714 - RNA, 19 nt, Artificial Sequence
  Description of Artificial Sequence: Synthetic oligonucleotide
  Sense strand starting at position 2725 of SEQ ID NO: 1244097
agaagaguauaauggaaga

SEQ ID NO: 1464715 - RNA, 19 nt, Artificial Sequence
  Description of Artificial Sequence: Synthetic oligonucleotide
  Antisense strand to SEQ ID NO: 1464714
ucuuccauuauacucuucu

SEQ ID NO: 1464716 - RNA, 19 nt, Artificial Sequence
  Description of Artificial Sequence: Synthetic oligonucleotide
  Sense strand starting at position 3007 of SEQ ID NO: 1244097
auuauaaagcuauggcaau

SEQ ID NO: 1464717 - RNA, 19 nt, Artificial Sequence
  Description of Artificial Sequence: Synthetic oligonucleotide
  Antisense strand to SEQ ID NO: 1464716
auugccauagcuuuauaau

SEQ ID NO: 1464718 - RNA, 19 nt, Artificial Sequence
  Description of Artificial Sequence: Synthetic oligonucleotide
  Sense strand starting at position 3108 of SEQ ID NO: 1244097
gugugaagacguggacauu

SEQ ID NO: 1464719 - RNA, 19 nt, Artificial Sequence
  Description of Artificial Sequence: Synthetic oligonucleotide
  Antisense strand to SEQ ID NO: 1464718
aauguccacgucuucacac

SEQ ID NO: 1464720 - RNA, 19 nt, Artificial Sequence
  Description of Artificial Sequence: Synthetic oligonucleotide
  Sense strand starting at position 3118 of SEQ ID NO: 1244097
guggacauuucuuaccaac

SEQ ID NO: 1464721 - RNA, 19 nt, Artificial Sequence
  Description of Artificial Sequence: Synthetic oligonucleotide
  Antisense strand to SEQ ID NO: 1464720
guugguaagaaauguccac

SEQ ID NO: 1464722 - RNA, 19 nt, Artificial Sequence
  Description of Artificial Sequence: Synthetic oligonucleotide
  Sense strand starting at position 3304 of SEQ ID NO: 1244097
aagauuggaucagguaaga

SEQ ID NO: 1464723 - RNA, 19 nt, Artificial Sequence
  Description of Artificial Sequence: Synthetic oligonucleotide
  Antisense strand to SEQ ID NO: 1464722
ucuuaccugauccaaucuu

SEQ ID NO: 1464724 - RNA, 19 nt, Artificial Sequence
  Description of Artificial Sequence: Synthetic oligonucleotide
  Sense strand starting at position 3318 of SEQ ID NO: 1244097
uaagaaucaucaguggauu

SEQ ID NO: 1464725 - RNA, 19 nt, Artificial Sequence
  Description of Artificial Sequence: Synthetic oligonucleotide
  Antisense strand to SEQ ID NO: 1464724
aauccacugaugauucuua

SEQ ID NO: 1464726 - RNA, 19 nt, Artificial Sequence
  Description of Artificial Sequence: Synthetic oligonucleotide
  Sense strand starting at position 3319 of SEQ ID NO: 1244097
aagaaucaucaguggauuc

SEQ ID NO: 1464727 - RNA, 19 nt, Artificial Sequence
  Description of Artificial Sequence: Synthetic oligonucleotide
  Antisense strand to SEQ ID NO: 1464726
gaauccacugaugauucuu

SEQ ID NO: 1464728 - RNA, 19 nt, Artificial Sequence
  Description of Artificial Sequence: Synthetic oligonucleotide
  Sense strand starting at position 3399 of SEQ ID NO: 1244097
uccagauugccaugaguug

SEQ ID NO: 1464729 - RNA, 19 nt, Artificial Sequence
  Description of Artificial Sequence: Synthetic oligonucleotide
  Antisense strand to SEQ ID NO: 1464728
caacucauggcaaucugga

SEQ ID NO: 1464730 - RNA, 19 nt, Artificial Sequence
  Description of Artificial Sequence: Synthetic oligonucleotide
  Sense strand starting at position 3447 of SEQ ID NO: 1244097
gucauuguacaguggagaa

SEQ ID NO: 1464731 - RNA, 19 nt, Artificial Sequence
  Description of Artificial Sequence: Synthetic oligonucleotide
  Antisense strand to SEQ ID NO: 1464730
uucuccacuguacaaugac

SEQ ID NO: 1464732 - RNA, 19 nt, Artificial Sequence
  Description of Artificial Sequence: Synthetic oligonucleotide
  Sense strand starting at position 3513 of SEQ ID NO: 1244097
gagagacauucuuugccuc

SEQ ID NO: 1464733 - RNA, 19 nt, Artificial Sequence
  Description of Artificial Sequence: Synthetic oligonucleotide
  Antisense strand to SEQ ID NO: 1464732
gaggcaaagaaugucucuc

SEQ ID NO: 1464734 - RNA, 19 nt, Artificial Sequence
  Description of Artificial Sequence: Synthetic oligonucleotide
  Sense strand starting at position 3520 of SEQ ID NO: 1244097
auucuuugccuccagaugu

SEQ ID NO: 1464735 - RNA, 19 nt, Artificial Sequence
  Description of Artificial Sequence: Synthetic oligonucleotide
  Antisense strand to SEQ ID NO: 1464734
acaucuggaggcaaagaau

SEQ ID NO: 1464736 - RNA, 19 nt, Artificial Sequence
  Description of Artificial Sequence: Synthetic oligonucleotide
  Sense strand starting at position 3569 of SEQ ID NO: 1244097
uaugcagugcugcacaaua

SEQ ID NO: 1464737 - RNA, 19 nt, Artificial Sequence
  Description of Artificial Sequence: Synthetic oligonucleotide
  Antisense strand to SEQ ID NO: 1464736
uauugugcagcacugcaua

SEQ ID NO: 1464738 - RNA, 19 nt, Artificial Sequence
  Description of Artificial Sequence: Synthetic oligonucleotide
  Sense strand starting at position 3653 of SEQ ID NO: 1244097
ugagaaacguucuauuuaa

SEQ ID NO: 1464739 - RNA, 19 nt, Artificial Sequence
  Description of Artificial Sequence: Synthetic oligonucleotide
  Antisense strand to SEQ ID NO: 1464738
uuaaauagaacguuucuca

SEQ ID NO: 1464740 - RNA, 19 nt, Artificial Sequence
  Description of Artificial Sequence: Synthetic oligonucleotide
  Sense strand starting at position 3703 of SEQ ID NO: 1244097
gucaaugucauagaaggca

SEQ ID NO: 1464741 - RNA, 19 nt, Artificial Sequence
  Description of Artificial Sequence: Synthetic oligonucleotide
  Antisense strand to SEQ ID NO: 1464740
ugccuucuaugacauugac

SEQ ID NO: 1464742 - RNA, 19 nt, Artificial Sequence
  Description of Artificial Sequence: Synthetic oligonucleotide
  Sense strand starting at position 3802 of SEQ ID NO: 1244097
gauucuguaucauuggauu

SEQ ID NO: 1464743 - RNA, 19 nt, Artificial Sequence
  Description of Artificial Sequence: Synthetic oligonucleotide
  Antisense strand to SEQ ID NO: 1464742
aauccaaugauacagaauc

SEQ ID NO: 1464744 - RNA, 19 nt, Artificial Sequence
  Description of Artificial Sequence: Synthetic oligonucleotide
  Sense strand starting at position 3823 of SEQ ID NO: 1244097
uuuaaagugcuauaagguu

SEQ ID NO: 1464745 - RNA, 19 nt, Artificial Sequence
  Description of Artificial Sequence: Synthetic oligonucleotide
  Antisense strand to SEQ ID NO: 1464744
aaccuuauagcacuuuaaa

SEQ ID NO: 1464746 - RNA, 19 nt, Artificial Sequence
  Description of Artificial Sequence: Synthetic oligonucleotide
  Sense strand starting at position 2 of SEQ ID NO: 1244098
ucagaauguuaguuaagau

SEQ ID NO: 1464747 - RNA, 19 nt, Artificial Sequence
  Description of Artificial Sequence: Synthetic oligonucleotide
  Antisense strand to SEQ ID NO: 1464746
aucuuaacuaacauucuga

SEQ ID NO: 1464748 - RNA, 19 nt, Artificial Sequence
  Description of Artificial Sequence: Synthetic oligonucleotide
  Sense strand starting at position 83 of SEQ ID NO: 1244098
uuugcauuaucagcuagag

SEQ ID NO: 1464749 - RNA, 19 nt, Artificial Sequence
  Description of Artificial Sequence: Synthetic oligonucleotide
  Antisense strand to SEQ ID NO: 1464748
cucuagcugauaaugcaaa

SEQ ID NO: 1464750 - RNA, 19 nt, Artificial Sequence
  Description of Artificial Sequence: Synthetic oligonucleotide
  Sense strand starting at position 89 of SEQ ID NO: 1244098
uuaucagcuagaggguuaa

SEQ ID NO: 1464751 - RNA, 19 nt, Artificial Sequence
  Description of Artificial Sequence: Synthetic oligonucleotide
  Antisense strand to SEQ ID NO: 1464750
uuaacccucuagcugauaa

SEQ ID NO: 1464752 - RNA, 19 nt, Artificial Sequence
  Description of Artificial Sequence: Synthetic oligonucleotide
  Sense strand starting at position 100 of SEQ ID NO: 1244098
aggguuaacaugugguaga

SEQ ID NO: 1464753 - RNA, 19 nt, Artificial Sequence
  Description of Artificial Sequence: Synthetic oligonucleotide
  Antisense strand to SEQ ID NO: 1464752
ucuaccacauguuaacccu

SEQ ID NO: 1464754 - RNA, 19 nt, Artificial Sequence
  Description of Artificial Sequence: Synthetic oligonucleotide
  Sense strand starting at position 123 of SEQ ID NO: 1244098
ggacuuaugcaagguauaa

SEQ ID NO: 1464755 - RNA, 19 nt, Artificial Sequence
  Description of Artificial Sequence: Synthetic oligonucleotide
  Antisense strand to SEQ ID NO: 1464754
uuauaccuugcauaagucc

SEQ ID NO: 1464756 - RNA, 19 nt, Artificial Sequence
  Description of Artificial Sequence: Synthetic oligonucleotide
  Sense strand starting at position 896 of SEQ ID NO: 1244098
acagguugguaucuucgaa

SEQ ID NO: 1464757 - RNA, 19 nt, Artificial Sequence
  Description of Artificial Sequence: Synthetic oligonucleotide
  Antisense strand to SEQ ID NO: 1464756
uucgaagauaccaaccugu

SEQ ID NO: 1464758 - RNA, 19 nt, Artificial Sequence
  Description of Artificial Sequence: Synthetic oligonucleotide
  Sense strand starting at position 952 of SEQ ID NO: 1244098
ggacgagagccgcacuauu

SEQ ID NO: 1464759 - RNA, 19 nt, Artificial Sequence
  Description of Artificial Sequence: Synthetic oligonucleotide
  Antisense strand to SEQ ID NO: 1464758
aauagugcggcucucgucc

SEQ ID NO: 1464760 - RNA, 19 nt, Artificial Sequence
  Description of Artificial Sequence: Synthetic oligonucleotide
  Sense strand starting at position 1688 of SEQ ID NO: 1244098
cugaaucaccgccgggaaa

SEQ ID NO: 1464761 - RNA, 19 nt, Artificial Sequence
  Description of Artificial Sequence: Synthetic oligonucleotide
  Antisense strand to SEQ ID NO: 1464760
uuucccggcggugauucag

SEQ ID NO: 1464762 - RNA, 19 nt, Artificial Sequence
  Description of Artificial Sequence: Synthetic oligonucleotide
  Sense strand starting at position 2044 of SEQ ID NO: 1244098
ugcgucucugcgucauaga

SEQ ID NO: 1464763 - RNA, 19 nt, Artificial Sequence
  Description of Artificial Sequence: Synthetic oligonucleotide
  Antisense strand to SEQ ID NO: 1464762
ucuaugacgcagagacgca

SEQ ID NO: 1464764 - RNA, 19 nt, Artificial Sequence
  Description of Artificial Sequence: Synthetic oligonucleotide
  Sense strand starting at position 2160 of SEQ ID NO: 1244098
ccaugauuggugcauaucu

SEQ ID NO: 1464765 - RNA, 19 nt, Artificial Sequence
  Description of Artificial Sequence: Synthetic oligonucleotide
  Antisense strand to SEQ ID NO: 1464764
agauaugcaccaaucaugg

SEQ ID NO: 1464766 - RNA, 19 nt, Artificial Sequence
  Description of Artificial Sequence: Synthetic oligonucleotide
  Sense strand starting at position 2195 of SEQ ID NO: 1244098
guuaaaguggccuaaugau

SEQ ID NO: 1464767 - RNA, 19 nt, Artificial Sequence
  Description of Artificial Sequence: Synthetic oligonucleotide
  Antisense strand to SEQ ID NO: 1464766
aucauuaggccacuuuaac

SEQ ID NO: 1464768 - RNA, 19 nt, Artificial Sequence
  Description of Artificial Sequence: Synthetic oligonucleotide
  Sense strand starting at position 2203 of SEQ ID NO: 1244098
ggccuaaugauuggaugga

SEQ ID NO: 1464769 - RNA, 19 nt, Artificial Sequence
  Description of Artificial Sequence: Synthetic oligonucleotide
  Antisense strand to SEQ ID NO: 1464768
uccauccaaucauuaggcc

SEQ ID NO: 1464770 - RNA, 19 nt, Artificial Sequence
  Description of Artificial Sequence: Synthetic oligonucleotide
  Sense strand starting at position 2207 of SEQ ID NO: 1244098
uaaugauuggauggaugca

SEQ ID NO: 1464771 - RNA, 19 nt, Artificial Sequence
  Description of Artificial Sequence: Synthetic oligonucleotide
  Antisense strand to SEQ ID NO: 1464770
ugcauccauccaaucauua

SEQ ID NO: 1464772 - RNA, 19 nt, Artificial Sequence
  Description of Artificial Sequence: Synthetic oligonucleotide
  Sense strand starting at position 2261 of SEQ ID NO: 1244098
ggcccuucugauuggauaa

SEQ ID NO: 1464773 - RNA, 19 nt, Artificial Sequence
  Description of Artificial Sequence: Synthetic oligonucleotide
  Antisense strand to SEQ ID NO: 1464772
uuauccaaucagaagggcc

SEQ ID NO: 1464774 - RNA, 19 nt, Artificial Sequence
  Description of Artificial Sequence: Synthetic oligonucleotide
  Sense strand starting at position 2311 of SEQ ID NO: 1244098
uccaaagcucugcaauaga

SEQ ID NO: 1464775 - RNA, 19 nt, Artificial Sequence
  Description of Artificial Sequence: Synthetic oligonucleotide
  Antisense strand to SEQ ID NO: 1464774
ucuauugcagagcuuugga

SEQ ID NO: 1464776 - RNA, 19 nt, Artificial Sequence
  Description of Artificial Sequence: Synthetic oligonucleotide
  Sense strand starting at position 2325 of SEQ ID NO: 1244098
auagaaagucaaugcaaau

SEQ ID NO: 1464777 - RNA, 19 nt, Artificial Sequence
  Description of Artificial Sequence: Synthetic oligonucleotide
  Antisense strand to SEQ ID NO: 1464776
auuugcauugacuuucuau

SEQ ID NO: 1464778 - RNA, 19 nt, Artificial Sequence
  Description of Artificial Sequence: Synthetic oligonucleotide
  Sense strand starting at position 2343 of SEQ ID NO: 1244098
ugaauugcauuggucucua

SEQ ID NO: 1464779 - RNA, 19 nt, Artificial Sequence
  Description of Artificial Sequence: Synthetic oligonucleotide
  Antisense strand to SEQ ID NO: 1464778
uagagaccaaugcaauuca

SEQ ID NO: 1464780 - RNA, 19 nt, Artificial Sequence
  Description of Artificial Sequence: Synthetic oligonucleotide
  Sense strand starting at position 2348 of SEQ ID NO: 1244098
ugcauuggucucuaucaga

SEQ ID NO: 1464781 - RNA, 19 nt, Artificial Sequence
  Description of Artificial Sequence: Synthetic oligonucleotide
  Antisense strand to SEQ ID NO: 1464780
ucugauagagaccaaugca

SEQ ID NO: 1464782 - RNA, 19 nt, Artificial Sequence
  Description of Artificial Sequence: Synthetic oligonucleotide
  Sense strand starting at position 2465 of SEQ ID NO: 1244098
aaauguguucccuggauua

SEQ ID NO: 1464783 - RNA, 19 nt, Artificial Sequence
  Description of Artificial Sequence: Synthetic oligonucleotide
  Antisense strand to SEQ ID NO: 1464782
uaauccagggaacacauuu

SEQ ID NO: 1464784 - RNA, 19 nt, Artificial Sequence
  Description of Artificial Sequence: Synthetic oligonucleotide
  Sense strand starting at position 2467 of SEQ ID NO: 1244098
auguguucccuggauuauu

SEQ ID NO: 1464785 - RNA, 19 nt, Artificial Sequence
  Description of Artificial Sequence: Synthetic oligonucleotide
  Antisense strand to SEQ ID NO: 1464784
aauaauccagggaacacau

SEQ ID NO: 1464786 - RNA, 19 nt, Artificial Sequence
  Description of Artificial Sequence: Synthetic oligonucleotide
  Sense strand starting at position 2513 of SEQ ID NO: 1244098
gugcguagugugagaauua

SEQ ID NO: 1464787 - RNA, 19 nt, Artificial Sequence
  Description of Artificial Sequence: Synthetic oligonucleotide
  Antisense strand to SEQ ID NO: 1464786
uaauucucacacuacgcac

SEQ ID NO: 1464788 - RNA, 19 nt, Artificial Sequence
  Description of Artificial Sequence: Synthetic oligonucleotide
  Sense strand starting at position 2733 of SEQ ID NO: 1244098
agagguaacuuacuaagca

SEQ ID NO: 1464789 - RNA, 19 nt, Artificial Sequence
  Description of Artificial Sequence: Synthetic oligonucleotide
  Antisense strand to SEQ ID NO: 1464788
ugcuuaguaaguuaccucu

SEQ ID NO: 1464790 - RNA, 19 nt, Artificial Sequence
  Description of Artificial Sequence: Synthetic oligonucleotide
  Sense strand starting at position 2748 of SEQ ID NO: 1244098
agcaacauguuacuugaau

SEQ ID NO: 1464791 - RNA, 19 nt, Artificial Sequence
  Description of Artificial Sequence: Synthetic oligonucleotide
  Antisense strand to SEQ ID NO: 1464790
auucaaguaacauguugcu

SEQ ID NO: 1464792 - RNA, 19 nt, Artificial Sequence
  Description of Artificial Sequence: Synthetic oligonucleotide
  Sense strand starting at position 2749 of SEQ ID NO: 1244098
gcaacauguuacuugaauu

SEQ ID NO: 1464793 - RNA, 19 nt, Artificial Sequence
  Description of Artificial Sequence: Synthetic oligonucleotide
  Antisense strand to SEQ ID NO: 1464792
aauucaaguaacauguugc

SEQ ID NO: 1464794 - RNA, 19 nt, Artificial Sequence
  Description of Artificial Sequence: Synthetic oligonucleotide
  Sense strand starting at position 2809 of SEQ ID NO: 1244098
auaguccuacuauaguauu

SEQ ID NO: 1464795 - RNA, 19 nt, Artificial Sequence
  Description of Artificial Sequence: Synthetic oligonucleotide
  Antisense strand to SEQ ID NO: 1464794
aauacuauaguaggacuau

SEQ ID NO: 1464796 - RNA, 19 nt, Artificial Sequence
  Description of Artificial Sequence: Synthetic oligonucleotide
  Sense strand starting at position 2820 of SEQ ID NO: 1244098
auaguauuugcauguccau

SEQ ID NO: 1464797 - RNA, 19 nt, Artificial Sequence
  Description of Artificial Sequence: Synthetic oligonucleotide
  Antisense strand to SEQ ID NO: 1464796
auggacaugcaaauacuau

SEQ ID NO: 1464798 - RNA, 19 nt, Artificial Sequence
  Description of Artificial Sequence: Synthetic oligonucleotide
  Sense strand starting at position 2826 of SEQ ID NO: 1244098
uuugcauguccauaaagaa

SEQ ID NO: 1464799 - RNA, 19 nt, Artificial Sequence
  Description of Artificial Sequence: Synthetic oligonucleotide
  Antisense strand to SEQ ID NO: 1464798
uucuuuauggacaugcaaa

SEQ ID NO: 1464800 - RNA, 19 nt, Artificial Sequence
  Description of Artificial Sequence: Synthetic oligonucleotide
  Sense strand starting at position 2891 of SEQ ID NO: 1244098
cauauccuggcagguauua

SEQ ID NO: 1464801 - RNA, 19 nt, Artificial Sequence
  Description of Artificial Sequence: Synthetic oligonucleotide
  Antisense strand to SEQ ID NO: 1464800
uaauaccugccaggauaug

SEQ ID NO: 1464802 - RNA, 19 nt, Artificial Sequence
  Description of Artificial Sequence: Synthetic oligonucleotide
  Sense strand starting at position 2952 of SEQ ID NO: 1244098
accuuugccuaaguaaaug

SEQ ID NO: 1464803 - RNA, 19 nt, Artificial Sequence
  Description of Artificial Sequence: Synthetic oligonucleotide
  Antisense strand to SEQ ID NO: 1464802
cauuuacuuaggcaaaggu

SEQ ID NO: 1464804 - RNA, 19 nt, Artificial Sequence
  Description of Artificial Sequence: Synthetic oligonucleotide
  Sense strand starting at position 2963 of SEQ ID NO: 1244098
aguaaaugucuuggguaga

SEQ ID NO: 1464805 - RNA, 19 nt, Artificial Sequence
  Description of Artificial Sequence: Synthetic oligonucleotide
  Antisense strand to SEQ ID NO: 1464804
ucuacccaagacauuuacu

SEQ ID NO: 1464806 - RNA, 19 nt, Artificial Sequence
  Description of Artificial Sequence: Synthetic oligonucleotide
  Sense strand starting at position 2966 of SEQ ID NO: 1244098
aaaugucuuggguagauug

SEQ ID NO: 1464807 - RNA, 19 nt, Artificial Sequence
  Description of Artificial Sequence: Synthetic oligonucleotide
  Antisense strand to SEQ ID NO: 1464806
caaucuacccaagacauuu

SEQ ID NO: 1464808 - RNA, 19 nt, Artificial Sequence
  Description of Artificial Sequence: Synthetic oligonucleotide
  Sense strand starting at position 2968 of SEQ ID NO: 1244098
augucuuggguagauugua

SEQ ID NO: 1464809 - RNA, 19 nt, Artificial Sequence
  Description of Artificial Sequence: Synthetic oligonucleotide
  Antisense strand to SEQ ID NO: 1464808
uacaaucuacccaagacau

SEQ ID NO: 1464810 - RNA, 19 nt, Artificial Sequence
  Description of Artificial Sequence: Synthetic oligonucleotide
  Sense strand starting at position 3072 of SEQ ID NO: 1244098
gaaauagagccuugggcau

SEQ ID NO: 1464811 - RNA, 19 nt, Artificial Sequence
  Description of Artificial Sequence: Synthetic oligonucleotide
  Antisense strand to SEQ ID NO: 1464810
augcccaaggcucuauuuc

SEQ ID NO: 1464812 - RNA, 19 nt, Artificial Sequence
  Description of Artificial Sequence: Synthetic oligonucleotide
  Sense strand starting at position 3084 of SEQ ID NO: 1244098
ugggcauucuacucuauag

SEQ ID NO: 1464813 - RNA, 19 nt, Artificial Sequence
  Description of Artificial Sequence: Synthetic oligonucleotide
  Antisense strand to SEQ ID NO: 1464812
cuauagaguagaaugccca

SEQ ID NO: 1464814 - RNA, 19 nt, Artificial Sequence
  Description of Artificial Sequence: Synthetic oligonucleotide
  Sense strand starting at position 3086 of SEQ ID NO: 1244098
ggcauucuacucuauaguu

SEQ ID NO: 1464815 - RNA, 19 nt, Artificial Sequence
  Description of Artificial Sequence: Synthetic oligonucleotide
  Antisense strand to SEQ ID NO: 1464814
aacuauagaguagaaugcc

SEQ ID NO: 1464816 - RNA, 19 nt, Artificial Sequence
  Description of Artificial Sequence: Synthetic oligonucleotide
  Sense strand starting at position 3150 of SEQ ID NO: 1244098
agcagauacagguaugcau

SEQ ID NO: 1464817 - RNA, 19 nt, Artificial Sequence
  Description of Artificial Sequence: Synthetic oligonucleotide
  Antisense strand to SEQ ID NO: 1464816
augcauaccuguaucugcu

SEQ ID NO: 1464818 - RNA, 19 nt, Artificial Sequence
  Description of Artificial Sequence: Synthetic oligonucleotide
  Sense strand starting at position 3512 of SEQ ID NO: 1244098
cccagucacccaugcuaga

SEQ ID NO: 1464819 - RNA, 19 nt, Artificial Sequence
  Description of Artificial Sequence: Synthetic oligonucleotide
  Antisense strand to SEQ ID NO: 1464818
ucuagcaugggugacuggg

SEQ ID NO: 1464820 - RNA, 19 nt, Artificial Sequence
  Description of Artificial Sequence: Synthetic oligonucleotide
  Sense strand starting at position 3653 of SEQ ID NO: 1244098
agaauuacaguacguaagu

SEQ ID NO: 1464821 - RNA, 19 nt, Artificial Sequence
  Description of Artificial Sequence: Synthetic oligonucleotide
  Antisense strand to SEQ ID NO: 1464820
acuuacguacuguaauucu

SEQ ID NO: 1464822 - RNA, 19 nt, Artificial Sequence
  Description of Artificial Sequence: Synthetic oligonucleotide
  Sense strand starting at position 3654 of SEQ ID NO: 1244098
gaauuacaguacguaagua

SEQ ID NO: 1464823 - RNA, 19 nt, Artificial Sequence
  Description of Artificial Sequence: Synthetic oligonucleotide
  Antisense strand to SEQ ID NO: 1464822
uacuuacguacuguaauuc

SEQ ID NO: 1464824 - RNA, 19 nt, Artificial Sequence
  Description of Artificial Sequence: Synthetic oligonucleotide
  Sense strand starting at position 3774 of SEQ ID NO: 1244098
gguaucaaauuccuguuau

SEQ ID NO: 1464825 - RNA, 19 nt, Artificial Sequence
  Description of Artificial Sequence: Synthetic oligonucleotide
  Antisense strand to SEQ ID NO: 1464824
auaacaggaauuugauacc

SEQ ID NO: 1464826 - RNA, 19 nt, Artificial Sequence
  Description of Artificial Sequence: Synthetic oligonucleotide
  Sense strand starting at position 99 of SEQ ID NO: 1244099
ugacgucuuccugggugau

SEQ ID NO: 1464827 - RNA, 19 nt, Artificial Sequence
  Description of Artificial Sequence: Synthetic oligonucleotide
  Antisense strand to SEQ ID NO: 1464826
aucacccaggaagacguca

SEQ ID NO: 1464828 - RNA, 19 nt, Artificial Sequence
  Description of Artificial Sequence: Synthetic oligonucleotide
  Sense strand starting at position 100 of SEQ ID NO: 1244099
gacgucuuccugggugauc

SEQ ID NO: 1464829 - RNA, 19 nt, Artificial Sequence
  Description of Artificial Sequence: Synthetic oligonucleotide
  Antisense strand to SEQ ID NO: 1464828
gaucacccaggaagacguc

SEQ ID NO: 1464830 - RNA, 19 nt, Artificial Sequence
  Description of Artificial Sequence: Synthetic oligonucleotide
  Sense strand starting at position 102 of SEQ ID NO: 1244099
cgucuuccugggugaucuu

SEQ ID NO: 1464831 - RNA, 19 nt, Artificial Sequence
  Description of Artificial Sequence: Synthetic oligonucleotide
  Antisense strand to SEQ ID NO: 1464830
aagaucacccaggaagacg

SEQ ID NO: 1464832 - RNA, 19 nt, Artificial Sequence
  Description of Artificial Sequence: Synthetic oligonucleotide
  Sense strand starting at position 241 of SEQ ID NO: 1244099
aucgucaguucuccaacaa

SEQ ID NO: 1464833 - RNA, 19 nt, Artificial Sequence
  Description of Artificial Sequence: Synthetic oligonucleotide
  Antisense strand to SEQ ID NO: 1464832
uuguuggagaacugacgau

SEQ ID NO: 1464834 - RNA, 19 nt, Artificial Sequence
  Description of Artificial Sequence: Synthetic oligonucleotide
  Sense strand starting at position 242 of SEQ ID NO: 1244099
ucgucaguucuccaacaag

SEQ ID NO: 1464835 - RNA, 19 nt, Artificial Sequence
  Description of Artificial Sequence: Synthetic oligonucleotide
  Antisense strand to SEQ ID NO: 1464834
cuuguuggagaacugacga

SEQ ID NO: 1464836 - RNA, 19 nt, Artificial Sequence
  Description of Artificial Sequence: Synthetic oligonucleotide
  Sense strand starting at position 884 of SEQ ID NO: 1244099
aauggagucuccuggguca

SEQ ID NO: 1464837 - RNA, 19 nt, Artificial Sequence
  Description of Artificial Sequence: Synthetic oligonucleotide
  Antisense strand to SEQ ID NO: 1464836
ugacccaggagacuccauu

SEQ ID NO: 1464838 - RNA, 19 nt, Artificial Sequence
  Description of Artificial Sequence: Synthetic oligonucleotide
  Sense strand starting at position 886 of SEQ ID NO: 1244099
uggagucuccugggucaua

SEQ ID NO: 1464839 - RNA, 19 nt, Artificial Sequence
  Description of Artificial Sequence: Synthetic oligonucleotide
  Antisense strand to SEQ ID NO: 1464838
uaugacccaggagacucca

SEQ ID NO: 1464840 - RNA, 19 nt, Artificial Sequence
  Description of Artificial Sequence: Synthetic oligonucleotide
  Sense strand starting at position 1250 of SEQ ID NO: 1244099
ugcagaucugccgcagcaa

SEQ ID NO: 1464841 - RNA, 19 nt, Artificial Sequence
  Description of Artificial Sequence: Synthetic oligonucleotide
  Antisense strand to SEQ ID NO: 1464840
uugcugcggcagaucugca

SEQ ID NO: 1464842 - RNA, 19 nt, Artificial Sequence
  Description of Artificial Sequence: Synthetic oligonucleotide
  Sense strand starting at position 1523 of SEQ ID NO: 1244099
ccuccagcucccgaauaaa

SEQ ID NO: 1464843 - RNA, 19 nt, Artificial Sequence
  Description of Artificial Sequence: Synthetic oligonucleotide
  Antisense strand to SEQ ID NO: 1464842
uuuauucgggagcuggagg

SEQ ID NO: 1464844 - RNA, 19 nt, Artificial Sequence
  Description of Artificial Sequence: Synthetic oligonucleotide
  Sense strand starting at position 1686 of SEQ ID NO: 1244099
guccgaauugucgggcaua

SEQ ID NO: 1464845 - RNA, 19 nt, Artificial Sequence
  Description of Artificial Sequence: Synthetic oligonucleotide
  Antisense strand to SEQ ID NO: 1464844
uaugcccgacaauucggac

SEQ ID NO: 1464846 - RNA, 19 nt, Artificial Sequence
  Description of Artificial Sequence: Synthetic oligonucleotide
  Sense strand starting at position 1687 of SEQ ID NO: 1244099
uccgaauugucgggcauag

SEQ ID NO: 1464847 - RNA, 19 nt, Artificial Sequence
  Description of Artificial Sequence: Synthetic oligonucleotide
  Antisense strand to SEQ ID NO: 1464846
cuaugcccgacaauucgga

SEQ ID NO: 1464848 - RNA, 19 nt, Artificial Sequence
  Description of Artificial Sequence: Synthetic oligonucleotide
  Sense strand starting at position 1689 of SEQ ID NO: 1244099
cgaauugucgggcauagac

SEQ ID NO: 1464849 - RNA, 19 nt, Artificial Sequence
  Description of Artificial Sequence: Synthetic oligonucleotide
  Antisense strand to SEQ ID NO: 1464848
gucuaugcccgacaauucg

SEQ ID NO: 1464850 - RNA, 19 nt, Artificial Sequence
  Description of Artificial Sequence: Synthetic oligonucleotide
  Sense strand starting at position 2229 of SEQ ID NO: 1244099
cucuccaucuccggagaau

SEQ ID NO: 1464851 - RNA, 19 nt, Artificial Sequence
  Description of Artificial Sequence: Synthetic oligonucleotide
  Antisense strand to SEQ ID NO: 1464850
auucuccggagauggagag

SEQ ID NO: 1464852 - RNA, 19 nt, Artificial Sequence
  Description of Artificial Sequence: Synthetic oligonucleotide
  Sense strand starting at position 2230 of SEQ ID NO: 1244099
ucuccaucuccggagaaug

SEQ ID NO: 1464853 - RNA, 19 nt, Artificial Sequence
  Description of Artificial Sequence: Synthetic oligonucleotide
  Antisense strand to SEQ ID NO: 1464852
cauucuccggagauggaga

SEQ ID NO: 1464854 - RNA, 19 nt, Artificial Sequence
  Description of Artificial Sequence: Synthetic oligonucleotide
  Sense strand starting at position 2242 of SEQ ID NO: 1244099
gagaaugguucugcccaaa

SEQ ID NO: 1464855 - RNA, 19 nt, Artificial Sequence
  Description of Artificial Sequence: Synthetic oligonucleotide
  Antisense strand to SEQ ID NO: 1464854
uuugggcagaaccauucuc

SEQ ID NO: 1464856 - RNA, 19 nt, Artificial Sequence
  Description of Artificial Sequence: Synthetic oligonucleotide
  Sense strand starting at position 2333 of SEQ ID NO: 1244099
gggugccuucccuggugua

SEQ ID NO: 1464857 - RNA, 19 nt, Artificial Sequence
  Description of Artificial Sequence: Synthetic oligonucleotide
  Antisense strand to SEQ ID NO: 1464856
uacaccagggaaggcaccc

SEQ ID NO: 1464858 - RNA, 19 nt, Artificial Sequence
  Description of Artificial Sequence: Synthetic oligonucleotide
  Sense strand starting at position 2336 of SEQ ID NO: 1244099
ugccuucccugguguagaa

SEQ ID NO: 1464859 - RNA, 19 nt, Artificial Sequence
  Description of Artificial Sequence: Synthetic oligonucleotide
  Antisense strand to SEQ ID NO: 1464858
uucuacaccagggaaggca

SEQ ID NO: 1464860 - RNA, 19 nt, Artificial Sequence
  Description of Artificial Sequence: Synthetic oligonucleotide
  Sense strand starting at position 2413 of SEQ ID NO: 1244099
gcgucuuucccgguugacu

SEQ ID NO: 1464861 - RNA, 19 nt, Artificial Sequence
  Description of Artificial Sequence: Synthetic oligonucleotide
  Antisense strand to SEQ ID NO: 1464860
agucaaccgggaaagacgc

SEQ ID NO: 1464862 - RNA, 19 nt, Artificial Sequence
  Description of Artificial Sequence: Synthetic oligonucleotide
  Sense strand starting at position 2670 of SEQ ID NO: 1244099
cccuguucuccuugggaga

SEQ ID NO: 1464863 - RNA, 19 nt, Artificial Sequence
  Description of Artificial Sequence: Synthetic oligonucleotide
  Antisense strand to SEQ ID NO: 1464862
ucucccaaggagaacaggg

SEQ ID NO: 1464864 - RNA, 19 nt, Artificial Sequence
  Description of Artificial Sequence: Synthetic oligonucleotide
  Sense strand starting at position 3034 of SEQ ID NO: 1244099
acuggaaauguuggguaga

SEQ ID NO: 1464865 - RNA, 19 nt, Artificial Sequence
  Description of Artificial Sequence: Synthetic oligonucleotide
  Antisense strand to SEQ ID NO: 1464864
ucuacccaacauuuccagu

SEQ ID NO: 1464866 - RNA, 19 nt, Artificial Sequence
  Description of Artificial Sequence: Synthetic oligonucleotide
  Sense strand starting at position 3036 of SEQ ID NO: 1244099
uggaaauguuggguagaca

SEQ ID NO: 1464867 - RNA, 19 nt, Artificial Sequence
  Description of Artificial Sequence: Synthetic oligonucleotide
  Antisense strand to SEQ ID NO: 1464866
ugucuacccaacauuucca

SEQ ID NO: 1464868 - RNA, 19 nt, Artificial Sequence
  Description of Artificial Sequence: Synthetic oligonucleotide
  Sense strand starting at position 3047 of SEQ ID NO: 1244099
gguagacaauuagauguau

SEQ ID NO: 1464869 - RNA, 19 nt, Artificial Sequence
  Description of Artificial Sequence: Synthetic oligonucleotide
  Antisense strand to SEQ ID NO: 1464868
auacaucuaauugucuacc

SEQ ID NO: 1464870 - RNA, 19 nt, Artificial Sequence
  Description of Artificial Sequence: Synthetic oligonucleotide
  Sense strand starting at position 3099 of SEQ ID NO: 1244099
auuuaaauguaggagucau

SEQ ID NO: 1464871 - RNA, 19 nt, Artificial Sequence
  Description of Artificial Sequence: Synthetic oligonucleotide
  Antisense strand to SEQ ID NO: 1464870
augacuccuacauuuaaau

SEQ ID NO: 1464872 - RNA, 19 nt, Artificial Sequence
  Description of Artificial Sequence: Synthetic oligonucleotide
  Sense strand starting at position 3109 of SEQ ID NO: 1244099
aggagucauuguucuuuga

SEQ ID NO: 1464873 - RNA, 19 nt, Artificial Sequence
  Description of Artificial Sequence: Synthetic oligonucleotide
  Antisense strand to SEQ ID NO: 1464872
ucaaagaacaaugacuccu

SEQ ID NO: 1464874 - RNA, 19 nt, Artificial Sequence
  Description of Artificial Sequence: Synthetic oligonucleotide
  Sense strand starting at position 3111 of SEQ ID NO: 1244099
gagucauuguucuuugaug

SEQ ID NO: 1464875 - RNA, 19 nt, Artificial Sequence
  Description of Artificial Sequence: Synthetic oligonucleotide
  Antisense strand to SEQ ID NO: 1464874
caucaaagaacaaugacuc

SEQ ID NO: 1464876 - RNA, 19 nt, Artificial Sequence
  Description of Artificial Sequence: Synthetic oligonucleotide
  Sense strand starting at position 3112 of SEQ ID NO: 1244099
agucauuguucuuugauga

SEQ ID NO: 1464877 - RNA, 19 nt, Artificial Sequence
  Description of Artificial Sequence: Synthetic oligonucleotide
  Antisense strand to SEQ ID NO: 1464876
ucaucaaagaacaaugacu

SEQ ID NO: 1464878 - RNA, 19 nt, Artificial Sequence
  Description of Artificial Sequence: Synthetic oligonucleotide
  Sense strand starting at position 3113 of SEQ ID NO: 1244099
gucauuguucuuugaugac

SEQ ID NO: 1464879 - RNA, 19 nt, Artificial Sequence
  Description of Artificial Sequence: Synthetic oligonucleotide
  Antisense strand to SEQ ID NO: 1464878
gucaucaaagaacaaugac

SEQ ID NO: 1464880 - RNA, 19 nt, Artificial Sequence
  Description of Artificial Sequence: Synthetic oligonucleotide
  Sense strand starting at position 3116 of SEQ ID NO: 1244099
auuguucuuugaugaccau

SEQ ID NO: 1464881 - RNA, 19 nt, Artificial Sequence
  Description of Artificial Sequence: Synthetic oligonucleotide
  Antisense strand to SEQ ID NO: 1464880
auggucaucaaagaacaau

SEQ ID NO: 1464882 - RNA, 19 nt, Artificial Sequence
  Description of Artificial Sequence: Synthetic oligonucleotide
  Sense strand starting at position 3117 of SEQ ID NO: 1244099
uuguucuuugaugaccauu

SEQ ID NO: 1464883 - RNA, 19 nt, Artificial Sequence
  Description of Artificial Sequence: Synthetic oligonucleotide
  Antisense strand to SEQ ID NO: 1464882
aauggucaucaaagaacaa

SEQ ID NO: 1464884 - RNA, 19 nt, Artificial Sequence
  Description of Artificial Sequence: Synthetic oligonucleotide
  Sense strand starting at position 3139 of SEQ ID NO: 1244099
agcuaugagacuggugaga

SEQ ID NO: 1464885 - RNA, 19 nt, Artificial Sequence
  Description of Artificial Sequence: Synthetic oligonucleotide
  Antisense strand to SEQ ID NO: 1464884
ucucaccagucucauagcu

SEQ ID NO: 1464886 - RNA, 19 nt, Artificial Sequence
  Description of Artificial Sequence: Synthetic oligonucleotide
  Sense strand starting at position 3287 of SEQ ID NO: 1244099
ccaggaaaguuggguccua

SEQ ID NO: 1464887 - RNA, 19 nt, Artificial Sequence
  Description of Artificial Sequence: Synthetic oligonucleotide
  Antisense strand to SEQ ID NO: 1464886
uaggacccaacuuuccugg

SEQ ID NO: 1464888 - RNA, 19 nt, Artificial Sequence
  Description of Artificial Sequence: Synthetic oligonucleotide
  Sense strand starting at position 3292 of SEQ ID NO: 1244099
aaaguuggguccuagaaag

SEQ ID NO: 1464889 - RNA, 19 nt, Artificial Sequence
  Description of Artificial Sequence: Synthetic oligonucleotide
  Antisense strand to SEQ ID NO: 1464888
cuuucuaggacccaacuuu

SEQ ID NO: 1464890 - RNA, 19 nt, Artificial Sequence
  Description of Artificial Sequence: Synthetic oligonucleotide
  Sense strand starting at position 3434 of SEQ ID NO: 1244099
ggucauggccucggcaaga

SEQ ID NO: 1464891 - RNA, 19 nt, Artificial Sequence
  Description of Artificial Sequence: Synthetic oligonucleotide
  Antisense strand to SEQ ID NO: 1464890
ucuugccgaggccaugacc

SEQ ID NO: 1464892 - RNA, 19 nt, Artificial Sequence
  Description of Artificial Sequence: Synthetic oligonucleotide
  Sense strand starting at position 3892 of SEQ ID NO: 1244099
gaggcuuaggagggugaau

SEQ ID NO: 1464893 - RNA, 19 nt, Artificial Sequence
  Description of Artificial Sequence: Synthetic oligonucleotide
  Antisense strand to SEQ ID NO: 1464892
auucacccuccuaagccuc

SEQ ID NO: 1464894 - RNA, 19 nt, Artificial Sequence
  Description of Artificial Sequence: Synthetic oligonucleotide
  Sense strand starting at position 101 of SEQ ID NO: 1244100
gcccaauuauggcucaaac

SEQ ID NO: 1464895 - RNA, 19 nt, Artificial Sequence
  Description of Artificial Sequence: Synthetic oligonucleotide
  Antisense strand to SEQ ID NO: 1464894
guuugagccauaauugggc

SEQ ID NO: 1464896 - RNA, 19 nt, Artificial Sequence
  Description of Artificial Sequence: Synthetic oligonucleotide
  Sense strand starting at position 185 of SEQ ID NO: 1244100
agagaugucucacucacua

SEQ ID NO: 1464897 - RNA, 19 nt, Artificial Sequence
  Description of Artificial Sequence: Synthetic oligonucleotide
  Antisense strand to SEQ ID NO: 1464896
uagugagugagacaucucu

SEQ ID NO: 1464898 - RNA, 19 nt, Artificial Sequence
  Description of Artificial Sequence: Synthetic oligonucleotide
  Sense strand starting at position 332 of SEQ ID NO: 1244100
ccgcgucucuggguaaagu

SEQ ID NO: 1464899 - RNA, 19 nt, Artificial Sequence
  Description of Artificial Sequence: Synthetic oligonucleotide
  Antisense strand to SEQ ID NO: 1464898
acuuuacccagagacgcgg

SEQ ID NO: 1464900 - RNA, 19 nt, Artificial Sequence
  Description of Artificial Sequence: Synthetic oligonucleotide
  Sense strand starting at position 462 of SEQ ID NO: 1244100
aaccaagaguguuuccgau

SEQ ID NO: 1464901 - RNA, 19 nt, Artificial Sequence
  Description of Artificial Sequence: Synthetic oligonucleotide
  Antisense strand to SEQ ID NO: 1464900
aucggaaacacucuugguu

SEQ ID NO: 1464902 - RNA, 19 nt, Artificial Sequence
  Description of Artificial Sequence: Synthetic oligonucleotide
  Sense strand starting at position 464 of SEQ ID NO: 1244100
ccaagaguguuuccgauuc

SEQ ID NO: 1464903 - RNA, 19 nt, Artificial Sequence
  Description of Artificial Sequence: Synthetic oligonucleotide
  Antisense strand to SEQ ID NO: 1464902
gaaucggaaacacucuugg

SEQ ID NO: 1464904 - RNA, 19 nt, Artificial Sequence
  Description of Artificial Sequence: Synthetic oligonucleotide
  Sense strand starting at position 530 of SEQ ID NO: 1244100
ccagcuguccuccgcaaga

SEQ ID NO: 1464905 - RNA, 19 nt, Artificial Sequence
  Description of Artificial Sequence: Synthetic oligonucleotide
  Antisense strand to SEQ ID NO: 1464904
ucuugcggaggacagcugg

SEQ ID NO: 1464906 - RNA, 19 nt, Artificial Sequence
  Description of Artificial Sequence: Synthetic oligonucleotide
  Sense strand starting at position 608 of SEQ ID NO: 1244100
aauggagacucgucuuuau

SEQ ID NO: 1464907 - RNA, 19 nt, Artificial Sequence
  Description of Artificial Sequence: Synthetic oligonucleotide
  Antisense strand to SEQ ID NO: 1464906
auaaagacgagucuccauu

SEQ ID NO: 1464908 - RNA, 19 nt, Artificial Sequence
  Description of Artificial Sequence: Synthetic oligonucleotide
  Sense strand starting at position 1227 of SEQ ID NO: 1244100
gcugguaucggccuacuuu

SEQ ID NO: 1464909 - RNA, 19 nt, Artificial Sequence
  Description of Artificial Sequence: Synthetic oligonucleotide
  Antisense strand to SEQ ID NO: 1464908
aaaguaggccgauaccagc

SEQ ID NO: 1464910 - RNA, 19 nt, Artificial Sequence
  Description of Artificial Sequence: Synthetic oligonucleotide
  Sense strand starting at position 1393 of SEQ ID NO: 1244100
gucugucugcagcagaagu

SEQ ID NO: 1464911 - RNA, 19 nt, Artificial Sequence
  Description of Artificial Sequence: Synthetic oligonucleotide
  Antisense strand to SEQ ID NO: 1464910
acuucugcugcagacagac

SEQ ID NO: 1464912 - RNA, 19 nt, Artificial Sequence
  Description of Artificial Sequence: Synthetic oligonucleotide
  Sense strand starting at position 1602 of SEQ ID NO: 1244100
ccuguaaacuggguauacu

SEQ ID NO: 1464913 - RNA, 19 nt, Artificial Sequence
  Description of Artificial Sequence: Synthetic oligonucleotide
  Antisense strand to SEQ ID NO: 1464912
aguauacccaguuuacagg

SEQ ID NO: 1464914 - RNA, 19 nt, Artificial Sequence
  Description of Artificial Sequence: Synthetic oligonucleotide
  Sense strand starting at position 1603 of SEQ ID NO: 1244100
cuguaaacuggguauacua

SEQ ID NO: 1464915 - RNA, 19 nt, Artificial Sequence
  Description of Artificial Sequence: Synthetic oligonucleotide
  Antisense strand to SEQ ID NO: 1464914
uaguauacccaguuuacag

SEQ ID NO: 1464916 - RNA, 19 nt, Artificial Sequence
  Description of Artificial Sequence: Synthetic oligonucleotide
  Sense strand starting at position 1884 of SEQ ID NO: 1244100
gaucuuuaccuuuguggaa

SEQ ID NO: 1464917 - RNA, 19 nt, Artificial Sequence
  Description of Artificial Sequence: Synthetic oligonucleotide
  Antisense strand to SEQ ID NO: 1464916
uuccacaaagguaaagauc

SEQ ID NO: 1464918 - RNA, 19 nt, Artificial Sequence
  Description of Artificial Sequence: Synthetic oligonucleotide
  Sense strand starting at position 1947 of SEQ ID NO: 1244100
aggagaugucugugguggu

SEQ ID NO: 1464919 - RNA, 19 nt, Artificial Sequence
  Description of Artificial Sequence: Synthetic oligonucleotide
  Antisense strand to SEQ ID NO: 1464918
accaccacagacaucuccu

SEQ ID NO: 1464920 - RNA, 19 nt, Artificial Sequence
  Description of Artificial Sequence: Synthetic oligonucleotide
  Sense strand starting at position 1948 of SEQ ID NO: 1244100
ggagaugucuguggugguu

SEQ ID NO: 1464921 - RNA, 19 nt, Artificial Sequence
  Description of Artificial Sequence: Synthetic oligonucleotide
  Antisense strand to SEQ ID NO: 1464920
aaccaccacagacaucucc

SEQ ID NO: 1464922 - RNA, 19 nt, Artificial Sequence
  Description of Artificial Sequence: Synthetic oligonucleotide
  Sense strand starting at position 1951 of SEQ ID NO: 1244100
gaugucuguggugguucaa

SEQ ID NO: 1464923 - RNA, 19 nt, Artificial Sequence
  Description of Artificial Sequence: Synthetic oligonucleotide
  Antisense strand to SEQ ID NO: 1464922
uugaaccaccacagacauc

SEQ ID NO: 1464924 - RNA, 19 nt, Artificial Sequence
  Description of Artificial Sequence: Synthetic oligonucleotide
  Sense strand starting at position 1978 of SEQ ID NO: 1244100
gaaccuugaggcugucaau

SEQ ID NO: 1464925 - RNA, 19 nt, Artificial Sequence
  Description of Artificial Sequence: Synthetic oligonucleotide
  Antisense strand to SEQ ID NO: 1464924
auugacagccucaagguuc

SEQ ID NO: 1464926 - RNA, 19 nt, Artificial Sequence
  Description of Artificial Sequence: Synthetic oligonucleotide
  Sense strand starting at position 1981 of SEQ ID NO: 1244100
ccuugaggcugucaauugu

SEQ ID NO: 1464927 - RNA, 19 nt, Artificial Sequence
  Description of Artificial Sequence: Synthetic oligonucleotide
  Antisense strand to SEQ ID NO: 1464926
acaauugacagccucaagg

SEQ ID NO: 1464928 - RNA, 19 nt, Artificial Sequence
  Description of Artificial Sequence: Synthetic oligonucleotide
  Sense strand starting at position 2021 of SEQ ID NO: 1244100
gguuuauagugcucugagg

SEQ ID NO: 1464929 - RNA, 19 nt, Artificial Sequence
  Description of Artificial Sequence: Synthetic oligonucleotide
  Antisense strand to SEQ ID NO: 1464928
ccucagagcacuauaaacc

SEQ ID NO: 1464930 - RNA, 19 nt, Artificial Sequence
  Description of Artificial Sequence: Synthetic oligonucleotide
  Sense strand starting at position 2023 of SEQ ID NO: 1244100
uuuauagugcucugaggug

SEQ ID NO: 1464931 - RNA, 19 nt, Artificial Sequence
  Description of Artificial Sequence: Synthetic oligonucleotide
  Antisense strand to SEQ ID NO: 1464930
caccucagagcacuauaaa

SEQ ID NO: 1464932 - RNA, 19 nt, Artificial Sequence
  Description of Artificial Sequence: Synthetic oligonucleotide
  Sense strand starting at position 2094 of SEQ ID NO: 1244100
cuaagauuagccugcugca

SEQ ID NO: 1464933 - RNA, 19 nt, Artificial Sequence
  Description of Artificial Sequence: Synthetic oligonucleotide
  Antisense strand to SEQ ID NO: 1464932
ugcagcaggcuaaucuuag

SEQ ID NO: 1464934 - RNA, 19 nt, Artificial Sequence
  Description of Artificial Sequence: Synthetic oligonucleotide
  Sense strand starting at position 2207 of SEQ ID NO: 1244100
ucuaucugcucccuggaga

SEQ ID NO: 1464935 - RNA, 19 nt, Artificial Sequence
  Description of Artificial Sequence: Synthetic oligonucleotide
  Antisense strand to SEQ ID NO: 1464934
ucuccagggagcagauaga

SEQ ID NO: 1464936 - RNA, 19 nt, Artificial Sequence
  Description of Artificial Sequence: Synthetic oligonucleotide
  Sense strand starting at position 2208 of SEQ ID NO: 1244100
cuaucugcucccuggagau

SEQ ID NO: 1464937 - RNA, 19 nt, Artificial Sequence
  Description of Artificial Sequence: Synthetic oligonucleotide
  Antisense strand to SEQ ID NO: 1464936
aucuccagggagcagauag

SEQ ID NO: 1464938 - RNA, 19 nt, Artificial Sequence
  Description of Artificial Sequence: Synthetic oligonucleotide
  Sense strand starting at position 2230 of SEQ ID NO: 1244100
gcggucuccgggcacuaau

SEQ ID NO: 1464939 - RNA, 19 nt, Artificial Sequence
  Description of Artificial Sequence: Synthetic oligonucleotide
  Antisense strand to SEQ ID NO: 1464938
auuagugcccggagaccgc

SEQ ID NO: 1464940 - RNA, 19 nt, Artificial Sequence
  Description of Artificial Sequence: Synthetic oligonucleotide
  Sense strand starting at position 2264 of SEQ ID NO: 1244100
ccaggaaucugggagcaca

SEQ ID NO: 1464941 - RNA, 19 nt, Artificial Sequence
  Description of Artificial Sequence: Synthetic oligonucleotide
  Antisense strand to SEQ ID NO: 1464940
ugugcucccagauuccugg

SEQ ID NO: 1464942 - RNA, 19 nt, Artificial Sequence
  Description of Artificial Sequence: Synthetic oligonucleotide
  Sense strand starting at position 2738 of SEQ ID NO: 1244100
cugaauagcuccugaauag

SEQ ID NO: 1464943 - RNA, 19 nt, Artificial Sequence
  Description of Artificial Sequence: Synthetic oligonucleotide
  Antisense strand to SEQ ID NO: 1464942
cuauucaggagcuauucag

SEQ ID NO: 1464944 - RNA, 19 nt, Artificial Sequence
  Description of Artificial Sequence: Synthetic oligonucleotide
  Sense strand starting at position 3815 of SEQ ID NO: 1244100
gccacaaucccuggcuaau

SEQ ID NO: 1464945 - RNA, 19 nt, Artificial Sequence
  Description of Artificial Sequence: Synthetic oligonucleotide
  Antisense strand to SEQ ID NO: 1464944
auuagccagggauuguggc

SEQ ID NO: 1464946 - RNA, 19 nt, Artificial Sequence
  Description of Artificial Sequence: Synthetic oligonucleotide
  Sense strand starting at position 64 of SEQ ID NO: 1244101
accuuugucucugcagcua

SEQ ID NO: 1464947 - RNA, 19 nt, Artificial Sequence
  Description of Artificial Sequence: Synthetic oligonucleotide
  Antisense strand to SEQ ID NO: 1464946
uagcugcagagacaaaggu

SEQ ID NO: 1464948 - RNA, 19 nt, Artificial Sequence
  Description of Artificial Sequence: Synthetic oligonucleotide
  Sense strand starting at position 138 of SEQ ID NO: 1244101
gccaaaguaggaggauaua

SEQ ID NO: 1464949 - RNA, 19 nt, Artificial Sequence
  Description of Artificial Sequence: Synthetic oligonucleotide
  Antisense strand to SEQ ID NO: 1464948
uauauccuccuacuuuggc

SEQ ID NO: 1464950 - RNA, 19 nt, Artificial Sequence
  Description of Artificial Sequence: Synthetic oligonucleotide
  Sense strand starting at position 255 of SEQ ID NO: 1244101
cccacauucccaggacaga

SEQ ID NO: 1464951 - RNA, 19 nt, Artificial Sequence
  Description of Artificial Sequence: Synthetic oligonucleotide
  Antisense strand to SEQ ID NO: 1464950
ucuguccugggaauguggg

SEQ ID NO: 1464952 - RNA, 19 nt, Artificial Sequence
  Description of Artificial Sequence: Synthetic oligonucleotide
  Sense strand starting at position 314 of SEQ ID NO: 1244101
cccuacugcuuugucaaga

SEQ ID NO: 1464953 - RNA, 19 nt, Artificial Sequence
  Description of Artificial Sequence: Synthetic oligonucleotide
  Antisense strand to SEQ ID NO: 1464952
ucuugacaaagcaguaggg

SEQ ID NO: 1464954 - RNA, 19 nt, Artificial Sequence
  Description of Artificial Sequence: Synthetic oligonucleotide
  Sense strand starting at position 315 of SEQ ID NO: 1244101
ccuacugcuuugucaagaa

SEQ ID NO: 1464955 - RNA, 19 nt, Artificial Sequence
  Description of Artificial Sequence: Synthetic oligonucleotide
  Antisense strand to SEQ ID NO: 1464954
uucuugacaaagcaguagg

SEQ ID NO: 1464956 - RNA, 19 nt, Artificial Sequence
  Description of Artificial Sequence: Synthetic oligonucleotide
  Sense strand starting at position 413 of SEQ ID NO: 1244101
caagcuuuguguuuaggga

SEQ ID NO: 1464957 - RNA, 19 nt, Artificial Sequence
  Description of Artificial Sequence: Synthetic oligonucleotide
  Antisense strand to SEQ ID NO: 1464956
ucccuaaacacaaagcuug

SEQ ID NO: 1464958 - RNA, 19 nt, Artificial Sequence
  Description of Artificial Sequence: Synthetic oligonucleotide
  Sense strand starting at position 417 of SEQ ID NO: 1244101
cuuuguguuuagggaggga

SEQ ID NO: 1464959 - RNA, 19 nt, Artificial Sequence
  Description of Artificial Sequence: Synthetic oligonucleotide
  Antisense strand to SEQ ID NO: 1464958
ucccucccuaaacacaaag

SEQ ID NO: 1464960 - RNA, 19 nt, Artificial Sequence
  Description of Artificial Sequence: Synthetic oligonucleotide
  Sense strand starting at position 835 of SEQ ID NO: 1244101
uggucacugacugagugau

SEQ ID NO: 1464961 - RNA, 19 nt, Artificial Sequence
  Description of Artificial Sequence: Synthetic oligonucleotide
  Antisense strand to SEQ ID NO: 1464960
aucacucagucagugacca

SEQ ID NO: 1464962 - RNA, 19 nt, Artificial Sequence
  Description of Artificial Sequence: Synthetic oligonucleotide
  Sense strand starting at position 1294 of SEQ ID NO: 1244101
gggugagaauaaugggaga

SEQ ID NO: 1464963 - RNA, 19 nt, Artificial Sequence
  Description of Artificial Sequence: Synthetic oligonucleotide
  Antisense strand to SEQ ID NO: 1464962
ucucccauuauucucaccc

SEQ ID NO: 1464964 - RNA, 19 nt, Artificial Sequence
  Description of Artificial Sequence: Synthetic oligonucleotide
  Sense strand starting at position 1350 of SEQ ID NO: 1244101
cacggaagucaaggacaua

SEQ ID NO: 1464965 - RNA, 19 nt, Artificial Sequence
  Description of Artificial Sequence: Synthetic oligonucleotide
  Antisense strand to SEQ ID NO: 1464964
uauguccuugacuuccgug

SEQ ID NO: 1464966 - RNA, 19 nt, Artificial Sequence
  Description of Artificial Sequence: Synthetic oligonucleotide
  Sense strand starting at position 1427 of SEQ ID NO: 1244101
accucagaguaccaagaaa

SEQ ID NO: 1464967 - RNA, 19 nt, Artificial Sequence
  Description of Artificial Sequence: Synthetic oligonucleotide
  Antisense strand to SEQ ID NO: 1464966
uuucuugguacucugaggu

SEQ ID NO: 1464968 - RNA, 19 nt, Artificial Sequence
  Description of Artificial Sequence: Synthetic oligonucleotide
  Sense strand starting at position 1599 of SEQ ID NO: 1244101
cucccuuaccuguagggaa

SEQ ID NO: 1464969 - RNA, 19 nt, Artificial Sequence
  Description of Artificial Sequence: Synthetic oligonucleotide
  Antisense strand to SEQ ID NO: 1464968
uucccuacagguaagggag

SEQ ID NO: 1464970 - RNA, 19 nt, Artificial Sequence
  Description of Artificial Sequence: Synthetic oligonucleotide
  Sense strand starting at position 1991 of SEQ ID NO: 1244101
acaacauucggagacguca

SEQ ID NO: 1464971 - RNA, 19 nt, Artificial Sequence
  Description of Artificial Sequence: Synthetic oligonucleotide
  Antisense strand to SEQ ID NO: 1464970
ugacgucuccgaauguugu

SEQ ID NO: 1464972 - RNA, 19 nt, Artificial Sequence
  Description of Artificial Sequence: Synthetic oligonucleotide
  Sense strand starting at position 2279 of SEQ ID NO: 1244101
ggcucaaccuuuggauugu

SEQ ID NO: 1464973 - RNA, 19 nt, Artificial Sequence
  Description of Artificial Sequence: Synthetic oligonucleotide
  Antisense strand to SEQ ID NO: 1464972
acaauccaaagguugagcc

SEQ ID NO: 1464974 - RNA, 19 nt, Artificial Sequence
  Description of Artificial Sequence: Synthetic oligonucleotide
  Sense strand starting at position 2280 of SEQ ID NO: 1244101
gcucaaccuuuggauugua

SEQ ID NO: 1464975 - RNA, 19 nt, Artificial Sequence
  Description of Artificial Sequence: Synthetic oligonucleotide
  Antisense strand to SEQ ID NO: 1464974
uacaauccaaagguugagc

SEQ ID NO: 1464976 - RNA, 19 nt, Artificial Sequence
  Description of Artificial Sequence: Synthetic oligonucleotide
  Sense strand starting at position 2349 of SEQ ID NO: 1244101
gcaaucgucgcuugccuaa

SEQ ID NO: 1464977 - RNA, 19 nt, Artificial Sequence
  Description of Artificial Sequence: Synthetic oligonucleotide
  Antisense strand to SEQ ID NO: 1464976
uuaggcaagcgacgauugc

SEQ ID NO: 1464978 - RNA, 19 nt, Artificial Sequence
  Description of Artificial Sequence: Synthetic oligonucleotide
  Sense strand starting at position 2471 of SEQ ID NO: 1244101
ggguggaugguucggacaa

SEQ ID NO: 1464979 - RNA, 19 nt, Artificial Sequence
  Description of Artificial Sequence: Synthetic oligonucleotide
  Antisense strand to SEQ ID NO: 1464978
uuguccgaaccauccaccc

SEQ ID NO: 1464980 - RNA, 19 nt, Artificial Sequence
  Description of Artificial Sequence: Synthetic oligonucleotide
  Sense strand starting at position 2473 of SEQ ID NO: 1244101
guggaugguucggacaagu

SEQ ID NO: 1464981 - RNA, 19 nt, Artificial Sequence
  Description of Artificial Sequence: Synthetic oligonucleotide
  Antisense strand to SEQ ID NO: 1464980
acuuguccgaaccauccac

SEQ ID NO: 1464982 - RNA, 19 nt, Artificial Sequence
  Description of Artificial Sequence: Synthetic oligonucleotide
  Sense strand starting at position 2560 of SEQ ID NO: 1244101
aggguauggcuguaacacu

SEQ ID NO: 1464983 - RNA, 19 nt, Artificial Sequence
  Description of Artificial Sequence: Synthetic oligonucleotide
  Antisense strand to SEQ ID NO: 1464982
aguguuacagccauacccu

SEQ ID NO: 1464984 - RNA, 19 nt, Artificial Sequence
  Description of Artificial Sequence: Synthetic oligonucleotide
  Sense strand starting at position 2617 of SEQ ID NO: 1244101
cggaaagacuucccugacu

SEQ ID NO: 1464985 - RNA, 19 nt, Artificial Sequence
  Description of Artificial Sequence: Synthetic oligonucleotide
  Antisense strand to SEQ ID NO: 1464984
agucagggaagucuuuccg

SEQ ID NO: 1464986 - RNA, 19 nt, Artificial Sequence
  Description of Artificial Sequence: Synthetic oligonucleotide
  Sense strand starting at position 2771 of SEQ ID NO: 1244101
aaaugaacaugagauuguu

SEQ ID NO: 1464987 - RNA, 19 nt, Artificial Sequence
  Description of Artificial Sequence: Synthetic oligonucleotide
  Antisense strand to SEQ ID NO: 1464986
aacaaucucauguucauuu

SEQ ID NO: 1464988 - RNA, 19 nt, Artificial Sequence
  Description of Artificial Sequence: Synthetic oligonucleotide
  Sense strand starting at position 2774 of SEQ ID NO: 1244101
ugaacaugagauuguuugu

SEQ ID NO: 1464989 - RNA, 19 nt, Artificial Sequence
  Description of Artificial Sequence: Synthetic oligonucleotide
  Antisense strand to SEQ ID NO: 1464988
acaaacaaucucauguuca

SEQ ID NO: 1464990 - RNA, 19 nt, Artificial Sequence
  Description of Artificial Sequence: Synthetic oligonucleotide
  Sense strand starting at position 2777 of SEQ ID NO: 1244101
acaugagauuguuuguaau

SEQ ID NO: 1464991 - RNA, 19 nt, Artificial Sequence
  Description of Artificial Sequence: Synthetic oligonucleotide
  Antisense strand to SEQ ID NO: 1464990
auuacaaacaaucucaugu

SEQ ID NO: 1464992 - RNA, 19 nt, Artificial Sequence
  Description of Artificial Sequence: Synthetic oligonucleotide
  Sense strand starting at position 2779 of SEQ ID NO: 1244101
augagauuguuuguaauga

SEQ ID NO: 1464993 - RNA, 19 nt, Artificial Sequence
  Description of Artificial Sequence: Synthetic oligonucleotide
  Antisense strand to SEQ ID NO: 1464992
ucauuacaaacaaucucau

SEQ ID NO: 1464994 - RNA, 19 nt, Artificial Sequence
  Description of Artificial Sequence: Synthetic oligonucleotide
  Sense strand starting at position 2780 of SEQ ID NO: 1244101
ugagauuguuuguaaugau

SEQ ID NO: 1464995 - RNA, 19 nt, Artificial Sequence
  Description of Artificial Sequence: Synthetic oligonucleotide
  Antisense strand to SEQ ID NO: 1464994
aucauuacaaacaaucuca

SEQ ID NO: 1464996 - RNA, 19 nt, Artificial Sequence
  Description of Artificial Sequence: Synthetic oligonucleotide
  Sense strand starting at position 2783 of SEQ ID NO: 1244101
gauuguuuguaaugaugug

SEQ ID NO: 1464997 - RNA, 19 nt, Artificial Sequence
  Description of Artificial Sequence: Synthetic oligonucleotide
  Antisense strand to SEQ ID NO: 1464996
cacaucauuacaaacaauc

SEQ ID NO: 1464998 - RNA, 19 nt, Artificial Sequence
  Description of Artificial Sequence: Synthetic oligonucleotide
  Sense strand starting at position 2784 of SEQ ID NO: 1244101
auuguuuguaaugauguga

SEQ ID NO: 1464999 - RNA, 19 nt, Artificial Sequence
  Description of Artificial Sequence: Synthetic oligonucleotide
  Antisense strand to SEQ ID NO: 1464998
ucacaucauuacaaacaau

SEQ ID NO: 1465000 - RNA, 19 nt, Artificial Sequence
  Description of Artificial Sequence: Synthetic oligonucleotide
  Sense strand starting at position 3225 of SEQ ID NO: 1244101
gcucuugccugucaucaau

SEQ ID NO: 1465001 - RNA, 19 nt, Artificial Sequence
  Description of Artificial Sequence: Synthetic oligonucleotide
  Antisense strand to SEQ ID NO: 1465000
auugaugacaggcaagagc

SEQ ID NO: 1465002 - RNA, 19 nt, Artificial Sequence
  Description of Artificial Sequence: Synthetic oligonucleotide
  Sense strand starting at position 3312 of SEQ ID NO: 1244101
gcgagacacugucuguauu

SEQ ID NO: 1465003 - RNA, 19 nt, Artificial Sequence
  Description of Artificial Sequence: Synthetic oligonucleotide
  Antisense strand to SEQ ID NO: 1465002
aauacagacagugucucgc

SEQ ID NO: 1465004 - RNA, 19 nt, Artificial Sequence
  Description of Artificial Sequence: Synthetic oligonucleotide
  Sense strand starting at position 3313 of SEQ ID NO: 1244101
cgagacacugucuguauuu

SEQ ID NO: 1465005 - RNA, 19 nt, Artificial Sequence
  Description of Artificial Sequence: Synthetic oligonucleotide
  Antisense strand to SEQ ID NO: 1465004
aaauacagacagugucucg

SEQ ID NO: 1465006 - RNA, 19 nt, Artificial Sequence
  Description of Artificial Sequence: Synthetic oligonucleotide
  Sense strand starting at position 62 of SEQ ID NO: 1244102
auccaucgauguuuauaga

SEQ ID NO: 1465007 - RNA, 19 nt, Artificial Sequence
  Description of Artificial Sequence: Synthetic oligonucleotide
  Antisense strand to SEQ ID NO: 1465006
ucuauaaacaucgauggau

SEQ ID NO: 1465008 - RNA, 19 nt, Artificial Sequence
  Description of Artificial Sequence: Synthetic oligonucleotide
  Sense strand starting at position 220 of SEQ ID NO: 1244102
aggugaaucaagugcugaa

SEQ ID NO: 1465009 - RNA, 19 nt, Artificial Sequence
  Description of Artificial Sequence: Synthetic oligonucleotide
  Antisense strand to SEQ ID NO: 1465008
uucagcacuugauucaccu

SEQ ID NO: 1465010 - RNA, 19 nt, Artificial Sequence
  Description of Artificial Sequence: Synthetic oligonucleotide
  Sense strand starting at position 246 of SEQ ID NO: 1244102
aguacaaacucuguccaga

SEQ ID NO: 1465011 - RNA, 19 nt, Artificial Sequence
  Description of Artificial Sequence: Synthetic oligonucleotide
  Antisense strand to SEQ ID NO: 1465010
ucuggacagaguuuguacu

SEQ ID NO: 1465012 - RNA, 19 nt, Artificial Sequence
  Description of Artificial Sequence: Synthetic oligonucleotide
  Sense strand starting at position 310 of SEQ ID NO: 1244102
cuggaaugauuugaaggau

SEQ ID NO: 1465013 - RNA, 19 nt, Artificial Sequence
  Description of Artificial Sequence: Synthetic oligonucleotide
  Antisense strand to SEQ ID NO: 1465012
auccuucaaaucauuccag

SEQ ID NO: 1465014 - RNA, 19 nt, Artificial Sequence
  Description of Artificial Sequence: Synthetic oligonucleotide
  Sense strand starting at position 331 of SEQ ID NO: 1244102
ggagaaauuugccagauag

SEQ ID NO: 1465015 - RNA, 19 nt, Artificial Sequence
  Description of Artificial Sequence: Synthetic oligonucleotide
  Antisense strand to SEQ ID NO: 1465014
cuaucuggcaaauuucucc

SEQ ID NO: 1465016 - RNA, 19 nt, Artificial Sequence
  Description of Artificial Sequence: Synthetic oligonucleotide
  Sense strand starting at position 398 of SEQ ID NO: 1244102
ggaggugugaaacacuagu

SEQ ID NO: 1465017 - RNA, 19 nt, Artificial Sequence
  Description of Artificial Sequence: Synthetic oligonucleotide
  Antisense strand to SEQ ID NO: 1465016
acuaguguuucacaccucc

SEQ ID NO: 1465018 - RNA, 19 nt, Artificial Sequence
  Description of Artificial Sequence: Synthetic oligonucleotide
  Sense strand starting at position 578 of SEQ ID NO: 1244102
acuauuauucuguagucaa

SEQ ID NO: 1465019 - RNA, 19 nt, Artificial Sequence
  Description of Artificial Sequence: Synthetic oligonucleotide
  Antisense strand to SEQ ID NO: 1465018
uugacuacagaauaauagu

SEQ ID NO: 1465020 - RNA, 19 nt, Artificial Sequence
  Description of Artificial Sequence: Synthetic oligonucleotide
  Sense strand starting at position 665 of SEQ ID NO: 1244102
ugaucucauucuguaugaa

SEQ ID NO: 1465021 - RNA, 19 nt, Artificial Sequence
  Description of Artificial Sequence: Synthetic oligonucleotide
  Antisense strand to SEQ ID NO: 1465020
uucauacagaaugagauca

SEQ ID NO: 1465022 - RNA, 19 nt, Artificial Sequence
  Description of Artificial Sequence: Synthetic oligonucleotide
  Sense strand starting at position 668 of SEQ ID NO: 1244102
ucucauucuguaugaauug

SEQ ID NO: 1465023 - RNA, 19 nt, Artificial Sequence
  Description of Artificial Sequence: Synthetic oligonucleotide
  Antisense strand to SEQ ID NO: 1465022
caauucauacagaaugaga

SEQ ID NO: 1465024 - RNA, 19 nt, Artificial Sequence
  Description of Artificial Sequence: Synthetic oligonucleotide
  Sense strand starting at position 680 of SEQ ID NO: 1244102
ugaauuguccugcaacuug

SEQ ID NO: 1465025 - RNA, 19 nt, Artificial Sequence
  Description of Artificial Sequence: Synthetic oligonucleotide
  Antisense strand to SEQ ID NO: 1465024
caaguugcaggacaauuca

SEQ ID NO: 1465026 - RNA, 19 nt, Artificial Sequence
  Description of Artificial Sequence: Synthetic oligonucleotide
  Sense strand starting at position 1114 of SEQ ID NO: 1244102
ggaacugucuaguuugaga

SEQ ID NO: 1465027 - RNA, 19 nt, Artificial Sequence
  Description of Artificial Sequence: Synthetic oligonucleotide
  Antisense strand to SEQ ID NO: 1465026
ucucaaacuagacaguucc

SEQ ID NO: 1465028 - RNA, 19 nt, Artificial Sequence
  Description of Artificial Sequence: Synthetic oligonucleotide
  Sense strand starting at position 1116 of SEQ ID NO: 1244102
aacugucuaguuugagaug

SEQ ID NO: 1465029 - RNA, 19 nt, Artificial Sequence
  Description of Artificial Sequence: Synthetic oligonucleotide
  Antisense strand to SEQ ID NO: 1465028
caucucaaacuagacaguu

SEQ ID NO: 1465030 - RNA, 19 nt, Artificial Sequence
  Description of Artificial Sequence: Synthetic oligonucleotide
  Sense strand starting at position 1237 of SEQ ID NO: 1244102
uguguaagauuacucagaa

SEQ ID NO: 1465031 - RNA, 19 nt, Artificial Sequence
  Description of Artificial Sequence: Synthetic oligonucleotide
  Antisense strand to SEQ ID NO: 1465030
uucugaguaaucuuacaca

SEQ ID NO: 1465032 - RNA, 19 nt, Artificial Sequence
  Description of Artificial Sequence: Synthetic oligonucleotide
  Sense strand starting at position 1238 of SEQ ID NO: 1244102
guguaagauuacucagaaa

SEQ ID NO: 1465033 - RNA, 19 nt, Artificial Sequence
  Description of Artificial Sequence: Synthetic oligonucleotide
  Antisense strand to SEQ ID NO: 1465032
uuucugaguaaucuuacac

SEQ ID NO: 1465034 - RNA, 19 nt, Artificial Sequence
  Description of Artificial Sequence: Synthetic oligonucleotide
  Sense strand starting at position 1301 of SEQ ID NO: 1244102
gggcuuuguggcagaguuu

SEQ ID NO: 1465035 - RNA, 19 nt, Artificial Sequence
  Description of Artificial Sequence: Synthetic oligonucleotide
  Antisense strand to SEQ ID NO: 1465034
aaacucugccacaaagccc

SEQ ID NO: 1465036 - RNA, 19 nt, Artificial Sequence
  Description of Artificial Sequence: Synthetic oligonucleotide
  Sense strand starting at position 1418 of SEQ ID NO: 1244102
cgcaauaaacaguaguaau

SEQ ID NO: 1465037 - RNA, 19 nt, Artificial Sequence
  Description of Artificial Sequence: Synthetic oligonucleotide
  Antisense strand to SEQ ID NO: 1465036
auuacuacuguuuauugcg

SEQ ID NO: 1465038 - RNA, 19 nt, Artificial Sequence
  Description of Artificial Sequence: Synthetic oligonucleotide
  Sense strand starting at position 1516 of SEQ ID NO: 1244102
gaggaaacccgaggcauua

SEQ ID NO: 1465039 - RNA, 19 nt, Artificial Sequence
  Description of Artificial Sequence: Synthetic oligonucleotide
  Antisense strand to SEQ ID NO: 1465038
uaaugccucggguuuccuc

SEQ ID NO: 1465040 - RNA, 19 nt, Artificial Sequence
  Description of Artificial Sequence: Synthetic oligonucleotide
  Sense strand starting at position 1529 of SEQ ID NO: 1244102
gcauuaucagagcaggagu

SEQ ID NO: 1465041 - RNA, 19 nt, Artificial Sequence
  Description of Artificial Sequence: Synthetic oligonucleotide
  Antisense strand to SEQ ID NO: 1465040
acuccugcucugauaaugc

SEQ ID NO: 1465042 - RNA, 19 nt, Artificial Sequence
  Description of Artificial Sequence: Synthetic oligonucleotide
  Sense strand starting at position 1800 of SEQ ID NO: 1244102
cggagaugagcugaucgaa

SEQ ID NO: 1465043 - RNA, 19 nt, Artificial Sequence
  Description of Artificial Sequence: Synthetic oligonucleotide
  Antisense strand to SEQ ID NO: 1465042
uucgaucagcucaucuccg

SEQ ID NO: 1465044 - RNA, 19 nt, Artificial Sequence
  Description of Artificial Sequence: Synthetic oligonucleotide
  Sense strand starting at position 2024 of SEQ ID NO: 1244102
gaaauacuuccgggacauc

SEQ ID NO: 1465045 - RNA, 19 nt, Artificial Sequence
  Description of Artificial Sequence: Synthetic oligonucleotide
  Antisense strand to SEQ ID NO: 1465044
gaugucccggaaguauuuc

SEQ ID NO: 1465046 - RNA, 19 nt, Artificial Sequence
  Description of Artificial Sequence: Synthetic oligonucleotide
  Sense strand starting at position 2486 of SEQ ID NO: 1244102
agaaauuggcuuggagauu

SEQ ID NO: 1465047 - RNA, 19 nt, Artificial Sequence
  Description of Artificial Sequence: Synthetic oligonucleotide
  Antisense strand to SEQ ID NO: 1465046
aaucuccaagccaauuucu

SEQ ID NO: 1465048 - RNA, 19 nt, Artificial Sequence
  Description of Artificial Sequence: Synthetic oligonucleotide
  Sense strand starting at position 2487 of SEQ ID NO: 1244102
gaaauuggcuuggagauuu

SEQ ID NO: 1465049 - RNA, 19 nt, Artificial Sequence
  Description of Artificial Sequence: Synthetic oligonucleotide
  Antisense strand to SEQ ID NO: 1465048
aaaucuccaagccaauuuc

SEQ ID NO: 1465050 - RNA, 19 nt, Artificial Sequence
  Description of Artificial Sequence: Synthetic oligonucleotide
  Sense strand starting at position 2549 of SEQ ID NO: 1244102
cucaauuugugcuuccaga

SEQ ID NO: 1465051 - RNA, 19 nt, Artificial Sequence
  Description of Artificial Sequence: Synthetic oligonucleotide
  Antisense strand to SEQ ID NO: 1465050
ucuggaagcacaaauugag

SEQ ID NO: 1465052 - RNA, 19 nt, Artificial Sequence
  Description of Artificial Sequence: Synthetic oligonucleotide
  Sense strand starting at position 2566 of SEQ ID NO: 1244102
gaaaguuuguccucccaga

SEQ ID NO: 1465053 - RNA, 19 nt, Artificial Sequence
  Description of Artificial Sequence: Synthetic oligonucleotide
  Antisense strand to SEQ ID NO: 1465052
ucugggaggacaaacuuuc

SEQ ID NO: 1465054 - RNA, 19 nt, Artificial Sequence
  Description of Artificial Sequence: Synthetic oligonucleotide
  Sense strand starting at position 2583 of SEQ ID NO: 1244102
gaguuuguuccuggacagg

SEQ ID NO: 1465055 - RNA, 19 nt, Artificial Sequence
  Description of Artificial Sequence: Synthetic oligonucleotide
  Antisense strand to SEQ ID NO: 1465054
ccuguccaggaacaaacuc

SEQ ID NO: 1465056 - RNA, 19 nt, Artificial Sequence
  Description of Artificial Sequence: Synthetic oligonucleotide
  Sense strand starting at position 2802 of SEQ ID NO: 1244102
caaucuggucaguggaaua

SEQ ID NO: 1465057 - RNA, 19 nt, Artificial Sequence
  Description of Artificial Sequence: Synthetic oligonucleotide
  Antisense strand to SEQ ID NO: 1465056
uauuccacugaccagauug

SEQ ID NO: 1465058 - RNA, 19 nt, Artificial Sequence
  Description of Artificial Sequence: Synthetic oligonucleotide
  Sense strand starting at position 2941 of SEQ ID NO: 1244102
uuuggaguuuaacugaauc

SEQ ID NO: 1465059 - RNA, 19 nt, Artificial Sequence
  Description of Artificial Sequence: Synthetic oligonucleotide
  Antisense strand to SEQ ID NO: 1465058
gauucaguuaaacuccaaa

SEQ ID NO: 1465060 - RNA, 19 nt, Artificial Sequence
  Description of Artificial Sequence: Synthetic oligonucleotide
  Sense strand starting at position 2967 of SEQ ID NO: 1244102
auauaaucugccuaagagu

SEQ ID NO: 1465061 - RNA, 19 nt, Artificial Sequence
  Description of Artificial Sequence: Synthetic oligonucleotide
  Antisense strand to SEQ ID NO: 1465060
acucuuaggcagauuauau

SEQ ID NO: 1465062 - RNA, 19 nt, Artificial Sequence
  Description of Artificial Sequence: Synthetic oligonucleotide
  Sense strand starting at position 2978 of SEQ ID NO: 1244102
cuaagagugaccggguuga

SEQ ID NO: 1465063 - RNA, 19 nt, Artificial Sequence
  Description of Artificial Sequence: Synthetic oligonucleotide
  Antisense strand to SEQ ID NO: 1465062
ucaacccggucacucuuag

SEQ ID NO: 1465064 - RNA, 19 nt, Artificial Sequence
  Description of Artificial Sequence: Synthetic oligonucleotide
  Sense strand starting at position 2982 of SEQ ID NO: 1244102
gagugaccggguugaaaug

SEQ ID NO: 1465065 - RNA, 19 nt, Artificial Sequence
  Description of Artificial Sequence: Synthetic oligonucleotide
  Antisense strand to SEQ ID NO: 1465064
cauuucaacccggucacuc

SEQ ID NO: 1465066 - RNA, 19 nt, Artificial Sequence
  Description of Artificial Sequence: Synthetic oligonucleotide
  Sense strand starting at position 3030 of SEQ ID NO: 1244102
agucaagaagcuggagaau

SEQ ID NO: 1465067 - RNA, 19 nt, Artificial Sequence
  Description of Artificial Sequence: Synthetic oligonucleotide
  Antisense strand to SEQ ID NO: 1465066
auucuccagcuucuugacu

SEQ ID NO: 1465068 - RNA, 19 nt, Artificial Sequence
  Description of Artificial Sequence: Synthetic oligonucleotide
  Sense strand starting at position 3348 of SEQ ID NO: 1244102
uccguugugcugguauauu

SEQ ID NO: 1465069 - RNA, 19 nt, Artificial Sequence
  Description of Artificial Sequence: Synthetic oligonucleotide
  Antisense strand to SEQ ID NO: 1465068
aauauaccagcacaacgga

SEQ ID NO: 1465070 - RNA, 19 nt, Artificial Sequence
  Description of Artificial Sequence: Synthetic oligonucleotide
  Sense strand starting at position 3356 of SEQ ID NO: 1244102
gcugguauauuauuucuua

SEQ ID NO: 1465071 - RNA, 19 nt, Artificial Sequence
  Description of Artificial Sequence: Synthetic oligonucleotide
  Antisense strand to SEQ ID NO: 1465070
uaagaaauaauauaccagc

SEQ ID NO: 1465072 - RNA, 19 nt, Artificial Sequence
  Description of Artificial Sequence: Synthetic oligonucleotide
  Sense strand starting at position 3477 of SEQ ID NO: 1244102
gaaaccuagucguuggaua

SEQ ID NO: 1465073 - RNA, 19 nt, Artificial Sequence
  Description of Artificial Sequence: Synthetic oligonucleotide
  Antisense strand to SEQ ID NO: 1465072
uauccaacgacuagguuuc

SEQ ID NO: 1465074 - RNA, 19 nt, Artificial Sequence
  Description of Artificial Sequence: Synthetic oligonucleotide
  Sense strand starting at position 3499 of SEQ ID NO: 1244102
uaaucuggguucccugaua

SEQ ID NO: 1465075 - RNA, 19 nt, Artificial Sequence
  Description of Artificial Sequence: Synthetic oligonucleotide
  Antisense strand to SEQ ID NO: 1465074
uaucagggaacccagauua

SEQ ID NO: 1465076 - RNA, 19 nt, Artificial Sequence
  Description of Artificial Sequence: Synthetic oligonucleotide
  Sense strand starting at position 3532 of SEQ ID NO: 1244102
gagguugauaggugaggga

SEQ ID NO: 1465077 - RNA, 19 nt, Artificial Sequence
  Description of Artificial Sequence: Synthetic oligonucleotide
  Antisense strand to SEQ ID NO: 1465076
ucccucaccuaucaaccuc

SEQ ID NO: 1465078 - RNA, 19 nt, Artificial Sequence
  Description of Artificial Sequence: Synthetic oligonucleotide
  Sense strand starting at position 3770 of SEQ ID NO: 1244102
gguguuccuguguugagca

SEQ ID NO: 1465079 - RNA, 19 nt, Artificial Sequence
  Description of Artificial Sequence: Synthetic oligonucleotide
  Antisense strand to SEQ ID NO: 1465078
ugcucaacacaggaacacc

SEQ ID NO: 1465080 - RNA, 19 nt, Artificial Sequence
  Description of Artificial Sequence: Synthetic oligonucleotide
  Sense strand starting at position 3854 of SEQ ID NO: 1244102
ugaggaaacuaggugcaua

SEQ ID NO: 1465081 - RNA, 19 nt, Artificial Sequence
  Description of Artificial Sequence: Synthetic oligonucleotide
  Antisense strand to SEQ ID NO: 1465080
uaugcaccuaguuuccuca

SEQ ID NO: 1465082 - RNA, 19 nt, Artificial Sequence
  Description of Artificial Sequence: Synthetic oligonucleotide
  Sense strand starting at position 3968 of SEQ ID NO: 1244102
gaccaagaguaugugaagu

SEQ ID NO: 1465083 - RNA, 19 nt, Artificial Sequence
  Description of Artificial Sequence: Synthetic oligonucleotide
  Antisense strand to SEQ ID NO: 1465082
acuucacauacucuugguc

SEQ ID NO: 1465084 - RNA, 19 nt, Artificial Sequence
  Description of Artificial Sequence: Synthetic oligonucleotide
  Sense strand starting at position 3974 of SEQ ID NO: 1244102
gaguaugugaaguaguacu

SEQ ID NO: 1465085 - RNA, 19 nt, Artificial Sequence
  Description of Artificial Sequence: Synthetic oligonucleotide
  Antisense strand to SEQ ID NO: 1465084
aguacuacuucacauacuc

SEQ ID NO: 1465086 - RNA, 19 nt, Artificial Sequence
  Description of Artificial Sequence: Synthetic oligonucleotide
  Sense strand starting at position 147 of SEQ ID NO: 1244103
ucaggagauugggaccaua

SEQ ID NO: 1465087 - RNA, 19 nt, Artificial Sequence
  Description of Artificial Sequence: Synthetic oligonucleotide
  Antisense strand to SEQ ID NO: 1465086
uauggucccaaucuccuga

SEQ ID NO: 1465088 - RNA, 19 nt, Artificial Sequence
  Description of Artificial Sequence: Synthetic oligonucleotide
  Sense strand starting at position 565 of SEQ ID NO: 1244103
agagauagcaguugcaaag

SEQ ID NO: 1465089 - RNA, 19 nt, Artificial Sequence
  Description of Artificial Sequence: Synthetic oligonucleotide
  Antisense strand to SEQ ID NO: 1465088
cuuugcaacugcuaucucu

SEQ ID NO: 1465090 - RNA, 19 nt, Artificial Sequence
  Description of Artificial Sequence: Synthetic oligonucleotide
  Sense strand starting at position 799 of SEQ ID NO: 1244103
acagauuucugggacucau

SEQ ID NO: 1465091 - RNA, 19 nt, Artificial Sequence
  Description of Artificial Sequence: Synthetic oligonucleotide
  Antisense strand to SEQ ID NO: 1465090
augagucccagaaaucugu

SEQ ID NO: 1465092 - RNA, 19 nt, Artificial Sequence
  Description of Artificial Sequence: Synthetic oligonucleotide
  Sense strand starting at position 1252 of SEQ ID NO: 1244103
acuguucuagcuggagaga

SEQ ID NO: 1465093 - RNA, 19 nt, Artificial Sequence
  Description of Artificial Sequence: Synthetic oligonucleotide
  Antisense strand to SEQ ID NO: 1465092
ucucuccagcuagaacagu

SEQ ID NO: 1465094 - RNA, 19 nt, Artificial Sequence
  Description of Artificial Sequence: Synthetic oligonucleotide
  Sense strand starting at position 1265 of SEQ ID NO: 1244103
gagagacagaaguguuucu

SEQ ID NO: 1465095 - RNA, 19 nt, Artificial Sequence
  Description of Artificial Sequence: Synthetic oligonucleotide
  Antisense strand to SEQ ID NO: 1465094
agaaacacuucugucucuc

SEQ ID NO: 1465096 - RNA, 19 nt, Artificial Sequence
  Description of Artificial Sequence: Synthetic oligonucleotide
  Sense strand starting at position 1270 of SEQ ID NO: 1244103
acagaaguguuucuuagug

SEQ ID NO: 1465097 - RNA, 19 nt, Artificial Sequence
  Description of Artificial Sequence: Synthetic oligonucleotide
  Antisense strand to SEQ ID NO: 1465096
cacuaagaaacacuucugu

SEQ ID NO: 1465098 - RNA, 19 nt, Artificial Sequence
  Description of Artificial Sequence: Synthetic oligonucleotide
  Sense strand starting at position 1274 of SEQ ID NO: 1244103
aaguguuucuuagugauua

SEQ ID NO: 1465099 - RNA, 19 nt, Artificial Sequence
  Description of Artificial Sequence: Synthetic oligonucleotide
  Antisense strand to SEQ ID NO: 1465098
uaaucacuaagaaacacuu

SEQ ID NO: 1465100 - RNA, 19 nt, Artificial Sequence
  Description of Artificial Sequence: Synthetic oligonucleotide
  Sense strand starting at position 1276 of SEQ ID NO: 1244103
guguuucuuagugauuaac

SEQ ID NO: 1465101 - RNA, 19 nt, Artificial Sequence
  Description of Artificial Sequence: Synthetic oligonucleotide
  Antisense strand to SEQ ID NO: 1465100
guuaaucacuaagaaacac

SEQ ID NO: 1465102 - RNA, 19 nt, Artificial Sequence
  Description of Artificial Sequence: Synthetic oligonucleotide
  Sense strand starting at position 1278 of SEQ ID NO: 1244103
guuucuuagugauuaacag

SEQ ID NO: 1465103 - RNA, 19 nt, Artificial Sequence
  Description of Artificial Sequence: Synthetic oligonucleotide
  Antisense strand to SEQ ID NO: 1465102
cuguuaaucacuaagaaac

SEQ ID NO: 1465104 - RNA, 19 nt, Artificial Sequence
  Description of Artificial Sequence: Synthetic oligonucleotide
  Sense strand starting at position 1299 of SEQ ID NO: 1244103
ggaaacaaaugugaagaua

SEQ ID NO: 1465105 - RNA, 19 nt, Artificial Sequence
  Description of Artificial Sequence: Synthetic oligonucleotide
  Antisense strand to SEQ ID NO: 1465104
uaucuucacauuuguuucc

SEQ ID NO: 1465106 - RNA, 19 nt, Artificial Sequence
  Description of Artificial Sequence: Synthetic oligonucleotide
  Sense strand starting at position 1371 of SEQ ID NO: 1244103
agggaagguuuccuagagu

SEQ ID NO: 1465107 - RNA, 19 nt, Artificial Sequence
  Description of Artificial Sequence: Synthetic oligonucleotide
  Antisense strand to SEQ ID NO: 1465106
acucuaggaaaccuucccu

SEQ ID NO: 1465108 - RNA, 19 nt, Artificial Sequence
  Description of Artificial Sequence: Synthetic oligonucleotide
  Sense strand starting at position 1593 of SEQ ID NO: 1244103
gccugagaccuugaggacu

SEQ ID NO: 1465109 - RNA, 19 nt, Artificial Sequence
  Description of Artificial Sequence: Synthetic oligonucleotide
  Antisense strand to SEQ ID NO: 1465108
aguccucaaggucucaggc

SEQ ID NO: 1465110 - RNA, 19 nt, Artificial Sequence
  Description of Artificial Sequence: Synthetic oligonucleotide
  Sense strand starting at position 1694 of SEQ ID NO: 1244103
gugagagccagguagcauu

SEQ ID NO: 1465111 - RNA, 19 nt, Artificial Sequence
  Description of Artificial Sequence: Synthetic oligonucleotide
  Antisense strand to SEQ ID NO: 1465110
aaugcuaccuggcucucac

SEQ ID NO: 1465112 - RNA, 19 nt, Artificial Sequence
  Description of Artificial Sequence: Synthetic oligonucleotide
  Sense strand starting at position 1765 of SEQ ID NO: 1244103
uuuggucuugucuggauau

SEQ ID NO: 1465113 - RNA, 19 nt, Artificial Sequence
  Description of Artificial Sequence: Synthetic oligonucleotide
  Antisense strand to SEQ ID NO: 1465112
auauccagacaagaccaaa

SEQ ID NO: 1465114 - RNA, 19 nt, Artificial Sequence
  Description of Artificial Sequence: Synthetic oligonucleotide
  Sense strand starting at position 1767 of SEQ ID NO: 1244103
uggucuugucuggauauuc

SEQ ID NO: 1465115 - RNA, 19 nt, Artificial Sequence
  Description of Artificial Sequence: Synthetic oligonucleotide
  Antisense strand to SEQ ID NO: 1465114
gaauauccagacaagacca

SEQ ID NO: 1465116 - RNA, 19 nt, Artificial Sequence
  Description of Artificial Sequence: Synthetic oligonucleotide
  Sense strand starting at position 1778 of SEQ ID NO: 1244103
ggauauuccagccaugggu

SEQ ID NO: 1465117 - RNA, 19 nt, Artificial Sequence
  Description of Artificial Sequence: Synthetic oligonucleotide
  Antisense strand to SEQ ID NO: 1465116
acccauggcuggaauaucc

SEQ ID NO: 1465118 - RNA, 19 nt, Artificial Sequence
  Description of Artificial Sequence: Synthetic oligonucleotide
  Sense strand starting at position 1972 of SEQ ID NO: 1244103
uggacuucuggagguagaa

SEQ ID NO: 1465119 - RNA, 19 nt, Artificial Sequence
  Description of Artificial Sequence: Synthetic oligonucleotide
  Antisense strand to SEQ ID NO: 1465118
uucuaccuccagaagucca

SEQ ID NO: 1465120 - RNA, 19 nt, Artificial Sequence
  Description of Artificial Sequence: Synthetic oligonucleotide
  Sense strand starting at position 2011 of SEQ ID NO: 1244103
cagguuacuuugguaaaua

SEQ ID NO: 1465121 - RNA, 19 nt, Artificial Sequence
  Description of Artificial Sequence: Synthetic oligonucleotide
  Antisense strand to SEQ ID NO: 1465120
uauuuaccaaaguaaccug

SEQ ID NO: 1465122 - RNA, 19 nt, Artificial Sequence
  Description of Artificial Sequence: Synthetic oligonucleotide
  Sense strand starting at position 2131 of SEQ ID NO: 1244103
guaggaaagucauuccugu

SEQ ID NO: 1465123 - RNA, 19 nt, Artificial Sequence
  Description of Artificial Sequence: Synthetic oligonucleotide
  Antisense strand to SEQ ID NO: 1465122
acaggaaugacuuuccuac

SEQ ID NO: 1465124 - RNA, 19 nt, Artificial Sequence
  Description of Artificial Sequence: Synthetic oligonucleotide
  Sense strand starting at position 2164 of SEQ ID NO: 1244103
gggccuguggugaggcaua

SEQ ID NO: 1465125 - RNA, 19 nt, Artificial Sequence
  Description of Artificial Sequence: Synthetic oligonucleotide
  Antisense strand to SEQ ID NO: 1465124
uaugccucaccacaggccc

SEQ ID NO: 1465126 - RNA, 19 nt, Artificial Sequence
  Description of Artificial Sequence: Synthetic oligonucleotide
  Sense strand starting at position 2246 of SEQ ID NO: 1244103
caagaccuguucuuaggau

SEQ ID NO: 1465127 - RNA, 19 nt, Artificial Sequence
  Description of Artificial Sequence: Synthetic oligonucleotide
  Antisense strand to SEQ ID NO: 1465126
auccuaagaacaggucuug

SEQ ID NO: 1465128 - RNA, 19 nt, Artificial Sequence
  Description of Artificial Sequence: Synthetic oligonucleotide
  Sense strand starting at position 2288 of SEQ ID NO: 1244103
augggaaagucccuuuauu

SEQ ID NO: 1465129 - RNA, 19 nt, Artificial Sequence
  Description of Artificial Sequence: Synthetic oligonucleotide
  Antisense strand to SEQ ID NO: 1465128
aauaaagggacuuucccau

SEQ ID NO: 1465130 - RNA, 19 nt, Artificial Sequence
  Description of Artificial Sequence: Synthetic oligonucleotide
  Sense strand starting at position 2669 of SEQ ID NO: 1244103
acucuuaucugugugguaa

SEQ ID NO: 1465131 - RNA, 19 nt, Artificial Sequence
  Description of Artificial Sequence: Synthetic oligonucleotide
  Antisense strand to SEQ ID NO: 1465130
uuaccacacagauaagagu

SEQ ID NO: 1465132 - RNA, 19 nt, Artificial Sequence
  Description of Artificial Sequence: Synthetic oligonucleotide
  Sense strand starting at position 2787 of SEQ ID NO: 1244103
aaugguaaaugugugucau

SEQ ID NO: 1465133 - RNA, 19 nt, Artificial Sequence
  Description of Artificial Sequence: Synthetic oligonucleotide
  Antisense strand to SEQ ID NO: 1465132
augacacacauuuaccauu

SEQ ID NO: 1465134 - RNA, 19 nt, Artificial Sequence
  Description of Artificial Sequence: Synthetic oligonucleotide
  Sense strand starting at position 2852 of SEQ ID NO: 1244103
gcaugcauucgcuauuuga

SEQ ID NO: 1465135 - RNA, 19 nt, Artificial Sequence
  Description of Artificial Sequence: Synthetic oligonucleotide
  Antisense strand to SEQ ID NO: 1465134
ucaaauagcgaaugcaugc

SEQ ID NO: 1465136 - RNA, 19 nt, Artificial Sequence
  Description of Artificial Sequence: Synthetic oligonucleotide
  Sense strand starting at position 3049 of SEQ ID NO: 1244103
ccacccacucagugauaga

SEQ ID NO: 1465137 - RNA, 19 nt, Artificial Sequence
  Description of Artificial Sequence: Synthetic oligonucleotide
  Antisense strand to SEQ ID NO: 1465136
ucuaucacugagugggugg

SEQ ID NO: 1465138 - RNA, 19 nt, Artificial Sequence
  Description of Artificial Sequence: Synthetic oligonucleotide
  Sense strand starting at position 3060 of SEQ ID NO: 1244103
gugauagaauucccucucu

SEQ ID NO: 1465139 - RNA, 19 nt, Artificial Sequence
  Description of Artificial Sequence: Synthetic oligonucleotide
  Antisense strand to SEQ ID NO: 1465138
agagagggaauucuaucac

SEQ ID NO: 1465140 - RNA, 19 nt, Artificial Sequence
  Description of Artificial Sequence: Synthetic oligonucleotide
  Sense strand starting at position 3136 of SEQ ID NO: 1244103
guauaaucugcucacaggu

SEQ ID NO: 1465141 - RNA, 19 nt, Artificial Sequence
  Description of Artificial Sequence: Synthetic oligonucleotide
  Antisense strand to SEQ ID NO: 1465140
accugugagcagauuauac

SEQ ID NO: 1465142 - RNA, 19 nt, Artificial Sequence
  Description of Artificial Sequence: Synthetic oligonucleotide
  Sense strand starting at position 3153 of SEQ ID NO: 1244103
gucugucuuccuuacugga

SEQ ID NO: 1465143 - RNA, 19 nt, Artificial Sequence
  Description of Artificial Sequence: Synthetic oligonucleotide
  Antisense strand to SEQ ID NO: 1465142
uccaguaaggaagacagac

SEQ ID NO: 1465144 - RNA, 19 nt, Artificial Sequence
  Description of Artificial Sequence: Synthetic oligonucleotide
  Sense strand starting at position 3166 of SEQ ID NO: 1244103
acuggacuaugaggaauuu

SEQ ID NO: 1465145 - RNA, 19 nt, Artificial Sequence
  Description of Artificial Sequence: Synthetic oligonucleotide
  Antisense strand to SEQ ID NO: 1465144
aaauuccucauaguccagu

SEQ ID NO: 1465146 - RNA, 19 nt, Artificial Sequence
  Description of Artificial Sequence: Synthetic oligonucleotide
  Sense strand starting at position 3183 of SEQ ID NO: 1244103
uugauuauggacuguauau

SEQ ID NO: 1465147 - RNA, 19 nt, Artificial Sequence
  Description of Artificial Sequence: Synthetic oligonucleotide
  Antisense strand to SEQ ID NO: 1465146
auauacaguccauaaucaa

SEQ ID NO: 1465148 - RNA, 19 nt, Artificial Sequence
  Description of Artificial Sequence: Synthetic oligonucleotide
  Sense strand starting at position 3209 of SEQ ID NO: 1244103
uuguuaaguuuccugagua

SEQ ID NO: 1465149 - RNA, 19 nt, Artificial Sequence
  Description of Artificial Sequence: Synthetic oligonucleotide
  Antisense strand to SEQ ID NO: 1465148
uacucaggaaacuuaacaa

SEQ ID NO: 1465150 - RNA, 19 nt, Artificial Sequence
  Description of Artificial Sequence: Synthetic oligonucleotide
  Sense strand starting at position 3213 of SEQ ID NO: 1244103
uaaguuuccugaguauggu

SEQ ID NO: 1465151 - RNA, 19 nt, Artificial Sequence
  Description of Artificial Sequence: Synthetic oligonucleotide
  Antisense strand to SEQ ID NO: 1465150
accauacucaggaaacuua

SEQ ID NO: 1465152 - RNA, 19 nt, Artificial Sequence
  Description of Artificial Sequence: Synthetic oligonucleotide
  Sense strand starting at position 3214 of SEQ ID NO: 1244103
aaguuuccugaguauggua

SEQ ID NO: 1465153 - RNA, 19 nt, Artificial Sequence
  Description of Artificial Sequence: Synthetic oligonucleotide
  Antisense strand to SEQ ID NO: 1465152
uaccauacucaggaaacuu

SEQ ID NO: 1465154 - RNA, 19 nt, Artificial Sequence
  Description of Artificial Sequence: Synthetic oligonucleotide
  Sense strand starting at position 3346 of SEQ ID NO: 1244103
uguguauacugaccacaca

SEQ ID NO: 1465155 - RNA, 19 nt, Artificial Sequence
  Description of Artificial Sequence: Synthetic oligonucleotide
  Antisense strand to SEQ ID NO: 1465154
uguguggucaguauacaca

SEQ ID NO: 1465156 - RNA, 19 nt, Artificial Sequence
  Description of Artificial Sequence: Synthetic oligonucleotide
  Sense strand starting at position 3424 of SEQ ID NO: 1244103
ggguaugugguguauucuu

SEQ ID NO: 1465157 - RNA, 19 nt, Artificial Sequence
  Description of Artificial Sequence: Synthetic oligonucleotide
  Antisense strand to SEQ ID NO: 1465156
aagaauacaccacauaccc

SEQ ID NO: 1465158 - RNA, 19 nt, Artificial Sequence
  Description of Artificial Sequence: Synthetic oligonucleotide
  Sense strand starting at position 3505 of SEQ ID NO: 1244103
ggcauuagaccugaugggu

SEQ ID NO: 1465159 - RNA, 19 nt, Artificial Sequence
  Description of Artificial Sequence: Synthetic oligonucleotide
  Antisense strand to SEQ ID NO: 1465158
acccaucaggucuaaugcc

SEQ ID NO: 1465160 - RNA, 19 nt, Artificial Sequence
  Description of Artificial Sequence: Synthetic oligonucleotide
  Sense strand starting at position 3508 of SEQ ID NO: 1244103
auuagaccugauggguuua

SEQ ID NO: 1465161 - RNA, 19 nt, Artificial Sequence
  Description of Artificial Sequence: Synthetic oligonucleotide
  Antisense strand to SEQ ID NO: 1465160
uaaacccaucaggucuaau

SEQ ID NO: 1465162 - RNA, 19 nt, Artificial Sequence
  Description of Artificial Sequence: Synthetic oligonucleotide
  Sense strand starting at position 3510 of SEQ ID NO: 1244103
uagaccugauggguuuaaa

SEQ ID NO: 1465163 - RNA, 19 nt, Artificial Sequence
  Description of Artificial Sequence: Synthetic oligonucleotide
  Antisense strand to SEQ ID NO: 1465162
uuuaaacccaucaggucua

SEQ ID NO: 1465164 - RNA, 19 nt, Artificial Sequence
  Description of Artificial Sequence: Synthetic oligonucleotide
  Sense strand starting at position 3963 of SEQ ID NO: 1244103
ggcuaauaacuguaccuaa

SEQ ID NO: 1465165 - RNA, 19 nt, Artificial Sequence
  Description of Artificial Sequence: Synthetic oligonucleotide
  Antisense strand to SEQ ID NO: 1465164
uuagguacaguuauuagcc

SEQ ID NO: 1465166 - RNA, 19 nt, Artificial Sequence
  Description of Artificial Sequence: Synthetic oligonucleotide
  Sense strand starting at position 143 of SEQ ID NO: 1244104
aaggguauacuuuacgagu

SEQ ID NO: 1465167 - RNA, 19 nt, Artificial Sequence
  Description of Artificial Sequence: Synthetic oligonucleotide
  Antisense strand to SEQ ID NO: 1465166
acucguaaaguauacccuu

SEQ ID NO: 1465168 - RNA, 19 nt, Artificial Sequence
  Description of Artificial Sequence: Synthetic oligonucleotide
  Sense strand starting at position 191 of SEQ ID NO: 1244104
auacauaaucaccgggacu

SEQ ID NO: 1465169 - RNA, 19 nt, Artificial Sequence
  Description of Artificial Sequence: Synthetic oligonucleotide
  Antisense strand to SEQ ID NO: 1465168
agucccggugauuauguau

SEQ ID NO: 1465170 - RNA, 19 nt, Artificial Sequence
  Description of Artificial Sequence: Synthetic oligonucleotide
  Sense strand starting at position 210 of SEQ ID NO: 1244104
aaacguacaguaggugaua

SEQ ID NO: 1465171 - RNA, 19 nt, Artificial Sequence
  Description of Artificial Sequence: Synthetic oligonucleotide
  Antisense strand to SEQ ID NO: 1465170
uaucaccuacuguacguuu

SEQ ID NO: 1465172 - RNA, 19 nt, Artificial Sequence
  Description of Artificial Sequence: Synthetic oligonucleotide
  Sense strand starting at position 261 of SEQ ID NO: 1244104
aaguaaaguuacgcaagaa

SEQ ID NO: 1465173 - RNA, 19 nt, Artificial Sequence
  Description of Artificial Sequence: Synthetic oligonucleotide
  Antisense strand to SEQ ID NO: 1465172
uucuugcguaacuuuacuu

SEQ ID NO: 1465174 - RNA, 19 nt, Artificial Sequence
  Description of Artificial Sequence: Synthetic oligonucleotide
  Sense strand starting at position 262 of SEQ ID NO: 1244104
aguaaaguuacgcaagaaa

SEQ ID NO: 1465175 - RNA, 19 nt, Artificial Sequence
  Description of Artificial Sequence: Synthetic oligonucleotide
  Antisense strand to SEQ ID NO: 1465174
uuucuugcguaacuuuacu

SEQ ID NO: 1465176 - RNA, 19 nt, Artificial Sequence
  Description of Artificial Sequence: Synthetic oligonucleotide
  Sense strand starting at position 296 of SEQ ID NO: 1244104
cuauaauuaucccugguga

SEQ ID NO: 1465177 - RNA, 19 nt, Artificial Sequence
  Description of Artificial Sequence: Synthetic oligonucleotide
  Antisense strand to SEQ ID NO: 1465176
ucaccagggauaauuauag

SEQ ID NO: 1465178 - RNA, 19 nt, Artificial Sequence
  Description of Artificial Sequence: Synthetic oligonucleotide
  Sense strand starting at position 298 of SEQ ID NO: 1244104
auaauuaucccuggugaag

SEQ ID NO: 1465179 - RNA, 19 nt, Artificial Sequence
  Description of Artificial Sequence: Synthetic oligonucleotide
  Antisense strand to SEQ ID NO: 1465178
cuucaccagggauaauuau

SEQ ID NO: 1465180 - RNA, 19 nt, Artificial Sequence
  Description of Artificial Sequence: Synthetic oligonucleotide
  Sense strand starting at position 343 of SEQ ID NO: 1244104
acauuuggcucuuaguuaa

SEQ ID NO: 1465181 - RNA, 19 nt, Artificial Sequence
  Description of Artificial Sequence: Synthetic oligonucleotide
  Antisense strand to SEQ ID NO: 1465180
uuaacuaagagccaaaugu

SEQ ID NO: 1465182 - RNA, 19 nt, Artificial Sequence
  Description of Artificial Sequence: Synthetic oligonucleotide
  Sense strand starting at position 346 of SEQ ID NO: 1244104
uuuggcucuuaguuaagua

SEQ ID NO: 1465183 - RNA, 19 nt, Artificial Sequence
  Description of Artificial Sequence: Synthetic oligonucleotide
  Antisense strand to SEQ ID NO: 1465182
uacuuaacuaagagccaaa

SEQ ID NO: 1465184 - RNA, 19 nt, Artificial Sequence
  Description of Artificial Sequence: Synthetic oligonucleotide
  Sense strand starting at position 362 of SEQ ID NO: 1244104
guaccacuauguuugagua

SEQ ID NO: 1465185 - RNA, 19 nt, Artificial Sequence
  Description of Artificial Sequence: Synthetic oligonucleotide
  Antisense strand to SEQ ID NO: 1465184
uacucaaacauagugguac

SEQ ID NO: 1465186 - RNA, 19 nt, Artificial Sequence
  Description of Artificial Sequence: Synthetic oligonucleotide
  Sense strand starting at position 366 of SEQ ID NO: 1244104
cacuauguuugaguauguu

SEQ ID NO: 1465187 - RNA, 19 nt, Artificial Sequence
  Description of Artificial Sequence: Synthetic oligonucleotide
  Antisense strand to SEQ ID NO: 1465186
aacauacucaaacauagug

SEQ ID NO: 1465188 - RNA, 19 nt, Artificial Sequence
  Description of Artificial Sequence: Synthetic oligonucleotide
  Sense strand starting at position 369 of SEQ ID NO: 1244104
uauguuugaguauguugga

SEQ ID NO: 1465189 - RNA, 19 nt, Artificial Sequence
  Description of Artificial Sequence: Synthetic oligonucleotide
  Antisense strand to SEQ ID NO: 1465188
uccaacauacucaaacaua

SEQ ID NO: 1465190 - RNA, 19 nt, Artificial Sequence
  Description of Artificial Sequence: Synthetic oligonucleotide
  Sense strand starting at position 455 of SEQ ID NO: 1244104
cugacugagugauacauuu

SEQ ID NO: 1465191 - RNA, 19 nt, Artificial Sequence
  Description of Artificial Sequence: Synthetic oligonucleotide
  Antisense strand to SEQ ID NO: 1465190
aaauguaucacucagucag

SEQ ID NO: 1465192 - RNA, 19 nt, Artificial Sequence
  Description of Artificial Sequence: Synthetic oligonucleotide
  Sense strand starting at position 571 of SEQ ID NO: 1244104
gcagucucaccuuacacau

SEQ ID NO: 1465193 - RNA, 19 nt, Artificial Sequence
  Description of Artificial Sequence: Synthetic oligonucleotide
  Antisense strand to SEQ ID NO: 1465192
auguguaaggugagacugc

SEQ ID NO: 1465194 - RNA, 19 nt, Artificial Sequence
  Description of Artificial Sequence: Synthetic oligonucleotide
  Sense strand starting at position 762 of SEQ ID NO: 1244104
cagugugcagcuuugcaaa

SEQ ID NO: 1465195 - RNA, 19 nt, Artificial Sequence
  Description of Artificial Sequence: Synthetic oligonucleotide
  Antisense strand to SEQ ID NO: 1465194
uuugcaaagcugcacacug

SEQ ID NO: 1465196 - RNA, 19 nt, Artificial Sequence
  Description of Artificial Sequence: Synthetic oligonucleotide
  Sense strand starting at position 1015 of SEQ ID NO: 1244104
ccaggaauccacugucucu

SEQ ID NO: 1465197 - RNA, 19 nt, Artificial Sequence
  Description of Artificial Sequence: Synthetic oligonucleotide
  Antisense strand to SEQ ID NO: 1465196
agagacaguggauuccugg

SEQ ID NO: 1465198 - RNA, 19 nt, Artificial Sequence
  Description of Artificial Sequence: Synthetic oligonucleotide
  Sense strand starting at position 1021 of SEQ ID NO: 1244104
auccacugucucugaaguu

SEQ ID NO: 1465199 - RNA, 19 nt, Artificial Sequence
  Description of Artificial Sequence: Synthetic oligonucleotide
  Antisense strand to SEQ ID NO: 1465198
aacuucagagacaguggau

SEQ ID NO: 1465200 - RNA, 19 nt, Artificial Sequence
  Description of Artificial Sequence: Synthetic oligonucleotide
  Sense strand starting at position 1063 of SEQ ID NO: 1244104
uugccugagaaguguuaag

SEQ ID NO: 1465201 - RNA, 19 nt, Artificial Sequence
  Description of Artificial Sequence: Synthetic oligonucleotide
  Antisense strand to SEQ ID NO: 1465200
cuuaacacuucucaggcaa

SEQ ID NO: 1465202 - RNA, 19 nt, Artificial Sequence
  Description of Artificial Sequence: Synthetic oligonucleotide
  Sense strand starting at position 1077 of SEQ ID NO: 1244104
uuaaguugugagggagaag

SEQ ID NO: 1465203 - RNA, 19 nt, Artificial Sequence
  Description of Artificial Sequence: Synthetic oligonucleotide
  Antisense strand to SEQ ID NO: 1465202
cuucucccucacaacuuaa

SEQ ID NO: 1465204 - RNA, 19 nt, Artificial Sequence
  Description of Artificial Sequence: Synthetic oligonucleotide
  Sense strand starting at position 1204 of SEQ ID NO: 1244104
ugcagaaggcuccaauaau

SEQ ID NO: 1465205 - RNA, 19 nt, Artificial Sequence
  Description of Artificial Sequence: Synthetic oligonucleotide
  Antisense strand to SEQ ID NO: 1465204
auuauuggagccuucugca

SEQ ID NO: 1465206 - RNA, 19 nt, Artificial Sequence
  Description of Artificial Sequence: Synthetic oligonucleotide
  Sense strand starting at position 1235 of SEQ ID NO: 1244104
aaucgaaguucccuaggua

SEQ ID NO: 1465207 - RNA, 19 nt, Artificial Sequence
  Description of Artificial Sequence: Synthetic oligonucleotide
  Antisense strand to SEQ ID NO: 1465206
uaccuagggaacuucgauu

SEQ ID NO: 1465208 - RNA, 19 nt, Artificial Sequence
  Description of Artificial Sequence: Synthetic oligonucleotide
  Sense strand starting at position 1236 of SEQ ID NO: 1244104
aucgaaguucccuagguaa

SEQ ID NO: 1465209 - RNA, 19 nt, Artificial Sequence
  Description of Artificial Sequence: Synthetic oligonucleotide
  Antisense strand to SEQ ID NO: 1465208
uuaccuagggaacuucgau

SEQ ID NO: 1465210 - RNA, 19 nt, Artificial Sequence
  Description of Artificial Sequence: Synthetic oligonucleotide
  Sense strand starting at position 1238 of SEQ ID NO: 1244104
cgaaguucccuagguaaga

SEQ ID NO: 1465211 - RNA, 19 nt, Artificial Sequence
  Description of Artificial Sequence: Synthetic oligonucleotide
  Antisense strand to SEQ ID NO: 1465210
ucuuaccuagggaacuucg

SEQ ID NO: 1465212 - RNA, 19 nt, Artificial Sequence
  Description of Artificial Sequence: Synthetic oligonucleotide
  Sense strand starting at position 1239 of SEQ ID NO: 1244104
gaaguucccuagguaagac

SEQ ID NO: 1465213 - RNA, 19 nt, Artificial Sequence
  Description of Artificial Sequence: Synthetic oligonucleotide
  Antisense strand to SEQ ID NO: 1465212
gucuuaccuagggaacuuc

SEQ ID NO: 1465214 - RNA, 19 nt, Artificial Sequence
  Description of Artificial Sequence: Synthetic oligonucleotide
  Sense strand starting at position 1289 of SEQ ID NO: 1244104
gaguacucucaaggaaucu

SEQ ID NO: 1465215 - RNA, 19 nt, Artificial Sequence
  Description of Artificial Sequence: Synthetic oligonucleotide
  Antisense strand to SEQ ID NO: 1465214
agauuccuugagaguacuc

SEQ ID NO: 1465216 - RNA, 19 nt, Artificial Sequence
  Description of Artificial Sequence: Synthetic oligonucleotide
  Sense strand starting at position 1616 of SEQ ID NO: 1244104
gugcucugggccggagaaa

SEQ ID NO: 1465217 - RNA, 19 nt, Artificial Sequence
  Description of Artificial Sequence: Synthetic oligonucleotide
  Antisense strand to SEQ ID NO: 1465216
uuucuccggcccagagcac

SEQ ID NO: 1465218 - RNA, 19 nt, Artificial Sequence
  Description of Artificial Sequence: Synthetic oligonucleotide
  Sense strand starting at position 1994 of SEQ ID NO: 1244104
aaagcauuauggguaagaa

SEQ ID NO: 1465219 - RNA, 19 nt, Artificial Sequence
  Description of Artificial Sequence: Synthetic oligonucleotide
  Antisense strand to SEQ ID NO: 1465218
uucuuacccauaaugcuuu

SEQ ID NO: 1465220 - RNA, 19 nt, Artificial Sequence
  Description of Artificial Sequence: Synthetic oligonucleotide
  Sense strand starting at position 2302 of SEQ ID NO: 1244104
auugaaucaacccgagguu

SEQ ID NO: 1465221 - RNA, 19 nt, Artificial Sequence
  Description of Artificial Sequence: Synthetic oligonucleotide
  Antisense strand to SEQ ID NO: 1465220
aaccucggguugauucaau

SEQ ID NO: 1465222 - RNA, 19 nt, Artificial Sequence
  Description of Artificial Sequence: Synthetic oligonucleotide
  Sense strand starting at position 2303 of SEQ ID NO: 1244104
uugaaucaacccgagguuu

SEQ ID NO: 1465223 - RNA, 19 nt, Artificial Sequence
  Description of Artificial Sequence: Synthetic oligonucleotide
  Antisense strand to SEQ ID NO: 1465222
aaaccucggguugauucaa

SEQ ID NO: 1465224 - RNA, 19 nt, Artificial Sequence
  Description of Artificial Sequence: Synthetic oligonucleotide
  Sense strand starting at position 2345 of SEQ ID NO: 1244104
ggagcugcucgcggauuua

SEQ ID NO: 1465225 - RNA, 19 nt, Artificial Sequence
  Description of Artificial Sequence: Synthetic oligonucleotide
  Antisense strand to SEQ ID NO: 1465224
uaaauccgcgagcagcucc

SEQ ID NO: 1465226 - RNA, 19 nt, Artificial Sequence
  Description of Artificial Sequence: Synthetic oligonucleotide
  Sense strand starting at position 2359 of SEQ ID NO: 1244104
auuuauuugugcgcgugga

SEQ ID NO: 1465227 - RNA, 19 nt, Artificial Sequence
  Description of Artificial Sequence: Synthetic oligonucleotide
  Antisense strand to SEQ ID NO: 1465226
uccacgcgcacaaauaaau

SEQ ID NO: 1465228 - RNA, 19 nt, Artificial Sequence
  Description of Artificial Sequence: Synthetic oligonucleotide
  Sense strand starting at position 2375 of SEQ ID NO: 1244104
ggaugugagcguuucugcu

SEQ ID NO: 1465229 - RNA, 19 nt, Artificial Sequence
  Description of Artificial Sequence: Synthetic oligonucleotide
  Antisense strand to SEQ ID NO: 1465228
agcagaaacgcucacaucc

SEQ ID NO: 1465230 - RNA, 19 nt, Artificial Sequence
  Description of Artificial Sequence: Synthetic oligonucleotide
  Sense strand starting at position 3335 of SEQ ID NO: 1244104
cggcucuaccuuuagaaga

SEQ ID NO: 1465231 - RNA, 19 nt, Artificial Sequence
  Description of Artificial Sequence: Synthetic oligonucleotide
  Antisense strand to SEQ ID NO: 1465230
ucuucuaaagguagagccg

SEQ ID NO: 1465232 - RNA, 19 nt, Artificial Sequence
  Description of Artificial Sequence: Synthetic oligonucleotide
  Sense strand starting at position 3409 of SEQ ID NO: 1244104
cuuggaucuacccgaggau

SEQ ID NO: 1465233 - RNA, 19 nt, Artificial Sequence
  Description of Artificial Sequence: Synthetic oligonucleotide
  Antisense strand to SEQ ID NO: 1465232
auccucggguagauccaag

SEQ ID NO: 1465234 - RNA, 19 nt, Artificial Sequence
  Description of Artificial Sequence: Synthetic oligonucleotide
  Sense strand starting at position 3593 of SEQ ID NO: 1244104
gaacgagguagugagucau

SEQ ID NO: 1465235 - RNA, 19 nt, Artificial Sequence
  Description of Artificial Sequence: Synthetic oligonucleotide
  Antisense strand to SEQ ID NO: 1465234
augacucacuaccucguuc

SEQ ID NO: 1465236 - RNA, 19 nt, Artificial Sequence
  Description of Artificial Sequence: Synthetic oligonucleotide
  Sense strand starting at position 3661 of SEQ ID NO: 1244104
ugcuucucaccucggaaua

SEQ ID NO: 1465237 - RNA, 19 nt, Artificial Sequence
  Description of Artificial Sequence: Synthetic oligonucleotide
  Antisense strand to SEQ ID NO: 1465236
uauuccgaggugagaagca

SEQ ID NO: 1465238 - RNA, 19 nt, Artificial Sequence
  Description of Artificial Sequence: Synthetic oligonucleotide
  Sense strand starting at position 3662 of SEQ ID NO: 1244104
gcuucucaccucggaauaa

SEQ ID NO: 1465239 - RNA, 19 nt, Artificial Sequence
  Description of Artificial Sequence: Synthetic oligonucleotide
  Antisense strand to SEQ ID NO: 1465238
uuauuccgaggugagaagc

SEQ ID NO: 1465240 - RNA, 19 nt, Artificial Sequence
  Description of Artificial Sequence: Synthetic oligonucleotide
  Sense strand starting at position 3926 of SEQ ID NO: 1244104
uuagguauguggucugagu

SEQ ID NO: 1465241 - RNA, 19 nt, Artificial Sequence
  Description of Artificial Sequence: Synthetic oligonucleotide
  Antisense strand to SEQ ID NO: 1465240
acucagaccacauaccuaa

SEQ ID NO: 1465242 - RNA, 19 nt, Artificial Sequence
  Description of Artificial Sequence: Synthetic oligonucleotide
  Sense strand starting at position 3928 of SEQ ID NO: 1244104
agguauguggucugaguuu

SEQ ID NO: 1465243 - RNA, 19 nt, Artificial Sequence
  Description of Artificial Sequence: Synthetic oligonucleotide
  Antisense strand to SEQ ID NO: 1465242
aaacucagaccacauaccu

SEQ ID NO: 1465244 - RNA, 19 nt, Artificial Sequence
  Description of Artificial Sequence: Synthetic oligonucleotide
  Sense strand starting at position 3934 of SEQ ID NO: 1244104
guggucugaguuuaugcaa

SEQ ID NO: 1465245 - RNA, 19 nt, Artificial Sequence
  Description of Artificial Sequence: Synthetic oligonucleotide
  Antisense strand to SEQ ID NO: 1465244
uugcauaaacucagaccac

SEQ ID NO: 1465246 - RNA, 19 nt, Artificial Sequence
  Description of Artificial Sequence: Synthetic oligonucleotide
  Sense strand starting at position 266 of SEQ ID NO: 1244105
ggcuucgcucccucaagua

SEQ ID NO: 1465247 - RNA, 19 nt, Artificial Sequence
  Description of Artificial Sequence: Synthetic oligonucleotide
  Antisense strand to SEQ ID NO: 1465246
uacuugagggagcgaagcc

SEQ ID NO: 1465248 - RNA, 19 nt, Artificial Sequence
  Description of Artificial Sequence: Synthetic oligonucleotide
  Sense strand starting at position 769 of SEQ ID NO: 1244105
ucgcguucugagagcgagu

SEQ ID NO: 1465249 - RNA, 19 nt, Artificial Sequence
  Description of Artificial Sequence: Synthetic oligonucleotide
  Antisense strand to SEQ ID NO: 1465248
acucgcucucagaacgcga

SEQ ID NO: 1465250 - RNA, 19 nt, Artificial Sequence
  Description of Artificial Sequence: Synthetic oligonucleotide
  Sense strand starting at position 1331 of SEQ ID NO: 1244105
cucuuugucucaguggaga

SEQ ID NO: 1465251 - RNA, 19 nt, Artificial Sequence
  Description of Artificial Sequence: Synthetic oligonucleotide
  Antisense strand to SEQ ID NO: 1465250
ucuccacugagacaaagag

SEQ ID NO: 1465252 - RNA, 19 nt, Artificial Sequence
  Description of Artificial Sequence: Synthetic oligonucleotide
  Sense strand starting at position 1333 of SEQ ID NO: 1244105
cuuugucucaguggagaac

SEQ ID NO: 1465253 - RNA, 19 nt, Artificial Sequence
  Description of Artificial Sequence: Synthetic oligonucleotide
  Antisense strand to SEQ ID NO: 1465252
guucuccacugagacaaag

SEQ ID NO: 1465254 - RNA, 19 nt, Artificial Sequence
  Description of Artificial Sequence: Synthetic oligonucleotide
  Sense strand starting at position 1336 of SEQ ID NO: 1244105
ugucucaguggagaacuuu

SEQ ID NO: 1465255 - RNA, 19 nt, Artificial Sequence
  Description of Artificial Sequence: Synthetic oligonucleotide
  Antisense strand to SEQ ID NO: 1465254
aaaguucuccacugagaca

SEQ ID NO: 1465256 - RNA, 19 nt, Artificial Sequence
  Description of Artificial Sequence: Synthetic oligonucleotide
  Sense strand starting at position 1544 of SEQ ID NO: 1244105
cgggaccuucuguacaaga

SEQ ID NO: 1465257 - RNA, 19 nt, Artificial Sequence
  Description of Artificial Sequence: Synthetic oligonucleotide
  Antisense strand to SEQ ID NO: 1465256
ucuuguacagaaggucccg

SEQ ID NO: 1465258 - RNA, 19 nt, Artificial Sequence
  Description of Artificial Sequence: Synthetic oligonucleotide
  Sense strand starting at position 1961 of SEQ ID NO: 1244105
ucccuauucucagcucgau

SEQ ID NO: 1465259 - RNA, 19 nt, Artificial Sequence
  Description of Artificial Sequence: Synthetic oligonucleotide
  Antisense strand to SEQ ID NO: 1465258
aucgagcugagaauaggga

SEQ ID NO: 1465260 - RNA, 19 nt, Artificial Sequence
  Description of Artificial Sequence: Synthetic oligonucleotide
  Sense strand starting at position 2039 of SEQ ID NO: 1244105
cuuauauuccgcggcccaa

SEQ ID NO: 1465261 - RNA, 19 nt, Artificial Sequence
  Description of Artificial Sequence: Synthetic oligonucleotide
  Antisense strand to SEQ ID NO: 1465260
uugggccgcggaauauaag

SEQ ID NO: 1465262 - RNA, 19 nt, Artificial Sequence
  Description of Artificial Sequence: Synthetic oligonucleotide
  Sense strand starting at position 2328 of SEQ ID NO: 1244105
gcagcuuucugggaggcuu

SEQ ID NO: 1465263 - RNA, 19 nt, Artificial Sequence
  Description of Artificial Sequence: Synthetic oligonucleotide
  Antisense strand to SEQ ID NO: 1465262
aagccucccagaaagcugc

SEQ ID NO: 1465264 - RNA, 19 nt, Artificial Sequence
  Description of Artificial Sequence: Synthetic oligonucleotide
  Sense strand starting at position 2408 of SEQ ID NO: 1244105
auacaucaucuccgaaguu

SEQ ID NO: 1465265 - RNA, 19 nt, Artificial Sequence
  Description of Artificial Sequence: Synthetic oligonucleotide
  Antisense strand to SEQ ID NO: 1465264
aacuucggagaugauguau

SEQ ID NO: 1465266 - RNA, 19 nt, Artificial Sequence
  Description of Artificial Sequence: Synthetic oligonucleotide
  Sense strand starting at position 2417 of SEQ ID NO: 1244105
cuccgaaguucgcuuccua

SEQ ID NO: 1465267 - RNA, 19 nt, Artificial Sequence
  Description of Artificial Sequence: Synthetic oligonucleotide
  Antisense strand to SEQ ID NO: 1465266
uaggaagcgaacuucggag

SEQ ID NO: 1465268 - RNA, 19 nt, Artificial Sequence
  Description of Artificial Sequence: Synthetic oligonucleotide
  Sense strand starting at position 2424 of SEQ ID NO: 1244105
guucgcuuccuagucgaga

SEQ ID NO: 1465269 - RNA, 19 nt, Artificial Sequence
  Description of Artificial Sequence: Synthetic oligonucleotide
  Antisense strand to SEQ ID NO: 1465268
ucucgacuaggaagcgaac

SEQ ID NO: 1465270 - RNA, 19 nt, Artificial Sequence
  Description of Artificial Sequence: Synthetic oligonucleotide
  Sense strand starting at position 2426 of SEQ ID NO: 1244105
ucgcuuccuagucgagaca

SEQ ID NO: 1465271 - RNA, 19 nt, Artificial Sequence
  Description of Artificial Sequence: Synthetic oligonucleotide
  Antisense strand to SEQ ID NO: 1465270
ugucucgacuaggaagcga

SEQ ID NO: 1465272 - RNA, 19 nt, Artificial Sequence
  Description of Artificial Sequence: Synthetic oligonucleotide
  Sense strand starting at position 2454 of SEQ ID NO: 1244105
ccgagugcgcugggugaau

SEQ ID NO: 1465273 - RNA, 19 nt, Artificial Sequence
  Description of Artificial Sequence: Synthetic oligonucleotide
  Antisense strand to SEQ ID NO: 1465272
auucacccagcgcacucgg

SEQ ID NO: 1465274 - RNA, 19 nt, Artificial Sequence
  Description of Artificial Sequence: Synthetic oligonucleotide
  Sense strand starting at position 2465 of SEQ ID NO: 1244105
gggugaaucuguccgacuc

SEQ ID NO: 1465275 - RNA, 19 nt, Artificial Sequence
  Description of Artificial Sequence: Synthetic oligonucleotide
  Antisense strand to SEQ ID NO: 1465274
gagucggacagauucaccc

SEQ ID NO: 1465276 - RNA, 19 nt, Artificial Sequence
  Description of Artificial Sequence: Synthetic oligonucleotide
  Sense strand starting at position 2466 of SEQ ID NO: 1244105
ggugaaucuguccgacuca

SEQ ID NO: 1465277 - RNA, 19 nt, Artificial Sequence
  Description of Artificial Sequence: Synthetic oligonucleotide
  Antisense strand to SEQ ID NO: 1465276
ugagucggacagauucacc

SEQ ID NO: 1465278 - RNA, 19 nt, Artificial Sequence
  Description of Artificial Sequence: Synthetic oligonucleotide
  Sense strand starting at position 2467 of SEQ ID NO: 1244105
gugaaucuguccgacucaa

SEQ ID NO: 1465279 - RNA, 19 nt, Artificial Sequence
  Description of Artificial Sequence: Synthetic oligonucleotide
  Antisense strand to SEQ ID NO: 1465278
uugagucggacagauucac

SEQ ID NO: 1465280 - RNA, 19 nt, Artificial Sequence
  Description of Artificial Sequence: Synthetic oligonucleotide
  Sense strand starting at position 2512 of SEQ ID NO: 1244105
ggcgcucucuucuaucuaa

SEQ ID NO: 1465281 - RNA, 19 nt, Artificial Sequence
  Description of Artificial Sequence: Synthetic oligonucleotide
  Antisense strand to SEQ ID NO: 1465280
uuagauagaagagagcgcc

SEQ ID NO: 1465282 - RNA, 19 nt, Artificial Sequence
  Description of Artificial Sequence: Synthetic oligonucleotide
  Sense strand starting at position 2600 of SEQ ID NO: 1244105
gcgagucauagugagauac

SEQ ID NO: 1465283 - RNA, 19 nt, Artificial Sequence
  Description of Artificial Sequence: Synthetic oligonucleotide
  Antisense strand to SEQ ID NO: 1465282
guaucucacuaugacucgc

SEQ ID NO: 1465284 - RNA, 19 nt, Artificial Sequence
  Description of Artificial Sequence: Synthetic oligonucleotide
  Sense strand starting at position 2610 of SEQ ID NO: 1244105
gugagauacgcaggagaga

SEQ ID NO: 1465285 - RNA, 19 nt, Artificial Sequence
  Description of Artificial Sequence: Synthetic oligonucleotide
  Antisense strand to SEQ ID NO: 1465284
ucucuccugcguaucucac

SEQ ID NO: 1465286 - RNA, 19 nt, Artificial Sequence
  Description of Artificial Sequence: Synthetic oligonucleotide
  Sense strand starting at position 2630 of SEQ ID NO: 1244105
ccagcuuaucccugcagga

SEQ ID NO: 1465287 - RNA, 19 nt, Artificial Sequence
  Description of Artificial Sequence: Synthetic oligonucleotide
  Antisense strand to SEQ ID NO: 1465286
uccugcagggauaagcugg

SEQ ID NO: 1465288 - RNA, 19 nt, Artificial Sequence
  Description of Artificial Sequence: Synthetic oligonucleotide
  Sense strand starting at position 2673 of SEQ ID NO: 1244105
ccaaguagcuauuacagaa

SEQ ID NO: 1465289 - RNA, 19 nt, Artificial Sequence
  Description of Artificial Sequence: Synthetic oligonucleotide
  Antisense strand to SEQ ID NO: 1465288
uucuguaauagcuacuugg

SEQ ID NO: 1465290 - RNA, 19 nt, Artificial Sequence
  Description of Artificial Sequence: Synthetic oligonucleotide
  Sense strand starting at position 2686 of SEQ ID NO: 1244105
acagaagcccagugaagua

SEQ ID NO: 1465291 - RNA, 19 nt, Artificial Sequence
  Description of Artificial Sequence: Synthetic oligonucleotide
  Antisense strand to SEQ ID NO: 1465290
uacuucacugggcuucugu

SEQ ID NO: 1465292 - RNA, 19 nt, Artificial Sequence
  Description of Artificial Sequence: Synthetic oligonucleotide
  Sense strand starting at position 2765 of SEQ ID NO: 1244105
gggagcaagucuuugaaac

SEQ ID NO: 1465293 - RNA, 19 nt, Artificial Sequence
  Description of Artificial Sequence: Synthetic oligonucleotide
  Antisense strand to SEQ ID NO: 1465292
guuucaaagacuugcuccc

SEQ ID NO: 1465294 - RNA, 19 nt, Artificial Sequence
  Description of Artificial Sequence: Synthetic oligonucleotide
  Sense strand starting at position 2766 of SEQ ID NO: 1244105
ggagcaagucuuugaaaca

SEQ ID NO: 1465295 - RNA, 19 nt, Artificial Sequence
  Description of Artificial Sequence: Synthetic oligonucleotide
  Antisense strand to SEQ ID NO: 1465294
uguuucaaagacuugcucc

SEQ ID NO: 1465296 - RNA, 19 nt, Artificial Sequence
  Description of Artificial Sequence: Synthetic oligonucleotide
  Sense strand starting at position 2767 of SEQ ID NO: 1244105
gagcaagucuuugaaacau

SEQ ID NO: 1465297 - RNA, 19 nt, Artificial Sequence
  Description of Artificial Sequence: Synthetic oligonucleotide
  Antisense strand to SEQ ID NO: 1465296
auguuucaaagacuugcuc

SEQ ID NO: 1465298 - RNA, 19 nt, Artificial Sequence
  Description of Artificial Sequence: Synthetic oligonucleotide
  Sense strand starting at position 2844 of SEQ ID NO: 1244105
auaggagauucaggagugu

SEQ ID NO: 1465299 - RNA, 19 nt, Artificial Sequence
  Description of Artificial Sequence: Synthetic oligonucleotide
  Antisense strand to SEQ ID NO: 1465298
acacuccugaaucuccuau

SEQ ID NO: 1465300 - RNA, 19 nt, Artificial Sequence
  Description of Artificial Sequence: Synthetic oligonucleotide
  Sense strand starting at position 2855 of SEQ ID NO: 1244105
aggaguguggcugauagga

SEQ ID NO: 1465301 - RNA, 19 nt, Artificial Sequence
  Description of Artificial Sequence: Synthetic oligonucleotide
  Antisense strand to SEQ ID NO: 1465300
uccuaucagccacacuccu

SEQ ID NO: 1465302 - RNA, 19 nt, Artificial Sequence
  Description of Artificial Sequence: Synthetic oligonucleotide
  Sense strand starting at position 2857 of SEQ ID NO: 1244105
gaguguggcugauaggaca

SEQ ID NO: 1465303 - RNA, 19 nt, Artificial Sequence
  Description of Artificial Sequence: Synthetic oligonucleotide
  Antisense strand to SEQ ID NO: 1465302
uguccuaucagccacacuc

SEQ ID NO: 1465304 - RNA, 19 nt, Artificial Sequence
  Description of Artificial Sequence: Synthetic oligonucleotide
  Sense strand starting at position 3052 of SEQ ID NO: 1244105
ggacaaagugucugagaag

SEQ ID NO: 1465305 - RNA, 19 nt, Artificial Sequence
  Description of Artificial Sequence: Synthetic oligonucleotide
  Antisense strand to SEQ ID NO: 1465304
cuucucagacacuuugucc

SEQ ID NO: 1465306 - RNA, 19 nt, Artificial Sequence
  Description of Artificial Sequence: Synthetic oligonucleotide
  Sense strand starting at position 3053 of SEQ ID NO: 1244105
gacaaagugucugagaaga

SEQ ID NO: 1465307 - RNA, 19 nt, Artificial Sequence
  Description of Artificial Sequence: Synthetic oligonucleotide
  Antisense strand to SEQ ID NO: 1465306
ucuucucagacacuuuguc

SEQ ID NO: 1465308 - RNA, 19 nt, Artificial Sequence
  Description of Artificial Sequence: Synthetic oligonucleotide
  Sense strand starting at position 3055 of SEQ ID NO: 1244105
caaagugucugagaagaua

SEQ ID NO: 1465309 - RNA, 19 nt, Artificial Sequence
  Description of Artificial Sequence: Synthetic oligonucleotide
  Antisense strand to SEQ ID NO: 1465308
uaucuucucagacacuuug

SEQ ID NO: 1465310 - RNA, 19 nt, Artificial Sequence
  Description of Artificial Sequence: Synthetic oligonucleotide
  Sense strand starting at position 3096 of SEQ ID NO: 1244105
ccagguugccagggauaaa

SEQ ID NO: 1465311 - RNA, 19 nt, Artificial Sequence
  Description of Artificial Sequence: Synthetic oligonucleotide
  Antisense strand to SEQ ID NO: 1465310
uuuaucccuggcaaccugg

SEQ ID NO: 1465312 - RNA, 19 nt, Artificial Sequence
  Description of Artificial Sequence: Synthetic oligonucleotide
  Sense strand starting at position 3144 of SEQ ID NO: 1244105
acggaagacagcugugaaa

SEQ ID NO: 1465313 - RNA, 19 nt, Artificial Sequence
  Description of Artificial Sequence: Synthetic oligonucleotide
  Antisense strand to SEQ ID NO: 1465312
uuucacagcugucuuccgu

SEQ ID NO: 1465314 - RNA, 19 nt, Artificial Sequence
  Description of Artificial Sequence: Synthetic oligonucleotide
  Sense strand starting at position 3146 of SEQ ID NO: 1244105
ggaagacagcugugaaauc

SEQ ID NO: 1465315 - RNA, 19 nt, Artificial Sequence
  Description of Artificial Sequence: Synthetic oligonucleotide
  Antisense strand to SEQ ID NO: 1465314
gauuucacagcugucuucc

SEQ ID NO: 1465316 - RNA, 19 nt, Artificial Sequence
  Description of Artificial Sequence: Synthetic oligonucleotide
  Sense strand starting at position 3147 of SEQ ID NO: 1244105
gaagacagcugugaaauca

SEQ ID NO: 1465317 - RNA, 19 nt, Artificial Sequence
  Description of Artificial Sequence: Synthetic oligonucleotide
  Antisense strand to SEQ ID NO: 1465316
ugauuucacagcugucuuc

SEQ ID NO: 1465318 - RNA, 19 nt, Artificial Sequence
  Description of Artificial Sequence: Synthetic oligonucleotide
  Sense strand starting at position 3612 of SEQ ID NO: 1244105
cuuacaaucucagauagga

SEQ ID NO: 1465319 - RNA, 19 nt, Artificial Sequence
  Description of Artificial Sequence: Synthetic oligonucleotide
  Antisense strand to SEQ ID NO: 1465318
uccuaucugagauuguaag

SEQ ID NO: 1465320 - RNA, 19 nt, Artificial Sequence
  Description of Artificial Sequence: Synthetic oligonucleotide
  Sense strand starting at position 3760 of SEQ ID NO: 1244105
gauaauauauuugguagca

SEQ ID NO: 1465321 - RNA, 19 nt, Artificial Sequence
  Description of Artificial Sequence: Synthetic oligonucleotide
  Antisense strand to SEQ ID NO: 1465320
ugcuaccaaauauauuauc

SEQ ID NO: 1465322 - RNA, 19 nt, Artificial Sequence
  Description of Artificial Sequence: Synthetic oligonucleotide
  Sense strand starting at position 3961 of SEQ ID NO: 1244105
aggcgugacccugagaaag

SEQ ID NO: 1465323 - RNA, 19 nt, Artificial Sequence
  Description of Artificial Sequence: Synthetic oligonucleotide
  Antisense strand to SEQ ID NO: 1465322
cuuucucagggucacgccu

SEQ ID NO: 1465324 - RNA, 19 nt, Artificial Sequence
  Description of Artificial Sequence: Synthetic oligonucleotide
  Sense strand starting at position 79 of SEQ ID NO: 1244106
uccucauaaggaugccaau

SEQ ID NO: 1465325 - RNA, 19 nt, Artificial Sequence
  Description of Artificial Sequence: Synthetic oligonucleotide
  Antisense strand to SEQ ID NO: 1465324
auuggcauccuuaugagga

SEQ ID NO: 1465326 - RNA, 19 nt, Artificial Sequence
  Description of Artificial Sequence: Synthetic oligonucleotide
  Sense strand starting at position 377 of SEQ ID NO: 1244106
caccgagaaccuugugguu

SEQ ID NO: 1465327 - RNA, 19 nt, Artificial Sequence
  Description of Artificial Sequence: Synthetic oligonucleotide
  Antisense strand to SEQ ID NO: 1465326
aaccacaagguucucggug

SEQ ID NO: 1465328 - RNA, 19 nt, Artificial Sequence
  Description of Artificial Sequence: Synthetic oligonucleotide
  Sense strand starting at position 459 of SEQ ID NO: 1244106
aaaguaaugcucuagaggu

SEQ ID NO: 1465329 - RNA, 19 nt, Artificial Sequence
  Description of Artificial Sequence: Synthetic oligonucleotide
  Antisense strand to SEQ ID NO: 1465328
accucuagagcauuacuuu

SEQ ID NO: 1465330 - RNA, 19 nt, Artificial Sequence
  Description of Artificial Sequence: Synthetic oligonucleotide
  Sense strand starting at position 461 of SEQ ID NO: 1244106
aguaaugcucuagagguaa

SEQ ID NO: 1465331 - RNA, 19 nt, Artificial Sequence
  Description of Artificial Sequence: Synthetic oligonucleotide
  Antisense strand to SEQ ID NO: 1465330
uuaccucuagagcauuacu

SEQ ID NO: 1465332 - RNA, 19 nt, Artificial Sequence
  Description of Artificial Sequence: Synthetic oligonucleotide
  Sense strand starting at position 729 of SEQ ID NO: 1244106
uagauuaacuuggaggaaa

SEQ ID NO: 1465333 - RNA, 19 nt, Artificial Sequence
  Description of Artificial Sequence: Synthetic oligonucleotide
  Antisense strand to SEQ ID NO: 1465332
uuuccuccaaguuaaucua

SEQ ID NO: 1465334 - RNA, 19 nt, Artificial Sequence
  Description of Artificial Sequence: Synthetic oligonucleotide
  Sense strand starting at position 778 of SEQ ID NO: 1244106
agucuaccuccauguuaag

SEQ ID NO: 1465335 - RNA, 19 nt, Artificial Sequence
  Description of Artificial Sequence: Synthetic oligonucleotide
  Antisense strand to SEQ ID NO: 1465334
cuuaacauggagguagacu

SEQ ID NO: 1465336 - RNA, 19 nt, Artificial Sequence
  Description of Artificial Sequence: Synthetic oligonucleotide
  Sense strand starting at position 798 of SEQ ID NO: 1244106
uauagagaccucugcuaug

SEQ ID NO: 1465337 - RNA, 19 nt, Artificial Sequence
  Description of Artificial Sequence: Synthetic oligonucleotide
  Antisense strand to SEQ ID NO: 1465336
cauagcagaggucucuaua

SEQ ID NO: 1465338 - RNA, 19 nt, Artificial Sequence
  Description of Artificial Sequence: Synthetic oligonucleotide
  Sense strand starting at position 812 of SEQ ID NO: 1244106
cuaugugugauuuguugcu

SEQ ID NO: 1465339 - RNA, 19 nt, Artificial Sequence
  Description of Artificial Sequence: Synthetic oligonucleotide
  Antisense strand to SEQ ID NO: 1465338
agcaacaaaucacacauag

SEQ ID NO: 1465340 - RNA, 19 nt, Artificial Sequence
  Description of Artificial Sequence: Synthetic oligonucleotide
  Sense strand starting at position 841 of SEQ ID NO: 1244106
agcacuaguuuguuuauaa

SEQ ID NO: 1465341 - RNA, 19 nt, Artificial Sequence
  Description of Artificial Sequence: Synthetic oligonucleotide
  Antisense strand to SEQ ID NO: 1465340
uuauaaacaaacuagugcu

SEQ ID NO: 1465342 - RNA, 19 nt, Artificial Sequence
  Description of Artificial Sequence: Synthetic oligonucleotide
  Sense strand starting at position 851 of SEQ ID NO: 1244106
uguuuauaagaugguuaug

SEQ ID NO: 1465343 - RNA, 19 nt, Artificial Sequence
  Description of Artificial Sequence: Synthetic oligonucleotide
  Antisense strand to SEQ ID NO: 1465342
cauaaccaucuuauaaaca

SEQ ID NO: 1465344 - RNA, 19 nt, Artificial Sequence
  Description of Artificial Sequence: Synthetic oligonucleotide
  Sense strand starting at position 955 of SEQ ID NO: 1244106
ggcagaagccucuaaacau

SEQ ID NO: 1465345 - RNA, 19 nt, Artificial Sequence
  Description of Artificial Sequence: Synthetic oligonucleotide
  Antisense strand to SEQ ID NO: 1465344
auguuuagaggcuucugcc

SEQ ID NO: 1465346 - RNA, 19 nt, Artificial Sequence
  Description of Artificial Sequence: Synthetic oligonucleotide
  Sense strand starting at position 990 of SEQ ID NO: 1244106
acaauaugaugcuucugua

SEQ ID NO: 1465347 - RNA, 19 nt, Artificial Sequence
  Description of Artificial Sequence: Synthetic oligonucleotide
  Antisense strand to SEQ ID NO: 1465346
uacagaagcaucauauugu

SEQ ID NO: 1465348 - RNA, 19 nt, Artificial Sequence
  Description of Artificial Sequence: Synthetic oligonucleotide
  Sense strand starting at position 994 of SEQ ID NO: 1244106
uaugaugcuucuguaggaa

SEQ ID NO: 1465349 - RNA, 19 nt, Artificial Sequence
  Description of Artificial Sequence: Synthetic oligonucleotide
  Antisense strand to SEQ ID NO: 1465348
uuccuacagaagcaucaua

SEQ ID NO: 1465350 - RNA, 19 nt, Artificial Sequence
  Description of Artificial Sequence: Synthetic oligonucleotide
  Sense strand starting at position 997 of SEQ ID NO: 1244106
gaugcuucuguaggaaauu

SEQ ID NO: 1465351 - RNA, 19 nt, Artificial Sequence
  Description of Artificial Sequence: Synthetic oligonucleotide
  Antisense strand to SEQ ID NO: 1465350
aauuuccuacagaagcauc

SEQ ID NO: 1465352 - RNA, 19 nt, Artificial Sequence
  Description of Artificial Sequence: Synthetic oligonucleotide
  Sense strand starting at position 1058 of SEQ ID NO: 1244106
gagcucagaucagcuugau

SEQ ID NO: 1465353 - RNA, 19 nt, Artificial Sequence
  Description of Artificial Sequence: Synthetic oligonucleotide
  Antisense strand to SEQ ID NO: 1465352
aucaagcugaucugagcuc

SEQ ID NO: 1465354 - RNA, 19 nt, Artificial Sequence
  Description of Artificial Sequence: Synthetic oligonucleotide
  Sense strand starting at position 1061 of SEQ ID NO: 1244106
cucagaucagcuugauuau

SEQ ID NO: 1465355 - RNA, 19 nt, Artificial Sequence
  Description of Artificial Sequence: Synthetic oligonucleotide
  Antisense strand to SEQ ID NO: 1465354
auaaucaagcugaucugag

SEQ ID NO: 1465356 - RNA, 19 nt, Artificial Sequence
  Description of Artificial Sequence: Synthetic oligonucleotide
  Sense strand starting at position 1062 of SEQ ID NO: 1244106
ucagaucagcuugauuaua

SEQ ID NO: 1465357 - RNA, 19 nt, Artificial Sequence
  Description of Artificial Sequence: Synthetic oligonucleotide
  Antisense strand to SEQ ID NO: 1465356
uauaaucaagcugaucuga

SEQ ID NO: 1465358 - RNA, 19 nt, Artificial Sequence
  Description of Artificial Sequence: Synthetic oligonucleotide
  Sense strand starting at position 1174 of SEQ ID NO: 1244106
cagagcugaccguaguauu

SEQ ID NO: 1465359 - RNA, 19 nt, Artificial Sequence
  Description of Artificial Sequence: Synthetic oligonucleotide
  Antisense strand to SEQ ID NO: 1465358
aauacuacggucagcucug

SEQ ID NO: 1465360 - RNA, 19 nt, Artificial Sequence
  Description of Artificial Sequence: Synthetic oligonucleotide
  Sense strand starting at position 1205 of SEQ ID NO: 1244106
ggcggcauccaagggauaa

SEQ ID NO: 1465361 - RNA, 19 nt, Artificial Sequence
  Description of Artificial Sequence: Synthetic oligonucleotide
  Antisense strand to SEQ ID NO: 1465360
uuaucccuuggaugccgcc

SEQ ID NO: 1465362 - RNA, 19 nt, Artificial Sequence
  Description of Artificial Sequence: Synthetic oligonucleotide
  Sense strand starting at position 1317 of SEQ ID NO: 1244106
gaaagcuuugcaugugaga

SEQ ID NO: 1465363 - RNA, 19 nt, Artificial Sequence
  Description of Artificial Sequence: Synthetic oligonucleotide
  Antisense strand to SEQ ID NO: 1465362
ucucacaugcaaagcuuuc

SEQ ID NO: 1465364 - RNA, 19 nt, Artificial Sequence
  Description of Artificial Sequence: Synthetic oligonucleotide
  Sense strand starting at position 1393 of SEQ ID NO: 1244106
cccuaagggcucuguaaca

SEQ ID NO: 1465365 - RNA, 19 nt, Artificial Sequence
  Description of Artificial Sequence: Synthetic oligonucleotide
  Antisense strand to SEQ ID NO: 1465364
uguuacagagcccuuaggg

SEQ ID NO: 1465366 - RNA, 19 nt, Artificial Sequence
  Description of Artificial Sequence: Synthetic oligonucleotide
  Sense strand starting at position 2274 of SEQ ID NO: 1244106
ugucgcugucccguggaau

SEQ ID NO: 1465367 - RNA, 19 nt, Artificial Sequence
  Description of Artificial Sequence: Synthetic oligonucleotide
  Antisense strand to SEQ ID NO: 1465366
auuccacgggacagcgaca

SEQ ID NO: 1465368 - RNA, 19 nt, Artificial Sequence
  Description of Artificial Sequence: Synthetic oligonucleotide
  Sense strand starting at position 2376 of SEQ ID NO: 1244106
cguggaauucuagaggauc

SEQ ID NO: 1465369 - RNA, 19 nt, Artificial Sequence
  Description of Artificial Sequence: Synthetic oligonucleotide
  Antisense strand to SEQ ID NO: 1465368
gauccucuagaauuccacg

SEQ ID NO: 1465370 - RNA, 19 nt, Artificial Sequence
  Description of Artificial Sequence: Synthetic oligonucleotide
  Sense strand starting at position 2432 of SEQ ID NO: 1244106
aaauguuacgggugaucau

SEQ ID NO: 1465371 - RNA, 19 nt, Artificial Sequence
  Description of Artificial Sequence: Synthetic oligonucleotide
  Antisense strand to SEQ ID NO: 1465370
augaucacccguaacauuu

SEQ ID NO: 1465372 - RNA, 19 nt, Artificial Sequence
  Description of Artificial Sequence: Synthetic oligonucleotide
  Sense strand starting at position 2433 of SEQ ID NO: 1244106
aauguuacgggugaucauu

SEQ ID NO: 1465373 - RNA, 19 nt, Artificial Sequence
  Description of Artificial Sequence: Synthetic oligonucleotide
  Antisense strand to SEQ ID NO: 1465372
aaugaucacccguaacauu

SEQ ID NO: 1465374 - RNA, 19 nt, Artificial Sequence
  Description of Artificial Sequence: Synthetic oligonucleotide
  Sense strand starting at position 2445 of SEQ ID NO: 1244106
gaucauugguuugcaggua

SEQ ID NO: 1465375 - RNA, 19 nt, Artificial Sequence
  Description of Artificial Sequence: Synthetic oligonucleotide
  Antisense strand to SEQ ID NO: 1465374
uaccugcaaaccaaugauc

SEQ ID NO: 1465376 - RNA, 19 nt, Artificial Sequence
  Description of Artificial Sequence: Synthetic oligonucleotide
  Sense strand starting at position 2457 of SEQ ID NO: 1244106
gcagguauuagugaaggag

SEQ ID NO: 1465377 - RNA, 19 nt, Artificial Sequence
  Description of Artificial Sequence: Synthetic oligonucleotide
  Antisense strand to SEQ ID NO: 1465376
cuccuucacuaauaccugc

SEQ ID NO: 1465378 - RNA, 19 nt, Artificial Sequence
  Description of Artificial Sequence: Synthetic oligonucleotide
  Sense strand starting at position 2475 of SEQ ID NO: 1244106
gccucuaacgugcagaaua

SEQ ID NO: 1465379 - RNA, 19 nt, Artificial Sequence
  Description of Artificial Sequence: Synthetic oligonucleotide
  Antisense strand to SEQ ID NO: 1465378
uauucugcacguuagaggc

SEQ ID NO: 1465380 - RNA, 19 nt, Artificial Sequence
  Description of Artificial Sequence: Synthetic oligonucleotide
  Sense strand starting at position 2569 of SEQ ID NO: 1244106
cauugaagucgucaguuua

SEQ ID NO: 1465381 - RNA, 19 nt, Artificial Sequence
  Description of Artificial Sequence: Synthetic oligonucleotide
  Antisense strand to SEQ ID NO: 1465380
uaaacugacgacuucaaug

SEQ ID NO: 1465382 - RNA, 19 nt, Artificial Sequence
  Description of Artificial Sequence: Synthetic oligonucleotide
  Sense strand starting at position 2642 of SEQ ID NO: 1244106
cauaguuuguucuugagau

SEQ ID NO: 1465383 - RNA, 19 nt, Artificial Sequence
  Description of Artificial Sequence: Synthetic oligonucleotide
  Antisense strand to SEQ ID NO: 1465382
aucucaagaacaaacuaug

SEQ ID NO: 1465384 - RNA, 19 nt, Artificial Sequence
  Description of Artificial Sequence: Synthetic oligonucleotide
  Sense strand starting at position 3175 of SEQ ID NO: 1244106
augaccuagugaugauuua

SEQ ID NO: 1465385 - RNA, 19 nt, Artificial Sequence
  Description of Artificial Sequence: Synthetic oligonucleotide
  Antisense strand to SEQ ID NO: 1465384
uaaaucaucacuaggucau

SEQ ID NO: 1465386 - RNA, 19 nt, Artificial Sequence
  Description of Artificial Sequence: Synthetic oligonucleotide
  Sense strand starting at position 3340 of SEQ ID NO: 1244106
ugaaauaccgaguaccagu

SEQ ID NO: 1465387 - RNA, 19 nt, Artificial Sequence
  Description of Artificial Sequence: Synthetic oligonucleotide
  Antisense strand to SEQ ID NO: 1465386
acugguacucgguauuuca

SEQ ID NO: 1465388 - RNA, 19 nt, Artificial Sequence
  Description of Artificial Sequence: Synthetic oligonucleotide
  Sense strand starting at position 3363 of SEQ ID NO: 1244106
gucagcacugaaugguuaa

SEQ ID NO: 1465389 - RNA, 19 nt, Artificial Sequence
  Description of Artificial Sequence: Synthetic oligonucleotide
  Antisense strand to SEQ ID NO: 1465388
uuaaccauucagugcugac

SEQ ID NO: 1465390 - RNA, 19 nt, Artificial Sequence
  Description of Artificial Sequence: Synthetic oligonucleotide
  Sense strand starting at position 3366 of SEQ ID NO: 1244106
agcacugaaugguuaauau

SEQ ID NO: 1465391 - RNA, 19 nt, Artificial Sequence
  Description of Artificial Sequence: Synthetic oligonucleotide
  Antisense strand to SEQ ID NO: 1465390
auauuaaccauucagugcu

SEQ ID NO: 1465392 - RNA, 19 nt, Artificial Sequence
  Description of Artificial Sequence: Synthetic oligonucleotide
  Sense strand starting at position 3447 of SEQ ID NO: 1244106
ggcugaggcgguuagauua

SEQ ID NO: 1465393 - RNA, 19 nt, Artificial Sequence
  Description of Artificial Sequence: Synthetic oligonucleotide
  Antisense strand to SEQ ID NO: 1465392
uaaucuaaccgccucagcc

SEQ ID NO: 1465394 - RNA, 19 nt, Artificial Sequence
  Description of Artificial Sequence: Synthetic oligonucleotide
  Sense strand starting at position 3455 of SEQ ID NO: 1244106
cgguuagauuacuugaggu

SEQ ID NO: 1465395 - RNA, 19 nt, Artificial Sequence
  Description of Artificial Sequence: Synthetic oligonucleotide
  Antisense strand to SEQ ID NO: 1465394
accucaaguaaucuaaccg

SEQ ID NO: 1465396 - RNA, 19 nt, Artificial Sequence
  Description of Artificial Sequence: Synthetic oligonucleotide
  Sense strand starting at position 3457 of SEQ ID NO: 1244106
guuagauuacuugagguca

SEQ ID NO: 1465397 - RNA, 19 nt, Artificial Sequence
  Description of Artificial Sequence: Synthetic oligonucleotide
  Antisense strand to SEQ ID NO: 1465396
ugaccucaaguaaucuaac

SEQ ID NO: 1465398 - RNA, 19 nt, Artificial Sequence
  Description of Artificial Sequence: Synthetic oligonucleotide
  Sense strand starting at position 3744 of SEQ ID NO: 1244106
ugccuuaaaugagucucua

SEQ ID NO: 1465399 - RNA, 19 nt, Artificial Sequence
  Description of Artificial Sequence: Synthetic oligonucleotide
  Antisense strand to SEQ ID NO: 1465398
uagagacucauuuaaggca

SEQ ID NO: 1465400 - RNA, 19 nt, Artificial Sequence
  Description of Artificial Sequence: Synthetic oligonucleotide
  Sense strand starting at position 3824 of SEQ ID NO: 1244106
auaccugcuccuuggaaca

SEQ ID NO: 1465401 - RNA, 19 nt, Artificial Sequence
  Description of Artificial Sequence: Synthetic oligonucleotide
  Antisense strand to SEQ ID NO: 1465400
uguuccaaggagcagguau

SEQ ID NO: 1465402 - RNA, 19 nt, Artificial Sequence
  Description of Artificial Sequence: Synthetic oligonucleotide
  Sense strand starting at position 3888 of SEQ ID NO: 1244106
ggaauaaccugagcuguag

SEQ ID NO: 1465403 - RNA, 19 nt, Artificial Sequence
  Description of Artificial Sequence: Synthetic oligonucleotide
  Antisense strand to SEQ ID NO: 1465402
cuacagcucagguuauucc

SEQ ID NO: 1465404 - RNA, 19 nt, Artificial Sequence
  Description of Artificial Sequence: Synthetic oligonucleotide
  Sense strand starting at position 2065 of SEQ ID NO: 1244107
gaggccuugcuccgaaacu

SEQ ID NO: 1465405 - RNA, 19 nt, Artificial Sequence
  Description of Artificial Sequence: Synthetic oligonucleotide
  Antisense strand to SEQ ID NO: 1465404
aguuucggagcaaggccuc

SEQ ID NO: 1465406 - RNA, 19 nt, Artificial Sequence
  Description of Artificial Sequence: Synthetic oligonucleotide
  Sense strand starting at position 2066 of SEQ ID NO: 1244107
aggccuugcuccgaaacuu

SEQ ID NO: 1465407 - RNA, 19 nt, Artificial Sequence
  Description of Artificial Sequence: Synthetic oligonucleotide
  Antisense strand to SEQ ID NO: 1465406
aaguuucggagcaaggccu

SEQ ID NO: 1465408 - RNA, 19 nt, Artificial Sequence
  Description of Artificial Sequence: Synthetic oligonucleotide
  Sense strand starting at position 2131 of SEQ ID NO: 1244107
gggcguaguuucucagaga

SEQ ID NO: 1465409 - RNA, 19 nt, Artificial Sequence
  Description of Artificial Sequence: Synthetic oligonucleotide
  Antisense strand to SEQ ID NO: 1465408
ucucugagaaacuacgccc

SEQ ID NO: 1465410 - RNA, 19 nt, Artificial Sequence
  Description of Artificial Sequence: Synthetic oligonucleotide
  Sense strand starting at position 2132 of SEQ ID NO: 1244107
ggcguaguuucucagagag

SEQ ID NO: 1465411 - RNA, 19 nt, Artificial Sequence
  Description of Artificial Sequence: Synthetic oligonucleotide
  Antisense strand to SEQ ID NO: 1465410
cucucugagaaacuacgcc

SEQ ID NO: 1465412 - RNA, 19 nt, Artificial Sequence
  Description of Artificial Sequence: Synthetic oligonucleotide
  Sense strand starting at position 2134 of SEQ ID NO: 1244107
cguaguuucucagagagaa

SEQ ID NO: 1465413 - RNA, 19 nt, Artificial Sequence
  Description of Artificial Sequence: Synthetic oligonucleotide
  Antisense strand to SEQ ID NO: 1465412
uucucucugagaaacuacg

SEQ ID NO: 1465414 - RNA, 19 nt, Artificial Sequence
  Description of Artificial Sequence: Synthetic oligonucleotide
  Sense strand starting at position 2279 of SEQ ID NO: 1244107
gugacccuuucuucuuauu

SEQ ID NO: 1465415 - RNA, 19 nt, Artificial Sequence
  Description of Artificial Sequence: Synthetic oligonucleotide
  Antisense strand to SEQ ID NO: 1465414
aauaagaagaaagggucac

SEQ ID NO: 1465416 - RNA, 19 nt, Artificial Sequence
  Description of Artificial Sequence: Synthetic oligonucleotide
  Sense strand starting at position 2316 of SEQ ID NO: 1244107
cugacauuccagcacguuu

SEQ ID NO: 1465417 - RNA, 19 nt, Artificial Sequence
  Description of Artificial Sequence: Synthetic oligonucleotide
  Antisense strand to SEQ ID NO: 1465416
aaacgugcuggaaugucag

SEQ ID NO: 1465418 - RNA, 19 nt, Artificial Sequence
  Description of Artificial Sequence: Synthetic oligonucleotide
  Sense strand starting at position 2382 of SEQ ID NO: 1244107
uggcaaguuagacacgaua

SEQ ID NO: 1465419 - RNA, 19 nt, Artificial Sequence
  Description of Artificial Sequence: Synthetic oligonucleotide
  Antisense strand to SEQ ID NO: 1465418
uaucgugucuaacuugcca

SEQ ID NO: 1465420 - RNA, 19 nt, Artificial Sequence
  Description of Artificial Sequence: Synthetic oligonucleotide
  Sense strand starting at position 2393 of SEQ ID NO: 1244107
acacgauaggaaugagugu

SEQ ID NO: 1465421 - RNA, 19 nt, Artificial Sequence
  Description of Artificial Sequence: Synthetic oligonucleotide
  Antisense strand to SEQ ID NO: 1465420
acacucauuccuaucgugu

SEQ ID NO: 1465422 - RNA, 19 nt, Artificial Sequence
  Description of Artificial Sequence: Synthetic oligonucleotide
  Sense strand starting at position 2770 of SEQ ID NO: 1244107
gcugaugagccgagugcau

SEQ ID NO: 1465423 - RNA, 19 nt, Artificial Sequence
  Description of Artificial Sequence: Synthetic oligonucleotide
  Antisense strand to SEQ ID NO: 1465422
augcacucggcucaucagc

SEQ ID NO: 1465424 - RNA, 19 nt, Artificial Sequence
  Description of Artificial Sequence: Synthetic oligonucleotide
  Sense strand starting at position 2805 of SEQ ID NO: 1244107
ggacaagugucaggagcaa

SEQ ID NO: 1465425 - RNA, 19 nt, Artificial Sequence
  Description of Artificial Sequence: Synthetic oligonucleotide
  Antisense strand to SEQ ID NO: 1465424
uugcuccugacacuugucc

SEQ ID NO: 1465426 - RNA, 19 nt, Artificial Sequence
  Description of Artificial Sequence: Synthetic oligonucleotide
  Sense strand starting at position 2835 of SEQ ID NO: 1244107
gcuggcucugaaggaugaa

SEQ ID NO: 1465427 - RNA, 19 nt, Artificial Sequence
  Description of Artificial Sequence: Synthetic oligonucleotide
  Antisense strand to SEQ ID NO: 1465426
uucauccuucagagccagc

SEQ ID NO: 1465428 - RNA, 19 nt, Artificial Sequence
  Description of Artificial Sequence: Synthetic oligonucleotide
  Sense strand starting at position 2901 of SEQ ID NO: 1244107
agcaucaugugccaggaaa

SEQ ID NO: 1465429 - RNA, 19 nt, Artificial Sequence
  Description of Artificial Sequence: Synthetic oligonucleotide
  Antisense strand to SEQ ID NO: 1465428
uuuccuggcacaugaugcu

SEQ ID NO: 1465430 - RNA, 19 nt, Artificial Sequence
  Description of Artificial Sequence: Synthetic oligonucleotide
  Sense strand starting at position 2986 of SEQ ID NO: 1244107
gggcauggccaauguagau

SEQ ID NO: 1465431 - RNA, 19 nt, Artificial Sequence
  Description of Artificial Sequence: Synthetic oligonucleotide
  Antisense strand to SEQ ID NO: 1465430
aucuacauuggccaugccc

SEQ ID NO: 1465432 - RNA, 19 nt, Artificial Sequence
  Description of Artificial Sequence: Synthetic oligonucleotide
  Sense strand starting at position 3043 of SEQ ID NO: 1244107
acagcuauauguucugaaa

SEQ ID NO: 1465433 - RNA, 19 nt, Artificial Sequence
  Description of Artificial Sequence: Synthetic oligonucleotide
  Antisense strand to SEQ ID NO: 1465432
uuucagaacauauagcugu

SEQ ID NO: 1465434 - RNA, 19 nt, Artificial Sequence
  Description of Artificial Sequence: Synthetic oligonucleotide
  Sense strand starting at position 3149 of SEQ ID NO: 1244107
gaggcuuccugagagcaag

SEQ ID NO: 1465435 - RNA, 19 nt, Artificial Sequence
  Description of Artificial Sequence: Synthetic oligonucleotide
  Antisense strand to SEQ ID NO: 1465434
cuugcucucaggaagccuc

SEQ ID NO: 1465436 - RNA, 19 nt, Artificial Sequence
  Description of Artificial Sequence: Synthetic oligonucleotide
  Sense strand starting at position 3178 of SEQ ID NO: 1244107
cagagcacuccuggaggaa

SEQ ID NO: 1465437 - RNA, 19 nt, Artificial Sequence
  Description of Artificial Sequence: Synthetic oligonucleotide
  Antisense strand to SEQ ID NO: 1465436
uuccuccaggagugcucug

SEQ ID NO: 1465438 - RNA, 19 nt, Artificial Sequence
  Description of Artificial Sequence: Synthetic oligonucleotide
  Sense strand starting at position 3207 of SEQ ID NO: 1244107
ugcagauaacuugguuauc

SEQ ID NO: 1465439 - RNA, 19 nt, Artificial Sequence
  Description of Artificial Sequence: Synthetic oligonucleotide
  Antisense strand to SEQ ID NO: 1465438
gauaaccaaguuaucugca

SEQ ID NO: 1465440 - RNA, 19 nt, Artificial Sequence
  Description of Artificial Sequence: Synthetic oligonucleotide
  Sense strand starting at position 3208 of SEQ ID NO: 1244107
gcagauaacuugguuauca

SEQ ID NO: 1465441 - RNA, 19 nt, Artificial Sequence
  Description of Artificial Sequence: Synthetic oligonucleotide
  Antisense strand to SEQ ID NO: 1465440
ugauaaccaaguuaucugc

SEQ ID NO: 1465442 - RNA, 19 nt, Artificial Sequence
  Description of Artificial Sequence: Synthetic oligonucleotide
  Sense strand starting at position 3212 of SEQ ID NO: 1244107
auaacuugguuaucacaga

SEQ ID NO: 1465443 - RNA, 19 nt, Artificial Sequence
  Description of Artificial Sequence: Synthetic oligonucleotide
  Antisense strand to SEQ ID NO: 1465442
ucugugauaaccaaguuau

SEQ ID NO: 1465444 - RNA, 19 nt, Artificial Sequence
  Description of Artificial Sequence: Synthetic oligonucleotide
  Sense strand starting at position 3217 of SEQ ID NO: 1244107
uugguuaucacagagaguu

SEQ ID NO: 1465445 - RNA, 19 nt, Artificial Sequence
  Description of Artificial Sequence: Synthetic oligonucleotide
  Antisense strand to SEQ ID NO: 1465444
aacucucugugauaaccaa

SEQ ID NO: 1465446 - RNA, 19 nt, Artificial Sequence
  Description of Artificial Sequence: Synthetic oligonucleotide
  Sense strand starting at position 3355 of SEQ ID NO: 1244107
cacuguauggucucguguu

SEQ ID NO: 1465447 - RNA, 19 nt, Artificial Sequence
  Description of Artificial Sequence: Synthetic oligonucleotide
  Antisense strand to SEQ ID NO: 1465446
aacacgagaccauacagug

SEQ ID NO: 1465448 - RNA, 19 nt, Artificial Sequence
  Description of Artificial Sequence: Synthetic oligonucleotide
  Sense strand starting at position 3394 of SEQ ID NO: 1244107
ugacgaauagguuguggaa

SEQ ID NO: 1465449 - RNA, 19 nt, Artificial Sequence
  Description of Artificial Sequence: Synthetic oligonucleotide
  Antisense strand to SEQ ID NO: 1465448
uuccacaaccuauucguca

SEQ ID NO: 1465450 - RNA, 19 nt, Artificial Sequence
  Description of Artificial Sequence: Synthetic oligonucleotide
  Sense strand starting at position 3396 of SEQ ID NO: 1244107
acgaauagguuguggaauu

SEQ ID NO: 1465451 - RNA, 19 nt, Artificial Sequence
  Description of Artificial Sequence: Synthetic oligonucleotide
  Antisense strand to SEQ ID NO: 1465450
aauuccacaaccuauucgu

SEQ ID NO: 1465452 - RNA, 19 nt, Artificial Sequence
  Description of Artificial Sequence: Synthetic oligonucleotide
  Sense strand starting at position 3445 of SEQ ID NO: 1244107
uacuguuagcuggguucua

SEQ ID NO: 1465453 - RNA, 19 nt, Artificial Sequence
  Description of Artificial Sequence: Synthetic oligonucleotide
  Antisense strand to SEQ ID NO: 1465452
uagaacccagcuaacagua

SEQ ID NO: 1465454 - RNA, 19 nt, Artificial Sequence
  Description of Artificial Sequence: Synthetic oligonucleotide
  Sense strand starting at position 3446 of SEQ ID NO: 1244107
acuguuagcuggguucuaa

SEQ ID NO: 1465455 - RNA, 19 nt, Artificial Sequence
  Description of Artificial Sequence: Synthetic oligonucleotide
  Antisense strand to SEQ ID NO: 1465454
uuagaacccagcuaacagu

SEQ ID NO: 1465456 - RNA, 19 nt, Artificial Sequence
  Description of Artificial Sequence: Synthetic oligonucleotide
  Sense strand starting at position 143 of SEQ ID NO: 1244108
ugacaccugcuuugaacaa

SEQ ID NO: 1465457 - RNA, 19 nt, Artificial Sequence
  Description of Artificial Sequence: Synthetic oligonucleotide
  Antisense strand to SEQ ID NO: 1465456
uuguucaaagcagguguca

SEQ ID NO: 1465458 - RNA, 19 nt, Artificial Sequence
  Description of Artificial Sequence: Synthetic oligonucleotide
  Sense strand starting at position 211 of SEQ ID NO: 1244108
agaauuguuugcccaggca

SEQ ID NO: 1465459 - RNA, 19 nt, Artificial Sequence
  Description of Artificial Sequence: Synthetic oligonucleotide
  Antisense strand to SEQ ID NO: 1465458
ugccugggcaaacaauucu

SEQ ID NO: 1465460 - RNA, 19 nt, Artificial Sequence
  Description of Artificial Sequence: Synthetic oligonucleotide
  Sense strand starting at position 441 of SEQ ID NO: 1244108
caggaagccagguguaagu

SEQ ID NO: 1465461 - RNA, 19 nt, Artificial Sequence
  Description of Artificial Sequence: Synthetic oligonucleotide
  Antisense strand to SEQ ID NO: 1465460
acuuacaccuggcuuccug

SEQ ID NO: 1465462 - RNA, 19 nt, Artificial Sequence
  Description of Artificial Sequence: Synthetic oligonucleotide
  Sense strand starting at position 752 of SEQ ID NO: 1244108
gaaagaggucuuugcacua

SEQ ID NO: 1465463 - RNA, 19 nt, Artificial Sequence
  Description of Artificial Sequence: Synthetic oligonucleotide
  Antisense strand to SEQ ID NO: 1465462
uagugcaaagaccucuuuc

SEQ ID NO: 1465464 - RNA, 19 nt, Artificial Sequence
  Description of Artificial Sequence: Synthetic oligonucleotide
  Sense strand starting at position 863 of SEQ ID NO: 1244108
ugaccuauucgcugucaag

SEQ ID NO: 1465465 - RNA, 19 nt, Artificial Sequence
  Description of Artificial Sequence: Synthetic oligonucleotide
  Antisense strand to SEQ ID NO: 1465464
cuugacagcgaauagguca

SEQ ID NO: 1465466 - RNA, 19 nt, Artificial Sequence
  Description of Artificial Sequence: Synthetic oligonucleotide
  Sense strand starting at position 1055 of SEQ ID NO: 1244108
uaguucuucuggccugaaa

SEQ ID NO: 1465467 - RNA, 19 nt, Artificial Sequence
  Description of Artificial Sequence: Synthetic oligonucleotide
  Antisense strand to SEQ ID NO: 1465466
uuucaggccagaagaacua

SEQ ID NO: 1465468 - RNA, 19 nt, Artificial Sequence
  Description of Artificial Sequence: Synthetic oligonucleotide
  Sense strand starting at position 1164 of SEQ ID NO: 1244108
ugccuucuuugauugguca

SEQ ID NO: 1465469 - RNA, 19 nt, Artificial Sequence
  Description of Artificial Sequence: Synthetic oligonucleotide
  Antisense strand to SEQ ID NO: 1465468
ugaccaaucaaagaaggca

SEQ ID NO: 1465470 - RNA, 19 nt, Artificial Sequence
  Description of Artificial Sequence: Synthetic oligonucleotide
  Sense strand starting at position 1165 of SEQ ID NO: 1244108
gccuucuuugauuggucaa

SEQ ID NO: 1465471 - RNA, 19 nt, Artificial Sequence
  Description of Artificial Sequence: Synthetic oligonucleotide
  Antisense strand to SEQ ID NO: 1465470
uugaccaaucaaagaaggc

SEQ ID NO: 1465472 - RNA, 19 nt, Artificial Sequence
  Description of Artificial Sequence: Synthetic oligonucleotide
  Sense strand starting at position 1214 of SEQ ID NO: 1244108
aacgauuagcugugaggag

SEQ ID NO: 1465473 - RNA, 19 nt, Artificial Sequence
  Description of Artificial Sequence: Synthetic oligonucleotide
  Antisense strand to SEQ ID NO: 1465472
cuccucacagcuaaucguu

SEQ ID NO: 1465474 - RNA, 19 nt, Artificial Sequence
  Description of Artificial Sequence: Synthetic oligonucleotide
  Sense strand starting at position 1274 of SEQ ID NO: 1244108
cauugauggcguuaaucuu

SEQ ID NO: 1465475 - RNA, 19 nt, Artificial Sequence
  Description of Artificial Sequence: Synthetic oligonucleotide
  Antisense strand to SEQ ID NO: 1465474
aagauuaacgccaucaaug

SEQ ID NO: 1465476 - RNA, 19 nt, Artificial Sequence
  Description of Artificial Sequence: Synthetic oligonucleotide
  Sense strand starting at position 1347 of SEQ ID NO: 1244108
auccuuggccuuugaggaa

SEQ ID NO: 1465477 - RNA, 19 nt, Artificial Sequence
  Description of Artificial Sequence: Synthetic oligonucleotide
  Antisense strand to SEQ ID NO: 1465476
uuccucaaaggccaaggau

SEQ ID NO: 1465478 - RNA, 19 nt, Artificial Sequence
  Description of Artificial Sequence: Synthetic oligonucleotide
  Sense strand starting at position 1639 of SEQ ID NO: 1244108
ucgguaauuaccgcguguu

SEQ ID NO: 1465479 - RNA, 19 nt, Artificial Sequence
  Description of Artificial Sequence: Synthetic oligonucleotide
  Antisense strand to SEQ ID NO: 1465478
aacacgcgguaauuaccga

SEQ ID NO: 1465480 - RNA, 19 nt, Artificial Sequence
  Description of Artificial Sequence: Synthetic oligonucleotide
  Sense strand starting at position 2104 of SEQ ID NO: 1244108
ggcucuugcccucaagauc

SEQ ID NO: 1465481 - RNA, 19 nt, Artificial Sequence
  Description of Artificial Sequence: Synthetic oligonucleotide
  Antisense strand to SEQ ID NO: 1465480
gaucuugagggcaagagcc

SEQ ID NO: 1465482 - RNA, 19 nt, Artificial Sequence
  Description of Artificial Sequence: Synthetic oligonucleotide
  Sense strand starting at position 2525 of SEQ ID NO: 1244108
ggugcauuguuacuaggua

SEQ ID NO: 1465483 - RNA, 19 nt, Artificial Sequence
  Description of Artificial Sequence: Synthetic oligonucleotide
  Antisense strand to SEQ ID NO: 1465482
uaccuaguaacaaugcacc

SEQ ID NO: 1465484 - RNA, 19 nt, Artificial Sequence
  Description of Artificial Sequence: Synthetic oligonucleotide
  Sense strand starting at position 2636 of SEQ ID NO: 1244108
auguauagcguuuaagaga

SEQ ID NO: 1465485 - RNA, 19 nt, Artificial Sequence
  Description of Artificial Sequence: Synthetic oligonucleotide
  Antisense strand to SEQ ID NO: 1465484
ucucuuaaacgcuauacau

SEQ ID NO: 1465486 - RNA, 19 nt, Artificial Sequence
  Description of Artificial Sequence: Synthetic oligonucleotide
  Sense strand starting at position 2643 of SEQ ID NO: 1244108
gcguuuaagagaugaggag

SEQ ID NO: 1465487 - RNA, 19 nt, Artificial Sequence
  Description of Artificial Sequence: Synthetic oligonucleotide
  Antisense strand to SEQ ID NO: 1465486
cuccucaucucuuaaacgc

SEQ ID NO: 1465488 - RNA, 19 nt, Artificial Sequence
  Description of Artificial Sequence: Synthetic oligonucleotide
  Sense strand starting at position 2658 of SEQ ID NO: 1244108
ggagaccugcuuugaaaga

SEQ ID NO: 1465489 - RNA, 19 nt, Artificial Sequence
  Description of Artificial Sequence: Synthetic oligonucleotide
  Antisense strand to SEQ ID NO: 1465488
ucuuucaaagcaggucucc

SEQ ID NO: 1465490 - RNA, 19 nt, Artificial Sequence
  Description of Artificial Sequence: Synthetic oligonucleotide
  Sense strand starting at position 2703 of SEQ ID NO: 1244108
uguagcagcuucuuaaaga

SEQ ID NO: 1465491 - RNA, 19 nt, Artificial Sequence
  Description of Artificial Sequence: Synthetic oligonucleotide
  Antisense strand to SEQ ID NO: 1465490
ucuuuaagaagcugcuaca

SEQ ID NO: 1465492 - RNA, 19 nt, Artificial Sequence
  Description of Artificial Sequence: Synthetic oligonucleotide
  Sense strand starting at position 2711 of SEQ ID NO: 1244108
cuucuuaaagauugaaguu

SEQ ID NO: 1465493 - RNA, 19 nt, Artificial Sequence
  Description of Artificial Sequence: Synthetic oligonucleotide
  Antisense strand to SEQ ID NO: 1465492
aacuucaaucuuuaagaag

SEQ ID NO: 1465494 - RNA, 19 nt, Artificial Sequence
  Description of Artificial Sequence: Synthetic oligonucleotide
  Sense strand starting at position 2723 of SEQ ID NO: 1244108
ugaaguuugaugugaaguu

SEQ ID NO: 1465495 - RNA, 19 nt, Artificial Sequence
  Description of Artificial Sequence: Synthetic oligonucleotide
  Antisense strand to SEQ ID NO: 1465494
aacuucacaucaaacuuca

SEQ ID NO: 1465496 - RNA, 19 nt, Artificial Sequence
  Description of Artificial Sequence: Synthetic oligonucleotide
  Sense strand starting at position 2746 of SEQ ID NO: 1244108
uauugaauugcagguuaaa

SEQ ID NO: 1465497 - RNA, 19 nt, Artificial Sequence
  Description of Artificial Sequence: Synthetic oligonucleotide
  Antisense strand to SEQ ID NO: 1465496
uuuaaccugcaauucaaua

SEQ ID NO: 1465498 - RNA, 19 nt, Artificial Sequence
  Description of Artificial Sequence: Synthetic oligonucleotide
  Sense strand starting at position 2860 of SEQ ID NO: 1244108
aaauuaugccuagguaggu

SEQ ID NO: 1465499 - RNA, 19 nt, Artificial Sequence
  Description of Artificial Sequence: Synthetic oligonucleotide
  Antisense strand to SEQ ID NO: 1465498
accuaccuaggcauaauuu

SEQ ID NO: 1465500 - RNA, 19 nt, Artificial Sequence
  Description of Artificial Sequence: Synthetic oligonucleotide
  Sense strand starting at position 2891 of SEQ ID NO: 1244108
gaggcuuugacguagcaga

SEQ ID NO: 1465501 - RNA, 19 nt, Artificial Sequence
  Description of Artificial Sequence: Synthetic oligonucleotide
  Antisense strand to SEQ ID NO: 1465500
ucugcuacgucaaagccuc

SEQ ID NO: 1465502 - RNA, 19 nt, Artificial Sequence
  Description of Artificial Sequence: Synthetic oligonucleotide
  Sense strand starting at position 2933 of SEQ ID NO: 1244108
guaccuugugaugagucuu

SEQ ID NO: 1465503 - RNA, 19 nt, Artificial Sequence
  Description of Artificial Sequence: Synthetic oligonucleotide
  Antisense strand to SEQ ID NO: 1465502
aagacucaucacaagguac

SEQ ID NO: 1465504 - RNA, 19 nt, Artificial Sequence
  Description of Artificial Sequence: Synthetic oligonucleotide
  Sense strand starting at position 2941 of SEQ ID NO: 1244108
ugaugagucuuauuaucag

SEQ ID NO: 1465505 - RNA, 19 nt, Artificial Sequence
  Description of Artificial Sequence: Synthetic oligonucleotide
  Antisense strand to SEQ ID NO: 1465504
cugauaauaagacucauca

SEQ ID NO: 1465506 - RNA, 19 nt, Artificial Sequence
  Description of Artificial Sequence: Synthetic oligonucleotide
  Sense strand starting at position 2944 of SEQ ID NO: 1244108
ugagucuuauuaucaguua

SEQ ID NO: 1465507 - RNA, 19 nt, Artificial Sequence
  Description of Artificial Sequence: Synthetic oligonucleotide
  Antisense strand to SEQ ID NO: 1465506
uaacugauaauaagacuca

SEQ ID NO: 1465508 - RNA, 19 nt, Artificial Sequence
  Description of Artificial Sequence: Synthetic oligonucleotide
  Sense strand starting at position 2947 of SEQ ID NO: 1244108
gucuuauuaucaguuacaa

SEQ ID NO: 1465509 - RNA, 19 nt, Artificial Sequence
  Description of Artificial Sequence: Synthetic oligonucleotide
  Antisense strand to SEQ ID NO: 1465508
uuguaacugauaauaagac

SEQ ID NO: 1465510 - RNA, 19 nt, Artificial Sequence
  Description of Artificial Sequence: Synthetic oligonucleotide
  Sense strand starting at position 3361 of SEQ ID NO: 1244108
gagugacaacuccauagca

SEQ ID NO: 1465511 - RNA, 19 nt, Artificial Sequence
  Description of Artificial Sequence: Synthetic oligonucleotide
  Antisense strand to SEQ ID NO: 1465510
ugcuauggaguugucacuc

SEQ ID NO: 1465512 - RNA, 19 nt, Artificial Sequence
  Description of Artificial Sequence: Synthetic oligonucleotide
  Sense strand starting at position 3363 of SEQ ID NO: 1244108
gugacaacuccauagcauu

SEQ ID NO: 1465513 - RNA, 19 nt, Artificial Sequence
  Description of Artificial Sequence: Synthetic oligonucleotide
  Antisense strand to SEQ ID NO: 1465512
aaugcuauggaguugucac

SEQ ID NO: 1465514 - RNA, 19 nt, Artificial Sequence
  Description of Artificial Sequence: Synthetic oligonucleotide
  Sense strand starting at position 3535 of SEQ ID NO: 1244108
auaugacauguucgcucua

SEQ ID NO: 1465515 - RNA, 19 nt, Artificial Sequence
  Description of Artificial Sequence: Synthetic oligonucleotide
  Antisense strand to SEQ ID NO: 1465514
uagagcgaacaugucauau

SEQ ID NO: 1465516 - RNA, 19 nt, Artificial Sequence
  Description of Artificial Sequence: Synthetic oligonucleotide
  Sense strand starting at position 3537 of SEQ ID NO: 1244108
augacauguucgcucuaca

SEQ ID NO: 1465517 - RNA, 19 nt, Artificial Sequence
  Description of Artificial Sequence: Synthetic oligonucleotide
  Antisense strand to SEQ ID NO: 1465516
uguagagcgaacaugucau

SEQ ID NO: 1465518 - RNA, 19 nt, Artificial Sequence
  Description of Artificial Sequence: Synthetic oligonucleotide
  Sense strand starting at position 3545 of SEQ ID NO: 1244108
uucgcucuacacugaucaa

SEQ ID NO: 1465519 - RNA, 19 nt, Artificial Sequence
  Description of Artificial Sequence: Synthetic oligonucleotide
  Antisense strand to SEQ ID NO: 1465518
uugaucaguguagagcgaa

SEQ ID NO: 1465520 - RNA, 19 nt, Artificial Sequence
  Description of Artificial Sequence: Synthetic oligonucleotide
  Sense strand starting at position 3548 of SEQ ID NO: 1244108
gcucuacacugaucaagag

SEQ ID NO: 1465521 - RNA, 19 nt, Artificial Sequence
  Description of Artificial Sequence: Synthetic oligonucleotide
  Antisense strand to SEQ ID NO: 1465520
cucuugaucaguguagagc

SEQ ID NO: 1465522 - RNA, 19 nt, Artificial Sequence
  Description of Artificial Sequence: Synthetic oligonucleotide
  Sense strand starting at position 3556 of SEQ ID NO: 1244108
cugaucaagagaugugagu

SEQ ID NO: 1465523 - RNA, 19 nt, Artificial Sequence
  Description of Artificial Sequence: Synthetic oligonucleotide
  Antisense strand to SEQ ID NO: 1465522
acucacaucucuugaucag

SEQ ID NO: 1465524 - RNA, 19 nt, Artificial Sequence
  Description of Artificial Sequence: Synthetic oligonucleotide
  Sense strand starting at position 3558 of SEQ ID NO: 1244108
gaucaagagaugugaguuu

SEQ ID NO: 1465525 - RNA, 19 nt, Artificial Sequence
  Description of Artificial Sequence: Synthetic oligonucleotide
  Antisense strand to SEQ ID NO: 1465524
aaacucacaucucuugauc

SEQ ID NO: 1465526 - RNA, 19 nt, Artificial Sequence
  Description of Artificial Sequence: Synthetic oligonucleotide
  Sense strand starting at position 3659 of SEQ ID NO: 1244108
ucaagaauuuaauggagga

SEQ ID NO: 1465527 - RNA, 19 nt, Artificial Sequence
  Description of Artificial Sequence: Synthetic oligonucleotide
  Antisense strand to SEQ ID NO: 1465526
uccuccauuaaauucuuga

SEQ ID NO: 1465528 - RNA, 19 nt, Artificial Sequence
  Description of Artificial Sequence: Synthetic oligonucleotide
  Sense strand starting at position 3732 of SEQ ID NO: 1244108
gaugcuacugaguggcaaa

SEQ ID NO: 1465529 - RNA, 19 nt, Artificial Sequence
  Description of Artificial Sequence: Synthetic oligonucleotide
  Antisense strand to SEQ ID NO: 1465528
uuugccacucaguagcauc

SEQ ID NO: 1465530 - RNA, 19 nt, Artificial Sequence
  Description of Artificial Sequence: Synthetic oligonucleotide
  Sense strand starting at position 3733 of SEQ ID NO: 1244108
augcuacugaguggcaaau

SEQ ID NO: 1465531 - RNA, 19 nt, Artificial Sequence
  Description of Artificial Sequence: Synthetic oligonucleotide
  Antisense strand to SEQ ID NO: 1465530
auuugccacucaguagcau

SEQ ID NO: 1465532 - RNA, 19 nt, Artificial Sequence
  Description of Artificial Sequence: Synthetic oligonucleotide
  Sense strand starting at position 3764 of SEQ ID NO: 1244108
gcagaaauuuguuacucau

SEQ ID NO: 1465533 - RNA, 19 nt, Artificial Sequence
  Description of Artificial Sequence: Synthetic oligonucleotide
  Antisense strand to SEQ ID NO: 1465532
augaguaacaaauuucugc

SEQ ID NO: 1465534 - RNA, 19 nt, Artificial Sequence
  Description of Artificial Sequence: Synthetic oligonucleotide
  Sense strand starting at position 3774 of SEQ ID NO: 1244108
guuacucauuuguaaauga

SEQ ID NO: 1465535 - RNA, 19 nt, Artificial Sequence
  Description of Artificial Sequence: Synthetic oligonucleotide
  Antisense strand to SEQ ID NO: 1465534
ucauuuacaaaugaguaac

SEQ ID NO: 1465536 - RNA, 19 nt, Artificial Sequence
  Description of Artificial Sequence: Synthetic oligonucleotide
  Sense strand starting at position 1 of SEQ ID NO: 1244109
cugccaucuuagucuuuga

SEQ ID NO: 1465537 - RNA, 19 nt, Artificial Sequence
  Description of Artificial Sequence: Synthetic oligonucleotide
  Antisense strand to SEQ ID NO: 1465536
ucaaagacuaagauggcag

SEQ ID NO: 1465538 - RNA, 19 nt, Artificial Sequence
  Description of Artificial Sequence: Synthetic oligonucleotide
  Sense strand starting at position 4 of SEQ ID NO: 1244109
ccaucuuagucuuugagaa

SEQ ID NO: 1465539 - RNA, 19 nt, Artificial Sequence
  Description of Artificial Sequence: Synthetic oligonucleotide
  Antisense strand to SEQ ID NO: 1465538
uucucaaagacuaagaugg

SEQ ID NO: 1465540 - RNA, 19 nt, Artificial Sequence
  Description of Artificial Sequence: Synthetic oligonucleotide
  Sense strand starting at position 6 of SEQ ID NO: 1244109
aucuuagucuuugagaacc

SEQ ID NO: 1465541 - RNA, 19 nt, Artificial Sequence
  Description of Artificial Sequence: Synthetic oligonucleotide
  Antisense strand to SEQ ID NO: 1465540
gguucucaaagacuaagau

SEQ ID NO: 1465542 - RNA, 19 nt, Artificial Sequence
  Description of Artificial Sequence: Synthetic oligonucleotide
  Sense strand starting at position 117 of SEQ ID NO: 1244109
ccaugcaguucuccacaua

SEQ ID NO: 1465543 - RNA, 19 nt, Artificial Sequence
  Description of Artificial Sequence: Synthetic oligonucleotide
  Antisense strand to SEQ ID NO: 1465542
uauguggagaacugcaugg

SEQ ID NO: 1465544 - RNA, 19 nt, Artificial Sequence
  Description of Artificial Sequence: Synthetic oligonucleotide
  Sense strand starting at position 120 of SEQ ID NO: 1244109
ugcaguucuccacauaaga

SEQ ID NO: 1465545 - RNA, 19 nt, Artificial Sequence
  Description of Artificial Sequence: Synthetic oligonucleotide
  Antisense strand to SEQ ID NO: 1465544
ucuuauguggagaacugca

SEQ ID NO: 1465546 - RNA, 19 nt, Artificial Sequence
  Description of Artificial Sequence: Synthetic oligonucleotide
  Sense strand starting at position 316 of SEQ ID NO: 1244109
cuggucgccuugucugaga

SEQ ID NO: 1465547 - RNA, 19 nt, Artificial Sequence
  Description of Artificial Sequence: Synthetic oligonucleotide
  Antisense strand to SEQ ID NO: 1465546
ucucagacaaggcgaccag

SEQ ID NO: 1465548 - RNA, 19 nt, Artificial Sequence
  Description of Artificial Sequence: Synthetic oligonucleotide
  Sense strand starting at position 318 of SEQ ID NO: 1244109
ggucgccuugucugagaga

SEQ ID NO: 1465549 - RNA, 19 nt, Artificial Sequence
  Description of Artificial Sequence: Synthetic oligonucleotide
  Antisense strand to SEQ ID NO: 1465548
ucucucagacaaggcgacc

SEQ ID NO: 1465550 - RNA, 19 nt, Artificial Sequence
  Description of Artificial Sequence: Synthetic oligonucleotide
  Sense strand starting at position 428 of SEQ ID NO: 1244109
uuuagacauuuggaccaaa

SEQ ID NO: 1465551 - RNA, 19 nt, Artificial Sequence
  Description of Artificial Sequence: Synthetic oligonucleotide
  Antisense strand to SEQ ID NO: 1465550
uuugguccaaaugucuaaa

SEQ ID NO: 1465552 - RNA, 19 nt, Artificial Sequence
  Description of Artificial Sequence: Synthetic oligonucleotide
  Sense strand starting at position 669 of SEQ ID NO: 1244109
gcugcuucucaacaaagaa

SEQ ID NO: 1465553 - RNA, 19 nt, Artificial Sequence
  Description of Artificial Sequence: Synthetic oligonucleotide
  Antisense strand to SEQ ID NO: 1465552
uucuuuguugagaagcagc

SEQ ID NO: 1465554 - RNA, 19 nt, Artificial Sequence
  Description of Artificial Sequence: Synthetic oligonucleotide
  Sense strand starting at position 805 of SEQ ID NO: 1244109
agccaagugcuuuggaaau

SEQ ID NO: 1465555 - RNA, 19 nt, Artificial Sequence
  Description of Artificial Sequence: Synthetic oligonucleotide
  Antisense strand to SEQ ID NO: 1465554
auuuccaaagcacuuggcu

SEQ ID NO: 1465556 - RNA, 19 nt, Artificial Sequence
  Description of Artificial Sequence: Synthetic oligonucleotide
  Sense strand starting at position 807 of SEQ ID NO: 1244109
ccaagugcuuuggaaauaa

SEQ ID NO: 1465557 - RNA, 19 nt, Artificial Sequence
  Description of Artificial Sequence: Synthetic oligonucleotide
  Antisense strand to SEQ ID NO: 1465556
uuauuuccaaagcacuugg

SEQ ID NO: 1465558 - RNA, 19 nt, Artificial Sequence
  Description of Artificial Sequence: Synthetic oligonucleotide
  Sense strand starting at position 936 of SEQ ID NO: 1244109
aucgccuuucccggauaca

SEQ ID NO: 1465559 - RNA, 19 nt, Artificial Sequence
  Description of Artificial Sequence: Synthetic oligonucleotide
  Antisense strand to SEQ ID NO: 1465558
uguauccgggaaaggcgau

SEQ ID NO: 1465560 - RNA, 19 nt, Artificial Sequence
  Description of Artificial Sequence: Synthetic oligonucleotide
  Sense strand starting at position 939 of SEQ ID NO: 1244109
gccuuucccggauacagaa

SEQ ID NO: 1465561 - RNA, 19 nt, Artificial Sequence
  Description of Artificial Sequence: Synthetic oligonucleotide
  Antisense strand to SEQ ID NO: 1465560
uucuguauccgggaaaggc

SEQ ID NO: 1465562 - RNA, 19 nt, Artificial Sequence
  Description of Artificial Sequence: Synthetic oligonucleotide
  Sense strand starting at position 980 of SEQ ID NO: 1244109
guccacuuucuauacugau

SEQ ID NO: 1465563 - RNA, 19 nt, Artificial Sequence
  Description of Artificial Sequence: Synthetic oligonucleotide
  Antisense strand to SEQ ID NO: 1465562
aucaguauagaaaguggac

SEQ ID NO: 1465564 - RNA, 19 nt, Artificial Sequence
  Description of Artificial Sequence: Synthetic oligonucleotide
  Sense strand starting at position 1002 of SEQ ID NO: 1244109
guaguuaaccucuggauuc

SEQ ID NO: 1465565 - RNA, 19 nt, Artificial Sequence
  Description of Artificial Sequence: Synthetic oligonucleotide
  Antisense strand to SEQ ID NO: 1465564
gaauccagagguuaacuac

SEQ ID NO: 1465566 - RNA, 19 nt, Artificial Sequence
  Description of Artificial Sequence: Synthetic oligonucleotide
  Sense strand starting at position 1038 of SEQ ID NO: 1244109
cuaccuguguggcugagau

SEQ ID NO: 1465567 - RNA, 19 nt, Artificial Sequence
  Description of Artificial Sequence: Synthetic oligonucleotide
  Antisense strand to SEQ ID NO: 1465566
aucucagccacacagguag

SEQ ID NO: 1465568 - RNA, 19 nt, Artificial Sequence
  Description of Artificial Sequence: Synthetic oligonucleotide
  Sense strand starting at position 1050 of SEQ ID NO: 1244109
cugagauacucagucugcu

SEQ ID NO: 1465569 - RNA, 19 nt, Artificial Sequence
  Description of Artificial Sequence: Synthetic oligonucleotide
  Antisense strand to SEQ ID NO: 1465568
agcagacugaguaucucag

SEQ ID NO: 1465570 - RNA, 19 nt, Artificial Sequence
  Description of Artificial Sequence: Synthetic oligonucleotide
  Sense strand starting at position 1084 of SEQ ID NO: 1244109
caaggaaggugucucacuu

SEQ ID NO: 1465571 - RNA, 19 nt, Artificial Sequence
  Description of Artificial Sequence: Synthetic oligonucleotide
  Antisense strand to SEQ ID NO: 1465570
aagugagacaccuuccuug

SEQ ID NO: 1465572 - RNA, 19 nt, Artificial Sequence
  Description of Artificial Sequence: Synthetic oligonucleotide
  Sense strand starting at position 1088 of SEQ ID NO: 1244109
gaaggugucucacuugaag

SEQ ID NO: 1465573 - RNA, 19 nt, Artificial Sequence
  Description of Artificial Sequence: Synthetic oligonucleotide
  Antisense strand to SEQ ID NO: 1465572
cuucaagugagacaccuuc

SEQ ID NO: 1465574 - RNA, 19 nt, Artificial Sequence
  Description of Artificial Sequence: Synthetic oligonucleotide
  Sense strand starting at position 1090 of SEQ ID NO: 1244109
aggugucucacuugaaguc

SEQ ID NO: 1465575 - RNA, 19 nt, Artificial Sequence
  Description of Artificial Sequence: Synthetic oligonucleotide
  Antisense strand to SEQ ID NO: 1465574
gacuucaagugagacaccu

SEQ ID NO: 1465576 - RNA, 19 nt, Artificial Sequence
  Description of Artificial Sequence: Synthetic oligonucleotide
  Sense strand starting at position 1211 of SEQ ID NO: 1244109
gcacgugcacaucaacauu

SEQ ID NO: 1465577 - RNA, 19 nt, Artificial Sequence
  Description of Artificial Sequence: Synthetic oligonucleotide
  Antisense strand to SEQ ID NO: 1465576
aauguugaugugcacgugc

SEQ ID NO: 1465578 - RNA, 19 nt, Artificial Sequence
  Description of Artificial Sequence: Synthetic oligonucleotide
  Sense strand starting at position 1247 of SEQ ID NO: 1244109
gcgucaauuccaggaggcu

SEQ ID NO: 1465579 - RNA, 19 nt, Artificial Sequence
  Description of Artificial Sequence: Synthetic oligonucleotide
  Antisense strand to SEQ ID NO: 1465578
agccuccuggaauugacgc

SEQ ID NO: 1465580 - RNA, 19 nt, Artificial Sequence
  Description of Artificial Sequence: Synthetic oligonucleotide
  Sense strand starting at position 1464 of SEQ ID NO: 1244109
cuaacauccgacugaguca

SEQ ID NO: 1465581 - RNA, 19 nt, Artificial Sequence
  Description of Artificial Sequence: Synthetic oligonucleotide
  Antisense strand to SEQ ID NO: 1465580
ugacucagucggauguuag

SEQ ID NO: 1465582 - RNA, 19 nt, Artificial Sequence
  Description of Artificial Sequence: Synthetic oligonucleotide
  Sense strand starting at position 1521 of SEQ ID NO: 1244109
gggugcucgucggucaaga

SEQ ID NO: 1465583 - RNA, 19 nt, Artificial Sequence
  Description of Artificial Sequence: Synthetic oligonucleotide
  Antisense strand to SEQ ID NO: 1465582
ucuugaccgacgagcaccc

SEQ ID NO: 1465584 - RNA, 19 nt, Artificial Sequence
  Description of Artificial Sequence: Synthetic oligonucleotide
  Sense strand starting at position 1819 of SEQ ID NO: 1244109
ggacgcguuaccuaggaga

SEQ ID NO: 1465585 - RNA, 19 nt, Artificial Sequence
  Description of Artificial Sequence: Synthetic oligonucleotide
  Antisense strand to SEQ ID NO: 1465584
ucuccuagguaacgcgucc

SEQ ID NO: 1465586 - RNA, 19 nt, Artificial Sequence
  Description of Artificial Sequence: Synthetic oligonucleotide
  Sense strand starting at position 2077 of SEQ ID NO: 1244109
caaugagaaguccgaaggu

SEQ ID NO: 1465587 - RNA, 19 nt, Artificial Sequence
  Description of Artificial Sequence: Synthetic oligonucleotide
  Antisense strand to SEQ ID NO: 1465586
accuucggacuucucauug

SEQ ID NO: 1465588 - RNA, 19 nt, Artificial Sequence
  Description of Artificial Sequence: Synthetic oligonucleotide
  Sense strand starting at position 2492 of SEQ ID NO: 1244109
gggucaggucgugacuuaa

SEQ ID NO: 1465589 - RNA, 19 nt, Artificial Sequence
  Description of Artificial Sequence: Synthetic oligonucleotide
  Antisense strand to SEQ ID NO: 1465588
uuaagucacgaccugaccc

SEQ ID NO: 1465590 - RNA, 19 nt, Artificial Sequence
  Description of Artificial Sequence: Synthetic oligonucleotide
  Sense strand starting at position 2536 of SEQ ID NO: 1244109
gcccgagcugaggauaauu

SEQ ID NO: 1465591 - RNA, 19 nt, Artificial Sequence
  Description of Artificial Sequence: Synthetic oligonucleotide
  Antisense strand to SEQ ID NO: 1465590
aauuauccucagcucgggc

SEQ ID NO: 1465592 - RNA, 19 nt, Artificial Sequence
  Description of Artificial Sequence: Synthetic oligonucleotide
  Sense strand starting at position 2547 of SEQ ID NO: 1244109
ggauaauuggcgcgggaug

SEQ ID NO: 1465593 - RNA, 19 nt, Artificial Sequence
  Description of Artificial Sequence: Synthetic oligonucleotide
  Antisense strand to SEQ ID NO: 1465592
caucccgcgccaauuaucc

SEQ ID NO: 1465594 - RNA, 19 nt, Artificial Sequence
  Description of Artificial Sequence: Synthetic oligonucleotide
  Sense strand starting at position 2548 of SEQ ID NO: 1244109
gauaauuggcgcgggauga

SEQ ID NO: 1465595 - RNA, 19 nt, Artificial Sequence
  Description of Artificial Sequence: Synthetic oligonucleotide
  Antisense strand to SEQ ID NO: 1465594
ucaucccgcgccaauuauc

SEQ ID NO: 1465596 - RNA, 19 nt, Artificial Sequence
  Description of Artificial Sequence: Synthetic oligonucleotide
  Sense strand starting at position 2962 of SEQ ID NO: 1244109
ucuacauuucugugacguc

SEQ ID NO: 1465597 - RNA, 19 nt, Artificial Sequence
  Description of Artificial Sequence: Synthetic oligonucleotide
  Antisense strand to SEQ ID NO: 1465596
gacgucacagaaauguaga

SEQ ID NO: 1465598 - RNA, 19 nt, Artificial Sequence
  Description of Artificial Sequence: Synthetic oligonucleotide
  Sense strand starting at position 3015 of SEQ ID NO: 1244109
uggguuauuuagugacuau

SEQ ID NO: 1465599 - RNA, 19 nt, Artificial Sequence
  Description of Artificial Sequence: Synthetic oligonucleotide
  Antisense strand to SEQ ID NO: 1465598
auagucacuaaauaaccca

SEQ ID NO: 1465600 - RNA, 19 nt, Artificial Sequence
  Description of Artificial Sequence: Synthetic oligonucleotide
  Sense strand starting at position 3043 of SEQ ID NO: 1244109
ggaaauaggucuuagcuag

SEQ ID NO: 1465601 - RNA, 19 nt, Artificial Sequence
  Description of Artificial Sequence: Synthetic oligonucleotide
  Antisense strand to SEQ ID NO: 1465600
cuagcuaagaccuauuucc

SEQ ID NO: 1465602 - RNA, 19 nt, Artificial Sequence
  Description of Artificial Sequence: Synthetic oligonucleotide
  Sense strand starting at position 3047 of SEQ ID NO: 1244109
auaggucuuagcuaguguu

SEQ ID NO: 1465603 - RNA, 19 nt, Artificial Sequence
  Description of Artificial Sequence: Synthetic oligonucleotide
  Antisense strand to SEQ ID NO: 1465602
aacacuagcuaagaccuau

SEQ ID NO: 1465604 - RNA, 19 nt, Artificial Sequence
  Description of Artificial Sequence: Synthetic oligonucleotide
  Sense strand starting at position 3207 of SEQ ID NO: 1244109
uguguuuauguuggacuua

SEQ ID NO: 1465605 - RNA, 19 nt, Artificial Sequence
  Description of Artificial Sequence: Synthetic oligonucleotide
  Antisense strand to SEQ ID NO: 1465604
uaaguccaacauaaacaca

SEQ ID NO: 1465606 - RNA, 19 nt, Artificial Sequence
  Description of Artificial Sequence: Synthetic oligonucleotide
  Sense strand starting at position 3212 of SEQ ID NO: 1244109
uuauguuggacuuauacgu

SEQ ID NO: 1465607 - RNA, 19 nt, Artificial Sequence
  Description of Artificial Sequence: Synthetic oligonucleotide
  Antisense strand to SEQ ID NO: 1465606
acguauaaguccaacauaa

SEQ ID NO: 1465608 - RNA, 19 nt, Artificial Sequence
  Description of Artificial Sequence: Synthetic oligonucleotide
  Sense strand starting at position 3268 of SEQ ID NO: 1244109
cggauaccaguauggagaa

SEQ ID NO: 1465609 - RNA, 19 nt, Artificial Sequence
  Description of Artificial Sequence: Synthetic oligonucleotide
  Antisense strand to SEQ ID NO: 1465608
uucuccauacugguauccg

SEQ ID NO: 1465610 - RNA, 19 nt, Artificial Sequence
  Description of Artificial Sequence: Synthetic oligonucleotide
  Sense strand starting at position 3352 of SEQ ID NO: 1244109
gcuucugcuuguucccaaa

SEQ ID NO: 1465611 - RNA, 19 nt, Artificial Sequence
  Description of Artificial Sequence: Synthetic oligonucleotide
  Antisense strand to SEQ ID NO: 1465610
uuugggaacaagcagaagc

SEQ ID NO: 1465612 - RNA, 19 nt, Artificial Sequence
  Description of Artificial Sequence: Synthetic oligonucleotide
  Sense strand starting at position 3842 of SEQ ID NO: 1244109
gucuccuuucugcagaaca

SEQ ID NO: 1465613 - RNA, 19 nt, Artificial Sequence
  Description of Artificial Sequence: Synthetic oligonucleotide
  Antisense strand to SEQ ID NO: 1465612
uguucugcagaaaggagac

SEQ ID NO: 1465614 - RNA, 19 nt, Artificial Sequence
  Description of Artificial Sequence: Synthetic oligonucleotide
  Sense strand starting at position 3950 of SEQ ID NO: 1244109
ggguuacagccggaagcau

SEQ ID NO: 1465615 - RNA, 19 nt, Artificial Sequence
  Description of Artificial Sequence: Synthetic oligonucleotide
  Antisense strand to SEQ ID NO: 1465614
augcuuccggcuguaaccc

SEQ ID NO: 1465616 - RNA, 19 nt, Artificial Sequence
  Description of Artificial Sequence: Synthetic oligonucleotide
  Sense strand starting at position 1996 of SEQ ID NO: 1244110
agucauucagggcggagaa

SEQ ID NO: 1465617 - RNA, 19 nt, Artificial Sequence
  Description of Artificial Sequence: Synthetic oligonucleotide
  Antisense strand to SEQ ID NO: 1465616
uucuccgcccugaaugacu

SEQ ID NO: 1465618 - RNA, 19 nt, Artificial Sequence
  Description of Artificial Sequence: Synthetic oligonucleotide
  Sense strand starting at position 2006 of SEQ ID NO: 1244110
ggcggagaacuuuacccaa

SEQ ID NO: 1465619 - RNA, 19 nt, Artificial Sequence
  Description of Artificial Sequence: Synthetic oligonucleotide
  Antisense strand to SEQ ID NO: 1465618
uuggguaaaguucuccgcc

SEQ ID NO: 1465620 - RNA, 19 nt, Artificial Sequence
  Description of Artificial Sequence: Synthetic oligonucleotide
  Sense strand starting at position 2008 of SEQ ID NO: 1244110
cggagaacuuuacccaagu

SEQ ID NO: 1465621 - RNA, 19 nt, Artificial Sequence
  Description of Artificial Sequence: Synthetic oligonucleotide
  Antisense strand to SEQ ID NO: 1465620
acuuggguaaaguucuccg

SEQ ID NO: 1465622 - RNA, 19 nt, Artificial Sequence
  Description of Artificial Sequence: Synthetic oligonucleotide
  Sense strand starting at position 2009 of SEQ ID NO: 1244110
ggagaacuuuacccaagua

SEQ ID NO: 1465623 - RNA, 19 nt, Artificial Sequence
  Description of Artificial Sequence: Synthetic oligonucleotide
  Antisense strand to SEQ ID NO: 1465622
uacuuggguaaaguucucc

SEQ ID NO: 1465624 - RNA, 19 nt, Artificial Sequence
  Description of Artificial Sequence: Synthetic oligonucleotide
  Sense strand starting at position 3468 of SEQ ID NO: 1244110
agcugagcgcucccaugua

SEQ ID NO: 1465625 - RNA, 19 nt, Artificial Sequence
  Description of Artificial Sequence: Synthetic oligonucleotide
  Antisense strand to SEQ ID NO: 1465624
uacaugggagcgcucagcu

SEQ ID NO: 1465626 - RNA, 19 nt, Artificial Sequence
  Description of Artificial Sequence: Synthetic oligonucleotide
  Sense strand starting at position 3558 of SEQ ID NO: 1244110
gagguuauccugcgcagga

SEQ ID NO: 1465627 - RNA, 19 nt, Artificial Sequence
  Description of Artificial Sequence: Synthetic oligonucleotide
  Antisense strand to SEQ ID NO: 1465626
uccugcgcaggauaaccuc

SEQ ID NO: 1465628 - RNA, 19 nt, Artificial Sequence
  Description of Artificial Sequence: Synthetic oligonucleotide
  Sense strand starting at position 3560 of SEQ ID NO: 1244110
gguuauccugcgcaggagu

SEQ ID NO: 1465629 - RNA, 19 nt, Artificial Sequence
  Description of Artificial Sequence: Synthetic oligonucleotide
  Antisense strand to SEQ ID NO: 1465628
acuccugcgcaggauaacc

SEQ ID NO: 1465630 - RNA, 19 nt, Artificial Sequence
  Description of Artificial Sequence: Synthetic oligonucleotide
  Sense strand starting at position 3677 of SEQ ID NO: 1244110
ucggugugcgcggcauaaa

SEQ ID NO: 1465631 - RNA, 19 nt, Artificial Sequence
  Description of Artificial Sequence: Synthetic oligonucleotide
  Antisense strand to SEQ ID NO: 1465630
uuuaugccgcgcacaccga

SEQ ID NO: 1465632 - RNA, 19 nt, Artificial Sequence
  Description of Artificial Sequence: Synthetic oligonucleotide
  Sense strand starting at position 3737 of SEQ ID NO: 1244110
gcgcucauguuuccagaag

SEQ ID NO: 1465633 - RNA, 19 nt, Artificial Sequence
  Description of Artificial Sequence: Synthetic oligonucleotide
  Antisense strand to SEQ ID NO: 1465632
cuucuggaaacaugagcgc

SEQ ID NO: 1465634 - RNA, 19 nt, Artificial Sequence
  Description of Artificial Sequence: Synthetic oligonucleotide
  Sense strand starting at position 3776 of SEQ ID NO: 1244110
gcccuagcgcucugggaua

SEQ ID NO: 1465635 - RNA, 19 nt, Artificial Sequence
  Description of Artificial Sequence: Synthetic oligonucleotide
  Antisense strand to SEQ ID NO: 1465634
uaucccagagcgcuagggc

SEQ ID NO: 1465636 - RNA, 19 nt, Artificial Sequence
  Description of Artificial Sequence: Synthetic oligonucleotide
  Sense strand starting at position 785 of SEQ ID NO: 1244111
agucauucagggcggagaa

SEQ ID NO: 1465637 - RNA, 19 nt, Artificial Sequence
  Description of Artificial Sequence: Synthetic oligonucleotide
  Antisense strand to SEQ ID NO: 1465636
uucuccgcccugaaugacu

SEQ ID NO: 1465638 - RNA, 19 nt, Artificial Sequence
  Description of Artificial Sequence: Synthetic oligonucleotide
  Sense strand starting at position 795 of SEQ ID NO: 1244111
ggcggagaacuuuacccaa

SEQ ID NO: 1465639 - RNA, 19 nt, Artificial Sequence
  Description of Artificial Sequence: Synthetic oligonucleotide
  Antisense strand to SEQ ID NO: 1465638
uuggguaaaguucuccgcc

SEQ ID NO: 1465640 - RNA, 19 nt, Artificial Sequence
  Description of Artificial Sequence: Synthetic oligonucleotide
  Sense strand starting at position 797 of SEQ ID NO: 1244111
cggagaacuuuacccaagu

SEQ ID NO: 1465641 - RNA, 19 nt, Artificial Sequence
  Description of Artificial Sequence: Synthetic oligonucleotide
  Antisense strand to SEQ ID NO: 1465640
acuuggguaaaguucuccg

SEQ ID NO: 1465642 - RNA, 19 nt, Artificial Sequence
  Description of Artificial Sequence: Synthetic oligonucleotide
  Sense strand starting at position 798 of SEQ ID NO: 1244111
ggagaacuuuacccaagua

SEQ ID NO: 1465643 - RNA, 19 nt, Artificial Sequence
  Description of Artificial Sequence: Synthetic oligonucleotide
  Antisense strand to SEQ ID NO: 1465642
uacuuggguaaaguucucc

SEQ ID NO: 1465644 - RNA, 19 nt, Artificial Sequence
  Description of Artificial Sequence: Synthetic oligonucleotide
  Sense strand starting at position 2257 of SEQ ID NO: 1244111
agcugagcgcucccaugua

SEQ ID NO: 1465645 - RNA, 19 nt, Artificial Sequence
  Description of Artificial Sequence: Synthetic oligonucleotide
  Antisense strand to SEQ ID NO: 1465644
uacaugggagcgcucagcu

SEQ ID NO: 1465646 - RNA, 19 nt, Artificial Sequence
  Description of Artificial Sequence: Synthetic oligonucleotide
  Sense strand starting at position 2347 of SEQ ID NO: 1244111
gagguuauccugcgcagga

SEQ ID NO: 1465647 - RNA, 19 nt, Artificial Sequence
  Description of Artificial Sequence: Synthetic oligonucleotide
  Antisense strand to SEQ ID NO: 1465646
uccugcgcaggauaaccuc

SEQ ID NO: 1465648 - RNA, 19 nt, Artificial Sequence
  Description of Artificial Sequence: Synthetic oligonucleotide
  Sense strand starting at position 2349 of SEQ ID NO: 1244111
gguuauccugcgcaggagu

SEQ ID NO: 1465649 - RNA, 19 nt, Artificial Sequence
  Description of Artificial Sequence: Synthetic oligonucleotide
  Antisense strand to SEQ ID NO: 1465648
acuccugcgcaggauaacc

SEQ ID NO: 1465650 - RNA, 19 nt, Artificial Sequence
  Description of Artificial Sequence: Synthetic oligonucleotide
  Sense strand starting at position 2466 of SEQ ID NO: 1244111
ucggugugcgcggcauaaa

SEQ ID NO: 1465651 - RNA, 19 nt, Artificial Sequence
  Description of Artificial Sequence: Synthetic oligonucleotide
  Antisense strand to SEQ ID NO: 1465650
uuuaugccgcgcacaccga

SEQ ID NO: 1465652 - RNA, 19 nt, Artificial Sequence
  Description of Artificial Sequence: Synthetic oligonucleotide
  Sense strand starting at position 2526 of SEQ ID NO: 1244111
gcgcucauguuuccagaag

SEQ ID NO: 1465653 - RNA, 19 nt, Artificial Sequence
  Description of Artificial Sequence: Synthetic oligonucleotide
  Antisense strand to SEQ ID NO: 1465652
cuucuggaaacaugagcgc

SEQ ID NO: 1465654 - RNA, 19 nt, Artificial Sequence
  Description of Artificial Sequence: Synthetic oligonucleotide
  Sense strand starting at position 2565 of SEQ ID NO: 1244111
gcccuagcgcucugggaua

SEQ ID NO: 1465655 - RNA, 19 nt, Artificial Sequence
  Description of Artificial Sequence: Synthetic oligonucleotide
  Antisense strand to SEQ ID NO: 1465654
uaucccagagcgcuagggc

SEQ ID NO: 1465656 - RNA, 19 nt, Artificial Sequence
  Description of Artificial Sequence: Synthetic oligonucleotide
  Sense strand starting at position 2776 of SEQ ID NO: 1244111
ugaagaaucccgcguggac

SEQ ID NO: 1465657 - RNA, 19 nt, Artificial Sequence
  Description of Artificial Sequence: Synthetic oligonucleotide
  Antisense strand to SEQ ID NO: 1465656
guccacgcgggauucuuca

SEQ ID NO: 1465658 - RNA, 19 nt, Artificial Sequence
  Description of Artificial Sequence: Synthetic oligonucleotide
  Sense strand starting at position 2778 of SEQ ID NO: 1244111
aagaaucccgcguggacuu

SEQ ID NO: 1465659 - RNA, 19 nt, Artificial Sequence
  Description of Artificial Sequence: Synthetic oligonucleotide
  Antisense strand to SEQ ID NO: 1465658
aaguccacgcgggauucuu

SEQ ID NO: 1465660 - RNA, 19 nt, Artificial Sequence
  Description of Artificial Sequence: Synthetic oligonucleotide
  Sense strand starting at position 2870 of SEQ ID NO: 1244111
acgugaaggucagguuugu

SEQ ID NO: 1465661 - RNA, 19 nt, Artificial Sequence
  Description of Artificial Sequence: Synthetic oligonucleotide
  Antisense strand to SEQ ID NO: 1465660
acaaaccugaccuucacgu

SEQ ID NO: 1465662 - RNA, 19 nt, Artificial Sequence
  Description of Artificial Sequence: Synthetic oligonucleotide
  Sense strand starting at position 2878 of SEQ ID NO: 1244111
gucagguuuguguggguga

SEQ ID NO: 1465663 - RNA, 19 nt, Artificial Sequence
  Description of Artificial Sequence: Synthetic oligonucleotide
  Antisense strand to SEQ ID NO: 1465662
ucacccacacaaaccugac

SEQ ID NO: 1465664 - RNA, 19 nt, Artificial Sequence
  Description of Artificial Sequence: Synthetic oligonucleotide
  Sense strand starting at position 2894 of SEQ ID NO: 1244111
ugacgucucuucugggaga

SEQ ID NO: 1465665 - RNA, 19 nt, Artificial Sequence
  Description of Artificial Sequence: Synthetic oligonucleotide
  Antisense strand to SEQ ID NO: 1465664
ucucccagaagagacguca

SEQ ID NO: 1465666 - RNA, 19 nt, Artificial Sequence
  Description of Artificial Sequence: Synthetic oligonucleotide
  Sense strand starting at position 2895 of SEQ ID NO: 1244111
gacgucucuucugggagaa

SEQ ID NO: 1465667 - RNA, 19 nt, Artificial Sequence
  Description of Artificial Sequence: Synthetic oligonucleotide
  Antisense strand to SEQ ID NO: 1465666
uucucccagaagagacguc

SEQ ID NO: 1465668 - RNA, 19 nt, Artificial Sequence
  Description of Artificial Sequence: Synthetic oligonucleotide
  Sense strand starting at position 2896 of SEQ ID NO: 1244111
acgucucuucugggagaaa

SEQ ID NO: 1465669 - RNA, 19 nt, Artificial Sequence
  Description of Artificial Sequence: Synthetic oligonucleotide
  Antisense strand to SEQ ID NO: 1465668
uuucucccagaagagacgu

SEQ ID NO: 1465670 - RNA, 19 nt, Artificial Sequence
  Description of Artificial Sequence: Synthetic oligonucleotide
  Sense strand starting at position 2897 of SEQ ID NO: 1244111
cgucucuucugggagaaag

SEQ ID NO: 1465671 - RNA, 19 nt, Artificial Sequence
  Description of Artificial Sequence: Synthetic oligonucleotide
  Antisense strand to SEQ ID NO: 1465670
cuuucucccagaagagacg

SEQ ID NO: 1465672 - RNA, 19 nt, Artificial Sequence
  Description of Artificial Sequence: Synthetic oligonucleotide
  Sense strand starting at position 2944 of SEQ ID NO: 1244111
gcaguacuacuccggaagu

SEQ ID NO: 1465673 - RNA, 19 nt, Artificial Sequence
  Description of Artificial Sequence: Synthetic oligonucleotide
  Antisense strand to SEQ ID NO: 1465672
acuuccggaguaguacugc

SEQ ID NO: 1465674 - RNA, 19 nt, Artificial Sequence
  Description of Artificial Sequence: Synthetic oligonucleotide
  Sense strand starting at position 3413 of SEQ ID NO: 1244111
gaggcuucgguccaaacga

SEQ ID NO: 1465675 - RNA, 19 nt, Artificial Sequence
  Description of Artificial Sequence: Synthetic oligonucleotide
  Antisense strand to SEQ ID NO: 1465674
ucguuuggaccgaagccuc

SEQ ID NO: 1465676 - RNA, 19 nt, Artificial Sequence
  Description of Artificial Sequence: Synthetic oligonucleotide
  Sense strand starting at position 3633 of SEQ ID NO: 1244111
guggaaguuacggaguguu

SEQ ID NO: 1465677 - RNA, 19 nt, Artificial Sequence
  Description of Artificial Sequence: Synthetic oligonucleotide
  Antisense strand to SEQ ID NO: 1465676
aacacuccguaacuuccac

SEQ ID NO: 1465678 - RNA, 19 nt, Artificial Sequence
  Description of Artificial Sequence: Synthetic oligonucleotide
  Sense strand starting at position 3661 of SEQ ID NO: 1244111
uggagaggcuccucauaag

SEQ ID NO: 1465679 - RNA, 19 nt, Artificial Sequence
  Description of Artificial Sequence: Synthetic oligonucleotide
  Antisense strand to SEQ ID NO: 1465678
cuuaugaggagccucucca

SEQ ID NO: 1465680 - RNA, 19 nt, Artificial Sequence
  Description of Artificial Sequence: Synthetic oligonucleotide
  Sense strand starting at position 3671 of SEQ ID NO: 1244111
ccucauaagugcuccuaga

SEQ ID NO: 1465681 - RNA, 19 nt, Artificial Sequence
  Description of Artificial Sequence: Synthetic oligonucleotide
  Antisense strand to SEQ ID NO: 1465680
ucuaggagcacuuaugagg

SEQ ID NO: 1465682 - RNA, 19 nt, Artificial Sequence
  Description of Artificial Sequence: Synthetic oligonucleotide
  Sense strand starting at position 3691 of SEQ ID NO: 1244111
cugggcuuugacggaugaa

SEQ ID NO: 1465683 - RNA, 19 nt, Artificial Sequence
  Description of Artificial Sequence: Synthetic oligonucleotide
  Antisense strand to SEQ ID NO: 1465682
uucauccgucaaagcccag

SEQ ID NO: 1465684 - RNA, 19 nt, Artificial Sequence
  Description of Artificial Sequence: Synthetic oligonucleotide
  Sense strand starting at position 3692 of SEQ ID NO: 1244111
ugggcuuugacggaugaau

SEQ ID NO: 1465685 - RNA, 19 nt, Artificial Sequence
  Description of Artificial Sequence: Synthetic oligonucleotide
  Antisense strand to SEQ ID NO: 1465684
auucauccgucaaagccca

SEQ ID NO: 1465686 - RNA, 19 nt, Artificial Sequence
  Description of Artificial Sequence: Synthetic oligonucleotide
  Sense strand starting at position 3732 of SEQ ID NO: 1244111
gaaggcauuugugaauaac

SEQ ID NO: 1465687 - RNA, 19 nt, Artificial Sequence
  Description of Artificial Sequence: Synthetic oligonucleotide
  Antisense strand to SEQ ID NO: 1465686
guuauucacaaaugccuuc

SEQ ID NO: 1465688 - RNA, 19 nt, Artificial Sequence
  Description of Artificial Sequence: Synthetic oligonucleotide
  Sense strand starting at position 3787 of SEQ ID NO: 1244111
ggagcucuaguaggccaaa

SEQ ID NO: 1465689 - RNA, 19 nt, Artificial Sequence
  Description of Artificial Sequence: Synthetic oligonucleotide
  Antisense strand to SEQ ID NO: 1465688
uuuggccuacuagagcucc

SEQ ID NO: 1465690 - RNA, 19 nt, Artificial Sequence
  Description of Artificial Sequence: Synthetic oligonucleotide
  Sense strand starting at position 3788 of SEQ ID NO: 1244111
gagcucuaguaggccaaau

SEQ ID NO: 1465691 - RNA, 19 nt, Artificial Sequence
  Description of Artificial Sequence: Synthetic oligonucleotide
  Antisense strand to SEQ ID NO: 1465690
auuuggccuacuagagcuc

SEQ ID NO: 1465692 - RNA, 19 nt, Artificial Sequence
  Description of Artificial Sequence: Synthetic oligonucleotide
  Sense strand starting at position 3925 of SEQ ID NO: 1244111
gagucugugcauugcuaac

SEQ ID NO: 1465693 - RNA, 19 nt, Artificial Sequence
  Description of Artificial Sequence: Synthetic oligonucleotide
  Antisense strand to SEQ ID NO: 1465692
guuagcaaugcacagacuc

SEQ ID NO: 1465694 - RNA, 19 nt, Artificial Sequence
  Description of Artificial Sequence: Synthetic oligonucleotide
  Sense strand starting at position 123 of SEQ ID NO: 1244112
cagugcucuccagaaggcu

SEQ ID NO: 1465695 - RNA, 19 nt, Artificial Sequence
  Description of Artificial Sequence: Synthetic oligonucleotide
  Antisense strand to SEQ ID NO: 1465694
agccuucuggagagcacug

SEQ ID NO: 1465696 - RNA, 19 nt, Artificial Sequence
  Description of Artificial Sequence: Synthetic oligonucleotide
  Sense strand starting at position 132 of SEQ ID NO: 1244112
ccagaaggcuggucugauc

SEQ ID NO: 1465697 - RNA, 19 nt, Artificial Sequence
  Description of Artificial Sequence: Synthetic oligonucleotide
  Antisense strand to SEQ ID NO: 1465696
gaucagaccagccuucugg

SEQ ID NO: 1465698 - RNA, 19 nt, Artificial Sequence
  Description of Artificial Sequence: Synthetic oligonucleotide
  Sense strand starting at position 141 of SEQ ID NO: 1244112
uggucugaucuccagccua

SEQ ID NO: 1465699 - RNA, 19 nt, Artificial Sequence
  Description of Artificial Sequence: Synthetic oligonucleotide
  Antisense strand to SEQ ID NO: 1465698
uaggcuggagaucagacca

SEQ ID NO: 1465700 - RNA, 19 nt, Artificial Sequence
  Description of Artificial Sequence: Synthetic oligonucleotide
  Sense strand starting at position 176 of SEQ ID NO: 1244112
agccuacucagcugggaaa

SEQ ID NO: 1465701 - RNA, 19 nt, Artificial Sequence
  Description of Artificial Sequence: Synthetic oligonucleotide
  Antisense strand to SEQ ID NO: 1465700
uuucccagcugaguaggcu

SEQ ID NO: 1465702 - RNA, 19 nt, Artificial Sequence
  Description of Artificial Sequence: Synthetic oligonucleotide
  Sense strand starting at position 208 of SEQ ID NO: 1244112
ucucaaguggcccaucaua

SEQ ID NO: 1465703 - RNA, 19 nt, Artificial Sequence
  Description of Artificial Sequence: Synthetic oligonucleotide
  Antisense strand to SEQ ID NO: 1465702
uaugaugggccacuugaga

SEQ ID NO: 1465704 - RNA, 19 nt, Artificial Sequence
  Description of Artificial Sequence: Synthetic oligonucleotide
  Sense strand starting at position 228 of SEQ ID NO: 1244112
ggcuguagccagggaaaga

SEQ ID NO: 1465705 - RNA, 19 nt, Artificial Sequence
  Description of Artificial Sequence: Synthetic oligonucleotide
  Antisense strand to SEQ ID NO: 1465704
ucuuucccuggcuacagcc

SEQ ID NO: 1465706 - RNA, 19 nt, Artificial Sequence
  Description of Artificial Sequence: Synthetic oligonucleotide
  Sense strand starting at position 372 of SEQ ID NO: 1244112
agugcaauccuccaacaag

SEQ ID NO: 1465707 - RNA, 19 nt, Artificial Sequence
  Description of Artificial Sequence: Synthetic oligonucleotide
  Antisense strand to SEQ ID NO: 1465706
cuuguuggaggauugcacu

SEQ ID NO: 1465708 - RNA, 19 nt, Artificial Sequence
  Description of Artificial Sequence: Synthetic oligonucleotide
  Sense strand starting at position 580 of SEQ ID NO: 1244112
gcggucugguuucuaucaa

SEQ ID NO: 1465709 - RNA, 19 nt, Artificial Sequence
  Description of Artificial Sequence: Synthetic oligonucleotide
  Antisense strand to SEQ ID NO: 1465708
uugauagaaaccagaccgc

SEQ ID NO: 1465710 - RNA, 19 nt, Artificial Sequence
  Description of Artificial Sequence: Synthetic oligonucleotide
  Sense strand starting at position 587 of SEQ ID NO: 1244112
gguuucuaucaagagccuu

SEQ ID NO: 1465711 - RNA, 19 nt, Artificial Sequence
  Description of Artificial Sequence: Synthetic oligonucleotide
  Antisense strand to SEQ ID NO: 1465710
aaggcucuugauagaaacc

SEQ ID NO: 1465712 - RNA, 19 nt, Artificial Sequence
  Description of Artificial Sequence: Synthetic oligonucleotide
  Sense strand starting at position 995 of SEQ ID NO: 1244112
acaggagaguuaugagcau

SEQ ID NO: 1465713 - RNA, 19 nt, Artificial Sequence
  Description of Artificial Sequence: Synthetic oligonucleotide
  Antisense strand to SEQ ID NO: 1465712
augcucauaacucuccugu

SEQ ID NO: 1465714 - RNA, 19 nt, Artificial Sequence
  Description of Artificial Sequence: Synthetic oligonucleotide
  Sense strand starting at position 1001 of SEQ ID NO: 1244112
gaguuaugagcauggacua

SEQ ID NO: 1465715 - RNA, 19 nt, Artificial Sequence
  Description of Artificial Sequence: Synthetic oligonucleotide
  Antisense strand to SEQ ID NO: 1465714
uaguccaugcucauaacuc

SEQ ID NO: 1465716 - RNA, 19 nt, Artificial Sequence
  Description of Artificial Sequence: Synthetic oligonucleotide
  Sense strand starting at position 1228 of SEQ ID NO: 1244112
cuuugcguguucccaggaa

SEQ ID NO: 1465717 - RNA, 19 nt, Artificial Sequence
  Description of Artificial Sequence: Synthetic oligonucleotide
  Antisense strand to SEQ ID NO: 1465716
uuccugggaacacgcaaag

SEQ ID NO: 1465718 - RNA, 19 nt, Artificial Sequence
  Description of Artificial Sequence: Synthetic oligonucleotide
  Sense strand starting at position 1346 of SEQ ID NO: 1244112
cuuuguuugcauugaguca

SEQ ID NO: 1465719 - RNA, 19 nt, Artificial Sequence
  Description of Artificial Sequence: Synthetic oligonucleotide
  Antisense strand to SEQ ID NO: 1465718
ugacucaaugcaaacaaag

SEQ ID NO: 1465720 - RNA, 19 nt, Artificial Sequence
  Description of Artificial Sequence: Synthetic oligonucleotide
  Sense strand starting at position 2507 of SEQ ID NO: 1244112
ccaccagauucccagagaa

SEQ ID NO: 1465721 - RNA, 19 nt, Artificial Sequence
  Description of Artificial Sequence: Synthetic oligonucleotide
  Antisense strand to SEQ ID NO: 1465720
uucucugggaaucuggugg

SEQ ID NO: 1465722 - RNA, 19 nt, Artificial Sequence
  Description of Artificial Sequence: Synthetic oligonucleotide
  Sense strand starting at position 2520 of SEQ ID NO: 1244112
agagaauccuuugagauuc

SEQ ID NO: 1465723 - RNA, 19 nt, Artificial Sequence
  Description of Artificial Sequence: Synthetic oligonucleotide
  Antisense strand to SEQ ID NO: 1465722
gaaucucaaaggauucucu

SEQ ID NO: 1465724 - RNA, 19 nt, Artificial Sequence
  Description of Artificial Sequence: Synthetic oligonucleotide
  Sense strand starting at position 2556 of SEQ ID NO: 1244112
ugcugagggucugguauuu

SEQ ID NO: 1465725 - RNA, 19 nt, Artificial Sequence
  Description of Artificial Sequence: Synthetic oligonucleotide
  Antisense strand to SEQ ID NO: 1465724
aaauaccagacccucagca

SEQ ID NO: 1465726 - RNA, 19 nt, Artificial Sequence
  Description of Artificial Sequence: Synthetic oligonucleotide
  Sense strand starting at position 2680 of SEQ ID NO: 1244112
gccaaauaagccuguaaua

SEQ ID NO: 1465727 - RNA, 19 nt, Artificial Sequence
  Description of Artificial Sequence: Synthetic oligonucleotide
  Antisense strand to SEQ ID NO: 1465726
uauuacaggcuuauuuggc

SEQ ID NO: 1465728 - RNA, 19 nt, Artificial Sequence
  Description of Artificial Sequence: Synthetic oligonucleotide
  Sense strand starting at position 2689 of SEQ ID NO: 1244112
gccuguaauagaggcagau

SEQ ID NO: 1465729 - RNA, 19 nt, Artificial Sequence
  Description of Artificial Sequence: Synthetic oligonucleotide
  Antisense strand to SEQ ID NO: 1465728
aucugccucuauuacaggc

SEQ ID NO: 1465730 - RNA, 19 nt, Artificial Sequence
  Description of Artificial Sequence: Synthetic oligonucleotide
  Sense strand starting at position 3030 of SEQ ID NO: 1244112
cgacaaugacgauaucucu

SEQ ID NO: 1465731 - RNA, 19 nt, Artificial Sequence
  Description of Artificial Sequence: Synthetic oligonucleotide
  Antisense strand to SEQ ID NO: 1465730
agagauaucgucauugucg

SEQ ID NO: 1465732 - RNA, 19 nt, Artificial Sequence
  Description of Artificial Sequence: Synthetic oligonucleotide
  Sense strand starting at position 3036 of SEQ ID NO: 1244112
ugacgauaucucuaauagc

SEQ ID NO: 1465733 - RNA, 19 nt, Artificial Sequence
  Description of Artificial Sequence: Synthetic oligonucleotide
  Antisense strand to SEQ ID NO: 1465732
gcuauuagagauaucguca

SEQ ID NO: 1465734 - RNA, 19 nt, Artificial Sequence
  Description of Artificial Sequence: Synthetic oligonucleotide
  Sense strand starting at position 3039 of SEQ ID NO: 1244112
cgauaucucuaauagcuac

SEQ ID NO: 1465735 - RNA, 19 nt, Artificial Sequence
  Description of Artificial Sequence: Synthetic oligonucleotide
  Antisense strand to SEQ ID NO: 1465734
guagcuauuagagauaucg

SEQ ID NO: 1465736 - RNA, 19 nt, Artificial Sequence
  Description of Artificial Sequence: Synthetic oligonucleotide
  Sense strand starting at position 3049 of SEQ ID NO: 1244112
aauagcuaccucugaggua

SEQ ID NO: 1465737 - RNA, 19 nt, Artificial Sequence
  Description of Artificial Sequence: Synthetic oligonucleotide
  Antisense strand to SEQ ID NO: 1465736
uaccucagagguagcuauu

SEQ ID NO: 1465738 - RNA, 19 nt, Artificial Sequence
  Description of Artificial Sequence: Synthetic oligonucleotide
  Sense strand starting at position 3050 of SEQ ID NO: 1244112
auagcuaccucugagguau

SEQ ID NO: 1465739 - RNA, 19 nt, Artificial Sequence
  Description of Artificial Sequence: Synthetic oligonucleotide
  Antisense strand to SEQ ID NO: 1465738
auaccucagagguagcuau

SEQ ID NO: 1465740 - RNA, 19 nt, Artificial Sequence
  Description of Artificial Sequence: Synthetic oligonucleotide
  Sense strand starting at position 3052 of SEQ ID NO: 1244112
agcuaccucugagguauua

SEQ ID NO: 1465741 - RNA, 19 nt, Artificial Sequence
  Description of Artificial Sequence: Synthetic oligonucleotide
  Antisense strand to SEQ ID NO: 1465740
uaauaccucagagguagcu

SEQ ID NO: 1465742 - RNA, 19 nt, Artificial Sequence
  Description of Artificial Sequence: Synthetic oligonucleotide
  Sense strand starting at position 3138 of SEQ ID NO: 1244112
uaguaaggagcucauccaa

SEQ ID NO: 1465743 - RNA, 19 nt, Artificial Sequence
  Description of Artificial Sequence: Synthetic oligonucleotide
  Antisense strand to SEQ ID NO: 1465742
uuggaugagcuccuuacua

SEQ ID NO: 1465744 - RNA, 19 nt, Artificial Sequence
  Description of Artificial Sequence: Synthetic oligonucleotide
  Sense strand starting at position 3190 of SEQ ID NO: 1244112
caagcuaugucuggaagcu

SEQ ID NO: 1465745 - RNA, 19 nt, Artificial Sequence
  Description of Artificial Sequence: Synthetic oligonucleotide
  Antisense strand to SEQ ID NO: 1465744
agcuuccagacauagcuug

SEQ ID NO: 1465746 - RNA, 19 nt, Artificial Sequence
  Description of Artificial Sequence: Synthetic oligonucleotide
  Sense strand starting at position 3191 of SEQ ID NO: 1244112
aagcuaugucuggaagcuu

SEQ ID NO: 1465747 - RNA, 19 nt, Artificial Sequence
  Description of Artificial Sequence: Synthetic oligonucleotide
  Antisense strand to SEQ ID NO: 1465746
aagcuuccagacauagcuu

SEQ ID NO: 1465748 - RNA, 19 nt, Artificial Sequence
  Description of Artificial Sequence: Synthetic oligonucleotide
  Sense strand starting at position 3209 of SEQ ID NO: 1244112
ucuggaaaucuuggaugcu

SEQ ID NO: 1465749 - RNA, 19 nt, Artificial Sequence
  Description of Artificial Sequence: Synthetic oligonucleotide
  Antisense strand to SEQ ID NO: 1465748
agcauccaagauuuccaga

SEQ ID NO: 1465750 - RNA, 19 nt, Artificial Sequence
  Description of Artificial Sequence: Synthetic oligonucleotide
  Sense strand starting at position 3653 of SEQ ID NO: 1244112
ccucgaaugcugggacuca

SEQ ID NO: 1465751 - RNA, 19 nt, Artificial Sequence
  Description of Artificial Sequence: Synthetic oligonucleotide
  Antisense strand to SEQ ID NO: 1465750
ugagucccagcauucgagg

SEQ ID NO: 1465752 - RNA, 19 nt, Artificial Sequence
  Description of Artificial Sequence: Synthetic oligonucleotide
  Sense strand starting at position 3654 of SEQ ID NO: 1244112
cucgaaugcugggacucaa

SEQ ID NO: 1465753 - RNA, 19 nt, Artificial Sequence
  Description of Artificial Sequence: Synthetic oligonucleotide
  Antisense strand to SEQ ID NO: 1465752
uugagucccagcauucgag

SEQ ID NO: 1465754 - RNA, 19 nt, Artificial Sequence
  Description of Artificial Sequence: Synthetic oligonucleotide
  Sense strand starting at position 510 of SEQ ID NO: 1244113
gggugugauccuugggcca

SEQ ID NO: 1465755 - RNA, 19 nt, Artificial Sequence
  Description of Artificial Sequence: Synthetic oligonucleotide
  Antisense strand to SEQ ID NO: 1465754
uggcccaaggaucacaccc

SEQ ID NO: 1465756 - RNA, 19 nt, Artificial Sequence
  Description of Artificial Sequence: Synthetic oligonucleotide
  Sense strand starting at position 513 of SEQ ID NO: 1244113
ugugauccuugggccaaga

SEQ ID NO: 1465757 - RNA, 19 nt, Artificial Sequence
  Description of Artificial Sequence: Synthetic oligonucleotide
  Antisense strand to SEQ ID NO: 1465756
ucuuggcccaaggaucaca

SEQ ID NO: 1465758 - RNA, 19 nt, Artificial Sequence
  Description of Artificial Sequence: Synthetic oligonucleotide
  Sense strand starting at position 565 of SEQ ID NO: 1244113
gagaaacaguccuugagug

SEQ ID NO: 1465759 - RNA, 19 nt, Artificial Sequence
  Description of Artificial Sequence: Synthetic oligonucleotide
  Antisense strand to SEQ ID NO: 1465758
cacucaaggacuguuucuc

SEQ ID NO: 1465760 - RNA, 19 nt, Artificial Sequence
  Description of Artificial Sequence: Synthetic oligonucleotide
  Sense strand starting at position 567 of SEQ ID NO: 1244113
gaaacaguccuugagugcu

SEQ ID NO: 1465761 - RNA, 19 nt, Artificial Sequence
  Description of Artificial Sequence: Synthetic oligonucleotide
  Antisense strand to SEQ ID NO: 1465760
agcacucaaggacuguuuc

SEQ ID NO: 1465762 - RNA, 19 nt, Artificial Sequence
  Description of Artificial Sequence: Synthetic oligonucleotide
  Sense strand starting at position 597 of SEQ ID NO: 1244113
uggccuuuggucugugaug

SEQ ID NO: 1465763 - RNA, 19 nt, Artificial Sequence
  Description of Artificial Sequence: Synthetic oligonucleotide
  Antisense strand to SEQ ID NO: 1465762
caucacagaccaaaggcca

SEQ ID NO: 1465764 - RNA, 19 nt, Artificial Sequence
  Description of Artificial Sequence: Synthetic oligonucleotide
  Sense strand starting at position 599 of SEQ ID NO: 1244113
gccuuuggucugugauggu

SEQ ID NO: 1465765 - RNA, 19 nt, Artificial Sequence
  Description of Artificial Sequence: Synthetic oligonucleotide
  Antisense strand to SEQ ID NO: 1465764
accaucacagaccaaaggc

SEQ ID NO: 1465766 - RNA, 19 nt, Artificial Sequence
  Description of Artificial Sequence: Synthetic oligonucleotide
  Sense strand starting at position 660 of SEQ ID NO: 1244113
ccagaaauguccuagacca

SEQ ID NO: 1465767 - RNA, 19 nt, Artificial Sequence
  Description of Artificial Sequence: Synthetic oligonucleotide
  Antisense strand to SEQ ID NO: 1465766
uggucuaggacauuucugg

SEQ ID NO: 1465768 - RNA, 19 nt, Artificial Sequence
  Description of Artificial Sequence: Synthetic oligonucleotide
  Sense strand starting at position 683 of SEQ ID NO: 1244113
guguaacagcauuaguuac

SEQ ID NO: 1465769 - RNA, 19 nt, Artificial Sequence
  Description of Artificial Sequence: Synthetic oligonucleotide
  Antisense strand to SEQ ID NO: 1465768
guaacuaaugcuguuacac

SEQ ID NO: 1465770 - RNA, 19 nt, Artificial Sequence
  Description of Artificial Sequence: Synthetic oligonucleotide
  Sense strand starting at position 698 of SEQ ID NO: 1244113
uuaccaaauugccagagau

SEQ ID NO: 1465771 - RNA, 19 nt, Artificial Sequence
  Description of Artificial Sequence: Synthetic oligonucleotide
  Antisense strand to SEQ ID NO: 1465770
aucucuggcaauuugguaa

SEQ ID NO: 1465772 - RNA, 19 nt, Artificial Sequence
  Description of Artificial Sequence: Synthetic oligonucleotide
  Sense strand starting at position 728 of SEQ ID NO: 1244113
gacauugauuugcauguaa

SEQ ID NO: 1465773 - RNA, 19 nt, Artificial Sequence
  Description of Artificial Sequence: Synthetic oligonucleotide
  Antisense strand to SEQ ID NO: 1465772
uuacaugcaaaucaauguc

SEQ ID NO: 1465774 - RNA, 19 nt, Artificial Sequence
  Description of Artificial Sequence: Synthetic oligonucleotide
  Sense strand starting at position 762 of SEQ ID NO: 1244113
gcacaugaguacuaaggaa

SEQ ID NO: 1465775 - RNA, 19 nt, Artificial Sequence
  Description of Artificial Sequence: Synthetic oligonucleotide
  Antisense strand to SEQ ID NO: 1465774
uuccuuaguacucaugugc

SEQ ID NO: 1465776 - RNA, 19 nt, Artificial Sequence
  Description of Artificial Sequence: Synthetic oligonucleotide
  Sense strand starting at position 1492 of SEQ ID NO: 1244113
ugcccuguccaaugggaua

SEQ ID NO: 1465777 - RNA, 19 nt, Artificial Sequence
  Description of Artificial Sequence: Synthetic oligonucleotide
  Antisense strand to SEQ ID NO: 1465776
uaucccauuggacagggca

SEQ ID NO: 1465778 - RNA, 19 nt, Artificial Sequence
  Description of Artificial Sequence: Synthetic oligonucleotide
  Sense strand starting at position 1609 of SEQ ID NO: 1244113
ugucaaucccugcaagcuu

SEQ ID NO: 1465779 - RNA, 19 nt, Artificial Sequence
  Description of Artificial Sequence: Synthetic oligonucleotide
  Antisense strand to SEQ ID NO: 1465778
aagcuugcagggauugaca

SEQ ID NO: 1465780 - RNA, 19 nt, Artificial Sequence
  Description of Artificial Sequence: Synthetic oligonucleotide
  Sense strand starting at position 1836 of SEQ ID NO: 1244113
gcccuugagucagcuucua

SEQ ID NO: 1465781 - RNA, 19 nt, Artificial Sequence
  Description of Artificial Sequence: Synthetic oligonucleotide
  Antisense strand to SEQ ID NO: 1465780
uagaagcugacucaagggc

SEQ ID NO: 1465782 - RNA, 19 nt, Artificial Sequence
  Description of Artificial Sequence: Synthetic oligonucleotide
  Sense strand starting at position 1844 of SEQ ID NO: 1244113
gucagcuucuauccuaguu

SEQ ID NO: 1465783 - RNA, 19 nt, Artificial Sequence
  Description of Artificial Sequence: Synthetic oligonucleotide
  Antisense strand to SEQ ID NO: 1465782
aacuaggauagaagcugac

SEQ ID NO: 1465784 - RNA, 19 nt, Artificial Sequence
  Description of Artificial Sequence: Synthetic oligonucleotide
  Sense strand starting at position 1916 of SEQ ID NO: 1244113
gcuggugcuuacccuaaga

SEQ ID NO: 1465785 - RNA, 19 nt, Artificial Sequence
  Description of Artificial Sequence: Synthetic oligonucleotide
  Antisense strand to SEQ ID NO: 1465784
ucuuaggguaagcaccagc

SEQ ID NO: 1465786 - RNA, 19 nt, Artificial Sequence
  Description of Artificial Sequence: Synthetic oligonucleotide
  Sense strand starting at position 1918 of SEQ ID NO: 1244113
uggugcuuacccuaagaga

SEQ ID NO: 1465787 - RNA, 19 nt, Artificial Sequence
  Description of Artificial Sequence: Synthetic oligonucleotide
  Antisense strand to SEQ ID NO: 1465786
ucucuuaggguaagcacca

SEQ ID NO: 1465788 - RNA, 19 nt, Artificial Sequence
  Description of Artificial Sequence: Synthetic oligonucleotide
  Sense strand starting at position 2062 of SEQ ID NO: 1244113
cuuugaagucagggaugga

SEQ ID NO: 1465789 - RNA, 19 nt, Artificial Sequence
  Description of Artificial Sequence: Synthetic oligonucleotide
  Antisense strand to SEQ ID NO: 1465788
uccaucccugacuucaaag

SEQ ID NO: 1465790 - RNA, 19 nt, Artificial Sequence
  Description of Artificial Sequence: Synthetic oligonucleotide
  Sense strand starting at position 2219 of SEQ ID NO: 1244113
gaauuaaguggcuggauca

SEQ ID NO: 1465791 - RNA, 19 nt, Artificial Sequence
  Description of Artificial Sequence: Synthetic oligonucleotide
  Antisense strand to SEQ ID NO: 1465790
ugauccagccacuuaauuc

SEQ ID NO: 1465792 - RNA, 19 nt, Artificial Sequence
  Description of Artificial Sequence: Synthetic oligonucleotide
  Sense strand starting at position 2321 of SEQ ID NO: 1244113
cucggauacucuuaugaac

SEQ ID NO: 1465793 - RNA, 19 nt, Artificial Sequence
  Description of Artificial Sequence: Synthetic oligonucleotide
  Antisense strand to SEQ ID NO: 1465792
guucauaagaguauccgag

SEQ ID NO: 1465794 - RNA, 19 nt, Artificial Sequence
  Description of Artificial Sequence: Synthetic oligonucleotide
  Sense strand starting at position 2324 of SEQ ID NO: 1244113
ggauacucuuaugaacaau

SEQ ID NO: 1465795 - RNA, 19 nt, Artificial Sequence
  Description of Artificial Sequence: Synthetic oligonucleotide
  Antisense strand to SEQ ID NO: 1465794
auuguucauaagaguaucc

SEQ ID NO: 1465796 - RNA, 19 nt, Artificial Sequence
  Description of Artificial Sequence: Synthetic oligonucleotide
  Sense strand starting at position 2335 of SEQ ID NO: 1244113
ugaacaaugugggauguaa

SEQ ID NO: 1465797 - RNA, 19 nt, Artificial Sequence
  Description of Artificial Sequence: Synthetic oligonucleotide
  Antisense strand to SEQ ID NO: 1465796
uuacaucccacauuguuca

SEQ ID NO: 1465798 - RNA, 19 nt, Artificial Sequence
  Description of Artificial Sequence: Synthetic oligonucleotide
  Sense strand starting at position 2337 of SEQ ID NO: 1244113
aacaaugugggauguaaau

SEQ ID NO: 1465799 - RNA, 19 nt, Artificial Sequence
  Description of Artificial Sequence: Synthetic oligonucleotide
  Antisense strand to SEQ ID NO: 1465798
auuuacaucccacauuguu

SEQ ID NO: 1465800 - RNA, 19 nt, Artificial Sequence
  Description of Artificial Sequence: Synthetic oligonucleotide
  Sense strand starting at position 3004 of SEQ ID NO: 1244113
gggugaugcucacucaggu

SEQ ID NO: 1465801 - RNA, 19 nt, Artificial Sequence
  Description of Artificial Sequence: Synthetic oligonucleotide
  Antisense strand to SEQ ID NO: 1465800
accugagugagcaucaccc

SEQ ID NO: 1465802 - RNA, 19 nt, Artificial Sequence
  Description of Artificial Sequence: Synthetic oligonucleotide
  Sense strand starting at position 3017 of SEQ ID NO: 1244113
ucagguugcagggaugaca

SEQ ID NO: 1465803 - RNA, 19 nt, Artificial Sequence
  Description of Artificial Sequence: Synthetic oligonucleotide
  Antisense strand to SEQ ID NO: 1465802
ugucaucccugcaaccuga

SEQ ID NO: 1465804 - RNA, 19 nt, Artificial Sequence
  Description of Artificial Sequence: Synthetic oligonucleotide
  Sense strand starting at position 3051 of SEQ ID NO: 1244113
gcucuucuguacucaguau

SEQ ID NO: 1465805 - RNA, 19 nt, Artificial Sequence
  Description of Artificial Sequence: Synthetic oligonucleotide
  Antisense strand to SEQ ID NO: 1465804
auacugaguacagaagagc

SEQ ID NO: 1465806 - RNA, 19 nt, Artificial Sequence
  Description of Artificial Sequence: Synthetic oligonucleotide
  Sense strand starting at position 3404 of SEQ ID NO: 1244113
ucagcuauucuauauggua

SEQ ID NO: 1465807 - RNA, 19 nt, Artificial Sequence
  Description of Artificial Sequence: Synthetic oligonucleotide
  Antisense strand to SEQ ID NO: 1465806
uaccauauagaauagcuga

SEQ ID NO: 1465808 - RNA, 19 nt, Artificial Sequence
  Description of Artificial Sequence: Synthetic oligonucleotide
  Sense strand starting at position 3468 of SEQ ID NO: 1244113
ugacuuaccugaggauaca

SEQ ID NO: 1465809 - RNA, 19 nt, Artificial Sequence
  Description of Artificial Sequence: Synthetic oligonucleotide
  Antisense strand to SEQ ID NO: 1465808
uguauccucagguaaguca

SEQ ID NO: 1465810 - RNA, 19 nt, Artificial Sequence
  Description of Artificial Sequence: Synthetic oligonucleotide
  Sense strand starting at position 3611 of SEQ ID NO: 1244113
gaagcuuaggaaugcuagu

SEQ ID NO: 1465811 - RNA, 19 nt, Artificial Sequence
  Description of Artificial Sequence: Synthetic oligonucleotide
  Antisense strand to SEQ ID NO: 1465810
acuagcauuccuaagcuuc

SEQ ID NO: 1465812 - RNA, 19 nt, Artificial Sequence
  Description of Artificial Sequence: Synthetic oligonucleotide
  Sense strand starting at position 3640 of SEQ ID NO: 1244113
acccuuguuuaggagaaga

SEQ ID NO: 1465813 - RNA, 19 nt, Artificial Sequence
  Description of Artificial Sequence: Synthetic oligonucleotide
  Antisense strand to SEQ ID NO: 1465812
ucuucuccuaaacaagggu

SEQ ID NO: 1465814 - RNA, 19 nt, Artificial Sequence
  Description of Artificial Sequence: Synthetic oligonucleotide
  Sense strand starting at position 3722 of SEQ ID NO: 1244113
ggccuuuguuucuucccua

SEQ ID NO: 1465815 - RNA, 19 nt, Artificial Sequence
  Description of Artificial Sequence: Synthetic oligonucleotide
  Antisense strand to SEQ ID NO: 1465814
uagggaagaaacaaaggcc

SEQ ID NO: 1465816 - RNA, 19 nt, Artificial Sequence
  Description of Artificial Sequence: Synthetic oligonucleotide
  Sense strand starting at position 3725 of SEQ ID NO: 1244113
cuuuguuucuucccuagau

SEQ ID NO: 1465817 - RNA, 19 nt, Artificial Sequence
  Description of Artificial Sequence: Synthetic oligonucleotide
  Antisense strand to SEQ ID NO: 1465816
aucuagggaagaaacaaag

SEQ ID NO: 1465818 - RNA, 19 nt, Artificial Sequence
  Description of Artificial Sequence: Synthetic oligonucleotide
  Sense strand starting at position 3726 of SEQ ID NO: 1244113
uuuguuucuucccuagauu

SEQ ID NO: 1465819 - RNA, 19 nt, Artificial Sequence
  Description of Artificial Sequence: Synthetic oligonucleotide
  Antisense strand to SEQ ID NO: 1465818
aaucuagggaagaaacaaa

SEQ ID NO: 1465820 - RNA, 19 nt, Artificial Sequence
  Description of Artificial Sequence: Synthetic oligonucleotide
  Sense strand starting at position 3727 of SEQ ID NO: 1244113
uuguuucuucccuagauua

SEQ ID NO: 1465821 - RNA, 19 nt, Artificial Sequence
  Description of Artificial Sequence: Synthetic oligonucleotide
  Antisense strand to SEQ ID NO: 1465820
uaaucuagggaagaaacaa

SEQ ID NO: 1465822 - RNA, 19 nt, Artificial Sequence
  Description of Artificial Sequence: Synthetic oligonucleotide
  Sense strand starting at position 3729 of SEQ ID NO: 1244113
guuucuucccuagauuacu

SEQ ID NO: 1465823 - RNA, 19 nt, Artificial Sequence
  Description of Artificial Sequence: Synthetic oligonucleotide
  Antisense strand to SEQ ID NO: 1465822
aguaaucuagggaagaaac

SEQ ID NO: 1465824 - RNA, 19 nt, Artificial Sequence
  Description of Artificial Sequence: Synthetic oligonucleotide
  Sense strand starting at position 3753 of SEQ ID NO: 1244113
cuguguguuuauccuaaag

SEQ ID NO: 1465825 - RNA, 19 nt, Artificial Sequence
  Description of Artificial Sequence: Synthetic oligonucleotide
  Antisense strand to SEQ ID NO: 1465824
cuuuaggauaaacacacag

SEQ ID NO: 1465826 - RNA, 19 nt, Artificial Sequence
  Description of Artificial Sequence: Synthetic oligonucleotide
  Sense strand starting at position 3787 of SEQ ID NO: 1244113
ggaaauuuguuuggcagau

SEQ ID NO: 1465827 - RNA, 19 nt, Artificial Sequence
  Description of Artificial Sequence: Synthetic oligonucleotide
  Antisense strand to SEQ ID NO: 1465826
aucugccaaacaaauuucc

SEQ ID NO: 1465828 - RNA, 19 nt, Artificial Sequence
  Description of Artificial Sequence: Synthetic oligonucleotide
  Sense strand starting at position 3789 of SEQ ID NO: 1244113
aaauuuguuuggcagauga

SEQ ID NO: 1465829 - RNA, 19 nt, Artificial Sequence
  Description of Artificial Sequence: Synthetic oligonucleotide
  Antisense strand to SEQ ID NO: 1465828
ucaucugccaaacaaauuu

SEQ ID NO: 1465830 - RNA, 19 nt, Artificial Sequence
  Description of Artificial Sequence: Synthetic oligonucleotide
  Sense strand starting at position 3964 of SEQ ID NO: 1244113
ccugaauucucaggagaug

SEQ ID NO: 1465831 - RNA, 19 nt, Artificial Sequence
  Description of Artificial Sequence: Synthetic oligonucleotide
  Antisense strand to SEQ ID NO: 1465830
caucuccugagaauucagg

SEQ ID NO: 1465832 - RNA, 19 nt, Artificial Sequence
  Description of Artificial Sequence: Synthetic oligonucleotide
  Sense strand starting at position 3976 of SEQ ID NO: 1244113
ggagauggaugguauauuc

SEQ ID NO: 1465833 - RNA, 19 nt, Artificial Sequence
  Description of Artificial Sequence: Synthetic oligonucleotide
  Antisense strand to SEQ ID NO: 1465832
gaauauaccauccaucucc

SEQ ID NO: 1465834 - RNA, 19 nt, Artificial Sequence
  Description of Artificial Sequence: Synthetic oligonucleotide
  Sense strand starting at position 237 of SEQ ID NO: 1244114
ugccgaagccuccagagua

SEQ ID NO: 1465835 - RNA, 19 nt, Artificial Sequence
  Description of Artificial Sequence: Synthetic oligonucleotide
  Antisense strand to SEQ ID NO: 1465834
uacucuggaggcuucggca

SEQ ID NO: 1465836 - RNA, 19 nt, Artificial Sequence
  Description of Artificial Sequence: Synthetic oligonucleotide
  Sense strand starting at position 436 of SEQ ID NO: 1244114
uuuaauuguugggacuuaa

SEQ ID NO: 1465837 - RNA, 19 nt, Artificial Sequence
  Description of Artificial Sequence: Synthetic oligonucleotide
  Antisense strand to SEQ ID NO: 1465836
uuaagucccaacaauuaaa

SEQ ID NO: 1465838 - RNA, 19 nt, Artificial Sequence
  Description of Artificial Sequence: Synthetic oligonucleotide
  Sense strand starting at position 807 of SEQ ID NO: 1244114
ucauuagaauauugaguug

SEQ ID NO: 1465839 - RNA, 19 nt, Artificial Sequence
  Description of Artificial Sequence: Synthetic oligonucleotide
  Antisense strand to SEQ ID NO: 1465838
caacucaauauucuaauga

SEQ ID NO: 1465840 - RNA, 19 nt, Artificial Sequence
  Description of Artificial Sequence: Synthetic oligonucleotide
  Sense strand starting at position 1204 of SEQ ID NO: 1244114
gcugaucaccaccagugau

SEQ ID NO: 1465841 - RNA, 19 nt, Artificial Sequence
  Description of Artificial Sequence: Synthetic oligonucleotide
  Antisense strand to SEQ ID NO: 1465840
aucacugguggugaucagc

SEQ ID NO: 1465842 - RNA, 19 nt, Artificial Sequence
  Description of Artificial Sequence: Synthetic oligonucleotide
  Sense strand starting at position 1421 of SEQ ID NO: 1244114
gcuccagguuccucauauc

SEQ ID NO: 1465843 - RNA, 19 nt, Artificial Sequence
  Description of Artificial Sequence: Synthetic oligonucleotide
  Antisense strand to SEQ ID NO: 1465842
gauaugaggaaccuggagc

SEQ ID NO: 1465844 - RNA, 19 nt, Artificial Sequence
  Description of Artificial Sequence: Synthetic oligonucleotide
  Sense strand starting at position 1527 of SEQ ID NO: 1244114
uucccuuguuccgugagua

SEQ ID NO: 1465845 - RNA, 19 nt, Artificial Sequence
  Description of Artificial Sequence: Synthetic oligonucleotide
  Antisense strand to SEQ ID NO: 1465844
uacucacggaacaagggaa

SEQ ID NO: 1465846 - RNA, 19 nt, Artificial Sequence
  Description of Artificial Sequence: Synthetic oligonucleotide
  Sense strand starting at position 1528 of SEQ ID NO: 1244114
ucccuuguuccgugaguag

SEQ ID NO: 1465847 - RNA, 19 nt, Artificial Sequence
  Description of Artificial Sequence: Synthetic oligonucleotide
  Antisense strand to SEQ ID NO: 1465846
cuacucacggaacaaggga

SEQ ID NO: 1465848 - RNA, 19 nt, Artificial Sequence
  Description of Artificial Sequence: Synthetic oligonucleotide
  Sense strand starting at position 2059 of SEQ ID NO: 1244114
gggugugauccuugggcca

SEQ ID NO: 1465849 - RNA, 19 nt, Artificial Sequence
  Description of Artificial Sequence: Synthetic oligonucleotide
  Antisense strand to SEQ ID NO: 1465848
uggcccaaggaucacaccc

SEQ ID NO: 1465850 - RNA, 19 nt, Artificial Sequence
  Description of Artificial Sequence: Synthetic oligonucleotide
  Sense strand starting at position 2061 of SEQ ID NO: 1244114
gugugauccuugggccaag

SEQ ID NO: 1465851 - RNA, 19 nt, Artificial Sequence
  Description of Artificial Sequence: Synthetic oligonucleotide
  Antisense strand to SEQ ID NO: 1465850
cuuggcccaaggaucacac

SEQ ID NO: 1465852 - RNA, 19 nt, Artificial Sequence
  Description of Artificial Sequence: Synthetic oligonucleotide
  Sense strand starting at position 2062 of SEQ ID NO: 1244114
ugugauccuugggccaaga

SEQ ID NO: 1465853 - RNA, 19 nt, Artificial Sequence
  Description of Artificial Sequence: Synthetic oligonucleotide
  Antisense strand to SEQ ID NO: 1465852
ucuuggcccaaggaucaca

SEQ ID NO: 1465854 - RNA, 19 nt, Artificial Sequence
  Description of Artificial Sequence: Synthetic oligonucleotide
  Sense strand starting at position 2114 of SEQ ID NO: 1244114
gagaaacaguccuugagug

SEQ ID NO: 1465855 - RNA, 19 nt, Artificial Sequence
  Description of Artificial Sequence: Synthetic oligonucleotide
  Antisense strand to SEQ ID NO: 1465854
cacucaaggacuguuucuc

SEQ ID NO: 1465856 - RNA, 19 nt, Artificial Sequence
  Description of Artificial Sequence: Synthetic oligonucleotide
  Sense strand starting at position 2116 of SEQ ID NO: 1244114
gaaacaguccuugagugcu

SEQ ID NO: 1465857 - RNA, 19 nt, Artificial Sequence
  Description of Artificial Sequence: Synthetic oligonucleotide
  Antisense strand to SEQ ID NO: 1465856
agcacucaaggacuguuuc

SEQ ID NO: 1465858 - RNA, 19 nt, Artificial Sequence
  Description of Artificial Sequence: Synthetic oligonucleotide
  Sense strand starting at position 2146 of SEQ ID NO: 1244114
uggccuuuggucugugaug

SEQ ID NO: 1465859 - RNA, 19 nt, Artificial Sequence
  Description of Artificial Sequence: Synthetic oligonucleotide
  Antisense strand to SEQ ID NO: 1465858
caucacagaccaaaggcca

SEQ ID NO: 1465860 - RNA, 19 nt, Artificial Sequence
  Description of Artificial Sequence: Synthetic oligonucleotide
  Sense strand starting at position 2148 of SEQ ID NO: 1244114
gccuuuggucugugauggu

SEQ ID NO: 1465861 - RNA, 19 nt, Artificial Sequence
  Description of Artificial Sequence: Synthetic oligonucleotide
  Antisense strand to SEQ ID NO: 1465860
accaucacagaccaaaggc

SEQ ID NO: 1465862 - RNA, 19 nt, Artificial Sequence
  Description of Artificial Sequence: Synthetic oligonucleotide
  Sense strand starting at position 2161 of SEQ ID NO: 1244114
gaugguuucuccuguggga

SEQ ID NO: 1465863 - RNA, 19 nt, Artificial Sequence
  Description of Artificial Sequence: Synthetic oligonucleotide
  Antisense strand to SEQ ID NO: 1465862
ucccacaggagaaaccauc

SEQ ID NO: 1465864 - RNA, 19 nt, Artificial Sequence
  Description of Artificial Sequence: Synthetic oligonucleotide
  Sense strand starting at position 2209 of SEQ ID NO: 1244114
ccagaaauguccuagacca

SEQ ID NO: 1465865 - RNA, 19 nt, Artificial Sequence
  Description of Artificial Sequence: Synthetic oligonucleotide
  Antisense strand to SEQ ID NO: 1465864
uggucuaggacauuucugg

SEQ ID NO: 1465866 - RNA, 19 nt, Artificial Sequence
  Description of Artificial Sequence: Synthetic oligonucleotide
  Sense strand starting at position 2226 of SEQ ID NO: 1244114
cagauaguguaacagcauu

SEQ ID NO: 1465867 - RNA, 19 nt, Artificial Sequence
  Description of Artificial Sequence: Synthetic oligonucleotide
  Antisense strand to SEQ ID NO: 1465866
aaugcuguuacacuaucug

SEQ ID NO: 1465868 - RNA, 19 nt, Artificial Sequence
  Description of Artificial Sequence: Synthetic oligonucleotide
  Sense strand starting at position 2232 of SEQ ID NO: 1244114
guguaacagcauuaguuac

SEQ ID NO: 1465869 - RNA, 19 nt, Artificial Sequence
  Description of Artificial Sequence: Synthetic oligonucleotide
  Antisense strand to SEQ ID NO: 1465868
guaacuaaugcuguuacac

SEQ ID NO: 1465870 - RNA, 19 nt, Artificial Sequence
  Description of Artificial Sequence: Synthetic oligonucleotide
  Sense strand starting at position 2247 of SEQ ID NO: 1244114
uuaccaaauugccagagau

SEQ ID NO: 1465871 - RNA, 19 nt, Artificial Sequence
  Description of Artificial Sequence: Synthetic oligonucleotide
  Antisense strand to SEQ ID NO: 1465870
aucucuggcaauuugguaa

SEQ ID NO: 1465872 - RNA, 19 nt, Artificial Sequence
  Description of Artificial Sequence: Synthetic oligonucleotide
  Sense strand starting at position 2277 of SEQ ID NO: 1244114
gacauugauuugcauguaa

SEQ ID NO: 1465873 - RNA, 19 nt, Artificial Sequence
  Description of Artificial Sequence: Synthetic oligonucleotide
  Antisense strand to SEQ ID NO: 1465872
uuacaugcaaaucaauguc

SEQ ID NO: 1465874 - RNA, 19 nt, Artificial Sequence
  Description of Artificial Sequence: Synthetic oligonucleotide
  Sense strand starting at position 2311 of SEQ ID NO: 1244114
gcacaugaguacuaaggaa

SEQ ID NO: 1465875 - RNA, 19 nt, Artificial Sequence
  Description of Artificial Sequence: Synthetic oligonucleotide
  Antisense strand to SEQ ID NO: 1465874
uuccuuaguacucaugugc

SEQ ID NO: 1465876 - RNA, 19 nt, Artificial Sequence
  Description of Artificial Sequence: Synthetic oligonucleotide
  Sense strand starting at position 3041 of SEQ ID NO: 1244114
ugcccuguccaaugggaua

SEQ ID NO: 1465877 - RNA, 19 nt, Artificial Sequence
  Description of Artificial Sequence: Synthetic oligonucleotide
  Antisense strand to SEQ ID NO: 1465876
uaucccauuggacagggca

SEQ ID NO: 1465878 - RNA, 19 nt, Artificial Sequence
  Description of Artificial Sequence: Synthetic oligonucleotide
  Sense strand starting at position 3053 of SEQ ID NO: 1244114
ugggauaccuucuaagccu

SEQ ID NO: 1465879 - RNA, 19 nt, Artificial Sequence
  Description of Artificial Sequence: Synthetic oligonucleotide
  Antisense strand to SEQ ID NO: 1465878
aggcuuagaagguauccca

SEQ ID NO: 1465880 - RNA, 19 nt, Artificial Sequence
  Description of Artificial Sequence: Synthetic oligonucleotide
  Sense strand starting at position 3158 of SEQ ID NO: 1244114
ugucaaucccugcaagcuu

SEQ ID NO: 1465881 - RNA, 19 nt, Artificial Sequence
  Description of Artificial Sequence: Synthetic oligonucleotide
  Antisense strand to SEQ ID NO: 1465880
aagcuugcagggauugaca

SEQ ID NO: 1465882 - RNA, 19 nt, Artificial Sequence
  Description of Artificial Sequence: Synthetic oligonucleotide
  Sense strand starting at position 3385 of SEQ ID NO: 1244114
gcccuugagucagcuucua

SEQ ID NO: 1465883 - RNA, 19 nt, Artificial Sequence
  Description of Artificial Sequence: Synthetic oligonucleotide
  Antisense strand to SEQ ID NO: 1465882
uagaagcugacucaagggc

SEQ ID NO: 1465884 - RNA, 19 nt, Artificial Sequence
  Description of Artificial Sequence: Synthetic oligonucleotide
  Sense strand starting at position 3390 of SEQ ID NO: 1244114
ugagucagcuucuauccua

SEQ ID NO: 1465885 - RNA, 19 nt, Artificial Sequence
  Description of Artificial Sequence: Synthetic oligonucleotide
  Antisense strand to SEQ ID NO: 1465884
uaggauagaagcugacuca

SEQ ID NO: 1465886 - RNA, 19 nt, Artificial Sequence
  Description of Artificial Sequence: Synthetic oligonucleotide
  Sense strand starting at position 3393 of SEQ ID NO: 1244114
gucagcuucuauccuaguu

SEQ ID NO: 1465887 - RNA, 19 nt, Artificial Sequence
  Description of Artificial Sequence: Synthetic oligonucleotide
  Antisense strand to SEQ ID NO: 1465886
aacuaggauagaagcugac

SEQ ID NO: 1465888 - RNA, 19 nt, Artificial Sequence
  Description of Artificial Sequence: Synthetic oligonucleotide
  Sense strand starting at position 3465 of SEQ ID NO: 1244114
gcuggugcuuacccuaaga

SEQ ID NO: 1465889 - RNA, 19 nt, Artificial Sequence
  Description of Artificial Sequence: Synthetic oligonucleotide
  Antisense strand to SEQ ID NO: 1465888
ucuuaggguaagcaccagc

SEQ ID NO: 1465890 - RNA, 19 nt, Artificial Sequence
  Description of Artificial Sequence: Synthetic oligonucleotide
  Sense strand starting at position 3467 of SEQ ID NO: 1244114
uggugcuuacccuaagaga

SEQ ID NO: 1465891 - RNA, 19 nt, Artificial Sequence
  Description of Artificial Sequence: Synthetic oligonucleotide
  Antisense strand to SEQ ID NO: 1465890
ucucuuaggguaagcacca

SEQ ID NO: 1465892 - RNA, 19 nt, Artificial Sequence
  Description of Artificial Sequence: Synthetic oligonucleotide
  Sense strand starting at position 3586 of SEQ ID NO: 1244114
agcagugacuugggcuuua

SEQ ID NO: 1465893 - RNA, 19 nt, Artificial Sequence
  Description of Artificial Sequence: Synthetic oligonucleotide
  Antisense strand to SEQ ID NO: 1465892
uaaagcccaagucacugcu

SEQ ID NO: 1465894 - RNA, 19 nt, Artificial Sequence
  Description of Artificial Sequence: Synthetic oligonucleotide
  Sense strand starting at position 3611 of SEQ ID NO: 1244114
cuuugaagucagggaugga

SEQ ID NO: 1465895 - RNA, 19 nt, Artificial Sequence
  Description of Artificial Sequence: Synthetic oligonucleotide
  Antisense strand to SEQ ID NO: 1465894
uccaucccugacuucaaag

SEQ ID NO: 1465896 - RNA, 19 nt, Artificial Sequence
  Description of Artificial Sequence: Synthetic oligonucleotide
  Sense strand starting at position 3768 of SEQ ID NO: 1244114
gaauuaaguggcuggauca

SEQ ID NO: 1465897 - RNA, 19 nt, Artificial Sequence
  Description of Artificial Sequence: Synthetic oligonucleotide
  Antisense strand to SEQ ID NO: 1465896
ugauccagccacuuaauuc

SEQ ID NO: 1465898 - RNA, 19 nt, Artificial Sequence
  Description of Artificial Sequence: Synthetic oligonucleotide
  Sense strand starting at position 3870 of SEQ ID NO: 1244114
cucggauacucuuaugaac

SEQ ID NO: 1465899 - RNA, 19 nt, Artificial Sequence
  Description of Artificial Sequence: Synthetic oligonucleotide
  Antisense strand to SEQ ID NO: 1465898
guucauaagaguauccgag

SEQ ID NO: 1465900 - RNA, 19 nt, Artificial Sequence
  Description of Artificial Sequence: Synthetic oligonucleotide
  Sense strand starting at position 3872 of SEQ ID NO: 1244114
cggauacucuuaugaacaa

SEQ ID NO: 1465901 - RNA, 19 nt, Artificial Sequence
  Description of Artificial Sequence: Synthetic oligonucleotide
  Antisense strand to SEQ ID NO: 1465900
uuguucauaagaguauccg

SEQ ID NO: 1465902 - RNA, 19 nt, Artificial Sequence
  Description of Artificial Sequence: Synthetic oligonucleotide
  Sense strand starting at position 3873 of SEQ ID NO: 1244114
ggauacucuuaugaacaau

SEQ ID NO: 1465903 - RNA, 19 nt, Artificial Sequence
  Description of Artificial Sequence: Synthetic oligonucleotide
  Antisense strand to SEQ ID NO: 1465902
auuguucauaagaguaucc

SEQ ID NO: 1465904 - RNA, 19 nt, Artificial Sequence
  Description of Artificial Sequence: Synthetic oligonucleotide
  Sense strand starting at position 3884 of SEQ ID NO: 1244114
ugaacaaugugggauguaa

SEQ ID NO: 1465905 - RNA, 19 nt, Artificial Sequence
  Description of Artificial Sequence: Synthetic oligonucleotide
  Antisense strand to SEQ ID NO: 1465904
uuacaucccacauuguuca

SEQ ID NO: 1465906 - RNA, 19 nt, Artificial Sequence
  Description of Artificial Sequence: Synthetic oligonucleotide
  Sense strand starting at position 3886 of SEQ ID NO: 1244114
aacaaugugggauguaaau

SEQ ID NO: 1465907 - RNA, 19 nt, Artificial Sequence
  Description of Artificial Sequence: Synthetic oligonucleotide
  Antisense strand to SEQ ID NO: 1465906
auuuacaucccacauuguu

SEQ ID NO: 1465908 - RNA, 19 nt, Artificial Sequence
  Description of Artificial Sequence: Synthetic oligonucleotide
  Sense strand starting at position 3908 of SEQ ID NO: 1244114
auacccuaguugugagaga

SEQ ID NO: 1465909 - RNA, 19 nt, Artificial Sequence
  Description of Artificial Sequence: Synthetic oligonucleotide
  Antisense strand to SEQ ID NO: 1465908
ucucucacaacuaggguau

SEQ ID NO: 1465910 - RNA, 19 nt, Artificial Sequence
  Description of Artificial Sequence: Synthetic oligonucleotide
  Sense strand starting at position 54 of SEQ ID NO: 1244115
aaaggugaguuauucuaua

SEQ ID NO: 1465911 - RNA, 19 nt, Artificial Sequence
  Description of Artificial Sequence: Synthetic oligonucleotide
  Antisense strand to SEQ ID NO: 1465910
uauagaauaacucaccuuu

SEQ ID NO: 1465912 - RNA, 19 nt, Artificial Sequence
  Description of Artificial Sequence: Synthetic oligonucleotide
  Sense strand starting at position 72 of SEQ ID NO: 1244115
acauuuauguuggaaguau

SEQ ID NO: 1465913 - RNA, 19 nt, Artificial Sequence
  Description of Artificial Sequence: Synthetic oligonucleotide
  Antisense strand to SEQ ID NO: 1465912
auacuuccaacauaaaugu

SEQ ID NO: 1465914 - RNA, 19 nt, Artificial Sequence
  Description of Artificial Sequence: Synthetic oligonucleotide
  Sense strand starting at position 80 of SEQ ID NO: 1244115
guuggaaguaugcagcuau

SEQ ID NO: 1465915 - RNA, 19 nt, Artificial Sequence
  Description of Artificial Sequence: Synthetic oligonucleotide
  Antisense strand to SEQ ID NO: 1465914
auagcugcauacuuccaac

SEQ ID NO: 1465916 - RNA, 19 nt, Artificial Sequence
  Description of Artificial Sequence: Synthetic oligonucleotide
  Sense strand starting at position 166 of SEQ ID NO: 1244115
uauucagucguggguggaa

SEQ ID NO: 1465917 - RNA, 19 nt, Artificial Sequence
  Description of Artificial Sequence: Synthetic oligonucleotide
  Antisense strand to SEQ ID NO: 1465916
uuccacccacgacugaaua

SEQ ID NO: 1465918 - RNA, 19 nt, Artificial Sequence
  Description of Artificial Sequence: Synthetic oligonucleotide
  Sense strand starting at position 175 of SEQ ID NO: 1244115
guggguggaaucugggauu

SEQ ID NO: 1465919 - RNA, 19 nt, Artificial Sequence
  Description of Artificial Sequence: Synthetic oligonucleotide
  Antisense strand to SEQ ID NO: 1465918
aaucccagauuccacccac

SEQ ID NO: 1465920 - RNA, 19 nt, Artificial Sequence
  Description of Artificial Sequence: Synthetic oligonucleotide
  Sense strand starting at position 370 of SEQ ID NO: 1244115
uggcuaucaucugcagauu

SEQ ID NO: 1465921 - RNA, 19 nt, Artificial Sequence
  Description of Artificial Sequence: Synthetic oligonucleotide
  Antisense strand to SEQ ID NO: 1465920
aaucugcagaugauagcca

SEQ ID NO: 1465922 - RNA, 19 nt, Artificial Sequence
  Description of Artificial Sequence: Synthetic oligonucleotide
  Sense strand starting at position 371 of SEQ ID NO: 1244115
ggcuaucaucugcagauug

SEQ ID NO: 1465923 - RNA, 19 nt, Artificial Sequence
  Description of Artificial Sequence: Synthetic oligonucleotide
  Antisense strand to SEQ ID NO: 1465922
caaucugcagaugauagcc

SEQ ID NO: 1465924 - RNA, 19 nt, Artificial Sequence
  Description of Artificial Sequence: Synthetic oligonucleotide
  Sense strand starting at position 373 of SEQ ID NO: 1244115
cuaucaucugcagauugca

SEQ ID NO: 1465925 - RNA, 19 nt, Artificial Sequence
  Description of Artificial Sequence: Synthetic oligonucleotide
  Antisense strand to SEQ ID NO: 1465924
ugcaaucugcagaugauag

SEQ ID NO: 1465926 - RNA, 19 nt, Artificial Sequence
  Description of Artificial Sequence: Synthetic oligonucleotide
  Sense strand starting at position 1050 of SEQ ID NO: 1244115
ccucguucuagggaacgau

SEQ ID NO: 1465927 - RNA, 19 nt, Artificial Sequence
  Description of Artificial Sequence: Synthetic oligonucleotide
  Antisense strand to SEQ ID NO: 1465926
aucguucccuagaacgagg

SEQ ID NO: 1465928 - RNA, 19 nt, Artificial Sequence
  Description of Artificial Sequence: Synthetic oligonucleotide
  Sense strand starting at position 1062 of SEQ ID NO: 1244115
gaacgauccugaccuguca

SEQ ID NO: 1465929 - RNA, 19 nt, Artificial Sequence
  Description of Artificial Sequence: Synthetic oligonucleotide
  Antisense strand to SEQ ID NO: 1465928
ugacaggucaggaucguuc

SEQ ID NO: 1465930 - RNA, 19 nt, Artificial Sequence
  Description of Artificial Sequence: Synthetic oligonucleotide
  Sense strand starting at position 2162 of SEQ ID NO: 1244115
gccagauucccugggccau

SEQ ID NO: 1465931 - RNA, 19 nt, Artificial Sequence
  Description of Artificial Sequence: Synthetic oligonucleotide
  Antisense strand to SEQ ID NO: 1465930
auggcccagggaaucuggc

SEQ ID NO: 1465932 - RNA, 19 nt, Artificial Sequence
  Description of Artificial Sequence: Synthetic oligonucleotide
  Sense strand starting at position 2177 of SEQ ID NO: 1244115
ccaucaacuuaggcuuaga

SEQ ID NO: 1465933 - RNA, 19 nt, Artificial Sequence
  Description of Artificial Sequence: Synthetic oligonucleotide
  Antisense strand to SEQ ID NO: 1465932
ucuaagccuaaguugaugg

SEQ ID NO: 1465934 - RNA, 19 nt, Artificial Sequence
  Description of Artificial Sequence: Synthetic oligonucleotide
  Sense strand starting at position 2303 of SEQ ID NO: 1244115
ggccgcaucccagaucaau

SEQ ID NO: 1465935 - RNA, 19 nt, Artificial Sequence
  Description of Artificial Sequence: Synthetic oligonucleotide
  Antisense strand to SEQ ID NO: 1465934
auugaucugggaugcggcc

SEQ ID NO: 1465936 - RNA, 19 nt, Artificial Sequence
  Description of Artificial Sequence: Synthetic oligonucleotide
  Sense strand starting at position 2399 of SEQ ID NO: 1244115
guuugagaugauugguuua

SEQ ID NO: 1465937 - RNA, 19 nt, Artificial Sequence
  Description of Artificial Sequence: Synthetic oligonucleotide
  Antisense strand to SEQ ID NO: 1465936
uaaaccaaucaucucaaac

SEQ ID NO: 1465938 - RNA, 19 nt, Artificial Sequence
  Description of Artificial Sequence: Synthetic oligonucleotide
  Sense strand starting at position 2401 of SEQ ID NO: 1244115
uugagaugauugguuuaga

SEQ ID NO: 1465939 - RNA, 19 nt, Artificial Sequence
  Description of Artificial Sequence: Synthetic oligonucleotide
  Antisense strand to SEQ ID NO: 1465938
ucuaaaccaaucaucucaa

SEQ ID NO: 1465940 - RNA, 19 nt, Artificial Sequence
  Description of Artificial Sequence: Synthetic oligonucleotide
  Sense strand starting at position 2402 of SEQ ID NO: 1244115
ugagaugauugguuuagau

SEQ ID NO: 1465941 - RNA, 19 nt, Artificial Sequence
  Description of Artificial Sequence: Synthetic oligonucleotide
  Antisense strand to SEQ ID NO: 1465940
aucuaaaccaaucaucuca

SEQ ID NO: 1465942 - RNA, 19 nt, Artificial Sequence
  Description of Artificial Sequence: Synthetic oligonucleotide
  Sense strand starting at position 2410 of SEQ ID NO: 1244115
uugguuuagaucggaugga

SEQ ID NO: 1465943 - RNA, 19 nt, Artificial Sequence
  Description of Artificial Sequence: Synthetic oligonucleotide
  Antisense strand to SEQ ID NO: 1465942
uccauccgaucuaaaccaa

SEQ ID NO: 1465944 - RNA, 19 nt, Artificial Sequence
  Description of Artificial Sequence: Synthetic oligonucleotide
  Sense strand starting at position 2698 of SEQ ID NO: 1244115
aauauuuacucugggugaa

SEQ ID NO: 1465945 - RNA, 19 nt, Artificial Sequence
  Description of Artificial Sequence: Synthetic oligonucleotide
  Antisense strand to SEQ ID NO: 1465944
uucacccagaguaaauauu

SEQ ID NO: 1465946 - RNA, 19 nt, Artificial Sequence
  Description of Artificial Sequence: Synthetic oligonucleotide
  Sense strand starting at position 2737 of SEQ ID NO: 1244115
ucaaguuauuagguuugca

SEQ ID NO: 1465947 - RNA, 19 nt, Artificial Sequence
  Description of Artificial Sequence: Synthetic oligonucleotide
  Antisense strand to SEQ ID NO: 1465946
ugcaaaccuaauaacuuga

SEQ ID NO: 1465948 - RNA, 19 nt, Artificial Sequence
  Description of Artificial Sequence: Synthetic oligonucleotide
  Sense strand starting at position 2798 of SEQ ID NO: 1244115
ucggcuuuccuugcuguua

SEQ ID NO: 1465949 - RNA, 19 nt, Artificial Sequence
  Description of Artificial Sequence: Synthetic oligonucleotide
  Antisense strand to SEQ ID NO: 1465948
uaacagcaaggaaagccga

SEQ ID NO: 1465950 - RNA, 19 nt, Artificial Sequence
  Description of Artificial Sequence: Synthetic oligonucleotide
  Sense strand starting at position 3166 of SEQ ID NO: 1244115
ccaggagaggguuguaaga

SEQ ID NO: 1465951 - RNA, 19 nt, Artificial Sequence
  Description of Artificial Sequence: Synthetic oligonucleotide
  Antisense strand to SEQ ID NO: 1465950
ucuuacaacccucuccugg

SEQ ID NO: 1465952 - RNA, 19 nt, Artificial Sequence
  Description of Artificial Sequence: Synthetic oligonucleotide
  Sense strand starting at position 3360 of SEQ ID NO: 1244115
gcaacauucuaagugagau

SEQ ID NO: 1465953 - RNA, 19 nt, Artificial Sequence
  Description of Artificial Sequence: Synthetic oligonucleotide
  Antisense strand to SEQ ID NO: 1465952
aucucacuuagaauguugc

SEQ ID NO: 1465954 - RNA, 19 nt, Artificial Sequence
  Description of Artificial Sequence: Synthetic oligonucleotide
  Sense strand starting at position 3366 of SEQ ID NO: 1244115
uucuaagugagauguuguu

SEQ ID NO: 1465955 - RNA, 19 nt, Artificial Sequence
  Description of Artificial Sequence: Synthetic oligonucleotide
  Antisense strand to SEQ ID NO: 1465954
aacaacaucucacuuagaa

SEQ ID NO: 1465956 - RNA, 19 nt, Artificial Sequence
  Description of Artificial Sequence: Synthetic oligonucleotide
  Sense strand starting at position 3527 of SEQ ID NO: 1244115
ucaagaacucaucguuuag

SEQ ID NO: 1465957 - RNA, 19 nt, Artificial Sequence
  Description of Artificial Sequence: Synthetic oligonucleotide
  Antisense strand to SEQ ID NO: 1465956
cuaaacgaugaguucuuga

SEQ ID NO: 1465958 - RNA, 19 nt, Artificial Sequence
  Description of Artificial Sequence: Synthetic oligonucleotide
  Sense strand starting at position 3531 of SEQ ID NO: 1244115
gaacucaucguuuaggguu

SEQ ID NO: 1465959 - RNA, 19 nt, Artificial Sequence
  Description of Artificial Sequence: Synthetic oligonucleotide
  Antisense strand to SEQ ID NO: 1465958
aacccuaaacgaugaguuc

SEQ ID NO: 1465960 - RNA, 19 nt, Artificial Sequence
  Description of Artificial Sequence: Synthetic oligonucleotide
  Sense strand starting at position 3545 of SEQ ID NO: 1244115
ggguuuggcauauaagcaa

SEQ ID NO: 1465961 - RNA, 19 nt, Artificial Sequence
  Description of Artificial Sequence: Synthetic oligonucleotide
  Antisense strand to SEQ ID NO: 1465960
uugcuuauaugccaaaccc

SEQ ID NO: 1465962 - RNA, 19 nt, Artificial Sequence
  Description of Artificial Sequence: Synthetic oligonucleotide
  Sense strand starting at position 3617 of SEQ ID NO: 1244115
gcacuuacauuauuaggaa

SEQ ID NO: 1465963 - RNA, 19 nt, Artificial Sequence
  Description of Artificial Sequence: Synthetic oligonucleotide
  Antisense strand to SEQ ID NO: 1465962
uuccuaauaauguaagugc

SEQ ID NO: 1465964 - RNA, 19 nt, Artificial Sequence
  Description of Artificial Sequence: Synthetic oligonucleotide
  Sense strand starting at position 3671 of SEQ ID NO: 1244115
agguaauagucucucguga

SEQ ID NO: 1465965 - RNA, 19 nt, Artificial Sequence
  Description of Artificial Sequence: Synthetic oligonucleotide
  Antisense strand to SEQ ID NO: 1465964
ucacgagagacuauuaccu

SEQ ID NO: 1465966 - RNA, 19 nt, Artificial Sequence
  Description of Artificial Sequence: Synthetic oligonucleotide
  Sense strand starting at position 3777 of SEQ ID NO: 1244115
cuauuucccugucuugagu

SEQ ID NO: 1465967 - RNA, 19 nt, Artificial Sequence
  Description of Artificial Sequence: Synthetic oligonucleotide
  Antisense strand to SEQ ID NO: 1465966
acucaagacagggaaauag

SEQ ID NO: 1465968 - RNA, 19 nt, Artificial Sequence
  Description of Artificial Sequence: Synthetic oligonucleotide
  Sense strand starting at position 3786 of SEQ ID NO: 1244115
ugucuugaguuccuuacau

SEQ ID NO: 1465969 - RNA, 19 nt, Artificial Sequence
  Description of Artificial Sequence: Synthetic oligonucleotide
  Antisense strand to SEQ ID NO: 1465968
auguaaggaacucaagaca

SEQ ID NO: 1465970 - RNA, 19 nt, Artificial Sequence
  Description of Artificial Sequence: Synthetic oligonucleotide
  Sense strand starting at position 3796 of SEQ ID NO: 1244115
uccuuacaucccuguaagu

SEQ ID NO: 1465971 - RNA, 19 nt, Artificial Sequence
  Description of Artificial Sequence: Synthetic oligonucleotide
  Antisense strand to SEQ ID NO: 1465970
acuuacagggauguaagga

SEQ ID NO: 1465972 - RNA, 19 nt, Artificial Sequence
  Description of Artificial Sequence: Synthetic oligonucleotide
  Sense strand starting at position 3806 of SEQ ID NO: 1244115
ccuguaaguccauaaacug

SEQ ID NO: 1465973 - RNA, 19 nt, Artificial Sequence
  Description of Artificial Sequence: Synthetic oligonucleotide
  Antisense strand to SEQ ID NO: 1465972
caguuuauggacuuacagg

SEQ ID NO: 1465974 - RNA, 19 nt, Artificial Sequence
  Description of Artificial Sequence: Synthetic oligonucleotide
  Sense strand starting at position 3840 of SEQ ID NO: 1244115
uccucucagccugguuaga

SEQ ID NO: 1465975 - RNA, 19 nt, Artificial Sequence
  Description of Artificial Sequence: Synthetic oligonucleotide
  Antisense strand to SEQ ID NO: 1465974
ucuaaccaggcugagagga

SEQ ID NO: 1465976 - RNA, 19 nt, Artificial Sequence
  Description of Artificial Sequence: Synthetic oligonucleotide
  Sense strand starting at position 3842 of SEQ ID NO: 1244115
cucucagccugguuagaaa

SEQ ID NO: 1465977 - RNA, 19 nt, Artificial Sequence
  Description of Artificial Sequence: Synthetic oligonucleotide
  Antisense strand to SEQ ID NO: 1465976
uuucuaaccaggcugagag

SEQ ID NO: 1465978 - RNA, 19 nt, Artificial Sequence
  Description of Artificial Sequence: Synthetic oligonucleotide
  Sense strand starting at position 3851 of SEQ ID NO: 1244115
ugguuagaaaucuguuaga

SEQ ID NO: 1465979 - RNA, 19 nt, Artificial Sequence
  Description of Artificial Sequence: Synthetic oligonucleotide
  Antisense strand to SEQ ID NO: 1465978
ucuaacagauuucuaacca

SEQ ID NO: 1465980 - RNA, 19 nt, Artificial Sequence
  Description of Artificial Sequence: Synthetic oligonucleotide
  Sense strand starting at position 3876 of SEQ ID NO: 1244115
auuccaggugcaugaaaga

SEQ ID NO: 1465981 - RNA, 19 nt, Artificial Sequence
  Description of Artificial Sequence: Synthetic oligonucleotide
  Antisense strand to SEQ ID NO: 1465980
ucuuucaugcaccuggaau

SEQ ID NO: 1465982 - RNA, 19 nt, Artificial Sequence
  Description of Artificial Sequence: Synthetic oligonucleotide
  Sense strand starting at position 3892 of SEQ ID NO: 1244115
agaugcguuaccuaagcuu

SEQ ID NO: 1465983 - RNA, 19 nt, Artificial Sequence
  Description of Artificial Sequence: Synthetic oligonucleotide
  Antisense strand to SEQ ID NO: 1465982
aagcuuagguaacgcaucu

SEQ ID NO: 1465984 - RNA, 19 nt, Artificial Sequence
  Description of Artificial Sequence: Synthetic oligonucleotide
  Sense strand starting at position 3903 of SEQ ID NO: 1244115
cuaagcuuuguguaacagu

SEQ ID NO: 1465985 - RNA, 19 nt, Artificial Sequence
  Description of Artificial Sequence: Synthetic oligonucleotide
  Antisense strand to SEQ ID NO: 1465984
acuguuacacaaagcuuag

SEQ ID NO: 1465986 - RNA, 19 nt, Artificial Sequence
  Description of Artificial Sequence: Synthetic oligonucleotide
  Sense strand starting at position 3914 of SEQ ID NO: 1244115
guaacaguccacugacauu

SEQ ID NO: 1465987 - RNA, 19 nt, Artificial Sequence
  Description of Artificial Sequence: Synthetic oligonucleotide
  Antisense strand to SEQ ID NO: 1465986
aaugucaguggacuguuac

SEQ ID NO: 1465988 - RNA, 19 nt, Artificial Sequence
  Description of Artificial Sequence: Synthetic oligonucleotide
  Sense strand starting at position 3951 of SEQ ID NO: 1244115
gcuccaccugcucaugauu

SEQ ID NO: 1465989 - RNA, 19 nt, Artificial Sequence
  Description of Artificial Sequence: Synthetic oligonucleotide
  Antisense strand to SEQ ID NO: 1465988
aaucaugagcagguggagc

SEQ ID NO: 1465990 - RNA, 19 nt, Artificial Sequence
  Description of Artificial Sequence: Synthetic oligonucleotide
  Sense strand starting at position 18 of SEQ ID NO: 1244116
uuaucauuccgacgacuga

SEQ ID NO: 1465991 - RNA, 19 nt, Artificial Sequence
  Description of Artificial Sequence: Synthetic oligonucleotide
  Antisense strand to SEQ ID NO: 1465990
ucagucgucggaaugauaa

SEQ ID NO: 1465992 - RNA, 19 nt, Artificial Sequence
  Description of Artificial Sequence: Synthetic oligonucleotide
  Sense strand starting at position 19 of SEQ ID NO: 1244116
uaucauuccgacgacugaa

SEQ ID NO: 1465993 - RNA, 19 nt, Artificial Sequence
  Description of Artificial Sequence: Synthetic oligonucleotide
  Antisense strand to SEQ ID NO: 1465992
uucagucgucggaaugaua

SEQ ID NO: 1465994 - RNA, 19 nt, Artificial Sequence
  Description of Artificial Sequence: Synthetic oligonucleotide
  Sense strand starting at position 34 of SEQ ID NO: 1244116
ugaagucuaaccggcagaa

SEQ ID NO: 1465995 - RNA, 19 nt, Artificial Sequence
  Description of Artificial Sequence: Synthetic oligonucleotide
  Antisense strand to SEQ ID NO: 1465994
uucugccgguuagacuuca

SEQ ID NO: 1465996 - RNA, 19 nt, Artificial Sequence
  Description of Artificial Sequence: Synthetic oligonucleotide
  Sense strand starting at position 38 of SEQ ID NO: 1244116
gucuaaccggcagaaaguu

SEQ ID NO: 1465997 - RNA, 19 nt, Artificial Sequence
  Description of Artificial Sequence: Synthetic oligonucleotide
  Antisense strand to SEQ ID NO: 1465996
aacuuucugccgguuagac

SEQ ID NO: 1465998 - RNA, 19 nt, Artificial Sequence
  Description of Artificial Sequence: Synthetic oligonucleotide
  Sense strand starting at position 94 of SEQ ID NO: 1244116
ucuuccuguucucugaaga

SEQ ID NO: 1465999 - RNA, 19 nt, Artificial Sequence
  Description of Artificial Sequence: Synthetic oligonucleotide
  Antisense strand to SEQ ID NO: 1465998
ucuucagagaacaggaaga

SEQ ID NO: 1466000 - RNA, 19 nt, Artificial Sequence
  Description of Artificial Sequence: Synthetic oligonucleotide
  Sense strand starting at position 95 of SEQ ID NO: 1244116
cuuccuguucucugaagaa

SEQ ID NO: 1466001 - RNA, 19 nt, Artificial Sequence
  Description of Artificial Sequence: Synthetic oligonucleotide
  Antisense strand to SEQ ID NO: 1466000
uucuucagagaacaggaag

SEQ ID NO: 1466002 - RNA, 19 nt, Artificial Sequence
  Description of Artificial Sequence: Synthetic oligonucleotide
  Sense strand starting at position 235 of SEQ ID NO: 1244116
ccuuguaaaccugaaagua

SEQ ID NO: 1466003 - RNA, 19 nt, Artificial Sequence
  Description of Artificial Sequence: Synthetic oligonucleotide
  Antisense strand to SEQ ID NO: 1466002
uacuuucagguuuacaagg

SEQ ID NO: 1466004 - RNA, 19 nt, Artificial Sequence
  Description of Artificial Sequence: Synthetic oligonucleotide
  Sense strand starting at position 244 of SEQ ID NO: 1244116
ccugaaaguauugaguugu

SEQ ID NO: 1466005 - RNA, 19 nt, Artificial Sequence
  Description of Artificial Sequence: Synthetic oligonucleotide
  Antisense strand to SEQ ID NO: 1466004
acaacucaauacuuucagg

SEQ ID NO: 1466006 - RNA, 19 nt, Artificial Sequence
  Description of Artificial Sequence: Synthetic oligonucleotide
  Sense strand starting at position 254 of SEQ ID NO: 1244116
uugaguuguaaaggaaugu

SEQ ID NO: 1466007 - RNA, 19 nt, Artificial Sequence
  Description of Artificial Sequence: Synthetic oligonucleotide
  Antisense strand to SEQ ID NO: 1466006
acauuccuuuacaacucaa

SEQ ID NO: 1466008 - RNA, 19 nt, Artificial Sequence
  Description of Artificial Sequence: Synthetic oligonucleotide
  Sense strand starting at position 258 of SEQ ID NO: 1244116
guuguaaaggaaugucauu

SEQ ID NO: 1466009 - RNA, 19 nt, Artificial Sequence
  Description of Artificial Sequence: Synthetic oligonucleotide
  Antisense strand to SEQ ID NO: 1466008
aaugacauuccuuuacaac

SEQ ID NO: 1466010 - RNA, 19 nt, Artificial Sequence
  Description of Artificial Sequence: Synthetic oligonucleotide
  Sense strand starting at position 344 of SEQ ID NO: 1244116
cccugugagauauggcuau

SEQ ID NO: 1466011 - RNA, 19 nt, Artificial Sequence
  Description of Artificial Sequence: Synthetic oligonucleotide
  Antisense strand to SEQ ID NO: 1466010
auagccauaucucacaggg

SEQ ID NO: 1466012 - RNA, 19 nt, Artificial Sequence
  Description of Artificial Sequence: Synthetic oligonucleotide
  Sense strand starting at position 535 of SEQ ID NO: 1244116
cuuaaagaacagugugcaa

SEQ ID NO: 1466013 - RNA, 19 nt, Artificial Sequence
  Description of Artificial Sequence: Synthetic oligonucleotide
  Antisense strand to SEQ ID NO: 1466012
uugcacacuguucuuuaag

SEQ ID NO: 1466014 - RNA, 19 nt, Artificial Sequence
  Description of Artificial Sequence: Synthetic oligonucleotide
  Sense strand starting at position 537 of SEQ ID NO: 1244116
uaaagaacagugugcaauu

SEQ ID NO: 1466015 - RNA, 19 nt, Artificial Sequence
  Description of Artificial Sequence: Synthetic oligonucleotide
  Antisense strand to SEQ ID NO: 1466014
aauugcacacuguucuuua

SEQ ID NO: 1466016 - RNA, 19 nt, Artificial Sequence
  Description of Artificial Sequence: Synthetic oligonucleotide
  Sense strand starting at position 538 of SEQ ID NO: 1244116
aaagaacagugugcaauua

SEQ ID NO: 1466017 - RNA, 19 nt, Artificial Sequence
  Description of Artificial Sequence: Synthetic oligonucleotide
  Antisense strand to SEQ ID NO: 1466016
uaauugcacacuguucuuu

SEQ ID NO: 1466018 - RNA, 19 nt, Artificial Sequence
  Description of Artificial Sequence: Synthetic oligonucleotide
  Sense strand starting at position 548 of SEQ ID NO: 1244116
gugcaauuagcugagacaa

SEQ ID NO: 1466019 - RNA, 19 nt, Artificial Sequence
  Description of Artificial Sequence: Synthetic oligonucleotide
  Antisense strand to SEQ ID NO: 1466018
uugucucagcuaauugcac

SEQ ID NO: 1466020 - RNA, 19 nt, Artificial Sequence
  Description of Artificial Sequence: Synthetic oligonucleotide
  Sense strand starting at position 628 of SEQ ID NO: 1244116
aaggguuccuguccaaaca

SEQ ID NO: 1466021 - RNA, 19 nt, Artificial Sequence
  Description of Artificial Sequence: Synthetic oligonucleotide
  Antisense strand to SEQ ID NO: 1466020
uguuuggacaggaacccuu

SEQ ID NO: 1466022 - RNA, 19 nt, Artificial Sequence
  Description of Artificial Sequence: Synthetic oligonucleotide
  Sense strand starting at position 799 of SEQ ID NO: 1244116
ggaugaacucacugggcaa

SEQ ID NO: 1466023 - RNA, 19 nt, Artificial Sequence
  Description of Artificial Sequence: Synthetic oligonucleotide
  Antisense strand to SEQ ID NO: 1466022
uugcccagugaguucaucc

SEQ ID NO: 1466024 - RNA, 19 nt, Artificial Sequence
  Description of Artificial Sequence: Synthetic oligonucleotide
  Sense strand starting at position 929 of SEQ ID NO: 1244116
uagaaaugagcgcagggau

SEQ ID NO: 1466025 - RNA, 19 nt, Artificial Sequence
  Description of Artificial Sequence: Synthetic oligonucleotide
  Antisense strand to SEQ ID NO: 1466024
aucccugcgcucauuucua

SEQ ID NO: 1466026 - RNA, 19 nt, Artificial Sequence
  Description of Artificial Sequence: Synthetic oligonucleotide
  Sense strand starting at position 1362 of SEQ ID NO: 1244116
gaagguuccgauuaacgaa

SEQ ID NO: 1466027 - RNA, 19 nt, Artificial Sequence
  Description of Artificial Sequence: Synthetic oligonucleotide
  Antisense strand to SEQ ID NO: 1466026
uucguuaaucggaaccuuc

SEQ ID NO: 1466028 - RNA, 19 nt, Artificial Sequence
  Description of Artificial Sequence: Synthetic oligonucleotide
  Sense strand starting at position 1841 of SEQ ID NO: 1244116
ggccgaucgacgccuuuau

SEQ ID NO: 1466029 - RNA, 19 nt, Artificial Sequence
  Description of Artificial Sequence: Synthetic oligonucleotide
  Antisense strand to SEQ ID NO: 1466028
auaaaggcgucgaucggcc

SEQ ID NO: 1466030 - RNA, 19 nt, Artificial Sequence
  Description of Artificial Sequence: Synthetic oligonucleotide
  Sense strand starting at position 1842 of SEQ ID NO: 1244116
gccgaucgacgccuuuaua

SEQ ID NO: 1466031 - RNA, 19 nt, Artificial Sequence
  Description of Artificial Sequence: Synthetic oligonucleotide
  Antisense strand to SEQ ID NO: 1466030
uauaaaggcgucgaucggc

SEQ ID NO: 1466032 - RNA, 19 nt, Artificial Sequence
  Description of Artificial Sequence: Synthetic oligonucleotide
  Sense strand starting at position 2200 of SEQ ID NO: 1244116
uguuacuguucucucauuu

SEQ ID NO: 1466033 - RNA, 19 nt, Artificial Sequence
  Description of Artificial Sequence: Synthetic oligonucleotide
  Antisense strand to SEQ ID NO: 1466032
aaaugagagaacaguaaca

SEQ ID NO: 1466034 - RNA, 19 nt, Artificial Sequence
  Description of Artificial Sequence: Synthetic oligonucleotide
  Sense strand starting at position 2446 of SEQ ID NO: 1244116
gugcauguacuggaccaaa

SEQ ID NO: 1466035 - RNA, 19 nt, Artificial Sequence
  Description of Artificial Sequence: Synthetic oligonucleotide
  Antisense strand to SEQ ID NO: 1466034
uuugguccaguacaugcac

SEQ ID NO: 1466036 - RNA, 19 nt, Artificial Sequence
  Description of Artificial Sequence: Synthetic oligonucleotide
  Sense strand starting at position 2490 of SEQ ID NO: 1244116
cuauucuaaggcugguuaa

SEQ ID NO: 1466037 - RNA, 19 nt, Artificial Sequence
  Description of Artificial Sequence: Synthetic oligonucleotide
  Antisense strand to SEQ ID NO: 1466036
uuaaccagccuuagaauag

SEQ ID NO: 1466038 - RNA, 19 nt, Artificial Sequence
  Description of Artificial Sequence: Synthetic oligonucleotide
  Sense strand starting at position 2491 of SEQ ID NO: 1244116
uauucuaaggcugguuaau

SEQ ID NO: 1466039 - RNA, 19 nt, Artificial Sequence
  Description of Artificial Sequence: Synthetic oligonucleotide
  Antisense strand to SEQ ID NO: 1466038
auuaaccagccuuagaaua

SEQ ID NO: 1466040 - RNA, 19 nt, Artificial Sequence
  Description of Artificial Sequence: Synthetic oligonucleotide
  Sense strand starting at position 2566 of SEQ ID NO: 1244116
gccucugcagcuguuuaua

SEQ ID NO: 1466041 - RNA, 19 nt, Artificial Sequence
  Description of Artificial Sequence: Synthetic oligonucleotide
  Antisense strand to SEQ ID NO: 1466040
uauaaacagcugcagaggc

SEQ ID NO: 1466042 - RNA, 19 nt, Artificial Sequence
  Description of Artificial Sequence: Synthetic oligonucleotide
  Sense strand starting at position 2578 of SEQ ID NO: 1244116
guuuauaacccuuaaguca

SEQ ID NO: 1466043 - RNA, 19 nt, Artificial Sequence
  Description of Artificial Sequence: Synthetic oligonucleotide
  Antisense strand to SEQ ID NO: 1466042
ugacuuaaggguuauaaac

SEQ ID NO: 1466044 - RNA, 19 nt, Artificial Sequence
  Description of Artificial Sequence: Synthetic oligonucleotide
  Sense strand starting at position 2604 of SEQ ID NO: 1244116
uccaccugucuggguaaau

SEQ ID NO: 1466045 - RNA, 19 nt, Artificial Sequence
  Description of Artificial Sequence: Synthetic oligonucleotide
  Antisense strand to SEQ ID NO: 1466044
auuuacccagacaggugga

SEQ ID NO: 1466046 - RNA, 19 nt, Artificial Sequence
  Description of Artificial Sequence: Synthetic oligonucleotide
  Sense strand starting at position 2605 of SEQ ID NO: 1244116
ccaccugucuggguaaauc

SEQ ID NO: 1466047 - RNA, 19 nt, Artificial Sequence
  Description of Artificial Sequence: Synthetic oligonucleotide
  Antisense strand to SEQ ID NO: 1466046
gauuuacccagacaggugg

SEQ ID NO: 1466048 - RNA, 19 nt, Artificial Sequence
  Description of Artificial Sequence: Synthetic oligonucleotide
  Sense strand starting at position 2616 of SEQ ID NO: 1244116
gguaaaucuauccaugcga

SEQ ID NO: 1466049 - RNA, 19 nt, Artificial Sequence
  Description of Artificial Sequence: Synthetic oligonucleotide
  Antisense strand to SEQ ID NO: 1466048
ucgcauggauagauuuacc

SEQ ID NO: 1466050 - RNA, 19 nt, Artificial Sequence
  Description of Artificial Sequence: Synthetic oligonucleotide
  Sense strand starting at position 2675 of SEQ ID NO: 1244116
acaagaucauaauaggaaa

SEQ ID NO: 1466051 - RNA, 19 nt, Artificial Sequence
  Description of Artificial Sequence: Synthetic oligonucleotide
  Antisense strand to SEQ ID NO: 1466050
uuuccuauuaugaucuugu

SEQ ID NO: 1466052 - RNA, 19 nt, Artificial Sequence
  Description of Artificial Sequence: Synthetic oligonucleotide
  Sense strand starting at position 2686 of SEQ ID NO: 1244116
auaggaaagccuugggcaa

SEQ ID NO: 1466053 - RNA, 19 nt, Artificial Sequence
  Description of Artificial Sequence: Synthetic oligonucleotide
  Antisense strand to SEQ ID NO: 1466052
uugcccaaggcuuuccuau

SEQ ID NO: 1466054 - RNA, 19 nt, Artificial Sequence
  Description of Artificial Sequence: Synthetic oligonucleotide
  Sense strand starting at position 2687 of SEQ ID NO: 1244116
uaggaaagccuugggcaaa

SEQ ID NO: 1466055 - RNA, 19 nt, Artificial Sequence
  Description of Artificial Sequence: Synthetic oligonucleotide
  Antisense strand to SEQ ID NO: 1466054
uuugcccaaggcuuuccua

SEQ ID NO: 1466056 - RNA, 19 nt, Artificial Sequence
  Description of Artificial Sequence: Synthetic oligonucleotide
  Sense strand starting at position 2831 of SEQ ID NO: 1244116
uuguauucugggcagucua

SEQ ID NO: 1466057 - RNA, 19 nt, Artificial Sequence
  Description of Artificial Sequence: Synthetic oligonucleotide
  Antisense strand to SEQ ID NO: 1466056
uagacugcccagaauacaa

SEQ ID NO: 1466058 - RNA, 19 nt, Artificial Sequence
  Description of Artificial Sequence: Synthetic oligonucleotide
  Sense strand starting at position 2890 of SEQ ID NO: 1244116
gugagaaguucuguucuag

SEQ ID NO: 1466059 - RNA, 19 nt, Artificial Sequence
  Description of Artificial Sequence: Synthetic oligonucleotide
  Antisense strand to SEQ ID NO: 1466058
cuagaacagaacuucucac

SEQ ID NO: 1466060 - RNA, 19 nt, Artificial Sequence
  Description of Artificial Sequence: Synthetic oligonucleotide
  Sense strand starting at position 2896 of SEQ ID NO: 1244116
aguucuguucuagaaagca

SEQ ID NO: 1466061 - RNA, 19 nt, Artificial Sequence
  Description of Artificial Sequence: Synthetic oligonucleotide
  Antisense strand to SEQ ID NO: 1466060
ugcuuucuagaacagaacu

SEQ ID NO: 1466062 - RNA, 19 nt, Artificial Sequence
  Description of Artificial Sequence: Synthetic oligonucleotide
  Sense strand starting at position 2904 of SEQ ID NO: 1244116
ucuagaaagcacggaugau

SEQ ID NO: 1466063 - RNA, 19 nt, Artificial Sequence
  Description of Artificial Sequence: Synthetic oligonucleotide
  Antisense strand to SEQ ID NO: 1466062
aucauccgugcuuucuaga

SEQ ID NO: 1466064 - RNA, 19 nt, Artificial Sequence
  Description of Artificial Sequence: Synthetic oligonucleotide
  Sense strand starting at position 2919 of SEQ ID NO: 1244116
ugaugcauuuaugugcuua

SEQ ID NO: 1466065 - RNA, 19 nt, Artificial Sequence
  Description of Artificial Sequence: Synthetic oligonucleotide
  Antisense strand to SEQ ID NO: 1466064
uaagcacauaaaugcauca

SEQ ID NO: 1466066 - RNA, 19 nt, Artificial Sequence
  Description of Artificial Sequence: Synthetic oligonucleotide
  Sense strand starting at position 2923 of SEQ ID NO: 1244116
gcauuuaugugcuuaccac

SEQ ID NO: 1466067 - RNA, 19 nt, Artificial Sequence
  Description of Artificial Sequence: Synthetic oligonucleotide
  Antisense strand to SEQ ID NO: 1466066
gugguaagcacauaaaugc

SEQ ID NO: 1466068 - RNA, 19 nt, Artificial Sequence
  Description of Artificial Sequence: Synthetic oligonucleotide
  Sense strand starting at position 3478 of SEQ ID NO: 1244116
uguaguuuauuaguagaga

SEQ ID NO: 1466069 - RNA, 19 nt, Artificial Sequence
  Description of Artificial Sequence: Synthetic oligonucleotide
  Antisense strand to SEQ ID NO: 1466068
ucucuacuaauaaacuaca

SEQ ID NO: 1466070 - RNA, 19 nt, Artificial Sequence
  Description of Artificial Sequence: Synthetic oligonucleotide
  Sense strand starting at position 25 of SEQ ID NO: 1244117
guccauguacuguaaauag

SEQ ID NO: 1466071 - RNA, 19 nt, Artificial Sequence
  Description of Artificial Sequence: Synthetic oligonucleotide
  Antisense strand to SEQ ID NO: 1466070
cuauuuacaguacauggac

SEQ ID NO: 1466072 - RNA, 19 nt, Artificial Sequence
  Description of Artificial Sequence: Synthetic oligonucleotide
  Sense strand starting at position 254 of SEQ ID NO: 1244117
gucccuagagcauaauauu

SEQ ID NO: 1466073 - RNA, 19 nt, Artificial Sequence
  Description of Artificial Sequence: Synthetic oligonucleotide
  Antisense strand to SEQ ID NO: 1466072
aauauuaugcucuagggac

SEQ ID NO: 1466074 - RNA, 19 nt, Artificial Sequence
  Description of Artificial Sequence: Synthetic oligonucleotide
  Sense strand starting at position 458 of SEQ ID NO: 1244117
uuaucauuccgacgacuga

SEQ ID NO: 1466075 - RNA, 19 nt, Artificial Sequence
  Description of Artificial Sequence: Synthetic oligonucleotide
  Antisense strand to SEQ ID NO: 1466074
ucagucgucggaaugauaa

SEQ ID NO: 1466076 - RNA, 19 nt, Artificial Sequence
  Description of Artificial Sequence: Synthetic oligonucleotide
  Sense strand starting at position 459 of SEQ ID NO: 1244117
uaucauuccgacgacugaa

SEQ ID NO: 1466077 - RNA, 19 nt, Artificial Sequence
  Description of Artificial Sequence: Synthetic oligonucleotide
  Antisense strand to SEQ ID NO: 1466076
uucagucgucggaaugaua

SEQ ID NO: 1466078 - RNA, 19 nt, Artificial Sequence
  Description of Artificial Sequence: Synthetic oligonucleotide
  Sense strand starting at position 474 of SEQ ID NO: 1244117
ugaagucuaaccggcagaa

SEQ ID NO: 1466079 - RNA, 19 nt, Artificial Sequence
  Description of Artificial Sequence: Synthetic oligonucleotide
  Antisense strand to SEQ ID NO: 1466078
uucugccgguuagacuuca

SEQ ID NO: 1466080 - RNA, 19 nt, Artificial Sequence
  Description of Artificial Sequence: Synthetic oligonucleotide
  Sense strand starting at position 478 of SEQ ID NO: 1244117
gucuaaccggcagaaaguu

SEQ ID NO: 1466081 - RNA, 19 nt, Artificial Sequence
  Description of Artificial Sequence: Synthetic oligonucleotide
  Antisense strand to SEQ ID NO: 1466080
aacuuucugccgguuagac

SEQ ID NO: 1466082 - RNA, 19 nt, Artificial Sequence
  Description of Artificial Sequence: Synthetic oligonucleotide
  Sense strand starting at position 534 of SEQ ID NO: 1244117
ucuuccuguucucugaaga

SEQ ID NO: 1466083 - RNA, 19 nt, Artificial Sequence
  Description of Artificial Sequence: Synthetic oligonucleotide
  Antisense strand to SEQ ID NO: 1466082
ucuucagagaacaggaaga

SEQ ID NO: 1466084 - RNA, 19 nt, Artificial Sequence
  Description of Artificial Sequence: Synthetic oligonucleotide
  Sense strand starting at position 535 of SEQ ID NO: 1244117
cuuccuguucucugaagaa

SEQ ID NO: 1466085 - RNA, 19 nt, Artificial Sequence
  Description of Artificial Sequence: Synthetic oligonucleotide
  Antisense strand to SEQ ID NO: 1466084
uucuucagagaacaggaag

SEQ ID NO: 1466086 - RNA, 19 nt, Artificial Sequence
  Description of Artificial Sequence: Synthetic oligonucleotide
  Sense strand starting at position 675 of SEQ ID NO: 1244117
ccuuguaaaccugaaagua

SEQ ID NO: 1466087 - RNA, 19 nt, Artificial Sequence
  Description of Artificial Sequence: Synthetic oligonucleotide
  Antisense strand to SEQ ID NO: 1466086
uacuuucagguuuacaagg

SEQ ID NO: 1466088 - RNA, 19 nt, Artificial Sequence
  Description of Artificial Sequence: Synthetic oligonucleotide
  Sense strand starting at position 684 of SEQ ID NO: 1244117
ccugaaaguauugaguugu

SEQ ID NO: 1466089 - RNA, 19 nt, Artificial Sequence
  Description of Artificial Sequence: Synthetic oligonucleotide
  Antisense strand to SEQ ID NO: 1466088
acaacucaauacuuucagg

SEQ ID NO: 1466090 - RNA, 19 nt, Artificial Sequence
  Description of Artificial Sequence: Synthetic oligonucleotide
  Sense strand starting at position 694 of SEQ ID NO: 1244117
uugaguuguaaaggaaugu

SEQ ID NO: 1466091 - RNA, 19 nt, Artificial Sequence
  Description of Artificial Sequence: Synthetic oligonucleotide
  Antisense strand to SEQ ID NO: 1466090
acauuccuuuacaacucaa

SEQ ID NO: 1466092 - RNA, 19 nt, Artificial Sequence
  Description of Artificial Sequence: Synthetic oligonucleotide
  Sense strand starting at position 698 of SEQ ID NO: 1244117
guuguaaaggaaugucauu

SEQ ID NO: 1466093 - RNA, 19 nt, Artificial Sequence
  Description of Artificial Sequence: Synthetic oligonucleotide
  Antisense strand to SEQ ID NO: 1466092
aaugacauuccuuuacaac

SEQ ID NO: 1466094 - RNA, 19 nt, Artificial Sequence
  Description of Artificial Sequence: Synthetic oligonucleotide
  Sense strand starting at position 784 of SEQ ID NO: 1244117
cccugugagauauggcuau

SEQ ID NO: 1466095 - RNA, 19 nt, Artificial Sequence
  Description of Artificial Sequence: Synthetic oligonucleotide
  Antisense strand to SEQ ID NO: 1466094
auagccauaucucacaggg

SEQ ID NO: 1466096 - RNA, 19 nt, Artificial Sequence
  Description of Artificial Sequence: Synthetic oligonucleotide
  Sense strand starting at position 975 of SEQ ID NO: 1244117
cuuaaagaacagugugcaa

SEQ ID NO: 1466097 - RNA, 19 nt, Artificial Sequence
  Description of Artificial Sequence: Synthetic oligonucleotide
  Antisense strand to SEQ ID NO: 1466096
uugcacacuguucuuuaag

SEQ ID NO: 1466098 - RNA, 19 nt, Artificial Sequence
  Description of Artificial Sequence: Synthetic oligonucleotide
  Sense strand starting at position 977 of SEQ ID NO: 1244117
uaaagaacagugugcaauu

SEQ ID NO: 1466099 - RNA, 19 nt, Artificial Sequence
  Description of Artificial Sequence: Synthetic oligonucleotide
  Antisense strand to SEQ ID NO: 1466098
aauugcacacuguucuuua

SEQ ID NO: 1466100 - RNA, 19 nt, Artificial Sequence
  Description of Artificial Sequence: Synthetic oligonucleotide
  Sense strand starting at position 978 of SEQ ID NO: 1244117
aaagaacagugugcaauua

SEQ ID NO: 1466101 - RNA, 19 nt, Artificial Sequence
  Description of Artificial Sequence: Synthetic oligonucleotide
  Antisense strand to SEQ ID NO: 1466100
uaauugcacacuguucuuu

SEQ ID NO: 1466102 - RNA, 19 nt, Artificial Sequence
  Description of Artificial Sequence: Synthetic oligonucleotide
  Sense strand starting at position 988 of SEQ ID NO: 1244117
gugcaauuagcugagacaa

SEQ ID NO: 1466103 - RNA, 19 nt, Artificial Sequence
  Description of Artificial Sequence: Synthetic oligonucleotide
  Antisense strand to SEQ ID NO: 1466102
uugucucagcuaauugcac

SEQ ID NO: 1466104 - RNA, 19 nt, Artificial Sequence
  Description of Artificial Sequence: Synthetic oligonucleotide
  Sense strand starting at position 1068 of SEQ ID NO: 1244117
aaggguuccuguccaaaca

SEQ ID NO: 1466105 - RNA, 19 nt, Artificial Sequence
  Description of Artificial Sequence: Synthetic oligonucleotide
  Antisense strand to SEQ ID NO: 1466104
uguuuggacaggaacccuu

SEQ ID NO: 1466106 - RNA, 19 nt, Artificial Sequence
  Description of Artificial Sequence: Synthetic oligonucleotide
  Sense strand starting at position 1239 of SEQ ID NO: 1244117
ggaugaacucacugggcaa

SEQ ID NO: 1466107 - RNA, 19 nt, Artificial Sequence
  Description of Artificial Sequence: Synthetic oligonucleotide
  Antisense strand to SEQ ID NO: 1466106
uugcccagugaguucaucc

SEQ ID NO: 1466108 - RNA, 19 nt, Artificial Sequence
  Description of Artificial Sequence: Synthetic oligonucleotide
  Sense strand starting at position 1369 of SEQ ID NO: 1244117
uagaaaugagcgcagggau

SEQ ID NO: 1466109 - RNA, 19 nt, Artificial Sequence
  Description of Artificial Sequence: Synthetic oligonucleotide
  Antisense strand to SEQ ID NO: 1466108
aucccugcgcucauuucua

SEQ ID NO: 1466110 - RNA, 19 nt, Artificial Sequence
  Description of Artificial Sequence: Synthetic oligonucleotide
  Sense strand starting at position 1802 of SEQ ID NO: 1244117
gaagguuccgauuaacgaa

SEQ ID NO: 1466111 - RNA, 19 nt, Artificial Sequence
  Description of Artificial Sequence: Synthetic oligonucleotide
  Antisense strand to SEQ ID NO: 1466110
uucguuaaucggaaccuuc

SEQ ID NO: 1466112 - RNA, 19 nt, Artificial Sequence
  Description of Artificial Sequence: Synthetic oligonucleotide
  Sense strand starting at position 2281 of SEQ ID NO: 1244117
ggccgaucgacgccuuuau

SEQ ID NO: 1466113 - RNA, 19 nt, Artificial Sequence
  Description of Artificial Sequence: Synthetic oligonucleotide
  Antisense strand to SEQ ID NO: 1466112
auaaaggcgucgaucggcc

SEQ ID NO: 1466114 - RNA, 19 nt, Artificial Sequence
  Description of Artificial Sequence: Synthetic oligonucleotide
  Sense strand starting at position 2282 of SEQ ID NO: 1244117
gccgaucgacgccuuuaua

SEQ ID NO: 1466115 - RNA, 19 nt, Artificial Sequence
  Description of Artificial Sequence: Synthetic oligonucleotide
  Antisense strand to SEQ ID NO: 1466114
uauaaaggcgucgaucggc

SEQ ID NO: 1466116 - RNA, 19 nt, Artificial Sequence
  Description of Artificial Sequence: Synthetic oligonucleotide
  Sense strand starting at position 2640 of SEQ ID NO: 1244117
uguuacuguucucucauuu

SEQ ID NO: 1466117 - RNA, 19 nt, Artificial Sequence
  Description of Artificial Sequence: Synthetic oligonucleotide
  Antisense strand to SEQ ID NO: 1466116
aaaugagagaacaguaaca

SEQ ID NO: 1466118 - RNA, 19 nt, Artificial Sequence
  Description of Artificial Sequence: Synthetic oligonucleotide
  Sense strand starting at position 2886 of SEQ ID NO: 1244117
gugcauguacuggaccaaa

SEQ ID NO: 1466119 - RNA, 19 nt, Artificial Sequence
  Description of Artificial Sequence: Synthetic oligonucleotide
  Antisense strand to SEQ ID NO: 1466118
uuugguccaguacaugcac

SEQ ID NO: 1466120 - RNA, 19 nt, Artificial Sequence
  Description of Artificial Sequence: Synthetic oligonucleotide
  Sense strand starting at position 2930 of SEQ ID NO: 1244117
cuauucuaaggcugguuaa

SEQ ID NO: 1466121 - RNA, 19 nt, Artificial Sequence
  Description of Artificial Sequence: Synthetic oligonucleotide
  Antisense strand to SEQ ID NO: 1466120
uuaaccagccuuagaauag

SEQ ID NO: 1466122 - RNA, 19 nt, Artificial Sequence
  Description of Artificial Sequence: Synthetic oligonucleotide
  Sense strand starting at position 2931 of SEQ ID NO: 1244117
uauucuaaggcugguuaau

SEQ ID NO: 1466123 - RNA, 19 nt, Artificial Sequence
  Description of Artificial Sequence: Synthetic oligonucleotide
  Antisense strand to SEQ ID NO: 1466122
auuaaccagccuuagaaua

SEQ ID NO: 1466124 - RNA, 19 nt, Artificial Sequence
  Description of Artificial Sequence: Synthetic oligonucleotide
  Sense strand starting at position 3006 of SEQ ID NO: 1244117
gccucugcagcuguuuaua

SEQ ID NO: 1466125 - RNA, 19 nt, Artificial Sequence
  Description of Artificial Sequence: Synthetic oligonucleotide
  Antisense strand to SEQ ID NO: 1466124
uauaaacagcugcagaggc

SEQ ID NO: 1466126 - RNA, 19 nt, Artificial Sequence
  Description of Artificial Sequence: Synthetic oligonucleotide
  Sense strand starting at position 3018 of SEQ ID NO: 1244117
guuuauaacccuuaaguca

SEQ ID NO: 1466127 - RNA, 19 nt, Artificial Sequence
  Description of Artificial Sequence: Synthetic oligonucleotide
  Antisense strand to SEQ ID NO: 1466126
ugacuuaaggguuauaaac

SEQ ID NO: 1466128 - RNA, 19 nt, Artificial Sequence
  Description of Artificial Sequence: Synthetic oligonucleotide
  Sense strand starting at position 3044 of SEQ ID NO: 1244117
uccaccugucuggguaaau

SEQ ID NO: 1466129 - RNA, 19 nt, Artificial Sequence
  Description of Artificial Sequence: Synthetic oligonucleotide
  Antisense strand to SEQ ID NO: 1466128
auuuacccagacaggugga

SEQ ID NO: 1466130 - RNA, 19 nt, Artificial Sequence
  Description of Artificial Sequence: Synthetic oligonucleotide
  Sense strand starting at position 3045 of SEQ ID NO: 1244117
ccaccugucuggguaaauc

SEQ ID NO: 1466131 - RNA, 19 nt, Artificial Sequence
  Description of Artificial Sequence: Synthetic oligonucleotide
  Antisense strand to SEQ ID NO: 1466130
gauuuacccagacaggugg

SEQ ID NO: 1466132 - RNA, 19 nt, Artificial Sequence
  Description of Artificial Sequence: Synthetic oligonucleotide
  Sense strand starting at position 3056 of SEQ ID NO: 1244117
gguaaaucuauccaugcga

SEQ ID NO: 1466133 - RNA, 19 nt, Artificial Sequence
  Description of Artificial Sequence: Synthetic oligonucleotide
  Antisense strand to SEQ ID NO: 1466132
ucgcauggauagauuuacc

SEQ ID NO: 1466134 - RNA, 19 nt, Artificial Sequence
  Description of Artificial Sequence: Synthetic oligonucleotide
  Sense strand starting at position 3115 of SEQ ID NO: 1244117
acaagaucauaauaggaaa

SEQ ID NO: 1466135 - RNA, 19 nt, Artificial Sequence
  Description of Artificial Sequence: Synthetic oligonucleotide
  Antisense strand to SEQ ID NO: 1466134
uuuccuauuaugaucuugu

SEQ ID NO: 1466136 - RNA, 19 nt, Artificial Sequence
  Description of Artificial Sequence: Synthetic oligonucleotide
  Sense strand starting at position 3126 of SEQ ID NO: 1244117
auaggaaagccuugggcaa

SEQ ID NO: 1466137 - RNA, 19 nt, Artificial Sequence
  Description of Artificial Sequence: Synthetic oligonucleotide
  Antisense strand to SEQ ID NO: 1466136
uugcccaaggcuuuccuau

SEQ ID NO: 1466138 - RNA, 19 nt, Artificial Sequence
  Description of Artificial Sequence: Synthetic oligonucleotide
  Sense strand starting at position 3127 of SEQ ID NO: 1244117
uaggaaagccuugggcaaa

SEQ ID NO: 1466139 - RNA, 19 nt, Artificial Sequence
  Description of Artificial Sequence: Synthetic oligonucleotide
  Antisense strand to SEQ ID NO: 1466138
uuugcccaaggcuuuccua

SEQ ID NO: 1466140 - RNA, 19 nt, Artificial Sequence
  Description of Artificial Sequence: Synthetic oligonucleotide
  Sense strand starting at position 3336 of SEQ ID NO: 1244117
aguucuguucuagaaagca

SEQ ID NO: 1466141 - RNA, 19 nt, Artificial Sequence
  Description of Artificial Sequence: Synthetic oligonucleotide
  Antisense strand to SEQ ID NO: 1466140
ugcuuucuagaacagaacu

SEQ ID NO: 1466142 - RNA, 19 nt, Artificial Sequence
  Description of Artificial Sequence: Synthetic oligonucleotide
  Sense strand starting at position 3344 of SEQ ID NO: 1244117
ucuagaaagcacggaugau

SEQ ID NO: 1466143 - RNA, 19 nt, Artificial Sequence
  Description of Artificial Sequence: Synthetic oligonucleotide
  Antisense strand to SEQ ID NO: 1466142
aucauccgugcuuucuaga

SEQ ID NO: 1466144 - RNA, 19 nt, Artificial Sequence
  Description of Artificial Sequence: Synthetic oligonucleotide
  Sense strand starting at position 3359 of SEQ ID NO: 1244117
ugaugcauuuaugugcuua

SEQ ID NO: 1466145 - RNA, 19 nt, Artificial Sequence
  Description of Artificial Sequence: Synthetic oligonucleotide
  Antisense strand to SEQ ID NO: 1466144
uaagcacauaaaugcauca

SEQ ID NO: 1466146 - RNA, 19 nt, Artificial Sequence
  Description of Artificial Sequence: Synthetic oligonucleotide
  Sense strand starting at position 3363 of SEQ ID NO: 1244117
gcauuuaugugcuuaccac

SEQ ID NO: 1466147 - RNA, 19 nt, Artificial Sequence
  Description of Artificial Sequence: Synthetic oligonucleotide
  Antisense strand to SEQ ID NO: 1466146
gugguaagcacauaaaugc

SEQ ID NO: 1466148 - RNA, 19 nt, Artificial Sequence
  Description of Artificial Sequence: Synthetic oligonucleotide
  Sense strand starting at position 3918 of SEQ ID NO: 1244117
uguaguuuauuaguagaga

SEQ ID NO: 1466149 - RNA, 19 nt, Artificial Sequence
  Description of Artificial Sequence: Synthetic oligonucleotide
  Antisense strand to SEQ ID NO: 1466148
ucucuacuaauaaacuaca

SEQ ID NO: 1466150 - RNA, 19 nt, Artificial Sequence
  Description of Artificial Sequence: Synthetic oligonucleotide
  Sense strand starting at position 182 of SEQ ID NO: 1244118
gugaaacugucuguacuac

SEQ ID NO: 1466151 - RNA, 19 nt, Artificial Sequence
  Description of Artificial Sequence: Synthetic oligonucleotide
  Antisense strand to SEQ ID NO: 1466150
guaguacagacaguuucac

SEQ ID NO: 1466152 - RNA, 19 nt, Artificial Sequence
  Description of Artificial Sequence: Synthetic oligonucleotide
  Sense strand starting at position 183 of SEQ ID NO: 1244118
ugaaacugucuguacuaca

SEQ ID NO: 1466153 - RNA, 19 nt, Artificial Sequence
  Description of Artificial Sequence: Synthetic oligonucleotide
  Antisense strand to SEQ ID NO: 1466152
uguaguacagacaguuuca

SEQ ID NO: 1466154 - RNA, 19 nt, Artificial Sequence
  Description of Artificial Sequence: Synthetic oligonucleotide
  Sense strand starting at position 825 of SEQ ID NO: 1244118
agagaccauuuguaauagu

SEQ ID NO: 1466155 - RNA, 19 nt, Artificial Sequence
  Description of Artificial Sequence: Synthetic oligonucleotide
  Antisense strand to SEQ ID NO: 1466154
acuauuacaaauggucucu

SEQ ID NO: 1466156 - RNA, 19 nt, Artificial Sequence
  Description of Artificial Sequence: Synthetic oligonucleotide
  Sense strand starting at position 828 of SEQ ID NO: 1244118
gaccauuuguaauagugag

SEQ ID NO: 1466157 - RNA, 19 nt, Artificial Sequence
  Description of Artificial Sequence: Synthetic oligonucleotide
  Antisense strand to SEQ ID NO: 1466156
cucacuauuacaaaugguc

SEQ ID NO: 1466158 - RNA, 19 nt, Artificial Sequence
  Description of Artificial Sequence: Synthetic oligonucleotide
  Sense strand starting at position 877 of SEQ ID NO: 1244118
ggcagaaaguaucucaaug

SEQ ID NO: 1466159 - RNA, 19 nt, Artificial Sequence
  Description of Artificial Sequence: Synthetic oligonucleotide
  Antisense strand to SEQ ID NO: 1466158
cauugagauacuuucugcc

SEQ ID NO: 1466160 - RNA, 19 nt, Artificial Sequence
  Description of Artificial Sequence: Synthetic oligonucleotide
  Sense strand starting at position 975 of SEQ ID NO: 1244118
guccauguacuguaaauag

SEQ ID NO: 1466161 - RNA, 19 nt, Artificial Sequence
  Description of Artificial Sequence: Synthetic oligonucleotide
  Antisense strand to SEQ ID NO: 1466160
cuauuuacaguacauggac

SEQ ID NO: 1466162 - RNA, 19 nt, Artificial Sequence
  Description of Artificial Sequence: Synthetic oligonucleotide
  Sense strand starting at position 1038 of SEQ ID NO: 1244118
ccugaaguuucuguauauc

SEQ ID NO: 1466163 - RNA, 19 nt, Artificial Sequence
  Description of Artificial Sequence: Synthetic oligonucleotide
  Antisense strand to SEQ ID NO: 1466162
gauauacagaaacuucagg

SEQ ID NO: 1466164 - RNA, 19 nt, Artificial Sequence
  Description of Artificial Sequence: Synthetic oligonucleotide
  Sense strand starting at position 1140 of SEQ ID NO: 1244118
agaauuaggugagaauaua

SEQ ID NO: 1466165 - RNA, 19 nt, Artificial Sequence
  Description of Artificial Sequence: Synthetic oligonucleotide
  Antisense strand to SEQ ID NO: 1466164
uauauucucaccuaauucu

SEQ ID NO: 1466166 - RNA, 19 nt, Artificial Sequence
  Description of Artificial Sequence: Synthetic oligonucleotide
  Sense strand starting at position 1204 of SEQ ID NO: 1244118
gucccuagagcauaauauu

SEQ ID NO: 1466167 - RNA, 19 nt, Artificial Sequence
  Description of Artificial Sequence: Synthetic oligonucleotide
  Antisense strand to SEQ ID NO: 1466166
aauauuaugcucuagggac

SEQ ID NO: 1466168 - RNA, 19 nt, Artificial Sequence
  Description of Artificial Sequence: Synthetic oligonucleotide
  Sense strand starting at position 1408 of SEQ ID NO: 1244118
uuaucauuccgacgacuga

SEQ ID NO: 1466169 - RNA, 19 nt, Artificial Sequence
  Description of Artificial Sequence: Synthetic oligonucleotide
  Antisense strand to SEQ ID NO: 1466168
ucagucgucggaaugauaa

SEQ ID NO: 1466170 - RNA, 19 nt, Artificial Sequence
  Description of Artificial Sequence: Synthetic oligonucleotide
  Sense strand starting at position 1409 of SEQ ID NO: 1244118
uaucauuccgacgacugaa

SEQ ID NO: 1466171 - RNA, 19 nt, Artificial Sequence
  Description of Artificial Sequence: Synthetic oligonucleotide
  Antisense strand to SEQ ID NO: 1466170
uucagucgucggaaugaua

SEQ ID NO: 1466172 - RNA, 19 nt, Artificial Sequence
  Description of Artificial Sequence: Synthetic oligonucleotide
  Sense strand starting at position 1424 of SEQ ID NO: 1244118
ugaagucuaaccggcagaa

SEQ ID NO: 1466173 - RNA, 19 nt, Artificial Sequence
  Description of Artificial Sequence: Synthetic oligonucleotide
  Antisense strand to SEQ ID NO: 1466172
uucugccgguuagacuuca

SEQ ID NO: 1466174 - RNA, 19 nt, Artificial Sequence
  Description of Artificial Sequence: Synthetic oligonucleotide
  Sense strand starting at position 1428 of SEQ ID NO: 1244118
gucuaaccggcagaaaguu

SEQ ID NO: 1466175 - RNA, 19 nt, Artificial Sequence
  Description of Artificial Sequence: Synthetic oligonucleotide
  Antisense strand to SEQ ID NO: 1466174
aacuuucugccgguuagac

SEQ ID NO: 1466176 - RNA, 19 nt, Artificial Sequence
  Description of Artificial Sequence: Synthetic oligonucleotide
  Sense strand starting at position 1484 of SEQ ID NO: 1244118
ucuuccuguucucugaaga

SEQ ID NO: 1466177 - RNA, 19 nt, Artificial Sequence
  Description of Artificial Sequence: Synthetic oligonucleotide
  Antisense strand to SEQ ID NO: 1466176
ucuucagagaacaggaaga

SEQ ID NO: 1466178 - RNA, 19 nt, Artificial Sequence
  Description of Artificial Sequence: Synthetic oligonucleotide
  Sense strand starting at position 1485 of SEQ ID NO: 1244118
cuuccuguucucugaagaa

SEQ ID NO: 1466179 - RNA, 19 nt, Artificial Sequence
  Description of Artificial Sequence: Synthetic oligonucleotide
  Antisense strand to SEQ ID NO: 1466178
uucuucagagaacaggaag

SEQ ID NO: 1466180 - RNA, 19 nt, Artificial Sequence
  Description of Artificial Sequence: Synthetic oligonucleotide
  Sense strand starting at position 1625 of SEQ ID NO: 1244118
ccuuguaaaccugaaagua

SEQ ID NO: 1466181 - RNA, 19 nt, Artificial Sequence
  Description of Artificial Sequence: Synthetic oligonucleotide
  Antisense strand to SEQ ID NO: 1466180
uacuuucagguuuacaagg

SEQ ID NO: 1466182 - RNA, 19 nt, Artificial Sequence
  Description of Artificial Sequence: Synthetic oligonucleotide
  Sense strand starting at position 1634 of SEQ ID NO: 1244118
ccugaaaguauugaguugu

SEQ ID NO: 1466183 - RNA, 19 nt, Artificial Sequence
  Description of Artificial Sequence: Synthetic oligonucleotide
  Antisense strand to SEQ ID NO: 1466182
acaacucaauacuuucagg

SEQ ID NO: 1466184 - RNA, 19 nt, Artificial Sequence
  Description of Artificial Sequence: Synthetic oligonucleotide
  Sense strand starting at position 1644 of SEQ ID NO: 1244118
uugaguuguaaaggaaugu

SEQ ID NO: 1466185 - RNA, 19 nt, Artificial Sequence
  Description of Artificial Sequence: Synthetic oligonucleotide
  Antisense strand to SEQ ID NO: 1466184
acauuccuuuacaacucaa

SEQ ID NO: 1466186 - RNA, 19 nt, Artificial Sequence
  Description of Artificial Sequence: Synthetic oligonucleotide
  Sense strand starting at position 1648 of SEQ ID NO: 1244118
guuguaaaggaaugucauu

SEQ ID NO: 1466187 - RNA, 19 nt, Artificial Sequence
  Description of Artificial Sequence: Synthetic oligonucleotide
  Antisense strand to SEQ ID NO: 1466186
aaugacauuccuuuacaac

SEQ ID NO: 1466188 - RNA, 19 nt, Artificial Sequence
  Description of Artificial Sequence: Synthetic oligonucleotide
  Sense strand starting at position 1734 of SEQ ID NO: 1244118
cccugugagauauggcuau

SEQ ID NO: 1466189 - RNA, 19 nt, Artificial Sequence
  Description of Artificial Sequence: Synthetic oligonucleotide
  Antisense strand to SEQ ID NO: 1466188
auagccauaucucacaggg

SEQ ID NO: 1466190 - RNA, 19 nt, Artificial Sequence
  Description of Artificial Sequence: Synthetic oligonucleotide
  Sense strand starting at position 1925 of SEQ ID NO: 1244118
cuuaaagaacagugugcaa

SEQ ID NO: 1466191 - RNA, 19 nt, Artificial Sequence
  Description of Artificial Sequence: Synthetic oligonucleotide
  Antisense strand to SEQ ID NO: 1466190
uugcacacuguucuuuaag

SEQ ID NO: 1466192 - RNA, 19 nt, Artificial Sequence
  Description of Artificial Sequence: Synthetic oligonucleotide
  Sense strand starting at position 1927 of SEQ ID NO: 1244118
uaaagaacagugugcaauu

SEQ ID NO: 1466193 - RNA, 19 nt, Artificial Sequence
  Description of Artificial Sequence: Synthetic oligonucleotide
  Antisense strand to SEQ ID NO: 1466192
aauugcacacuguucuuua

SEQ ID NO: 1466194 - RNA, 19 nt, Artificial Sequence
  Description of Artificial Sequence: Synthetic oligonucleotide
  Sense strand starting at position 1928 of SEQ ID NO: 1244118
aaagaacagugugcaauua

SEQ ID NO: 1466195 - RNA, 19 nt, Artificial Sequence
  Description of Artificial Sequence: Synthetic oligonucleotide
  Antisense strand to SEQ ID NO: 1466194
uaauugcacacuguucuuu

SEQ ID NO: 1466196 - RNA, 19 nt, Artificial Sequence
  Description of Artificial Sequence: Synthetic oligonucleotide
  Sense strand starting at position 1937 of SEQ ID NO: 1244118
ugugcaauuagcugagaca

SEQ ID NO: 1466197 - RNA, 19 nt, Artificial Sequence
  Description of Artificial Sequence: Synthetic oligonucleotide
  Antisense strand to SEQ ID NO: 1466196
ugucucagcuaauugcaca

SEQ ID NO: 1466198 - RNA, 19 nt, Artificial Sequence
  Description of Artificial Sequence: Synthetic oligonucleotide
  Sense strand starting at position 1938 of SEQ ID NO: 1244118
gugcaauuagcugagacaa

SEQ ID NO: 1466199 - RNA, 19 nt, Artificial Sequence
  Description of Artificial Sequence: Synthetic oligonucleotide
  Antisense strand to SEQ ID NO: 1466198
uugucucagcuaauugcac

SEQ ID NO: 1466200 - RNA, 19 nt, Artificial Sequence
  Description of Artificial Sequence: Synthetic oligonucleotide
  Sense strand starting at position 2018 of SEQ ID NO: 1244118
aaggguuccuguccaaaca

SEQ ID NO: 1466201 - RNA, 19 nt, Artificial Sequence
  Description of Artificial Sequence: Synthetic oligonucleotide
  Antisense strand to SEQ ID NO: 1466200
uguuuggacaggaacccuu

SEQ ID NO: 1466202 - RNA, 19 nt, Artificial Sequence
  Description of Artificial Sequence: Synthetic oligonucleotide
  Sense strand starting at position 2189 of SEQ ID NO: 1244118
ggaugaacucacugggcaa

SEQ ID NO: 1466203 - RNA, 19 nt, Artificial Sequence
  Description of Artificial Sequence: Synthetic oligonucleotide
  Antisense strand to SEQ ID NO: 1466202
uugcccagugaguucaucc

SEQ ID NO: 1466204 - RNA, 19 nt, Artificial Sequence
  Description of Artificial Sequence: Synthetic oligonucleotide
  Sense strand starting at position 2319 of SEQ ID NO: 1244118
uagaaaugagcgcagggau

SEQ ID NO: 1466205 - RNA, 19 nt, Artificial Sequence
  Description of Artificial Sequence: Synthetic oligonucleotide
  Antisense strand to SEQ ID NO: 1466204
aucccugcgcucauuucua

SEQ ID NO: 1466206 - RNA, 19 nt, Artificial Sequence
  Description of Artificial Sequence: Synthetic oligonucleotide
  Sense strand starting at position 2348 of SEQ ID NO: 1244118
ggucuuuccuuuguuagga

SEQ ID NO: 1466207 - RNA, 19 nt, Artificial Sequence
  Description of Artificial Sequence: Synthetic oligonucleotide
  Antisense strand to SEQ ID NO: 1466206
uccuaacaaaggaaagacc

SEQ ID NO: 1466208 - RNA, 19 nt, Artificial Sequence
  Description of Artificial Sequence: Synthetic oligonucleotide
  Sense strand starting at position 2349 of SEQ ID NO: 1244118
gucuuuccuuuguuaggaa

SEQ ID NO: 1466209 - RNA, 19 nt, Artificial Sequence
  Description of Artificial Sequence: Synthetic oligonucleotide
  Antisense strand to SEQ ID NO: 1466208
uuccuaacaaaggaaagac

SEQ ID NO: 1466210 - RNA, 19 nt, Artificial Sequence
  Description of Artificial Sequence: Synthetic oligonucleotide
  Sense strand starting at position 2752 of SEQ ID NO: 1244118
gaagguuccgauuaacgaa

SEQ ID NO: 1466211 - RNA, 19 nt, Artificial Sequence
  Description of Artificial Sequence: Synthetic oligonucleotide
  Antisense strand to SEQ ID NO: 1466210
uucguuaaucggaaccuuc

SEQ ID NO: 1466212 - RNA, 19 nt, Artificial Sequence
  Description of Artificial Sequence: Synthetic oligonucleotide
  Sense strand starting at position 3231 of SEQ ID NO: 1244118
ggccgaucgacgccuuuau

SEQ ID NO: 1466213 - RNA, 19 nt, Artificial Sequence
  Description of Artificial Sequence: Synthetic oligonucleotide
  Antisense strand to SEQ ID NO: 1466212
auaaaggcgucgaucggcc

SEQ ID NO: 1466214 - RNA, 19 nt, Artificial Sequence
  Description of Artificial Sequence: Synthetic oligonucleotide
  Sense strand starting at position 3232 of SEQ ID NO: 1244118
gccgaucgacgccuuuaua

SEQ ID NO: 1466215 - RNA, 19 nt, Artificial Sequence
  Description of Artificial Sequence: Synthetic oligonucleotide
  Antisense strand to SEQ ID NO: 1466214
uauaaaggcgucgaucggc

SEQ ID NO: 1466216 - RNA, 19 nt, Artificial Sequence
  Description of Artificial Sequence: Synthetic oligonucleotide
  Sense strand starting at position 3590 of SEQ ID NO: 1244118
uguuacuguucucucauuu

SEQ ID NO: 1466217 - RNA, 19 nt, Artificial Sequence
  Description of Artificial Sequence: Synthetic oligonucleotide
  Antisense strand to SEQ ID NO: 1466216
aaaugagagaacaguaaca

SEQ ID NO: 1466218 - RNA, 19 nt, Artificial Sequence
  Description of Artificial Sequence: Synthetic oligonucleotide
  Sense strand starting at position 3663 of SEQ ID NO: 1244118
gcaacaaguugacauuuau

SEQ ID NO: 1466219 - RNA, 19 nt, Artificial Sequence
  Description of Artificial Sequence: Synthetic oligonucleotide
  Antisense strand to SEQ ID NO: 1466218
auaaaugucaacuuguugc

SEQ ID NO: 1466220 - RNA, 19 nt, Artificial Sequence
  Description of Artificial Sequence: Synthetic oligonucleotide
  Sense strand starting at position 3836 of SEQ ID NO: 1244118
gugcauguacuggaccaaa

SEQ ID NO: 1466221 - RNA, 19 nt, Artificial Sequence
  Description of Artificial Sequence: Synthetic oligonucleotide
  Antisense strand to SEQ ID NO: 1466220
uuugguccaguacaugcac

SEQ ID NO: 1466222 - RNA, 19 nt, Artificial Sequence
  Description of Artificial Sequence: Synthetic oligonucleotide
  Sense strand starting at position 3880 of SEQ ID NO: 1244118
cuauucuaaggcugguuaa

SEQ ID NO: 1466223 - RNA, 19 nt, Artificial Sequence
  Description of Artificial Sequence: Synthetic oligonucleotide
  Antisense strand to SEQ ID NO: 1466222
uuaaccagccuuagaauag

SEQ ID NO: 1466224 - RNA, 19 nt, Artificial Sequence
  Description of Artificial Sequence: Synthetic oligonucleotide
  Sense strand starting at position 3881 of SEQ ID NO: 1244118
uauucuaaggcugguuaau

SEQ ID NO: 1466225 - RNA, 19 nt, Artificial Sequence
  Description of Artificial Sequence: Synthetic oligonucleotide
  Antisense strand to SEQ ID NO: 1466224
auuaaccagccuuagaaua

SEQ ID NO: 1466226 - RNA, 19 nt, Artificial Sequence
  Description of Artificial Sequence: Synthetic oligonucleotide
  Sense strand starting at position 3956 of SEQ ID NO: 1244118
gccucugcagcuguuuaua

SEQ ID NO: 1466227 - RNA, 19 nt, Artificial Sequence
  Description of Artificial Sequence: Synthetic oligonucleotide
  Antisense strand to SEQ ID NO: 1466226
uauaaacagcugcagaggc

SEQ ID NO: 1466228 - RNA, 19 nt, Artificial Sequence
  Description of Artificial Sequence: Synthetic oligonucleotide
  Sense strand starting at position 3968 of SEQ ID NO: 1244118
guuuauaacccuuaaguca

SEQ ID NO: 1466229 - RNA, 19 nt, Artificial Sequence
  Description of Artificial Sequence: Synthetic oligonucleotide
  Antisense strand to SEQ ID NO: 1466228
ugacuuaaggguuauaaac

SEQ ID NO: 1466230 - RNA, 19 nt, Artificial Sequence
  Description of Artificial Sequence: Synthetic oligonucleotide
  Sense strand starting at position 549 of SEQ ID NO: 1244119
ccgcucggcuccuuagaua

SEQ ID NO: 1466231 - RNA, 19 nt, Artificial Sequence
  Description of Artificial Sequence: Synthetic oligonucleotide
  Antisense strand to SEQ ID NO: 1466230
uaucuaaggagccgagcgg

SEQ ID NO: 1466232 - RNA, 19 nt, Artificial Sequence
  Description of Artificial Sequence: Synthetic oligonucleotide
  Sense strand starting at position 719 of SEQ ID NO: 1244119
accagauccucugcgaacu

SEQ ID NO: 1466233 - RNA, 19 nt, Artificial Sequence
  Description of Artificial Sequence: Synthetic oligonucleotide
  Antisense strand to SEQ ID NO: 1466232
aguucgcagaggaucuggu

SEQ ID NO: 1466234 - RNA, 19 nt, Artificial Sequence
  Description of Artificial Sequence: Synthetic oligonucleotide
  Sense strand starting at position 941 of SEQ ID NO: 1244119
gccuguccuucggcaaaga

SEQ ID NO: 1466235 - RNA, 19 nt, Artificial Sequence
  Description of Artificial Sequence: Synthetic oligonucleotide
  Antisense strand to SEQ ID NO: 1466234
ucuuugccgaaggacaggc

SEQ ID NO: 1466236 - RNA, 19 nt, Artificial Sequence
  Description of Artificial Sequence: Synthetic oligonucleotide
  Sense strand starting at position 942 of SEQ ID NO: 1244119
ccuguccuucggcaaagaa

SEQ ID NO: 1466237 - RNA, 19 nt, Artificial Sequence
  Description of Artificial Sequence: Synthetic oligonucleotide
  Antisense strand to SEQ ID NO: 1466236
uucuuugccgaaggacagg

SEQ ID NO: 1466238 - RNA, 19 nt, Artificial Sequence
  Description of Artificial Sequence: Synthetic oligonucleotide
  Sense strand starting at position 966 of SEQ ID NO: 1244119
ggucaucaugcaggucaau

SEQ ID NO: 1466239 - RNA, 19 nt, Artificial Sequence
  Description of Artificial Sequence: Synthetic oligonucleotide
  Antisense strand to SEQ ID NO: 1466238
auugaccugcaugaugacc

SEQ ID NO: 1466240 - RNA, 19 nt, Artificial Sequence
  Description of Artificial Sequence: Synthetic oligonucleotide
  Sense strand starting at position 1255 of SEQ ID NO: 1244119
gggucgucccgcuaaggga

SEQ ID NO: 1466241 - RNA, 19 nt, Artificial Sequence
  Description of Artificial Sequence: Synthetic oligonucleotide
  Antisense strand to SEQ ID NO: 1466240
ucccuuagcgggacgaccc

SEQ ID NO: 1466242 - RNA, 19 nt, Artificial Sequence
  Description of Artificial Sequence: Synthetic oligonucleotide
  Sense strand starting at position 1256 of SEQ ID NO: 1244119
ggucgucccgcuaagggau

SEQ ID NO: 1466243 - RNA, 19 nt, Artificial Sequence
  Description of Artificial Sequence: Synthetic oligonucleotide
  Antisense strand to SEQ ID NO: 1466242
aucccuuagcgggacgacc

SEQ ID NO: 1466244 - RNA, 19 nt, Artificial Sequence
  Description of Artificial Sequence: Synthetic oligonucleotide
  Sense strand starting at position 1321 of SEQ ID NO: 1244119
gacuucucuggugggaaac

SEQ ID NO: 1466245 - RNA, 19 nt, Artificial Sequence
  Description of Artificial Sequence: Synthetic oligonucleotide
  Antisense strand to SEQ ID NO: 1466244
guuucccaccagagaaguc

SEQ ID NO: 1466246 - RNA, 19 nt, Artificial Sequence
  Description of Artificial Sequence: Synthetic oligonucleotide
  Sense strand starting at position 1491 of SEQ ID NO: 1244119
ccugcagcuccuugaggau

SEQ ID NO: 1466247 - RNA, 19 nt, Artificial Sequence
  Description of Artificial Sequence: Synthetic oligonucleotide
  Antisense strand to SEQ ID NO: 1466246
auccucaaggagcugcagg

SEQ ID NO: 1466248 - RNA, 19 nt, Artificial Sequence
  Description of Artificial Sequence: Synthetic oligonucleotide
  Sense strand starting at position 1506 of SEQ ID NO: 1244119
ggaugggaggugugucaua

SEQ ID NO: 1466249 - RNA, 19 nt, Artificial Sequence
  Description of Artificial Sequence: Synthetic oligonucleotide
  Antisense strand to SEQ ID NO: 1466248
uaugacacaccucccaucc

SEQ ID NO: 1466250 - RNA, 19 nt, Artificial Sequence
  Description of Artificial Sequence: Synthetic oligonucleotide
  Sense strand starting at position 1578 of SEQ ID NO: 1244119
cguuggugagaguauggaa

SEQ ID NO: 1466251 - RNA, 19 nt, Artificial Sequence
  Description of Artificial Sequence: Synthetic oligonucleotide
  Antisense strand to SEQ ID NO: 1466250
uuccauacucucaccaacg

SEQ ID NO: 1466252 - RNA, 19 nt, Artificial Sequence
  Description of Artificial Sequence: Synthetic oligonucleotide
  Sense strand starting at position 1743 of SEQ ID NO: 1244119
ggaguucuugcuggagcga

SEQ ID NO: 1466253 - RNA, 19 nt, Artificial Sequence
  Description of Artificial Sequence: Synthetic oligonucleotide
  Antisense strand to SEQ ID NO: 1466252
ucgcuccagcaagaacucc

SEQ ID NO: 1466254 - RNA, 19 nt, Artificial Sequence
  Description of Artificial Sequence: Synthetic oligonucleotide
  Sense strand starting at position 1959 of SEQ ID NO: 1244119
ugccaugaucgccaccauu

SEQ ID NO: 1466255 - RNA, 19 nt, Artificial Sequence
  Description of Artificial Sequence: Synthetic oligonucleotide
  Antisense strand to SEQ ID NO: 1466254
aaugguggcgaucauggca

SEQ ID NO: 1466256 - RNA, 19 nt, Artificial Sequence
  Description of Artificial Sequence: Synthetic oligonucleotide
  Sense strand starting at position 2258 of SEQ ID NO: 1244119
uucucaguuccgcuuuagu

SEQ ID NO: 1466257 - RNA, 19 nt, Artificial Sequence
  Description of Artificial Sequence: Synthetic oligonucleotide
  Antisense strand to SEQ ID NO: 1466256
acuaaagcggaacugagaa

SEQ ID NO: 1466258 - RNA, 19 nt, Artificial Sequence
  Description of Artificial Sequence: Synthetic oligonucleotide
  Sense strand starting at position 2268 of SEQ ID NO: 1244119
cgcuuuaguccagagagaa

SEQ ID NO: 1466259 - RNA, 19 nt, Artificial Sequence
  Description of Artificial Sequence: Synthetic oligonucleotide
  Antisense strand to SEQ ID NO: 1466258
uucucucuggacuaaagcg

SEQ ID NO: 1466260 - RNA, 19 nt, Artificial Sequence
  Description of Artificial Sequence: Synthetic oligonucleotide
  Sense strand starting at position 2578 of SEQ ID NO: 1244119
gcgguuuggguuugcagaa

SEQ ID NO: 1466261 - RNA, 19 nt, Artificial Sequence
  Description of Artificial Sequence: Synthetic oligonucleotide
  Antisense strand to SEQ ID NO: 1466260
uucugcaaacccaaaccgc

SEQ ID NO: 1466262 - RNA, 19 nt, Artificial Sequence
  Description of Artificial Sequence: Synthetic oligonucleotide
  Sense strand starting at position 2636 of SEQ ID NO: 1244119
ggagaacucuuggaaagag

SEQ ID NO: 1466263 - RNA, 19 nt, Artificial Sequence
  Description of Artificial Sequence: Synthetic oligonucleotide
  Antisense strand to SEQ ID NO: 1466262
cucuuuccaagaguucucc

SEQ ID NO: 1466264 - RNA, 19 nt, Artificial Sequence
  Description of Artificial Sequence: Synthetic oligonucleotide
  Sense strand starting at position 2772 of SEQ ID NO: 1244119
uguuuaaacccggauguca

SEQ ID NO: 1466265 - RNA, 19 nt, Artificial Sequence
  Description of Artificial Sequence: Synthetic oligonucleotide
  Antisense strand to SEQ ID NO: 1466264
ugacauccggguuuaaaca

SEQ ID NO: 1466266 - RNA, 19 nt, Artificial Sequence
  Description of Artificial Sequence: Synthetic oligonucleotide
  Sense strand starting at position 2944 of SEQ ID NO: 1244119
cccacucauuucugguuua

SEQ ID NO: 1466267 - RNA, 19 nt, Artificial Sequence
  Description of Artificial Sequence: Synthetic oligonucleotide
  Antisense strand to SEQ ID NO: 1466266
uaaaccagaaaugaguggg

SEQ ID NO: 1466268 - RNA, 19 nt, Artificial Sequence
  Description of Artificial Sequence: Synthetic oligonucleotide
  Sense strand starting at position 2945 of SEQ ID NO: 1244119
ccacucauuucugguuuau

SEQ ID NO: 1466269 - RNA, 19 nt, Artificial Sequence
  Description of Artificial Sequence: Synthetic oligonucleotide
  Antisense strand to SEQ ID NO: 1466268
auaaaccagaaaugagugg

SEQ ID NO: 1466270 - RNA, 19 nt, Artificial Sequence
  Description of Artificial Sequence: Synthetic oligonucleotide
  Sense strand starting at position 2958 of SEQ ID NO: 1244119
guuuauucguaguuccaga

SEQ ID NO: 1466271 - RNA, 19 nt, Artificial Sequence
  Description of Artificial Sequence: Synthetic oligonucleotide
  Antisense strand to SEQ ID NO: 1466270
ucuggaacuacgaauaaac

SEQ ID NO: 1466272 - RNA, 19 nt, Artificial Sequence
  Description of Artificial Sequence: Synthetic oligonucleotide
  Sense strand starting at position 2963 of SEQ ID NO: 1244119
uucguaguuccagaacauc

SEQ ID NO: 1466273 - RNA, 19 nt, Artificial Sequence
  Description of Artificial Sequence: Synthetic oligonucleotide
  Antisense strand to SEQ ID NO: 1466272
gauguucuggaacuacgaa

SEQ ID NO: 1466274 - RNA, 19 nt, Artificial Sequence
  Description of Artificial Sequence: Synthetic oligonucleotide
  Sense strand starting at position 3000 of SEQ ID NO: 1244119
ggacgagcucuguagacga

SEQ ID NO: 1466275 - RNA, 19 nt, Artificial Sequence
  Description of Artificial Sequence: Synthetic oligonucleotide
  Antisense strand to SEQ ID NO: 1466274
ucgucuacagagcucgucc

SEQ ID NO: 1466276 - RNA, 19 nt, Artificial Sequence
  Description of Artificial Sequence: Synthetic oligonucleotide
  Sense strand starting at position 3352 of SEQ ID NO: 1244119
ggauaccacugauaaccuu

SEQ ID NO: 1466277 - RNA, 19 nt, Artificial Sequence
  Description of Artificial Sequence: Synthetic oligonucleotide
  Antisense strand to SEQ ID NO: 1466276
aagguuaucagugguaucc

SEQ ID NO: 1466278 - RNA, 19 nt, Artificial Sequence
  Description of Artificial Sequence: Synthetic oligonucleotide
  Sense strand starting at position 3408 of SEQ ID NO: 1244119
gcaaccgcuuggucuaaua

SEQ ID NO: 1466279 - RNA, 19 nt, Artificial Sequence
  Description of Artificial Sequence: Synthetic oligonucleotide
  Antisense strand to SEQ ID NO: 1466278
uauuagaccaagcgguugc

SEQ ID NO: 1466280 - RNA, 19 nt, Artificial Sequence
  Description of Artificial Sequence: Synthetic oligonucleotide
  Sense strand starting at position 3436 of SEQ ID NO: 1244119
aacacuuucuggucugaga

SEQ ID NO: 1466281 - RNA, 19 nt, Artificial Sequence
  Description of Artificial Sequence: Synthetic oligonucleotide
  Antisense strand to SEQ ID NO: 1466280
ucucagaccagaaaguguu

SEQ ID NO: 1466282 - RNA, 19 nt, Artificial Sequence
  Description of Artificial Sequence: Synthetic oligonucleotide
  Sense strand starting at position 3438 of SEQ ID NO: 1244119
cacuuucuggucugagaag

SEQ ID NO: 1466283 - RNA, 19 nt, Artificial Sequence
  Description of Artificial Sequence: Synthetic oligonucleotide
  Antisense strand to SEQ ID NO: 1466282
cuucucagaccagaaagug

SEQ ID NO: 1466284 - RNA, 19 nt, Artificial Sequence
  Description of Artificial Sequence: Synthetic oligonucleotide
  Sense strand starting at position 3439 of SEQ ID NO: 1244119
acuuucuggucugagaaga

SEQ ID NO: 1466285 - RNA, 19 nt, Artificial Sequence
  Description of Artificial Sequence: Synthetic oligonucleotide
  Antisense strand to SEQ ID NO: 1466284
ucuucucagaccagaaagu

SEQ ID NO: 1466286 - RNA, 19 nt, Artificial Sequence
  Description of Artificial Sequence: Synthetic oligonucleotide
  Sense strand starting at position 3464 of SEQ ID NO: 1244119
gccaguucccaguaguaaa

SEQ ID NO: 1466287 - RNA, 19 nt, Artificial Sequence
  Description of Artificial Sequence: Synthetic oligonucleotide
  Antisense strand to SEQ ID NO: 1466286
uuuacuacugggaacuggc

SEQ ID NO: 1466288 - RNA, 19 nt, Artificial Sequence
  Description of Artificial Sequence: Synthetic oligonucleotide
  Sense strand starting at position 3551 of SEQ ID NO: 1244119
ggacuaggguuucagaauc

SEQ ID NO: 1466289 - RNA, 19 nt, Artificial Sequence
  Description of Artificial Sequence: Synthetic oligonucleotide
  Antisense strand to SEQ ID NO: 1466288
gauucugaaacccuagucc

SEQ ID NO: 1466290 - RNA, 19 nt, Artificial Sequence
  Description of Artificial Sequence: Synthetic oligonucleotide
  Sense strand starting at position 3626 of SEQ ID NO: 1244119
aaagauaucuaggaggaag

SEQ ID NO: 1466291 - RNA, 19 nt, Artificial Sequence
  Description of Artificial Sequence: Synthetic oligonucleotide
  Antisense strand to SEQ ID NO: 1466290
cuuccuccuagauaucuuu

SEQ ID NO: 1466292 - RNA, 19 nt, Artificial Sequence
  Description of Artificial Sequence: Synthetic oligonucleotide
  Sense strand starting at position 3647 of SEQ ID NO: 1244119
agguuagguuagggauaga

SEQ ID NO: 1466293 - RNA, 19 nt, Artificial Sequence
  Description of Artificial Sequence: Synthetic oligonucleotide
  Antisense strand to SEQ ID NO: 1466292
ucuaucccuaaccuaaccu

SEQ ID NO: 1466294 - RNA, 19 nt, Artificial Sequence
  Description of Artificial Sequence: Synthetic oligonucleotide
  Sense strand starting at position 3753 of SEQ ID NO: 1244119
gguguaauuuaucaaguca

SEQ ID NO: 1466295 - RNA, 19 nt, Artificial Sequence
  Description of Artificial Sequence: Synthetic oligonucleotide
  Antisense strand to SEQ ID NO: 1466294
ugacuugauaaauuacacc

SEQ ID NO: 1466296 - RNA, 19 nt, Artificial Sequence
  Description of Artificial Sequence: Synthetic oligonucleotide
  Sense strand starting at position 3782 of SEQ ID NO: 1244119
gagcuaggaugccucuuaa

SEQ ID NO: 1466297 - RNA, 19 nt, Artificial Sequence
  Description of Artificial Sequence: Synthetic oligonucleotide
  Antisense strand to SEQ ID NO: 1466296
uuaagaggcauccuagcuc

SEQ ID NO: 1466298 - RNA, 19 nt, Artificial Sequence
  Description of Artificial Sequence: Synthetic oligonucleotide
  Sense strand starting at position 3867 of SEQ ID NO: 1244119
gugcguguagccugaggaa

SEQ ID NO: 1466299 - RNA, 19 nt, Artificial Sequence
  Description of Artificial Sequence: Synthetic oligonucleotide
  Antisense strand to SEQ ID NO: 1466298
uuccucaggcuacacgcac

SEQ ID NO: 1466300 - RNA, 19 nt, Artificial Sequence
  Description of Artificial Sequence: Synthetic oligonucleotide
  Sense strand starting at position 3869 of SEQ ID NO: 1244119
gcguguagccugaggaaag

SEQ ID NO: 1466301 - RNA, 19 nt, Artificial Sequence
  Description of Artificial Sequence: Synthetic oligonucleotide
  Antisense strand to SEQ ID NO: 1466300
cuuuccucaggcuacacgc

SEQ ID NO: 1466302 - RNA, 19 nt, Artificial Sequence
  Description of Artificial Sequence: Synthetic oligonucleotide
  Sense strand starting at position 3880 of SEQ ID NO: 1244119
gaggaaaguuuacacugau

SEQ ID NO: 1466303 - RNA, 19 nt, Artificial Sequence
  Description of Artificial Sequence: Synthetic oligonucleotide
  Antisense strand to SEQ ID NO: 1466302
aucaguguaaacuuuccuc

SEQ ID NO: 1466304 - RNA, 19 nt, Artificial Sequence
  Description of Artificial Sequence: Synthetic oligonucleotide
  Sense strand starting at position 3886 of SEQ ID NO: 1244119
aguuuacacugaucucagu

SEQ ID NO: 1466305 - RNA, 19 nt, Artificial Sequence
  Description of Artificial Sequence: Synthetic oligonucleotide
  Antisense strand to SEQ ID NO: 1466304
acugagaucaguguaaacu

SEQ ID NO: 1466306 - RNA, 19 nt, Artificial Sequence
  Description of Artificial Sequence: Synthetic oligonucleotide
  Sense strand starting at position 3904 of SEQ ID NO: 1244119
ucccucuuucccggagaca

SEQ ID NO: 1466307 - RNA, 19 nt, Artificial Sequence
  Description of Artificial Sequence: Synthetic oligonucleotide
  Antisense strand to SEQ ID NO: 1466306
ugucuccgggaaagaggga

SEQ ID NO: 1466308 - RNA, 19 nt, Artificial Sequence
  Description of Artificial Sequence: Synthetic oligonucleotide
  Sense strand starting at position 3905 of SEQ ID NO: 1244119
cccucuuucccggagacaa

SEQ ID NO: 1466309 - RNA, 19 nt, Artificial Sequence
  Description of Artificial Sequence: Synthetic oligonucleotide
  Antisense strand to SEQ ID NO: 1466308
uugucuccgggaaagaggg

SEQ ID NO: 1466310 - RNA, 19 nt, Artificial Sequence
  Description of Artificial Sequence: Synthetic oligonucleotide
  Sense strand starting at position 15 of SEQ ID NO: 1244120
cucugaaggcugcauuagu

SEQ ID NO: 1466311 - RNA, 19 nt, Artificial Sequence
  Description of Artificial Sequence: Synthetic oligonucleotide
  Antisense strand to SEQ ID NO: 1466310
acuaaugcagccuucagag

SEQ ID NO: 1466312 - RNA, 19 nt, Artificial Sequence
  Description of Artificial Sequence: Synthetic oligonucleotide
  Sense strand starting at position 23 of SEQ ID NO: 1244120
gcugcauuagugcaauaua

SEQ ID NO: 1466313 - RNA, 19 nt, Artificial Sequence
  Description of Artificial Sequence: Synthetic oligonucleotide
  Antisense strand to SEQ ID NO: 1466312
uauauugcacuaaugcagc

SEQ ID NO: 1466314 - RNA, 19 nt, Artificial Sequence
  Description of Artificial Sequence: Synthetic oligonucleotide
  Sense strand starting at position 26 of SEQ ID NO: 1244120
gcauuagugcaauauaaau

SEQ ID NO: 1466315 - RNA, 19 nt, Artificial Sequence
  Description of Artificial Sequence: Synthetic oligonucleotide
  Antisense strand to SEQ ID NO: 1466314
auuuauauugcacuaaugc

SEQ ID NO: 1466316 - RNA, 19 nt, Artificial Sequence
  Description of Artificial Sequence: Synthetic oligonucleotide
  Sense strand starting at position 37 of SEQ ID NO: 1244120
auauaaauaugccaggaga

SEQ ID NO: 1466317 - RNA, 19 nt, Artificial Sequence
  Description of Artificial Sequence: Synthetic oligonucleotide
  Antisense strand to SEQ ID NO: 1466316
ucuccuggcauauuuauau

SEQ ID NO: 1466318 - RNA, 19 nt, Artificial Sequence
  Description of Artificial Sequence: Synthetic oligonucleotide
  Sense strand starting at position 117 of SEQ ID NO: 1244120
auuguaaggucugugguga

SEQ ID NO: 1466319 - RNA, 19 nt, Artificial Sequence
  Description of Artificial Sequence: Synthetic oligonucleotide
  Antisense strand to SEQ ID NO: 1466318
ucaccacagaccuuacaau

SEQ ID NO: 1466320 - RNA, 19 nt, Artificial Sequence
  Description of Artificial Sequence: Synthetic oligonucleotide
  Sense strand starting at position 125 of SEQ ID NO: 1244120
gucuguggugacuggauua

SEQ ID NO: 1466321 - RNA, 19 nt, Artificial Sequence
  Description of Artificial Sequence: Synthetic oligonucleotide
  Antisense strand to SEQ ID NO: 1466320
uaauccagucaccacagac

SEQ ID NO: 1466322 - RNA, 19 nt, Artificial Sequence
  Description of Artificial Sequence: Synthetic oligonucleotide
  Sense strand starting at position 130 of SEQ ID NO: 1244120
uggugacuggauuaagcau

SEQ ID NO: 1466323 - RNA, 19 nt, Artificial Sequence
  Description of Artificial Sequence: Synthetic oligonucleotide
  Antisense strand to SEQ ID NO: 1466322
augcuuaauccagucacca

SEQ ID NO: 1466324 - RNA, 19 nt, Artificial Sequence
  Description of Artificial Sequence: Synthetic oligonucleotide
  Sense strand starting at position 137 of SEQ ID NO: 1244120
uggauuaagcauugauaau

SEQ ID NO: 1466325 - RNA, 19 nt, Artificial Sequence
  Description of Artificial Sequence: Synthetic oligonucleotide
  Antisense strand to SEQ ID NO: 1466324
auuaucaaugcuuaaucca

SEQ ID NO: 1466326 - RNA, 19 nt, Artificial Sequence
  Description of Artificial Sequence: Synthetic oligonucleotide
  Sense strand starting at position 855 of SEQ ID NO: 1244120
ggcucagguacuuguugaa

SEQ ID NO: 1466327 - RNA, 19 nt, Artificial Sequence
  Description of Artificial Sequence: Synthetic oligonucleotide
  Antisense strand to SEQ ID NO: 1466326
uucaacaaguaccugagcc

SEQ ID NO: 1466328 - RNA, 19 nt, Artificial Sequence
  Description of Artificial Sequence: Synthetic oligonucleotide
  Sense strand starting at position 981 of SEQ ID NO: 1244120
ggagaaaggccaggucaau

SEQ ID NO: 1466329 - RNA, 19 nt, Artificial Sequence
  Description of Artificial Sequence: Synthetic oligonucleotide
  Antisense strand to SEQ ID NO: 1466328
auugaccuggccuuucucc

SEQ ID NO: 1466330 - RNA, 19 nt, Artificial Sequence
  Description of Artificial Sequence: Synthetic oligonucleotide
  Sense strand starting at position 1058 of SEQ ID NO: 1244120
uugccauucugcccaagua

SEQ ID NO: 1466331 - RNA, 19 nt, Artificial Sequence
  Description of Artificial Sequence: Synthetic oligonucleotide
  Antisense strand to SEQ ID NO: 1466330
uacuugggcagaauggcaa

SEQ ID NO: 1466332 - RNA, 19 nt, Artificial Sequence
  Description of Artificial Sequence: Synthetic oligonucleotide
  Sense strand starting at position 1071 of SEQ ID NO: 1244120
caaguacaguugucaaagu

SEQ ID NO: 1466333 - RNA, 19 nt, Artificial Sequence
  Description of Artificial Sequence: Synthetic oligonucleotide
  Antisense strand to SEQ ID NO: 1466332
acuuugacaacuguacuug

SEQ ID NO: 1466334 - RNA, 19 nt, Artificial Sequence
  Description of Artificial Sequence: Synthetic oligonucleotide
  Sense strand starting at position 1290 of SEQ ID NO: 1244120
gugcucuuaccugugucua

SEQ ID NO: 1466335 - RNA, 19 nt, Artificial Sequence
  Description of Artificial Sequence: Synthetic oligonucleotide
  Antisense strand to SEQ ID NO: 1466334
uagacacagguaagagcac

SEQ ID NO: 1466336 - RNA, 19 nt, Artificial Sequence
  Description of Artificial Sequence: Synthetic oligonucleotide
  Sense strand starting at position 1423 of SEQ ID NO: 1244120
uuggguggguuucucuuaa

SEQ ID NO: 1466337 - RNA, 19 nt, Artificial Sequence
  Description of Artificial Sequence: Synthetic oligonucleotide
  Antisense strand to SEQ ID NO: 1466336
uuaagagaaacccacccaa

SEQ ID NO: 1466338 - RNA, 19 nt, Artificial Sequence
  Description of Artificial Sequence: Synthetic oligonucleotide
  Sense strand starting at position 1498 of SEQ ID NO: 1244120
guuuccuuguccucggaga

SEQ ID NO: 1466339 - RNA, 19 nt, Artificial Sequence
  Description of Artificial Sequence: Synthetic oligonucleotide
  Antisense strand to SEQ ID NO: 1466338
ucuccgaggacaaggaaac

SEQ ID NO: 1466340 - RNA, 19 nt, Artificial Sequence
  Description of Artificial Sequence: Synthetic oligonucleotide
  Sense strand starting at position 1547 of SEQ ID NO: 1244120
cggucugcucguucccaua

SEQ ID NO: 1466341 - RNA, 19 nt, Artificial Sequence
  Description of Artificial Sequence: Synthetic oligonucleotide
  Antisense strand to SEQ ID NO: 1466340
uaugggaacgagcagaccg

SEQ ID NO: 1466342 - RNA, 19 nt, Artificial Sequence
  Description of Artificial Sequence: Synthetic oligonucleotide
  Sense strand starting at position 1610 of SEQ ID NO: 1244120
cuccguagccaucggacaa

SEQ ID NO: 1466343 - RNA, 19 nt, Artificial Sequence
  Description of Artificial Sequence: Synthetic oligonucleotide
  Antisense strand to SEQ ID NO: 1466342
uuguccgauggcuacggag

SEQ ID NO: 1466344 - RNA, 19 nt, Artificial Sequence
  Description of Artificial Sequence: Synthetic oligonucleotide
  Sense strand starting at position 1646 of SEQ ID NO: 1244120
cguagcucgagggaugaaa

SEQ ID NO: 1466345 - RNA, 19 nt, Artificial Sequence
  Description of Artificial Sequence: Synthetic oligonucleotide
  Antisense strand to SEQ ID NO: 1466344
uuucaucccucgagcuacg

SEQ ID NO: 1466346 - RNA, 19 nt, Artificial Sequence
  Description of Artificial Sequence: Synthetic oligonucleotide
  Sense strand starting at position 1801 of SEQ ID NO: 1244120
gcgggauagccggaguucu

SEQ ID NO: 1466347 - RNA, 19 nt, Artificial Sequence
  Description of Artificial Sequence: Synthetic oligonucleotide
  Antisense strand to SEQ ID NO: 1466346
agaacuccggcuaucccgc

SEQ ID NO: 1466348 - RNA, 19 nt, Artificial Sequence
  Description of Artificial Sequence: Synthetic oligonucleotide
  Sense strand starting at position 1951 of SEQ ID NO: 1244120
cagaguggguacucuaaga

SEQ ID NO: 1466349 - RNA, 19 nt, Artificial Sequence
  Description of Artificial Sequence: Synthetic oligonucleotide
  Antisense strand to SEQ ID NO: 1466348
ucuuagaguacccacucug

SEQ ID NO: 1466350 - RNA, 19 nt, Artificial Sequence
  Description of Artificial Sequence: Synthetic oligonucleotide
  Sense strand starting at position 2080 of SEQ ID NO: 1244120
gcucgaauccauggccuga

SEQ ID NO: 1466351 - RNA, 19 nt, Artificial Sequence
  Description of Artificial Sequence: Synthetic oligonucleotide
  Antisense strand to SEQ ID NO: 1466350
ucaggccauggauucgagc

SEQ ID NO: 1466352 - RNA, 19 nt, Artificial Sequence
  Description of Artificial Sequence: Synthetic oligonucleotide
  Sense strand starting at position 2163 of SEQ ID NO: 1244120
ugaucucucccaggccaau

SEQ ID NO: 1466353 - RNA, 19 nt, Artificial Sequence
  Description of Artificial Sequence: Synthetic oligonucleotide
  Antisense strand to SEQ ID NO: 1466352
auuggccugggagagauca

SEQ ID NO: 1466354 - RNA, 19 nt, Artificial Sequence
  Description of Artificial Sequence: Synthetic oligonucleotide
  Sense strand starting at position 2286 of SEQ ID NO: 1244120
gcgacauggaagcgucaaa

SEQ ID NO: 1466355 - RNA, 19 nt, Artificial Sequence
  Description of Artificial Sequence: Synthetic oligonucleotide
  Antisense strand to SEQ ID NO: 1466354
uuugacgcuuccaugucgc

SEQ ID NO: 1466356 - RNA, 19 nt, Artificial Sequence
  Description of Artificial Sequence: Synthetic oligonucleotide
  Sense strand starting at position 2412 of SEQ ID NO: 1244120
auaggcuccuggguuauua

SEQ ID NO: 1466357 - RNA, 19 nt, Artificial Sequence
  Description of Artificial Sequence: Synthetic oligonucleotide
  Antisense strand to SEQ ID NO: 1466356
uaauaacccaggagccuau

SEQ ID NO: 1466358 - RNA, 19 nt, Artificial Sequence
  Description of Artificial Sequence: Synthetic oligonucleotide
  Sense strand starting at position 2414 of SEQ ID NO: 1244120
aggcuccuggguuauuaga

SEQ ID NO: 1466359 - RNA, 19 nt, Artificial Sequence
  Description of Artificial Sequence: Synthetic oligonucleotide
  Antisense strand to SEQ ID NO: 1466358
ucuaauaacccaggagccu

SEQ ID NO: 1466360 - RNA, 19 nt, Artificial Sequence
  Description of Artificial Sequence: Synthetic oligonucleotide
  Sense strand starting at position 2416 of SEQ ID NO: 1244120
gcuccuggguuauuagauu

SEQ ID NO: 1466361 - RNA, 19 nt, Artificial Sequence
  Description of Artificial Sequence: Synthetic oligonucleotide
  Antisense strand to SEQ ID NO: 1466360
aaucuaauaacccaggagc

SEQ ID NO: 1466362 - RNA, 19 nt, Artificial Sequence
  Description of Artificial Sequence: Synthetic oligonucleotide
  Sense strand starting at position 2424 of SEQ ID NO: 1244120
guuauuagauuuggacaaa

SEQ ID NO: 1466363 - RNA, 19 nt, Artificial Sequence
  Description of Artificial Sequence: Synthetic oligonucleotide
  Antisense strand to SEQ ID NO: 1466362
uuuguccaaaucuaauaac

SEQ ID NO: 1466364 - RNA, 19 nt, Artificial Sequence
  Description of Artificial Sequence: Synthetic oligonucleotide
  Sense strand starting at position 2610 of SEQ ID NO: 1244120
guauguuaucuugggccaa

SEQ ID NO: 1466365 - RNA, 19 nt, Artificial Sequence
  Description of Artificial Sequence: Synthetic oligonucleotide
  Antisense strand to SEQ ID NO: 1466364
uuggcccaagauaacauac

SEQ ID NO: 1466366 - RNA, 19 nt, Artificial Sequence
  Description of Artificial Sequence: Synthetic oligonucleotide
  Sense strand starting at position 2612 of SEQ ID NO: 1244120
auguuaucuugggccaaau

SEQ ID NO: 1466367 - RNA, 19 nt, Artificial Sequence
  Description of Artificial Sequence: Synthetic oligonucleotide
  Antisense strand to SEQ ID NO: 1466366
auuuggcccaagauaacau

SEQ ID NO: 1466368 - RNA, 19 nt, Artificial Sequence
  Description of Artificial Sequence: Synthetic oligonucleotide
  Sense strand starting at position 2731 of SEQ ID NO: 1244120
gugggaaauuggcauuuca

SEQ ID NO: 1466369 - RNA, 19 nt, Artificial Sequence
  Description of Artificial Sequence: Synthetic oligonucleotide
  Antisense strand to SEQ ID NO: 1466368
ugaaaugccaauuucccac

SEQ ID NO: 1466370 - RNA, 19 nt, Artificial Sequence
  Description of Artificial Sequence: Synthetic oligonucleotide
  Sense strand starting at position 2908 of SEQ ID NO: 1244120
ucguccaucuuucuccaua

SEQ ID NO: 1466371 - RNA, 19 nt, Artificial Sequence
  Description of Artificial Sequence: Synthetic oligonucleotide
  Antisense strand to SEQ ID NO: 1466370
uauggagaaagauggacga

SEQ ID NO: 1466372 - RNA, 19 nt, Artificial Sequence
  Description of Artificial Sequence: Synthetic oligonucleotide
  Sense strand starting at position 2909 of SEQ ID NO: 1244120
cguccaucuuucuccauau

SEQ ID NO: 1466373 - RNA, 19 nt, Artificial Sequence
  Description of Artificial Sequence: Synthetic oligonucleotide
  Antisense strand to SEQ ID NO: 1466372
auauggagaaagauggacg

SEQ ID NO: 1466374 - RNA, 19 nt, Artificial Sequence
  Description of Artificial Sequence: Synthetic oligonucleotide
  Sense strand starting at position 2945 of SEQ ID NO: 1244120
cucucaucucucuagaugu

SEQ ID NO: 1466375 - RNA, 19 nt, Artificial Sequence
  Description of Artificial Sequence: Synthetic oligonucleotide
  Antisense strand to SEQ ID NO: 1466374
acaucuagagagaugagag

SEQ ID NO: 1466376 - RNA, 19 nt, Artificial Sequence
  Description of Artificial Sequence: Synthetic oligonucleotide
  Sense strand starting at position 2947 of SEQ ID NO: 1244120
cucaucucucuagauguau

SEQ ID NO: 1466377 - RNA, 19 nt, Artificial Sequence
  Description of Artificial Sequence: Synthetic oligonucleotide
  Antisense strand to SEQ ID NO: 1466376
auacaucuagagagaugag

SEQ ID NO: 1466378 - RNA, 19 nt, Artificial Sequence
  Description of Artificial Sequence: Synthetic oligonucleotide
  Sense strand starting at position 3293 of SEQ ID NO: 1244120
aagggaguuuggucagaga

SEQ ID NO: 1466379 - RNA, 19 nt, Artificial Sequence
  Description of Artificial Sequence: Synthetic oligonucleotide
  Antisense strand to SEQ ID NO: 1466378
ucucugaccaaacucccuu

SEQ ID NO: 1466380 - RNA, 19 nt, Artificial Sequence
  Description of Artificial Sequence: Synthetic oligonucleotide
  Sense strand starting at position 3550 of SEQ ID NO: 1244120
gcucauuuguaaccuguca

SEQ ID NO: 1466381 - RNA, 19 nt, Artificial Sequence
  Description of Artificial Sequence: Synthetic oligonucleotide
  Antisense strand to SEQ ID NO: 1466380
ugacagguuacaaaugagc

SEQ ID NO: 1466382 - RNA, 19 nt, Artificial Sequence
  Description of Artificial Sequence: Synthetic oligonucleotide
  Sense strand starting at position 3622 of SEQ ID NO: 1244120
gcaagaguucagggaguga

SEQ ID NO: 1466383 - RNA, 19 nt, Artificial Sequence
  Description of Artificial Sequence: Synthetic oligonucleotide
  Antisense strand to SEQ ID NO: 1466382
ucacucccugaacucuugc

SEQ ID NO: 1466384 - RNA, 19 nt, Artificial Sequence
  Description of Artificial Sequence: Synthetic oligonucleotide
  Sense strand starting at position 3633 of SEQ ID NO: 1244120
gggagugaucucuguaaac

SEQ ID NO: 1466385 - RNA, 19 nt, Artificial Sequence
  Description of Artificial Sequence: Synthetic oligonucleotide
  Antisense strand to SEQ ID NO: 1466384
guuuacagagaucacuccc

SEQ ID NO: 1466386 - RNA, 19 nt, Artificial Sequence
  Description of Artificial Sequence: Synthetic oligonucleotide
  Sense strand starting at position 3678 of SEQ ID NO: 1244120
gcaggugggacagguuuaa

SEQ ID NO: 1466387 - RNA, 19 nt, Artificial Sequence
  Description of Artificial Sequence: Synthetic oligonucleotide
  Antisense strand to SEQ ID NO: 1466386
uuaaaccugucccaccugc

SEQ ID NO: 1466388 - RNA, 19 nt, Artificial Sequence
  Description of Artificial Sequence: Synthetic oligonucleotide
  Sense strand starting at position 3744 of SEQ ID NO: 1244120
ggcgaauacuccuuccucu

SEQ ID NO: 1466389 - RNA, 19 nt, Artificial Sequence
  Description of Artificial Sequence: Synthetic oligonucleotide
  Antisense strand to SEQ ID NO: 1466388
agaggaaggaguauucgcc

SEQ ID NO: 1466390 - RNA, 19 nt, Artificial Sequence
  Description of Artificial Sequence: Synthetic oligonucleotide
  Sense strand starting at position 69 of SEQ ID NO: 1244121
gcgagaaccuucuucucuu

SEQ ID NO: 1466391 - RNA, 19 nt, Artificial Sequence
  Description of Artificial Sequence: Synthetic oligonucleotide
  Antisense strand to SEQ ID NO: 1466390
aagagaagaagguucucgc

SEQ ID NO: 1466392 - RNA, 19 nt, Artificial Sequence
  Description of Artificial Sequence: Synthetic oligonucleotide
  Sense strand starting at position 70 of SEQ ID NO: 1244121
cgagaaccuucuucucuuu

SEQ ID NO: 1466393 - RNA, 19 nt, Artificial Sequence
  Description of Artificial Sequence: Synthetic oligonucleotide
  Antisense strand to SEQ ID NO: 1466392
aaagagaagaagguucucg

SEQ ID NO: 1466394 - RNA, 19 nt, Artificial Sequence
  Description of Artificial Sequence: Synthetic oligonucleotide
  Sense strand starting at position 418 of SEQ ID NO: 1244121
gugcaauccuguuccucca

SEQ ID NO: 1466395 - RNA, 19 nt, Artificial Sequence
  Description of Artificial Sequence: Synthetic oligonucleotide
  Antisense strand to SEQ ID NO: 1466394
uggaggaacaggauugcac

SEQ ID NO: 1466396 - RNA, 19 nt, Artificial Sequence
  Description of Artificial Sequence: Synthetic oligonucleotide
  Sense strand starting at position 808 of SEQ ID NO: 1244121
gagguuguauucucuacag

SEQ ID NO: 1466397 - RNA, 19 nt, Artificial Sequence
  Description of Artificial Sequence: Synthetic oligonucleotide
  Antisense strand to SEQ ID NO: 1466396
cuguagagaauacaaccuc

SEQ ID NO: 1466398 - RNA, 19 nt, Artificial Sequence
  Description of Artificial Sequence: Synthetic oligonucleotide
  Sense strand starting at position 810 of SEQ ID NO: 1244121
gguuguauucucuacagua

SEQ ID NO: 1466399 - RNA, 19 nt, Artificial Sequence
  Description of Artificial Sequence: Synthetic oligonucleotide
  Antisense strand to SEQ ID NO: 1466398
uacuguagagaauacaacc

SEQ ID NO: 1466400 - RNA, 19 nt, Artificial Sequence
  Description of Artificial Sequence: Synthetic oligonucleotide
  Sense strand starting at position 812 of SEQ ID NO: 1244121
uuguauucucuacaguaca

SEQ ID NO: 1466401 - RNA, 19 nt, Artificial Sequence
  Description of Artificial Sequence: Synthetic oligonucleotide
  Antisense strand to SEQ ID NO: 1466400
uguacuguagagaauacaa

SEQ ID NO: 1466402 - RNA, 19 nt, Artificial Sequence
  Description of Artificial Sequence: Synthetic oligonucleotide
  Sense strand starting at position 901 of SEQ ID NO: 1244121
guagaauuaguuuggaauu

SEQ ID NO: 1466403 - RNA, 19 nt, Artificial Sequence
  Description of Artificial Sequence: Synthetic oligonucleotide
  Antisense strand to SEQ ID NO: 1466402
aauuccaaacuaauucuac

SEQ ID NO: 1466404 - RNA, 19 nt, Artificial Sequence
  Description of Artificial Sequence: Synthetic oligonucleotide
  Sense strand starting at position 1166 of SEQ ID NO: 1244121
cuccuccucccagggaaau

SEQ ID NO: 1466405 - RNA, 19 nt, Artificial Sequence
  Description of Artificial Sequence: Synthetic oligonucleotide
  Antisense strand to SEQ ID NO: 1466404
auuucccugggaggaggag

SEQ ID NO: 1466406 - RNA, 19 nt, Artificial Sequence
  Description of Artificial Sequence: Synthetic oligonucleotide
  Sense strand starting at position 1245 of SEQ ID NO: 1244121
ugcaaaugcugccuuccaa

SEQ ID NO: 1466407 - RNA, 19 nt, Artificial Sequence
  Description of Artificial Sequence: Synthetic oligonucleotide
  Antisense strand to SEQ ID NO: 1466406
uuggaaggcagcauuugca

SEQ ID NO: 1466408 - RNA, 19 nt, Artificial Sequence
  Description of Artificial Sequence: Synthetic oligonucleotide
  Sense strand starting at position 1280 of SEQ ID NO: 1244121
ucuguucucccuggcaaca

SEQ ID NO: 1466409 - RNA, 19 nt, Artificial Sequence
  Description of Artificial Sequence: Synthetic oligonucleotide
  Antisense strand to SEQ ID NO: 1466408
uguugccagggagaacaga

SEQ ID NO: 1466410 - RNA, 19 nt, Artificial Sequence
  Description of Artificial Sequence: Synthetic oligonucleotide
  Sense strand starting at position 1337 of SEQ ID NO: 1244121
gguaacuguccacaggcaa

SEQ ID NO: 1466411 - RNA, 19 nt, Artificial Sequence
  Description of Artificial Sequence: Synthetic oligonucleotide
  Antisense strand to SEQ ID NO: 1466410
uugccuguggacaguuacc

SEQ ID NO: 1466412 - RNA, 19 nt, Artificial Sequence
  Description of Artificial Sequence: Synthetic oligonucleotide
  Sense strand starting at position 1430 of SEQ ID NO: 1244121
gcugguagguucccggaua

SEQ ID NO: 1466413 - RNA, 19 nt, Artificial Sequence
  Description of Artificial Sequence: Synthetic oligonucleotide
  Antisense strand to SEQ ID NO: 1466412
uauccgggaaccuaccagc

SEQ ID NO: 1466414 - RNA, 19 nt, Artificial Sequence
  Description of Artificial Sequence: Synthetic oligonucleotide
  Sense strand starting at position 1441 of SEQ ID NO: 1244121
cccggauaucccggauaga

SEQ ID NO: 1466415 - RNA, 19 nt, Artificial Sequence
  Description of Artificial Sequence: Synthetic oligonucleotide
  Antisense strand to SEQ ID NO: 1466414
ucuauccgggauauccggg

SEQ ID NO: 1466416 - RNA, 19 nt, Artificial Sequence
  Description of Artificial Sequence: Synthetic oligonucleotide
  Sense strand starting at position 1787 of SEQ ID NO: 1244121
ccagcaagccuucgauauc

SEQ ID NO: 1466417 - RNA, 19 nt, Artificial Sequence
  Description of Artificial Sequence: Synthetic oligonucleotide
  Antisense strand to SEQ ID NO: 1466416
gauaucgaaggcuugcugg

SEQ ID NO: 1466418 - RNA, 19 nt, Artificial Sequence
  Description of Artificial Sequence: Synthetic oligonucleotide
  Sense strand starting at position 1790 of SEQ ID NO: 1244121
gcaagccuucgauauccuu

SEQ ID NO: 1466419 - RNA, 19 nt, Artificial Sequence
  Description of Artificial Sequence: Synthetic oligonucleotide
  Antisense strand to SEQ ID NO: 1466418
aaggauaucgaaggcuugc

SEQ ID NO: 1466420 - RNA, 19 nt, Artificial Sequence
  Description of Artificial Sequence: Synthetic oligonucleotide
  Sense strand starting at position 1798 of SEQ ID NO: 1244121
ucgauauccuuggcuccau

SEQ ID NO: 1466421 - RNA, 19 nt, Artificial Sequence
  Description of Artificial Sequence: Synthetic oligonucleotide
  Antisense strand to SEQ ID NO: 1466420
auggagccaaggauaucga

SEQ ID NO: 1466422 - RNA, 19 nt, Artificial Sequence
  Description of Artificial Sequence: Synthetic oligonucleotide
  Sense strand starting at position 1984 of SEQ ID NO: 1244121
gccgucuugacgcaagaga

SEQ ID NO: 1466423 - RNA, 19 nt, Artificial Sequence
  Description of Artificial Sequence: Synthetic oligonucleotide
  Antisense strand to SEQ ID NO: 1466422
ucucuugcgucaagacggc

SEQ ID NO: 1466424 - RNA, 19 nt, Artificial Sequence
  Description of Artificial Sequence: Synthetic oligonucleotide
  Sense strand starting at position 2548 of SEQ ID NO: 1244121
ccgggaaugcgccugugua

SEQ ID NO: 1466425 - RNA, 19 nt, Artificial Sequence
  Description of Artificial Sequence: Synthetic oligonucleotide
  Antisense strand to SEQ ID NO: 1466424
uacacaggcgcauucccgg

SEQ ID NO: 1466426 - RNA, 19 nt, Artificial Sequence
  Description of Artificial Sequence: Synthetic oligonucleotide
  Sense strand starting at position 2667 of SEQ ID NO: 1244121
cccagauguccuggaauga

SEQ ID NO: 1466427 - RNA, 19 nt, Artificial Sequence
  Description of Artificial Sequence: Synthetic oligonucleotide
  Antisense strand to SEQ ID NO: 1466426
ucauuccaggacaucuggg

SEQ ID NO: 1466428 - RNA, 19 nt, Artificial Sequence
  Description of Artificial Sequence: Synthetic oligonucleotide
  Sense strand starting at position 2762 of SEQ ID NO: 1244121
cccugauucgggugaggcu

SEQ ID NO: 1466429 - RNA, 19 nt, Artificial Sequence
  Description of Artificial Sequence: Synthetic oligonucleotide
  Antisense strand to SEQ ID NO: 1466428
agccucacccgaaucaggg

SEQ ID NO: 1466430 - RNA, 19 nt, Artificial Sequence
  Description of Artificial Sequence: Synthetic oligonucleotide
  Sense strand starting at position 2880 of SEQ ID NO: 1244121
ucuagaguggccuguggaa

SEQ ID NO: 1466431 - RNA, 19 nt, Artificial Sequence
  Description of Artificial Sequence: Synthetic oligonucleotide
  Antisense strand to SEQ ID NO: 1466430
uuccacaggccacucuaga

SEQ ID NO: 1466432 - RNA, 19 nt, Artificial Sequence
  Description of Artificial Sequence: Synthetic oligonucleotide
  Sense strand starting at position 3057 of SEQ ID NO: 1244121
ccugaagugucagucagaa

SEQ ID NO: 1466433 - RNA, 19 nt, Artificial Sequence
  Description of Artificial Sequence: Synthetic oligonucleotide
  Antisense strand to SEQ ID NO: 1466432
uucugacugacacuucagg

SEQ ID NO: 1466434 - RNA, 19 nt, Artificial Sequence
  Description of Artificial Sequence: Synthetic oligonucleotide
  Sense strand starting at position 3255 of SEQ ID NO: 1244121
ccaggaaacugucccugau

SEQ ID NO: 1466435 - RNA, 19 nt, Artificial Sequence
  Description of Artificial Sequence: Synthetic oligonucleotide
  Antisense strand to SEQ ID NO: 1466434
aucagggacaguuuccugg

SEQ ID NO: 1466436 - RNA, 19 nt, Artificial Sequence
  Description of Artificial Sequence: Synthetic oligonucleotide
  Sense strand starting at position 3257 of SEQ ID NO: 1244121
aggaaacugucccugauac

SEQ ID NO: 1466437 - RNA, 19 nt, Artificial Sequence
  Description of Artificial Sequence: Synthetic oligonucleotide
  Antisense strand to SEQ ID NO: 1466436
guaucagggacaguuuccu

SEQ ID NO: 1466438 - RNA, 19 nt, Artificial Sequence
  Description of Artificial Sequence: Synthetic oligonucleotide
  Sense strand starting at position 3421 of SEQ ID NO: 1244121
gccuaaugugcagugcaau

SEQ ID NO: 1466439 - RNA, 19 nt, Artificial Sequence
  Description of Artificial Sequence: Synthetic oligonucleotide
  Antisense strand to SEQ ID NO: 1466438
auugcacugcacauuaggc

SEQ ID NO: 1466440 - RNA, 19 nt, Artificial Sequence
  Description of Artificial Sequence: Synthetic oligonucleotide
  Sense strand starting at position 3466 of SEQ ID NO: 1244121
caaaucugucuuuagaggu

SEQ ID NO: 1466441 - RNA, 19 nt, Artificial Sequence
  Description of Artificial Sequence: Synthetic oligonucleotide
  Antisense strand to SEQ ID NO: 1466440
accucuaaagacagauuug

SEQ ID NO: 1466442 - RNA, 19 nt, Artificial Sequence
  Description of Artificial Sequence: Synthetic oligonucleotide
  Sense strand starting at position 3564 of SEQ ID NO: 1244121
acaggaauguuuccauucu

SEQ ID NO: 1466443 - RNA, 19 nt, Artificial Sequence
  Description of Artificial Sequence: Synthetic oligonucleotide
  Antisense strand to SEQ ID NO: 1466442
agaauggaaacauuccugu

SEQ ID NO: 1466444 - RNA, 19 nt, Artificial Sequence
  Description of Artificial Sequence: Synthetic oligonucleotide
  Sense strand starting at position 3592 of SEQ ID NO: 1244121
ucuugacaauuauauggaa

SEQ ID NO: 1466445 - RNA, 19 nt, Artificial Sequence
  Description of Artificial Sequence: Synthetic oligonucleotide
  Antisense strand to SEQ ID NO: 1466444
uuccauauaauugucaaga

SEQ ID NO: 1466446 - RNA, 19 nt, Artificial Sequence
  Description of Artificial Sequence: Synthetic oligonucleotide
  Sense strand starting at position 3606 of SEQ ID NO: 1244121
uggaauggcuuacccuaaa

SEQ ID NO: 1466447 - RNA, 19 nt, Artificial Sequence
  Description of Artificial Sequence: Synthetic oligonucleotide
  Antisense strand to SEQ ID NO: 1466446
uuuaggguaagccauucca

SEQ ID NO: 1466448 - RNA, 19 nt, Artificial Sequence
  Description of Artificial Sequence: Synthetic oligonucleotide
  Sense strand starting at position 3700 of SEQ ID NO: 1244121
ggcaguaguguacaucacu

SEQ ID NO: 1466449 - RNA, 19 nt, Artificial Sequence
  Description of Artificial Sequence: Synthetic oligonucleotide
  Antisense strand to SEQ ID NO: 1466448
agugauguacacuacugcc

SEQ ID NO: 1466450 - RNA, 19 nt, Artificial Sequence
  Description of Artificial Sequence: Synthetic oligonucleotide
  Sense strand starting at position 3719 of SEQ ID NO: 1244121
ccuaaugagcauugcuaua

SEQ ID NO: 1466451 - RNA, 19 nt, Artificial Sequence
  Description of Artificial Sequence: Synthetic oligonucleotide
  Antisense strand to SEQ ID NO: 1466450
uauagcaaugcucauuagg

SEQ ID NO: 1466452 - RNA, 19 nt, Artificial Sequence
  Description of Artificial Sequence: Synthetic oligonucleotide
  Sense strand starting at position 3724 of SEQ ID NO: 1244121
ugagcauugcuauaauuga

SEQ ID NO: 1466453 - RNA, 19 nt, Artificial Sequence
  Description of Artificial Sequence: Synthetic oligonucleotide
  Antisense strand to SEQ ID NO: 1466452
ucaauuauagcaaugcuca

SEQ ID NO: 1466454 - RNA, 19 nt, Artificial Sequence
  Description of Artificial Sequence: Synthetic oligonucleotide
  Sense strand starting at position 3824 of SEQ ID NO: 1244121
uccaguuucucaccagagu

SEQ ID NO: 1466455 - RNA, 19 nt, Artificial Sequence
  Description of Artificial Sequence: Synthetic oligonucleotide
  Antisense strand to SEQ ID NO: 1466454
acucuggugagaaacugga

SEQ ID NO: 1466456 - RNA, 19 nt, Artificial Sequence
  Description of Artificial Sequence: Synthetic oligonucleotide
  Sense strand starting at position 3825 of SEQ ID NO: 1244121
ccaguuucucaccagaguu

SEQ ID NO: 1466457 - RNA, 19 nt, Artificial Sequence
  Description of Artificial Sequence: Synthetic oligonucleotide
  Antisense strand to SEQ ID NO: 1466456
aacucuggugagaaacugg

SEQ ID NO: 1466458 - RNA, 19 nt, Artificial Sequence
  Description of Artificial Sequence: Synthetic oligonucleotide
  Sense strand starting at position 3838 of SEQ ID NO: 1244121
agaguuucuugcuugucua

SEQ ID NO: 1466459 - RNA, 19 nt, Artificial Sequence
  Description of Artificial Sequence: Synthetic oligonucleotide
  Antisense strand to SEQ ID NO: 1466458
uagacaagcaagaaacucu

SEQ ID NO: 1466460 - RNA, 19 nt, Artificial Sequence
  Description of Artificial Sequence: Synthetic oligonucleotide
  Sense strand starting at position 3839 of SEQ ID NO: 1244121
gaguuucuugcuugucuaa

SEQ ID NO: 1466461 - RNA, 19 nt, Artificial Sequence
  Description of Artificial Sequence: Synthetic oligonucleotide
  Antisense strand to SEQ ID NO: 1466460
uuagacaagcaagaaacuc

SEQ ID NO: 1466462 - RNA, 19 nt, Artificial Sequence
  Description of Artificial Sequence: Synthetic oligonucleotide
  Sense strand starting at position 3846 of SEQ ID NO: 1244121
uugcuugucuaauuaugaa

SEQ ID NO: 1466463 - RNA, 19 nt, Artificial Sequence
  Description of Artificial Sequence: Synthetic oligonucleotide
  Antisense strand to SEQ ID NO: 1466462
uucauaauuagacaagcaa

SEQ ID NO: 1466464 - RNA, 19 nt, Artificial Sequence
  Description of Artificial Sequence: Synthetic oligonucleotide
  Sense strand starting at position 3917 of SEQ ID NO: 1244121
uuacuugguagaugauaga

SEQ ID NO: 1466465 - RNA, 19 nt, Artificial Sequence
  Description of Artificial Sequence: Synthetic oligonucleotide
  Antisense strand to SEQ ID NO: 1466464
ucuaucaucuaccaaguaa

SEQ ID NO: 1466466 - RNA, 19 nt, Artificial Sequence
  Description of Artificial Sequence: Synthetic oligonucleotide
  Sense strand starting at position 3920 of SEQ ID NO: 1244121
cuugguagaugauagauau

SEQ ID NO: 1466467 - RNA, 19 nt, Artificial Sequence
  Description of Artificial Sequence: Synthetic oligonucleotide
  Antisense strand to SEQ ID NO: 1466466
auaucuaucaucuaccaag

SEQ ID NO: 1466468 - RNA, 19 nt, Artificial Sequence
  Description of Artificial Sequence: Synthetic oligonucleotide
  Sense strand starting at position 3957 of SEQ ID NO: 1244121
uuuaguuuccacuaggcaa

SEQ ID NO: 1466469 - RNA, 19 nt, Artificial Sequence
  Description of Artificial Sequence: Synthetic oligonucleotide
  Antisense strand to SEQ ID NO: 1466468
uugccuaguggaaacuaaa

SEQ ID NO: 1466470 - RNA, 19 nt, Artificial Sequence
  Description of Artificial Sequence: Synthetic oligonucleotide
  Sense strand starting at position 83 of SEQ ID NO: 1244122
uccagcucuuccucggaaa

SEQ ID NO: 1466471 - RNA, 19 nt, Artificial Sequence
  Description of Artificial Sequence: Synthetic oligonucleotide
  Antisense strand to SEQ ID NO: 1466470
uuuccgaggaagagcugga

SEQ ID NO: 1466472 - RNA, 19 nt, Artificial Sequence
  Description of Artificial Sequence: Synthetic oligonucleotide
  Sense strand starting at position 599 of SEQ ID NO: 1244122
cggcacagguacuuauuaa

SEQ ID NO: 1466473 - RNA, 19 nt, Artificial Sequence
  Description of Artificial Sequence: Synthetic oligonucleotide
  Antisense strand to SEQ ID NO: 1466472
uuaauaaguaccugugccg

SEQ ID NO: 1466474 - RNA, 19 nt, Artificial Sequence
  Description of Artificial Sequence: Synthetic oligonucleotide
  Sense strand starting at position 620 of SEQ ID NO: 1244122
uggaauuccuucuccaguu

SEQ ID NO: 1466475 - RNA, 19 nt, Artificial Sequence
  Description of Artificial Sequence: Synthetic oligonucleotide
  Antisense strand to SEQ ID NO: 1466474
aacuggagaaggaauucca

SEQ ID NO: 1466476 - RNA, 19 nt, Artificial Sequence
  Description of Artificial Sequence: Synthetic oligonucleotide
  Sense strand starting at position 1156 of SEQ ID NO: 1244122
ggucuaucccagcaacaac

SEQ ID NO: 1466477 - RNA, 19 nt, Artificial Sequence
  Description of Artificial Sequence: Synthetic oligonucleotide
  Antisense strand to SEQ ID NO: 1466476
guuguugcugggauagacc

SEQ ID NO: 1466478 - RNA, 19 nt, Artificial Sequence
  Description of Artificial Sequence: Synthetic oligonucleotide
  Sense strand starting at position 1750 of SEQ ID NO: 1244122
ggaauuaaugucgacuccu

SEQ ID NO: 1466479 - RNA, 19 nt, Artificial Sequence
  Description of Artificial Sequence: Synthetic oligonucleotide
  Antisense strand to SEQ ID NO: 1466478
aggagucgacauuaauucc

SEQ ID NO: 1466480 - RNA, 19 nt, Artificial Sequence
  Description of Artificial Sequence: Synthetic oligonucleotide
  Sense strand starting at position 1758 of SEQ ID NO: 1244122
ugucgacuccuugauugau

SEQ ID NO: 1466481 - RNA, 19 nt, Artificial Sequence
  Description of Artificial Sequence: Synthetic oligonucleotide
  Antisense strand to SEQ ID NO: 1466480
aucaaucaaggagucgaca

SEQ ID NO: 1466482 - RNA, 19 nt, Artificial Sequence
  Description of Artificial Sequence: Synthetic oligonucleotide
  Sense strand starting at position 1760 of SEQ ID NO: 1244122
ucgacuccuugauugauga

SEQ ID NO: 1466483 - RNA, 19 nt, Artificial Sequence
  Description of Artificial Sequence: Synthetic oligonucleotide
  Antisense strand to SEQ ID NO: 1466482
ucaucaaucaaggagucga

SEQ ID NO: 1466484 - RNA, 19 nt, Artificial Sequence
  Description of Artificial Sequence: Synthetic oligonucleotide
  Sense strand starting at position 1761 of SEQ ID NO: 1244122
cgacuccuugauugaugaa

SEQ ID NO: 1466485 - RNA, 19 nt, Artificial Sequence
  Description of Artificial Sequence: Synthetic oligonucleotide
  Antisense strand to SEQ ID NO: 1466484
uucaucaaucaaggagucg

SEQ ID NO: 1466486 - RNA, 19 nt, Artificial Sequence
  Description of Artificial Sequence: Synthetic oligonucleotide
  Sense strand starting at position 1781 of SEQ ID NO: 1244122
uuugaaaugucuccaagac

SEQ ID NO: 1466487 - RNA, 19 nt, Artificial Sequence
  Description of Artificial Sequence: Synthetic oligonucleotide
  Antisense strand to SEQ ID NO: 1466486
gucuuggagacauuucaaa

SEQ ID NO: 1466488 - RNA, 19 nt, Artificial Sequence
  Description of Artificial Sequence: Synthetic oligonucleotide
  Sense strand starting at position 2025 of SEQ ID NO: 1244122
gggccuuuauaauuguaua

SEQ ID NO: 1466489 - RNA, 19 nt, Artificial Sequence
  Description of Artificial Sequence: Synthetic oligonucleotide
  Antisense strand to SEQ ID NO: 1466488
uauacaauuauaaaggccc

SEQ ID NO: 1466490 - RNA, 19 nt, Artificial Sequence
  Description of Artificial Sequence: Synthetic oligonucleotide
  Sense strand starting at position 2086 of SEQ ID NO: 1244122
ccaggacuccagcgaaauu

SEQ ID NO: 1466491 - RNA, 19 nt, Artificial Sequence
  Description of Artificial Sequence: Synthetic oligonucleotide
  Antisense strand to SEQ ID NO: 1466490
aauuucgcuggaguccugg

SEQ ID NO: 1466492 - RNA, 19 nt, Artificial Sequence
  Description of Artificial Sequence: Synthetic oligonucleotide
  Sense strand starting at position 2608 of SEQ ID NO: 1244122
caguuaaaucuugggaaau

SEQ ID NO: 1466493 - RNA, 19 nt, Artificial Sequence
  Description of Artificial Sequence: Synthetic oligonucleotide
  Antisense strand to SEQ ID NO: 1466492
auuucccaagauuuaacug

SEQ ID NO: 1466494 - RNA, 19 nt, Artificial Sequence
  Description of Artificial Sequence: Synthetic oligonucleotide
  Sense strand starting at position 2610 of SEQ ID NO: 1244122
guuaaaucuugggaaaugg

SEQ ID NO: 1466495 - RNA, 19 nt, Artificial Sequence
  Description of Artificial Sequence: Synthetic oligonucleotide
  Antisense strand to SEQ ID NO: 1466494
ccauuucccaagauuuaac

SEQ ID NO: 1466496 - RNA, 19 nt, Artificial Sequence
  Description of Artificial Sequence: Synthetic oligonucleotide
  Sense strand starting at position 2791 of SEQ ID NO: 1244122
ccaugcuucucugugacau

SEQ ID NO: 1466497 - RNA, 19 nt, Artificial Sequence
  Description of Artificial Sequence: Synthetic oligonucleotide
  Antisense strand to SEQ ID NO: 1466496
augucacagagaagcaugg

SEQ ID NO: 1466498 - RNA, 19 nt, Artificial Sequence
  Description of Artificial Sequence: Synthetic oligonucleotide
  Sense strand starting at position 2826 of SEQ ID NO: 1244122
gagucuaagaugugcaugu

SEQ ID NO: 1466499 - RNA, 19 nt, Artificial Sequence
  Description of Artificial Sequence: Synthetic oligonucleotide
  Antisense strand to SEQ ID NO: 1466498
acaugcacaucuuagacuc

SEQ ID NO: 1466500 - RNA, 19 nt, Artificial Sequence
  Description of Artificial Sequence: Synthetic oligonucleotide
  Sense strand starting at position 2827 of SEQ ID NO: 1244122
agucuaagaugugcaugua

SEQ ID NO: 1466501 - RNA, 19 nt, Artificial Sequence
  Description of Artificial Sequence: Synthetic oligonucleotide
  Antisense strand to SEQ ID NO: 1466500
uacaugcacaucuuagacu

SEQ ID NO: 1466502 - RNA, 19 nt, Artificial Sequence
  Description of Artificial Sequence: Synthetic oligonucleotide
  Sense strand starting at position 2902 of SEQ ID NO: 1244122
ugagguagccauugguuua

SEQ ID NO: 1466503 - RNA, 19 nt, Artificial Sequence
  Description of Artificial Sequence: Synthetic oligonucleotide
  Antisense strand to SEQ ID NO: 1466502
uaaaccaauggcuaccuca

SEQ ID NO: 1466504 - RNA, 19 nt, Artificial Sequence
  Description of Artificial Sequence: Synthetic oligonucleotide
  Sense strand starting at position 2903 of SEQ ID NO: 1244122
gagguagccauugguuuaa

SEQ ID NO: 1466505 - RNA, 19 nt, Artificial Sequence
  Description of Artificial Sequence: Synthetic oligonucleotide
  Antisense strand to SEQ ID NO: 1466504
uuaaaccaauggcuaccuc

SEQ ID NO: 1466506 - RNA, 19 nt, Artificial Sequence
  Description of Artificial Sequence: Synthetic oligonucleotide
  Sense strand starting at position 2905 of SEQ ID NO: 1244122
gguagccauugguuuaacu

SEQ ID NO: 1466507 - RNA, 19 nt, Artificial Sequence
  Description of Artificial Sequence: Synthetic oligonucleotide
  Antisense strand to SEQ ID NO: 1466506
aguuaaaccaauggcuacc

SEQ ID NO: 1466508 - RNA, 19 nt, Artificial Sequence
  Description of Artificial Sequence: Synthetic oligonucleotide
  Sense strand starting at position 2938 of SEQ ID NO: 1244122
aguucagaucagcguuaug

SEQ ID NO: 1466509 - RNA, 19 nt, Artificial Sequence
  Description of Artificial Sequence: Synthetic oligonucleotide
  Antisense strand to SEQ ID NO: 1466508
cauaacgcugaucugaacu

SEQ ID NO: 1466510 - RNA, 19 nt, Artificial Sequence
  Description of Artificial Sequence: Synthetic oligonucleotide
  Sense strand starting at position 2941 of SEQ ID NO: 1244122
ucagaucagcguuaugugu

SEQ ID NO: 1466511 - RNA, 19 nt, Artificial Sequence
  Description of Artificial Sequence: Synthetic oligonucleotide
  Antisense strand to SEQ ID NO: 1466510
acacauaacgcugaucuga

SEQ ID NO: 1466512 - RNA, 19 nt, Artificial Sequence
  Description of Artificial Sequence: Synthetic oligonucleotide
  Sense strand starting at position 3017 of SEQ ID NO: 1244122
uuugccauugugcuaguua

SEQ ID NO: 1466513 - RNA, 19 nt, Artificial Sequence
  Description of Artificial Sequence: Synthetic oligonucleotide
  Antisense strand to SEQ ID NO: 1466512
uaacuagcacaauggcaaa

SEQ ID NO: 1466514 - RNA, 19 nt, Artificial Sequence
  Description of Artificial Sequence: Synthetic oligonucleotide
  Sense strand starting at position 3199 of SEQ ID NO: 1244122
ugaaguuuagaguguugua

SEQ ID NO: 1466515 - RNA, 19 nt, Artificial Sequence
  Description of Artificial Sequence: Synthetic oligonucleotide
  Antisense strand to SEQ ID NO: 1466514
uacaacacucuaaacuuca

SEQ ID NO: 1466516 - RNA, 19 nt, Artificial Sequence
  Description of Artificial Sequence: Synthetic oligonucleotide
  Sense strand starting at position 3255 of SEQ ID NO: 1244122
aagcaauuggugggaaacu

SEQ ID NO: 1466517 - RNA, 19 nt, Artificial Sequence
  Description of Artificial Sequence: Synthetic oligonucleotide
  Antisense strand to SEQ ID NO: 1466516
aguuucccaccaauugcuu

SEQ ID NO: 1466518 - RNA, 19 nt, Artificial Sequence
  Description of Artificial Sequence: Synthetic oligonucleotide
  Sense strand starting at position 3317 of SEQ ID NO: 1244122
uuuaaauaagugggucaga

SEQ ID NO: 1466519 - RNA, 19 nt, Artificial Sequence
  Description of Artificial Sequence: Synthetic oligonucleotide
  Antisense strand to SEQ ID NO: 1466518
ucugacccacuuauuuaaa

SEQ ID NO: 1466520 - RNA, 19 nt, Artificial Sequence
  Description of Artificial Sequence: Synthetic oligonucleotide
  Sense strand starting at position 3348 of SEQ ID NO: 1244122
agaugaggcgaucaaucuu

SEQ ID NO: 1466521 - RNA, 19 nt, Artificial Sequence
  Description of Artificial Sequence: Synthetic oligonucleotide
  Antisense strand to SEQ ID NO: 1466520
aagauugaucgccucaucu

SEQ ID NO: 1466522 - RNA, 19 nt, Artificial Sequence
  Description of Artificial Sequence: Synthetic oligonucleotide
  Sense strand starting at position 3384 of SEQ ID NO: 1244122
cuccgauugcaucaaagaa

SEQ ID NO: 1466523 - RNA, 19 nt, Artificial Sequence
  Description of Artificial Sequence: Synthetic oligonucleotide
  Antisense strand to SEQ ID NO: 1466522
uucuuugaugcaaucggag

SEQ ID NO: 1466524 - RNA, 19 nt, Artificial Sequence
  Description of Artificial Sequence: Synthetic oligonucleotide
  Sense strand starting at position 3543 of SEQ ID NO: 1244122
gcgcuaaguuggguggaaa

SEQ ID NO: 1466525 - RNA, 19 nt, Artificial Sequence
  Description of Artificial Sequence: Synthetic oligonucleotide
  Antisense strand to SEQ ID NO: 1466524
uuuccacccaacuuagcgc

SEQ ID NO: 1466526 - RNA, 19 nt, Artificial Sequence
  Description of Artificial Sequence: Synthetic oligonucleotide
  Sense strand starting at position 3546 of SEQ ID NO: 1244122
cuaaguuggguggaaaguu

SEQ ID NO: 1466527 - RNA, 19 nt, Artificial Sequence
  Description of Artificial Sequence: Synthetic oligonucleotide
  Antisense strand to SEQ ID NO: 1466526
aacuuuccacccaacuuag

SEQ ID NO: 1466528 - RNA, 19 nt, Artificial Sequence
  Description of Artificial Sequence: Synthetic oligonucleotide
  Sense strand starting at position 3556 of SEQ ID NO: 1244122
uggaaaguuugccuggaga

SEQ ID NO: 1466529 - RNA, 19 nt, Artificial Sequence
  Description of Artificial Sequence: Synthetic oligonucleotide
  Antisense strand to SEQ ID NO: 1466528
ucuccaggcaaacuuucca

SEQ ID NO: 1466530 - RNA, 19 nt, Artificial Sequence
  Description of Artificial Sequence: Synthetic oligonucleotide
  Sense strand starting at position 3570 of SEQ ID NO: 1244122
ggagaacucccauggcuuu

SEQ ID NO: 1466531 - RNA, 19 nt, Artificial Sequence
  Description of Artificial Sequence: Synthetic oligonucleotide
  Antisense strand to SEQ ID NO: 1466530
aaagccaugggaguucucc

SEQ ID NO: 1466532 - RNA, 19 nt, Artificial Sequence
  Description of Artificial Sequence: Synthetic oligonucleotide
  Sense strand starting at position 3685 of SEQ ID NO: 1244122
acuuucugucaguguaaca

SEQ ID NO: 1466533 - RNA, 19 nt, Artificial Sequence
  Description of Artificial Sequence: Synthetic oligonucleotide
  Antisense strand to SEQ ID NO: 1466532
uguuacacugacagaaagu

SEQ ID NO: 1466534 - RNA, 19 nt, Artificial Sequence
  Description of Artificial Sequence: Synthetic oligonucleotide
  Sense strand starting at position 3699 of SEQ ID NO: 1244122
uaacaucugcgugaguacu

SEQ ID NO: 1466535 - RNA, 19 nt, Artificial Sequence
  Description of Artificial Sequence: Synthetic oligonucleotide
  Antisense strand to SEQ ID NO: 1466534
aguacucacgcagauguua

SEQ ID NO: 1466536 - RNA, 19 nt, Artificial Sequence
  Description of Artificial Sequence: Synthetic oligonucleotide
  Sense strand starting at position 3701 of SEQ ID NO: 1244122
acaucugcgugaguacuua

SEQ ID NO: 1466537 - RNA, 19 nt, Artificial Sequence
  Description of Artificial Sequence: Synthetic oligonucleotide
  Antisense strand to SEQ ID NO: 1466536
uaaguacucacgcagaugu

SEQ ID NO: 1466538 - RNA, 19 nt, Artificial Sequence
  Description of Artificial Sequence: Synthetic oligonucleotide
  Sense strand starting at position 3728 of SEQ ID NO: 1244122
gacagagaagucugaguag

SEQ ID NO: 1466539 - RNA, 19 nt, Artificial Sequence
  Description of Artificial Sequence: Synthetic oligonucleotide
  Antisense strand to SEQ ID NO: 1466538
cuacucagacuucucuguc

SEQ ID NO: 1466540 - RNA, 19 nt, Artificial Sequence
  Description of Artificial Sequence: Synthetic oligonucleotide
  Sense strand starting at position 3734 of SEQ ID NO: 1244122
gaagucugaguagaagcau

SEQ ID NO: 1466541 - RNA, 19 nt, Artificial Sequence
  Description of Artificial Sequence: Synthetic oligonucleotide
  Antisense strand to SEQ ID NO: 1466540
augcuucuacucagacuuc

SEQ ID NO: 1466542 - RNA, 19 nt, Artificial Sequence
  Description of Artificial Sequence: Synthetic oligonucleotide
  Sense strand starting at position 3848 of SEQ ID NO: 1244122
cugcucugaccugggcaaa

SEQ ID NO: 1466543 - RNA, 19 nt, Artificial Sequence
  Description of Artificial Sequence: Synthetic oligonucleotide
  Antisense strand to SEQ ID NO: 1466542
uuugcccaggucagagcag

SEQ ID NO: 1466544 - RNA, 19 nt, Artificial Sequence
  Description of Artificial Sequence: Synthetic oligonucleotide
  Sense strand starting at position 3887 of SEQ ID NO: 1244122
gcaacuaggcuccaaagaa

SEQ ID NO: 1466545 - RNA, 19 nt, Artificial Sequence
  Description of Artificial Sequence: Synthetic oligonucleotide
  Antisense strand to SEQ ID NO: 1466544
uucuuuggagccuaguugc

SEQ ID NO: 1466546 - RNA, 19 nt, Artificial Sequence
  Description of Artificial Sequence: Synthetic oligonucleotide
  Sense strand starting at position 3959 of SEQ ID NO: 1244122
auaguagcugucuggaagu

SEQ ID NO: 1466547 - RNA, 19 nt, Artificial Sequence
  Description of Artificial Sequence: Synthetic oligonucleotide
  Antisense strand to SEQ ID NO: 1466546
acuuccagacagcuacuau

SEQ ID NO: 1466548 - RNA, 19 nt, Artificial Sequence
  Description of Artificial Sequence: Synthetic oligonucleotide
  Sense strand starting at position 3961 of SEQ ID NO: 1244122
aguagcugucuggaaguca

SEQ ID NO: 1466549 - RNA, 19 nt, Artificial Sequence
  Description of Artificial Sequence: Synthetic oligonucleotide
  Antisense strand to SEQ ID NO: 1466548
ugacuuccagacagcuacu

SEQ ID NO: 1466550 - RNA, 19 nt, Artificial Sequence
  Description of Artificial Sequence: Synthetic oligonucleotide
  Sense strand starting at position 92 of SEQ ID NO: 1244123
caguucccuccaggugaaa

SEQ ID NO: 1466551 - RNA, 19 nt, Artificial Sequence
  Description of Artificial Sequence: Synthetic oligonucleotide
  Antisense strand to SEQ ID NO: 1466550
uuucaccuggagggaacug

SEQ ID NO: 1466552 - RNA, 19 nt, Artificial Sequence
  Description of Artificial Sequence: Synthetic oligonucleotide
  Sense strand starting at position 262 of SEQ ID NO: 1244123
cccagugggcaguaauaga

SEQ ID NO: 1466553 - RNA, 19 nt, Artificial Sequence
  Description of Artificial Sequence: Synthetic oligonucleotide
  Antisense strand to SEQ ID NO: 1466552
ucuauuacugcccacuggg

SEQ ID NO: 1466554 - RNA, 19 nt, Artificial Sequence
  Description of Artificial Sequence: Synthetic oligonucleotide
  Sense strand starting at position 336 of SEQ ID NO: 1244123
uggagaagaugggacauau

SEQ ID NO: 1466555 - RNA, 19 nt, Artificial Sequence
  Description of Artificial Sequence: Synthetic oligonucleotide
  Antisense strand to SEQ ID NO: 1466554
auaugucccaucuucucca

SEQ ID NO: 1466556 - RNA, 19 nt, Artificial Sequence
  Description of Artificial Sequence: Synthetic oligonucleotide
  Sense strand starting at position 479 of SEQ ID NO: 1244123
cugagcuaaucgccuagaa

SEQ ID NO: 1466557 - RNA, 19 nt, Artificial Sequence
  Description of Artificial Sequence: Synthetic oligonucleotide
  Antisense strand to SEQ ID NO: 1466556
uucuaggcgauuagcucag

SEQ ID NO: 1466558 - RNA, 19 nt, Artificial Sequence
  Description of Artificial Sequence: Synthetic oligonucleotide
  Sense strand starting at position 700 of SEQ ID NO: 1244123
auugcuccuccaggaagaa

SEQ ID NO: 1466559 - RNA, 19 nt, Artificial Sequence
  Description of Artificial Sequence: Synthetic oligonucleotide
  Antisense strand to SEQ ID NO: 1466558
uucuuccuggaggagcaau

SEQ ID NO: 1466560 - RNA, 19 nt, Artificial Sequence
  Description of Artificial Sequence: Synthetic oligonucleotide
  Sense strand starting at position 785 of SEQ ID NO: 1244123
uuuccugcuccagagagua

SEQ ID NO: 1466561 - RNA, 19 nt, Artificial Sequence
  Description of Artificial Sequence: Synthetic oligonucleotide
  Antisense strand to SEQ ID NO: 1466560
uacucucuggagcaggaaa

SEQ ID NO: 1466562 - RNA, 19 nt, Artificial Sequence
  Description of Artificial Sequence: Synthetic oligonucleotide
  Sense strand starting at position 871 of SEQ ID NO: 1244123
gcuccaaagcuggaacauu

SEQ ID NO: 1466563 - RNA, 19 nt, Artificial Sequence
  Description of Artificial Sequence: Synthetic oligonucleotide
  Antisense strand to SEQ ID NO: 1466562
aauguuccagcuuuggagc

SEQ ID NO: 1466564 - RNA, 19 nt, Artificial Sequence
  Description of Artificial Sequence: Synthetic oligonucleotide
  Sense strand starting at position 931 of SEQ ID NO: 1244123
gacaacgucucacugguaa

SEQ ID NO: 1466565 - RNA, 19 nt, Artificial Sequence
  Description of Artificial Sequence: Synthetic oligonucleotide
  Antisense strand to SEQ ID NO: 1466564
uuaccagugagacguuguc

SEQ ID NO: 1466566 - RNA, 19 nt, Artificial Sequence
  Description of Artificial Sequence: Synthetic oligonucleotide
  Sense strand starting at position 1308 of SEQ ID NO: 1244123
gagagaguguuucuucuuu

SEQ ID NO: 1466567 - RNA, 19 nt, Artificial Sequence
  Description of Artificial Sequence: Synthetic oligonucleotide
  Antisense strand to SEQ ID NO: 1466566
aaagaagaaacacucucuc

SEQ ID NO: 1466568 - RNA, 19 nt, Artificial Sequence
  Description of Artificial Sequence: Synthetic oligonucleotide
  Sense strand starting at position 1569 of SEQ ID NO: 1244123
guugaauaauaacaaagga

SEQ ID NO: 1466569 - RNA, 19 nt, Artificial Sequence
  Description of Artificial Sequence: Synthetic oligonucleotide
  Antisense strand to SEQ ID NO: 1466568
uccuuuguuauuauucaac

SEQ ID NO: 1466570 - RNA, 19 nt, Artificial Sequence
  Description of Artificial Sequence: Synthetic oligonucleotide
  Sense strand starting at position 1651 of SEQ ID NO: 1244123
cuuagcucuugucuacaca

SEQ ID NO: 1466571 - RNA, 19 nt, Artificial Sequence
  Description of Artificial Sequence: Synthetic oligonucleotide
  Antisense strand to SEQ ID NO: 1466570
uguguagacaagagcuaag

SEQ ID NO: 1466572 - RNA, 19 nt, Artificial Sequence
  Description of Artificial Sequence: Synthetic oligonucleotide
  Sense strand starting at position 1654 of SEQ ID NO: 1244123
agcucuugucuacacagaa

SEQ ID NO: 1466573 - RNA, 19 nt, Artificial Sequence
  Description of Artificial Sequence: Synthetic oligonucleotide
  Antisense strand to SEQ ID NO: 1466572
uucuguguagacaagagcu

SEQ ID NO: 1466574 - RNA, 19 nt, Artificial Sequence
  Description of Artificial Sequence: Synthetic oligonucleotide
  Sense strand starting at position 1667 of SEQ ID NO: 1244123
acagaauggcugugaacuu

SEQ ID NO: 1466575 - RNA, 19 nt, Artificial Sequence
  Description of Artificial Sequence: Synthetic oligonucleotide
  Antisense strand to SEQ ID NO: 1466574
aaguucacagccauucugu

SEQ ID NO: 1466576 - RNA, 19 nt, Artificial Sequence
  Description of Artificial Sequence: Synthetic oligonucleotide
  Sense strand starting at position 1851 of SEQ ID NO: 1244123
cgcaauccgaccgaaauaa

SEQ ID NO: 1466577 - RNA, 19 nt, Artificial Sequence
  Description of Artificial Sequence: Synthetic oligonucleotide
  Antisense strand to SEQ ID NO: 1466576
uuauuucggucggauugcg

SEQ ID NO: 1466578 - RNA, 19 nt, Artificial Sequence
  Description of Artificial Sequence: Synthetic oligonucleotide
  Sense strand starting at position 2248 of SEQ ID NO: 1244123
gcaaucugagccugacaga

SEQ ID NO: 1466579 - RNA, 19 nt, Artificial Sequence
  Description of Artificial Sequence: Synthetic oligonucleotide
  Antisense strand to SEQ ID NO: 1466578
ucugucaggcucagauugc

SEQ ID NO: 1466580 - RNA, 19 nt, Artificial Sequence
  Description of Artificial Sequence: Synthetic oligonucleotide
  Sense strand starting at position 2366 of SEQ ID NO: 1244123
uuucgauacuuucuaugag

SEQ ID NO: 1466581 - RNA, 19 nt, Artificial Sequence
  Description of Artificial Sequence: Synthetic oligonucleotide
  Antisense strand to SEQ ID NO: 1466580
cucauagaaaguaucgaaa

SEQ ID NO: 1466582 - RNA, 19 nt, Artificial Sequence
  Description of Artificial Sequence: Synthetic oligonucleotide
  Sense strand starting at position 2369 of SEQ ID NO: 1244123
cgauacuuucuaugagaaa

SEQ ID NO: 1466583 - RNA, 19 nt, Artificial Sequence
  Description of Artificial Sequence: Synthetic oligonucleotide
  Antisense strand to SEQ ID NO: 1466582
uuucucauagaaaguaucg

SEQ ID NO: 1466584 - RNA, 19 nt, Artificial Sequence
  Description of Artificial Sequence: Synthetic oligonucleotide
  Sense strand starting at position 2428 of SEQ ID NO: 1244123
ggccauuugucuucuugau

SEQ ID NO: 1466585 - RNA, 19 nt, Artificial Sequence
  Description of Artificial Sequence: Synthetic oligonucleotide
  Antisense strand to SEQ ID NO: 1466584
aucaagaagacaaauggcc

SEQ ID NO: 1466586 - RNA, 19 nt, Artificial Sequence
  Description of Artificial Sequence: Synthetic oligonucleotide
  Sense strand starting at position 2434 of SEQ ID NO: 1244123
uugucuucuugauuaucua

SEQ ID NO: 1466587 - RNA, 19 nt, Artificial Sequence
  Description of Artificial Sequence: Synthetic oligonucleotide
  Antisense strand to SEQ ID NO: 1466586
uagauaaucaagaagacaa

SEQ ID NO: 1466588 - RNA, 19 nt, Artificial Sequence
  Description of Artificial Sequence: Synthetic oligonucleotide
  Sense strand starting at position 2435 of SEQ ID NO: 1244123
ugucuucuugauuaucuau

SEQ ID NO: 1466589 - RNA, 19 nt, Artificial Sequence
  Description of Artificial Sequence: Synthetic oligonucleotide
  Antisense strand to SEQ ID NO: 1466588
auagauaaucaagaagaca

SEQ ID NO: 1466590 - RNA, 19 nt, Artificial Sequence
  Description of Artificial Sequence: Synthetic oligonucleotide
  Sense strand starting at position 2449 of SEQ ID NO: 1244123
ucuauuugcuugucagagu

SEQ ID NO: 1466591 - RNA, 19 nt, Artificial Sequence
  Description of Artificial Sequence: Synthetic oligonucleotide
  Antisense strand to SEQ ID NO: 1466590
acucugacaagcaaauaga

SEQ ID NO: 1466592 - RNA, 19 nt, Artificial Sequence
  Description of Artificial Sequence: Synthetic oligonucleotide
  Sense strand starting at position 2464 of SEQ ID NO: 1244123
gaguuugagcuauggcacu

SEQ ID NO: 1466593 - RNA, 19 nt, Artificial Sequence
  Description of Artificial Sequence: Synthetic oligonucleotide
  Antisense strand to SEQ ID NO: 1466592
agugccauagcucaaacuc

SEQ ID NO: 1466594 - RNA, 19 nt, Artificial Sequence
  Description of Artificial Sequence: Synthetic oligonucleotide
  Sense strand starting at position 2530 of SEQ ID NO: 1244123
ccagaaacaucugugcaaa

SEQ ID NO: 1466595 - RNA, 19 nt, Artificial Sequence
  Description of Artificial Sequence: Synthetic oligonucleotide
  Antisense strand to SEQ ID NO: 1466594
uuugcacagauguuucugg

SEQ ID NO: 1466596 - RNA, 19 nt, Artificial Sequence
  Description of Artificial Sequence: Synthetic oligonucleotide
  Sense strand starting at position 2627 of SEQ ID NO: 1244123
auggaauccucucucggaa

SEQ ID NO: 1466597 - RNA, 19 nt, Artificial Sequence
  Description of Artificial Sequence: Synthetic oligonucleotide
  Antisense strand to SEQ ID NO: 1466596
uuccgagagaggauuccau

SEQ ID NO: 1466598 - RNA, 19 nt, Artificial Sequence
  Description of Artificial Sequence: Synthetic oligonucleotide
  Sense strand starting at position 2730 of SEQ ID NO: 1244123
aaggcuuugccguacuuaa

SEQ ID NO: 1466599 - RNA, 19 nt, Artificial Sequence
  Description of Artificial Sequence: Synthetic oligonucleotide
  Antisense strand to SEQ ID NO: 1466598
uuaaguacggcaaagccuu

SEQ ID NO: 1466600 - RNA, 19 nt, Artificial Sequence
  Description of Artificial Sequence: Synthetic oligonucleotide
  Sense strand starting at position 2752 of SEQ ID NO: 1244123
ucuuguguccuacaaugaa

SEQ ID NO: 1466601 - RNA, 19 nt, Artificial Sequence
  Description of Artificial Sequence: Synthetic oligonucleotide
  Antisense strand to SEQ ID NO: 1466600
uucauuguaggacacaaga

SEQ ID NO: 1466602 - RNA, 19 nt, Artificial Sequence
  Description of Artificial Sequence: Synthetic oligonucleotide
  Sense strand starting at position 2755 of SEQ ID NO: 1244123
uguguccuacaaugaaaca

SEQ ID NO: 1466603 - RNA, 19 nt, Artificial Sequence
  Description of Artificial Sequence: Synthetic oligonucleotide
  Antisense strand to SEQ ID NO: 1466602
uguuucauuguaggacaca

SEQ ID NO: 1466604 - RNA, 19 nt, Artificial Sequence
  Description of Artificial Sequence: Synthetic oligonucleotide
  Sense strand starting at position 2904 of SEQ ID NO: 1244123
uuuggaguccucugagaua

SEQ ID NO: 1466605 - RNA, 19 nt, Artificial Sequence
  Description of Artificial Sequence: Synthetic oligonucleotide
  Antisense strand to SEQ ID NO: 1466604
uaucucagaggacuccaaa

SEQ ID NO: 1466606 - RNA, 19 nt, Artificial Sequence
  Description of Artificial Sequence: Synthetic oligonucleotide
  Sense strand starting at position 3009 of SEQ ID NO: 1244123
gguggcauuuguccauauc

SEQ ID NO: 1466607 - RNA, 19 nt, Artificial Sequence
  Description of Artificial Sequence: Synthetic oligonucleotide
  Antisense strand to SEQ ID NO: 1466606
gauauggacaaaugccacc

SEQ ID NO: 1466608 - RNA, 19 nt, Artificial Sequence
  Description of Artificial Sequence: Synthetic oligonucleotide
  Sense strand starting at position 3023 of SEQ ID NO: 1244123
auaucuuuacgccaauguu

SEQ ID NO: 1466609 - RNA, 19 nt, Artificial Sequence
  Description of Artificial Sequence: Synthetic oligonucleotide
  Antisense strand to SEQ ID NO: 1466608
aacauuggcguaaagauau

SEQ ID NO: 1466610 - RNA, 19 nt, Artificial Sequence
  Description of Artificial Sequence: Synthetic oligonucleotide
  Sense strand starting at position 3086 of SEQ ID NO: 1244123
uuucuauugucacucugua

SEQ ID NO: 1466611 - RNA, 19 nt, Artificial Sequence
  Description of Artificial Sequence: Synthetic oligonucleotide
  Antisense strand to SEQ ID NO: 1466610
uacagagugacaauagaaa

SEQ ID NO: 1466612 - RNA, 19 nt, Artificial Sequence
  Description of Artificial Sequence: Synthetic oligonucleotide
  Sense strand starting at position 3283 of SEQ ID NO: 1244123
gggagagggcucugcaaca

SEQ ID NO: 1466613 - RNA, 19 nt, Artificial Sequence
  Description of Artificial Sequence: Synthetic oligonucleotide
  Antisense strand to SEQ ID NO: 1466612
uguugcagagcccucuccc

SEQ ID NO: 1466614 - RNA, 19 nt, Artificial Sequence
  Description of Artificial Sequence: Synthetic oligonucleotide
  Sense strand starting at position 3370 of SEQ ID NO: 1244123
aggcuucugcuguacaacu

SEQ ID NO: 1466615 - RNA, 19 nt, Artificial Sequence
  Description of Artificial Sequence: Synthetic oligonucleotide
  Antisense strand to SEQ ID NO: 1466614
aguuguacagcagaagccu

SEQ ID NO: 1466616 - RNA, 19 nt, Artificial Sequence
  Description of Artificial Sequence: Synthetic oligonucleotide
  Sense strand starting at position 3620 of SEQ ID NO: 1244123
cauucuggcccucagugaa

SEQ ID NO: 1466617 - RNA, 19 nt, Artificial Sequence
  Description of Artificial Sequence: Synthetic oligonucleotide
  Antisense strand to SEQ ID NO: 1466616
uucacugagggccagaaug

SEQ ID NO: 1466618 - RNA, 19 nt, Artificial Sequence
  Description of Artificial Sequence: Synthetic oligonucleotide
  Sense strand starting at position 3633 of SEQ ID NO: 1244123
agugaaugggcacgaaaga

SEQ ID NO: 1466619 - RNA, 19 nt, Artificial Sequence
  Description of Artificial Sequence: Synthetic oligonucleotide
  Antisense strand to SEQ ID NO: 1466618
ucuuucgugcccauucacu

SEQ ID NO: 1466620 - RNA, 19 nt, Artificial Sequence
  Description of Artificial Sequence: Synthetic oligonucleotide
  Sense strand starting at position 3634 of SEQ ID NO: 1244123
gugaaugggcacgaaagau

SEQ ID NO: 1466621 - RNA, 19 nt, Artificial Sequence
  Description of Artificial Sequence: Synthetic oligonucleotide
  Antisense strand to SEQ ID NO: 1466620
aucuuucgugcccauucac

SEQ ID NO: 1466622 - RNA, 19 nt, Artificial Sequence
  Description of Artificial Sequence: Synthetic oligonucleotide
  Sense strand starting at position 3667 of SEQ ID NO: 1244123
guguguuaccgugaccaaa

SEQ ID NO: 1466623 - RNA, 19 nt, Artificial Sequence
  Description of Artificial Sequence: Synthetic oligonucleotide
  Antisense strand to SEQ ID NO: 1466622
uuuggucacgguaacacac

SEQ ID NO: 1466624 - RNA, 19 nt, Artificial Sequence
  Description of Artificial Sequence: Synthetic oligonucleotide
  Sense strand starting at position 3891 of SEQ ID NO: 1244123
cuggaccuggcgugauuaa

SEQ ID NO: 1466625 - RNA, 19 nt, Artificial Sequence
  Description of Artificial Sequence: Synthetic oligonucleotide
  Antisense strand to SEQ ID NO: 1466624
uuaaucacgccagguccag

SEQ ID NO: 1466626 - RNA, 19 nt, Artificial Sequence
  Description of Artificial Sequence: Synthetic oligonucleotide
  Sense strand starting at position 3892 of SEQ ID NO: 1244123
uggaccuggcgugauuaaa

SEQ ID NO: 1466627 - RNA, 19 nt, Artificial Sequence
  Description of Artificial Sequence: Synthetic oligonucleotide
  Antisense strand to SEQ ID NO: 1466626
uuuaaucacgccaggucca

SEQ ID NO: 1466628 - RNA, 19 nt, Artificial Sequence
  Description of Artificial Sequence: Synthetic oligonucleotide
  Sense strand starting at position 3920 of SEQ ID NO: 1244123
uggauccaucuucgccaaa

SEQ ID NO: 1466629 - RNA, 19 nt, Artificial Sequence
  Description of Artificial Sequence: Synthetic oligonucleotide
  Antisense strand to SEQ ID NO: 1466628
uuuggcgaagauggaucca

SEQ ID NO: 1466630 - RNA, 19 nt, Artificial Sequence
  Description of Artificial Sequence: Synthetic oligonucleotide
  Sense strand starting at position 195 of SEQ ID NO: 1244124
cguuuauucguauauaaag

SEQ ID NO: 1466631 - RNA, 19 nt, Artificial Sequence
  Description of Artificial Sequence: Synthetic oligonucleotide
  Antisense strand to SEQ ID NO: 1466630
cuuuauauacgaauaaacg

SEQ ID NO: 1466632 - RNA, 19 nt, Artificial Sequence
  Description of Artificial Sequence: Synthetic oligonucleotide
  Sense strand starting at position 541 of SEQ ID NO: 1244124
agcgguuguagugaaauuc

SEQ ID NO: 1466633 - RNA, 19 nt, Artificial Sequence
  Description of Artificial Sequence: Synthetic oligonucleotide
  Antisense strand to SEQ ID NO: 1466632
gaauuucacuacaaccgcu

SEQ ID NO: 1466634 - RNA, 19 nt, Artificial Sequence
  Description of Artificial Sequence: Synthetic oligonucleotide
  Sense strand starting at position 698 of SEQ ID NO: 1244124
uccuuucuuccagggaaca

SEQ ID NO: 1466635 - RNA, 19 nt, Artificial Sequence
  Description of Artificial Sequence: Synthetic oligonucleotide
  Antisense strand to SEQ ID NO: 1466634
uguucccuggaagaaagga

SEQ ID NO: 1466636 - RNA, 19 nt, Artificial Sequence
  Description of Artificial Sequence: Synthetic oligonucleotide
  Sense strand starting at position 1102 of SEQ ID NO: 1244124
aauaaauacugggaguuga

SEQ ID NO: 1466637 - RNA, 19 nt, Artificial Sequence
  Description of Artificial Sequence: Synthetic oligonucleotide
  Antisense strand to SEQ ID NO: 1466636
ucaacucccaguauuuauu

SEQ ID NO: 1466638 - RNA, 19 nt, Artificial Sequence
  Description of Artificial Sequence: Synthetic oligonucleotide
  Sense strand starting at position 1209 of SEQ ID NO: 1244124
acuguaucucccuggcgaa

SEQ ID NO: 1466639 - RNA, 19 nt, Artificial Sequence
  Description of Artificial Sequence: Synthetic oligonucleotide
  Antisense strand to SEQ ID NO: 1466638
uucgccagggagauacagu

SEQ ID NO: 1466640 - RNA, 19 nt, Artificial Sequence
  Description of Artificial Sequence: Synthetic oligonucleotide
  Sense strand starting at position 1210 of SEQ ID NO: 1244124
cuguaucucccuggcgaaa

SEQ ID NO: 1466641 - RNA, 19 nt, Artificial Sequence
  Description of Artificial Sequence: Synthetic oligonucleotide
  Antisense strand to SEQ ID NO: 1466640
uuucgccagggagauacag

SEQ ID NO: 1466642 - RNA, 19 nt, Artificial Sequence
  Description of Artificial Sequence: Synthetic oligonucleotide
  Sense strand starting at position 1314 of SEQ ID NO: 1244124
guaauuauguggcucugaa

SEQ ID NO: 1466643 - RNA, 19 nt, Artificial Sequence
  Description of Artificial Sequence: Synthetic oligonucleotide
  Antisense strand to SEQ ID NO: 1466642
uucagagccacauaauuac

SEQ ID NO: 1466644 - RNA, 19 nt, Artificial Sequence
  Description of Artificial Sequence: Synthetic oligonucleotide
  Sense strand starting at position 1340 of SEQ ID NO: 1244124
gaccguaaaucuccggcaa

SEQ ID NO: 1466645 - RNA, 19 nt, Artificial Sequence
  Description of Artificial Sequence: Synthetic oligonucleotide
  Antisense strand to SEQ ID NO: 1466644
uugccggagauuuacgguc

SEQ ID NO: 1466646 - RNA, 19 nt, Artificial Sequence
  Description of Artificial Sequence: Synthetic oligonucleotide
  Sense strand starting at position 1352 of SEQ ID NO: 1244124
ccggcaauggcgaguuuau

SEQ ID NO: 1466647 - RNA, 19 nt, Artificial Sequence
  Description of Artificial Sequence: Synthetic oligonucleotide
  Antisense strand to SEQ ID NO: 1466646
auaaacucgccauugccgg

SEQ ID NO: 1466648 - RNA, 19 nt, Artificial Sequence
  Description of Artificial Sequence: Synthetic oligonucleotide
  Sense strand starting at position 1422 of SEQ ID NO: 1244124
gaagucccuuugguguaaa

SEQ ID NO: 1466649 - RNA, 19 nt, Artificial Sequence
  Description of Artificial Sequence: Synthetic oligonucleotide
  Antisense strand to SEQ ID NO: 1466648
uuuacaccaaagggacuuc

SEQ ID NO: 1466650 - RNA, 19 nt, Artificial Sequence
  Description of Artificial Sequence: Synthetic oligonucleotide
  Sense strand starting at position 1425 of SEQ ID NO: 1244124
gucccuuugguguaaagcu

SEQ ID NO: 1466651 - RNA, 19 nt, Artificial Sequence
  Description of Artificial Sequence: Synthetic oligonucleotide
  Antisense strand to SEQ ID NO: 1466650
agcuuuacaccaaagggac

SEQ ID NO: 1466652 - RNA, 19 nt, Artificial Sequence
  Description of Artificial Sequence: Synthetic oligonucleotide
  Sense strand starting at position 1854 of SEQ ID NO: 1244124
gguaaucgcucugugaaua

SEQ ID NO: 1466653 - RNA, 19 nt, Artificial Sequence
  Description of Artificial Sequence: Synthetic oligonucleotide
  Antisense strand to SEQ ID NO: 1466652
uauucacagagcgauuacc

SEQ ID NO: 1466654 - RNA, 19 nt, Artificial Sequence
  Description of Artificial Sequence: Synthetic oligonucleotide
  Sense strand starting at position 1865 of SEQ ID NO: 1244124
ugugaauauuccucgcaug

SEQ ID NO: 1466655 - RNA, 19 nt, Artificial Sequence
  Description of Artificial Sequence: Synthetic oligonucleotide
  Antisense strand to SEQ ID NO: 1466654
caugcgaggaauauucaca

SEQ ID NO: 1466656 - RNA, 19 nt, Artificial Sequence
  Description of Artificial Sequence: Synthetic oligonucleotide
  Sense strand starting at position 1900 of SEQ ID NO: 1244124
gacauaguuugaguugauc

SEQ ID NO: 1466657 - RNA, 19 nt, Artificial Sequence
  Description of Artificial Sequence: Synthetic oligonucleotide
  Antisense strand to SEQ ID NO: 1466656
gaucaacucaaacuauguc

SEQ ID NO: 1466658 - RNA, 19 nt, Artificial Sequence
  Description of Artificial Sequence: Synthetic oligonucleotide
  Sense strand starting at position 1935 of SEQ ID NO: 1244124
ccauuaauuucugggaauu

SEQ ID NO: 1466659 - RNA, 19 nt, Artificial Sequence
  Description of Artificial Sequence: Synthetic oligonucleotide
  Antisense strand to SEQ ID NO: 1466658
aauucccagaaauuaaugg

SEQ ID NO: 1466660 - RNA, 19 nt, Artificial Sequence
  Description of Artificial Sequence: Synthetic oligonucleotide
  Sense strand starting at position 2025 of SEQ ID NO: 1244124
cugucaagugaacaaaguu

SEQ ID NO: 1466661 - RNA, 19 nt, Artificial Sequence
  Description of Artificial Sequence: Synthetic oligonucleotide
  Antisense strand to SEQ ID NO: 1466660
aacuuuguucacuugacag

SEQ ID NO: 1466662 - RNA, 19 nt, Artificial Sequence
  Description of Artificial Sequence: Synthetic oligonucleotide
  Sense strand starting at position 2083 of SEQ ID NO: 1244124
cugcgauucccggauaagg

SEQ ID NO: 1466663 - RNA, 19 nt, Artificial Sequence
  Description of Artificial Sequence: Synthetic oligonucleotide
  Antisense strand to SEQ ID NO: 1466662
ccuuauccgggaaucgcag

SEQ ID NO: 1466664 - RNA, 19 nt, Artificial Sequence
  Description of Artificial Sequence: Synthetic oligonucleotide
  Sense strand starting at position 2085 of SEQ ID NO: 1244124
gcgauucccggauaaggaa

SEQ ID NO: 1466665 - RNA, 19 nt, Artificial Sequence
  Description of Artificial Sequence: Synthetic oligonucleotide
  Antisense strand to SEQ ID NO: 1466664
uuccuuauccgggaaucgc

SEQ ID NO: 1466666 - RNA, 19 nt, Artificial Sequence
  Description of Artificial Sequence: Synthetic oligonucleotide
  Sense strand starting at position 2231 of SEQ ID NO: 1244124
cgcucucuccgggaucaga

SEQ ID NO: 1466667 - RNA, 19 nt, Artificial Sequence
  Description of Artificial Sequence: Synthetic oligonucleotide
  Antisense strand to SEQ ID NO: 1466666
ucugaucccggagagagcg

SEQ ID NO: 1466668 - RNA, 19 nt, Artificial Sequence
  Description of Artificial Sequence: Synthetic oligonucleotide
  Sense strand starting at position 2608 of SEQ ID NO: 1244124
cgcagagggacuugucaga

SEQ ID NO: 1466669 - RNA, 19 nt, Artificial Sequence
  Description of Artificial Sequence: Synthetic oligonucleotide
  Antisense strand to SEQ ID NO: 1466668
ucugacaagucccucugcg

SEQ ID NO: 1466670 - RNA, 19 nt, Artificial Sequence
  Description of Artificial Sequence: Synthetic oligonucleotide
  Sense strand starting at position 2613 of SEQ ID NO: 1244124
agggacuugucagagauga

SEQ ID NO: 1466671 - RNA, 19 nt, Artificial Sequence
  Description of Artificial Sequence: Synthetic oligonucleotide
  Antisense strand to SEQ ID NO: 1466670
ucaucucugacaagucccu

SEQ ID NO: 1466672 - RNA, 19 nt, Artificial Sequence
  Description of Artificial Sequence: Synthetic oligonucleotide
  Sense strand starting at position 2641 of SEQ ID NO: 1244124
cgggcggaucgauaggaaa

SEQ ID NO: 1466673 - RNA, 19 nt, Artificial Sequence
  Description of Artificial Sequence: Synthetic oligonucleotide
  Antisense strand to SEQ ID NO: 1466672
uuuccuaucgauccgcccg

SEQ ID NO: 1466674 - RNA, 19 nt, Artificial Sequence
  Description of Artificial Sequence: Synthetic oligonucleotide
  Sense strand starting at position 2643 of SEQ ID NO: 1244124
ggcggaucgauaggaaauu

SEQ ID NO: 1466675 - RNA, 19 nt, Artificial Sequence
  Description of Artificial Sequence: Synthetic oligonucleotide
  Antisense strand to SEQ ID NO: 1466674
aauuuccuaucgauccgcc

SEQ ID NO: 1466676 - RNA, 19 nt, Artificial Sequence
  Description of Artificial Sequence: Synthetic oligonucleotide
  Sense strand starting at position 2793 of SEQ ID NO: 1244124
ggagaaacgacuugguuuc

SEQ ID NO: 1466677 - RNA, 19 nt, Artificial Sequence
  Description of Artificial Sequence: Synthetic oligonucleotide
  Antisense strand to SEQ ID NO: 1466676
gaaaccaagucguuucucc

SEQ ID NO: 1466678 - RNA, 19 nt, Artificial Sequence
  Description of Artificial Sequence: Synthetic oligonucleotide
  Sense strand starting at position 2803 of SEQ ID NO: 1244124
cuugguuucccacacuaua

SEQ ID NO: 1466679 - RNA, 19 nt, Artificial Sequence
  Description of Artificial Sequence: Synthetic oligonucleotide
  Antisense strand to SEQ ID NO: 1466678
uauagugugggaaaccaag

SEQ ID NO: 1466680 - RNA, 19 nt, Artificial Sequence
  Description of Artificial Sequence: Synthetic oligonucleotide
  Sense strand starting at position 3021 of SEQ ID NO: 1244124
acuccuugguaaucgagua

SEQ ID NO: 1466681 - RNA, 19 nt, Artificial Sequence
  Description of Artificial Sequence: Synthetic oligonucleotide
  Antisense strand to SEQ ID NO: 1466680
uacucgauuaccaaggagu

SEQ ID NO: 1466682 - RNA, 19 nt, Artificial Sequence
  Description of Artificial Sequence: Synthetic oligonucleotide
  Sense strand starting at position 3022 of SEQ ID NO: 1244124
cuccuugguaaucgaguau

SEQ ID NO: 1466683 - RNA, 19 nt, Artificial Sequence
  Description of Artificial Sequence: Synthetic oligonucleotide
  Antisense strand to SEQ ID NO: 1466682
auacucgauuaccaaggag

SEQ ID NO: 1466684 - RNA, 19 nt, Artificial Sequence
  Description of Artificial Sequence: Synthetic oligonucleotide
  Sense strand starting at position 3034 of SEQ ID NO: 1244124
cgaguauuuccaggucauc

SEQ ID NO: 1466685 - RNA, 19 nt, Artificial Sequence
  Description of Artificial Sequence: Synthetic oligonucleotide
  Antisense strand to SEQ ID NO: 1466684
gaugaccuggaaauacucg

SEQ ID NO: 1466686 - RNA, 19 nt, Artificial Sequence
  Description of Artificial Sequence: Synthetic oligonucleotide
  Sense strand starting at position 3044 of SEQ ID NO: 1244124
caggucaucuuguucugaa

SEQ ID NO: 1466687 - RNA, 19 nt, Artificial Sequence
  Description of Artificial Sequence: Synthetic oligonucleotide
  Antisense strand to SEQ ID NO: 1466686
uucagaacaagaugaccug

SEQ ID NO: 1466688 - RNA, 19 nt, Artificial Sequence
  Description of Artificial Sequence: Synthetic oligonucleotide
  Sense strand starting at position 3045 of SEQ ID NO: 1244124
aggucaucuuguucugaac

SEQ ID NO: 1466689 - RNA, 19 nt, Artificial Sequence
  Description of Artificial Sequence: Synthetic oligonucleotide
  Antisense strand to SEQ ID NO: 1466688
guucagaacaagaugaccu

SEQ ID NO: 1466690 - RNA, 19 nt, Artificial Sequence
  Description of Artificial Sequence: Synthetic oligonucleotide
  Sense strand starting at position 3113 of SEQ ID NO: 1244124
gccuucuucgcacacugaa

SEQ ID NO: 1466691 - RNA, 19 nt, Artificial Sequence
  Description of Artificial Sequence: Synthetic oligonucleotide
  Antisense strand to SEQ ID NO: 1466690
uucagugugcgaagaaggc

SEQ ID NO: 1466692 - RNA, 19 nt, Artificial Sequence
  Description of Artificial Sequence: Synthetic oligonucleotide
  Sense strand starting at position 3194 of SEQ ID NO: 1244124
ugcguuugggacgagaaga

SEQ ID NO: 1466693 - RNA, 19 nt, Artificial Sequence
  Description of Artificial Sequence: Synthetic oligonucleotide
  Antisense strand to SEQ ID NO: 1466692
ucuucucgucccaaacgca

SEQ ID NO: 1466694 - RNA, 19 nt, Artificial Sequence
  Description of Artificial Sequence: Synthetic oligonucleotide
  Sense strand starting at position 3386 of SEQ ID NO: 1244124
ucaccagacuguccucauu

SEQ ID NO: 1466695 - RNA, 19 nt, Artificial Sequence
  Description of Artificial Sequence: Synthetic oligonucleotide
  Antisense strand to SEQ ID NO: 1466694
aaugaggacagucugguga

SEQ ID NO: 1466696 - RNA, 19 nt, Artificial Sequence
  Description of Artificial Sequence: Synthetic oligonucleotide
  Sense strand starting at position 3454 of SEQ ID NO: 1244124
auaagagcggaguguuuau

SEQ ID NO: 1466697 - RNA, 19 nt, Artificial Sequence
  Description of Artificial Sequence: Synthetic oligonucleotide
  Antisense strand to SEQ ID NO: 1466696
auaaacacuccgcucuuau

SEQ ID NO: 1466698 - RNA, 19 nt, Artificial Sequence
  Description of Artificial Sequence: Synthetic oligonucleotide
  Sense strand starting at position 3494 of SEQ ID NO: 1244124
auacgaauuugugaccaca

SEQ ID NO: 1466699 - RNA, 19 nt, Artificial Sequence
  Description of Artificial Sequence: Synthetic oligonucleotide
  Antisense strand to SEQ ID NO: 1466698
uguggucacaaauucguau

SEQ ID NO: 1466700 - RNA, 19 nt, Artificial Sequence
  Description of Artificial Sequence: Synthetic oligonucleotide
  Sense strand starting at position 3529 of SEQ ID NO: 1244124
uucggaucuacaggguaua

SEQ ID NO: 1466701 - RNA, 19 nt, Artificial Sequence
  Description of Artificial Sequence: Synthetic oligonucleotide
  Antisense strand to SEQ ID NO: 1466700
uauacccuguagauccgaa

SEQ ID NO: 1466702 - RNA, 19 nt, Artificial Sequence
  Description of Artificial Sequence: Synthetic oligonucleotide
  Sense strand starting at position 3562 of SEQ ID NO: 1244124
agaucuucuuggcccagaa

SEQ ID NO: 1466703 - RNA, 19 nt, Artificial Sequence
  Description of Artificial Sequence: Synthetic oligonucleotide
  Antisense strand to SEQ ID NO: 1466702
uucugggccaagaagaucu

SEQ ID NO: 1466704 - RNA, 19 nt, Artificial Sequence
  Description of Artificial Sequence: Synthetic oligonucleotide
  Sense strand starting at position 3564 of SEQ ID NO: 1244124
aucuucuuggcccagaaau

SEQ ID NO: 1466705 - RNA, 19 nt, Artificial Sequence
  Description of Artificial Sequence: Synthetic oligonucleotide
  Antisense strand to SEQ ID NO: 1466704
auuucugggccaagaagau

SEQ ID NO: 1466706 - RNA, 19 nt, Artificial Sequence
  Description of Artificial Sequence: Synthetic oligonucleotide
  Sense strand starting at position 3809 of SEQ ID NO: 1244124
uggcgcaugaauuaugaga

SEQ ID NO: 1466707 - RNA, 19 nt, Artificial Sequence
  Description of Artificial Sequence: Synthetic oligonucleotide
  Antisense strand to SEQ ID NO: 1466706
ucucauaauucaugcgcca

SEQ ID NO: 1466708 - RNA, 19 nt, Artificial Sequence
  Description of Artificial Sequence: Synthetic oligonucleotide
  Sense strand starting at position 3814 of SEQ ID NO: 1244124
caugaauuaugagauguaa

SEQ ID NO: 1466709 - RNA, 19 nt, Artificial Sequence
  Description of Artificial Sequence: Synthetic oligonucleotide
  Antisense strand to SEQ ID NO: 1466708
uuacaucucauaauucaug

SEQ ID NO: 1466710 - RNA, 19 nt, Artificial Sequence
  Description of Artificial Sequence: Synthetic oligonucleotide
  Sense strand starting at position 747 of SEQ ID NO: 1244125
cauuauuccgguuaaggga

SEQ ID NO: 1466711 - RNA, 19 nt, Artificial Sequence
  Description of Artificial Sequence: Synthetic oligonucleotide
  Antisense strand to SEQ ID NO: 1466710
ucccuuaaccggaauaaug

SEQ ID NO: 1466712 - RNA, 19 nt, Artificial Sequence
  Description of Artificial Sequence: Synthetic oligonucleotide
  Sense strand starting at position 1279 of SEQ ID NO: 1244125
aucuauauuuaggguaaag

SEQ ID NO: 1466713 - RNA, 19 nt, Artificial Sequence
  Description of Artificial Sequence: Synthetic oligonucleotide
  Antisense strand to SEQ ID NO: 1466712
cuuuacccuaaauauagau

SEQ ID NO: 1466714 - RNA, 19 nt, Artificial Sequence
  Description of Artificial Sequence: Synthetic oligonucleotide
  Sense strand starting at position 1370 of SEQ ID NO: 1244125
agagaauuaccauggcuga

SEQ ID NO: 1466715 - RNA, 19 nt, Artificial Sequence
  Description of Artificial Sequence: Synthetic oligonucleotide
  Antisense strand to SEQ ID NO: 1466714
ucagccaugguaauucucu

SEQ ID NO: 1466716 - RNA, 19 nt, Artificial Sequence
  Description of Artificial Sequence: Synthetic oligonucleotide
  Sense strand starting at position 1371 of SEQ ID NO: 1244125
gagaauuaccauggcugau

SEQ ID NO: 1466717 - RNA, 19 nt, Artificial Sequence
  Description of Artificial Sequence: Synthetic oligonucleotide
  Antisense strand to SEQ ID NO: 1466716
aucagccaugguaauucuc

SEQ ID NO: 1466718 - RNA, 19 nt, Artificial Sequence
  Description of Artificial Sequence: Synthetic oligonucleotide
  Sense strand starting at position 1389 of SEQ ID NO: 1244125
ugugaagcuuccucaucca

SEQ ID NO: 1466719 - RNA, 19 nt, Artificial Sequence
  Description of Artificial Sequence: Synthetic oligonucleotide
  Antisense strand to SEQ ID NO: 1466718
uggaugaggaagcuucaca

SEQ ID NO: 1466720 - RNA, 19 nt, Artificial Sequence
  Description of Artificial Sequence: Synthetic oligonucleotide
  Sense strand starting at position 1538 of SEQ ID NO: 1244125
ucgucuauuucggugaaau

SEQ ID NO: 1466721 - RNA, 19 nt, Artificial Sequence
  Description of Artificial Sequence: Synthetic oligonucleotide
  Antisense strand to SEQ ID NO: 1466720
auuucaccgaaauagacga

SEQ ID NO: 1466722 - RNA, 19 nt, Artificial Sequence
  Description of Artificial Sequence: Synthetic oligonucleotide
  Sense strand starting at position 1539 of SEQ ID NO: 1244125
cgucuauuucggugaaauu

SEQ ID NO: 1466723 - RNA, 19 nt, Artificial Sequence
  Description of Artificial Sequence: Synthetic oligonucleotide
  Antisense strand to SEQ ID NO: 1466722
aauuucaccgaaauagacg

SEQ ID NO: 1466724 - RNA, 19 nt, Artificial Sequence
  Description of Artificial Sequence: Synthetic oligonucleotide
  Sense strand starting at position 1782 of SEQ ID NO: 1244125
gguccaucccauuguaauu

SEQ ID NO: 1466725 - RNA, 19 nt, Artificial Sequence
  Description of Artificial Sequence: Synthetic oligonucleotide
  Antisense strand to SEQ ID NO: 1466724
aauuacaaugggauggacc

SEQ ID NO: 1466726 - RNA, 19 nt, Artificial Sequence
  Description of Artificial Sequence: Synthetic oligonucleotide
  Sense strand starting at position 1829 of SEQ ID NO: 1244125
gcgggaucccuguaagagc

SEQ ID NO: 1466727 - RNA, 19 nt, Artificial Sequence
  Description of Artificial Sequence: Synthetic oligonucleotide
  Antisense strand to SEQ ID NO: 1466726
gcucuuacagggaucccgc

SEQ ID NO: 1466728 - RNA, 19 nt, Artificial Sequence
  Description of Artificial Sequence: Synthetic oligonucleotide
  Sense strand starting at position 1854 of SEQ ID NO: 1244125
gagagcugccacugccaua

SEQ ID NO: 1466729 - RNA, 19 nt, Artificial Sequence
  Description of Artificial Sequence: Synthetic oligonucleotide
  Antisense strand to SEQ ID NO: 1466728
uauggcaguggcagcucuc

SEQ ID NO: 1466730 - RNA, 19 nt, Artificial Sequence
  Description of Artificial Sequence: Synthetic oligonucleotide
  Sense strand starting at position 1867 of SEQ ID NO: 1244125
gccauaauuuagcaacuga

SEQ ID NO: 1466731 - RNA, 19 nt, Artificial Sequence
  Description of Artificial Sequence: Synthetic oligonucleotide
  Antisense strand to SEQ ID NO: 1466730
ucaguugcuaaauuauggc

SEQ ID NO: 1466732 - RNA, 19 nt, Artificial Sequence
  Description of Artificial Sequence: Synthetic oligonucleotide
  Sense strand starting at position 1881 of SEQ ID NO: 1244125
acugauaguccgggccauu

SEQ ID NO: 1466733 - RNA, 19 nt, Artificial Sequence
  Description of Artificial Sequence: Synthetic oligonucleotide
  Antisense strand to SEQ ID NO: 1466732
aauggcccggacuaucagu

SEQ ID NO: 1466734 - RNA, 19 nt, Artificial Sequence
  Description of Artificial Sequence: Synthetic oligonucleotide
  Sense strand starting at position 1959 of SEQ ID NO: 1244125
gcuugauuuguggaucgug

SEQ ID NO: 1466735 - RNA, 19 nt, Artificial Sequence
  Description of Artificial Sequence: Synthetic oligonucleotide
  Antisense strand to SEQ ID NO: 1466734
cacgauccacaaaucaagc

SEQ ID NO: 1466736 - RNA, 19 nt, Artificial Sequence
  Description of Artificial Sequence: Synthetic oligonucleotide
  Sense strand starting at position 1966 of SEQ ID NO: 1244125
uuguggaucguggucguua

SEQ ID NO: 1466737 - RNA, 19 nt, Artificial Sequence
  Description of Artificial Sequence: Synthetic oligonucleotide
  Antisense strand to SEQ ID NO: 1466736
uaacgaccacgauccacaa

SEQ ID NO: 1466738 - RNA, 19 nt, Artificial Sequence
  Description of Artificial Sequence: Synthetic oligonucleotide
  Sense strand starting at position 1998 of SEQ ID NO: 1244125
cacgauuuaugauguauua

SEQ ID NO: 1466739 - RNA, 19 nt, Artificial Sequence
  Description of Artificial Sequence: Synthetic oligonucleotide
  Antisense strand to SEQ ID NO: 1466738
uaauacaucauaaaucgug

SEQ ID NO: 1466740 - RNA, 19 nt, Artificial Sequence
  Description of Artificial Sequence: Synthetic oligonucleotide
  Sense strand starting at position 2019 of SEQ ID NO: 1244125
gaauuauagcgaugcacug

SEQ ID NO: 1466741 - RNA, 19 nt, Artificial Sequence
  Description of Artificial Sequence: Synthetic oligonucleotide
  Antisense strand to SEQ ID NO: 1466740
cagugcaucgcuauaauuc

SEQ ID NO: 1466742 - RNA, 19 nt, Artificial Sequence
  Description of Artificial Sequence: Synthetic oligonucleotide
  Sense strand starting at position 2051 of SEQ ID NO: 1244125
uauguaugcggccaaauau

SEQ ID NO: 1466743 - RNA, 19 nt, Artificial Sequence
  Description of Artificial Sequence: Synthetic oligonucleotide
  Antisense strand to SEQ ID NO: 1466742
auauuuggccgcauacaua

SEQ ID NO: 1466744 - RNA, 19 nt, Artificial Sequence
  Description of Artificial Sequence: Synthetic oligonucleotide
  Sense strand starting at position 2131 of SEQ ID NO: 1244125
cguaaauucucgcugauga

SEQ ID NO: 1466745 - RNA, 19 nt, Artificial Sequence
  Description of Artificial Sequence: Synthetic oligonucleotide
  Antisense strand to SEQ ID NO: 1466744
ucaucagcgagaauuuacg

SEQ ID NO: 1466746 - RNA, 19 nt, Artificial Sequence
  Description of Artificial Sequence: Synthetic oligonucleotide
  Sense strand starting at position 2132 of SEQ ID NO: 1244125
guaaauucucgcugaugac

SEQ ID NO: 1466747 - RNA, 19 nt, Artificial Sequence
  Description of Artificial Sequence: Synthetic oligonucleotide
  Antisense strand to SEQ ID NO: 1466746
gucaucagcgagaauuuac

SEQ ID NO: 1466748 - RNA, 19 nt, Artificial Sequence
  Description of Artificial Sequence: Synthetic oligonucleotide
  Sense strand starting at position 2166 of SEQ ID NO: 1244125
augcucuaugguuacaaau

SEQ ID NO: 1466749 - RNA, 19 nt, Artificial Sequence
  Description of Artificial Sequence: Synthetic oligonucleotide
  Antisense strand to SEQ ID NO: 1466748
auuuguaaccauagagcau

SEQ ID NO: 1466750 - RNA, 19 nt, Artificial Sequence
  Description of Artificial Sequence: Synthetic oligonucleotide
  Sense strand starting at position 2200 of SEQ ID NO: 1244125
aucguuagggccgauucaa

SEQ ID NO: 1466751 - RNA, 19 nt, Artificial Sequence
  Description of Artificial Sequence: Synthetic oligonucleotide
  Antisense strand to SEQ ID NO: 1466750
uugaaucggcccuaacgau

SEQ ID NO: 1466752 - RNA, 19 nt, Artificial Sequence
  Description of Artificial Sequence: Synthetic oligonucleotide
  Sense strand starting at position 2487 of SEQ ID NO: 1244125
ggguuagccucucuauuug

SEQ ID NO: 1466753 - RNA, 19 nt, Artificial Sequence
  Description of Artificial Sequence: Synthetic oligonucleotide
  Antisense strand to SEQ ID NO: 1466752
caaauagagaggcuaaccc

SEQ ID NO: 1466754 - RNA, 19 nt, Artificial Sequence
  Description of Artificial Sequence: Synthetic oligonucleotide
  Sense strand starting at position 2505 of SEQ ID NO: 1244125
gguucuuucucccuacauc

SEQ ID NO: 1466755 - RNA, 19 nt, Artificial Sequence
  Description of Artificial Sequence: Synthetic oligonucleotide
  Antisense strand to SEQ ID NO: 1466754
gauguagggagaaagaacc

SEQ ID NO: 1466756 - RNA, 19 nt, Artificial Sequence
  Description of Artificial Sequence: Synthetic oligonucleotide
  Sense strand starting at position 2519 of SEQ ID NO: 1244125
acaucaucauugucguuau

SEQ ID NO: 1466757 - RNA, 19 nt, Artificial Sequence
  Description of Artificial Sequence: Synthetic oligonucleotide
  Antisense strand to SEQ ID NO: 1466756
auaacgacaaugaugaugu

SEQ ID NO: 1466758 - RNA, 19 nt, Artificial Sequence
  Description of Artificial Sequence: Synthetic oligonucleotide
  Sense strand starting at position 2522 of SEQ ID NO: 1244125
ucaucauugucguuauuau

SEQ ID NO: 1466759 - RNA, 19 nt, Artificial Sequence
  Description of Artificial Sequence: Synthetic oligonucleotide
  Antisense strand to SEQ ID NO: 1466758
auaauaacgacaaugauga

SEQ ID NO: 1466760 - RNA, 19 nt, Artificial Sequence
  Description of Artificial Sequence: Synthetic oligonucleotide
  Sense strand starting at position 2593 of SEQ ID NO: 1244125
cuuugcaagucuccgaauu

SEQ ID NO: 1466761 - RNA, 19 nt, Artificial Sequence
  Description of Artificial Sequence: Synthetic oligonucleotide
  Antisense strand to SEQ ID NO: 1466760
aauucggagacuugcaaag

SEQ ID NO: 1466762 - RNA, 19 nt, Artificial Sequence
  Description of Artificial Sequence: Synthetic oligonucleotide
  Sense strand starting at position 2605 of SEQ ID NO: 1244125
ccgaauuggaggcggaaau

SEQ ID NO: 1466763 - RNA, 19 nt, Artificial Sequence
  Description of Artificial Sequence: Synthetic oligonucleotide
  Antisense strand to SEQ ID NO: 1466762
auuuccgccuccaauucgg

SEQ ID NO: 1466764 - RNA, 19 nt, Artificial Sequence
  Description of Artificial Sequence: Synthetic oligonucleotide
  Sense strand starting at position 2655 of SEQ ID NO: 1244125
caauuauugcaacggguuu

SEQ ID NO: 1466765 - RNA, 19 nt, Artificial Sequence
  Description of Artificial Sequence: Synthetic oligonucleotide
  Antisense strand to SEQ ID NO: 1466764
aaacccguugcaauaauug

SEQ ID NO: 1466766 - RNA, 19 nt, Artificial Sequence
  Description of Artificial Sequence: Synthetic oligonucleotide
  Sense strand starting at position 2776 of SEQ ID NO: 1244125
aggagaagcguucacuucu

SEQ ID NO: 1466767 - RNA, 19 nt, Artificial Sequence
  Description of Artificial Sequence: Synthetic oligonucleotide
  Antisense strand to SEQ ID NO: 1466766
agaagugaacgcuucuccu

SEQ ID NO: 1466768 - RNA, 19 nt, Artificial Sequence
  Description of Artificial Sequence: Synthetic oligonucleotide
  Sense strand starting at position 2956 of SEQ ID NO: 1244125
ugcuuaguuugaguaguaa

SEQ ID NO: 1466769 - RNA, 19 nt, Artificial Sequence
  Description of Artificial Sequence: Synthetic oligonucleotide
  Antisense strand to SEQ ID NO: 1466768
uuacuacucaaacuaagca

SEQ ID NO: 1466770 - RNA, 19 nt, Artificial Sequence
  Description of Artificial Sequence: Synthetic oligonucleotide
  Sense strand starting at position 2965 of SEQ ID NO: 1244125
ugaguaguaacaugugucu

SEQ ID NO: 1466771 - RNA, 19 nt, Artificial Sequence
  Description of Artificial Sequence: Synthetic oligonucleotide
  Antisense strand to SEQ ID NO: 1466770
agacacauguuacuacuca

SEQ ID NO: 1466772 - RNA, 19 nt, Artificial Sequence
  Description of Artificial Sequence: Synthetic oligonucleotide
  Sense strand starting at position 2967 of SEQ ID NO: 1244125
aguaguaacaugugucuga

SEQ ID NO: 1466773 - RNA, 19 nt, Artificial Sequence
  Description of Artificial Sequence: Synthetic oligonucleotide
  Antisense strand to SEQ ID NO: 1466772
ucagacacauguuacuacu

SEQ ID NO: 1466774 - RNA, 19 nt, Artificial Sequence
  Description of Artificial Sequence: Synthetic oligonucleotide
  Sense strand starting at position 2971 of SEQ ID NO: 1244125
guaacaugugucugagagu

SEQ ID NO: 1466775 - RNA, 19 nt, Artificial Sequence
  Description of Artificial Sequence: Synthetic oligonucleotide
  Antisense strand to SEQ ID NO: 1466774
acucucagacacauguuac

SEQ ID NO: 1466776 - RNA, 19 nt, Artificial Sequence
  Description of Artificial Sequence: Synthetic oligonucleotide
  Sense strand starting at position 3076 of SEQ ID NO: 1244125
gagaauuugccugguggca

SEQ ID NO: 1466777 - RNA, 19 nt, Artificial Sequence
  Description of Artificial Sequence: Synthetic oligonucleotide
  Antisense strand to SEQ ID NO: 1466776
ugccaccaggcaaauucuc

SEQ ID NO: 1466778 - RNA, 19 nt, Artificial Sequence
  Description of Artificial Sequence: Synthetic oligonucleotide
  Sense strand starting at position 3296 of SEQ ID NO: 1244125
gagccauucuggguugaga

SEQ ID NO: 1466779 - RNA, 19 nt, Artificial Sequence
  Description of Artificial Sequence: Synthetic oligonucleotide
  Antisense strand to SEQ ID NO: 1466778
ucucaacccagaauggcuc

SEQ ID NO: 1466780 - RNA, 19 nt, Artificial Sequence
  Description of Artificial Sequence: Synthetic oligonucleotide
  Sense strand starting at position 3711 of SEQ ID NO: 1244125
cuguguauacacgaggaaa

SEQ ID NO: 1466781 - RNA, 19 nt, Artificial Sequence
  Description of Artificial Sequence: Synthetic oligonucleotide
  Antisense strand to SEQ ID NO: 1466780
uuuccucguguauacacag

SEQ ID NO: 1466782 - RNA, 19 nt, Artificial Sequence
  Description of Artificial Sequence: Synthetic oligonucleotide
  Sense strand starting at position 3838 of SEQ ID NO: 1244125
gacugaucgcuccagccuu

SEQ ID NO: 1466783 - RNA, 19 nt, Artificial Sequence
  Description of Artificial Sequence: Synthetic oligonucleotide
  Antisense strand to SEQ ID NO: 1466782
aaggcuggagcgaucaguc

SEQ ID NO: 1466784 - RNA, 19 nt, Artificial Sequence
  Description of Artificial Sequence: Synthetic oligonucleotide
  Sense strand starting at position 3911 of SEQ ID NO: 1244125
cucgccuuugcugaagaau

SEQ ID NO: 1466785 - RNA, 19 nt, Artificial Sequence
  Description of Artificial Sequence: Synthetic oligonucleotide
  Antisense strand to SEQ ID NO: 1466784
auucuucagcaaaggcgag

SEQ ID NO: 1466786 - RNA, 19 nt, Artificial Sequence
  Description of Artificial Sequence: Synthetic oligonucleotide
  Sense strand starting at position 3914 of SEQ ID NO: 1244125
gccuuugcugaagaauucu

SEQ ID NO: 1466787 - RNA, 19 nt, Artificial Sequence
  Description of Artificial Sequence: Synthetic oligonucleotide
  Antisense strand to SEQ ID NO: 1466786
agaauucuucagcaaaggc

SEQ ID NO: 1466788 - RNA, 19 nt, Artificial Sequence
  Description of Artificial Sequence: Synthetic oligonucleotide
  Sense strand starting at position 3923 of SEQ ID NO: 1244125
gaagaauucuggcucagga

SEQ ID NO: 1466789 - RNA, 19 nt, Artificial Sequence
  Description of Artificial Sequence: Synthetic oligonucleotide
  Antisense strand to SEQ ID NO: 1466788
uccugagccagaauucuuc

SEQ ID NO: 1466790 - RNA, 19 nt, Artificial Sequence
  Description of Artificial Sequence: Synthetic oligonucleotide
  Sense strand starting at position 64 of SEQ ID NO: 1244126
cuagcuuaggacugagaua

SEQ ID NO: 1466791 - RNA, 19 nt, Artificial Sequence
  Description of Artificial Sequence: Synthetic oligonucleotide
  Antisense strand to SEQ ID NO: 1466790
uaucucaguccuaagcuag

SEQ ID NO: 1466792 - RNA, 19 nt, Artificial Sequence
  Description of Artificial Sequence: Synthetic oligonucleotide
  Sense strand starting at position 187 of SEQ ID NO: 1244126
aaucacauguucgugcaaa

SEQ ID NO: 1466793 - RNA, 19 nt, Artificial Sequence
  Description of Artificial Sequence: Synthetic oligonucleotide
  Antisense strand to SEQ ID NO: 1466792
uuugcacgaacaugugauu

SEQ ID NO: 1466794 - RNA, 19 nt, Artificial Sequence
  Description of Artificial Sequence: Synthetic oligonucleotide
  Sense strand starting at position 250 of SEQ ID NO: 1244126
cacuuaucucuuggcugga

SEQ ID NO: 1466795 - RNA, 19 nt, Artificial Sequence
  Description of Artificial Sequence: Synthetic oligonucleotide
  Antisense strand to SEQ ID NO: 1466794
uccagccaagagauaagug

SEQ ID NO: 1466796 - RNA, 19 nt, Artificial Sequence
  Description of Artificial Sequence: Synthetic oligonucleotide
  Sense strand starting at position 251 of SEQ ID NO: 1244126
acuuaucucuuggcuggaa

SEQ ID NO: 1466797 - RNA, 19 nt, Artificial Sequence
  Description of Artificial Sequence: Synthetic oligonucleotide
  Antisense strand to SEQ ID NO: 1466796
uuccagccaagagauaagu

SEQ ID NO: 1466798 - RNA, 19 nt, Artificial Sequence
  Description of Artificial Sequence: Synthetic oligonucleotide
  Sense strand starting at position 348 of SEQ ID NO: 1244126
uuaggaaucucugucaccu

SEQ ID NO: 1466799 - RNA, 19 nt, Artificial Sequence
  Description of Artificial Sequence: Synthetic oligonucleotide
  Antisense strand to SEQ ID NO: 1466798
aggugacagagauuccuaa

SEQ ID NO: 1466800 - RNA, 19 nt, Artificial Sequence
  Description of Artificial Sequence: Synthetic oligonucleotide
  Sense strand starting at position 480 of SEQ ID NO: 1244126
cgccgcuaggucccauaau

SEQ ID NO: 1466801 - RNA, 19 nt, Artificial Sequence
  Description of Artificial Sequence: Synthetic oligonucleotide
  Antisense strand to SEQ ID NO: 1466800
auuaugggaccuagcggcg

SEQ ID NO: 1466802 - RNA, 19 nt, Artificial Sequence
  Description of Artificial Sequence: Synthetic oligonucleotide
  Sense strand starting at position 699 of SEQ ID NO: 1244126
guaauagaaucaguaucac

SEQ ID NO: 1466803 - RNA, 19 nt, Artificial Sequence
  Description of Artificial Sequence: Synthetic oligonucleotide
  Antisense strand to SEQ ID NO: 1466802
gugauacugauucuauuac

SEQ ID NO: 1466804 - RNA, 19 nt, Artificial Sequence
  Description of Artificial Sequence: Synthetic oligonucleotide
  Sense strand starting at position 733 of SEQ ID NO: 1244126
uguaaccuaccgcauuaaa

SEQ ID NO: 1466805 - RNA, 19 nt, Artificial Sequence
  Description of Artificial Sequence: Synthetic oligonucleotide
  Antisense strand to SEQ ID NO: 1466804
uuuaaugcgguagguuaca

SEQ ID NO: 1466806 - RNA, 19 nt, Artificial Sequence
  Description of Artificial Sequence: Synthetic oligonucleotide
  Sense strand starting at position 798 of SEQ ID NO: 1244126
uggcgagauacuugggcau

SEQ ID NO: 1466807 - RNA, 19 nt, Artificial Sequence
  Description of Artificial Sequence: Synthetic oligonucleotide
  Antisense strand to SEQ ID NO: 1466806
augcccaaguaucucgcca

SEQ ID NO: 1466808 - RNA, 19 nt, Artificial Sequence
  Description of Artificial Sequence: Synthetic oligonucleotide
  Sense strand starting at position 801 of SEQ ID NO: 1244126
cgagauacuugggcauucu

SEQ ID NO: 1466809 - RNA, 19 nt, Artificial Sequence
  Description of Artificial Sequence: Synthetic oligonucleotide
  Antisense strand to SEQ ID NO: 1466808
agaaugcccaaguaucucg

SEQ ID NO: 1466810 - RNA, 19 nt, Artificial Sequence
  Description of Artificial Sequence: Synthetic oligonucleotide
  Sense strand starting at position 894 of SEQ ID NO: 1244126
augucuccgaagggagaua

SEQ ID NO: 1466811 - RNA, 19 nt, Artificial Sequence
  Description of Artificial Sequence: Synthetic oligonucleotide
  Antisense strand to SEQ ID NO: 1466810
uaucucccuucggagacau

SEQ ID NO: 1466812 - RNA, 19 nt, Artificial Sequence
  Description of Artificial Sequence: Synthetic oligonucleotide
  Sense strand starting at position 1353 of SEQ ID NO: 1244126
cacugaauuuccugggaag

SEQ ID NO: 1466813 - RNA, 19 nt, Artificial Sequence
  Description of Artificial Sequence: Synthetic oligonucleotide
  Antisense strand to SEQ ID NO: 1466812
cuucccaggaaauucagug

SEQ ID NO: 1466814 - RNA, 19 nt, Artificial Sequence
  Description of Artificial Sequence: Synthetic oligonucleotide
  Sense strand starting at position 1356 of SEQ ID NO: 1244126
ugaauuuccugggaagcuu

SEQ ID NO: 1466815 - RNA, 19 nt, Artificial Sequence
  Description of Artificial Sequence: Synthetic oligonucleotide
  Antisense strand to SEQ ID NO: 1466814
aagcuucccaggaaauuca

SEQ ID NO: 1466816 - RNA, 19 nt, Artificial Sequence
  Description of Artificial Sequence: Synthetic oligonucleotide
  Sense strand starting at position 1634 of SEQ ID NO: 1244126
ccuucucugacuugggaga

SEQ ID NO: 1466817 - RNA, 19 nt, Artificial Sequence
  Description of Artificial Sequence: Synthetic oligonucleotide
  Antisense strand to SEQ ID NO: 1466816
ucucccaagucagagaagg

SEQ ID NO: 1466818 - RNA, 19 nt, Artificial Sequence
  Description of Artificial Sequence: Synthetic oligonucleotide
  Sense strand starting at position 1668 of SEQ ID NO: 1244126
uucugacauuugcauagaa

SEQ ID NO: 1466819 - RNA, 19 nt, Artificial Sequence
  Description of Artificial Sequence: Synthetic oligonucleotide
  Antisense strand to SEQ ID NO: 1466818
uucuaugcaaaugucagaa

SEQ ID NO: 1466820 - RNA, 19 nt, Artificial Sequence
  Description of Artificial Sequence: Synthetic oligonucleotide
  Sense strand starting at position 1770 of SEQ ID NO: 1244126
aucccagaucagugagcaa

SEQ ID NO: 1466821 - RNA, 19 nt, Artificial Sequence
  Description of Artificial Sequence: Synthetic oligonucleotide
  Antisense strand to SEQ ID NO: 1466820
uugcucacugaucugggau

SEQ ID NO: 1466822 - RNA, 19 nt, Artificial Sequence
  Description of Artificial Sequence: Synthetic oligonucleotide
  Sense strand starting at position 1773 of SEQ ID NO: 1244126
ccagaucagugagcaaauu

SEQ ID NO: 1466823 - RNA, 19 nt, Artificial Sequence
  Description of Artificial Sequence: Synthetic oligonucleotide
  Antisense strand to SEQ ID NO: 1466822
aauuugcucacugaucugg

SEQ ID NO: 1466824 - RNA, 19 nt, Artificial Sequence
  Description of Artificial Sequence: Synthetic oligonucleotide
  Sense strand starting at position 2441 of SEQ ID NO: 1244126
ggaaacggugucuagaguu

SEQ ID NO: 1466825 - RNA, 19 nt, Artificial Sequence
  Description of Artificial Sequence: Synthetic oligonucleotide
  Antisense strand to SEQ ID NO: 1466824
aacucuagacaccguuucc

SEQ ID NO: 1466826 - RNA, 19 nt, Artificial Sequence
  Description of Artificial Sequence: Synthetic oligonucleotide
  Sense strand starting at position 2591 of SEQ ID NO: 1244126
uuagauucccuagggcuua

SEQ ID NO: 1466827 - RNA, 19 nt, Artificial Sequence
  Description of Artificial Sequence: Synthetic oligonucleotide
  Antisense strand to SEQ ID NO: 1466826
uaagcccuagggaaucuaa

SEQ ID NO: 1466828 - RNA, 19 nt, Artificial Sequence
  Description of Artificial Sequence: Synthetic oligonucleotide
  Sense strand starting at position 2749 of SEQ ID NO: 1244126
ccagguuuccuaugacagc

SEQ ID NO: 1466829 - RNA, 19 nt, Artificial Sequence
  Description of Artificial Sequence: Synthetic oligonucleotide
  Antisense strand to SEQ ID NO: 1466828
gcugucauaggaaaccugg

SEQ ID NO: 1466830 - RNA, 19 nt, Artificial Sequence
  Description of Artificial Sequence: Synthetic oligonucleotide
  Sense strand starting at position 2783 of SEQ ID NO: 1244126
gggcguuacguggucauua

SEQ ID NO: 1466831 - RNA, 19 nt, Artificial Sequence
  Description of Artificial Sequence: Synthetic oligonucleotide
  Antisense strand to SEQ ID NO: 1466830
uaaugaccacguaacgccc

SEQ ID NO: 1466832 - RNA, 19 nt, Artificial Sequence
  Description of Artificial Sequence: Synthetic oligonucleotide
  Sense strand starting at position 2887 of SEQ ID NO: 1244126
cuauccaaagucuguuuaa

SEQ ID NO: 1466833 - RNA, 19 nt, Artificial Sequence
  Description of Artificial Sequence: Synthetic oligonucleotide
  Antisense strand to SEQ ID NO: 1466832
uuaaacagacuuuggauag

SEQ ID NO: 1466834 - RNA, 19 nt, Artificial Sequence
  Description of Artificial Sequence: Synthetic oligonucleotide
  Sense strand starting at position 2890 of SEQ ID NO: 1244126
uccaaagucuguuuaaauu

SEQ ID NO: 1466835 - RNA, 19 nt, Artificial Sequence
  Description of Artificial Sequence: Synthetic oligonucleotide
  Antisense strand to SEQ ID NO: 1466834
aauuuaaacagacuuugga

SEQ ID NO: 1466836 - RNA, 19 nt, Artificial Sequence
  Description of Artificial Sequence: Synthetic oligonucleotide
  Sense strand starting at position 2918 of SEQ ID NO: 1244126
cagaguuuauaaucgaaua

SEQ ID NO: 1466837 - RNA, 19 nt, Artificial Sequence
  Description of Artificial Sequence: Synthetic oligonucleotide
  Antisense strand to SEQ ID NO: 1466836
uauucgauuauaaacucug

SEQ ID NO: 1466838 - RNA, 19 nt, Artificial Sequence
  Description of Artificial Sequence: Synthetic oligonucleotide
  Sense strand starting at position 2997 of SEQ ID NO: 1244126
cugcaaucagcggauguuu

SEQ ID NO: 1466839 - RNA, 19 nt, Artificial Sequence
  Description of Artificial Sequence: Synthetic oligonucleotide
  Antisense strand to SEQ ID NO: 1466838
aaacauccgcugauugcag

SEQ ID NO: 1466840 - RNA, 19 nt, Artificial Sequence
  Description of Artificial Sequence: Synthetic oligonucleotide
  Sense strand starting at position 3091 of SEQ ID NO: 1244126
cuaccaaugcccgaauucu

SEQ ID NO: 1466841 - RNA, 19 nt, Artificial Sequence
  Description of Artificial Sequence: Synthetic oligonucleotide
  Antisense strand to SEQ ID NO: 1466840
agaauucgggcauugguag

SEQ ID NO: 1466842 - RNA, 19 nt, Artificial Sequence
  Description of Artificial Sequence: Synthetic oligonucleotide
  Sense strand starting at position 3099 of SEQ ID NO: 1244126
gcccgaauucuggaaacga

SEQ ID NO: 1466843 - RNA, 19 nt, Artificial Sequence
  Description of Artificial Sequence: Synthetic oligonucleotide
  Antisense strand to SEQ ID NO: 1466842
ucguuuccagaauucgggc

SEQ ID NO: 1466844 - RNA, 19 nt, Artificial Sequence
  Description of Artificial Sequence: Synthetic oligonucleotide
  Sense strand starting at position 3678 of SEQ ID NO: 1244126
gguuuccaggccugaauga

SEQ ID NO: 1466845 - RNA, 19 nt, Artificial Sequence
  Description of Artificial Sequence: Synthetic oligonucleotide
  Antisense strand to SEQ ID NO: 1466844
ucauucaggccuggaaacc

SEQ ID NO: 1466846 - RNA, 19 nt, Artificial Sequence
  Description of Artificial Sequence: Synthetic oligonucleotide
  Sense strand starting at position 3765 of SEQ ID NO: 1244126
gggcuucugagugcguuua

SEQ ID NO: 1466847 - RNA, 19 nt, Artificial Sequence
  Description of Artificial Sequence: Synthetic oligonucleotide
  Antisense strand to SEQ ID NO: 1466846
uaaacgcacucagaagccc

SEQ ID NO: 1466848 - RNA, 19 nt, Artificial Sequence
  Description of Artificial Sequence: Synthetic oligonucleotide
  Sense strand starting at position 3793 of SEQ ID NO: 1244126
aaaugugaaucuguguuua

SEQ ID NO: 1466849 - RNA, 19 nt, Artificial Sequence
  Description of Artificial Sequence: Synthetic oligonucleotide
  Antisense strand to SEQ ID NO: 1466848
uaaacacagauucacauuu

SEQ ID NO: 1466850 - RNA, 19 nt, Artificial Sequence
  Description of Artificial Sequence: Synthetic oligonucleotide
  Sense strand starting at position 3795 of SEQ ID NO: 1244126
augugaaucuguguuuaua

SEQ ID NO: 1466851 - RNA, 19 nt, Artificial Sequence
  Description of Artificial Sequence: Synthetic oligonucleotide
  Antisense strand to SEQ ID NO: 1466850
uauaaacacagauucacau

SEQ ID NO: 1466852 - RNA, 19 nt, Artificial Sequence
  Description of Artificial Sequence: Synthetic oligonucleotide
  Sense strand starting at position 3797 of SEQ ID NO: 1244126
gugaaucuguguuuauaag

SEQ ID NO: 1466853 - RNA, 19 nt, Artificial Sequence
  Description of Artificial Sequence: Synthetic oligonucleotide
  Antisense strand to SEQ ID NO: 1466852
cuuauaaacacagauucac

SEQ ID NO: 1466854 - RNA, 19 nt, Artificial Sequence
  Description of Artificial Sequence: Synthetic oligonucleotide
  Sense strand starting at position 3808 of SEQ ID NO: 1244126
uuuauaagccaauguguga

SEQ ID NO: 1466855 - RNA, 19 nt, Artificial Sequence
  Description of Artificial Sequence: Synthetic oligonucleotide
  Antisense strand to SEQ ID NO: 1466854
ucacacauuggcuuauaaa

SEQ ID NO: 1466856 - RNA, 19 nt, Artificial Sequence
  Description of Artificial Sequence: Synthetic oligonucleotide
  Sense strand starting at position 3825 of SEQ ID NO: 1244126
gaauguacguugguaucaa

SEQ ID NO: 1466857 - RNA, 19 nt, Artificial Sequence
  Description of Artificial Sequence: Synthetic oligonucleotide
  Antisense strand to SEQ ID NO: 1466856
uugauaccaacguacauuc

SEQ ID NO: 1466858 - RNA, 19 nt, Artificial Sequence
  Description of Artificial Sequence: Synthetic oligonucleotide
  Sense strand starting at position 3871 of SEQ ID NO: 1244126
acuugugagcgugugugaa

SEQ ID NO: 1466859 - RNA, 19 nt, Artificial Sequence
  Description of Artificial Sequence: Synthetic oligonucleotide
  Antisense strand to SEQ ID NO: 1466858
uucacacacgcucacaagu

SEQ ID NO: 1466860 - RNA, 19 nt, Artificial Sequence
  Description of Artificial Sequence: Synthetic oligonucleotide
  Sense strand starting at position 3887 of SEQ ID NO: 1244126
gaacaugaaugccuauguu

SEQ ID NO: 1466861 - RNA, 19 nt, Artificial Sequence
  Description of Artificial Sequence: Synthetic oligonucleotide
  Antisense strand to SEQ ID NO: 1466860
aacauaggcauucauguuc

SEQ ID NO: 1466862 - RNA, 19 nt, Artificial Sequence
  Description of Artificial Sequence: Synthetic oligonucleotide
  Sense strand starting at position 3945 of SEQ ID NO: 1244126
uguuaacauauggguauga

SEQ ID NO: 1466863 - RNA, 19 nt, Artificial Sequence
  Description of Artificial Sequence: Synthetic oligonucleotide
  Antisense strand to SEQ ID NO: 1466862
ucauacccauauguuaaca

SEQ ID NO: 1466864 - RNA, 19 nt, Artificial Sequence
  Description of Artificial Sequence: Synthetic oligonucleotide
  Sense strand starting at position 3960 of SEQ ID NO: 1244126
augagugucucuuugugac

SEQ ID NO: 1466865 - RNA, 19 nt, Artificial Sequence
  Description of Artificial Sequence: Synthetic oligonucleotide
  Antisense strand to SEQ ID NO: 1466864
gucacaaagagacacucau

SEQ ID NO: 1466866 - RNA, 19 nt, Artificial Sequence
  Description of Artificial Sequence: Synthetic oligonucleotide
  Sense strand starting at position 3967 of SEQ ID NO: 1244126
ucucuuugugacugugaca

SEQ ID NO: 1466867 - RNA, 19 nt, Artificial Sequence
  Description of Artificial Sequence: Synthetic oligonucleotide
  Antisense strand to SEQ ID NO: 1466866
ugucacagucacaaagaga

SEQ ID NO: 1466868 - RNA, 19 nt, Artificial Sequence
  Description of Artificial Sequence: Synthetic oligonucleotide
  Sense strand starting at position 3982 of SEQ ID NO: 1244126
gacaguguguauguuugau

SEQ ID NO: 1466869 - RNA, 19 nt, Artificial Sequence
  Description of Artificial Sequence: Synthetic oligonucleotide
  Antisense strand to SEQ ID NO: 1466868
aucaaacauacacacuguc

SEQ ID NO: 1466870 - RNA, 19 nt, Artificial Sequence
  Description of Artificial Sequence: Synthetic oligonucleotide
  Sense strand starting at position 228 of SEQ ID NO: 1244127
acuuuaaagaggugcugau

SEQ ID NO: 1466871 - RNA, 19 nt, Artificial Sequence
  Description of Artificial Sequence: Synthetic oligonucleotide
  Antisense strand to SEQ ID NO: 1466870
aucagcaccucuuuaaagu

SEQ ID NO: 1466872 - RNA, 19 nt, Artificial Sequence
  Description of Artificial Sequence: Synthetic oligonucleotide
  Sense strand starting at position 371 of SEQ ID NO: 1244127
gcaguuaaacuauggagca

SEQ ID NO: 1466873 - RNA, 19 nt, Artificial Sequence
  Description of Artificial Sequence: Synthetic oligonucleotide
  Antisense strand to SEQ ID NO: 1466872
ugcuccauaguuuaacugc

SEQ ID NO: 1466874 - RNA, 19 nt, Artificial Sequence
  Description of Artificial Sequence: Synthetic oligonucleotide
  Sense strand starting at position 409 of SEQ ID NO: 1244127
acuaauacugaugguauga

SEQ ID NO: 1466875 - RNA, 19 nt, Artificial Sequence
  Description of Artificial Sequence: Synthetic oligonucleotide
  Antisense strand to SEQ ID NO: 1466874
ucauaccaucaguauuagu

SEQ ID NO: 1466876 - RNA, 19 nt, Artificial Sequence
  Description of Artificial Sequence: Synthetic oligonucleotide
  Sense strand starting at position 470 of SEQ ID NO: 1244127
gccucugaccaugagucuu

SEQ ID NO: 1466877 - RNA, 19 nt, Artificial Sequence
  Description of Artificial Sequence: Synthetic oligonucleotide
  Antisense strand to SEQ ID NO: 1466876
aagacucauggucagaggc

SEQ ID NO: 1466878 - RNA, 19 nt, Artificial Sequence
  Description of Artificial Sequence: Synthetic oligonucleotide
  Sense strand starting at position 514 of SEQ ID NO: 1244127
cccuaaguucgucugcuuu

SEQ ID NO: 1466879 - RNA, 19 nt, Artificial Sequence
  Description of Artificial Sequence: Synthetic oligonucleotide
  Antisense strand to SEQ ID NO: 1466878
aaagcagacgaacuuaggg

SEQ ID NO: 1466880 - RNA, 19 nt, Artificial Sequence
  Description of Artificial Sequence: Synthetic oligonucleotide
  Sense strand starting at position 682 of SEQ ID NO: 1244127
aagggucacuuaucuggaa

SEQ ID NO: 1466881 - RNA, 19 nt, Artificial Sequence
  Description of Artificial Sequence: Synthetic oligonucleotide
  Antisense strand to SEQ ID NO: 1466880
uuccagauaagugacccuu

SEQ ID NO: 1466882 - RNA, 19 nt, Artificial Sequence
  Description of Artificial Sequence: Synthetic oligonucleotide
  Sense strand starting at position 683 of SEQ ID NO: 1244127
agggucacuuaucuggaau

SEQ ID NO: 1466883 - RNA, 19 nt, Artificial Sequence
  Description of Artificial Sequence: Synthetic oligonucleotide
  Antisense strand to SEQ ID NO: 1466882
auuccagauaagugacccu

SEQ ID NO: 1466884 - RNA, 19 nt, Artificial Sequence
  Description of Artificial Sequence: Synthetic oligonucleotide
  Sense strand starting at position 684 of SEQ ID NO: 1244127
gggucacuuaucuggaaug

SEQ ID NO: 1466885 - RNA, 19 nt, Artificial Sequence
  Description of Artificial Sequence: Synthetic oligonucleotide
  Antisense strand to SEQ ID NO: 1466884
cauuccagauaagugaccc

SEQ ID NO: 1466886 - RNA, 19 nt, Artificial Sequence
  Description of Artificial Sequence: Synthetic oligonucleotide
  Sense strand starting at position 954 of SEQ ID NO: 1244127
aauuguccugaugggaaua

SEQ ID NO: 1466887 - RNA, 19 nt, Artificial Sequence
  Description of Artificial Sequence: Synthetic oligonucleotide
  Antisense strand to SEQ ID NO: 1466886
uauucccaucaggacaauu

SEQ ID NO: 1466888 - RNA, 19 nt, Artificial Sequence
  Description of Artificial Sequence: Synthetic oligonucleotide
  Sense strand starting at position 955 of SEQ ID NO: 1244127
auuguccugaugggaauaa

SEQ ID NO: 1466889 - RNA, 19 nt, Artificial Sequence
  Description of Artificial Sequence: Synthetic oligonucleotide
  Antisense strand to SEQ ID NO: 1466888
uuauucccaucaggacaau

SEQ ID NO: 1466890 - RNA, 19 nt, Artificial Sequence
  Description of Artificial Sequence: Synthetic oligonucleotide
  Sense strand starting at position 1009 of SEQ ID NO: 1244127
gggagaauugcuuagcgcu

SEQ ID NO: 1466891 - RNA, 19 nt, Artificial Sequence
  Description of Artificial Sequence: Synthetic oligonucleotide
  Antisense strand to SEQ ID NO: 1466890
agcgcuaagcaauucuccc

SEQ ID NO: 1466892 - RNA, 19 nt, Artificial Sequence
  Description of Artificial Sequence: Synthetic oligonucleotide
  Sense strand starting at position 1081 of SEQ ID NO: 1244127
cugagauccuuagcuggga

SEQ ID NO: 1466893 - RNA, 19 nt, Artificial Sequence
  Description of Artificial Sequence: Synthetic oligonucleotide
  Antisense strand to SEQ ID NO: 1466892
ucccagcuaaggaucucag

SEQ ID NO: 1466894 - RNA, 19 nt, Artificial Sequence
  Description of Artificial Sequence: Synthetic oligonucleotide
  Sense strand starting at position 1082 of SEQ ID NO: 1244127
ugagauccuuagcugggaa

SEQ ID NO: 1466895 - RNA, 19 nt, Artificial Sequence
  Description of Artificial Sequence: Synthetic oligonucleotide
  Antisense strand to SEQ ID NO: 1466894
uucccagcuaaggaucuca

SEQ ID NO: 1466896 - RNA, 19 nt, Artificial Sequence
  Description of Artificial Sequence: Synthetic oligonucleotide
  Sense strand starting at position 1124 of SEQ ID NO: 1244127
auggcuauucucugcaaac

SEQ ID NO: 1466897 - RNA, 19 nt, Artificial Sequence
  Description of Artificial Sequence: Synthetic oligonucleotide
  Antisense strand to SEQ ID NO: 1466896
guuugcagagaauagccau

SEQ ID NO: 1466898 - RNA, 19 nt, Artificial Sequence
  Description of Artificial Sequence: Synthetic oligonucleotide
  Sense strand starting at position 1125 of SEQ ID NO: 1244127
uggcuauucucugcaaaca

SEQ ID NO: 1466899 - RNA, 19 nt, Artificial Sequence
  Description of Artificial Sequence: Synthetic oligonucleotide
  Antisense strand to SEQ ID NO: 1466898
uguuugcagagaauagcca

SEQ ID NO: 1466900 - RNA, 19 nt, Artificial Sequence
  Description of Artificial Sequence: Synthetic oligonucleotide
  Sense strand starting at position 1126 of SEQ ID NO: 1244127
ggcuauucucugcaaacac

SEQ ID NO: 1466901 - RNA, 19 nt, Artificial Sequence
  Description of Artificial Sequence: Synthetic oligonucleotide
  Antisense strand to SEQ ID NO: 1466900
guguuugcagagaauagcc

SEQ ID NO: 1466902 - RNA, 19 nt, Artificial Sequence
  Description of Artificial Sequence: Synthetic oligonucleotide
  Sense strand starting at position 1146 of SEQ ID NO: 1244127
ggccuuccuccgcaagaca

SEQ ID NO: 1466903 - RNA, 19 nt, Artificial Sequence
  Description of Artificial Sequence: Synthetic oligonucleotide
  Antisense strand to SEQ ID NO: 1466902
ugucuugcggaggaaggcc

SEQ ID NO: 1466904 - RNA, 19 nt, Artificial Sequence
  Description of Artificial Sequence: Synthetic oligonucleotide
  Sense strand starting at position 1307 of SEQ ID NO: 1244127
gagagcaccgagcaaauau

SEQ ID NO: 1466905 - RNA, 19 nt, Artificial Sequence
  Description of Artificial Sequence: Synthetic oligonucleotide
  Antisense strand to SEQ ID NO: 1466904
auauuugcucggugcucuc

SEQ ID NO: 1466906 - RNA, 19 nt, Artificial Sequence
  Description of Artificial Sequence: Synthetic oligonucleotide
  Sense strand starting at position 1606 of SEQ ID NO: 1244127
cggagagguucugcucaaa

SEQ ID NO: 1466907 - RNA, 19 nt, Artificial Sequence
  Description of Artificial Sequence: Synthetic oligonucleotide
  Antisense strand to SEQ ID NO: 1466906
uuugagcagaaccucuccg

SEQ ID NO: 1466908 - RNA, 19 nt, Artificial Sequence
  Description of Artificial Sequence: Synthetic oligonucleotide
  Sense strand starting at position 1803 of SEQ ID NO: 1244127
caagaaguuuguucuggga

SEQ ID NO: 1466909 - RNA, 19 nt, Artificial Sequence
  Description of Artificial Sequence: Synthetic oligonucleotide
  Antisense strand to SEQ ID NO: 1466908
ucccagaacaaacuucuug

SEQ ID NO: 1466910 - RNA, 19 nt, Artificial Sequence
  Description of Artificial Sequence: Synthetic oligonucleotide
  Sense strand starting at position 1841 of SEQ ID NO: 1244127
cgaacuugaggcuggauau

SEQ ID NO: 1466911 - RNA, 19 nt, Artificial Sequence
  Description of Artificial Sequence: Synthetic oligonucleotide
  Antisense strand to SEQ ID NO: 1466910
auauccagccucaaguucg

SEQ ID NO: 1466912 - RNA, 19 nt, Artificial Sequence
  Description of Artificial Sequence: Synthetic oligonucleotide
  Sense strand starting at position 1842 of SEQ ID NO: 1244127
gaacuugaggcuggauauu

SEQ ID NO: 1466913 - RNA, 19 nt, Artificial Sequence
  Description of Artificial Sequence: Synthetic oligonucleotide
  Antisense strand to SEQ ID NO: 1466912
aauauccagccucaaguuc

SEQ ID NO: 1466914 - RNA, 19 nt, Artificial Sequence
  Description of Artificial Sequence: Synthetic oligonucleotide
  Sense strand starting at position 1904 of SEQ ID NO: 1244127
gccggaugauuuguaggca

SEQ ID NO: 1466915 - RNA, 19 nt, Artificial Sequence
  Description of Artificial Sequence: Synthetic oligonucleotide
  Antisense strand to SEQ ID NO: 1466914
ugccuacaaaucauccggc

SEQ ID NO: 1466916 - RNA, 19 nt, Artificial Sequence
  Description of Artificial Sequence: Synthetic oligonucleotide
  Sense strand starting at position 1943 of SEQ ID NO: 1244127
uuacgagauuccuugauau

SEQ ID NO: 1466917 - RNA, 19 nt, Artificial Sequence
  Description of Artificial Sequence: Synthetic oligonucleotide
  Antisense strand to SEQ ID NO: 1466916
auaucaaggaaucucguaa

SEQ ID NO: 1466918 - RNA, 19 nt, Artificial Sequence
  Description of Artificial Sequence: Synthetic oligonucleotide
  Sense strand starting at position 2099 of SEQ ID NO: 1244127
uuguguggcguuggauuua

SEQ ID NO: 1466919 - RNA, 19 nt, Artificial Sequence
  Description of Artificial Sequence: Synthetic oligonucleotide
  Antisense strand to SEQ ID NO: 1466918
uaaauccaacgccacacaa

SEQ ID NO: 1466920 - RNA, 19 nt, Artificial Sequence
  Description of Artificial Sequence: Synthetic oligonucleotide
  Sense strand starting at position 2374 of SEQ ID NO: 1244127
aggucuguucuuuauuaaa

SEQ ID NO: 1466921 - RNA, 19 nt, Artificial Sequence
  Description of Artificial Sequence: Synthetic oligonucleotide
  Antisense strand to SEQ ID NO: 1466920
uuuaauaaagaacagaccu

SEQ ID NO: 1466922 - RNA, 19 nt, Artificial Sequence
  Description of Artificial Sequence: Synthetic oligonucleotide
  Sense strand starting at position 2498 of SEQ ID NO: 1244127
cagauaugcgggcggagau

SEQ ID NO: 1466923 - RNA, 19 nt, Artificial Sequence
  Description of Artificial Sequence: Synthetic oligonucleotide
  Antisense strand to SEQ ID NO: 1466922
aucuccgcccgcauaucug

SEQ ID NO: 1466924 - RNA, 19 nt, Artificial Sequence
  Description of Artificial Sequence: Synthetic oligonucleotide
  Sense strand starting at position 2518 of SEQ ID NO: 1244127
gagcaagucuuccuaggug

SEQ ID NO: 1466925 - RNA, 19 nt, Artificial Sequence
  Description of Artificial Sequence: Synthetic oligonucleotide
  Antisense strand to SEQ ID NO: 1466924
caccuaggaagacuugcuc

SEQ ID NO: 1466926 - RNA, 19 nt, Artificial Sequence
  Description of Artificial Sequence: Synthetic oligonucleotide
  Sense strand starting at position 2788 of SEQ ID NO: 1244127
gagccauggccucagaaca

SEQ ID NO: 1466927 - RNA, 19 nt, Artificial Sequence
  Description of Artificial Sequence: Synthetic oligonucleotide
  Antisense strand to SEQ ID NO: 1466926
uguucugaggccauggcuc

SEQ ID NO: 1466928 - RNA, 19 nt, Artificial Sequence
  Description of Artificial Sequence: Synthetic oligonucleotide
  Sense strand starting at position 3325 of SEQ ID NO: 1244127
ucggguucucgcuuguaaa

SEQ ID NO: 1466929 - RNA, 19 nt, Artificial Sequence
  Description of Artificial Sequence: Synthetic oligonucleotide
  Antisense strand to SEQ ID NO: 1466928
uuuacaagcgagaacccga

SEQ ID NO: 1466930 - RNA, 19 nt, Artificial Sequence
  Description of Artificial Sequence: Synthetic oligonucleotide
  Sense strand starting at position 3335 of SEQ ID NO: 1244127
gcuuguaaacuuuauugua

SEQ ID NO: 1466931 - RNA, 19 nt, Artificial Sequence
  Description of Artificial Sequence: Synthetic oligonucleotide
  Antisense strand to SEQ ID NO: 1466930
uacaauaaaguuuacaagc

SEQ ID NO: 1466932 - RNA, 19 nt, Artificial Sequence
  Description of Artificial Sequence: Synthetic oligonucleotide
  Sense strand starting at position 3512 of SEQ ID NO: 1244127
gcgcaugcuaacuaaagua

SEQ ID NO: 1466933 - RNA, 19 nt, Artificial Sequence
  Description of Artificial Sequence: Synthetic oligonucleotide
  Antisense strand to SEQ ID NO: 1466932
uacuuuaguuagcaugcgc

SEQ ID NO: 1466934 - RNA, 19 nt, Artificial Sequence
  Description of Artificial Sequence: Synthetic oligonucleotide
  Sense strand starting at position 3731 of SEQ ID NO: 1244127
aaagaauuacggcgugaau

SEQ ID NO: 1466935 - RNA, 19 nt, Artificial Sequence
  Description of Artificial Sequence: Synthetic oligonucleotide
  Antisense strand to SEQ ID NO: 1466934
auucacgccguaauucuuu

SEQ ID NO: 1466936 - RNA, 19 nt, Artificial Sequence
  Description of Artificial Sequence: Synthetic oligonucleotide
  Sense strand starting at position 3733 of SEQ ID NO: 1244127
agaauuacggcgugaauag

SEQ ID NO: 1466937 - RNA, 19 nt, Artificial Sequence
  Description of Artificial Sequence: Synthetic oligonucleotide
  Antisense strand to SEQ ID NO: 1466936
cuauucacgccguaauucu

SEQ ID NO: 1466938 - RNA, 19 nt, Artificial Sequence
  Description of Artificial Sequence: Synthetic oligonucleotide
  Sense strand starting at position 3756 of SEQ ID NO: 1244127
uuucauguuguugggagaa

SEQ ID NO: 1466939 - RNA, 19 nt, Artificial Sequence
  Description of Artificial Sequence: Synthetic oligonucleotide
  Antisense strand to SEQ ID NO: 1466938
uucucccaacaacaugaaa

SEQ ID NO: 1466940 - RNA, 19 nt, Artificial Sequence
  Description of Artificial Sequence: Synthetic oligonucleotide
  Sense strand starting at position 3768 of SEQ ID NO: 1244127
gggagaacuuagcagaaau

SEQ ID NO: 1466941 - RNA, 19 nt, Artificial Sequence
  Description of Artificial Sequence: Synthetic oligonucleotide
  Antisense strand to SEQ ID NO: 1466940
auuucugcuaaguucuccc

SEQ ID NO: 1466942 - RNA, 19 nt, Artificial Sequence
  Description of Artificial Sequence: Synthetic oligonucleotide
  Sense strand starting at position 3778 of SEQ ID NO: 1244127
agcagaaaucgguaccuug

SEQ ID NO: 1466943 - RNA, 19 nt, Artificial Sequence
  Description of Artificial Sequence: Synthetic oligonucleotide
  Antisense strand to SEQ ID NO: 1466942
caagguaccgauuucugcu

SEQ ID NO: 1466944 - RNA, 19 nt, Artificial Sequence
  Description of Artificial Sequence: Synthetic oligonucleotide
  Sense strand starting at position 3785 of SEQ ID NO: 1244127
aucgguaccuuggucauua

SEQ ID NO: 1466945 - RNA, 19 nt, Artificial Sequence
  Description of Artificial Sequence: Synthetic oligonucleotide
  Antisense strand to SEQ ID NO: 1466944
uaaugaccaagguaccgau

SEQ ID NO: 1466946 - RNA, 19 nt, Artificial Sequence
  Description of Artificial Sequence: Synthetic oligonucleotide
  Sense strand starting at position 3789 of SEQ ID NO: 1244127
guaccuuggucauuacaaa

SEQ ID NO: 1466947 - RNA, 19 nt, Artificial Sequence
  Description of Artificial Sequence: Synthetic oligonucleotide
  Antisense strand to SEQ ID NO: 1466946
uuuguaaugaccaagguac

SEQ ID NO: 1466948 - RNA, 19 nt, Artificial Sequence
  Description of Artificial Sequence: Synthetic oligonucleotide
  Sense strand starting at position 3920 of SEQ ID NO: 1244127
gggagccuuugcuuaaauc

SEQ ID NO: 1466949 - RNA, 19 nt, Artificial Sequence
  Description of Artificial Sequence: Synthetic oligonucleotide
  Antisense strand to SEQ ID NO: 1466948
gauuuaagcaaaggcuccc

SEQ ID NO: 1466950 - RNA, 19 nt, Artificial Sequence
  Description of Artificial Sequence: Synthetic oligonucleotide
  Sense strand starting at position 2 of SEQ ID NO: 1244128
gggagccuuugcuuaaauc

SEQ ID NO: 1466951 - RNA, 19 nt, Artificial Sequence
  Description of Artificial Sequence: Synthetic oligonucleotide
  Antisense strand to SEQ ID NO: 1466950
gauuuaagcaaaggcuccc

SEQ ID NO: 1466952 - RNA, 19 nt, Artificial Sequence
  Description of Artificial Sequence: Synthetic oligonucleotide
  Sense strand starting at position 363 of SEQ ID NO: 1244128
gggaacuugucuuuguugu

SEQ ID NO: 1466953 - RNA, 19 nt, Artificial Sequence
  Description of Artificial Sequence: Synthetic oligonucleotide
  Antisense strand to SEQ ID NO: 1466952
acaacaaagacaaguuccc

SEQ ID NO: 1466954 - RNA, 19 nt, Artificial Sequence
  Description of Artificial Sequence: Synthetic oligonucleotide
  Sense strand starting at position 364 of SEQ ID NO: 1244128
ggaacuugucuuuguuguu

SEQ ID NO: 1466955 - RNA, 19 nt, Artificial Sequence
  Description of Artificial Sequence: Synthetic oligonucleotide
  Antisense strand to SEQ ID NO: 1466954
aacaacaaagacaaguucc

SEQ ID NO: 1466956 - RNA, 19 nt, Artificial Sequence
  Description of Artificial Sequence: Synthetic oligonucleotide
  Sense strand starting at position 468 of SEQ ID NO: 1244128
cgccgcuuacgagucagau

SEQ ID NO: 1466957 - RNA, 19 nt, Artificial Sequence
  Description of Artificial Sequence: Synthetic oligonucleotide
  Antisense strand to SEQ ID NO: 1466956
aucugacucguaagcggcg

SEQ ID NO: 1466958 - RNA, 19 nt, Artificial Sequence
  Description of Artificial Sequence: Synthetic oligonucleotide
  Sense strand starting at position 470 of SEQ ID NO: 1244128
ccgcuuacgagucagauag

SEQ ID NO: 1466959 - RNA, 19 nt, Artificial Sequence
  Description of Artificial Sequence: Synthetic oligonucleotide
  Antisense strand to SEQ ID NO: 1466958
cuaucugacucguaagcgg

SEQ ID NO: 1466960 - RNA, 19 nt, Artificial Sequence
  Description of Artificial Sequence: Synthetic oligonucleotide
  Sense strand starting at position 476 of SEQ ID NO: 1244128
acgagucagauagggauua

SEQ ID NO: 1466961 - RNA, 19 nt, Artificial Sequence
  Description of Artificial Sequence: Synthetic oligonucleotide
  Antisense strand to SEQ ID NO: 1466960
uaaucccuaucugacucgu

SEQ ID NO: 1466962 - RNA, 19 nt, Artificial Sequence
  Description of Artificial Sequence: Synthetic oligonucleotide
  Sense strand starting at position 662 of SEQ ID NO: 1244128
gggagaccauuauaauaag

SEQ ID NO: 1466963 - RNA, 19 nt, Artificial Sequence
  Description of Artificial Sequence: Synthetic oligonucleotide
  Antisense strand to SEQ ID NO: 1466962
cuuauuauaauggucuccc

SEQ ID NO: 1466964 - RNA, 19 nt, Artificial Sequence
  Description of Artificial Sequence: Synthetic oligonucleotide
  Sense strand starting at position 853 of SEQ ID NO: 1244128
uuagaagugccauaaacuu

SEQ ID NO: 1466965 - RNA, 19 nt, Artificial Sequence
  Description of Artificial Sequence: Synthetic oligonucleotide
  Antisense strand to SEQ ID NO: 1466964
aaguuuauggcacuucuaa

SEQ ID NO: 1466966 - RNA, 19 nt, Artificial Sequence
  Description of Artificial Sequence: Synthetic oligonucleotide
  Sense strand starting at position 1244 of SEQ ID NO: 1244128
gcaagucuuccagaagcug

SEQ ID NO: 1466967 - RNA, 19 nt, Artificial Sequence
  Description of Artificial Sequence: Synthetic oligonucleotide
  Antisense strand to SEQ ID NO: 1466966
cagcuucuggaagacuugc

SEQ ID NO: 1466968 - RNA, 19 nt, Artificial Sequence
  Description of Artificial Sequence: Synthetic oligonucleotide
  Sense strand starting at position 1496 of SEQ ID NO: 1244128
cgggucguagccguagaaa

SEQ ID NO: 1466969 - RNA, 19 nt, Artificial Sequence
  Description of Artificial Sequence: Synthetic oligonucleotide
  Antisense strand to SEQ ID NO: 1466968
uuucuacggcuacgacccg

SEQ ID NO: 1466970 - RNA, 19 nt, Artificial Sequence
  Description of Artificial Sequence: Synthetic oligonucleotide
  Sense strand starting at position 1497 of SEQ ID NO: 1244128
gggucguagccguagaaau

SEQ ID NO: 1466971 - RNA, 19 nt, Artificial Sequence
  Description of Artificial Sequence: Synthetic oligonucleotide
  Antisense strand to SEQ ID NO: 1466970
auuucuacggcuacgaccc

SEQ ID NO: 1466972 - RNA, 19 nt, Artificial Sequence
  Description of Artificial Sequence: Synthetic oligonucleotide
  Sense strand starting at position 1498 of SEQ ID NO: 1244128
ggucguagccguagaaauu

SEQ ID NO: 1466973 - RNA, 19 nt, Artificial Sequence
  Description of Artificial Sequence: Synthetic oligonucleotide
  Antisense strand to SEQ ID NO: 1466972
aauuucuacggcuacgacc

SEQ ID NO: 1466974 - RNA, 19 nt, Artificial Sequence
  Description of Artificial Sequence: Synthetic oligonucleotide
  Sense strand starting at position 1499 of SEQ ID NO: 1244128
gucguagccguagaaauug

SEQ ID NO: 1466975 - RNA, 19 nt, Artificial Sequence
  Description of Artificial Sequence: Synthetic oligonucleotide
  Antisense strand to SEQ ID NO: 1466974
caauuucuacggcuacgac

SEQ ID NO: 1466976 - RNA, 19 nt, Artificial Sequence
  Description of Artificial Sequence: Synthetic oligonucleotide
  Sense strand starting at position 1678 of SEQ ID NO: 1244128
gggcgaagccgcagucaua

SEQ ID NO: 1466977 - RNA, 19 nt, Artificial Sequence
  Description of Artificial Sequence: Synthetic oligonucleotide
  Antisense strand to SEQ ID NO: 1466976
uaugacugcggcuucgccc

SEQ ID NO: 1466978 - RNA, 19 nt, Artificial Sequence
  Description of Artificial Sequence: Synthetic oligonucleotide
  Sense strand starting at position 1679 of SEQ ID NO: 1244128
ggcgaagccgcagucauaa

SEQ ID NO: 1466979 - RNA, 19 nt, Artificial Sequence
  Description of Artificial Sequence: Synthetic oligonucleotide
  Antisense strand to SEQ ID NO: 1466978
uuaugacugcggcuucgcc

SEQ ID NO: 1466980 - RNA, 19 nt, Artificial Sequence
  Description of Artificial Sequence: Synthetic oligonucleotide
  Sense strand starting at position 1681 of SEQ ID NO: 1244128
cgaagccgcagucauaaua

SEQ ID NO: 1466981 - RNA, 19 nt, Artificial Sequence
  Description of Artificial Sequence: Synthetic oligonucleotide
  Antisense strand to SEQ ID NO: 1466980
uauuaugacugcggcuucg

SEQ ID NO: 1466982 - RNA, 19 nt, Artificial Sequence
  Description of Artificial Sequence: Synthetic oligonucleotide
  Sense strand starting at position 1735 of SEQ ID NO: 1244128
agaacagugaguugacgaa

SEQ ID NO: 1466983 - RNA, 19 nt, Artificial Sequence
  Description of Artificial Sequence: Synthetic oligonucleotide
  Antisense strand to SEQ ID NO: 1466982
uucgucaacucacuguucu

SEQ ID NO: 1466984 - RNA, 19 nt, Artificial Sequence
  Description of Artificial Sequence: Synthetic oligonucleotide
  Sense strand starting at position 1977 of SEQ ID NO: 1244128
ugugguuuccaggaauaga

SEQ ID NO: 1466985 - RNA, 19 nt, Artificial Sequence
  Description of Artificial Sequence: Synthetic oligonucleotide
  Antisense strand to SEQ ID NO: 1466984
ucuauuccuggaaaccaca

SEQ ID NO: 1466986 - RNA, 19 nt, Artificial Sequence
  Description of Artificial Sequence: Synthetic oligonucleotide
  Sense strand starting at position 2097 of SEQ ID NO: 1244128
uaaagagguccucgcuuua

SEQ ID NO: 1466987 - RNA, 19 nt, Artificial Sequence
  Description of Artificial Sequence: Synthetic oligonucleotide
  Antisense strand to SEQ ID NO: 1466986
uaaagcgaggaccucuuua

SEQ ID NO: 1466988 - RNA, 19 nt, Artificial Sequence
  Description of Artificial Sequence: Synthetic oligonucleotide
  Sense strand starting at position 2110 of SEQ ID NO: 1244128
gcuuuacauuucgaagaag

SEQ ID NO: 1466989 - RNA, 19 nt, Artificial Sequence
  Description of Artificial Sequence: Synthetic oligonucleotide
  Antisense strand to SEQ ID NO: 1466988
cuucuucgaaauguaaagc

SEQ ID NO: 1466990 - RNA, 19 nt, Artificial Sequence
  Description of Artificial Sequence: Synthetic oligonucleotide
  Sense strand starting at position 2155 of SEQ ID NO: 1244128
gugauuuacuucccugcaa

SEQ ID NO: 1466991 - RNA, 19 nt, Artificial Sequence
  Description of Artificial Sequence: Synthetic oligonucleotide
  Antisense strand to SEQ ID NO: 1466990
uugcagggaaguaaaucac

SEQ ID NO: 1466992 - RNA, 19 nt, Artificial Sequence
  Description of Artificial Sequence: Synthetic oligonucleotide
  Sense strand starting at position 2252 of SEQ ID NO: 1244128
cguacuccucccggacaga

SEQ ID NO: 1466993 - RNA, 19 nt, Artificial Sequence
  Description of Artificial Sequence: Synthetic oligonucleotide
  Antisense strand to SEQ ID NO: 1466992
ucuguccgggaggaguacg

SEQ ID NO: 1466994 - RNA, 19 nt, Artificial Sequence
  Description of Artificial Sequence: Synthetic oligonucleotide
  Sense strand starting at position 2253 of SEQ ID NO: 1244128
guacuccucccggacagaa

SEQ ID NO: 1466995 - RNA, 19 nt, Artificial Sequence
  Description of Artificial Sequence: Synthetic oligonucleotide
  Antisense strand to SEQ ID NO: 1466994
uucuguccgggaggaguac

SEQ ID NO: 1466996 - RNA, 19 nt, Artificial Sequence
  Description of Artificial Sequence: Synthetic oligonucleotide
  Sense strand starting at position 2454 of SEQ ID NO: 1244128
cggauuaaaucuguuuaac

SEQ ID NO: 1466997 - RNA, 19 nt, Artificial Sequence
  Description of Artificial Sequence: Synthetic oligonucleotide
  Antisense strand to SEQ ID NO: 1466996
guuaaacagauuuaauccg

SEQ ID NO: 1466998 - RNA, 19 nt, Artificial Sequence
  Description of Artificial Sequence: Synthetic oligonucleotide
  Sense strand starting at position 2487 of SEQ ID NO: 1244128
agauaucucucgccucaca

SEQ ID NO: 1466999 - RNA, 19 nt, Artificial Sequence
  Description of Artificial Sequence: Synthetic oligonucleotide
  Antisense strand to SEQ ID NO: 1466998
ugugaggcgagagauaucu

SEQ ID NO: 1467000 - RNA, 19 nt, Artificial Sequence
  Description of Artificial Sequence: Synthetic oligonucleotide
  Sense strand starting at position 2607 of SEQ ID NO: 1244128
gcuguuaauuucgcgauuu

SEQ ID NO: 1467001 - RNA, 19 nt, Artificial Sequence
  Description of Artificial Sequence: Synthetic oligonucleotide
  Antisense strand to SEQ ID NO: 1467000
aaaucgcgaaauuaacagc

SEQ ID NO: 1467002 - RNA, 19 nt, Artificial Sequence
  Description of Artificial Sequence: Synthetic oligonucleotide
  Sense strand starting at position 2636 of SEQ ID NO: 1244128
auuggagucuuucuaaaug

SEQ ID NO: 1467003 - RNA, 19 nt, Artificial Sequence
  Description of Artificial Sequence: Synthetic oligonucleotide
  Antisense strand to SEQ ID NO: 1467002
cauuuagaaagacuccaau

SEQ ID NO: 1467004 - RNA, 19 nt, Artificial Sequence
  Description of Artificial Sequence: Synthetic oligonucleotide
  Sense strand starting at position 2688 of SEQ ID NO: 1244128
gguuuaauugcgccgaguu

SEQ ID NO: 1467005 - RNA, 19 nt, Artificial Sequence
  Description of Artificial Sequence: Synthetic oligonucleotide
  Antisense strand to SEQ ID NO: 1467004
aacucggcgcaauuaaacc

SEQ ID NO: 1467006 - RNA, 19 nt, Artificial Sequence
  Description of Artificial Sequence: Synthetic oligonucleotide
  Sense strand starting at position 2851 of SEQ ID NO: 1244128
acuaucguguggagggaau

SEQ ID NO: 1467007 - RNA, 19 nt, Artificial Sequence
  Description of Artificial Sequence: Synthetic oligonucleotide
  Antisense strand to SEQ ID NO: 1467006
auucccuccacacgauagu

SEQ ID NO: 1467008 - RNA, 19 nt, Artificial Sequence
  Description of Artificial Sequence: Synthetic oligonucleotide
  Sense strand starting at position 2863 of SEQ ID NO: 1244128
agggaauuggcuggauaac

SEQ ID NO: 1467009 - RNA, 19 nt, Artificial Sequence
  Description of Artificial Sequence: Synthetic oligonucleotide
  Antisense strand to SEQ ID NO: 1467008
guuauccagccaauucccu

SEQ ID NO: 1467010 - RNA, 19 nt, Artificial Sequence
  Description of Artificial Sequence: Synthetic oligonucleotide
  Sense strand starting at position 2899 of SEQ ID NO: 1244128
gcuguaaacucuuuaagaa

SEQ ID NO: 1467011 - RNA, 19 nt, Artificial Sequence
  Description of Artificial Sequence: Synthetic oligonucleotide
  Antisense strand to SEQ ID NO: 1467010
uucuuaaagaguuuacagc

SEQ ID NO: 1467012 - RNA, 19 nt, Artificial Sequence
  Description of Artificial Sequence: Synthetic oligonucleotide
  Sense strand starting at position 2988 of SEQ ID NO: 1244128
acgaguucuuuccucuaca

SEQ ID NO: 1467013 - RNA, 19 nt, Artificial Sequence
  Description of Artificial Sequence: Synthetic oligonucleotide
  Antisense strand to SEQ ID NO: 1467012
uguagaggaaagaacucgu

SEQ ID NO: 1467014 - RNA, 19 nt, Artificial Sequence
  Description of Artificial Sequence: Synthetic oligonucleotide
  Sense strand starting at position 2989 of SEQ ID NO: 1244128
cgaguucuuuccucuacag

SEQ ID NO: 1467015 - RNA, 19 nt, Artificial Sequence
  Description of Artificial Sequence: Synthetic oligonucleotide
  Antisense strand to SEQ ID NO: 1467014
cuguagaggaaagaacucg

SEQ ID NO: 1467016 - RNA, 19 nt, Artificial Sequence
  Description of Artificial Sequence: Synthetic oligonucleotide
  Sense strand starting at position 3289 of SEQ ID NO: 1244128
gggagaucuugaggaggga

SEQ ID NO: 1467017 - RNA, 19 nt, Artificial Sequence
  Description of Artificial Sequence: Synthetic oligonucleotide
  Antisense strand to SEQ ID NO: 1467016
ucccuccucaagaucuccc

SEQ ID NO: 1467018 - RNA, 19 nt, Artificial Sequence
  Description of Artificial Sequence: Synthetic oligonucleotide
  Sense strand starting at position 3318 of SEQ ID NO: 1244128
agaagaaacuuucugguua

SEQ ID NO: 1467019 - RNA, 19 nt, Artificial Sequence
  Description of Artificial Sequence: Synthetic oligonucleotide
  Antisense strand to SEQ ID NO: 1467018
uaaccagaaaguuucuucu

SEQ ID NO: 1467020 - RNA, 19 nt, Artificial Sequence
  Description of Artificial Sequence: Synthetic oligonucleotide
  Sense strand starting at position 3322 of SEQ ID NO: 1244128
gaaacuuucugguuaauga

SEQ ID NO: 1467021 - RNA, 19 nt, Artificial Sequence
  Description of Artificial Sequence: Synthetic oligonucleotide
  Antisense strand to SEQ ID NO: 1467020
ucauuaaccagaaaguuuc

SEQ ID NO: 1467022 - RNA, 19 nt, Artificial Sequence
  Description of Artificial Sequence: Synthetic oligonucleotide
  Sense strand starting at position 3333 of SEQ ID NO: 1244128
guuaaugagcagugguuga

SEQ ID NO: 1467023 - RNA, 19 nt, Artificial Sequence
  Description of Artificial Sequence: Synthetic oligonucleotide
  Antisense strand to SEQ ID NO: 1467022
ucaaccacugcucauuaac

SEQ ID NO: 1467024 - RNA, 19 nt, Artificial Sequence
  Description of Artificial Sequence: Synthetic oligonucleotide
  Sense strand starting at position 3769 of SEQ ID NO: 1244128
aucuauuaguccucagugu

SEQ ID NO: 1467025 - RNA, 19 nt, Artificial Sequence
  Description of Artificial Sequence: Synthetic oligonucleotide
  Antisense strand to SEQ ID NO: 1467024
acacugaggacuaauagau

SEQ ID NO: 1467026 - RNA, 19 nt, Artificial Sequence
  Description of Artificial Sequence: Synthetic oligonucleotide
  Sense strand starting at position 3821 of SEQ ID NO: 1244128
aacugacuuggguguggaa

SEQ ID NO: 1467027 - RNA, 19 nt, Artificial Sequence
  Description of Artificial Sequence: Synthetic oligonucleotide
  Antisense strand to SEQ ID NO: 1467026
uuccacacccaagucaguu

SEQ ID NO: 1467028 - RNA, 19 nt, Artificial Sequence
  Description of Artificial Sequence: Synthetic oligonucleotide
  Sense strand starting at position 3823 of SEQ ID NO: 1244128
cugacuuggguguggaauu

SEQ ID NO: 1467029 - RNA, 19 nt, Artificial Sequence
  Description of Artificial Sequence: Synthetic oligonucleotide
  Antisense strand to SEQ ID NO: 1467028
aauuccacacccaagucag

SEQ ID NO: 1467030 - RNA, 19 nt, Artificial Sequence
  Description of Artificial Sequence: Synthetic oligonucleotide
  Sense strand starting at position 119 of SEQ ID NO: 1244129
ccacuccgucaaugggaaa

SEQ ID NO: 1467031 - RNA, 19 nt, Artificial Sequence
  Description of Artificial Sequence: Synthetic oligonucleotide
  Antisense strand to SEQ ID NO: 1467030
uuucccauugacggagugg

SEQ ID NO: 1467032 - RNA, 19 nt, Artificial Sequence
  Description of Artificial Sequence: Synthetic oligonucleotide
  Sense strand starting at position 216 of SEQ ID NO: 1244129
cgagucauuguuugaggcu

SEQ ID NO: 1467033 - RNA, 19 nt, Artificial Sequence
  Description of Artificial Sequence: Synthetic oligonucleotide
  Antisense strand to SEQ ID NO: 1467032
agccucaaacaaugacucg

SEQ ID NO: 1467034 - RNA, 19 nt, Artificial Sequence
  Description of Artificial Sequence: Synthetic oligonucleotide
  Sense strand starting at position 234 of SEQ ID NO: 1244129
ugaguucccucaccgauga

SEQ ID NO: 1467035 - RNA, 19 nt, Artificial Sequence
  Description of Artificial Sequence: Synthetic oligonucleotide
  Antisense strand to SEQ ID NO: 1467034
ucaucggugagggaacuca

SEQ ID NO: 1467036 - RNA, 19 nt, Artificial Sequence
  Description of Artificial Sequence: Synthetic oligonucleotide
  Sense strand starting at position 282 of SEQ ID NO: 1244129
ggagaacccucucuucuca

SEQ ID NO: 1467037 - RNA, 19 nt, Artificial Sequence
  Description of Artificial Sequence: Synthetic oligonucleotide
  Antisense strand to SEQ ID NO: 1467036
ugagaagagaggguucucc

SEQ ID NO: 1467038 - RNA, 19 nt, Artificial Sequence
  Description of Artificial Sequence: Synthetic oligonucleotide
  Sense strand starting at position 392 of SEQ ID NO: 1244129
gguaaaguucuccgccucu

SEQ ID NO: 1467039 - RNA, 19 nt, Artificial Sequence
  Description of Artificial Sequence: Synthetic oligonucleotide
  Antisense strand to SEQ ID NO: 1467038
agaggcggagaacuuuacc

SEQ ID NO: 1467040 - RNA, 19 nt, Artificial Sequence
  Description of Artificial Sequence: Synthetic oligonucleotide
  Sense strand starting at position 723 of SEQ ID NO: 1244129
cgagaucugcuaggaacaa

SEQ ID NO: 1467041 - RNA, 19 nt, Artificial Sequence
  Description of Artificial Sequence: Synthetic oligonucleotide
  Antisense strand to SEQ ID NO: 1467040
uuguuccuagcagaucucg

SEQ ID NO: 1467042 - RNA, 19 nt, Artificial Sequence
  Description of Artificial Sequence: Synthetic oligonucleotide
  Sense strand starting at position 724 of SEQ ID NO: 1244129
gagaucugcuaggaacaau

SEQ ID NO: 1467043 - RNA, 19 nt, Artificial Sequence
  Description of Artificial Sequence: Synthetic oligonucleotide
  Antisense strand to SEQ ID NO: 1467042
auuguuccuagcagaucuc

SEQ ID NO: 1467044 - RNA, 19 nt, Artificial Sequence
  Description of Artificial Sequence: Synthetic oligonucleotide
  Sense strand starting at position 1193 of SEQ ID NO: 1244129
ucacauuguccgcaguuua

SEQ ID NO: 1467045 - RNA, 19 nt, Artificial Sequence
  Description of Artificial Sequence: Synthetic oligonucleotide
  Antisense strand to SEQ ID NO: 1467044
uaaacugcggacaauguga

SEQ ID NO: 1467046 - RNA, 19 nt, Artificial Sequence
  Description of Artificial Sequence: Synthetic oligonucleotide
  Sense strand starting at position 1332 of SEQ ID NO: 1244129
guagccgggucuuugauua

SEQ ID NO: 1467047 - RNA, 19 nt, Artificial Sequence
  Description of Artificial Sequence: Synthetic oligonucleotide
  Antisense strand to SEQ ID NO: 1467046
uaaucaaagacccggcuac

SEQ ID NO: 1467048 - RNA, 19 nt, Artificial Sequence
  Description of Artificial Sequence: Synthetic oligonucleotide
  Sense strand starting at position 1336 of SEQ ID NO: 1244129
ccgggucuuugauuagaca

SEQ ID NO: 1467049 - RNA, 19 nt, Artificial Sequence
  Description of Artificial Sequence: Synthetic oligonucleotide
  Antisense strand to SEQ ID NO: 1467048
ugucuaaucaaagacccgg

SEQ ID NO: 1467050 - RNA, 19 nt, Artificial Sequence
  Description of Artificial Sequence: Synthetic oligonucleotide
  Sense strand starting at position 1696 of SEQ ID NO: 1244129
gcguacuggccagaaggaa

SEQ ID NO: 1467051 - RNA, 19 nt, Artificial Sequence
  Description of Artificial Sequence: Synthetic oligonucleotide
  Antisense strand to SEQ ID NO: 1467050
uuccuucuggccaguacgc

SEQ ID NO: 1467052 - RNA, 19 nt, Artificial Sequence
  Description of Artificial Sequence: Synthetic oligonucleotide
  Sense strand starting at position 1733 of SEQ ID NO: 1244129
ccucacucucgugacuuau

SEQ ID NO: 1467053 - RNA, 19 nt, Artificial Sequence
  Description of Artificial Sequence: Synthetic oligonucleotide
  Antisense strand to SEQ ID NO: 1467052
auaagucacgagagugagg

SEQ ID NO: 1467054 - RNA, 19 nt, Artificial Sequence
  Description of Artificial Sequence: Synthetic oligonucleotide
  Sense strand starting at position 1735 of SEQ ID NO: 1244129
ucacucucgugacuuauga

SEQ ID NO: 1467055 - RNA, 19 nt, Artificial Sequence
  Description of Artificial Sequence: Synthetic oligonucleotide
  Antisense strand to SEQ ID NO: 1467054
ucauaagucacgagaguga

SEQ ID NO: 1467056 - RNA, 19 nt, Artificial Sequence
  Description of Artificial Sequence: Synthetic oligonucleotide
  Sense strand starting at position 1744 of SEQ ID NO: 1244129
ugacuuaugaucgagucga

SEQ ID NO: 1467057 - RNA, 19 nt, Artificial Sequence
  Description of Artificial Sequence: Synthetic oligonucleotide
  Antisense strand to SEQ ID NO: 1467056
ucgacucgaucauaaguca

SEQ ID NO: 1467058 - RNA, 19 nt, Artificial Sequence
  Description of Artificial Sequence: Synthetic oligonucleotide
  Sense strand starting at position 1748 of SEQ ID NO: 1244129
uuaugaucgagucgacaua

SEQ ID NO: 1467059 - RNA, 19 nt, Artificial Sequence
  Description of Artificial Sequence: Synthetic oligonucleotide
  Antisense strand to SEQ ID NO: 1467058
uaugucgacucgaucauaa

SEQ ID NO: 1467060 - RNA, 19 nt, Artificial Sequence
  Description of Artificial Sequence: Synthetic oligonucleotide
  Sense strand starting at position 1749 of SEQ ID NO: 1244129
uaugaucgagucgacauaa

SEQ ID NO: 1467061 - RNA, 19 nt, Artificial Sequence
  Description of Artificial Sequence: Synthetic oligonucleotide
  Antisense strand to SEQ ID NO: 1467060
uuaugucgacucgaucaua

SEQ ID NO: 1467062 - RNA, 19 nt, Artificial Sequence
  Description of Artificial Sequence: Synthetic oligonucleotide
  Sense strand starting at position 1770 of SEQ ID NO: 1244129
gcugcuaagcgucccagaa

SEQ ID NO: 1467063 - RNA, 19 nt, Artificial Sequence
  Description of Artificial Sequence: Synthetic oligonucleotide
  Antisense strand to SEQ ID NO: 1467062
uucugggacgcuuagcagc

SEQ ID NO: 1467064 - RNA, 19 nt, Artificial Sequence
  Description of Artificial Sequence: Synthetic oligonucleotide
  Sense strand starting at position 1801 of SEQ ID NO: 1244129
agacauuauccgggcgcuu

SEQ ID NO: 1467065 - RNA, 19 nt, Artificial Sequence
  Description of Artificial Sequence: Synthetic oligonucleotide
  Antisense strand to SEQ ID NO: 1467064
aagcgcccggauaaugucu

SEQ ID NO: 1467066 - RNA, 19 nt, Artificial Sequence
  Description of Artificial Sequence: Synthetic oligonucleotide
  Sense strand starting at position 2016 of SEQ ID NO: 1244129
uuccgacugccugauaaag

SEQ ID NO: 1467067 - RNA, 19 nt, Artificial Sequence
  Description of Artificial Sequence: Synthetic oligonucleotide
  Antisense strand to SEQ ID NO: 1467066
cuuuaucaggcagucggaa

SEQ ID NO: 1467068 - RNA, 19 nt, Artificial Sequence
  Description of Artificial Sequence: Synthetic oligonucleotide
  Sense strand starting at position 2032 of SEQ ID NO: 1244129
aagcgucagcuccgacaua

SEQ ID NO: 1467069 - RNA, 19 nt, Artificial Sequence
  Description of Artificial Sequence: Synthetic oligonucleotide
  Antisense strand to SEQ ID NO: 1467068
uaugucggagcugacgcuu

SEQ ID NO: 1467070 - RNA, 19 nt, Artificial Sequence
  Description of Artificial Sequence: Synthetic oligonucleotide
  Sense strand starting at position 2101 of SEQ ID NO: 1244129
acuccauaucgaggaugga

SEQ ID NO: 1467071 - RNA, 19 nt, Artificial Sequence
  Description of Artificial Sequence: Synthetic oligonucleotide
  Antisense strand to SEQ ID NO: 1467070
uccauccucgauauggagu

SEQ ID NO: 1467072 - RNA, 19 nt, Artificial Sequence
  Description of Artificial Sequence: Synthetic oligonucleotide
  Sense strand starting at position 2572 of SEQ ID NO: 1244129
ggacguuguccgcuuugga

SEQ ID NO: 1467073 - RNA, 19 nt, Artificial Sequence
  Description of Artificial Sequence: Synthetic oligonucleotide
  Antisense strand to SEQ ID NO: 1467072
uccaaagcggacaacgucc

SEQ ID NO: 1467074 - RNA, 19 nt, Artificial Sequence
  Description of Artificial Sequence: Synthetic oligonucleotide
  Sense strand starting at position 2612 of SEQ ID NO: 1244129
uguagagauuuacaugacu

SEQ ID NO: 1467075 - RNA, 19 nt, Artificial Sequence
  Description of Artificial Sequence: Synthetic oligonucleotide
  Antisense strand to SEQ ID NO: 1467074
agucauguaaaucucuaca

SEQ ID NO: 1467076 - RNA, 19 nt, Artificial Sequence
  Description of Artificial Sequence: Synthetic oligonucleotide
  Sense strand starting at position 2685 of SEQ ID NO: 1244129
acgacugaguguccaagaa

SEQ ID NO: 1467077 - RNA, 19 nt, Artificial Sequence
  Description of Artificial Sequence: Synthetic oligonucleotide
  Antisense strand to SEQ ID NO: 1467076
uucuuggacacucagucgu

SEQ ID NO: 1467078 - RNA, 19 nt, Artificial Sequence
  Description of Artificial Sequence: Synthetic oligonucleotide
  Sense strand starting at position 2689 of SEQ ID NO: 1244129
cugaguguccaagaaucca

SEQ ID NO: 1467079 - RNA, 19 nt, Artificial Sequence
  Description of Artificial Sequence: Synthetic oligonucleotide
  Antisense strand to SEQ ID NO: 1467078
uggauucuuggacacucag

SEQ ID NO: 1467080 - RNA, 19 nt, Artificial Sequence
  Description of Artificial Sequence: Synthetic oligonucleotide
  Sense strand starting at position 2722 of SEQ ID NO: 1244129
auuagaaacuacuugaggu

SEQ ID NO: 1467081 - RNA, 19 nt, Artificial Sequence
  Description of Artificial Sequence: Synthetic oligonucleotide
  Antisense strand to SEQ ID NO: 1467080
accucaaguaguuucuaau

SEQ ID NO: 1467082 - RNA, 19 nt, Artificial Sequence
  Description of Artificial Sequence: Synthetic oligonucleotide
  Sense strand starting at position 2726 of SEQ ID NO: 1244129
gaaacuacuugagguuaaa

SEQ ID NO: 1467083 - RNA, 19 nt, Artificial Sequence
  Description of Artificial Sequence: Synthetic oligonucleotide
  Antisense strand to SEQ ID NO: 1467082
uuuaaccucaaguaguuuc

SEQ ID NO: 1467084 - RNA, 19 nt, Artificial Sequence
  Description of Artificial Sequence: Synthetic oligonucleotide
  Sense strand starting at position 2778 of SEQ ID NO: 1244129
gaaagaguuuaauacaagg

SEQ ID NO: 1467085 - RNA, 19 nt, Artificial Sequence
  Description of Artificial Sequence: Synthetic oligonucleotide
  Antisense strand to SEQ ID NO: 1467084
ccuuguauuaaacucuuuc

SEQ ID NO: 1467086 - RNA, 19 nt, Artificial Sequence
  Description of Artificial Sequence: Synthetic oligonucleotide
  Sense strand starting at position 3449 of SEQ ID NO: 1244129
gguggauuucucggcaacu

SEQ ID NO: 1467087 - RNA, 19 nt, Artificial Sequence
  Description of Artificial Sequence: Synthetic oligonucleotide
  Antisense strand to SEQ ID NO: 1467086
aguugccgagaaauccacc

SEQ ID NO: 1467088 - RNA, 19 nt, Artificial Sequence
  Description of Artificial Sequence: Synthetic oligonucleotide
  Sense strand starting at position 3450 of SEQ ID NO: 1244129
guggauuucucggcaacuc

SEQ ID NO: 1467089 - RNA, 19 nt, Artificial Sequence
  Description of Artificial Sequence: Synthetic oligonucleotide
  Antisense strand to SEQ ID NO: 1467088
gaguugccgagaaauccac

SEQ ID NO: 1467090 - RNA, 19 nt, Artificial Sequence
  Description of Artificial Sequence: Synthetic oligonucleotide
  Sense strand starting at position 3468 of SEQ ID NO: 1244129
cucugacucugaguccuaa

SEQ ID NO: 1467091 - RNA, 19 nt, Artificial Sequence
  Description of Artificial Sequence: Synthetic oligonucleotide
  Antisense strand to SEQ ID NO: 1467090
uuaggacucagagucagag

SEQ ID NO: 1467092 - RNA, 19 nt, Artificial Sequence
  Description of Artificial Sequence: Synthetic oligonucleotide
  Sense strand starting at position 3472 of SEQ ID NO: 1244129
gacucugaguccuaauaag

SEQ ID NO: 1467093 - RNA, 19 nt, Artificial Sequence
  Description of Artificial Sequence: Synthetic oligonucleotide
  Antisense strand to SEQ ID NO: 1467092
cuuauuaggacucagaguc

SEQ ID NO: 1467094 - RNA, 19 nt, Artificial Sequence
  Description of Artificial Sequence: Synthetic oligonucleotide
  Sense strand starting at position 3537 of SEQ ID NO: 1244129
uaacuugaguccguaucuu

SEQ ID NO: 1467095 - RNA, 19 nt, Artificial Sequence
  Description of Artificial Sequence: Synthetic oligonucleotide
  Antisense strand to SEQ ID NO: 1467094
aagauacggacucaaguua

SEQ ID NO: 1467096 - RNA, 19 nt, Artificial Sequence
  Description of Artificial Sequence: Synthetic oligonucleotide
  Sense strand starting at position 3622 of SEQ ID NO: 1244129
acccgcuugucuuuccaaa

SEQ ID NO: 1467097 - RNA, 19 nt, Artificial Sequence
  Description of Artificial Sequence: Synthetic oligonucleotide
  Antisense strand to SEQ ID NO: 1467096
uuuggaaagacaagcgggu

SEQ ID NO: 1467098 - RNA, 19 nt, Artificial Sequence
  Description of Artificial Sequence: Synthetic oligonucleotide
  Sense strand starting at position 3624 of SEQ ID NO: 1244129
ccgcuugucuuuccaaaug

SEQ ID NO: 1467099 - RNA, 19 nt, Artificial Sequence
  Description of Artificial Sequence: Synthetic oligonucleotide
  Antisense strand to SEQ ID NO: 1467098
cauuuggaaagacaagcgg

SEQ ID NO: 1467100 - RNA, 19 nt, Artificial Sequence
  Description of Artificial Sequence: Synthetic oligonucleotide
  Sense strand starting at position 3652 of SEQ ID NO: 1244129
cgugucauuacacgugaaa

SEQ ID NO: 1467101 - RNA, 19 nt, Artificial Sequence
  Description of Artificial Sequence: Synthetic oligonucleotide
  Antisense strand to SEQ ID NO: 1467100
uuucacguguaaugacacg

SEQ ID NO: 1467102 - RNA, 19 nt, Artificial Sequence
  Description of Artificial Sequence: Synthetic oligonucleotide
  Sense strand starting at position 3655 of SEQ ID NO: 1244129
gucauuacacgugaaauac

SEQ ID NO: 1467103 - RNA, 19 nt, Artificial Sequence
  Description of Artificial Sequence: Synthetic oligonucleotide
  Antisense strand to SEQ ID NO: 1467102
guauuucacguguaaugac

SEQ ID NO: 1467104 - RNA, 19 nt, Artificial Sequence
  Description of Artificial Sequence: Synthetic oligonucleotide
  Sense strand starting at position 3664 of SEQ ID NO: 1244129
cgugaaauacgagggugaa

SEQ ID NO: 1467105 - RNA, 19 nt, Artificial Sequence
  Description of Artificial Sequence: Synthetic oligonucleotide
  Antisense strand to SEQ ID NO: 1467104
uucacccucguauuucacg

SEQ ID NO: 1467106 - RNA, 19 nt, Artificial Sequence
  Description of Artificial Sequence: Synthetic oligonucleotide
  Sense strand starting at position 3677 of SEQ ID NO: 1244129
ggugaagcgccauauuucu

SEQ ID NO: 1467107 - RNA, 19 nt, Artificial Sequence
  Description of Artificial Sequence: Synthetic oligonucleotide
  Antisense strand to SEQ ID NO: 1467106
agaaauauggcgcuucacc

SEQ ID NO: 1467108 - RNA, 19 nt, Artificial Sequence
  Description of Artificial Sequence: Synthetic oligonucleotide
  Sense strand starting at position 3792 of SEQ ID NO: 1244129
ccggcagauccguaaccaa

SEQ ID NO: 1467109 - RNA, 19 nt, Artificial Sequence
  Description of Artificial Sequence: Synthetic oligonucleotide
  Antisense strand to SEQ ID NO: 1467108
uugguuacggaucugccgg

SEQ ID NO: 1467110 - RNA, 19 nt, Artificial Sequence
  Description of Artificial Sequence: Synthetic oligonucleotide
  Sense strand starting at position 30 of SEQ ID NO: 1244130
gguugcuuucccuugcuca

SEQ ID NO: 1467111 - RNA, 19 nt, Artificial Sequence
  Description of Artificial Sequence: Synthetic oligonucleotide
  Antisense strand to SEQ ID NO: 1467110
ugagcaagggaaagcaacc

SEQ ID NO: 1467112 - RNA, 19 nt, Artificial Sequence
  Description of Artificial Sequence: Synthetic oligonucleotide
  Sense strand starting at position 75 of SEQ ID NO: 1244130
cagauucucugguucuuga

SEQ ID NO: 1467113 - RNA, 19 nt, Artificial Sequence
  Description of Artificial Sequence: Synthetic oligonucleotide
  Antisense strand to SEQ ID NO: 1467112
ucaagaaccagagaaucug

SEQ ID NO: 1467114 - RNA, 19 nt, Artificial Sequence
  Description of Artificial Sequence: Synthetic oligonucleotide
  Sense strand starting at position 169 of SEQ ID NO: 1244130
gaugguaaagacuguguua

SEQ ID NO: 1467115 - RNA, 19 nt, Artificial Sequence
  Description of Artificial Sequence: Synthetic oligonucleotide
  Antisense strand to SEQ ID NO: 1467114
uaacacagucuuuaccauc

SEQ ID NO: 1467116 - RNA, 19 nt, Artificial Sequence
  Description of Artificial Sequence: Synthetic oligonucleotide
  Sense strand starting at position 171 of SEQ ID NO: 1244130
ugguaaagacuguguuaac

SEQ ID NO: 1467117 - RNA, 19 nt, Artificial Sequence
  Description of Artificial Sequence: Synthetic oligonucleotide
  Antisense strand to SEQ ID NO: 1467116
guuaacacagucuuuacca

SEQ ID NO: 1467118 - RNA, 19 nt, Artificial Sequence
  Description of Artificial Sequence: Synthetic oligonucleotide
  Sense strand starting at position 247 of SEQ ID NO: 1244130
gcaaucuauuaauuguuga

SEQ ID NO: 1467119 - RNA, 19 nt, Artificial Sequence
  Description of Artificial Sequence: Synthetic oligonucleotide
  Antisense strand to SEQ ID NO: 1467118
ucaacaauuaauagauugc

SEQ ID NO: 1467120 - RNA, 19 nt, Artificial Sequence
  Description of Artificial Sequence: Synthetic oligonucleotide
  Sense strand starting at position 263 of SEQ ID NO: 1244130
ugaacagguuucuaauuua

SEQ ID NO: 1467121 - RNA, 19 nt, Artificial Sequence
  Description of Artificial Sequence: Synthetic oligonucleotide
  Antisense strand to SEQ ID NO: 1467120
uaaauuagaaaccuguuca

SEQ ID NO: 1467122 - RNA, 19 nt, Artificial Sequence
  Description of Artificial Sequence: Synthetic oligonucleotide
  Sense strand starting at position 270 of SEQ ID NO: 1244130
guuucuaauuuagaagaga

SEQ ID NO: 1467123 - RNA, 19 nt, Artificial Sequence
  Description of Artificial Sequence: Synthetic oligonucleotide
  Antisense strand to SEQ ID NO: 1467122
ucucuucuaaauuagaaac

SEQ ID NO: 1467124 - RNA, 19 nt, Artificial Sequence
  Description of Artificial Sequence: Synthetic oligonucleotide
  Sense strand starting at position 355 of SEQ ID NO: 1244130
gcuauuugcuggcaaggga

SEQ ID NO: 1467125 - RNA, 19 nt, Artificial Sequence
  Description of Artificial Sequence: Synthetic oligonucleotide
  Antisense strand to SEQ ID NO: 1467124
ucccuugccagcaaauagc

SEQ ID NO: 1467126 - RNA, 19 nt, Artificial Sequence
  Description of Artificial Sequence: Synthetic oligonucleotide
  Sense strand starting at position 1435 of SEQ ID NO: 1244130
cgcggguccgugcuuaaga

SEQ ID NO: 1467127 - RNA, 19 nt, Artificial Sequence
  Description of Artificial Sequence: Synthetic oligonucleotide
  Antisense strand to SEQ ID NO: 1467126
ucuuaagcacggacccgcg

SEQ ID NO: 1467128 - RNA, 19 nt, Artificial Sequence
  Description of Artificial Sequence: Synthetic oligonucleotide
  Sense strand starting at position 1437 of SEQ ID NO: 1244130
cggguccgugcuuaagaaa

SEQ ID NO: 1467129 - RNA, 19 nt, Artificial Sequence
  Description of Artificial Sequence: Synthetic oligonucleotide
  Antisense strand to SEQ ID NO: 1467128
uuucuuaagcacggacccg

SEQ ID NO: 1467130 - RNA, 19 nt, Artificial Sequence
  Description of Artificial Sequence: Synthetic oligonucleotide
  Sense strand starting at position 1448 of SEQ ID NO: 1244130
uuaagaaaccaucgucuua

SEQ ID NO: 1467131 - RNA, 19 nt, Artificial Sequence
  Description of Artificial Sequence: Synthetic oligonucleotide
  Antisense strand to SEQ ID NO: 1467130
uaagacgaugguuucuuaa

SEQ ID NO: 1467132 - RNA, 19 nt, Artificial Sequence
  Description of Artificial Sequence: Synthetic oligonucleotide
  Sense strand starting at position 1450 of SEQ ID NO: 1244130
aagaaaccaucgucuuaga

SEQ ID NO: 1467133 - RNA, 19 nt, Artificial Sequence
  Description of Artificial Sequence: Synthetic oligonucleotide
  Antisense strand to SEQ ID NO: 1467132
ucuaagacgaugguuucuu

SEQ ID NO: 1467134 - RNA, 19 nt, Artificial Sequence
  Description of Artificial Sequence: Synthetic oligonucleotide
  Sense strand starting at position 1461 of SEQ ID NO: 1244130
gucuuagacucgcccaagu

SEQ ID NO: 1467135 - RNA, 19 nt, Artificial Sequence
  Description of Artificial Sequence: Synthetic oligonucleotide
  Antisense strand to SEQ ID NO: 1467134
acuugggcgagucuaagac

SEQ ID NO: 1467136 - RNA, 19 nt, Artificial Sequence
  Description of Artificial Sequence: Synthetic oligonucleotide
  Sense strand starting at position 2564 of SEQ ID NO: 1244130
cccguuugucuggagcaaa

SEQ ID NO: 1467137 - RNA, 19 nt, Artificial Sequence
  Description of Artificial Sequence: Synthetic oligonucleotide
  Antisense strand to SEQ ID NO: 1467136
uuugcuccagacaaacggg

SEQ ID NO: 1467138 - RNA, 19 nt, Artificial Sequence
  Description of Artificial Sequence: Synthetic oligonucleotide
  Sense strand starting at position 2582 of SEQ ID NO: 1244130
accgaauuccucugcagca

SEQ ID NO: 1467139 - RNA, 19 nt, Artificial Sequence
  Description of Artificial Sequence: Synthetic oligonucleotide
  Antisense strand to SEQ ID NO: 1467138
ugcugcagaggaauucggu

SEQ ID NO: 1467140 - RNA, 19 nt, Artificial Sequence
  Description of Artificial Sequence: Synthetic oligonucleotide
  Sense strand starting at position 2721 of SEQ ID NO: 1244130
ggauuuguauaagaugaua

SEQ ID NO: 1467141 - RNA, 19 nt, Artificial Sequence
  Description of Artificial Sequence: Synthetic oligonucleotide
  Antisense strand to SEQ ID NO: 1467140
uaucaucuuauacaaaucc

SEQ ID NO: 1467142 - RNA, 19 nt, Artificial Sequence
  Description of Artificial Sequence: Synthetic oligonucleotide
  Sense strand starting at position 2761 of SEQ ID NO: 1244130
ggaacaaccucuuacgaaa

SEQ ID NO: 1467143 - RNA, 19 nt, Artificial Sequence
  Description of Artificial Sequence: Synthetic oligonucleotide
  Antisense strand to SEQ ID NO: 1467142
uuucguaagagguuguucc

SEQ ID NO: 1467144 - RNA, 19 nt, Artificial Sequence
  Description of Artificial Sequence: Synthetic oligonucleotide
  Sense strand starting at position 2869 of SEQ ID NO: 1244130
uguaguguguauuuccuua

SEQ ID NO: 1467145 - RNA, 19 nt, Artificial Sequence
  Description of Artificial Sequence: Synthetic oligonucleotide
  Antisense strand to SEQ ID NO: 1467144
uaaggaaauacacacuaca

SEQ ID NO: 1467146 - RNA, 19 nt, Artificial Sequence
  Description of Artificial Sequence: Synthetic oligonucleotide
  Sense strand starting at position 2882 of SEQ ID NO: 1244130
uccuuaauguuguuuguac

SEQ ID NO: 1467147 - RNA, 19 nt, Artificial Sequence
  Description of Artificial Sequence: Synthetic oligonucleotide
  Antisense strand to SEQ ID NO: 1467146
guacaaacaacauuaagga

SEQ ID NO: 1467148 - RNA, 19 nt, Artificial Sequence
  Description of Artificial Sequence: Synthetic oligonucleotide
  Sense strand starting at position 2884 of SEQ ID NO: 1244130
cuuaauguuguuuguacuu

SEQ ID NO: 1467149 - RNA, 19 nt, Artificial Sequence
  Description of Artificial Sequence: Synthetic oligonucleotide
  Antisense strand to SEQ ID NO: 1467148
aaguacaaacaacauuaag

SEQ ID NO: 1467150 - RNA, 19 nt, Artificial Sequence
  Description of Artificial Sequence: Synthetic oligonucleotide
  Sense strand starting at position 2953 of SEQ ID NO: 1244130
ucgcaaagagguuaaaugu

SEQ ID NO: 1467151 - RNA, 19 nt, Artificial Sequence
  Description of Artificial Sequence: Synthetic oligonucleotide
  Antisense strand to SEQ ID NO: 1467150
acauuuaaccucuuugcga

SEQ ID NO: 1467152 - RNA, 19 nt, Artificial Sequence
  Description of Artificial Sequence: Synthetic oligonucleotide
  Sense strand starting at position 3069 of SEQ ID NO: 1244130
cgccuugcugucuaaugga

SEQ ID NO: 1467153 - RNA, 19 nt, Artificial Sequence
  Description of Artificial Sequence: Synthetic oligonucleotide
  Antisense strand to SEQ ID NO: 1467152
uccauuagacagcaaggcg

SEQ ID NO: 1467154 - RNA, 19 nt, Artificial Sequence
  Description of Artificial Sequence: Synthetic oligonucleotide
  Sense strand starting at position 3345 of SEQ ID NO: 1244130
gccuuucugugcucuauuu

SEQ ID NO: 1467155 - RNA, 19 nt, Artificial Sequence
  Description of Artificial Sequence: Synthetic oligonucleotide
  Antisense strand to SEQ ID NO: 1467154
aaauagagcacagaaaggc

SEQ ID NO: 1467156 - RNA, 19 nt, Artificial Sequence
  Description of Artificial Sequence: Synthetic oligonucleotide
  Sense strand starting at position 3447 of SEQ ID NO: 1244130
augaauuugugcccugcua

SEQ ID NO: 1467157 - RNA, 19 nt, Artificial Sequence
  Description of Artificial Sequence: Synthetic oligonucleotide
  Antisense strand to SEQ ID NO: 1467156
uagcagggcacaaauucau

SEQ ID NO: 1467158 - RNA, 19 nt, Artificial Sequence
  Description of Artificial Sequence: Synthetic oligonucleotide
  Sense strand starting at position 3449 of SEQ ID NO: 1244130
gaauuugugcccugcuaga

SEQ ID NO: 1467159 - RNA, 19 nt, Artificial Sequence
  Description of Artificial Sequence: Synthetic oligonucleotide
  Antisense strand to SEQ ID NO: 1467158
ucuagcagggcacaaauuc

SEQ ID NO: 1467160 - RNA, 19 nt, Artificial Sequence
  Description of Artificial Sequence: Synthetic oligonucleotide
  Sense strand starting at position 3454 of SEQ ID NO: 1244130
ugugcccugcuagauaaau

SEQ ID NO: 1467161 - RNA, 19 nt, Artificial Sequence
  Description of Artificial Sequence: Synthetic oligonucleotide
  Antisense strand to SEQ ID NO: 1467160
auuuaucuagcagggcaca

SEQ ID NO: 1467162 - RNA, 19 nt, Artificial Sequence
  Description of Artificial Sequence: Synthetic oligonucleotide
  Sense strand starting at position 3481 of SEQ ID NO: 1244130
cuggauaugguuuaugguu

SEQ ID NO: 1467163 - RNA, 19 nt, Artificial Sequence
  Description of Artificial Sequence: Synthetic oligonucleotide
  Antisense strand to SEQ ID NO: 1467162
aaccauaaaccauauccag

SEQ ID NO: 1467164 - RNA, 19 nt, Artificial Sequence
  Description of Artificial Sequence: Synthetic oligonucleotide
  Sense strand starting at position 3578 of SEQ ID NO: 1244130
gggcguuuacgaggaugga

SEQ ID NO: 1467165 - RNA, 19 nt, Artificial Sequence
  Description of Artificial Sequence: Synthetic oligonucleotide
  Antisense strand to SEQ ID NO: 1467164
uccauccucguaaacgccc

SEQ ID NO: 1467166 - RNA, 19 nt, Artificial Sequence
  Description of Artificial Sequence: Synthetic oligonucleotide
  Sense strand starting at position 3636 of SEQ ID NO: 1244130
auuggauauugacaaacca

SEQ ID NO: 1467167 - RNA, 19 nt, Artificial Sequence
  Description of Artificial Sequence: Synthetic oligonucleotide
  Antisense strand to SEQ ID NO: 1467166
ugguuugucaauauccaau

SEQ ID NO: 1467168 - RNA, 19 nt, Artificial Sequence
  Description of Artificial Sequence: Synthetic oligonucleotide
  Sense strand starting at position 3672 of SEQ ID NO: 1244130
acuuaaacuuuccuguguu

SEQ ID NO: 1467169 - RNA, 19 nt, Artificial Sequence
  Description of Artificial Sequence: Synthetic oligonucleotide
  Antisense strand to SEQ ID NO: 1467168
aacacaggaaaguuuaagu

SEQ ID NO: 1467170 - RNA, 19 nt, Artificial Sequence
  Description of Artificial Sequence: Synthetic oligonucleotide
  Sense strand starting at position 3782 of SEQ ID NO: 1244130
ucccgugaaugcuuauaaa

SEQ ID NO: 1467171 - RNA, 19 nt, Artificial Sequence
  Description of Artificial Sequence: Synthetic oligonucleotide
  Antisense strand to SEQ ID NO: 1467170
uuuauaagcauucacggga

SEQ ID NO: 1467172 - RNA, 19 nt, Artificial Sequence
  Description of Artificial Sequence: Synthetic oligonucleotide
  Sense strand starting at position 3862 of SEQ ID NO: 1244130
gacaucauagcauguguuu

SEQ ID NO: 1467173 - RNA, 19 nt, Artificial Sequence
  Description of Artificial Sequence: Synthetic oligonucleotide
  Antisense strand to SEQ ID NO: 1467172
aaacacaugcuaugauguc

SEQ ID NO: 1467174 - RNA, 19 nt, Artificial Sequence
  Description of Artificial Sequence: Synthetic oligonucleotide
  Sense strand starting at position 3908 of SEQ ID NO: 1244130
uuccuuuacguggguauua

SEQ ID NO: 1467175 - RNA, 19 nt, Artificial Sequence
  Description of Artificial Sequence: Synthetic oligonucleotide
  Antisense strand to SEQ ID NO: 1467174
uaauacccacguaaaggaa

SEQ ID NO: 1467176 - RNA, 19 nt, Artificial Sequence
  Description of Artificial Sequence: Synthetic oligonucleotide
  Sense strand starting at position 3909 of SEQ ID NO: 1244130
uccuuuacguggguauuaa

SEQ ID NO: 1467177 - RNA, 19 nt, Artificial Sequence
  Description of Artificial Sequence: Synthetic oligonucleotide
  Antisense strand to SEQ ID NO: 1467176
uuaauacccacguaaagga

SEQ ID NO: 1467178 - RNA, 19 nt, Artificial Sequence
  Description of Artificial Sequence: Synthetic oligonucleotide
  Sense strand starting at position 3910 of SEQ ID NO: 1244130
ccuuuacguggguauuaaa

SEQ ID NO: 1467179 - RNA, 19 nt, Artificial Sequence
  Description of Artificial Sequence: Synthetic oligonucleotide
  Antisense strand to SEQ ID NO: 1467178
uuuaauacccacguaaagg

SEQ ID NO: 1467180 - RNA, 19 nt, Artificial Sequence
  Description of Artificial Sequence: Synthetic oligonucleotide
  Sense strand starting at position 3919 of SEQ ID NO: 1244130
ggguauuaaagaugcucga

SEQ ID NO: 1467181 - RNA, 19 nt, Artificial Sequence
  Description of Artificial Sequence: Synthetic oligonucleotide
  Antisense strand to SEQ ID NO: 1467180
ucgagcaucuuuaauaccc

SEQ ID NO: 1467182 - RNA, 19 nt, Artificial Sequence
  Description of Artificial Sequence: Synthetic oligonucleotide
  Sense strand starting at position 3922 of SEQ ID NO: 1244130
uauuaaagaugcucgaugu

SEQ ID NO: 1467183 - RNA, 19 nt, Artificial Sequence
  Description of Artificial Sequence: Synthetic oligonucleotide
  Antisense strand to SEQ ID NO: 1467182
acaucgagcaucuuuaaua

SEQ ID NO: 1467184 - RNA, 19 nt, Artificial Sequence
  Description of Artificial Sequence: Synthetic oligonucleotide
  Sense strand starting at position 3926 of SEQ ID NO: 1244130
aaagaugcucgauguagga

SEQ ID NO: 1467185 - RNA, 19 nt, Artificial Sequence
  Description of Artificial Sequence: Synthetic oligonucleotide
  Antisense strand to SEQ ID NO: 1467184
uccuacaucgagcaucuuu

SEQ ID NO: 1467186 - RNA, 19 nt, Artificial Sequence
  Description of Artificial Sequence: Synthetic oligonucleotide
  Sense strand starting at position 3928 of SEQ ID NO: 1244130
agaugcucgauguaggaaa

SEQ ID NO: 1467187 - RNA, 19 nt, Artificial Sequence
  Description of Artificial Sequence: Synthetic oligonucleotide
  Antisense strand to SEQ ID NO: 1467186
uuuccuacaucgagcaucu

SEQ ID NO: 1467188 - RNA, 19 nt, Artificial Sequence
  Description of Artificial Sequence: Synthetic oligonucleotide
  Sense strand starting at position 3958 of SEQ ID NO: 1244130
ccaucacuugcaugacaug

SEQ ID NO: 1467189 - RNA, 19 nt, Artificial Sequence
  Description of Artificial Sequence: Synthetic oligonucleotide
  Antisense strand to SEQ ID NO: 1467188
caugucaugcaagugaugg

SEQ ID NO: 1467190 - RNA, 19 nt, Artificial Sequence
  Description of Artificial Sequence: Synthetic oligonucleotide
  Sense strand starting at position 40 of SEQ ID NO: 1244131
gucgaagacaguuaucgga

SEQ ID NO: 1467191 - RNA, 19 nt, Artificial Sequence
  Description of Artificial Sequence: Synthetic oligonucleotide
  Antisense strand to SEQ ID NO: 1467190
uccgauaacugucuucgac

SEQ ID NO: 1467192 - RNA, 19 nt, Artificial Sequence
  Description of Artificial Sequence: Synthetic oligonucleotide
  Sense strand starting at position 47 of SEQ ID NO: 1244131
acaguuaucggaggccgaa

SEQ ID NO: 1467193 - RNA, 19 nt, Artificial Sequence
  Description of Artificial Sequence: Synthetic oligonucleotide
  Antisense strand to SEQ ID NO: 1467192
uucggccuccgauaacugu

SEQ ID NO: 1467194 - RNA, 19 nt, Artificial Sequence
  Description of Artificial Sequence: Synthetic oligonucleotide
  Sense strand starting at position 282 of SEQ ID NO: 1244131
gaauauucuuugcuccgga

SEQ ID NO: 1467195 - RNA, 19 nt, Artificial Sequence
  Description of Artificial Sequence: Synthetic oligonucleotide
  Antisense strand to SEQ ID NO: 1467194
uccggagcaaagaauauuc

SEQ ID NO: 1467196 - RNA, 19 nt, Artificial Sequence
  Description of Artificial Sequence: Synthetic oligonucleotide
  Sense strand starting at position 672 of SEQ ID NO: 1244131
agcagaagcugcucuagaa

SEQ ID NO: 1467197 - RNA, 19 nt, Artificial Sequence
  Description of Artificial Sequence: Synthetic oligonucleotide
  Antisense strand to SEQ ID NO: 1467196
uucuagagcagcuucugcu

SEQ ID NO: 1467198 - RNA, 19 nt, Artificial Sequence
  Description of Artificial Sequence: Synthetic oligonucleotide
  Sense strand starting at position 905 of SEQ ID NO: 1244131
cgagaacuuucuguggguu

SEQ ID NO: 1467199 - RNA, 19 nt, Artificial Sequence
  Description of Artificial Sequence: Synthetic oligonucleotide
  Antisense strand to SEQ ID NO: 1467198
aacccacagaaaguucucg

SEQ ID NO: 1467200 - RNA, 19 nt, Artificial Sequence
  Description of Artificial Sequence: Synthetic oligonucleotide
  Sense strand starting at position 977 of SEQ ID NO: 1244131
gcgcaaucugccguaguuu

SEQ ID NO: 1467201 - RNA, 19 nt, Artificial Sequence
  Description of Artificial Sequence: Synthetic oligonucleotide
  Antisense strand to SEQ ID NO: 1467200
aaacuacggcagauugcgc

SEQ ID NO: 1467202 - RNA, 19 nt, Artificial Sequence
  Description of Artificial Sequence: Synthetic oligonucleotide
  Sense strand starting at position 2518 of SEQ ID NO: 1244131
gauguuucgcaggagguuu

SEQ ID NO: 1467203 - RNA, 19 nt, Artificial Sequence
  Description of Artificial Sequence: Synthetic oligonucleotide
  Antisense strand to SEQ ID NO: 1467202
aaaccuccugcgaaacauc

SEQ ID NO: 1467204 - RNA, 19 nt, Artificial Sequence
  Description of Artificial Sequence: Synthetic oligonucleotide
  Sense strand starting at position 2638 of SEQ ID NO: 1244131
gacucauucggagacccuu

SEQ ID NO: 1467205 - RNA, 19 nt, Artificial Sequence
  Description of Artificial Sequence: Synthetic oligonucleotide
  Antisense strand to SEQ ID NO: 1467204
aagggucuccgaaugaguc

SEQ ID NO: 1467206 - RNA, 19 nt, Artificial Sequence
  Description of Artificial Sequence: Synthetic oligonucleotide
  Sense strand starting at position 2700 of SEQ ID NO: 1244131
uuggaaaucgcugucgugu

SEQ ID NO: 1467207 - RNA, 19 nt, Artificial Sequence
  Description of Artificial Sequence: Synthetic oligonucleotide
  Antisense strand to SEQ ID NO: 1467206
acacgacagcgauuuccaa

SEQ ID NO: 1467208 - RNA, 19 nt, Artificial Sequence
  Description of Artificial Sequence: Synthetic oligonucleotide
  Sense strand starting at position 2797 of SEQ ID NO: 1244131
guuaacugagauuagugua

SEQ ID NO: 1467209 - RNA, 19 nt, Artificial Sequence
  Description of Artificial Sequence: Synthetic oligonucleotide
  Antisense strand to SEQ ID NO: 1467208
uacacuaaucucaguuaac

SEQ ID NO: 1467210 - RNA, 19 nt, Artificial Sequence
  Description of Artificial Sequence: Synthetic oligonucleotide
  Sense strand starting at position 2802 of SEQ ID NO: 1244131
cugagauuaguguaaagug

SEQ ID NO: 1467211 - RNA, 19 nt, Artificial Sequence
  Description of Artificial Sequence: Synthetic oligonucleotide
  Antisense strand to SEQ ID NO: 1467210
cacuuuacacuaaucucag

SEQ ID NO: 1467212 - RNA, 19 nt, Artificial Sequence
  Description of Artificial Sequence: Synthetic oligonucleotide
  Sense strand starting at position 2812 of SEQ ID NO: 1244131
uguaaaguguccuuaacaa

SEQ ID NO: 1467213 - RNA, 19 nt, Artificial Sequence
  Description of Artificial Sequence: Synthetic oligonucleotide
  Antisense strand to SEQ ID NO: 1467212
uuguuaaggacacuuuaca

SEQ ID NO: 1467214 - RNA, 19 nt, Artificial Sequence
  Description of Artificial Sequence: Synthetic oligonucleotide
  Sense strand starting at position 2918 of SEQ ID NO: 1244131
aaaguuuccuggucgaaac

SEQ ID NO: 1467215 - RNA, 19 nt, Artificial Sequence
  Description of Artificial Sequence: Synthetic oligonucleotide
  Antisense strand to SEQ ID NO: 1467214
guuucgaccaggaaacuuu

SEQ ID NO: 1467216 - RNA, 19 nt, Artificial Sequence
  Description of Artificial Sequence: Synthetic oligonucleotide
  Sense strand starting at position 2919 of SEQ ID NO: 1244131
aaguuuccuggucgaaaca

SEQ ID NO: 1467217 - RNA, 19 nt, Artificial Sequence
  Description of Artificial Sequence: Synthetic oligonucleotide
  Antisense strand to SEQ ID NO: 1467216
uguuucgaccaggaaacuu

SEQ ID NO: 1467218 - RNA, 19 nt, Artificial Sequence
  Description of Artificial Sequence: Synthetic oligonucleotide
  Sense strand starting at position 2920 of SEQ ID NO: 1244131
aguuuccuggucgaaacau

SEQ ID NO: 1467219 - RNA, 19 nt, Artificial Sequence
  Description of Artificial Sequence: Synthetic oligonucleotide
  Antisense strand to SEQ ID NO: 1467218
auguuucgaccaggaaacu

SEQ ID NO: 1467220 - RNA, 19 nt, Artificial Sequence
  Description of Artificial Sequence: Synthetic oligonucleotide
  Sense strand starting at position 2943 of SEQ ID NO: 1244131
gugggagucauguguagga

SEQ ID NO: 1467221 - RNA, 19 nt, Artificial Sequence
  Description of Artificial Sequence: Synthetic oligonucleotide
  Antisense strand to SEQ ID NO: 1467220
uccuacacaugacucccac

SEQ ID NO: 1467222 - RNA, 19 nt, Artificial Sequence
  Description of Artificial Sequence: Synthetic oligonucleotide
  Sense strand starting at position 2945 of SEQ ID NO: 1244131
gggagucauguguaggaag

SEQ ID NO: 1467223 - RNA, 19 nt, Artificial Sequence
  Description of Artificial Sequence: Synthetic oligonucleotide
  Antisense strand to SEQ ID NO: 1467222
cuuccuacacaugacuccc

SEQ ID NO: 1467224 - RNA, 19 nt, Artificial Sequence
  Description of Artificial Sequence: Synthetic oligonucleotide
  Sense strand starting at position 2947 of SEQ ID NO: 1244131
gagucauguguaggaaguu

SEQ ID NO: 1467225 - RNA, 19 nt, Artificial Sequence
  Description of Artificial Sequence: Synthetic oligonucleotide
  Antisense strand to SEQ ID NO: 1467224
aacuuccuacacaugacuc

SEQ ID NO: 1467226 - RNA, 19 nt, Artificial Sequence
  Description of Artificial Sequence: Synthetic oligonucleotide
  Sense strand starting at position 2971 of SEQ ID NO: 1244131
uggauaugaguuuguugga

SEQ ID NO: 1467227 - RNA, 19 nt, Artificial Sequence
  Description of Artificial Sequence: Synthetic oligonucleotide
  Antisense strand to SEQ ID NO: 1467226
uccaacaaacucauaucca

SEQ ID NO: 1467228 - RNA, 19 nt, Artificial Sequence
  Description of Artificial Sequence: Synthetic oligonucleotide
  Sense strand starting at position 2972 of SEQ ID NO: 1244131
ggauaugaguuuguuggag

SEQ ID NO: 1467229 - RNA, 19 nt, Artificial Sequence
  Description of Artificial Sequence: Synthetic oligonucleotide
  Antisense strand to SEQ ID NO: 1467228
cuccaacaaacucauaucc

SEQ ID NO: 1467230 - RNA, 19 nt, Artificial Sequence
  Description of Artificial Sequence: Synthetic oligonucleotide
  Sense strand starting at position 2978 of SEQ ID NO: 1244131
gaguuuguuggagacguua

SEQ ID NO: 1467231 - RNA, 19 nt, Artificial Sequence
  Description of Artificial Sequence: Synthetic oligonucleotide
  Antisense strand to SEQ ID NO: 1467230
uaacgucuccaacaaacuc

SEQ ID NO: 1467232 - RNA, 19 nt, Artificial Sequence
  Description of Artificial Sequence: Synthetic oligonucleotide
  Sense strand starting at position 2989 of SEQ ID NO: 1244131
agacguuagguuugagaaa

SEQ ID NO: 1467233 - RNA, 19 nt, Artificial Sequence
  Description of Artificial Sequence: Synthetic oligonucleotide
  Antisense strand to SEQ ID NO: 1467232
uuucucaaaccuaacgucu

SEQ ID NO: 1467234 - RNA, 19 nt, Artificial Sequence
  Description of Artificial Sequence: Synthetic oligonucleotide
  Sense strand starting at position 3054 of SEQ ID NO: 1244131
ugccuuaauuuaggagaca

SEQ ID NO: 1467235 - RNA, 19 nt, Artificial Sequence
  Description of Artificial Sequence: Synthetic oligonucleotide
  Antisense strand to SEQ ID NO: 1467234
ugucuccuaaauuaaggca

SEQ ID NO: 1467236 - RNA, 19 nt, Artificial Sequence
  Description of Artificial Sequence: Synthetic oligonucleotide
  Sense strand starting at position 3055 of SEQ ID NO: 1244131
gccuuaauuuaggagacag

SEQ ID NO: 1467237 - RNA, 19 nt, Artificial Sequence
  Description of Artificial Sequence: Synthetic oligonucleotide
  Antisense strand to SEQ ID NO: 1467236
cugucuccuaaauuaaggc

SEQ ID NO: 1467238 - RNA, 19 nt, Artificial Sequence
  Description of Artificial Sequence: Synthetic oligonucleotide
  Sense strand starting at position 3075 of SEQ ID NO: 1244131
gugauuugcuaaccuguga

SEQ ID NO: 1467239 - RNA, 19 nt, Artificial Sequence
  Description of Artificial Sequence: Synthetic oligonucleotide
  Antisense strand to SEQ ID NO: 1467238
ucacagguuagcaaaucac

SEQ ID NO: 1467240 - RNA, 19 nt, Artificial Sequence
  Description of Artificial Sequence: Synthetic oligonucleotide
  Sense strand starting at position 3079 of SEQ ID NO: 1244131
uuugcuaaccugugacacu

SEQ ID NO: 1467241 - RNA, 19 nt, Artificial Sequence
  Description of Artificial Sequence: Synthetic oligonucleotide
  Antisense strand to SEQ ID NO: 1467240
agugucacagguuagcaaa

SEQ ID NO: 1467242 - RNA, 19 nt, Artificial Sequence
  Description of Artificial Sequence: Synthetic oligonucleotide
  Sense strand starting at position 3098 of SEQ ID NO: 1244131
gauuguuucguguugucau

SEQ ID NO: 1467243 - RNA, 19 nt, Artificial Sequence
  Description of Artificial Sequence: Synthetic oligonucleotide
  Antisense strand to SEQ ID NO: 1467242
augacaacacgaaacaauc

SEQ ID NO: 1467244 - RNA, 19 nt, Artificial Sequence
  Description of Artificial Sequence: Synthetic oligonucleotide
  Sense strand starting at position 3174 of SEQ ID NO: 1244131
gcacuuauuuaauagugaa

SEQ ID NO: 1467245 - RNA, 19 nt, Artificial Sequence
  Description of Artificial Sequence: Synthetic oligonucleotide
  Antisense strand to SEQ ID NO: 1467244
uucacuauuaaauaagugc

SEQ ID NO: 1467246 - RNA, 19 nt, Artificial Sequence
  Description of Artificial Sequence: Synthetic oligonucleotide
  Sense strand starting at position 3188 of SEQ ID NO: 1244131
gugaaagucuacucgaagu

SEQ ID NO: 1467247 - RNA, 19 nt, Artificial Sequence
  Description of Artificial Sequence: Synthetic oligonucleotide
  Antisense strand to SEQ ID NO: 1467246
acuucgaguagacuuucac

SEQ ID NO: 1467248 - RNA, 19 nt, Artificial Sequence
  Description of Artificial Sequence: Synthetic oligonucleotide
  Sense strand starting at position 3190 of SEQ ID NO: 1244131
gaaagucuacucgaaguca

SEQ ID NO: 1467249 - RNA, 19 nt, Artificial Sequence
  Description of Artificial Sequence: Synthetic oligonucleotide
  Antisense strand to SEQ ID NO: 1467248
ugacuucgaguagacuuuc

SEQ ID NO: 1467250 - RNA, 19 nt, Artificial Sequence
  Description of Artificial Sequence: Synthetic oligonucleotide
  Sense strand starting at position 3359 of SEQ ID NO: 1244131
ucggaagcucgagaucaaa

SEQ ID NO: 1467251 - RNA, 19 nt, Artificial Sequence
  Description of Artificial Sequence: Synthetic oligonucleotide
  Antisense strand to SEQ ID NO: 1467250
uuugaucucgagcuuccga

SEQ ID NO: 1467252 - RNA, 19 nt, Artificial Sequence
  Description of Artificial Sequence: Synthetic oligonucleotide
  Sense strand starting at position 3386 of SEQ ID NO: 1244131
ggucguguucaggaaguuu

SEQ ID NO: 1467253 - RNA, 19 nt, Artificial Sequence
  Description of Artificial Sequence: Synthetic oligonucleotide
  Antisense strand to SEQ ID NO: 1467252
aaacuuccugaacacgacc

SEQ ID NO: 1467254 - RNA, 19 nt, Artificial Sequence
  Description of Artificial Sequence: Synthetic oligonucleotide
  Sense strand starting at position 3662 of SEQ ID NO: 1244131
cccucucacuuccugagua

SEQ ID NO: 1467255 - RNA, 19 nt, Artificial Sequence
  Description of Artificial Sequence: Synthetic oligonucleotide
  Antisense strand to SEQ ID NO: 1467254
uacucaggaagugagaggg

SEQ ID NO: 1467256 - RNA, 19 nt, Artificial Sequence
  Description of Artificial Sequence: Synthetic oligonucleotide
  Sense strand starting at position 3666 of SEQ ID NO: 1244131
cucacuuccugaguaaaug

SEQ ID NO: 1467257 - RNA, 19 nt, Artificial Sequence
  Description of Artificial Sequence: Synthetic oligonucleotide
  Antisense strand to SEQ ID NO: 1467256
cauuuacucaggaagugag

SEQ ID NO: 1467258 - RNA, 19 nt, Artificial Sequence
  Description of Artificial Sequence: Synthetic oligonucleotide
  Sense strand starting at position 3667 of SEQ ID NO: 1244131
ucacuuccugaguaaaugu

SEQ ID NO: 1467259 - RNA, 19 nt, Artificial Sequence
  Description of Artificial Sequence: Synthetic oligonucleotide
  Antisense strand to SEQ ID NO: 1467258
acauuuacucaggaaguga

SEQ ID NO: 1467260 - RNA, 19 nt, Artificial Sequence
  Description of Artificial Sequence: Synthetic oligonucleotide
  Sense strand starting at position 3676 of SEQ ID NO: 1244131
gaguaaauguucccaagug

SEQ ID NO: 1467261 - RNA, 19 nt, Artificial Sequence
  Description of Artificial Sequence: Synthetic oligonucleotide
  Antisense strand to SEQ ID NO: 1467260
cacuugggaacauuuacuc

SEQ ID NO: 1467262 - RNA, 19 nt, Artificial Sequence
  Description of Artificial Sequence: Synthetic oligonucleotide
  Sense strand starting at position 3804 of SEQ ID NO: 1244131
cgguaauggccagagagga

SEQ ID NO: 1467263 - RNA, 19 nt, Artificial Sequence
  Description of Artificial Sequence: Synthetic oligonucleotide
  Antisense strand to SEQ ID NO: 1467262
uccucucuggccauuaccg

SEQ ID NO: 1467264 - RNA, 19 nt, Artificial Sequence
  Description of Artificial Sequence: Synthetic oligonucleotide
  Sense strand starting at position 3872 of SEQ ID NO: 1244131
acgggagacuucuuugcaa

SEQ ID NO: 1467265 - RNA, 19 nt, Artificial Sequence
  Description of Artificial Sequence: Synthetic oligonucleotide
  Antisense strand to SEQ ID NO: 1467264
uugcaaagaagucucccgu

SEQ ID NO: 1467266 - RNA, 19 nt, Artificial Sequence
  Description of Artificial Sequence: Synthetic oligonucleotide
  Sense strand starting at position 3874 of SEQ ID NO: 1244131
gggagacuucuuugcaacu

SEQ ID NO: 1467267 - RNA, 19 nt, Artificial Sequence
  Description of Artificial Sequence: Synthetic oligonucleotide
  Antisense strand to SEQ ID NO: 1467266
aguugcaaagaagucuccc

SEQ ID NO: 1467268 - RNA, 19 nt, Artificial Sequence
  Description of Artificial Sequence: Synthetic oligonucleotide
  Sense strand starting at position 3875 of SEQ ID NO: 1244131
ggagacuucuuugcaacua

SEQ ID NO: 1467269 - RNA, 19 nt, Artificial Sequence
  Description of Artificial Sequence: Synthetic oligonucleotide
  Antisense strand to SEQ ID NO: 1467268
uaguugcaaagaagucucc

SEQ ID NO: 1467270 - RNA, 19 nt, Artificial Sequence
  Description of Artificial Sequence: Synthetic oligonucleotide
  Sense strand starting at position 28 of SEQ ID NO: 1244132
gcgucucuaggucagaguu

SEQ ID NO: 1467271 - RNA, 19 nt, Artificial Sequence
  Description of Artificial Sequence: Synthetic oligonucleotide
  Antisense strand to SEQ ID NO: 1467270
aacucugaccuagagacgc

SEQ ID NO: 1467272 - RNA, 19 nt, Artificial Sequence
  Description of Artificial Sequence: Synthetic oligonucleotide
  Sense strand starting at position 30 of SEQ ID NO: 1244132
gucucuaggucagaguuaa

SEQ ID NO: 1467273 - RNA, 19 nt, Artificial Sequence
  Description of Artificial Sequence: Synthetic oligonucleotide
  Antisense strand to SEQ ID NO: 1467272
uuaacucugaccuagagac

SEQ ID NO: 1467274 - RNA, 19 nt, Artificial Sequence
  Description of Artificial Sequence: Synthetic oligonucleotide
  Sense strand starting at position 607 of SEQ ID NO: 1244132
gggaacauguugguuucaa

SEQ ID NO: 1467275 - RNA, 19 nt, Artificial Sequence
  Description of Artificial Sequence: Synthetic oligonucleotide
  Antisense strand to SEQ ID NO: 1467274
uugaaaccaacauguuccc

SEQ ID NO: 1467276 - RNA, 19 nt, Artificial Sequence
  Description of Artificial Sequence: Synthetic oligonucleotide
  Sense strand starting at position 2208 of SEQ ID NO: 1244132
gacaaaguauugcuuaggu

SEQ ID NO: 1467277 - RNA, 19 nt, Artificial Sequence
  Description of Artificial Sequence: Synthetic oligonucleotide
  Antisense strand to SEQ ID NO: 1467276
accuaagcaauacuuuguc

SEQ ID NO: 1467278 - RNA, 19 nt, Artificial Sequence
  Description of Artificial Sequence: Synthetic oligonucleotide
  Sense strand starting at position 2212 of SEQ ID NO: 1244132
aaguauugcuuagguugga

SEQ ID NO: 1467279 - RNA, 19 nt, Artificial Sequence
  Description of Artificial Sequence: Synthetic oligonucleotide
  Antisense strand to SEQ ID NO: 1467278
uccaaccuaagcaauacuu

SEQ ID NO: 1467280 - RNA, 19 nt, Artificial Sequence
  Description of Artificial Sequence: Synthetic oligonucleotide
  Sense strand starting at position 2225 of SEQ ID NO: 1244132
guuggagugcagugucuua

SEQ ID NO: 1467281 - RNA, 19 nt, Artificial Sequence
  Description of Artificial Sequence: Synthetic oligonucleotide
  Antisense strand to SEQ ID NO: 1467280
uaagacacugcacuccaac

SEQ ID NO: 1467282 - RNA, 19 nt, Artificial Sequence
  Description of Artificial Sequence: Synthetic oligonucleotide
  Sense strand starting at position 2230 of SEQ ID NO: 1244132
agugcagugucuuaaucuu

SEQ ID NO: 1467283 - RNA, 19 nt, Artificial Sequence
  Description of Artificial Sequence: Synthetic oligonucleotide
  Antisense strand to SEQ ID NO: 1467282
aagauuaagacacugcacu

SEQ ID NO: 1467284 - RNA, 19 nt, Artificial Sequence
  Description of Artificial Sequence: Synthetic oligonucleotide
  Sense strand starting at position 2236 of SEQ ID NO: 1244132
gugucuuaaucuuggcuca

SEQ ID NO: 1467285 - RNA, 19 nt, Artificial Sequence
  Description of Artificial Sequence: Synthetic oligonucleotide
  Antisense strand to SEQ ID NO: 1467284
ugagccaagauuaagacac

SEQ ID NO: 1467286 - RNA, 19 nt, Artificial Sequence
  Description of Artificial Sequence: Synthetic oligonucleotide
  Sense strand starting at position 2899 of SEQ ID NO: 1244132
cagugugcagucuggaaua

SEQ ID NO: 1467287 - RNA, 19 nt, Artificial Sequence
  Description of Artificial Sequence: Synthetic oligonucleotide
  Antisense strand to SEQ ID NO: 1467286
uauuccagacugcacacug

SEQ ID NO: 1467288 - RNA, 19 nt, Artificial Sequence
  Description of Artificial Sequence: Synthetic oligonucleotide
  Sense strand starting at position 2928 of SEQ ID NO: 1244132
gggauaugcuuugaugagc

SEQ ID NO: 1467289 - RNA, 19 nt, Artificial Sequence
  Description of Artificial Sequence: Synthetic oligonucleotide
  Antisense strand to SEQ ID NO: 1467288
gcucaucaaagcauauccc

SEQ ID NO: 1467290 - RNA, 19 nt, Artificial Sequence
  Description of Artificial Sequence: Synthetic oligonucleotide
  Sense strand starting at position 3049 of SEQ ID NO: 1244132
ggaguugucauauaguaaa

SEQ ID NO: 1467291 - RNA, 19 nt, Artificial Sequence
  Description of Artificial Sequence: Synthetic oligonucleotide
  Antisense strand to SEQ ID NO: 1467290
uuuacuauaugacaacucc

SEQ ID NO: 1467292 - RNA, 19 nt, Artificial Sequence
  Description of Artificial Sequence: Synthetic oligonucleotide
  Sense strand starting at position 3052 of SEQ ID NO: 1244132
guugucauauaguaaagua

SEQ ID NO: 1467293 - RNA, 19 nt, Artificial Sequence
  Description of Artificial Sequence: Synthetic oligonucleotide
  Antisense strand to SEQ ID NO: 1467292
uacuuuacuauaugacaac

SEQ ID NO: 1467294 - RNA, 19 nt, Artificial Sequence
  Description of Artificial Sequence: Synthetic oligonucleotide
  Sense strand starting at position 5 of SEQ ID NO: 1244133
cacagaggguuucuuaacu

SEQ ID NO: 1467295 - RNA, 19 nt, Artificial Sequence
  Description of Artificial Sequence: Synthetic oligonucleotide
  Antisense strand to SEQ ID NO: 1467294
aguuaagaaacccucugug

SEQ ID NO: 1467296 - RNA, 19 nt, Artificial Sequence
  Description of Artificial Sequence: Synthetic oligonucleotide
  Sense strand starting at position 66 of SEQ ID NO: 1244133
gaaagauuguagccaauag

SEQ ID NO: 1467297 - RNA, 19 nt, Artificial Sequence
  Description of Artificial Sequence: Synthetic oligonucleotide
  Antisense strand to SEQ ID NO: 1467296
cuauuggcuacaaucuuuc

SEQ ID NO: 1467298 - RNA, 19 nt, Artificial Sequence
  Description of Artificial Sequence: Synthetic oligonucleotide
  Sense strand starting at position 70 of SEQ ID NO: 1244133
gauuguagccaauagugaa

SEQ ID NO: 1467299 - RNA, 19 nt, Artificial Sequence
  Description of Artificial Sequence: Synthetic oligonucleotide
  Antisense strand to SEQ ID NO: 1467298
uucacuauuggcuacaauc

SEQ ID NO: 1467300 - RNA, 19 nt, Artificial Sequence
  Description of Artificial Sequence: Synthetic oligonucleotide
  Sense strand starting at position 91 of SEQ ID NO: 1244133
cuccaaaggcuguaaaugu

SEQ ID NO: 1467301 - RNA, 19 nt, Artificial Sequence
  Description of Artificial Sequence: Synthetic oligonucleotide
  Antisense strand to SEQ ID NO: 1467300
acauuuacagccuuuggag

SEQ ID NO: 1467302 - RNA, 19 nt, Artificial Sequence
  Description of Artificial Sequence: Synthetic oligonucleotide
  Sense strand starting at position 160 of SEQ ID NO: 1244133
ccaucuuugccuuauguuu

SEQ ID NO: 1467303 - RNA, 19 nt, Artificial Sequence
  Description of Artificial Sequence: Synthetic oligonucleotide
  Antisense strand to SEQ ID NO: 1467302
aaacauaaggcaaagaugg

SEQ ID NO: 1467304 - RNA, 19 nt, Artificial Sequence
  Description of Artificial Sequence: Synthetic oligonucleotide
  Sense strand starting at position 169 of SEQ ID NO: 1244133
ccuuauguuugucuaauca

SEQ ID NO: 1467305 - RNA, 19 nt, Artificial Sequence
  Description of Artificial Sequence: Synthetic oligonucleotide
  Antisense strand to SEQ ID NO: 1467304
ugauuagacaaacauaagg

SEQ ID NO: 1467306 - RNA, 19 nt, Artificial Sequence
  Description of Artificial Sequence: Synthetic oligonucleotide
  Sense strand starting at position 270 of SEQ ID NO: 1244133
cuuguaagccacgauguau

SEQ ID NO: 1467307 - RNA, 19 nt, Artificial Sequence
  Description of Artificial Sequence: Synthetic oligonucleotide
  Antisense strand to SEQ ID NO: 1467306
auacaucguggcuuacaag

SEQ ID NO: 1467308 - RNA, 19 nt, Artificial Sequence
  Description of Artificial Sequence: Synthetic oligonucleotide
  Sense strand starting at position 301 of SEQ ID NO: 1244133
gcucuuaagguauauaaac

SEQ ID NO: 1467309 - RNA, 19 nt, Artificial Sequence
  Description of Artificial Sequence: Synthetic oligonucleotide
  Antisense strand to SEQ ID NO: 1467308
guuuauauaccuuaagagc

SEQ ID NO: 1467310 - RNA, 19 nt, Artificial Sequence
  Description of Artificial Sequence: Synthetic oligonucleotide
  Sense strand starting at position 354 of SEQ ID NO: 1244133
aaaucugaugauugucgua

SEQ ID NO: 1467311 - RNA, 19 nt, Artificial Sequence
  Description of Artificial Sequence: Synthetic oligonucleotide
  Antisense strand to SEQ ID NO: 1467310
uacgacaaucaucagauuu

SEQ ID NO: 1467312 - RNA, 19 nt, Artificial Sequence
  Description of Artificial Sequence: Synthetic oligonucleotide
  Sense strand starting at position 385 of SEQ ID NO: 1244133
uuucuuagaugugccaaua

SEQ ID NO: 1467313 - RNA, 19 nt, Artificial Sequence
  Description of Artificial Sequence: Synthetic oligonucleotide
  Antisense strand to SEQ ID NO: 1467312
uauuggcacaucuaagaaa

SEQ ID NO: 1467314 - RNA, 19 nt, Artificial Sequence
  Description of Artificial Sequence: Synthetic oligonucleotide
  Sense strand starting at position 942 of SEQ ID NO: 1244133
gaguccacauguuuacagu

SEQ ID NO: 1467315 - RNA, 19 nt, Artificial Sequence
  Description of Artificial Sequence: Synthetic oligonucleotide
  Antisense strand to SEQ ID NO: 1467314
acuguaaacauguggacuc

SEQ ID NO: 1467316 - RNA, 19 nt, Artificial Sequence
  Description of Artificial Sequence: Synthetic oligonucleotide
  Sense strand starting at position 1531 of SEQ ID NO: 1244133
gcggguuguggaagugaug

SEQ ID NO: 1467317 - RNA, 19 nt, Artificial Sequence
  Description of Artificial Sequence: Synthetic oligonucleotide
  Antisense strand to SEQ ID NO: 1467316
caucacuuccacaacccgc

SEQ ID NO: 1467318 - RNA, 19 nt, Artificial Sequence
  Description of Artificial Sequence: Synthetic oligonucleotide
  Sense strand starting at position 1737 of SEQ ID NO: 1244133
aagagcggcugaucgauaa

SEQ ID NO: 1467319 - RNA, 19 nt, Artificial Sequence
  Description of Artificial Sequence: Synthetic oligonucleotide
  Antisense strand to SEQ ID NO: 1467318
uuaucgaucagccgcucuu

SEQ ID NO: 1467320 - RNA, 19 nt, Artificial Sequence
  Description of Artificial Sequence: Synthetic oligonucleotide
  Sense strand starting at position 2191 of SEQ ID NO: 1244133
guucuaaguccugacaaga

SEQ ID NO: 1467321 - RNA, 19 nt, Artificial Sequence
  Description of Artificial Sequence: Synthetic oligonucleotide
  Antisense strand to SEQ ID NO: 1467320
ucuugucaggacuuagaac

SEQ ID NO: 1467322 - RNA, 19 nt, Artificial Sequence
  Description of Artificial Sequence: Synthetic oligonucleotide
  Sense strand starting at position 2217 of SEQ ID NO: 1244133
ccaguuauccaccguggaa

SEQ ID NO: 1467323 - RNA, 19 nt, Artificial Sequence
  Description of Artificial Sequence: Synthetic oligonucleotide
  Antisense strand to SEQ ID NO: 1467322
uuccacgguggauaacugg

SEQ ID NO: 1467324 - RNA, 19 nt, Artificial Sequence
  Description of Artificial Sequence: Synthetic oligonucleotide
  Sense strand starting at position 2219 of SEQ ID NO: 1244133
aguuauccaccguggaaua

SEQ ID NO: 1467325 - RNA, 19 nt, Artificial Sequence
  Description of Artificial Sequence: Synthetic oligonucleotide
  Antisense strand to SEQ ID NO: 1467324
uauuccacgguggauaacu

SEQ ID NO: 1467326 - RNA, 19 nt, Artificial Sequence
  Description of Artificial Sequence: Synthetic oligonucleotide
  Sense strand starting at position 2333 of SEQ ID NO: 1244133
aagggucuggucuguaauc

SEQ ID NO: 1467327 - RNA, 19 nt, Artificial Sequence
  Description of Artificial Sequence: Synthetic oligonucleotide
  Antisense strand to SEQ ID NO: 1467326
gauuacagaccagacccuu

SEQ ID NO: 1467328 - RNA, 19 nt, Artificial Sequence
  Description of Artificial Sequence: Synthetic oligonucleotide
  Sense strand starting at position 2335 of SEQ ID NO: 1244133
gggucuggucuguaaucuu

SEQ ID NO: 1467329 - RNA, 19 nt, Artificial Sequence
  Description of Artificial Sequence: Synthetic oligonucleotide
  Antisense strand to SEQ ID NO: 1467328
aagauuacagaccagaccc

SEQ ID NO: 1467330 - RNA, 19 nt, Artificial Sequence
  Description of Artificial Sequence: Synthetic oligonucleotide
  Sense strand starting at position 2344 of SEQ ID NO: 1244133
cuguaaucuuugcuaacag

SEQ ID NO: 1467331 - RNA, 19 nt, Artificial Sequence
  Description of Artificial Sequence: Synthetic oligonucleotide
  Antisense strand to SEQ ID NO: 1467330
cuguuagcaaagauuacag

SEQ ID NO: 1467332 - RNA, 19 nt, Artificial Sequence
  Description of Artificial Sequence: Synthetic oligonucleotide
  Sense strand starting at position 2364 of SEQ ID NO: 1244133
ggaacugcuuaccucucaa

SEQ ID NO: 1467333 - RNA, 19 nt, Artificial Sequence
  Description of Artificial Sequence: Synthetic oligonucleotide
  Antisense strand to SEQ ID NO: 1467332
uugagagguaagcaguucc

SEQ ID NO: 1467334 - RNA, 19 nt, Artificial Sequence
  Description of Artificial Sequence: Synthetic oligonucleotide
  Sense strand starting at position 2391 of SEQ ID NO: 1244133
gaugcuacuggagguauaa

SEQ ID NO: 1467335 - RNA, 19 nt, Artificial Sequence
  Description of Artificial Sequence: Synthetic oligonucleotide
  Antisense strand to SEQ ID NO: 1467334
uuauaccuccaguagcauc

SEQ ID NO: 1467336 - RNA, 19 nt, Artificial Sequence
  Description of Artificial Sequence: Synthetic oligonucleotide
  Sense strand starting at position 2393 of SEQ ID NO: 1244133
ugcuacuggagguauaaua

SEQ ID NO: 1467337 - RNA, 19 nt, Artificial Sequence
  Description of Artificial Sequence: Synthetic oligonucleotide
  Antisense strand to SEQ ID NO: 1467336
uauuauaccuccaguagca

SEQ ID NO: 1467338 - RNA, 19 nt, Artificial Sequence
  Description of Artificial Sequence: Synthetic oligonucleotide
  Sense strand starting at position 2401 of SEQ ID NO: 1244133
gagguauaauaucuugagu

SEQ ID NO: 1467339 - RNA, 19 nt, Artificial Sequence
  Description of Artificial Sequence: Synthetic oligonucleotide
  Antisense strand to SEQ ID NO: 1467338
acucaagauauuauaccuc

SEQ ID NO: 1467340 - RNA, 19 nt, Artificial Sequence
  Description of Artificial Sequence: Synthetic oligonucleotide
  Sense strand starting at position 2406 of SEQ ID NO: 1244133
auaauaucuugaguaaacg

SEQ ID NO: 1467341 - RNA, 19 nt, Artificial Sequence
  Description of Artificial Sequence: Synthetic oligonucleotide
  Antisense strand to SEQ ID NO: 1467340
cguuuacucaagauauuau

SEQ ID NO: 1467342 - RNA, 19 nt, Artificial Sequence
  Description of Artificial Sequence: Synthetic oligonucleotide
  Sense strand starting at position 2624 of SEQ ID NO: 1244133
gacagaauucuacgguauc

SEQ ID NO: 1467343 - RNA, 19 nt, Artificial Sequence
  Description of Artificial Sequence: Synthetic oligonucleotide
  Antisense strand to SEQ ID NO: 1467342
gauaccguagaauucuguc

SEQ ID NO: 1467344 - RNA, 19 nt, Artificial Sequence
  Description of Artificial Sequence: Synthetic oligonucleotide
  Sense strand starting at position 2627 of SEQ ID NO: 1244133
agaauucuacgguauccau

SEQ ID NO: 1467345 - RNA, 19 nt, Artificial Sequence
  Description of Artificial Sequence: Synthetic oligonucleotide
  Antisense strand to SEQ ID NO: 1467344
auggauaccguagaauucu

SEQ ID NO: 1467346 - RNA, 19 nt, Artificial Sequence
  Description of Artificial Sequence: Synthetic oligonucleotide
  Sense strand starting at position 2647 of SEQ ID NO: 1244133
agaaucgaucccuagccaa

SEQ ID NO: 1467347 - RNA, 19 nt, Artificial Sequence
  Description of Artificial Sequence: Synthetic oligonucleotide
  Antisense strand to SEQ ID NO: 1467346
uuggcuagggaucgauucu

SEQ ID NO: 1467348 - RNA, 19 nt, Artificial Sequence
  Description of Artificial Sequence: Synthetic oligonucleotide
  Sense strand starting at position 2682 of SEQ ID NO: 1244133
uaacaagagcugugcugau

SEQ ID NO: 1467349 - RNA, 19 nt, Artificial Sequence
  Description of Artificial Sequence: Synthetic oligonucleotide
  Antisense strand to SEQ ID NO: 1467348
aucagcacagcucuuguua

SEQ ID NO: 1467350 - RNA, 19 nt, Artificial Sequence
  Description of Artificial Sequence: Synthetic oligonucleotide
  Sense strand starting at position 3025 of SEQ ID NO: 1244133
uuggaaauugcugggagaa

SEQ ID NO: 1467351 - RNA, 19 nt, Artificial Sequence
  Description of Artificial Sequence: Synthetic oligonucleotide
  Antisense strand to SEQ ID NO: 1467350
uucucccagcaauuuccaa

SEQ ID NO: 1467352 - RNA, 19 nt, Artificial Sequence
  Description of Artificial Sequence: Synthetic oligonucleotide
  Sense strand starting at position 3061 of SEQ ID NO: 1244133
cucuucucauggucaaaga

SEQ ID NO: 1467353 - RNA, 19 nt, Artificial Sequence
  Description of Artificial Sequence: Synthetic oligonucleotide
  Antisense strand to SEQ ID NO: 1467352
ucuuugaccaugagaagag

SEQ ID NO: 1467354 - RNA, 19 nt, Artificial Sequence
  Description of Artificial Sequence: Synthetic oligonucleotide
  Sense strand starting at position 3260 of SEQ ID NO: 1244133
aaaggaguauuugaugaac

SEQ ID NO: 1467355 - RNA, 19 nt, Artificial Sequence
  Description of Artificial Sequence: Synthetic oligonucleotide
  Antisense strand to SEQ ID NO: 1467354
guucaucaaauacuccuuu

SEQ ID NO: 1467356 - RNA, 19 nt, Artificial Sequence
  Description of Artificial Sequence: Synthetic oligonucleotide
  Sense strand starting at position 3262 of SEQ ID NO: 1244133
aggaguauuugaugaacac

SEQ ID NO: 1467357 - RNA, 19 nt, Artificial Sequence
  Description of Artificial Sequence: Synthetic oligonucleotide
  Antisense strand to SEQ ID NO: 1467356
guguucaucaaauacuccu

SEQ ID NO: 1467358 - RNA, 19 nt, Artificial Sequence
  Description of Artificial Sequence: Synthetic oligonucleotide
  Sense strand starting at position 3423 of SEQ ID NO: 1244133
agugaagugcaaugaaaga

SEQ ID NO: 1467359 - RNA, 19 nt, Artificial Sequence
  Description of Artificial Sequence: Synthetic oligonucleotide
  Antisense strand to SEQ ID NO: 1467358
ucuuucauugcacuucacu

SEQ ID NO: 1467360 - RNA, 19 nt, Artificial Sequence
  Description of Artificial Sequence: Synthetic oligonucleotide
  Sense strand starting at position 3525 of SEQ ID NO: 1244133
caaggaacagcuuguuacu

SEQ ID NO: 1467361 - RNA, 19 nt, Artificial Sequence
  Description of Artificial Sequence: Synthetic oligonucleotide
  Antisense strand to SEQ ID NO: 1467360
aguaacaagcuguuccuug

SEQ ID NO: 1467362 - RNA, 19 nt, Artificial Sequence
  Description of Artificial Sequence: Synthetic oligonucleotide
  Sense strand starting at position 3652 of SEQ ID NO: 1244133
agguuacaucuauggcaag

SEQ ID NO: 1467363 - RNA, 19 nt, Artificial Sequence
  Description of Artificial Sequence: Synthetic oligonucleotide
  Antisense strand to SEQ ID NO: 1467362
cuugccauagauguaaccu

SEQ ID NO: 1467364 - RNA, 19 nt, Artificial Sequence
  Description of Artificial Sequence: Synthetic oligonucleotide
  Sense strand starting at position 3733 of SEQ ID NO: 1244133
guucuaaaugcagauccua

SEQ ID NO: 1467365 - RNA, 19 nt, Artificial Sequence
  Description of Artificial Sequence: Synthetic oligonucleotide
  Antisense strand to SEQ ID NO: 1467364
uaggaucugcauuuagaac

SEQ ID NO: 1467366 - RNA, 19 nt, Artificial Sequence
  Description of Artificial Sequence: Synthetic oligonucleotide
  Sense strand starting at position 3944 of SEQ ID NO: 1244133
aguacauggcuauaucacu

SEQ ID NO: 1467367 - RNA, 19 nt, Artificial Sequence
  Description of Artificial Sequence: Synthetic oligonucleotide
  Antisense strand to SEQ ID NO: 1467366
agugauauagccauguacu

SEQ ID NO: 1467368 - RNA, 19 nt, Artificial Sequence
  Description of Artificial Sequence: Synthetic oligonucleotide
  Sense strand starting at position 3950 of SEQ ID NO: 1244133
uggcuauaucacuguaucu

SEQ ID NO: 1467369 - RNA, 19 nt, Artificial Sequence
  Description of Artificial Sequence: Synthetic oligonucleotide
  Antisense strand to SEQ ID NO: 1467368
agauacagugauauagcca

SEQ ID NO: 1467370 - RNA, 19 nt, Artificial Sequence
  Description of Artificial Sequence: Synthetic oligonucleotide
  Sense strand starting at position 3952 of SEQ ID NO: 1244133
gcuauaucacuguaucuuu

SEQ ID NO: 1467371 - RNA, 19 nt, Artificial Sequence
  Description of Artificial Sequence: Synthetic oligonucleotide
  Antisense strand to SEQ ID NO: 1467370
aaagauacagugauauagc

SEQ ID NO: 1467372 - RNA, 19 nt, Artificial Sequence
  Description of Artificial Sequence: Synthetic oligonucleotide
  Sense strand starting at position 3978 of SEQ ID NO: 1244133
gugccacugguacauauua

SEQ ID NO: 1467373 - RNA, 19 nt, Artificial Sequence
  Description of Artificial Sequence: Synthetic oligonucleotide
  Antisense strand to SEQ ID NO: 1467372
uaauauguaccaguggcac

SEQ ID NO: 1467374 - RNA, 19 nt, Artificial Sequence
  Description of Artificial Sequence: Synthetic oligonucleotide
  Sense strand starting at position 32 of SEQ ID NO: 1244134
ggugacaugcaguguguau

SEQ ID NO: 1467375 - RNA, 19 nt, Artificial Sequence
  Description of Artificial Sequence: Synthetic oligonucleotide
  Antisense strand to SEQ ID NO: 1467374
auacacacugcaugucacc

SEQ ID NO: 1467376 - RNA, 19 nt, Artificial Sequence
  Description of Artificial Sequence: Synthetic oligonucleotide
  Sense strand starting at position 34 of SEQ ID NO: 1244134
ugacaugcaguguguauuu

SEQ ID NO: 1467377 - RNA, 19 nt, Artificial Sequence
  Description of Artificial Sequence: Synthetic oligonucleotide
  Antisense strand to SEQ ID NO: 1467376
aaauacacacugcauguca

SEQ ID NO: 1467378 - RNA, 19 nt, Artificial Sequence
  Description of Artificial Sequence: Synthetic oligonucleotide
  Sense strand starting at position 39 of SEQ ID NO: 1244134
ugcaguguguauuugauga

SEQ ID NO: 1467379 - RNA, 19 nt, Artificial Sequence
  Description of Artificial Sequence: Synthetic oligonucleotide
  Antisense strand to SEQ ID NO: 1467378
ucaucaaauacacacugca

SEQ ID NO: 1467380 - RNA, 19 nt, Artificial Sequence
  Description of Artificial Sequence: Synthetic oligonucleotide
  Sense strand starting at position 41 of SEQ ID NO: 1244134
caguguguauuugaugauc

SEQ ID NO: 1467381 - RNA, 19 nt, Artificial Sequence
  Description of Artificial Sequence: Synthetic oligonucleotide
  Antisense strand to SEQ ID NO: 1467380
gaucaucaaauacacacug

SEQ ID NO: 1467382 - RNA, 19 nt, Artificial Sequence
  Description of Artificial Sequence: Synthetic oligonucleotide
  Sense strand starting at position 43 of SEQ ID NO: 1244134
guguguauuugaugaucau

SEQ ID NO: 1467383 - RNA, 19 nt, Artificial Sequence
  Description of Artificial Sequence: Synthetic oligonucleotide
  Antisense strand to SEQ ID NO: 1467382
augaucaucaaauacacac

SEQ ID NO: 1467384 - RNA, 19 nt, Artificial Sequence
  Description of Artificial Sequence: Synthetic oligonucleotide
  Sense strand starting at position 53 of SEQ ID NO: 1244134
gaugaucauuagucucuga

SEQ ID NO: 1467385 - RNA, 19 nt, Artificial Sequence
  Description of Artificial Sequence: Synthetic oligonucleotide
  Antisense strand to SEQ ID NO: 1467384
ucagagacuaaugaucauc

SEQ ID NO: 1467386 - RNA, 19 nt, Artificial Sequence
  Description of Artificial Sequence: Synthetic oligonucleotide
  Sense strand starting at position 79 of SEQ ID NO: 1244134
gaaacaaccucuuuggguu

SEQ ID NO: 1467387 - RNA, 19 nt, Artificial Sequence
  Description of Artificial Sequence: Synthetic oligonucleotide
  Antisense strand to SEQ ID NO: 1467386
aacccaaagagguuguuuc

SEQ ID NO: 1467388 - RNA, 19 nt, Artificial Sequence
  Description of Artificial Sequence: Synthetic oligonucleotide
  Sense strand starting at position 108 of SEQ ID NO: 1244134
ggucuuuaccagugagagg

SEQ ID NO: 1467389 - RNA, 19 nt, Artificial Sequence
  Description of Artificial Sequence: Synthetic oligonucleotide
  Antisense strand to SEQ ID NO: 1467388
ccucucacugguaaagacc

SEQ ID NO: 1467390 - RNA, 19 nt, Artificial Sequence
  Description of Artificial Sequence: Synthetic oligonucleotide
  Sense strand starting at position 187 of SEQ ID NO: 1244134
uggucuuaaggccaagacu

SEQ ID NO: 1467391 - RNA, 19 nt, Artificial Sequence
  Description of Artificial Sequence: Synthetic oligonucleotide
  Antisense strand to SEQ ID NO: 1467390
agucuuggccuuaagacca

SEQ ID NO: 1467392 - RNA, 19 nt, Artificial Sequence
  Description of Artificial Sequence: Synthetic oligonucleotide
  Sense strand starting at position 282 of SEQ ID NO: 1244134
ucuacugguucuggaauca

SEQ ID NO: 1467393 - RNA, 19 nt, Artificial Sequence
  Description of Artificial Sequence: Synthetic oligonucleotide
  Antisense strand to SEQ ID NO: 1467392
ugauuccagaaccaguaga

SEQ ID NO: 1467394 - RNA, 19 nt, Artificial Sequence
  Description of Artificial Sequence: Synthetic oligonucleotide
  Sense strand starting at position 1259 of SEQ ID NO: 1244134
aagugaucugcccgcagag

SEQ ID NO: 1467395 - RNA, 19 nt, Artificial Sequence
  Description of Artificial Sequence: Synthetic oligonucleotide
  Antisense strand to SEQ ID NO: 1467394
cucugcgggcagaucacuu

SEQ ID NO: 1467396 - RNA, 19 nt, Artificial Sequence
  Description of Artificial Sequence: Synthetic oligonucleotide
  Sense strand starting at position 1276 of SEQ ID NO: 1244134
aggccugauucuuggugga

SEQ ID NO: 1467397 - RNA, 19 nt, Artificial Sequence
  Description of Artificial Sequence: Synthetic oligonucleotide
  Antisense strand to SEQ ID NO: 1467396
uccaccaagaaucaggccu

SEQ ID NO: 1467398 - RNA, 19 nt, Artificial Sequence
  Description of Artificial Sequence: Synthetic oligonucleotide
  Sense strand starting at position 1279 of SEQ ID NO: 1244134
ccugauucuugguggacca

SEQ ID NO: 1467399 - RNA, 19 nt, Artificial Sequence
  Description of Artificial Sequence: Synthetic oligonucleotide
  Antisense strand to SEQ ID NO: 1467398
ugguccaccaagaaucagg

SEQ ID NO: 1467400 - RNA, 19 nt, Artificial Sequence
  Description of Artificial Sequence: Synthetic oligonucleotide
  Sense strand starting at position 2302 of SEQ ID NO: 1244134
caaggauuguuccuagaca

SEQ ID NO: 1467401 - RNA, 19 nt, Artificial Sequence
  Description of Artificial Sequence: Synthetic oligonucleotide
  Antisense strand to SEQ ID NO: 1467400
ugucuaggaacaauccuug

SEQ ID NO: 1467402 - RNA, 19 nt, Artificial Sequence
  Description of Artificial Sequence: Synthetic oligonucleotide
  Sense strand starting at position 2303 of SEQ ID NO: 1244134
aaggauuguuccuagacag

SEQ ID NO: 1467403 - RNA, 19 nt, Artificial Sequence
  Description of Artificial Sequence: Synthetic oligonucleotide
  Antisense strand to SEQ ID NO: 1467402
cugucuaggaacaauccuu

SEQ ID NO: 1467404 - RNA, 19 nt, Artificial Sequence
  Description of Artificial Sequence: Synthetic oligonucleotide
  Sense strand starting at position 2415 of SEQ ID NO: 1244134
ggucucuccggcugcauua

SEQ ID NO: 1467405 - RNA, 19 nt, Artificial Sequence
  Description of Artificial Sequence: Synthetic oligonucleotide
  Antisense strand to SEQ ID NO: 1467404
uaaugcagccggagagacc

SEQ ID NO: 1467406 - RNA, 19 nt, Artificial Sequence
  Description of Artificial Sequence: Synthetic oligonucleotide
  Sense strand starting at position 2573 of SEQ ID NO: 1244134
ucaguagccuucuugguga

SEQ ID NO: 1467407 - RNA, 19 nt, Artificial Sequence
  Description of Artificial Sequence: Synthetic oligonucleotide
  Antisense strand to SEQ ID NO: 1467406
ucaccaagaaggcuacuga

SEQ ID NO: 1467408 - RNA, 19 nt, Artificial Sequence
  Description of Artificial Sequence: Synthetic oligonucleotide
  Sense strand starting at position 2577 of SEQ ID NO: 1244134
uagccuucuuggugaccau

SEQ ID NO: 1467409 - RNA, 19 nt, Artificial Sequence
  Description of Artificial Sequence: Synthetic oligonucleotide
  Antisense strand to SEQ ID NO: 1467408
auggucaccaagaaggcua

SEQ ID NO: 1467410 - RNA, 19 nt, Artificial Sequence
  Description of Artificial Sequence: Synthetic oligonucleotide
  Sense strand starting at position 2581 of SEQ ID NO: 1244134
cuucuuggugaccaucaua

SEQ ID NO: 1467411 - RNA, 19 nt, Artificial Sequence
  Description of Artificial Sequence: Synthetic oligonucleotide
  Antisense strand to SEQ ID NO: 1467410
uaugauggucaccaagaag

SEQ ID NO: 1467412 - RNA, 19 nt, Artificial Sequence
  Description of Artificial Sequence: Synthetic oligonucleotide
  Sense strand starting at position 2616 of SEQ ID NO: 1244134
uggugcuguuauuugauaa

SEQ ID NO: 1467413 - RNA, 19 nt, Artificial Sequence
  Description of Artificial Sequence: Synthetic oligonucleotide
  Antisense strand to SEQ ID NO: 1467412
uuaucaaauaacagcacca

SEQ ID NO: 1467414 - RNA, 19 nt, Artificial Sequence
  Description of Artificial Sequence: Synthetic oligonucleotide
  Sense strand starting at position 2617 of SEQ ID NO: 1244134
ggugcuguuauuugauaau

SEQ ID NO: 1467415 - RNA, 19 nt, Artificial Sequence
  Description of Artificial Sequence: Synthetic oligonucleotide
  Antisense strand to SEQ ID NO: 1467414
auuaucaaauaacagcacc

SEQ ID NO: 1467416 - RNA, 19 nt, Artificial Sequence
  Description of Artificial Sequence: Synthetic oligonucleotide
  Sense strand starting at position 2901 of SEQ ID NO: 1244134
uuuguugagugauacuauu

SEQ ID NO: 1467417 - RNA, 19 nt, Artificial Sequence
  Description of Artificial Sequence: Synthetic oligonucleotide
  Antisense strand to SEQ ID NO: 1467416
aauaguaucacucaacaaa

SEQ ID NO: 1467418 - RNA, 19 nt, Artificial Sequence
  Description of Artificial Sequence: Synthetic oligonucleotide
  Sense strand starting at position 3003 of SEQ ID NO: 1244134
gcagaacuguugcuacauc

SEQ ID NO: 1467419 - RNA, 19 nt, Artificial Sequence
  Description of Artificial Sequence: Synthetic oligonucleotide
  Antisense strand to SEQ ID NO: 1467418
gauguagcaacaguucugc

SEQ ID NO: 1467420 - RNA, 19 nt, Artificial Sequence
  Description of Artificial Sequence: Synthetic oligonucleotide
  Sense strand starting at position 3731 of SEQ ID NO: 1244134
cgccaagaagcuugagaag

SEQ ID NO: 1467421 - RNA, 19 nt, Artificial Sequence
  Description of Artificial Sequence: Synthetic oligonucleotide
  Antisense strand to SEQ ID NO: 1467420
cuucucaagcuucuuggcg

SEQ ID NO: 1467422 - RNA, 19 nt, Artificial Sequence
  Description of Artificial Sequence: Synthetic oligonucleotide
  Sense strand starting at position 3734 of SEQ ID NO: 1244134
caagaagcuugagaagcua

SEQ ID NO: 1467423 - RNA, 19 nt, Artificial Sequence
  Description of Artificial Sequence: Synthetic oligonucleotide
  Antisense strand to SEQ ID NO: 1467422
uagcuucucaagcuucuug

SEQ ID NO: 1467424 - RNA, 19 nt, Artificial Sequence
  Description of Artificial Sequence: Synthetic oligonucleotide
  Sense strand starting at position 3870 of SEQ ID NO: 1244134
cccagagguauaggucauu

SEQ ID NO: 1467425 - RNA, 19 nt, Artificial Sequence
  Description of Artificial Sequence: Synthetic oligonucleotide
  Antisense strand to SEQ ID NO: 1467424
aaugaccuauaccucuggg

SEQ ID NO: 1467426 - RNA, 19 nt, Artificial Sequence
  Description of Artificial Sequence: Synthetic oligonucleotide
  Sense strand starting at position 3876 of SEQ ID NO: 1244134
gguauaggucauugacuga

SEQ ID NO: 1467427 - RNA, 19 nt, Artificial Sequence
  Description of Artificial Sequence: Synthetic oligonucleotide
  Antisense strand to SEQ ID NO: 1467426
ucagucaaugaccuauacc

SEQ ID NO: 1467428 - RNA, 19 nt, Artificial Sequence
  Description of Artificial Sequence: Synthetic oligonucleotide
  Sense strand starting at position 3912 of SEQ ID NO: 1244134
caaugaaaccuguaagugu

SEQ ID NO: 1467429 - RNA, 19 nt, Artificial Sequence
  Description of Artificial Sequence: Synthetic oligonucleotide
  Antisense strand to SEQ ID NO: 1467428
acacuuacagguuucauug

SEQ ID NO: 1467430 - RNA, 19 nt, Artificial Sequence
  Description of Artificial Sequence: Synthetic oligonucleotide
  Sense strand starting at position 3915 of SEQ ID NO: 1244134
ugaaaccuguaaguguaau

SEQ ID NO: 1467431 - RNA, 19 nt, Artificial Sequence
  Description of Artificial Sequence: Synthetic oligonucleotide
  Antisense strand to SEQ ID NO: 1467430
auuacacuuacagguuuca

SEQ ID NO: 1467432 - RNA, 19 nt, Artificial Sequence
  Description of Artificial Sequence: Synthetic oligonucleotide
  Sense strand starting at position 247 of SEQ ID NO: 1244135
ggaccgugucaugggagau

SEQ ID NO: 1467433 - RNA, 19 nt, Artificial Sequence
  Description of Artificial Sequence: Synthetic oligonucleotide
  Antisense strand to SEQ ID NO: 1467432
aucucccaugacacggucc

SEQ ID NO: 1467434 - RNA, 19 nt, Artificial Sequence
  Description of Artificial Sequence: Synthetic oligonucleotide
  Sense strand starting at position 248 of SEQ ID NO: 1244135
gaccgugucaugggagaug

SEQ ID NO: 1467435 - RNA, 19 nt, Artificial Sequence
  Description of Artificial Sequence: Synthetic oligonucleotide
  Antisense strand to SEQ ID NO: 1467434
caucucccaugacacgguc

SEQ ID NO: 1467436 - RNA, 19 nt, Artificial Sequence
  Description of Artificial Sequence: Synthetic oligonucleotide
  Sense strand starting at position 250 of SEQ ID NO: 1244135
ccgugucaugggagauguu

SEQ ID NO: 1467437 - RNA, 19 nt, Artificial Sequence
  Description of Artificial Sequence: Synthetic oligonucleotide
  Antisense strand to SEQ ID NO: 1467436
aacaucucccaugacacgg

SEQ ID NO: 1467438 - RNA, 19 nt, Artificial Sequence
  Description of Artificial Sequence: Synthetic oligonucleotide
  Sense strand starting at position 251 of SEQ ID NO: 1244135
cgugucaugggagauguuu

SEQ ID NO: 1467439 - RNA, 19 nt, Artificial Sequence
  Description of Artificial Sequence: Synthetic oligonucleotide
  Antisense strand to SEQ ID NO: 1467438
aaacaucucccaugacacg

SEQ ID NO: 1467440 - RNA, 19 nt, Artificial Sequence
  Description of Artificial Sequence: Synthetic oligonucleotide
  Sense strand starting at position 260 of SEQ ID NO: 1244135
ggagauguuugagaccaag

SEQ ID NO: 1467441 - RNA, 19 nt, Artificial Sequence
  Description of Artificial Sequence: Synthetic oligonucleotide
  Antisense strand to SEQ ID NO: 1467440
cuuggucucaaacaucucc

SEQ ID NO: 1467442 - RNA, 19 nt, Artificial Sequence
  Description of Artificial Sequence: Synthetic oligonucleotide
  Sense strand starting at position 306 of SEQ ID NO: 1244135
agcagaaucuuaucuagag

SEQ ID NO: 1467443 - RNA, 19 nt, Artificial Sequence
  Description of Artificial Sequence: Synthetic oligonucleotide
  Antisense strand to SEQ ID NO: 1467442
cucuagauaagauucugcu

SEQ ID NO: 1467444 - RNA, 19 nt, Artificial Sequence
  Description of Artificial Sequence: Synthetic oligonucleotide
  Sense strand starting at position 307 of SEQ ID NO: 1244135
gcagaaucuuaucuagaga

SEQ ID NO: 1467445 - RNA, 19 nt, Artificial Sequence
  Description of Artificial Sequence: Synthetic oligonucleotide
  Antisense strand to SEQ ID NO: 1467444
ucucuagauaagauucugc

SEQ ID NO: 1467446 - RNA, 19 nt, Artificial Sequence
  Description of Artificial Sequence: Synthetic oligonucleotide
  Sense strand starting at position 367 of SEQ ID NO: 1244135
ugcaguugaccucgaggga

SEQ ID NO: 1467447 - RNA, 19 nt, Artificial Sequence
  Description of Artificial Sequence: Synthetic oligonucleotide
  Antisense strand to SEQ ID NO: 1467446
ucccucgaggucaacugca

SEQ ID NO: 1467448 - RNA, 19 nt, Artificial Sequence
  Description of Artificial Sequence: Synthetic oligonucleotide
  Sense strand starting at position 418 of SEQ ID NO: 1244135
ucacguguaccucgaauac

SEQ ID NO: 1467449 - RNA, 19 nt, Artificial Sequence
  Description of Artificial Sequence: Synthetic oligonucleotide
  Antisense strand to SEQ ID NO: 1467448
guauucgagguacacguga

SEQ ID NO: 1467450 - RNA, 19 nt, Artificial Sequence
  Description of Artificial Sequence: Synthetic oligonucleotide
  Sense strand starting at position 508 of SEQ ID NO: 1244135
ggagcuguccauugaggca

SEQ ID NO: 1467451 - RNA, 19 nt, Artificial Sequence
  Description of Artificial Sequence: Synthetic oligonucleotide
  Antisense strand to SEQ ID NO: 1467450
ugccucaauggacagcucc

SEQ ID NO: 1467452 - RNA, 19 nt, Artificial Sequence
  Description of Artificial Sequence: Synthetic oligonucleotide
  Sense strand starting at position 718 of SEQ ID NO: 1244135
gcccaucagcuccagauua

SEQ ID NO: 1467453 - RNA, 19 nt, Artificial Sequence
  Description of Artificial Sequence: Synthetic oligonucleotide
  Antisense strand to SEQ ID NO: 1467452
uaaucuggagcugaugggc

SEQ ID NO: 1467454 - RNA, 19 nt, Artificial Sequence
  Description of Artificial Sequence: Synthetic oligonucleotide
  Sense strand starting at position 720 of SEQ ID NO: 1244135
ccaucagcuccagauuagu

SEQ ID NO: 1467455 - RNA, 19 nt, Artificial Sequence
  Description of Artificial Sequence: Synthetic oligonucleotide
  Antisense strand to SEQ ID NO: 1467454
acuaaucuggagcugaugg

SEQ ID NO: 1467456 - RNA, 19 nt, Artificial Sequence
  Description of Artificial Sequence: Synthetic oligonucleotide
  Sense strand starting at position 729 of SEQ ID NO: 1244135
ccagauuagucuuccucag

SEQ ID NO: 1467457 - RNA, 19 nt, Artificial Sequence
  Description of Artificial Sequence: Synthetic oligonucleotide
  Antisense strand to SEQ ID NO: 1467456
cugaggaagacuaaucugg

SEQ ID NO: 1467458 - RNA, 19 nt, Artificial Sequence
  Description of Artificial Sequence: Synthetic oligonucleotide
  Sense strand starting at position 772 of SEQ ID NO: 1244135
ggauccgacucagucuuua

SEQ ID NO: 1467459 - RNA, 19 nt, Artificial Sequence
  Description of Artificial Sequence: Synthetic oligonucleotide
  Antisense strand to SEQ ID NO: 1467458
uaaagacugagucggaucc

SEQ ID NO: 1467460 - RNA, 19 nt, Artificial Sequence
  Description of Artificial Sequence: Synthetic oligonucleotide
  Sense strand starting at position 776 of SEQ ID NO: 1244135
ccgacucagucuuuaaggu

SEQ ID NO: 1467461 - RNA, 19 nt, Artificial Sequence
  Description of Artificial Sequence: Synthetic oligonucleotide
  Antisense strand to SEQ ID NO: 1467460
accuuaaagacugagucgg

SEQ ID NO: 1467462 - RNA, 19 nt, Artificial Sequence
  Description of Artificial Sequence: Synthetic oligonucleotide
  Sense strand starting at position 785 of SEQ ID NO: 1244135
ucuuuaaggucagcccaaa

SEQ ID NO: 1467463 - RNA, 19 nt, Artificial Sequence
  Description of Artificial Sequence: Synthetic oligonucleotide
  Antisense strand to SEQ ID NO: 1467462
uuugggcugaccuuaaaga

SEQ ID NO: 1467464 - RNA, 19 nt, Artificial Sequence
  Description of Artificial Sequence: Synthetic oligonucleotide
  Sense strand starting at position 1265 of SEQ ID NO: 1244135
acaggaaccugccuauaau

SEQ ID NO: 1467465 - RNA, 19 nt, Artificial Sequence
  Description of Artificial Sequence: Synthetic oligonucleotide
  Antisense strand to SEQ ID NO: 1467464
auuauaggcagguuccugu

SEQ ID NO: 1467466 - RNA, 19 nt, Artificial Sequence
  Description of Artificial Sequence: Synthetic oligonucleotide
  Sense strand starting at position 1744 of SEQ ID NO: 1244135
ggguccuguaaccgaaaga

SEQ ID NO: 1467467 - RNA, 19 nt, Artificial Sequence
  Description of Artificial Sequence: Synthetic oligonucleotide
  Antisense strand to SEQ ID NO: 1467466
ucuuucgguuacaggaccc

SEQ ID NO: 1467468 - RNA, 19 nt, Artificial Sequence
  Description of Artificial Sequence: Synthetic oligonucleotide
  Sense strand starting at position 1760 of SEQ ID NO: 1244135
agaggacaucucuggcagu

SEQ ID NO: 1467469 - RNA, 19 nt, Artificial Sequence
  Description of Artificial Sequence: Synthetic oligonucleotide
  Antisense strand to SEQ ID NO: 1467468
acugccagagauguccucu

SEQ ID NO: 1467470 - RNA, 19 nt, Artificial Sequence
  Description of Artificial Sequence: Synthetic oligonucleotide
  Sense strand starting at position 1839 of SEQ ID NO: 1244135
ugagcuauggcccagaauc

SEQ ID NO: 1467471 - RNA, 19 nt, Artificial Sequence
  Description of Artificial Sequence: Synthetic oligonucleotide
  Antisense strand to SEQ ID NO: 1467470
gauucugggccauagcuca

SEQ ID NO: 1467472 - RNA, 19 nt, Artificial Sequence
  Description of Artificial Sequence: Synthetic oligonucleotide
  Sense strand starting at position 1903 of SEQ ID NO: 1244135
agagaucuuugggaagcca

SEQ ID NO: 1467473 - RNA, 19 nt, Artificial Sequence
  Description of Artificial Sequence: Synthetic oligonucleotide
  Antisense strand to SEQ ID NO: 1467472
uggcuucccaaagaucucu

SEQ ID NO: 1467474 - RNA, 19 nt, Artificial Sequence
  Description of Artificial Sequence: Synthetic oligonucleotide
  Sense strand starting at position 2137 of SEQ ID NO: 1244135
ggaugcauuguuggaguca

SEQ ID NO: 1467475 - RNA, 19 nt, Artificial Sequence
  Description of Artificial Sequence: Synthetic oligonucleotide
  Antisense strand to SEQ ID NO: 1467474
ugacuccaacaaugcaucc

SEQ ID NO: 1467476 - RNA, 19 nt, Artificial Sequence
  Description of Artificial Sequence: Synthetic oligonucleotide
  Sense strand starting at position 2148 of SEQ ID NO: 1244135
uggagucaugccugggaga

SEQ ID NO: 1467477 - RNA, 19 nt, Artificial Sequence
  Description of Artificial Sequence: Synthetic oligonucleotide
  Antisense strand to SEQ ID NO: 1467476
ucucccaggcaugacucca

SEQ ID NO: 1467478 - RNA, 19 nt, Artificial Sequence
  Description of Artificial Sequence: Synthetic oligonucleotide
  Sense strand starting at position 2149 of SEQ ID NO: 1244135
ggagucaugccugggagac

SEQ ID NO: 1467479 - RNA, 19 nt, Artificial Sequence
  Description of Artificial Sequence: Synthetic oligonucleotide
  Antisense strand to SEQ ID NO: 1467478
gucucccaggcaugacucc

SEQ ID NO: 1467480 - RNA, 19 nt, Artificial Sequence
  Description of Artificial Sequence: Synthetic oligonucleotide
  Sense strand starting at position 2150 of SEQ ID NO: 1244135
gagucaugccugggagaca

SEQ ID NO: 1467481 - RNA, 19 nt, Artificial Sequence
  Description of Artificial Sequence: Synthetic oligonucleotide
  Antisense strand to SEQ ID NO: 1467480
ugucucccaggcaugacuc

SEQ ID NO: 1467482 - RNA, 19 nt, Artificial Sequence
  Description of Artificial Sequence: Synthetic oligonucleotide
  Sense strand starting at position 2261 of SEQ ID NO: 1244135
auuugagcuucuccugcua

SEQ ID NO: 1467483 - RNA, 19 nt, Artificial Sequence
  Description of Artificial Sequence: Synthetic oligonucleotide
  Antisense strand to SEQ ID NO: 1467482
uagcaggagaagcucaaau

SEQ ID NO: 1467484 - RNA, 19 nt, Artificial Sequence
  Description of Artificial Sequence: Synthetic oligonucleotide
  Sense strand starting at position 2286 of SEQ ID NO: 1244135
uggugcaauucugcauaaa

SEQ ID NO: 1467485 - RNA, 19 nt, Artificial Sequence
  Description of Artificial Sequence: Synthetic oligonucleotide
  Antisense strand to SEQ ID NO: 1467484
uuuaugcagaauugcacca

SEQ ID NO: 1467486 - RNA, 19 nt, Artificial Sequence
  Description of Artificial Sequence: Synthetic oligonucleotide
  Sense strand starting at position 2287 of SEQ ID NO: 1244135
ggugcaauucugcauaaac

SEQ ID NO: 1467487 - RNA, 19 nt, Artificial Sequence
  Description of Artificial Sequence: Synthetic oligonucleotide
  Antisense strand to SEQ ID NO: 1467486
guuuaugcagaauugcacc

SEQ ID NO: 1467488 - RNA, 19 nt, Artificial Sequence
  Description of Artificial Sequence: Synthetic oligonucleotide
  Sense strand starting at position 2664 of SEQ ID NO: 1244135
gaucuugacucagcugauu

SEQ ID NO: 1467489 - RNA, 19 nt, Artificial Sequence
  Description of Artificial Sequence: Synthetic oligonucleotide
  Antisense strand to SEQ ID NO: 1467488
aaucagcugagucaagauc

SEQ ID NO: 1467490 - RNA, 19 nt, Artificial Sequence
  Description of Artificial Sequence: Synthetic oligonucleotide
  Sense strand starting at position 2711 of SEQ ID NO: 1244135
ggaaaugcaucccauaaua

SEQ ID NO: 1467491 - RNA, 19 nt, Artificial Sequence
  Description of Artificial Sequence: Synthetic oligonucleotide
  Antisense strand to SEQ ID NO: 1467490
uauuaugggaugcauuucc

SEQ ID NO: 1467492 - RNA, 19 nt, Artificial Sequence
  Description of Artificial Sequence: Synthetic oligonucleotide
  Sense strand starting at position 2993 of SEQ ID NO: 1244135
cucaguucugccuaagauc

SEQ ID NO: 1467493 - RNA, 19 nt, Artificial Sequence
  Description of Artificial Sequence: Synthetic oligonucleotide
  Antisense strand to SEQ ID NO: 1467492
gaucuuaggcagaacugag

SEQ ID NO: 1467494 - RNA, 19 nt, Artificial Sequence
  Description of Artificial Sequence: Synthetic oligonucleotide
  Sense strand starting at position 3183 of SEQ ID NO: 1244135
cgguuacuacuguacacaa

SEQ ID NO: 1467495 - RNA, 19 nt, Artificial Sequence
  Description of Artificial Sequence: Synthetic oligonucleotide
  Antisense strand to SEQ ID NO: 1467494
uuguguacaguaguaaccg

SEQ ID NO: 1467496 - RNA, 19 nt, Artificial Sequence
  Description of Artificial Sequence: Synthetic oligonucleotide
  Sense strand starting at position 3252 of SEQ ID NO: 1244135
gguugcuggacuugggaau

SEQ ID NO: 1467497 - RNA, 19 nt, Artificial Sequence
  Description of Artificial Sequence: Synthetic oligonucleotide
  Antisense strand to SEQ ID NO: 1467496
auucccaaguccagcaacc

SEQ ID NO: 1467498 - RNA, 19 nt, Artificial Sequence
  Description of Artificial Sequence: Synthetic oligonucleotide
  Sense strand starting at position 3370 of SEQ ID NO: 1244135
cagcaaaguccugagagca

SEQ ID NO: 1467499 - RNA, 19 nt, Artificial Sequence
  Description of Artificial Sequence: Synthetic oligonucleotide
  Antisense strand to SEQ ID NO: 1467498
ugcucucaggacuuugcug

SEQ ID NO: 1467500 - RNA, 19 nt, Artificial Sequence
  Description of Artificial Sequence: Synthetic oligonucleotide
  Sense strand starting at position 3440 of SEQ ID NO: 1244135
gggacauugcuguagugga

SEQ ID NO: 1467501 - RNA, 19 nt, Artificial Sequence
  Description of Artificial Sequence: Synthetic oligonucleotide
  Antisense strand to SEQ ID NO: 1467500
uccacuacagcaauguccc

SEQ ID NO: 1467502 - RNA, 19 nt, Artificial Sequence
  Description of Artificial Sequence: Synthetic oligonucleotide
  Sense strand starting at position 3643 of SEQ ID NO: 1244135
gaggcacgucaagguuaaa

SEQ ID NO: 1467503 - RNA, 19 nt, Artificial Sequence
  Description of Artificial Sequence: Synthetic oligonucleotide
  Antisense strand to SEQ ID NO: 1467502
uuuaaccuugacgugccuc

SEQ ID NO: 1467504 - RNA, 19 nt, Artificial Sequence
  Description of Artificial Sequence: Synthetic oligonucleotide
  Sense strand starting at position 3646 of SEQ ID NO: 1244135
gcacgucaagguuaaauga

SEQ ID NO: 1467505 - RNA, 19 nt, Artificial Sequence
  Description of Artificial Sequence: Synthetic oligonucleotide
  Antisense strand to SEQ ID NO: 1467504
ucauuuaaccuugacgugc

SEQ ID NO: 1467506 - RNA, 19 nt, Artificial Sequence
  Description of Artificial Sequence: Synthetic oligonucleotide
  Sense strand starting at position 3717 of SEQ ID NO: 1244135
ugccauggugacuguugaa

SEQ ID NO: 1467507 - RNA, 19 nt, Artificial Sequence
  Description of Artificial Sequence: Synthetic oligonucleotide
  Antisense strand to SEQ ID NO: 1467506
uucaacagucaccauggca

SEQ ID NO: 1467508 - RNA, 19 nt, Artificial Sequence
  Description of Artificial Sequence: Synthetic oligonucleotide
  Sense strand starting at position 3885 of SEQ ID NO: 1244135
ccuggagugcuccaaacag

SEQ ID NO: 1467509 - RNA, 19 nt, Artificial Sequence
  Description of Artificial Sequence: Synthetic oligonucleotide
  Antisense strand to SEQ ID NO: 1467508
cuguuuggagcacuccagg

SEQ ID NO: 1467510 - RNA, 19 nt, Artificial Sequence
  Description of Artificial Sequence: Synthetic oligonucleotide
  Sense strand starting at position 3912 of SEQ ID NO: 1244135
agggacagugcuugggaau

SEQ ID NO: 1467511 - RNA, 19 nt, Artificial Sequence
  Description of Artificial Sequence: Synthetic oligonucleotide
  Antisense strand to SEQ ID NO: 1467510
auucccaagcacugucccu

SEQ ID NO: 1467512 - RNA, 19 nt, Artificial Sequence
  Description of Artificial Sequence: Synthetic oligonucleotide
  Sense strand starting at position 4 of SEQ ID NO: 1244136
acaguuccauucuuagaug

SEQ ID NO: 1467513 - RNA, 19 nt, Artificial Sequence
  Description of Artificial Sequence: Synthetic oligonucleotide
  Antisense strand to SEQ ID NO: 1467512
caucuaagaauggaacugu

SEQ ID NO: 1467514 - RNA, 19 nt, Artificial Sequence
  Description of Artificial Sequence: Synthetic oligonucleotide
  Sense strand starting at position 7 of SEQ ID NO: 1244136
guuccauucuuagauguau

SEQ ID NO: 1467515 - RNA, 19 nt, Artificial Sequence
  Description of Artificial Sequence: Synthetic oligonucleotide
  Antisense strand to SEQ ID NO: 1467514
auacaucuaagaauggaac

SEQ ID NO: 1467516 - RNA, 19 nt, Artificial Sequence
  Description of Artificial Sequence: Synthetic oligonucleotide
  Sense strand starting at position 13 of SEQ ID NO: 1244136
uucuuagauguaugcccua

SEQ ID NO: 1467517 - RNA, 19 nt, Artificial Sequence
  Description of Artificial Sequence: Synthetic oligonucleotide
  Antisense strand to SEQ ID NO: 1467516
uagggcauacaucuaagaa

SEQ ID NO: 1467518 - RNA, 19 nt, Artificial Sequence
  Description of Artificial Sequence: Synthetic oligonucleotide
  Sense strand starting at position 16 of SEQ ID NO: 1244136
uuagauguaugcccuagaa

SEQ ID NO: 1467519 - RNA, 19 nt, Artificial Sequence
  Description of Artificial Sequence: Synthetic oligonucleotide
  Antisense strand to SEQ ID NO: 1467518
uucuagggcauacaucuaa

SEQ ID NO: 1467520 - RNA, 19 nt, Artificial Sequence
  Description of Artificial Sequence: Synthetic oligonucleotide
  Sense strand starting at position 18 of SEQ ID NO: 1244136
agauguaugcccuagaaac

SEQ ID NO: 1467521 - RNA, 19 nt, Artificial Sequence
  Description of Artificial Sequence: Synthetic oligonucleotide
  Antisense strand to SEQ ID NO: 1467520
guuucuagggcauacaucu

SEQ ID NO: 1467522 - RNA, 19 nt, Artificial Sequence
  Description of Artificial Sequence: Synthetic oligonucleotide
  Sense strand starting at position 53 of SEQ ID NO: 1244136
ccagacaugucuuuguguu

SEQ ID NO: 1467523 - RNA, 19 nt, Artificial Sequence
  Description of Artificial Sequence: Synthetic oligonucleotide
  Antisense strand to SEQ ID NO: 1467522
aacacaaagacaugucugg

SEQ ID NO: 1467524 - RNA, 19 nt, Artificial Sequence
  Description of Artificial Sequence: Synthetic oligonucleotide
  Sense strand starting at position 54 of SEQ ID NO: 1244136
cagacaugucuuuguguuu

SEQ ID NO: 1467525 - RNA, 19 nt, Artificial Sequence
  Description of Artificial Sequence: Synthetic oligonucleotide
  Antisense strand to SEQ ID NO: 1467524
aaacacaaagacaugucug

SEQ ID NO: 1467526 - RNA, 19 nt, Artificial Sequence
  Description of Artificial Sequence: Synthetic oligonucleotide
  Sense strand starting at position 55 of SEQ ID NO: 1244136
agacaugucuuuguguuua

SEQ ID NO: 1467527 - RNA, 19 nt, Artificial Sequence
  Description of Artificial Sequence: Synthetic oligonucleotide
  Antisense strand to SEQ ID NO: 1467526
uaaacacaaagacaugucu

SEQ ID NO: 1467528 - RNA, 19 nt, Artificial Sequence
  Description of Artificial Sequence: Synthetic oligonucleotide
  Sense strand starting at position 57 of SEQ ID NO: 1244136
acaugucuuuguguuuacu

SEQ ID NO: 1467529 - RNA, 19 nt, Artificial Sequence
  Description of Artificial Sequence: Synthetic oligonucleotide
  Antisense strand to SEQ ID NO: 1467528
aguaaacacaaagacaugu

SEQ ID NO: 1467530 - RNA, 19 nt, Artificial Sequence
  Description of Artificial Sequence: Synthetic oligonucleotide
  Sense strand starting at position 557 of SEQ ID NO: 1244136
acaguaacgcuauauaacu

SEQ ID NO: 1467531 - RNA, 19 nt, Artificial Sequence
  Description of Artificial Sequence: Synthetic oligonucleotide
  Antisense strand to SEQ ID NO: 1467530
aguuauauagcguuacugu

SEQ ID NO: 1467532 - RNA, 19 nt, Artificial Sequence
  Description of Artificial Sequence: Synthetic oligonucleotide
  Sense strand starting at position 683 of SEQ ID NO: 1244136
cgagguuguagugugcuau

SEQ ID NO: 1467533 - RNA, 19 nt, Artificial Sequence
  Description of Artificial Sequence: Synthetic oligonucleotide
  Antisense strand to SEQ ID NO: 1467532
auagcacacuacaaccucg

SEQ ID NO: 1467534 - RNA, 19 nt, Artificial Sequence
  Description of Artificial Sequence: Synthetic oligonucleotide
  Sense strand starting at position 789 of SEQ ID NO: 1244136
agagaugcauauguaauaa

SEQ ID NO: 1467535 - RNA, 19 nt, Artificial Sequence
  Description of Artificial Sequence: Synthetic oligonucleotide
  Antisense strand to SEQ ID NO: 1467534
uuauuacauaugcaucucu

SEQ ID NO: 1467536 - RNA, 19 nt, Artificial Sequence
  Description of Artificial Sequence: Synthetic oligonucleotide
  Sense strand starting at position 1211 of SEQ ID NO: 1244136
auaagugguguuugcaguu

SEQ ID NO: 1467537 - RNA, 19 nt, Artificial Sequence
  Description of Artificial Sequence: Synthetic oligonucleotide
  Antisense strand to SEQ ID NO: 1467536
aacugcaaacaccacuuau

SEQ ID NO: 1467538 - RNA, 19 nt, Artificial Sequence
  Description of Artificial Sequence: Synthetic oligonucleotide
  Sense strand starting at position 1224 of SEQ ID NO: 1244136
gcaguuuggugauacucca

SEQ ID NO: 1467539 - RNA, 19 nt, Artificial Sequence
  Description of Artificial Sequence: Synthetic oligonucleotide
  Antisense strand to SEQ ID NO: 1467538
uggaguaucaccaaacugc

SEQ ID NO: 1467540 - RNA, 19 nt, Artificial Sequence
  Description of Artificial Sequence: Synthetic oligonucleotide
  Sense strand starting at position 1261 of SEQ ID NO: 1244136
gcuucagguguguuuggua

SEQ ID NO: 1467541 - RNA, 19 nt, Artificial Sequence
  Description of Artificial Sequence: Synthetic oligonucleotide
  Antisense strand to SEQ ID NO: 1467540
uaccaaacacaccugaagc

SEQ ID NO: 1467542 - RNA, 19 nt, Artificial Sequence
  Description of Artificial Sequence: Synthetic oligonucleotide
  Sense strand starting at position 1266 of SEQ ID NO: 1244136
agguguguuugguauauua

SEQ ID NO: 1467543 - RNA, 19 nt, Artificial Sequence
  Description of Artificial Sequence: Synthetic oligonucleotide
  Antisense strand to SEQ ID NO: 1467542
uaauauaccaaacacaccu

SEQ ID NO: 1467544 - RNA, 19 nt, Artificial Sequence
  Description of Artificial Sequence: Synthetic oligonucleotide
  Sense strand starting at position 1268 of SEQ ID NO: 1244136
guguguuugguauauuacu

SEQ ID NO: 1467545 - RNA, 19 nt, Artificial Sequence
  Description of Artificial Sequence: Synthetic oligonucleotide
  Antisense strand to SEQ ID NO: 1467544
aguaauauaccaaacacac

SEQ ID NO: 1467546 - RNA, 19 nt, Artificial Sequence
  Description of Artificial Sequence: Synthetic oligonucleotide
  Sense strand starting at position 1276 of SEQ ID NO: 1244136
gguauauuacugugcagua

SEQ ID NO: 1467547 - RNA, 19 nt, Artificial Sequence
  Description of Artificial Sequence: Synthetic oligonucleotide
  Antisense strand to SEQ ID NO: 1467546
uacugcacaguaauauacc

SEQ ID NO: 1467548 - RNA, 19 nt, Artificial Sequence
  Description of Artificial Sequence: Synthetic oligonucleotide
  Sense strand starting at position 1277 of SEQ ID NO: 1244136
guauauuacugugcaguau

SEQ ID NO: 1467549 - RNA, 19 nt, Artificial Sequence
  Description of Artificial Sequence: Synthetic oligonucleotide
  Antisense strand to SEQ ID NO: 1467548
auacugcacaguaauauac

SEQ ID NO: 1467550 - RNA, 19 nt, Artificial Sequence
  Description of Artificial Sequence: Synthetic oligonucleotide
  Sense strand starting at position 1288 of SEQ ID NO: 1244136
ugcaguaugauguauaugu

SEQ ID NO: 1467551 - RNA, 19 nt, Artificial Sequence
  Description of Artificial Sequence: Synthetic oligonucleotide
  Antisense strand to SEQ ID NO: 1467550
acauauacaucauacugca

SEQ ID NO: 1467552 - RNA, 19 nt, Artificial Sequence
  Description of Artificial Sequence: Synthetic oligonucleotide
  Sense strand starting at position 1290 of SEQ ID NO: 1244136
caguaugauguauauguau

SEQ ID NO: 1467553 - RNA, 19 nt, Artificial Sequence
  Description of Artificial Sequence: Synthetic oligonucleotide
  Antisense strand to SEQ ID NO: 1467552
auacauauacaucauacug

SEQ ID NO: 1467554 - RNA, 19 nt, Artificial Sequence
  Description of Artificial Sequence: Synthetic oligonucleotide
  Sense strand starting at position 1296 of SEQ ID NO: 1244136
gauguauauguauguuaca

SEQ ID NO: 1467555 - RNA, 19 nt, Artificial Sequence
  Description of Artificial Sequence: Synthetic oligonucleotide
  Antisense strand to SEQ ID NO: 1467554
uguaacauacauauacauc

SEQ ID NO: 1467556 - RNA, 19 nt, Artificial Sequence
  Description of Artificial Sequence: Synthetic oligonucleotide
  Sense strand starting at position 1326 of SEQ ID NO: 1244136
ugcguuaccuaguaaauuu

SEQ ID NO: 1467557 - RNA, 19 nt, Artificial Sequence
  Description of Artificial Sequence: Synthetic oligonucleotide
  Antisense strand to SEQ ID NO: 1467556
aaauuuacuagguaacgca

SEQ ID NO: 1467558 - RNA, 19 nt, Artificial Sequence
  Description of Artificial Sequence: Synthetic oligonucleotide
  Sense strand starting at position 1373 of SEQ ID NO: 1244136
cuuucuacgugccuagaaa

SEQ ID NO: 1467559 - RNA, 19 nt, Artificial Sequence
  Description of Artificial Sequence: Synthetic oligonucleotide
  Antisense strand to SEQ ID NO: 1467558
uuucuaggcacguagaaag

SEQ ID NO: 1467560 - RNA, 19 nt, Artificial Sequence
  Description of Artificial Sequence: Synthetic oligonucleotide
  Sense strand starting at position 1374 of SEQ ID NO: 1244136
uuucuacgugccuagaaag

SEQ ID NO: 1467561 - RNA, 19 nt, Artificial Sequence
  Description of Artificial Sequence: Synthetic oligonucleotide
  Antisense strand to SEQ ID NO: 1467560
cuuucuaggcacguagaaa

SEQ ID NO: 1467562 - RNA, 19 nt, Artificial Sequence
  Description of Artificial Sequence: Synthetic oligonucleotide
  Sense strand starting at position 1407 of SEQ ID NO: 1244136
gaaugugagccauggguua

SEQ ID NO: 1467563 - RNA, 19 nt, Artificial Sequence
  Description of Artificial Sequence: Synthetic oligonucleotide
  Antisense strand to SEQ ID NO: 1467562
uaacccauggcucacauuc

SEQ ID NO: 1467564 - RNA, 19 nt, Artificial Sequence
  Description of Artificial Sequence: Synthetic oligonucleotide
  Sense strand starting at position 1455 of SEQ ID NO: 1244136
ggaagugagugacugagau

SEQ ID NO: 1467565 - RNA, 19 nt, Artificial Sequence
  Description of Artificial Sequence: Synthetic oligonucleotide
  Antisense strand to SEQ ID NO: 1467564
aucucagucacucacuucc

SEQ ID NO: 1467566 - RNA, 19 nt, Artificial Sequence
  Description of Artificial Sequence: Synthetic oligonucleotide
  Sense strand starting at position 1459 of SEQ ID NO: 1244136
gugagugacugagauucau

SEQ ID NO: 1467567 - RNA, 19 nt, Artificial Sequence
  Description of Artificial Sequence: Synthetic oligonucleotide
  Antisense strand to SEQ ID NO: 1467566
augaaucucagucacucac

SEQ ID NO: 1467568 - RNA, 19 nt, Artificial Sequence
  Description of Artificial Sequence: Synthetic oligonucleotide
  Sense strand starting at position 1763 of SEQ ID NO: 1244136
ugcacuuaccagcgagaaa

SEQ ID NO: 1467569 - RNA, 19 nt, Artificial Sequence
  Description of Artificial Sequence: Synthetic oligonucleotide
  Antisense strand to SEQ ID NO: 1467568
uuucucgcugguaagugca

SEQ ID NO: 1467570 - RNA, 19 nt, Artificial Sequence
  Description of Artificial Sequence: Synthetic oligonucleotide
  Sense strand starting at position 1764 of SEQ ID NO: 1244136
gcacuuaccagcgagaaac

SEQ ID NO: 1467571 - RNA, 19 nt, Artificial Sequence
  Description of Artificial Sequence: Synthetic oligonucleotide
  Antisense strand to SEQ ID NO: 1467570
guuucucgcugguaagugc

SEQ ID NO: 1467572 - RNA, 19 nt, Artificial Sequence
  Description of Artificial Sequence: Synthetic oligonucleotide
  Sense strand starting at position 1853 of SEQ ID NO: 1244136
gcuucauuggagggaaagu

SEQ ID NO: 1467573 - RNA, 19 nt, Artificial Sequence
  Description of Artificial Sequence: Synthetic oligonucleotide
  Antisense strand to SEQ ID NO: 1467572
acuuucccuccaaugaagc

SEQ ID NO: 1467574 - RNA, 19 nt, Artificial Sequence
  Description of Artificial Sequence: Synthetic oligonucleotide
  Sense strand starting at position 1927 of SEQ ID NO: 1244136
gcaggaaauuggugacaag

SEQ ID NO: 1467575 - RNA, 19 nt, Artificial Sequence
  Description of Artificial Sequence: Synthetic oligonucleotide
  Antisense strand to SEQ ID NO: 1467574
cuugucaccaauuuccugc

SEQ ID NO: 1467576 - RNA, 19 nt, Artificial Sequence
  Description of Artificial Sequence: Synthetic oligonucleotide
  Sense strand starting at position 2626 of SEQ ID NO: 1244136
gagacagaguguugcuuau

SEQ ID NO: 1467577 - RNA, 19 nt, Artificial Sequence
  Description of Artificial Sequence: Synthetic oligonucleotide
  Antisense strand to SEQ ID NO: 1467576
auaagcaacacucugucuc

SEQ ID NO: 1467578 - RNA, 19 nt, Artificial Sequence
  Description of Artificial Sequence: Synthetic oligonucleotide
  Sense strand starting at position 2628 of SEQ ID NO: 1244136
gacagaguguugcuuaugu

SEQ ID NO: 1467579 - RNA, 19 nt, Artificial Sequence
  Description of Artificial Sequence: Synthetic oligonucleotide
  Antisense strand to SEQ ID NO: 1467578
acauaagcaacacucuguc

SEQ ID NO: 1467580 - RNA, 19 nt, Artificial Sequence
  Description of Artificial Sequence: Synthetic oligonucleotide
  Sense strand starting at position 2630 of SEQ ID NO: 1244136
cagaguguugcuuauguug

SEQ ID NO: 1467581 - RNA, 19 nt, Artificial Sequence
  Description of Artificial Sequence: Synthetic oligonucleotide
  Antisense strand to SEQ ID NO: 1467580
caacauaagcaacacucug

SEQ ID NO: 1467582 - RNA, 19 nt, Artificial Sequence
  Description of Artificial Sequence: Synthetic oligonucleotide
  Sense strand starting at position 2699 of SEQ ID NO: 1244136
ucccaaaugcugggaauga

SEQ ID NO: 1467583 - RNA, 19 nt, Artificial Sequence
  Description of Artificial Sequence: Synthetic oligonucleotide
  Antisense strand to SEQ ID NO: 1467582
ucauucccagcauuuggga

SEQ ID NO: 1467584 - RNA, 19 nt, Artificial Sequence
  Description of Artificial Sequence: Synthetic oligonucleotide
  Sense strand starting at position 3502 of SEQ ID NO: 1244136
ugagcaauauccuauugug

SEQ ID NO: 1467585 - RNA, 19 nt, Artificial Sequence
  Description of Artificial Sequence: Synthetic oligonucleotide
  Antisense strand to SEQ ID NO: 1467584
cacaauaggauauugcuca

SEQ ID NO: 1467586 - RNA, 19 nt, Artificial Sequence
  Description of Artificial Sequence: Synthetic oligonucleotide
  Sense strand starting at position 3608 of SEQ ID NO: 1244136
caaacaggguuguacaaau

SEQ ID NO: 1467587 - RNA, 19 nt, Artificial Sequence
  Description of Artificial Sequence: Synthetic oligonucleotide
  Antisense strand to SEQ ID NO: 1467586
auuuguacaacccuguuug

SEQ ID NO: 1467588 - RNA, 19 nt, Artificial Sequence
  Description of Artificial Sequence: Synthetic oligonucleotide
  Sense strand starting at position 3682 of SEQ ID NO: 1244136
gcuggaucauaaugguaaa

SEQ ID NO: 1467589 - RNA, 19 nt, Artificial Sequence
  Description of Artificial Sequence: Synthetic oligonucleotide
  Antisense strand to SEQ ID NO: 1467588
uuuaccauuaugauccagc

SEQ ID NO: 1467590 - RNA, 19 nt, Artificial Sequence
  Description of Artificial Sequence: Synthetic oligonucleotide
  Sense strand starting at position 3977 of SEQ ID NO: 1244136
gccuucugugaaugaggca

SEQ ID NO: 1467591 - RNA, 19 nt, Artificial Sequence
  Description of Artificial Sequence: Synthetic oligonucleotide
  Antisense strand to SEQ ID NO: 1467590
ugccucauucacagaaggc

SEQ ID NO: 1467592 - RNA, 19 nt, Artificial Sequence
  Description of Artificial Sequence: Synthetic oligonucleotide
  Sense strand starting at position 589 of SEQ ID NO: 1244137
acgucuaggaucugaccaa

SEQ ID NO: 1467593 - RNA, 19 nt, Artificial Sequence
  Description of Artificial Sequence: Synthetic oligonucleotide
  Antisense strand to SEQ ID NO: 1467592
uuggucagauccuagacgu

SEQ ID NO: 1467594 - RNA, 19 nt, Artificial Sequence
  Description of Artificial Sequence: Synthetic oligonucleotide
  Sense strand starting at position 667 of SEQ ID NO: 1244137
ccuuacuugucucccugau

SEQ ID NO: 1467595 - RNA, 19 nt, Artificial Sequence
  Description of Artificial Sequence: Synthetic oligonucleotide
  Antisense strand to SEQ ID NO: 1467594
aucagggagacaaguaagg

SEQ ID NO: 1467596 - RNA, 19 nt, Artificial Sequence
  Description of Artificial Sequence: Synthetic oligonucleotide
  Sense strand starting at position 669 of SEQ ID NO: 1244137
uuacuugucucccugaucu

SEQ ID NO: 1467597 - RNA, 19 nt, Artificial Sequence
  Description of Artificial Sequence: Synthetic oligonucleotide
  Antisense strand to SEQ ID NO: 1467596
agaucagggagacaaguaa

SEQ ID NO: 1467598 - RNA, 19 nt, Artificial Sequence
  Description of Artificial Sequence: Synthetic oligonucleotide
  Sense strand starting at position 695 of SEQ ID NO: 1244137
cucuaucuguucucuguaa

SEQ ID NO: 1467599 - RNA, 19 nt, Artificial Sequence
  Description of Artificial Sequence: Synthetic oligonucleotide
  Antisense strand to SEQ ID NO: 1467598
uuacagagaacagauagag

SEQ ID NO: 1467600 - RNA, 19 nt, Artificial Sequence
  Description of Artificial Sequence: Synthetic oligonucleotide
  Sense strand starting at position 713 of SEQ ID NO: 1244137
aggcucucugagugauccu

SEQ ID NO: 1467601 - RNA, 19 nt, Artificial Sequence
  Description of Artificial Sequence: Synthetic oligonucleotide
  Antisense strand to SEQ ID NO: 1467600
aggaucacucagagagccu

SEQ ID NO: 1467602 - RNA, 19 nt, Artificial Sequence
  Description of Artificial Sequence: Synthetic oligonucleotide
  Sense strand starting at position 978 of SEQ ID NO: 1244137
gcuucuuccaggucguuau

SEQ ID NO: 1467603 - RNA, 19 nt, Artificial Sequence
  Description of Artificial Sequence: Synthetic oligonucleotide
  Antisense strand to SEQ ID NO: 1467602
auaacgaccuggaagaagc

SEQ ID NO: 1467604 - RNA, 19 nt, Artificial Sequence
  Description of Artificial Sequence: Synthetic oligonucleotide
  Sense strand starting at position 1235 of SEQ ID NO: 1244137
uugagugagugagugaauu

SEQ ID NO: 1467605 - RNA, 19 nt, Artificial Sequence
  Description of Artificial Sequence: Synthetic oligonucleotide
  Antisense strand to SEQ ID NO: 1467604
aauucacucacucacucaa

SEQ ID NO: 1467606 - RNA, 19 nt, Artificial Sequence
  Description of Artificial Sequence: Synthetic oligonucleotide
  Sense strand starting at position 1293 of SEQ ID NO: 1244137
guggaagcucaauggguuu

SEQ ID NO: 1467607 - RNA, 19 nt, Artificial Sequence
  Description of Artificial Sequence: Synthetic oligonucleotide
  Antisense strand to SEQ ID NO: 1467606
aaacccauugagcuuccac

SEQ ID NO: 1467608 - RNA, 19 nt, Artificial Sequence
  Description of Artificial Sequence: Synthetic oligonucleotide
  Sense strand starting at position 1356 of SEQ ID NO: 1244137
gcacacagcuggcuaaaua

SEQ ID NO: 1467609 - RNA, 19 nt, Artificial Sequence
  Description of Artificial Sequence: Synthetic oligonucleotide
  Antisense strand to SEQ ID NO: 1467608
uauuuagccagcugugugc

SEQ ID NO: 1467610 - RNA, 19 nt, Artificial Sequence
  Description of Artificial Sequence: Synthetic oligonucleotide
  Sense strand starting at position 1581 of SEQ ID NO: 1244137
gcuggcagccuugaaagaa

SEQ ID NO: 1467611 - RNA, 19 nt, Artificial Sequence
  Description of Artificial Sequence: Synthetic oligonucleotide
  Antisense strand to SEQ ID NO: 1467610
uucuuucaaggcugccagc

SEQ ID NO: 1467612 - RNA, 19 nt, Artificial Sequence
  Description of Artificial Sequence: Synthetic oligonucleotide
  Sense strand starting at position 2427 of SEQ ID NO: 1244137
gcugucuccuagccggaau

SEQ ID NO: 1467613 - RNA, 19 nt, Artificial Sequence
  Description of Artificial Sequence: Synthetic oligonucleotide
  Antisense strand to SEQ ID NO: 1467612
auuccggcuaggagacagc

SEQ ID NO: 1467614 - RNA, 19 nt, Artificial Sequence
  Description of Artificial Sequence: Synthetic oligonucleotide
  Sense strand starting at position 2758 of SEQ ID NO: 1244137
agcuuuauggagcaagaug

SEQ ID NO: 1467615 - RNA, 19 nt, Artificial Sequence
  Description of Artificial Sequence: Synthetic oligonucleotide
  Antisense strand to SEQ ID NO: 1467614
caucuugcuccauaaagcu

SEQ ID NO: 1467616 - RNA, 19 nt, Artificial Sequence
  Description of Artificial Sequence: Synthetic oligonucleotide
  Sense strand starting at position 2769 of SEQ ID NO: 1244137
gcaagaugaugcuuucuuc

SEQ ID NO: 1467617 - RNA, 19 nt, Artificial Sequence
  Description of Artificial Sequence: Synthetic oligonucleotide
  Antisense strand to SEQ ID NO: 1467616
gaagaaagcaucaucuugc

SEQ ID NO: 1467618 - RNA, 19 nt, Artificial Sequence
  Description of Artificial Sequence: Synthetic oligonucleotide
  Sense strand starting at position 2857 of SEQ ID NO: 1244137
cuuucauagcgcugguaag

SEQ ID NO: 1467619 - RNA, 19 nt, Artificial Sequence
  Description of Artificial Sequence: Synthetic oligonucleotide
  Antisense strand to SEQ ID NO: 1467618
cuuaccagcgcuaugaaag

SEQ ID NO: 1467620 - RNA, 19 nt, Artificial Sequence
  Description of Artificial Sequence: Synthetic oligonucleotide
  Sense strand starting at position 2867 of SEQ ID NO: 1244137
gcugguaagggaugaacua

SEQ ID NO: 1467621 - RNA, 19 nt, Artificial Sequence
  Description of Artificial Sequence: Synthetic oligonucleotide
  Antisense strand to SEQ ID NO: 1467620
uaguucaucccuuaccagc

SEQ ID NO: 1467622 - RNA, 19 nt, Artificial Sequence
  Description of Artificial Sequence: Synthetic oligonucleotide
  Sense strand starting at position 2919 of SEQ ID NO: 1244137
uagagcaagcaguguuuga

SEQ ID NO: 1467623 - RNA, 19 nt, Artificial Sequence
  Description of Artificial Sequence: Synthetic oligonucleotide
  Antisense strand to SEQ ID NO: 1467622
ucaaacacugcuugcucua

SEQ ID NO: 1467624 - RNA, 19 nt, Artificial Sequence
  Description of Artificial Sequence: Synthetic oligonucleotide
  Sense strand starting at position 2942 of SEQ ID NO: 1244137
agcuaaaccuuaguuaagu

SEQ ID NO: 1467625 - RNA, 19 nt, Artificial Sequence
  Description of Artificial Sequence: Synthetic oligonucleotide
  Antisense strand to SEQ ID NO: 1467624
acuuaacuaagguuuagcu

SEQ ID NO: 1467626 - RNA, 19 nt, Artificial Sequence
  Description of Artificial Sequence: Synthetic oligonucleotide
  Sense strand starting at position 2943 of SEQ ID NO: 1244137
gcuaaaccuuaguuaaguu

SEQ ID NO: 1467627 - RNA, 19 nt, Artificial Sequence
  Description of Artificial Sequence: Synthetic oligonucleotide
  Antisense strand to SEQ ID NO: 1467626
aacuuaacuaagguuuagc

SEQ ID NO: 1467628 - RNA, 19 nt, Artificial Sequence
  Description of Artificial Sequence: Synthetic oligonucleotide
  Sense strand starting at position 2968 of SEQ ID NO: 1244137
uugagaggcuaugugguaa

SEQ ID NO: 1467629 - RNA, 19 nt, Artificial Sequence
  Description of Artificial Sequence: Synthetic oligonucleotide
  Antisense strand to SEQ ID NO: 1467628
uuaccacauagccucucaa

SEQ ID NO: 1467630 - RNA, 19 nt, Artificial Sequence
  Description of Artificial Sequence: Synthetic oligonucleotide
  Sense strand starting at position 3022 of SEQ ID NO: 1244137
aguaaugcuagcgauuguu

SEQ ID NO: 1467631 - RNA, 19 nt, Artificial Sequence
  Description of Artificial Sequence: Synthetic oligonucleotide
  Antisense strand to SEQ ID NO: 1467630
aacaaucgcuagcauuacu

SEQ ID NO: 1467632 - RNA, 19 nt, Artificial Sequence
  Description of Artificial Sequence: Synthetic oligonucleotide
  Sense strand starting at position 3028 of SEQ ID NO: 1244137
gcuagcgauuguuucuuaa

SEQ ID NO: 1467633 - RNA, 19 nt, Artificial Sequence
  Description of Artificial Sequence: Synthetic oligonucleotide
  Antisense strand to SEQ ID NO: 1467632
uuaagaaacaaucgcuagc

SEQ ID NO: 1467634 - RNA, 19 nt, Artificial Sequence
  Description of Artificial Sequence: Synthetic oligonucleotide
  Sense strand starting at position 3030 of SEQ ID NO: 1244137
uagcgauuguuucuuaaug

SEQ ID NO: 1467635 - RNA, 19 nt, Artificial Sequence
  Description of Artificial Sequence: Synthetic oligonucleotide
  Antisense strand to SEQ ID NO: 1467634
cauuaagaaacaaucgcua

SEQ ID NO: 1467636 - RNA, 19 nt, Artificial Sequence
  Description of Artificial Sequence: Synthetic oligonucleotide
  Sense strand starting at position 3031 of SEQ ID NO: 1244137
agcgauuguuucuuaauga

SEQ ID NO: 1467637 - RNA, 19 nt, Artificial Sequence
  Description of Artificial Sequence: Synthetic oligonucleotide
  Antisense strand to SEQ ID NO: 1467636
ucauuaagaaacaaucgcu

SEQ ID NO: 1467638 - RNA, 19 nt, Artificial Sequence
  Description of Artificial Sequence: Synthetic oligonucleotide
  Sense strand starting at position 3103 of SEQ ID NO: 1244137
gaugcuggcugauugaaac

SEQ ID NO: 1467639 - RNA, 19 nt, Artificial Sequence
  Description of Artificial Sequence: Synthetic oligonucleotide
  Antisense strand to SEQ ID NO: 1467638
guuucaaucagccagcauc

SEQ ID NO: 1467640 - RNA, 19 nt, Artificial Sequence
  Description of Artificial Sequence: Synthetic oligonucleotide
  Sense strand starting at position 3122 of SEQ ID NO: 1244137
aggagauugucaucacacc

SEQ ID NO: 1467641 - RNA, 19 nt, Artificial Sequence
  Description of Artificial Sequence: Synthetic oligonucleotide
  Antisense strand to SEQ ID NO: 1467640
ggugugaugacaaucuccu

SEQ ID NO: 1467642 - RNA, 19 nt, Artificial Sequence
  Description of Artificial Sequence: Synthetic oligonucleotide
  Sense strand starting at position 3147 of SEQ ID NO: 1244137
uuaccaucuccgcauuaug

SEQ ID NO: 1467643 - RNA, 19 nt, Artificial Sequence
  Description of Artificial Sequence: Synthetic oligonucleotide
  Antisense strand to SEQ ID NO: 1467642
cauaaugcggagaugguaa

SEQ ID NO: 1467644 - RNA, 19 nt, Artificial Sequence
  Description of Artificial Sequence: Synthetic oligonucleotide
  Sense strand starting at position 3158 of SEQ ID NO: 1244137
gcauuauggcuacagcaaa

SEQ ID NO: 1467645 - RNA, 19 nt, Artificial Sequence
  Description of Artificial Sequence: Synthetic oligonucleotide
  Antisense strand to SEQ ID NO: 1467644
uuugcuguagccauaaugc

SEQ ID NO: 1467646 - RNA, 19 nt, Artificial Sequence
  Description of Artificial Sequence: Synthetic oligonucleotide
  Sense strand starting at position 3172 of SEQ ID NO: 1244137
gcaaaucuuuaagaaggaa

SEQ ID NO: 1467647 - RNA, 19 nt, Artificial Sequence
  Description of Artificial Sequence: Synthetic oligonucleotide
  Antisense strand to SEQ ID NO: 1467646
uuccuucuuaaagauuugc

SEQ ID NO: 1467648 - RNA, 19 nt, Artificial Sequence
  Description of Artificial Sequence: Synthetic oligonucleotide
  Sense strand starting at position 3209 of SEQ ID NO: 1244137
cuggcuuuauaagcucaga

SEQ ID NO: 1467649 - RNA, 19 nt, Artificial Sequence
  Description of Artificial Sequence: Synthetic oligonucleotide
  Antisense strand to SEQ ID NO: 1467648
ucugagcuuauaaagccag

SEQ ID NO: 1467650 - RNA, 19 nt, Artificial Sequence
  Description of Artificial Sequence: Synthetic oligonucleotide
  Sense strand starting at position 3212 of SEQ ID NO: 1244137
gcuuuauaagcucagacua

SEQ ID NO: 1467651 - RNA, 19 nt, Artificial Sequence
  Description of Artificial Sequence: Synthetic oligonucleotide
  Antisense strand to SEQ ID NO: 1467650
uagucugagcuuauaaagc

SEQ ID NO: 1467652 - RNA, 19 nt, Artificial Sequence
  Description of Artificial Sequence: Synthetic oligonucleotide
  Sense strand starting at position 3214 of SEQ ID NO: 1244137
uuuauaagcucagacuaga

SEQ ID NO: 1467653 - RNA, 19 nt, Artificial Sequence
  Description of Artificial Sequence: Synthetic oligonucleotide
  Antisense strand to SEQ ID NO: 1467652
ucuagucugagcuuauaaa

SEQ ID NO: 1467654 - RNA, 19 nt, Artificial Sequence
  Description of Artificial Sequence: Synthetic oligonucleotide
  Sense strand starting at position 3237 of SEQ ID NO: 1244137
ggugacaauugacauaucu

SEQ ID NO: 1467655 - RNA, 19 nt, Artificial Sequence
  Description of Artificial Sequence: Synthetic oligonucleotide
  Antisense strand to SEQ ID NO: 1467654
agauaugucaauugucacc

SEQ ID NO: 1467656 - RNA, 19 nt, Artificial Sequence
  Description of Artificial Sequence: Synthetic oligonucleotide
  Sense strand starting at position 3335 of SEQ ID NO: 1244137
gacgcaucucuauggcaac

SEQ ID NO: 1467657 - RNA, 19 nt, Artificial Sequence
  Description of Artificial Sequence: Synthetic oligonucleotide
  Antisense strand to SEQ ID NO: 1467656
guugccauagagaugcguc

SEQ ID NO: 1467658 - RNA, 19 nt, Artificial Sequence
  Description of Artificial Sequence: Synthetic oligonucleotide
  Sense strand starting at position 3419 of SEQ ID NO: 1244137
guaauaaagucagaaccuu

SEQ ID NO: 1467659 - RNA, 19 nt, Artificial Sequence
  Description of Artificial Sequence: Synthetic oligonucleotide
  Antisense strand to SEQ ID NO: 1467658
aagguucugacuuuauuac

SEQ ID NO: 1467660 - RNA, 19 nt, Artificial Sequence
  Description of Artificial Sequence: Synthetic oligonucleotide
  Sense strand starting at position 3427 of SEQ ID NO: 1244137
gucagaaccuuuccaugac

SEQ ID NO: 1467661 - RNA, 19 nt, Artificial Sequence
  Description of Artificial Sequence: Synthetic oligonucleotide
  Antisense strand to SEQ ID NO: 1467660
gucauggaaagguucugac

SEQ ID NO: 1467662 - RNA, 19 nt, Artificial Sequence
  Description of Artificial Sequence: Synthetic oligonucleotide
  Sense strand starting at position 3444 of SEQ ID NO: 1244137
acaucauugcucugaggcu

SEQ ID NO: 1467663 - RNA, 19 nt, Artificial Sequence
  Description of Artificial Sequence: Synthetic oligonucleotide
  Antisense strand to SEQ ID NO: 1467662
agccucagagcaaugaugu

SEQ ID NO: 1467664 - RNA, 19 nt, Artificial Sequence
  Description of Artificial Sequence: Synthetic oligonucleotide
  Sense strand starting at position 3560 of SEQ ID NO: 1244137
ccuggauucugggagagga

SEQ ID NO: 1467665 - RNA, 19 nt, Artificial Sequence
  Description of Artificial Sequence: Synthetic oligonucleotide
  Antisense strand to SEQ ID NO: 1467664
uccucucccagaauccagg

SEQ ID NO: 1467666 - RNA, 19 nt, Artificial Sequence
  Description of Artificial Sequence: Synthetic oligonucleotide
  Sense strand starting at position 3659 of SEQ ID NO: 1244137
ccgugaacuauccagaaug

SEQ ID NO: 1467667 - RNA, 19 nt, Artificial Sequence
  Description of Artificial Sequence: Synthetic oligonucleotide
  Antisense strand to SEQ ID NO: 1467666
cauucuggauaguucacgg

SEQ ID NO: 1467668 - RNA, 19 nt, Artificial Sequence
  Description of Artificial Sequence: Synthetic oligonucleotide
  Sense strand starting at position 3805 of SEQ ID NO: 1244137
ggacauucaugggagaaga

SEQ ID NO: 1467669 - RNA, 19 nt, Artificial Sequence
  Description of Artificial Sequence: Synthetic oligonucleotide
  Antisense strand to SEQ ID NO: 1467668
ucuucucccaugaaugucc

SEQ ID NO: 1467670 - RNA, 19 nt, Artificial Sequence
  Description of Artificial Sequence: Synthetic oligonucleotide
  Sense strand starting at position 3873 of SEQ ID NO: 1244137
uucuauagggccuaugagu

SEQ ID NO: 1467671 - RNA, 19 nt, Artificial Sequence
  Description of Artificial Sequence: Synthetic oligonucleotide
  Antisense strand to SEQ ID NO: 1467670
acucauaggcccuauagaa

SEQ ID NO: 1467672 - RNA, 19 nt, Artificial Sequence
  Description of Artificial Sequence: Synthetic oligonucleotide
  Sense strand starting at position 223 of SEQ ID NO: 1244138
uggcaugugugccuauaau

SEQ ID NO: 1467673 - RNA, 19 nt, Artificial Sequence
  Description of Artificial Sequence: Synthetic oligonucleotide
  Antisense strand to SEQ ID NO: 1467672
auuauaggcacacaugcca

SEQ ID NO: 1467674 - RNA, 19 nt, Artificial Sequence
  Description of Artificial Sequence: Synthetic oligonucleotide
  Sense strand starting at position 757 of SEQ ID NO: 1244138
uauugaaugcucuguaggu

SEQ ID NO: 1467675 - RNA, 19 nt, Artificial Sequence
  Description of Artificial Sequence: Synthetic oligonucleotide
  Antisense strand to SEQ ID NO: 1467674
accuacagagcauucaaua

SEQ ID NO: 1467676 - RNA, 19 nt, Artificial Sequence
  Description of Artificial Sequence: Synthetic oligonucleotide
  Sense strand starting at position 761 of SEQ ID NO: 1244138
gaaugcucuguaggugcua

SEQ ID NO: 1467677 - RNA, 19 nt, Artificial Sequence
  Description of Artificial Sequence: Synthetic oligonucleotide
  Antisense strand to SEQ ID NO: 1467676
uagcaccuacagagcauuc

SEQ ID NO: 1467678 - RNA, 19 nt, Artificial Sequence
  Description of Artificial Sequence: Synthetic oligonucleotide
  Sense strand starting at position 773 of SEQ ID NO: 1244138
ggugcuaagcagugggaua

SEQ ID NO: 1467679 - RNA, 19 nt, Artificial Sequence
  Description of Artificial Sequence: Synthetic oligonucleotide
  Antisense strand to SEQ ID NO: 1467678
uaucccacugcuuagcacc

SEQ ID NO: 1467680 - RNA, 19 nt, Artificial Sequence
  Description of Artificial Sequence: Synthetic oligonucleotide
  Sense strand starting at position 774 of SEQ ID NO: 1244138
gugcuaagcagugggauaa

SEQ ID NO: 1467681 - RNA, 19 nt, Artificial Sequence
  Description of Artificial Sequence: Synthetic oligonucleotide
  Antisense strand to SEQ ID NO: 1467680
uuaucccacugcuuagcac

SEQ ID NO: 1467682 - RNA, 19 nt, Artificial Sequence
  Description of Artificial Sequence: Synthetic oligonucleotide
  Sense strand starting at position 778 of SEQ ID NO: 1244138
uaagcagugggauaaguuu

SEQ ID NO: 1467683 - RNA, 19 nt, Artificial Sequence
  Description of Artificial Sequence: Synthetic oligonucleotide
  Antisense strand to SEQ ID NO: 1467682
aaacuuaucccacugcuua

SEQ ID NO: 1467684 - RNA, 19 nt, Artificial Sequence
  Description of Artificial Sequence: Synthetic oligonucleotide
  Sense strand starting at position 801 of SEQ ID NO: 1244138
cguguuaaucuauggauua

SEQ ID NO: 1467685 - RNA, 19 nt, Artificial Sequence
  Description of Artificial Sequence: Synthetic oligonucleotide
  Antisense strand to SEQ ID NO: 1467684
uaauccauagauuaacacg

SEQ ID NO: 1467686 - RNA, 19 nt, Artificial Sequence
  Description of Artificial Sequence: Synthetic oligonucleotide
  Sense strand starting at position 1468 of SEQ ID NO: 1244138
aauuguuauuugggucaca

SEQ ID NO: 1467687 - RNA, 19 nt, Artificial Sequence
  Description of Artificial Sequence: Synthetic oligonucleotide
  Antisense strand to SEQ ID NO: 1467686
ugugacccaaauaacaauu

SEQ ID NO: 1467688 - RNA, 19 nt, Artificial Sequence
  Description of Artificial Sequence: Synthetic oligonucleotide
  Sense strand starting at position 1483 of SEQ ID NO: 1244138
cacagaacccgcugaguau

SEQ ID NO: 1467689 - RNA, 19 nt, Artificial Sequence
  Description of Artificial Sequence: Synthetic oligonucleotide
  Antisense strand to SEQ ID NO: 1467688
auacucagcggguucugug

SEQ ID NO: 1467690 - RNA, 19 nt, Artificial Sequence
  Description of Artificial Sequence: Synthetic oligonucleotide
  Sense strand starting at position 1495 of SEQ ID NO: 1244138
ugaguaucugauggaaacu

SEQ ID NO: 1467691 - RNA, 19 nt, Artificial Sequence
  Description of Artificial Sequence: Synthetic oligonucleotide
  Antisense strand to SEQ ID NO: 1467690
aguuuccaucagauacuca

SEQ ID NO: 1467692 - RNA, 19 nt, Artificial Sequence
  Description of Artificial Sequence: Synthetic oligonucleotide
  Sense strand starting at position 1671 of SEQ ID NO: 1244138
gcugccaggcccugagaua

SEQ ID NO: 1467693 - RNA, 19 nt, Artificial Sequence
  Description of Artificial Sequence: Synthetic oligonucleotide
  Antisense strand to SEQ ID NO: 1467692
uaucucagggccuggcagc

SEQ ID NO: 1467694 - RNA, 19 nt, Artificial Sequence
  Description of Artificial Sequence: Synthetic oligonucleotide
  Sense strand starting at position 1672 of SEQ ID NO: 1244138
cugccaggcccugagauau

SEQ ID NO: 1467695 - RNA, 19 nt, Artificial Sequence
  Description of Artificial Sequence: Synthetic oligonucleotide
  Antisense strand to SEQ ID NO: 1467694
auaucucagggccuggcag

SEQ ID NO: 1467696 - RNA, 19 nt, Artificial Sequence
  Description of Artificial Sequence: Synthetic oligonucleotide
  Sense strand starting at position 1680 of SEQ ID NO: 1244138
cccugagauaucugcaggu

SEQ ID NO: 1467697 - RNA, 19 nt, Artificial Sequence
  Description of Artificial Sequence: Synthetic oligonucleotide
  Antisense strand to SEQ ID NO: 1467696
accugcagauaucucaggg

SEQ ID NO: 1467698 - RNA, 19 nt, Artificial Sequence
  Description of Artificial Sequence: Synthetic oligonucleotide
  Sense strand starting at position 1682 of SEQ ID NO: 1244138
cugagauaucugcagguuc

SEQ ID NO: 1467699 - RNA, 19 nt, Artificial Sequence
  Description of Artificial Sequence: Synthetic oligonucleotide
  Antisense strand to SEQ ID NO: 1467698
gaaccugcagauaucucag

SEQ ID NO: 1467700 - RNA, 19 nt, Artificial Sequence
  Description of Artificial Sequence: Synthetic oligonucleotide
  Sense strand starting at position 1684 of SEQ ID NO: 1244138
gagauaucugcagguuccu

SEQ ID NO: 1467701 - RNA, 19 nt, Artificial Sequence
  Description of Artificial Sequence: Synthetic oligonucleotide
  Antisense strand to SEQ ID NO: 1467700
aggaaccugcagauaucuc

SEQ ID NO: 1467702 - RNA, 19 nt, Artificial Sequence
  Description of Artificial Sequence: Synthetic oligonucleotide
  Sense strand starting at position 1697 of SEQ ID NO: 1244138
guuccuagccaagaggauu

SEQ ID NO: 1467703 - RNA, 19 nt, Artificial Sequence
  Description of Artificial Sequence: Synthetic oligonucleotide
  Antisense strand to SEQ ID NO: 1467702
aauccucuuggcuaggaac

SEQ ID NO: 1467704 - RNA, 19 nt, Artificial Sequence
  Description of Artificial Sequence: Synthetic oligonucleotide
  Sense strand starting at position 2020 of SEQ ID NO: 1244138
ggaggagccuucuugguca

SEQ ID NO: 1467705 - RNA, 19 nt, Artificial Sequence
  Description of Artificial Sequence: Synthetic oligonucleotide
  Antisense strand to SEQ ID NO: 1467704
ugaccaagaaggcuccucc

SEQ ID NO: 1467706 - RNA, 19 nt, Artificial Sequence
  Description of Artificial Sequence: Synthetic oligonucleotide
  Sense strand starting at position 2024 of SEQ ID NO: 1244138
gagccuucuuggucagcaa

SEQ ID NO: 1467707 - RNA, 19 nt, Artificial Sequence
  Description of Artificial Sequence: Synthetic oligonucleotide
  Antisense strand to SEQ ID NO: 1467706
uugcugaccaagaaggcuc

SEQ ID NO: 1467708 - RNA, 19 nt, Artificial Sequence
  Description of Artificial Sequence: Synthetic oligonucleotide
  Sense strand starting at position 2027 of SEQ ID NO: 1244138
ccuucuuggucagcaaagu

SEQ ID NO: 1467709 - RNA, 19 nt, Artificial Sequence
  Description of Artificial Sequence: Synthetic oligonucleotide
  Antisense strand to SEQ ID NO: 1467708
acuuugcugaccaagaagg

SEQ ID NO: 1467710 - RNA, 19 nt, Artificial Sequence
  Description of Artificial Sequence: Synthetic oligonucleotide
  Sense strand starting at position 2131 of SEQ ID NO: 1244138
cgacaagcccauugguaga

SEQ ID NO: 1467711 - RNA, 19 nt, Artificial Sequence
  Description of Artificial Sequence: Synthetic oligonucleotide
  Antisense strand to SEQ ID NO: 1467710
ucuaccaaugggcuugucg

SEQ ID NO: 1467712 - RNA, 19 nt, Artificial Sequence
  Description of Artificial Sequence: Synthetic oligonucleotide
  Sense strand starting at position 2144 of SEQ ID NO: 1244138
gguagacccugcuuuguca

SEQ ID NO: 1467713 - RNA, 19 nt, Artificial Sequence
  Description of Artificial Sequence: Synthetic oligonucleotide
  Antisense strand to SEQ ID NO: 1467712
ugacaaagcagggucuacc

SEQ ID NO: 1467714 - RNA, 19 nt, Artificial Sequence
  Description of Artificial Sequence: Synthetic oligonucleotide
  Sense strand starting at position 2152 of SEQ ID NO: 1244138
cugcuuugucaauggauua

SEQ ID NO: 1467715 - RNA, 19 nt, Artificial Sequence
  Description of Artificial Sequence: Synthetic oligonucleotide
  Antisense strand to SEQ ID NO: 1467714
uaauccauugacaaagcag

SEQ ID NO: 1467716 - RNA, 19 nt, Artificial Sequence
  Description of Artificial Sequence: Synthetic oligonucleotide
  Sense strand starting at position 2172 of SEQ ID NO: 1244138
uucccuagagccuagaaua

SEQ ID NO: 1467717 - RNA, 19 nt, Artificial Sequence
  Description of Artificial Sequence: Synthetic oligonucleotide
  Antisense strand to SEQ ID NO: 1467716
uauucuaggcucuagggaa

SEQ ID NO: 1467718 - RNA, 19 nt, Artificial Sequence
  Description of Artificial Sequence: Synthetic oligonucleotide
  Sense strand starting at position 2186 of SEQ ID NO: 1244138
gaauaaugcugggcacauu

SEQ ID NO: 1467719 - RNA, 19 nt, Artificial Sequence
  Description of Artificial Sequence: Synthetic oligonucleotide
  Antisense strand to SEQ ID NO: 1467718
aaugugcccagcauuauuc

SEQ ID NO: 1467720 - RNA, 19 nt, Artificial Sequence
  Description of Artificial Sequence: Synthetic oligonucleotide
  Sense strand starting at position 2566 of SEQ ID NO: 1244138
acagauaacgcccauaguu

SEQ ID NO: 1467721 - RNA, 19 nt, Artificial Sequence
  Description of Artificial Sequence: Synthetic oligonucleotide
  Antisense strand to SEQ ID NO: 1467720
aacuaugggcguuaucugu

SEQ ID NO: 1467722 - RNA, 19 nt, Artificial Sequence
  Description of Artificial Sequence: Synthetic oligonucleotide
  Sense strand starting at position 3120 of SEQ ID NO: 1244138
gagugagauucugacuaaa

SEQ ID NO: 1467723 - RNA, 19 nt, Artificial Sequence
  Description of Artificial Sequence: Synthetic oligonucleotide
  Antisense strand to SEQ ID NO: 1467722
uuuagucagaaucucacuc

SEQ ID NO: 1467724 - RNA, 19 nt, Artificial Sequence
  Description of Artificial Sequence: Synthetic oligonucleotide
  Sense strand starting at position 3176 of SEQ ID NO: 1244138
cugguaacaugugccuaua

SEQ ID NO: 1467725 - RNA, 19 nt, Artificial Sequence
  Description of Artificial Sequence: Synthetic oligonucleotide
  Antisense strand to SEQ ID NO: 1467724
uauaggcacauguuaccag

SEQ ID NO: 1467726 - RNA, 19 nt, Artificial Sequence
  Description of Artificial Sequence: Synthetic oligonucleotide
  Sense strand starting at position 3179 of SEQ ID NO: 1244138
guaacaugugccuauaguu

SEQ ID NO: 1467727 - RNA, 19 nt, Artificial Sequence
  Description of Artificial Sequence: Synthetic oligonucleotide
  Antisense strand to SEQ ID NO: 1467726
aacuauaggcacauguuac

SEQ ID NO: 1467728 - RNA, 19 nt, Artificial Sequence
  Description of Artificial Sequence: Synthetic oligonucleotide
  Sense strand starting at position 3251 of SEQ ID NO: 1244138
gggcaacacagugaaucuu

SEQ ID NO: 1467729 - RNA, 19 nt, Artificial Sequence
  Description of Artificial Sequence: Synthetic oligonucleotide
  Antisense strand to SEQ ID NO: 1467728
aagauucacuguguugccc

SEQ ID NO: 1467730 - RNA, 19 nt, Artificial Sequence
  Description of Artificial Sequence: Synthetic oligonucleotide
  Sense strand starting at position 3260 of SEQ ID NO: 1244138
agugaaucuugucucuuaa

SEQ ID NO: 1467731 - RNA, 19 nt, Artificial Sequence
  Description of Artificial Sequence: Synthetic oligonucleotide
  Antisense strand to SEQ ID NO: 1467730
uuaagagacaagauucacu

SEQ ID NO: 1467732 - RNA, 19 nt, Artificial Sequence
  Description of Artificial Sequence: Synthetic oligonucleotide
  Sense strand starting at position 3636 of SEQ ID NO: 1244138
agagcuaucgucugcccaa

SEQ ID NO: 1467733 - RNA, 19 nt, Artificial Sequence
  Description of Artificial Sequence: Synthetic oligonucleotide
  Antisense strand to SEQ ID NO: 1467732
uugggcagacgauagcucu

SEQ ID NO: 1467734 - RNA, 19 nt, Artificial Sequence
  Description of Artificial Sequence: Synthetic oligonucleotide
  Sense strand starting at position 3656 of SEQ ID NO: 1244138
acgcuugugccuuacauga

SEQ ID NO: 1467735 - RNA, 19 nt, Artificial Sequence
  Description of Artificial Sequence: Synthetic oligonucleotide
  Antisense strand to SEQ ID NO: 1467734
ucauguaaggcacaagcgu

SEQ ID NO: 1467736 - RNA, 19 nt, Artificial Sequence
  Description of Artificial Sequence: Synthetic oligonucleotide
  Sense strand starting at position 3661 of SEQ ID NO: 1244138
ugugccuuacaugaauuaa

SEQ ID NO: 1467737 - RNA, 19 nt, Artificial Sequence
  Description of Artificial Sequence: Synthetic oligonucleotide
  Antisense strand to SEQ ID NO: 1467736
uuaauucauguaaggcaca

SEQ ID NO: 1467738 - RNA, 19 nt, Artificial Sequence
  Description of Artificial Sequence: Synthetic oligonucleotide
  Sense strand starting at position 3695 of SEQ ID NO: 1244138
ccaugaaguugguucuauu

SEQ ID NO: 1467739 - RNA, 19 nt, Artificial Sequence
  Description of Artificial Sequence: Synthetic oligonucleotide
  Antisense strand to SEQ ID NO: 1467738
aauagaaccaacuucaugg

SEQ ID NO: 1467740 - RNA, 19 nt, Artificial Sequence
  Description of Artificial Sequence: Synthetic oligonucleotide
  Sense strand starting at position 3823 of SEQ ID NO: 1244138
acacuugggccuugaggua

SEQ ID NO: 1467741 - RNA, 19 nt, Artificial Sequence
  Description of Artificial Sequence: Synthetic oligonucleotide
  Antisense strand to SEQ ID NO: 1467740
uaccucaaggcccaagugu

SEQ ID NO: 1467742 - RNA, 19 nt, Artificial Sequence
  Description of Artificial Sequence: Synthetic oligonucleotide
  Sense strand starting at position 3923 of SEQ ID NO: 1244138
uuaauagaagucugucuca

SEQ ID NO: 1467743 - RNA, 19 nt, Artificial Sequence
  Description of Artificial Sequence: Synthetic oligonucleotide
  Antisense strand to SEQ ID NO: 1467742
ugagacagacuucuauuaa

SEQ ID NO: 1467744 - RNA, 19 nt, Artificial Sequence
  Description of Artificial Sequence: Synthetic oligonucleotide
  Sense strand starting at position 3926 of SEQ ID NO: 1244138
auagaagucugucucaaua

SEQ ID NO: 1467745 - RNA, 19 nt, Artificial Sequence
  Description of Artificial Sequence: Synthetic oligonucleotide
  Antisense strand to SEQ ID NO: 1467744
uauugagacagacuucuau

SEQ ID NO: 1467746 - RNA, 19 nt, Artificial Sequence
  Description of Artificial Sequence: Synthetic oligonucleotide
  Sense strand starting at position 3955 of SEQ ID NO: 1244138
aauacuuaagugugugaag

SEQ ID NO: 1467747 - RNA, 19 nt, Artificial Sequence
  Description of Artificial Sequence: Synthetic oligonucleotide
  Antisense strand to SEQ ID NO: 1467746
cuucacacacuuaaguauu

SEQ ID NO: 1467748 - RNA, 19 nt, Artificial Sequence
  Description of Artificial Sequence: Synthetic oligonucleotide
  Sense strand starting at position 3956 of SEQ ID NO: 1244138
auacuuaagugugugaaga

SEQ ID NO: 1467749 - RNA, 19 nt, Artificial Sequence
  Description of Artificial Sequence: Synthetic oligonucleotide
  Antisense strand to SEQ ID NO: 1467748
ucuucacacacuuaaguau

SEQ ID NO: 1467750 - RNA, 19 nt, Artificial Sequence
  Description of Artificial Sequence: Synthetic oligonucleotide
  Sense strand starting at position 3957 of SEQ ID NO: 1244138
uacuuaagugugugaagau

SEQ ID NO: 1467751 - RNA, 19 nt, Artificial Sequence
  Description of Artificial Sequence: Synthetic oligonucleotide
  Antisense strand to SEQ ID NO: 1467750
aucuucacacacuuaagua

SEQ ID NO: 1467752 - RNA, 19 nt, Artificial Sequence
  Description of Artificial Sequence: Synthetic oligonucleotide
  Sense strand starting at position 30 of SEQ ID NO: 1244139
augagcugucuguagacga

SEQ ID NO: 1467753 - RNA, 19 nt, Artificial Sequence
  Description of Artificial Sequence: Synthetic oligonucleotide
  Antisense strand to SEQ ID NO: 1467752
ucgucuacagacagcucau

SEQ ID NO: 1467754 - RNA, 19 nt, Artificial Sequence
  Description of Artificial Sequence: Synthetic oligonucleotide
  Sense strand starting at position 86 of SEQ ID NO: 1244139
gugagcuagcaucauccuu

SEQ ID NO: 1467755 - RNA, 19 nt, Artificial Sequence
  Description of Artificial Sequence: Synthetic oligonucleotide
  Antisense strand to SEQ ID NO: 1467754
aaggaugaugcuagcucac

SEQ ID NO: 1467756 - RNA, 19 nt, Artificial Sequence
  Description of Artificial Sequence: Synthetic oligonucleotide
  Sense strand starting at position 470 of SEQ ID NO: 1244139
gcagcuacaggucauuaau

SEQ ID NO: 1467757 - RNA, 19 nt, Artificial Sequence
  Description of Artificial Sequence: Synthetic oligonucleotide
  Antisense strand to SEQ ID NO: 1467756
auuaaugaccuguagcugc

SEQ ID NO: 1467758 - RNA, 19 nt, Artificial Sequence
  Description of Artificial Sequence: Synthetic oligonucleotide
  Sense strand starting at position 493 of SEQ ID NO: 1244139
ccagcugcuccagaaagau

SEQ ID NO: 1467759 - RNA, 19 nt, Artificial Sequence
  Description of Artificial Sequence: Synthetic oligonucleotide
  Antisense strand to SEQ ID NO: 1467758
aucuuucuggagcagcugg

SEQ ID NO: 1467760 - RNA, 19 nt, Artificial Sequence
  Description of Artificial Sequence: Synthetic oligonucleotide
  Sense strand starting at position 809 of SEQ ID NO: 1244139
aaguaugucaagugaaagg

SEQ ID NO: 1467761 - RNA, 19 nt, Artificial Sequence
  Description of Artificial Sequence: Synthetic oligonucleotide
  Antisense strand to SEQ ID NO: 1467760
ccuuucacuugacauacuu

SEQ ID NO: 1467762 - RNA, 19 nt, Artificial Sequence
  Description of Artificial Sequence: Synthetic oligonucleotide
  Sense strand starting at position 852 of SEQ ID NO: 1244139
ggaaacacguaugugaaga

SEQ ID NO: 1467763 - RNA, 19 nt, Artificial Sequence
  Description of Artificial Sequence: Synthetic oligonucleotide
  Antisense strand to SEQ ID NO: 1467762
ucuucacauacguguuucc

SEQ ID NO: 1467764 - RNA, 19 nt, Artificial Sequence
  Description of Artificial Sequence: Synthetic oligonucleotide
  Sense strand starting at position 966 of SEQ ID NO: 1244139
caccgaaggcucugaaaga

SEQ ID NO: 1467765 - RNA, 19 nt, Artificial Sequence
  Description of Artificial Sequence: Synthetic oligonucleotide
  Antisense strand to SEQ ID NO: 1467764
ucuuucagagccuucggug

SEQ ID NO: 1467766 - RNA, 19 nt, Artificial Sequence
  Description of Artificial Sequence: Synthetic oligonucleotide
  Sense strand starting at position 975 of SEQ ID NO: 1244139
cucugaaagacgcagucau

SEQ ID NO: 1467767 - RNA, 19 nt, Artificial Sequence
  Description of Artificial Sequence: Synthetic oligonucleotide
  Antisense strand to SEQ ID NO: 1467766
augacugcgucuuucagag

SEQ ID NO: 1467768 - RNA, 19 nt, Artificial Sequence
  Description of Artificial Sequence: Synthetic oligonucleotide
  Sense strand starting at position 1075 of SEQ ID NO: 1244139
ucuugcucagccugagaga

SEQ ID NO: 1467769 - RNA, 19 nt, Artificial Sequence
  Description of Artificial Sequence: Synthetic oligonucleotide
  Antisense strand to SEQ ID NO: 1467768
ucucucaggcugagcaaga

SEQ ID NO: 1467770 - RNA, 19 nt, Artificial Sequence
  Description of Artificial Sequence: Synthetic oligonucleotide
  Sense strand starting at position 1076 of SEQ ID NO: 1244139
cuugcucagccugagagaa

SEQ ID NO: 1467771 - RNA, 19 nt, Artificial Sequence
  Description of Artificial Sequence: Synthetic oligonucleotide
  Antisense strand to SEQ ID NO: 1467770
uucucucaggcugagcaag

SEQ ID NO: 1467772 - RNA, 19 nt, Artificial Sequence
  Description of Artificial Sequence: Synthetic oligonucleotide
  Sense strand starting at position 1209 of SEQ ID NO: 1244139
aaugaaugaccguggaaac

SEQ ID NO: 1467773 - RNA, 19 nt, Artificial Sequence
  Description of Artificial Sequence: Synthetic oligonucleotide
  Antisense strand to SEQ ID NO: 1467772
guuuccacggucauucauu

SEQ ID NO: 1467774 - RNA, 19 nt, Artificial Sequence
  Description of Artificial Sequence: Synthetic oligonucleotide
  Sense strand starting at position 1210 of SEQ ID NO: 1244139
augaaugaccguggaaaca

SEQ ID NO: 1467775 - RNA, 19 nt, Artificial Sequence
  Description of Artificial Sequence: Synthetic oligonucleotide
  Antisense strand to SEQ ID NO: 1467774
uguuuccacggucauucau

SEQ ID NO: 1467776 - RNA, 19 nt, Artificial Sequence
  Description of Artificial Sequence: Synthetic oligonucleotide
  Sense strand starting at position 1231 of SEQ ID NO: 1244139
agacuauugcaguaaccaa

SEQ ID NO: 1467777 - RNA, 19 nt, Artificial Sequence
  Description of Artificial Sequence: Synthetic oligonucleotide
  Antisense strand to SEQ ID NO: 1467776
uugguuacugcaauagucu

SEQ ID NO: 1467778 - RNA, 19 nt, Artificial Sequence
  Description of Artificial Sequence: Synthetic oligonucleotide
  Sense strand starting at position 1261 of SEQ ID NO: 1244139
gaacacaaguguuccgagu

SEQ ID NO: 1467779 - RNA, 19 nt, Artificial Sequence
  Description of Artificial Sequence: Synthetic oligonucleotide
  Antisense strand to SEQ ID NO: 1467778
acucggaacacuuguguuc

SEQ ID NO: 1467780 - RNA, 19 nt, Artificial Sequence
  Description of Artificial Sequence: Synthetic oligonucleotide
  Sense strand starting at position 1307 of SEQ ID NO: 1244139
gggcuuagcaauggacuga

SEQ ID NO: 1467781 - RNA, 19 nt, Artificial Sequence
  Description of Artificial Sequence: Synthetic oligonucleotide
  Antisense strand to SEQ ID NO: 1467780
ucaguccauugcuaagccc

SEQ ID NO: 1467782 - RNA, 19 nt, Artificial Sequence
  Description of Artificial Sequence: Synthetic oligonucleotide
  Sense strand starting at position 1366 of SEQ ID NO: 1244139
gcaugacucccaugaaucu

SEQ ID NO: 1467783 - RNA, 19 nt, Artificial Sequence
  Description of Artificial Sequence: Synthetic oligonucleotide
  Antisense strand to SEQ ID NO: 1467782
agauucaugggagucaugc

SEQ ID NO: 1467784 - RNA, 19 nt, Artificial Sequence
  Description of Artificial Sequence: Synthetic oligonucleotide
  Sense strand starting at position 1393 of SEQ ID NO: 1244139
ccaccuaucugauuggaag

SEQ ID NO: 1467785 - RNA, 19 nt, Artificial Sequence
  Description of Artificial Sequence: Synthetic oligonucleotide
  Antisense strand to SEQ ID NO: 1467784
cuuccaaucagauaggugg

SEQ ID NO: 1467786 - RNA, 19 nt, Artificial Sequence
  Description of Artificial Sequence: Synthetic oligonucleotide
  Sense strand starting at position 1533 of SEQ ID NO: 1244139
ggacuaagcucccugagca

SEQ ID NO: 1467787 - RNA, 19 nt, Artificial Sequence
  Description of Artificial Sequence: Synthetic oligonucleotide
  Antisense strand to SEQ ID NO: 1467786
ugcucagggagcuuagucc

SEQ ID NO: 1467788 - RNA, 19 nt, Artificial Sequence
  Description of Artificial Sequence: Synthetic oligonucleotide
  Sense strand starting at position 1652 of SEQ ID NO: 1244139
cgcaguuuccucguaagau

SEQ ID NO: 1467789 - RNA, 19 nt, Artificial Sequence
  Description of Artificial Sequence: Synthetic oligonucleotide
  Antisense strand to SEQ ID NO: 1467788
aucuuacgaggaaacugcg

SEQ ID NO: 1467790 - RNA, 19 nt, Artificial Sequence
  Description of Artificial Sequence: Synthetic oligonucleotide
  Sense strand starting at position 2523 of SEQ ID NO: 1244139
uggguuucucgguagugag

SEQ ID NO: 1467791 - RNA, 19 nt, Artificial Sequence
  Description of Artificial Sequence: Synthetic oligonucleotide
  Antisense strand to SEQ ID NO: 1467790
cucacuaccgagaaaccca

SEQ ID NO: 1467792 - RNA, 19 nt, Artificial Sequence
  Description of Artificial Sequence: Synthetic oligonucleotide
  Sense strand starting at position 2543 of SEQ ID NO: 1244139
agugguccgggcuagagaa

SEQ ID NO: 1467793 - RNA, 19 nt, Artificial Sequence
  Description of Artificial Sequence: Synthetic oligonucleotide
  Antisense strand to SEQ ID NO: 1467792
uucucuagcccggaccacu

SEQ ID NO: 1467794 - RNA, 19 nt, Artificial Sequence
  Description of Artificial Sequence: Synthetic oligonucleotide
  Sense strand starting at position 2842 of SEQ ID NO: 1244139
ggaagagcacuguggcuau

SEQ ID NO: 1467795 - RNA, 19 nt, Artificial Sequence
  Description of Artificial Sequence: Synthetic oligonucleotide
  Antisense strand to SEQ ID NO: 1467794
auagccacagugcucuucc

SEQ ID NO: 1467796 - RNA, 19 nt, Artificial Sequence
  Description of Artificial Sequence: Synthetic oligonucleotide
  Sense strand starting at position 2853 of SEQ ID NO: 1244139
guggcuaucaguggaaacu

SEQ ID NO: 1467797 - RNA, 19 nt, Artificial Sequence
  Description of Artificial Sequence: Synthetic oligonucleotide
  Antisense strand to SEQ ID NO: 1467796
aguuuccacugauagccac

SEQ ID NO: 1467798 - RNA, 19 nt, Artificial Sequence
  Description of Artificial Sequence: Synthetic oligonucleotide
  Sense strand starting at position 2854 of SEQ ID NO: 1244139
uggcuaucaguggaaacuu

SEQ ID NO: 1467799 - RNA, 19 nt, Artificial Sequence
  Description of Artificial Sequence: Synthetic oligonucleotide
  Antisense strand to SEQ ID NO: 1467798
aaguuuccacugauagcca

SEQ ID NO: 1467800 - RNA, 19 nt, Artificial Sequence
  Description of Artificial Sequence: Synthetic oligonucleotide
  Sense strand starting at position 2900 of SEQ ID NO: 1244139
cgucaccugccacagaauu

SEQ ID NO: 1467801 - RNA, 19 nt, Artificial Sequence
  Description of Artificial Sequence: Synthetic oligonucleotide
  Antisense strand to SEQ ID NO: 1467800
aauucuguggcaggugacg

SEQ ID NO: 1467802 - RNA, 19 nt, Artificial Sequence
  Description of Artificial Sequence: Synthetic oligonucleotide
  Sense strand starting at position 2971 of SEQ ID NO: 1244139
aagcaauugcuuuguagga

SEQ ID NO: 1467803 - RNA, 19 nt, Artificial Sequence
  Description of Artificial Sequence: Synthetic oligonucleotide
  Antisense strand to SEQ ID NO: 1467802
uccuacaaagcaauugcuu
